(19) United States
(12) Patent Application Publication
(10) Pub. No.: US 2007/0059710 A1
(43) Pub. Date: Mar. 15, 2007

(54) Genetic polymorphisms associated with stroke, methods of detection and uses thereof

(75) Inventors: May M. Luke, San Francisco, CA (US); James J. Devlin, Lafayette, CA (US); Michele Cargill, San Francisco, CA (US)

Correspondence Address: CELERA GENOMICS;ATTN: WAYNE MONTGOMERY, VICE PRES, INTEL PROPERTY, 45 WEST GUDE DRIVE, C2-4#20, ROCKVILLE, MD, 20850, US

(73) Assignee: APPLERA CORPORATION, Norwalk, CT (US)

(21) Appl. No.: 11/066,316

(22) Filed: Feb. 25, 2005

Related U.S. Application Data
(60) Provisional application No. 60/548,091, filed on Feb. 27, 2004.

(51) Int. Cl. C12Q 1/68

(52) U.S. Cl. 435/6

(57) ABSTRACT

The present invention is based on the discovery of genetic polymorphisms that are associated with vascular diseases, particularly stroke. In particular, the present invention relates to nucleic acid molecules containing the polymorphisms, variant proteins encoded by such nucleic acid molecules, reagents for detecting the polymorphic nucleic acid molecules and proteins, and methods of using the nucleic acid and proteins as well as methods of using reagents for their detection.

### FIELD OF THE INVENTION

[0001] The present invention is in the field of vascular disease, particularly stroke. In particular, the present invention relates to specific single nucleotide polymorphisms (SNPs) in the human genome, and their association with vascular disease and stroke. Based on differences in allele frequencies in the stroke patient population relative to normal individuals, the naturally-occurring SNPs disclosed herein can be used as targets for the design of diagnostic reagents and the development of therapeutic agents, as well as for disease association and linkage analysis. In particular, the SNPs of the present invention are useful for identifying an individual who is at an increased or decreased risk of developing stroke, for prognosing an individual's recovery from a stroke, and for early detection of the disease, for providing clinically important information for the prevention and/or treatment of stroke, and for screening and selecting therapeutic agents such as statins. The SNPs disclosed herein are also useful for human identification applications. Methods, assays, kits, and reagents for detecting the presence of these polymorphisms and their encoded products are provided.

### BACKGROUND OF THE INVENTION

[0002] Stroke and Other Vascular Diseases, and Drug Response

[0003] Vascular diseases encompass a number of related pathologies including stroke, cerebrovascular disease, carotid artery disease, coronary artery disease, peripheral artery disease, aortic aneurysm, and vascular dementia.

[0004] Stroke is a prevalent and serious cerebrovascular disease. It affects 4.7 million individuals in the United States, with 500,000 first attacks and 200,000 recurrent cases yearly. Approximately one in four men and one in five women aged 45 years will have a stroke if they live to their 85th year. About 25% of those who have a stroke die within a year. In fact, stroke is the third leading cause of mortality in the United States and is responsible for 170,000 deaths a year. Among those who survive a stroke attack, 30 to 50% do not regain functional independence. Stroke therefore is the most common cause of disability and the second leading cause of dementia (Heart Disease and Stroke Statistics—2004 Update, American Heart Association).

[0005] Stroke occurs when an artery bringing oxygen and nutrients to the brain either ruptures, causing hemorrhagic stroke, or gets occluded, causing the thrombotic/embolic stroke, which is also referred to as ischemic stroke. In both types of stroke, a cascade of cellular changes due to ischemia or increased cranial pressure leads to injuries or death of the brain cells. In the United States, the majority (about 80-90%) of stroke cases are ischemic (Rathore, et al., Stroke 33:2718-2721 ((2002)), including 30% large-vessel thrombotic (also referred to as large-vessel occlusive disease), 20% small-vessel thrombotic (also referred to as small-vessel occlusive disease), and 30% embolic or cardiogenic (caused by a clot originating from elsewhere in the body, e.g., from blood pooling due to atrial fibrillation, or from carotid artery stenosis). The ischemic form of stroke results from obstruction of blood flow in cerebral blood vessels, and it shares common pathological etiology with atherosclerosis and thrombosis.

[0006] About 10-20% of stroke cases are of the hemorrhagic type (Rathore, et al., Stroke 33:2718-2721 ((2002)), involving bleeding within or around the brain. Bleeding within the brain is known as cerebral hemorrhage, which is often linked to high blood pressure. Bleeding into the meninges surrounding the brain is known as a subarachnoid hemorrhage, which could be caused by a ruptured cerebral aneurysm, an arteriovenous malformation, or a head injury. The hemorrhagic stroke, although less prevalent, poses a greater danger. Whereas about 8% of ischemic stroke cases result in death within 30 days, about 38% of hemorrhagic stroke cases result in death within the same time period (Collins, et al., J. Clin. Epidemiol. 56:81-87 (2003)).

[0007] Known risk factors for stroke can be divided into modifiable and non-modifiable risk factors. Older age, male sex, black or Hispanic ethnicity, and family history of stroke are non-modifiable risk factors. Modifiable risk factors include hypertension, smoking, increased insulin levels, asymptomatic carotid disease, cardiac vessel disease, and hyperlipidemia. A number of genetic markers have been reported to be associated with stroke and some examples of stroke-related markers include MTHFR, ACE, NOTCH3, IL-6, PON1, fibrinogen-beta, and lipoprotein lipase (Casas, et al., Arch. Neurol., 61:1652-1661 (2004)).

[0008] The acute nature of stroke leaves physicians with little time to prevent or lessen the devastation of brain damage. Strategies to diminish the impact of stroke include prevention and treatment with thrombolytic and, possibly, neuroprotective agents. The success of preventive measures will depend on the identification of risk factors in individual patients and means to modulate their impact.

[0009] Although some risk factors for stroke are not modifiable, such as age and family history, other underlying pathology or risk factors of stroke such as atherosclerosis, hypertension, smoking, diabetes, aneurysm, and atrial fibrillation, are chronic and amenable to effective life-style changes, pharmacological, and interventional as well as surgical treatments. Early recognition of patients with informative risk factors, and especially those with a family history, using a non-invasive test of genetic markers associated with stroke will enable physicians to target the highest risk individuals for aggressive risk reduction. Thus there is a need for the identification of new genetic markers that are predictive of an individual's predisposition to the development of stroke and other vascular diseases.

[0010] Reduction of coronary and cerebrovascular events and total mortality by treatment with HMG-CoA reductase inhibitors (statins) has been demonstrated in a number of randomized, double blinded, placebo controlled prospective trials (Waters, D. D., Clin Cardiol, 2001. 24(8 Suppl): p. III3-7, Singh, B. K. and J. L. Mehta, Curr Opin Cardiol, 2002. 17(5): p. 503-11). These drugs have their primary effect through the inhibition of hepatic cholesterol synthesis, thereby upregulating LDL receptor in the liver. The resultant increase in LDL catabolism results in decreased circulating LDL, a major risk factor for vascular disease.

[0011] In addition to LDL-lowering, a variety of potential non-lipid lowering effects have been suggested to play a role in cardiovascular risk reduction by statins. These include anti-inflammatory effects on various vascular cell types including foam cell macrophages, improved endothelial responses, inhibition of platelet reactivity thereby decreasing hypercoaguability, and many others (Puddu, P., G. M. Puddu, and A. Muscari, Acta Cardiol, 2001. 56(4): p. 225-31, Albert, M., Jama, 2001. 286(1): p. 64-70, Rosenson, R. S., Curr Cardiol Rep, 1999. 1(3): p. 225-32, Dangas, G., et al., Thromb Haemost, 2000. 83(5): p. 688-92, Crisby, M., Drugs Today (Barc), 2003. 39(2): p. 137-43, Liao, J. K., Int J Clin Pract Suppl, 2003 (134): p. 51-7). However, because hypercholesterolemia is a factor in many of these additional pathophysiologic mechanisms that are reversed by statins, many of these statin benefits may be a consequence of LDL lowering.

[0012] Statins can be divided into two types according to their physicochemical and pharmacokinetic properties. Statins such as lovastatin, simvastatin, atorvastatin, and cerevastatin are hydrophobic in nature and, as such, diffuse across membranes and thus are highly cell permeable. Hydrophilic statins such as pravastatin are more polar, such that they require specific cell surface transporters for cellular uptake (Ziegler, K. and W. Stunkel, Biochim Biophys Acta, 1992. 1139(3): p. 203-9, Yamazaki, M., et al., Am J Physiol, 1993. 264(1 Pt 1): p. G36-44, Komai, T., et al., Biochem Pharmacol, 1992. 43(4): p. 667-70). The latter statin utilizes a transporter, OATP2, whose tissue distribution is confined to the liver and, therefore, they are relatively hepato-specific inhibitors (Hsiang, B., et al., J Biol Chem, 1999. 274(52): p. 37161-8). The former statins, not requiring specific transport mechanisms, are available to all cells and they can directly impact a much broader spectrum of cells and tissues. These differences in properties may influence the spectrum of activities that each statin possesses. Pravastatin, for instance, has a low myopathic potential in animal models and myocyte cultures compared to other hydrophobic statins (Masters, B., Toxicol Appl Pharmacol, 1995. 131(1): p. 163-74. Nakahara, K., et al., Toxicol Appl Pharmacol, 1998. 152(1): p. 99-106, Reijneveld, J., Pediatr Res, 1996. 39(6): p. 1028-35).

[0013] Evidence from gene association studies is accumulating to indicate that responses to drugs are, indeed, at least partly under genetic control. As such, pharmacogenetics—the study of variability in drug responses attributed to hereditary factors in different populations—may significantly assist in providing answers toward meeting this challenge (Roses, A. D., Nature, 2000. 405(6788): p. 857-65, Mooser, V., et al., J Thromb Haemost, 2003. 1(7): p. 1398-1402, Humma, L. M. and S. G. Terra, Am. J. Health Syst Pharm, 2002. 59(13): p. 1241-52). Numerous associations have been reported between selected genotypes, as defined by SNPs and other sequence variations and specific responses to cardiovascular drugs. Polymorphisms in several genes have been suggested to influence responses to statins including CETP (Kuivenhoven, J. A., N Engl J Med, 1998. 338(2): p. 86-93), beta-fibrinogen (de Maat, M. P., Arterioscler Thromb Vasc Biol, 1998. 18(2): p. 265-71), hepatic lipase (Zambon, A., et al., Circulation, 2001. 103(6): p. 792-8, lipoprotein lipase (Jukema, J. W., Circulation, 1996. 94(8): p. 1913-8), glycoprotein IIIa (Bray, P. F., Am J Cardiol, 2001. 88(4): p. 347-52), stromelysin-1 (de Maat, M. P., Am J Cardiol, 1999. 83(6): p. 852-6), and apolipoprotein E (Gerdes, L. U., Circulation, 2000. 101(12): p. 1366-71, Pedro-Botet, J., et al., Atherosclerosis, 2001. 158(1): p. 183-93). Some of these variants were shown to effect clinical events while others were associated with changes in surrogate endpoints.

[0014] Thus, there is also a need to identify genetic markers for stratifying stroke patients based on their likelihood of responding to drug therapy, particularly statin treatment.

[0015] SNPs

[0016] The genomes of all organisms undergo spontaneous mutation in the course of their continuing evolution, generating variant forms of progenitor genetic sequences (Gusella, Ann. Rev. Biochem. 55, 831-854 (1986)). A variant form may confer an evolutionary advantage or disadvantage relative to a progenitor form or may be neutral. In some instances, a variant form confers an evolutionary advantage to the species and is eventually incorporated into the DNA of many or most members of the species and effectively becomes the progenitor form. Additionally, the effects of a variant form may be both beneficial and detrimental, depending on the circumstances. For example, a heterozygous sickle cell mutation confers resistance to malaria, but a homozygous sickle cell mutation is usually lethal. In many cases, both progenitor and variant forms survive and co-exist in a species population. The coexistence of multiple forms of a genetic sequence gives rise to genetic polymorphisms, including SNPs.

[0017] Approximately 90% of all polymorphisms in the human genome are SNPs. SNPs are single base positions in DNA at which different alleles, or alternative nucleotides, exist in a population. The SNP position (interchangeably referred to herein as SNP, SNP site, SNP locus, SNP marker, or marker) is usually preceded by and followed by highly conserved sequences of the allele (e.g., sequences that vary in less than 1/100 or 1/1000 members of the populations). An individual may be homozygous or heterozygous for an allele at each SNP position. A SNP can, in some instances, be referred to as a “cSNP” to denote that the nucleotide sequence containing the SNP is an amino acid coding sequence.

[0018] A SNP may arise from a substitution of one nucleotide for another at the polymorphic site. Substitutions can be transitions or transversions. A transition is the replacement of one purine nucleotide by another purine nucleotide, or one pyrimidine by another pyrimidine. A transversion is the replacement of a purine by a pyrimidine, or vice versa. A SNP may also be a single base insertion or deletion variant referred to as an “indel” (Weber et al., “Human diallelic insertion/deletion polymorphisms”, Am J Hum Genet 2002 October; 71(4):854-62).

[0019] A synonymous codon change, or silent mutation/SNP (terms such as “SNP”, “polymorphism”, “mutation”, “mutant”, “variation”, and “variant” are used herein interchangeably), is one that does not result in a change of amino acid due to the degeneracy of the genetic code. A substitution that changes a codon coding for one amino acid to a codon coding for a different amino acid (i.e., a non-synonymous codon change) is referred to as a missense mutation. A nonsense mutation results in a type of non-synonymous codon change in which a stop codon is formed, thereby leading to premature termination of a polypeptide chain and a truncated protein. A read-through mutation is another type of non-synonymous codon change that causes the destruction of a stop codon, thereby resulting in an extended polypeptide product. While SNPs can be bi-, tri-, or tetra-allelic, the vast majority of the SNPs are bi-allelic, and are thus often referred to as “bi-allelic markers”, or “di-allelic markers”.

[0020] As used herein, references to SNPs and SNP genotypes include individual SNPs and/or haplotypes, which are groups of SNPs that are generally inherited together. Haplotypes can have stronger correlations with diseases or other phenotypic effects compared with individual SNPs, and therefore may provide increased diagnostic accuracy in some cases (Stephens et al. Science 293, 489-493, 20 Jul. 2001).

[0021] Causative SNPs are those SNPs that produce alterations in gene expression or in the expression, structure, and/or function of a gene product, and therefore are most predictive of a possible clinical phenotype. One such class includes SNPs falling within regions of genes encoding a polypeptide product, i.e. cSNPs. These SNPs may result in an alteration of the amino acid sequence of the polypeptide product (i.e., non-synonymous codon changes) and give rise to the expression of a defective or other variant protein. Furthermore, in the case of nonsense mutations, a SNP may lead to premature termination of a polypeptide product. Such variant products can result in a pathological condition, e.g., genetic disease. Examples of genes in which a SNP within a coding sequence causes a genetic disease include sickle cell anemia and cystic fibrosis.

[0022] Causative SNPs do not necessarily have to occur in coding regions; causative SNPs can occur in, for example, any genetic region that can ultimately affect the expression, structure, and/or activity of the protein encoded by a nucleic acid. Such genetic regions include, for example, those involved in transcription, such as SNPs in transcription factor binding domains, SNPs in promoter regions, in areas involved in transcript processing, such as SNPs at intron-exon boundaries that may cause defective splicing, or SNPs in mRNA processing signal sequences such as polyadenylation signal regions. Some SNPs that are not causative SNPs nevertheless are in close association with, and therefore segregate with, a disease-causing sequence. In this situation, the presence of a SNP correlates with the presence of, or predisposition to, or an increased risk in developing the disease. These SNPs, although not causative, are nonetheless also useful for diagnostics, disease predisposition screening, and other uses.

[0023] An association study of a SNP and a specific disorder involves determining the presence or frequency of the SNP allele in biological samples from individuals with the disorder of interest, such as those individuals who respond to statin treatment (“responders”) or those individuals who do not respond to statin treatment (“non-responders”), and comparing the information to that of controls (i.e., individuals who do not have the disorder; controls may be also referred to as “healthy” or “normal” individuals) who are preferably of similar age and race. The appropriate selection of patients and controls is important to the success of SNP association studies. Therefore, a pool of individuals with well-characterized phenotypes is extremely desirable.

[0024] A SNP may be screened in diseased tissue samples or any biological sample obtained from a diseased individual, and compared to control samples, and selected for its increased (or decreased) occurrence in a specific pathological condition, such as pathologies related to vascular diseases. Once a statistically significant association is established between one or more SNP(s) and a pathological condition (or other phenotype) of interest, then the region around the SNP can optionally be thoroughly screened to identify the causative genetic locus/sequence(s) (e.g., causative SNP/mutation, gene, regulatory region, etc.) that influences the pathological condition or phenotype. Association studies may be conducted within the general population and are not limited to studies performed on related individuals in affected families (linkage studies).

[0025] Clinical trials have shown that patient response to treatment with pharmaceuticals is often heterogeneous. There is a continuing need to improve pharmaceutical agent design and therapy. In that regard, SNPs can be used to identify patients most suited to therapy with particular pharmaceutical agents (this is often termed “pharmacogenomics”). Similarly, SNPs can be used to exclude patients from certain treatment due to the patient's increased likelihood of developing toxic side effects or their likelihood of not responding to the treatment. Pharmacogenomics can also be used in pharmaceutical research to assist the drug development and selection process. (Linder et al. (1997), Clinical Chemistry, 43, 254; Marshall (1997), Nature Biotechnology, 15, 1249; International Patent Application WO 97/40462, Spectra Biomedical; and Schafer et al. (1998), Nature Biotechnology, 16, 3).

### SUMMARY OF THE INVENTION

[0026] The present invention relates to the identification of novel SNPs, unique combinations of such SNPs, and haplotypes of SNPs that are associated with vascular disorders and in particular stroke. The polymorphisms disclosed herein are directly useful as targets for the design of diagnostic reagents and the development of therapeutic agents for use in the diagnosis and treatment of stroke.

[0027] Based on the identification of SNPs associated with stroke, the present invention also provides methods of detecting these variants as well as the design and preparation of detection reagents needed to accomplish this task. The invention specifically provides, for example, novel SNPs in genetic sequences involved in stroke, isolated nucleic acid molecules (including, for example, DNA and RNA molecules) containing these SNPs, variant proteins encoded by nucleic acid molecules containing such SNPs, antibodies to the encoded variant proteins, computer-based and data storage systems containing the novel SNP information, methods of detecting these SNPs in a test sample, methods of determining the risk of an individual of developing a stroke, methods of treating an individual who has an increased risk of developing a stroke, methods of identifying individuals who have an altered (i.e., increased or decreased) likelihood of responding to therapeutic treatment based on the presence or absence of one or more particular nucleotides (alleles) at one or more SNP sites disclosed herein or the detection of one or more encoded variant products (e.g., variant mRNA transcripts or variant proteins), methods of identifying individuals who are more or less likely to respond to a treatment (or more or less likely to experience undesirable side effects from a treatment, etc.), methods of screening for compounds useful in the treatment of a disorder associated with a variant gene/protein, compounds identified by these methods, methods of treating disorders mediated by a variant gene/protein, methods of using the novel SNPs of the present invention for human identification, etc.

[0028] In Tables 1-2, the present invention provides gene information, transcript sequences (SEQ ID NOS:1-580), encoded amino acid sequences (SEQ ID NOS:581-1160), genomic sequences (SEQ ID NOS:9840-10,061), transcript-based context sequences (SEQ ID NOS:1161-9839) and genomic-based context sequences (SEQ ID NOS:10,062-55,128) that contain the SNPs of the present invention, and extensive SNP information that includes observed alleles, allele frequencies, populations/ethnic groups in which alleles have been observed, information about the type of SNP and corresponding functional effect, and, for cSNPs, information about the encoded polypeptide product. The transcript sequences (SEQ ID NOS:1-580), amino acid sequences (SEQ ID NOS:581-1160), genomic sequences (SEQ ID NOS:9840-10,061), transcript-based SNP context sequences (SEQ ID NOS: 1161-9839), and genomic-based SNP context sequences (SEQ ID NOS:10,062-55,128) are also provided in the Sequence Listing.

[0029] In a specific embodiment of the present invention, SNPs which occur naturally in the human genome are provided as isolated nucleic acid molecules. These SNPs are associated with stroke such that they can have a variety of uses in the diagnosis and/or treatment of stroke as well as related pathologies such as other vascular diseases. Other vascular diseases include, but are not limited to, cerebrovascular disease, carotid artery disease, coronary artery disease, peripheral artery disease, aortic aneurysm, and vascular dementia. One aspect of the present invention relates to an isolated nucleic acid molecule comprising a nucleotide sequence in which at least one nucleotide is a SNP disclosed in Tables 3 and/or 4. In an alternative embodiment, a nucleic acid of the invention is an amplified polynucleotide, which is produced by amplification of a SNP-containing nucleic acid template. In another embodiment, the invention provides for a variant protein that is encoded by a nucleic acid molecule containing a SNP disclosed herein.

[0030] In yet another embodiment of the invention, a reagent for detecting a SNP in the context of its naturally-occurring flanking nucleotide sequences (which can be, e.g., either DNA or mRNA) is provided. In particular, such a reagent may be in the form of, for example, a hybridization probe or an amplification primer that is useful in the specific detection of a SNP of interest. In an alternative embodiment, a protein detection reagent is used to detect a variant protein that is encoded by a nucleic acid molecule containing a SNP disclosed herein. A preferred embodiment of a protein detection reagent is an antibody or an antigen-reactive antibody fragment.

[0031] Various embodiments of the invention also provide kits comprising SNP detection reagents, and methods for detecting the SNPs disclosed herein by employing detection reagents. In a specific embodiment, the present invention provides for a method of identifying an individual having an increased or decreased risk of developing a stroke by detecting the presence or absence of one or more SNP alleles disclosed herein. The present invention also provides methods for evaluating whether an individual is likely (or unlikely) to respond to therapeutic treatment of stroke and related pathologies by detecting the presence or absence of one or more SNP alleles disclosed herein.

[0032] The nucleic acid molecules of the invention can be inserted in an expression vector, such as to produce a variant protein in a host cell. Thus, the present invention also provides for a vector comprising a SNP-containing nucleic acid molecule, genetically-engineered host cells containing the vector, and methods for expressing a recombinant variant protein using such host cells. In another specific embodiment, the host cells, SNP-containing nucleic acid molecules, and/or variant proteins can be used as targets in a method for screening and identifying therapeutic agents or pharmaceutical compounds useful in the treatment of vascular diseases.

[0033] An aspect of this invention is a method for treating stroke, in a human subject wherein said human subject harbors a SNP, gene, transcript, and/or encoded protein identified in Tables 1-2, which method comprises administering to said human subject a therapeutically or prophylactically effective amount of one or more agents counteracting the effects of the disease, such as by inhibiting (or stimulating) the activity of the gene, transcript, and/or encoded protein identified in Tables 1-2.

[0034] Another aspect of this invention is a method for identifying an agent useful in therapeutically or prophylactically treating stroke, in a human subject wherein said human subject harbors a SNP, gene, transcript, and/or encoded protein identified in Tables 1-2, which method comprises contacting the gene, transcript, or encoded protein with a candidate agent under conditions suitable to allow formation of a binding complex between the gene, transcript, or encoded protein and the candidate agent and detecting the formation of the binding complex, wherein the presence of the complex identifies said agent.

[0035] Another aspect of this invention is a method for treating a stroke in a human subject, which method comprises:

[0036] (i) determining that said human subject harbors a SNP, gene, transcript, and/or encoded protein identified in Tables 1-2, and

[0037] (ii) administering to said subject a therapeutically or prophylactically effective amount of one or more agents counteracting the effects of the disease, such as the use of statins.

[0038] Many other uses and advantages of the present invention will be apparent to those skilled in the art upon review of the detailed description of the preferred embodiments herein. Solely for clarity of discussion, the invention is described in the sections below by way of non-limiting examples.

[0039] Description of the Files Contained on the CD-R Named CL001585CDR

[0040] The CD-R named CL001585CDR contains the following five text (ASCII) files:

[0041] 1) File SEQLIST_{—}1585.txt provides the Sequence Listing. The Sequence Listing provides the transcript sequences (SEQ ID NOS:1-580) and protein sequences (SEQ ID NOS:581-1160) as shown in Table 1, and genomic sequences (SEQ ID NOS:9840-10,061) as shown in -*Table 2, for each stroke-associated gene that contains one or more SNPs of the present invention. Also provided in the Sequence Listing are context sequences flanking each SNP, including both transcript-based context sequences as shown in Table 1 (SEQ ID NOS:1161-9839) and genomic-based context sequences as shown in Table 2 (SEQ ID NOS:10,062-55,128). The context sequences generally provide 100 bp upstream (5′) and 100 bp downstream (3′) of each SNP, with the SNP in the middle of the context sequence, for a total of 200 bp of context sequence surrounding each SNP. File SEQLIST_{—}1585.txt is 41,475 KB in size, and was created on Feb. 23, 2005.

[0042] 2) File TABLE1_{—}1585.txt provides Table 1. File TABLE1_{—}1585.txt is 7,980 KB in size, and was created on Feb. 23, 2005.

[0043] 3) File TABLE2_{—}1585.txt provides Table 2. File TABLE2_{—}1585.txt is 36,053 KB in size, and was created on Feb. 23, 2005.

[0044] 4) File TABLE3_{—}1585.txt provides Table 3. File TABLE3_{—}1585.txt is 55 KB in size, and was created on Feb. 23, 2005.

[0045] 5) File TABLE4_{—}1585.txt provides Table 4. File TABLE4_{—}1585.txt is 70 KB in size, and was created on Feb. 23, 2005.

[0046] The material contained on the CD-R labeled CL001585CDR is hereby incorporated by reference pursuant to 37 CFR 1.77(b)(4).

LENGTHY TABLES FILED ON CD
The patent application contains a lengthy table section. A copy of the table is available in electronic form from the USPTO web site (http://seqdata.uspto.gov/?pageRequest=docDetail&DocID=US20070059710A1). An electronic copy of the table will also be available from the USPTO upon request and payment of the fee set forth in 37 CFR 1.19(b)(3).

[0047] Description of Table 1 and Table 2

[0048] Table 1 and Table 2 (both provided on the CD-R) disclose the SNP and associated gene/transcript/protein information of the present invention. For each gene, Table 1 and Table 2 each provide a header containing gene/transcript/protein information, followed by a transcript and protein sequence (in Table 1) or genomic sequence (in Table 2), and then SNP information regarding each SNP found in that gene/transcript.

[0049] NOTE: SNPs may be included in both Table 1 and Table 2; Table 1 presents the SNPs relative to their transcript sequences and encoded protein sequences, whereas Table 2 presents the SNPs relative to their genomic sequences (in some instances Table 2 may also include, after the last gene sequence, genomic sequences of one or more intergenic regions, as well as SNP context sequences and other SNP information for any SNPs that lie within these intergenic regions). SNPs can readily be cross-referenced between Tables based on their hCV (or, in some instances, hDV) identification numbers.

[0050] The gene/transcript/protein information includes:
[0051] a gene number (1 through n, where n=the total number of genes in the Table)
[0052] a Celera hCG and UID internal identification numbers for the gene
[0053] a Celera hCT and UID internal identification numbers for the transcript (Table 1 only)
[0054] a public Genbank accession number (e.g., RefSeq NM number) for the transcript (Table 1 only)
[0055] a Celera hCP and UID internal identification numbers for the protein encoded by the hCT transcript (Table 1 only)
[0056] a public Genbank accession number (e.g., RefSeq NP number) for the protein (Table 1 only)
[0057] an art-known gene symbol
[0058] an art-known gene/protein name
[0059] Celera genomic axis position (indicating start nucleotide position-stop nucleotide position)
[0060] the chromosome number of the chromosome on which the gene is located
[0061] an OMIM (Online Mendelian Inheritance in Man; Johns Hopkins University/NCBI) public reference number for obtaining further information regarding the medical significance of each gene
[0062] alternative gene/protein name(s) and/or symbol(s) in the OMIM entry

[0063] NOTE: Due to the presence of alternative splice forms, multiple transcript/protein entries can be provided for a single gene entry in Table 1; i.e., for a single Gene Number, multiple entries may be provided in series that differ in their transcript/protein information and sequences.

[0064] Following the gene/transcript/protein information is a transcript sequence and protein sequence (in Table 1), or a genomic sequence (in Table 2), for each gene, as follows:
[0065] transcript sequence (Table 1 only) (corresponding to SEQ ID NOS:1-580 of the Sequence Listing), with SNPs identified by their IUB codes (transcript sequences can include 5′ UTR, protein coding, and 3′ UTR regions). (NOTE: If there are differences between the nucleotide sequence of the hCT transcript and the corresponding public transcript sequence identified by the Genbank accession number, the hCT transcript sequence (and encoded protein) is provided, unless the public sequence is a RefSeq transcript sequence identified by an NM number, in which case the RefSeq NM transcript sequence (and encoded protein) is provided. However, whether the hCT transcript or RefSeq NM transcript is used as the transcript sequence, the disclosed SNPs are represented by their IUB codes within the transcript.)
[0066] the encoded protein sequence (Table 1 only) (corresponding to SEQ ID NOS:581-1160 of the Sequence Listing)
[0067] the genomic sequence of the gene (Table 2 only), including 6 kb on each side of the gene boundaries (i.e., 6 kb on the 5′ side of the gene plus 6 kb on the 3′ side of the gene) (corresponding to SEQ ID NOS:9840-10,061 of the Sequence Listing).

[0068] After the last gene sequence, Table 2 may include additional genomic sequences of intergenic regions (in such instances, these sequences are identified as “Intergenic region:” followed by a numerical identification number), as well as SNP context sequences and other SNP information for any SNPs that lie within each intergenic region (and such SNPs are identified as “INTERGENIC” for SNP type).

[0069] NOTE: The transcript, protein, and transcript-based SNP context sequences are provided in both Table 1 and in the Sequence Listing. The genomic and genomic-based SNP context sequences are provided in both Table 2 and in the Sequence Listing. SEQ ID NOS are indicated in Table 1 for each transcript sequence (SEQ ID NOS:1-580), protein sequence (SEQ ID NOS:581-1160), and transcript-based SNP context sequence (SEQ ID NOS:1161-9839), and SEQ ID NOS are indicated in Table 2 for each genomic sequence (SEQ ID NOS:9840-10,061), and genomic-based SNP context sequence (SEQ ID NOS:10,062-55,128).

[0070] The SNP information includes:
[0071] context sequence (taken from the transcript sequence in Table 1, and taken from the genomic sequence in Table 2) with the SNP represented by its IUB code, including 100 bp upstream (5′) of the SNP position plus 100 bp downstream (3′) of the SNP position (the transcript-based SNP context sequences in Table 1 are provided in the Sequence Listing as SEQ ID NOS:1161-9839; the genomic-based SNP context sequences in Table 2 are provided in the Sequence Listing as SEQ ID NOS:10,062-55,128).
[0072] Celera hCV internal identification number for the SNP (in some instances, an “hDV” number is given instead of an “hCV” number)
[0073] SNP position [position of the SNP within the given transcript sequence (Table 1) or within the given genomic sequence (Table 2)]
[0074] SNP source (may include any combination of one or more of the following five codes, depending on which internal sequencing projects and/or public databases the SNP has been observed in: “Applera”=SNP observed during the re-sequencing of genes and regulatory regions of 39 individuals, “Celera”=SNP observed during shotgun sequencing and assembly of the Celera human genome sequence, “Celera Diagnostics”=SNP observed during re-sequencing of nucleic acid samples from individuals who have a disease, “dbSNP”=SNP observed in the dbSNP public database, “HGBASE”=SNP observed in the HGBASE public database, “HGMD”=SNP observed in the Human Gene Mutation Database (HGMD) public database, “HapMap”=SNP observed in the International HapMap Project public database, “CSNP”=SNP observed in an internal Applied Biosystems (Foster City, Calif.) database of coding SNPS (cSNPs)) (NOTE: multiple “Applera” source entries for a single SNP indicate that the same SNP was covered by multiple overlapping amplification products and the re-sequencing results (e.g., observed allele counts) from each of these amplification products is being provided)
[0075] Population/allele/allele count information in the format of [population1 (first_allele,count|second_allele,count)population2(first_allele,count|second_allele,count) total (first_allele,total count|second_allele,total count)]. The information in this field includes populations/ethnic groups in which particular SNP alleles have been observed (“cau”=Caucasian, “his”=Hispanic, “chn”=Chinese, and “afr”=African-American, “jpn”=Japanese, “ind”=Indian, “mex”=Mexican, “ain”=“American Indian, “cra”=Celera donor, “no_pop”=no population information available), identified SNP alleles, and observed allele counts (within each population group and total allele counts), where available [“−” in the allele field represents a deletion allele of an insertion/deletion (“indel”) polymorphism (in which case the corresponding insertion allele, which may be comprised of one or more nucleotides, is indicated in the allele field on the opposite side of the “|”); “−” in the count field indicates that allele count information is not available].

[0076] NOTE: For SNPs of “Applera” SNP source, genes/regulatory regions of 39 individuals (20 Caucasians and 19 African Americans) were re-sequenced and, since each SNP position is represented by two chromosomes in each individual (with the exception of SNPs on X and Y chromosomes in males, for which each SNP position is represented by a single chromosome), up to 78 chromosomes were genotyped for each SNP position. Thus, the sum of the African-American (“afr”) allele counts is up to 38, the sum of the Caucasian allele counts (“cau”) is up to 40, and the total sum of all allele counts is up to 78.

[0077] (NOTE: semicolons separate population/allele/count information corresponding to each indicated SNP source; i.e., if four SNP sources are indicated, such as “Celera”, “dbSNP”, “HGBASE”, and “HGMD”, then population/allele/count information is provided in four groups which are separated by semicolons and listed in the same order as the listing of SNP sources, with each population/allele/count information group corresponding to the respective SNP source based on order; thus, in this example, the first population/allele/count information group would correspond to the first listed SNP source (Celera) and the third population/allele/count information group separated by semicolons would correspond to the third listed SNP source (HGBASE); if population/allele/count information is not available for any particular SNP source, then a pair of semicolons is still inserted as a place-holder in order to maintain correspondence between the list of SNP sources and the corresponding listing of population/allele/count information)
[0078] SNP type (e.g., location within gene/transcript and/or predicted functional effect) [“MIS-SENSE MUTATION”=SNP causes a change in the encoded amino acid (i.e., a non-synonymous coding SNP); “SILENT MUTATION”=SNP does not cause a change in the encoded amino acid (i.e., a synonymous coding SNP); “STOP CODON MUTATION”=SNP is located in a stop codon; “NONSENSE MUTATION”=SNP creates or destroys a stop codon; “UTR 5”=SNP is located in a 5′ UTR of a transcript; “UTR 3”=SNP is located in a 3′ UTR of a transcript; “PUTATIVE UTR 5”=SNP is located in a putative 5′ UTR; “PUTATIVE UTR 3”=SNP is located in a putative 3′ UTR; “DONOR SPLICE SITE”=SNP is located in a donor splice site (5′ intron boundary); “ACCEPTOR SPLICE SITE”=SNP is located in an acceptor splice site (3′ intron boundary); “CODING REGION”=SNP is located in a protein-coding region of the transcript; “EXON”=SNP is located in an exon; “INTRON”=SNP is located in an intron; “hmCS”=SNP is located in a human-mouse conserved segment; “TFBS”=SNP is located in a transcription factor binding site; “UNKNOWN”=SNP type is not defined; “INTERGENIC”=SNP is intergenic, i.e., outside of any gene boundary]
[0079] Protein coding information (Table 1 only), where relevant, in the format of [protein SEQ ID NO:#, amino acid position, (amino acid-1, codon1) (amino acid-2, codon2)]. The information in this field includes SEQ ID NO of the encoded protein sequence, position of the amino acid residue within the protein identified by the SEQ ID NO that is encoded by the codon containing the SNP, amino acids (represented by one-letter amino acid codes) that are encoded by the alternative SNP alleles (in the case of stop codons, “X” is used for the one-letter amino acid code), and alternative codons containing the alternative SNP nucleotides which encode the amino acid residues (thus, for example, for missense mutation-type SNPs, at least two different amino acids and at least two different codons are generally indicated; for silent mutation-type SNPs, one amino acid and at least two different codons are generally indicated, etc.). In instances where the SNP is located outside of a protein-coding region (e.g., in a UTR region), “None” is indicated following the protein SEQ ID NO.

[0080] Description of Table 3 and Table 4

[0081] Tables 3 and 4 (both provided on the CD-R) provide a list of a subset of SNPs from Table 1 (in the case of Table 3) or Table 2 (in the case of Table 4) for which the SNP source falls into one of the following three categories: 1) SNPs for which the SNP source is only “Applera” and none other, 2) SNPs for which the SNP source is only “Celera Diagnostics” and none other, and 3) SNPs for which the SNP source is both “Applera” and “Celera Diagnostics” but none other.

[0082] These SNPs have not been observed in any of the public databases (dbSNP, HGBASE, and HGMD), and were also not observed during shotgun sequencing and assembly of the Celera human genome sequence (i.e., “Celera” SNP source). Tables 3 and 4 provide the hCV identification number (or hDV identification number for SNPs having “Celera Diagnostics” SNP source) and the SEQ ID NO of the context sequence for each of these SNPs.

[0083] Description of Table 5

[0084] Table 5 provides sequences (SEQ ID NOS:55,129-55,503) of primers that have been synthesized and used in the laboratory to carry out allele-specific PCR reactions in order to assay the SNPs disclosed in Table 6 during the course of association studies to verify the association of these SNPs with stroke.

[0085] Table 5 provides the following:
[0086] the column labeled “Marker” provides an hCV identification number for each SNP site
[0087] the column labeled “Alleles” designates the two alternative alleles at the SNP site identified by the hCV identification number that are targeted by the allele-specific primers (the allele-specific primers are shown as “Sequence A” and “Sequence B”) [NOTE: Alleles may be presented in Table 5 based on a different orientation (i.e., the reverse complement) relative to how the same alleles are presented in Tables 1, 2, and 6].
[0088] the column labeled “Sequence A (allele-specific primer)” provides an allele-specific primer that is specific for an allele designated in the “Alleles” column
[0089] the column labeled “Sequence B (allele-specific primer)” provides an allele-specific primer that is specific for the other allele designated in the “Alleles” column
[0090] the column labeled “Sequence C (common primer)” provides a common primer that is used in conjunction with each of the allele-specific primers (the “Sequence A” primer and the “Sequence B” primer) and which hybridizes at a site away from the SNP position.

[0091] All primer sequences are given in the 5′ to 3′ direction.

[0092] Each of the nucleotides designated in the “Alleles” column matches or is the reverse complement of (depending on the orientation of the primer relative to the designated allele) the 3′ nucleotide of the allele-specific primer (either “Sequence A” or “Sequence B”) that is specific for that allele.

[0093] Description of Table 6

[0094] Table 6 provides results of statistical analyses for SNPs disclosed in Tables 1-4 (SNPs can be cross-referenced between tables based on their hCV identification numbers), and the association of these SNPs with stroke. The statistical results shown in Table 6 provide support for the association of these SNPs with stroke. For example, the statistical results provided in Tables 6 show that the association of these SNPs with stroke is supported by p-values <0.2 in an allelic association test.

[0095] Table 6 presents statistical associations of SNPs with various trial endpoints. The column labeled “hCV#” presents each SNP as identified by its unique identifier number. The column labeled “Gene Name” presents the common gene name of the gene containing the SNP. In cases where the gene name is not known or the SNP is found in an intergenic region, the word “none” is present. The column labeled “Sample Set” identifies the study from which patient and control samples were obtained. CCF1 means the samples were obtained from a first study performed at the Cleveland Clinic. This sample set contains samples obtained from patients that had a variety of vascular diseases (i.e., myocardial infarction, coronary artery disease, etc.) including stroke. In the analysis performed here, only those patients that had a confirmed stroke were included in the case populations. CCF2 means the samples were obtained from a second study performed at the Cleveland Clinic. As above, patient samples had a variety of vascular diseases but the case samples were only obtained from patients who had stroke. UCSF1 means the samples were obtained from a first study performed at the University of California, San Francisco (UCSF). These samples were obtained from patients that had a variety of vascular diseases including stroke. Case samples were limited to patients that had a confirmed stroke. UCSF2 means the samples were obtained from a second study at UCSF. In this study, only cases were obtained from UCSF patients that were known to have had a stroke. Control samples were not obtained in this study. To perform the statistical analysis for the association of the SNPs with stroke, controls from the CCF1 and 2 and UCSF1 samples were used. Samples identified as CCF2/UCSF2 were a combination of the samples obtained from patients in the CCF2 and UCSF2 sample sets, all of whom had a confirmed stroke compared to non-stroke controls. The column labeled “p-value” indicates the results of either the chi-square test (Rec or Dom) or the Fisher Exact test (Allelic) to determine if the qualitative phenotype is a function of the SNP genotype. The column labeled “OR” (Odds Ratio) indicates an approximation of the relative risk for an individual for the defined endpoint associated with the SNP. ORs less than 1 indicate the risk allele is protective for the defined endpoint, and ORs greater than 1 indicate the risk allele increases the risk of having the defined endpoint. In cases where the OR is missing, the OR could not be counted because of too few control samples. The columns labeled “Case Freq.” and “Control Freq.” present the frequency of the risk allele in the case or control samples. The column labeled “mode” indicates that the association of the SNP with the phenotype is observed either in pooled samples (allelic) or, if the association is observed in individually genotyped samples, 2 copies of the SNP (recessive, “Rec”) or, 1 or 2 copies of the SNP (dominant, “Dom”) or additive (“Add”, effect seen with 1 or 2 copies of the risk allele) are required to see the association. The column labeled “Risk allele” presents the risk allele for each of the identified SNPs. Note that the risk allele may be presented in Table 6 based on a different orientation (i.e., the reverse complement) relative to how the same allele is presented in Tables 1-5. The column labeled “strata” indicates the group of individuals in which the association was observed. “All” indicates that the association was observed in all individuals, “M” indicates the association was observed in males, “F” indicates the association was observed in females, “smoke-” indicates the association was observed in non-smokers, “smoke+” indicates the association was observed in smokers, “Age T3” means that the patients were divided into tertiles based on their age, and patients in the CCF study in the T3 tertile were >61 (for males) or >69 (for females), and patients in the UCSF study in the T3 tertile were >64. “Age T1” indicates that the association was seen in patients in the CCF study in the T1 tertile (M<56, F<59), and patients in the UCSF study in the T1 tertile were <54. The column labeled “design” presents the vascular endpoints that a particular SNP is associated with. In design A, stroke cases were compared to non-stroke controls. In design B, stroke cases are compared to clean controls obtained from the CCF1 samples. In design C, non-cardiogenic stroke cases are compared to non-atrial fibrillation controls. In design D, non-cardiogenic stroke cases are compared to clean controls obtained from the UCSF1 and CCF2 samples. In design E, the non-cardiogenic cases are compared to clean controls obtained from the CCF2 samples. For example, in design A, the SNP was associated with patients with stroke as compared with samples obtained from patients who did not have stroke but may have had other vascular diseases such as myocardial infarction (MI), coronary artery disease, peripheral vascular disease or aortic aneurism. In designs B, D and E, “clean controls” means that the patient samples used as controls did not have any history of MI, coronary artery disease, peripheral vascular disease, or aortic aneurism. In designs C, D, and E, “non-cardiogenic stroke cases” means stroke cases in which the stroke could not be attributed to an atrial blood clot. In design C, “no atrial fibrillation” means controls did not have a history of atrial fibrillation.

[0096] NOTE: SNPs can be cross-referenced between all tables herein based on the hCV identification number of each SNP. However, one of the SNPs that is included in the tables may possess two different hCV identification numbers, as follows:
[0097] hCV16173091 is equivalent to hCV25473098

### DESCRIPTION OF THE FIGURE

[0098] FIG. 1 provides a diagrammatic representation of a computer-based discovery system containing the SNP information of the present invention in computer readable form.

### DETAILED DESCRIPTION OF THE INVENTION

[0099] The present invention provides SNPs associated with stroke. The present invention further provides nucleic acid molecules containing SNPs, methods and reagents for the detection of the SNPs disclosed herein, uses of these SNPs for the development of detection reagents, and assays or kits that utilize such reagents. The stroke-associated SNPs disclosed herein are useful for diagnosing, screening for, and evaluating an individuals increased or decreased risk of developing stroke as well as their responsiveness to drug treatment. Furthermore, such SNPs and their encoded products are useful targets for the development of therapeutic agents.

[0100] A large number of SNPs have been identified from re-sequencing DNA from 39 individuals, and they are indicated as “Applera” SNP source in Tables 1-2. Their allele frequencies observed in each of the Caucasian and African-American ethnic groups are provided. Additional SNPs included herein were previously identified during shotgun sequencing and assembly of the human genome, and they are indicated as “Celera” SNP source in Tables 1-2. Furthermore, the information provided in Table 1-2, particularly the allele frequency information obtained from 39 individuals and the identification of the precise position of each SNP within each gene/transcript, allows haplotypes (i.e., groups of SNPs that are co-inherited) to be readily inferred. The present invention encompasses SNP haplotypes, as well as individual SNPs.

[0101] Thus, the present invention provides individual SNPs associated with stroke (SEQ ID NOS:1-580) and genomic sequences (SEQ ID NOS:9840-10,061) containing SNPs, encoded amino acid sequences (SEQ ID NOS: 581-1160), and both transcript-based SNP context sequences (SEQ ID NOS: 1161-9839) and genomic-based SNP context sequences (SEQ ID NOS:10,062-55,128) (transcript sequences, protein sequences, and transcript-based SNP context sequences are provided in Table 1 and the Sequence Listing; genomic sequences and genomic-based SNP context sequences are provided in Table 2 and the Sequence Listing), methods of detecting these polymorphisms in a test sample, methods of determining the risk of an individual of having or developing a stroke, methods of screening for compounds useful for treating stroke, compounds identified by these screening methods, methods of using the disclosed SNPs to select a treatment strategy, methods of treating a disorder associated with a variant gene/protein (i.e., therapeutic methods), and methods of using the SNPs of the present invention for human identification.

[0102] Since vascular disorders/diseases share certain similar features that may be due to common genetic factors that are involved in their underlying mechanisms, the SNPs identified herein as being particularly associated with stroke may be used as diagnostic/prognostic markers or therapeutic targets for a broad spectrum of vascular diseases such as coronary heart disease (CHD), atherosclerosis, cardiovascular disease, congestive heart failure, congenital heart disease, and pathologies and symptoms associated with various heart diseases (e.g., angina, hypertension), as well as for predicting responses to drugs such as statins that are used to treat cardiovascular diseases.

[0103] The present invention further provides methods for selecting or formulating a treatment regimen, and methods for determining the likelihood of experiencing toxicity or other undesirable side effects from the treatment, etc. The present invention also provides methods for selecting individuals to whom a therapeutic will be administered based on the individual's genotype, and methods for selecting individuals for a clinical trial of a therapeutic agent based on the genotypes of the individuals (e.g. selecting individuals to participate in the trial who are most likely to respond positively from the therapeutic treatment).

[0104] The present invention provides novel SNPs associated with stroke, as well as SNPs that were previously known in the art, but were not previously known to be associated with stroke. Accordingly, the present invention provides novel compositions and methods based on the novel SNPs disclosed herein, and also provides novel methods of using the known, but previously unassociated, SNPs in methods relating to evaluating an individual's likelihood of having or developing stroke, predicting the likelihood of an individual experiencing a reoccurrence of the stroke (e.g. experiencing a second stroke etc.), prognosing the severity of the stroke in an individual, or prognosing an individual's recovery from the stroke, and methods relating to evaluating an individual's likelihood of responding to therapeutic treatment for the stroke. In Tables 1-2, known SNPs are identified based on the public database in which they have been observed, which is indicated as one or more of the following SNP types: “dbSNP”=SNP observed in dbSNP, “HGBASE”=SNP observed in HGBASE, and “HGMD”=SNP observed in the Human Gene Mutation Database (HGMD). Novel SNPs for which the SNP source is only “Applera” and none other, i.e., those that have not been observed in any public databases and which were also not observed during shotgun sequencing and assembly of the Celera human genome sequence (i.e., “Celera” SNP source), are indicated in Tables 3-4.

[0105] Particular SNP alleles of the present invention can be associated with either an increased risk of having a stroke or of responding to therapeutic treatment of the stroke, or a decreased likelihood of having a stroke or of responding to therapeutic treatment of the stroke. Thus, whereas certain SNPs (or their encoded products) can be assayed to determine whether an individual possesses a SNP allele that is indicative of an increased likelihood of experiencing a stroke or of responding to therapeutic treatment, other SNPs (or their encoded products) can be assayed to determine whether an individual possesses a SNP allele that is indicative of a decreased likelihood of experiencing a stroke or of responding to therapeutic treatment. Similarly, particular SNP alleles of the present invention can be associated with either an increased or decreased likelihood of having a reoccurrence of the stroke (ie, a second stroke), of fully recovering from the stroke, of experiencing toxic effects from a particular treatment or therapeutic compound, etc. The term “altered” may be used herein to encompass either of these two possibilities (e.g., an increased or a decreased risk/likelihood). SNP alleles that are associated with a decreased risk of having or developing a stroke may be referred to as “protective” alleles, and SNP alleles that are associated with an increased risk of having or developing a stroke may be referred to as “susceptibility” alleles, “risk” alleles, or “risk factors”.

[0106] Those skilled in the art will readily recognize that nucleic acid molecules may be double-stranded molecules and that reference to a particular site on one strand refers, as well, to the corresponding site on a complementary strand. In defining a SNP position, SNP allele, or nucleotide sequence, reference to an adenine, a thymine (uridine), a cytosine, or a guanine at a particular site on one strand of a nucleic acid molecule also defines the thymine (uridine), adenine, guanine, or cytosine (respectively) at the corresponding site on a complementary strand of the nucleic acid molecule. Thus, reference may be made to either strand in order to refer to a particular SNP position, SNP allele, or nucleotide sequence. Probes and primers, may be designed to hybridize to either strand and SNP genotyping methods disclosed herein may generally target either strand. Throughout the specification, in identifying a SNP position, reference is generally made to the protein-encoding strand, only for the purpose of convenience.

[0107] References to variant peptides, polypeptides, or proteins of the present invention include peptides, polypeptides, proteins, or fragments thereof, that contain at least one amino acid residue that differs from the corresponding amino acid sequence of the art-known peptide/polypeptide/protein (the art-known protein may be interchangeably referred to as the “wild-type”, “reference”, or “normal” protein). Such variant peptides/polypeptides/proteins can result from a codon change caused by a nonsynonymous nucleotide substitution at a protein-coding SNP position (i.e., a missense mutation) disclosed by the present invention. Variant peptides/polypeptides/proteins of the present invention can also result from a nonsense mutation, i.e. a SNP that creates a premature stop codon, a SNP that generates a read-through mutation by abolishing a stop codon, or due to any SNP disclosed by the present invention that otherwise alters the structure, function/activity, or expression of a protein, such as a SNP in a regulatory region (e.g. a promoter or enhancer) or a SNP that leads to alternative or defective splicing, such as a SNP in an intron or a SNP at an exon/intron boundary. As used herein, the terms “polypeptide”, “peptide”, and “protein” are used interchangeably.

[0108] Isolated Nucleic Acid Molecules and SNP Detection Reagents & Kits

[0109] Tables 1 and 2 provide a variety of information about each SNP of the present invention that is associated with stroke, including the transcript sequences (SEQ ID NOS:1-580), genomic sequences (SEQ ID NOS:9840-10,061), and protein sequences (SEQ ID NOS:581-1160) of the encoded gene products (with the SNPs indicated by IUB codes in the nucleic acid sequences). In addition, Tables 1 and 2 include SNP context sequences, which generally include 100 nucleotide upstream (5′) plus 100 nucleotides downstream (3′) of each SNP position (SEQ ID NOS:1161-9839 correspond to transcript-based SNP context sequences disclosed in Table 1, and SEQ ID NOS:10,062-55,128 correspond to genomic-based context sequences disclosed in Table 2), the alternative nucleotides (alleles) at each SNP position, and additional information about the variant where relevant, such as SNP type (coding, missense, splice site, UTR, etc.), human populations in which the SNP was observed, observed allele frequencies, information about the encoded protein, etc.

[0110] Isolated Nucleic Acid Molecules

[0111] The present invention provides isolated nucleic acid molecules that contain one or more SNPs disclosed Table 1 and/or Table 2. Preferred isolated nucleic acid molecules contain one or more SNPs identified in Table 3 and/or Table 4. Isolated nucleic acid molecules containing one or more SNPs disclosed in at least one of Tables 1-4 may be interchangeably referred to throughout the present text as “SNP-containing nucleic acid molecules”. Isolated nucleic acid molecules may optionally encode a full-length variant protein or fragment thereof. The isolated nucleic acid molecules of the present invention also include probes and primers (which are described in greater detail below in the section entitled “SNP Detection Reagents”), which may be used for assaying the disclosed SNPs, and isolated full-length genes, transcripts, cDNA molecules, and fragments thereof, which may be used for such purposes as expressing an encoded protein.

[0112] As used herein, an “isolated nucleic acid molecule” generally is one that contains a SNP of the present invention or one that hybridizes to such molecule such as a nucleic acid with a complementary sequence, and is separated from most other nucleic acids present in the natural source of the nucleic acid molecule. Moreover, an “isolated” nucleic acid molecule, such as a cDNA molecule containing a SNP of the present invention, can be substantially free of other cellular material, or culture medium when produced by recombinant techniques, or chemical precursors or other chemicals when chemically synthesized. A nucleic acid molecule can be fused to other coding or regulatory sequences and still be considered “isolated”. Nucleic acid molecules present in non-human transgenic animals, which do not naturally occur in the animal, are also considered “isolated”. For example, recombinant DNA molecules contained in a vector are considered “isolated”. Further examples of “isolated” DNA molecules include recombinant DNA molecules maintained in heterologous host cells, and purified (partially or substantially) DNA molecules in solution. Isolated RNA molecules include in vivo or in vitro RNA transcripts of the isolated SNP-containing DNA molecules of the present invention. Isolated nucleic acid molecules according to the present invention further include such molecules produced synthetically.

[0113] Generally, an isolated SNP-containing nucleic acid molecule comprises one or more SNP positions disclosed by the present invention with flanking nucleotide sequences on either side of the SNP positions. A flanking sequence can include nucleotide residues that are naturally associated with the SNP site and/or heterologous nucleotide sequences. Preferably the flanking sequence is up to about 500, 300, 100, 60, 50, 30, 25, 20, 15, 10, 8, or 4 nucleotides (or any other length in-between) on either side of a SNP position, or as long as the full-length gene or entire protein-coding sequence (or any portion thereof such as an exon), especially if the SNP-containing nucleic acid molecule is to be used to produce a protein or protein fragment.

[0114] For full-length genes and entire protein-coding sequences, a SNP flanking sequence can be, for example, up to about 5 KB, 4 KB, 3 KB, 2 KB, 1 KB on either side of the SNP. Furthermore, in such instances, the isolated nucleic acid molecule comprises exonic sequences (including protein-coding and/or non-coding exonic sequences), but may also include intronic sequences. Thus, any protein coding sequence may be either contiguous or separated by introns. The important point is that the nucleic acid is isolated from remote and unimportant flanking sequences and is of appropriate length such that it can be subjected to the specific manipulations or uses described herein such as recombinant protein expression, preparation of probes and primers for assaying the SNP position, and other uses specific to the SNP-containing nucleic acid sequences.

[0115] An isolated SNP-containing nucleic acid molecule can comprise, for example, a full-length gene or transcript, such as a gene isolated from genomic DNA (e.g., by cloning or PCR amplification), a cDNA molecule, or an mRNA transcript molecule. Polymorphic transcript sequences are provided in Table 1 and in the Sequence Listing (SEQ ID NOS: 1-580), and polymorphic genomic sequences are provided in Table 2 and in the Sequence Listing (SEQ ID NOS:9840-10,061). Furthermore, fragments of such full-length genes and transcripts that contain one or more SNPs disclosed herein are also encompassed by the present invention, and such fragments may be used, for example, to express any part of a protein, such as a particular functional domain or an antigenic epitope.

[0116] Thus, the present invention also encompasses fragments of the nucleic acid sequences provided in Tables 1-2 (transcript sequences are provided in Table 1 as SEQ ID NOS:1-580, genomic sequences are provided in Table 2 as SEQ ID NOS:9840-10,061, transcript-based SNP context sequences are provided in Table 1 as SEQ ID NO:1161-9839, and genomic-based SNP context sequences are provided in Table 2 as SEQ ID NO:10,062-55,128) and their complements. A fragment typically comprises a contiguous nucleotide sequence at least about 8 or more nucleotides, more preferably at least about 12 or more nucleotides, and even more preferably at least about 16 or more nucleotides. Further, a fragment could comprise at least about 18, 20, 22, 25, 30, 40, 50, 60, 80, 100, 150, 200, 250 or 500 (or any other number in-between) nucleotides in length. The length of the fragment will be based on its intended use. For example, the fragment can encode epitope-bearing regions of a variant peptide or regions of a variant peptide that differ from the normal/wild-type protein, or can be useful as a polynucleotide probe or primer. Such fragments can be isolated using the nucleotide sequences provided in Table 1 and/or Table 2 for the synthesis of a polynucleotide probe. A labeled probe can then be used, for example, to screen a cDNA library, genomic DNA library, or mRNA to isolate nucleic acid corresponding to the coding region. Further, primers can be used in amplification reactions, such as for purposes of assaying one or more SNPs sites or for cloning specific regions of a gene.

[0117] An isolated nucleic acid molecule of the present invention further encompasses a SNP-containing polynucleotide that is the product of any one of a variety of nucleic acid amplification methods, which are used to increase the copy numbers of a polynucleotide of interest in a nucleic acid sample. Such amplification methods are well known in the art, and they include but are not limited to, polymerase chain reaction (PCR) (U.S. Pat. Nos. 4,683,195; and 4,683,202; PCR Technology: Principles and Applications for DNA Amplification, ed. H. A. Erlich, Freeman Press, NY, N.Y., 1992), ligase chain reaction (LCR) (Wu and Wallace, Genomics 4:560, 1989; Landegren et al., Science 241:1077, 1988), strand displacement amplification (SDA) (U.S. Pat. Nos. 5,270,184; and 5,422,252), transcription-mediated amplification (TMA) (U.S. Pat. No. 5,399,491), linked linear amplification (LLA) (U.S. Pat. No. 6,027,923), and the like, and isothermal amplification methods such as nucleic acid sequence based amplification (NASBA), and self-sustained sequence replication (Guatelli et al., Proc. Natl. Acad. Sci. USA 87: 1874, 1990). Based on such methodologies, a person skilled in the art can readily design primers in any suitable regions 5′ and 3′ to a SNP disclosed herein. Such primers may be used to amplify DNA of any length so long that it contains the SNP of interest in its sequence.

[0118] As used herein, an “amplified polynucleotide” of the invention is a SNP-containing nucleic acid molecule whose amount has been increased at least two fold by any nucleic acid amplification method performed in vitro as compared to its starting amount in a test sample. In other preferred embodiments, an amplified polynucleotide is the result of at least ten fold, fifty fold, one hundred fold, one thousand fold, or even ten thousand fold increase as compared to its starting amount in a test sample. In a typical PCR amplification, a polynucleotide of interest is often amplified at least fifty thousand fold in amount over the unamplified genomic DNA, but the precise amount of amplification needed for an assay depends on the sensitivity of the subsequent detection method used.

[0119] Generally, an amplified polynucleotide is at least about 16 nucleotides in length. More typically, an amplified polynucleotide is at least about 20 nucleotides in length. In a preferred embodiment of the invention, an amplified polynucleotide is at least about 30 nucleotides in length. In a more preferred embodiment of the invention, an amplified polynucleotide is at least about 32, 40, 45, 50, or 60 nucleotides in length. In yet another preferred embodiment of the invention, an amplified polynucleotide is at least about 100, 200, 300, 400, or 500 nucleotides in length. While the total length of an amplified polynucleotide of the invention can be as long as an exon, an intron or the entire gene where the SNP of interest resides, an amplified product is typically up to about 1,000 nucleotides in length (although certain amplification methods may generate amplified products greater than 1000 nucleotides in length). More preferably, an amplified polynucleotide is not greater than about 600-700 nucleotides in length. It is understood that irrespective of the length of an amplified polynucleotide, a SNP of interest may be located anywhere along its sequence.

[0120] In a specific embodiment of the invention, the amplified product is at least about 201 nucleotides in length, comprises one of the transcript-based context sequences or the genomic-based context sequences shown in Tables 1-2. Such a product may have additional sequences on its 5′ end or 3′ end or both. In another embodiment, the amplified product is about 101 nucleotides in length, and it contains a SNP disclosed herein. Preferably, the SNP is located at the middle of the amplified product (e.g., at position 101 in an amplified product that is 201 nucleotides in length, or at position 51 in an amplified product that is 101 nucleotides in length), or within 1, 2, 3, 4, 5, 6, 7, 8, 9, 10, 12, 15, or 20 nucleotides from the middle of the amplified product (however, as indicated above, the SNP of interest may be located anywhere along the length of the amplified product).

[0121] The present invention provides isolated nucleic acid molecules that comprise, consist of, or consist essentially of one or more polynucleotide sequences that contain one or more SNPs disclosed herein, complements thereof, and SNP-containing fragments thereof.

[0122] Accordingly, the present invention provides nucleic acid molecules that consist of any of the nucleotide sequences shown in Table 1 and/or Table 2 (transcript sequences are provided in Table 1 as SEQ ID NOS:1-580, genomic sequences are provided in Table 2 as SEQ ID NOS:9840-10,061, transcript-based SNP context sequences are provided in Table 1 as SEQ ID NO:1161-9839, and genomic-based SNP context sequences are provided in Table 2 as SEQ ID NO:10,062-55,128), or any nucleic acid molecule that encodes any of the variant proteins provided in Table 1 (SEQ ID NOS:581-1160). A nucleic acid molecule consists of a nucleotide sequence when the nucleotide sequence is the complete nucleotide sequence of the nucleic acid molecule.

[0123] The present invention further provides nucleic acid molecules that consist essentially of any of the nucleotide sequences shown in Table 1 and/or Table 2 (transcript sequences are provided in Table 1 as SEQ ID NOS:1-580, genomic sequences are provided in Table 2 as SEQ ID NOS:9840-10,061, transcript-based SNP context sequences are provided in Table 1 as SEQ ID NO:1161-9839, and genomic-based SNP context sequences are provided in Table 2 as SEQ ID NO:10,062-55,128), or any nucleic acid molecule that encodes any of the variant proteins provided in Table 1 (SEQ ID NOS:581-1160). A nucleic acid molecule consists essentially of a nucleotide sequence when such a nucleotide sequence is present with only a few additional nucleotide residues in the final nucleic acid molecule.

[0124] The present invention further provides nucleic acid molecules that comprise any of the nucleotide sequences shown in Table 1 and/or Table 2 or a SNP-containing fragment thereof (transcript sequences are provided in Table 1 as SEQ ID NOS:1-580, genomic sequences are provided in Table 2 as SEQ ID NOS:9840-10,061, transcript-based SNP context sequences are provided in Table 1 as SEQ ID NO:1161-9839, and genomic-based SNP context sequences are provided in Table 2 as SEQ ID NO:10,062-55,128), or any nucleic acid molecule that encodes any of the variant proteins provided in Table 1 (SEQ ID NOS:581-1160). A nucleic acid molecule comprises a nucleotide sequence when the nucleotide sequence is at least part of the final nucleotide sequence of the nucleic acid molecule. In such a fashion, the nucleic acid molecule can be only the nucleotide sequence or have additional nucleotide residues, such as residues that are naturally associated with it or heterologous nucleotide sequences. Such a nucleic acid molecule can have one to a few additional nucleotides or can comprise many more additional nucleotides. A brief description of how various types of these nucleic acid molecules can be readily made and isolated is provided below, and such techniques are well known to those of ordinary skill in the art (Sambrook and Russell, 2000, Molecular Cloning: A Laboratory Manual, Cold Spring Harbor Press, NY).

[0125] The isolated nucleic acid molecules can encode mature proteins plus additional amino or carboxyl-terminal amino acids or both, or amino acids interior to the mature peptide (when the mature form has more than one peptide chain, for instance). Such sequences may play a role in processing of a protein from precursor to a mature form, facilitate protein trafficking, prolong or shorten protein half-life, or facilitate manipulation of a protein for assay or production. As generally is the case in situ, the additional amino acids may be processed away from the mature protein by cellular enzymes.

[0126] Thus, the isolated nucleic acid molecules include, but are not limited to, nucleic acid molecules having a sequence encoding a peptide alone, a sequence encoding a mature peptide and additional coding sequences such as a leader or secretory sequence (e.g., a pre-pro or pro-protein sequence), a sequence encoding a mature peptide with or without additional coding sequences, plus additional non-coding sequences, for example introns and non-coding 5′ and 3′ sequences such as transcribed but untranslated sequences that play a role in, for example, transcription, mRNA processing (including splicing and polyadenylation signals), ribosome binding, and/or stability of mRNA. In addition, the nucleic acid molecules may be fused to heterologous marker sequences encoding, for example, a peptide that facilitates purification.

[0127] Isolated nucleic acid molecules can be in the form of RNA, such as mRNA, or in the form DNA, including cDNA and genomic DNA, which may be obtained, for example, by molecular cloning or produced by chemical synthetic techniques or by a combination thereof (Sambrook and Russell, 2000, Molecular Cloning: A Laboratory Manual, Cold Spring Harbor Press, NY). Furthermore, isolated nucleic acid molecules, particularly SNP detection reagents such as probes and primers, can also be partially or completely in the form of one or more types of nucleic acid analogs, such as peptide nucleic acid (PNA) (U.S. Pat. Nos. 5,539,082; 5,527,675; 5,623,049; 5,714,331). The nucleic acid, especially DNA, can be double-stranded or single-stranded. Single-stranded nucleic acid can be the coding strand (sense strand) or the complementary non-coding strand (anti-sense strand). DNA, RNA, or PNA segments can be assembled, for example, from fragments of the human genome (in the case of DNA or RNA) or single nucleotides, short oligonucleotide linkers, or from a series of oligonucleotides, to provide a synthetic nucleic acid molecule. Nucleic acid molecules can be readily synthesized using the sequences provided herein as a reference; oligonucleotide and PNA oligomer synthesis techniques are well known in the art (see, e.g., Corey, “Peptide nucleic acids: expanding the scope of nucleic acid recognition”, Trends Biotechnol. 1997 June; 15(6):224-9, and Hyrup et al., “Peptide nucleic acids (PNA): synthesis, properties and potential applications”, Bioorg Med Chem. 1996 January; 4(1):5-23). Furthermore, large-scale automated oligonucleotide/PNA synthesis (including synthesis on an array or bead surface or other solid support) can readily be accomplished using commercially available nucleic acid synthesizers, such as the Applied Biosystems (Foster City, Calif.) 3900 High-Throughput DNA Synthesizer or Expedite 8909 Nucleic Acid Synthesis System, and the sequence information provided herein.

[0128] The present invention encompasses nucleic acid analogs that contain modified, synthetic, or non-naturally occurring nucleotides or structural elements or other alternative/modified nucleic acid chemistries known in the art. Such nucleic acid analogs are useful, for example, as detection reagents (e.g., primers/probes) for detecting one or more SNPs identified in Table 1 and/or Table 2. Furthermore, kits/systems (such as beads, arrays, etc.) that include these analogs are also encompassed by the present invention. For example, PNA oligomers that are based on the polymorphic sequences of the present invention are specifically contemplated. PNA oligomers are analogs of DNA in which the phosphate backbone is replaced with a peptide-like backbone (Lagriffoul et al., Bioorganic & Medicinal Chemistry Letters, 4: 1081-1082 (1994), Petersen et al., Bioorganic & Medicinal Chemistry Letters, 6: 793-796 (1996), Kumar et al., Organic Letters 3(9): 1269-1272 (2001), WO96/04000). PNA hybridizes to complementary RNA or DNA with higher affinity and specificity than conventional oligonucleotides and oligonucleotide analogs. The properties of PNA enable novel molecular biology and biochemistry applications unachievable with traditional oligonucleotides and peptides.

[0129] Additional examples of nucleic acid modifications that improve the binding properties and/or stability of a nucleic acid include the use of base analogs such as inosine, intercalators (U.S. Pat. No. 4,835,263) and the minor groove binders (U.S. Pat. No. 5,801,115). Thus, references herein to nucleic acid molecules, SNP-containing nucleic acid molecules, SNP detection reagents (e.g., probes and primers), oligonucleotides/polynucleotides include PNA oligomers and other nucleic acid analogs. Other examples of nucleic acid analogs and alternative/modified nucleic acid chemistries known in the art are described in Current Protocols in Nucleic Acid Chemistry, John Wiley & Sons, N.Y. (2002).

[0130] The present invention further provides nucleic acid molecules that encode fragments of the variant polypeptides disclosed herein as well as nucleic acid molecules that encode obvious variants of such variant polypeptides. Such nucleic acid molecules may be naturally occurring, such as paralogs (different locus) and orthologs (different organism), or may be constructed by recombinant DNA methods or by chemical synthesis. Non-naturally occurring variants may be made by mutagenesis techniques, including those applied to nucleic acid molecules, cells, or organisms. Accordingly, the variants can contain nucleotide substitutions, deletions, inversions and insertions (in addition to the SNPs disclosed in Tables 1-2). Variation can occur in either or both the coding and non-coding regions. The variations can produce conservative and/or non-conservative amino acid substitutions.

[0131] Further variants of the nucleic acid molecules disclosed in Tables 1-2, such as naturally occurring allelic variants (as well as orthologs and paralogs) and synthetic variants produced by mutagenesis techniques, can be identified and/or produced using methods well known in the art. Such further variants can comprise a nucleotide sequence that shares at least 70-80%, 80-85%, 85-90%, 91%, 92%, 93%, 94%, 95%, 96%, 97%, 98%, or 99% sequence identity with a nucleic acid sequence disclosed in Table 1 and/or Table 2 (or a fragment thereof) and that includes a novel SNP allele disclosed in Table 1 and/or Table 2. Further, variants can comprise a nucleotide sequence that encodes a polypeptide that shares at least 70-80%, 80-85%, 85-90%, 91%, 92%, 93%, 94%, 95%, 96%, 97%, 98%, or 99% sequence identity with a polypeptide sequence disclosed in Table 1 (or a fragment thereof) and that includes a novel SNP allele disclosed in Table 1 and/or Table 2. Thus, an aspect of the present invention that is specifically contemplated are isolated nucleic acid molecules that have a certain degree of sequence variation compared with the sequences shown in Tables 1-2, but that contain a novel SNP allele disclosed herein. In other words, as long as an isolated nucleic acid molecule contains a novel SNP allele disclosed herein, other portions of the nucleic acid molecule that flank the novel SNP allele can vary to some degree from the specific transcript, genomic, and context sequences shown in Tables 1-2, and can encode a polypeptide that varies to some degree from the specific polypeptide sequences shown in Table 1.

[0132] To determine the percent identity of two amino acid sequences or two nucleotide sequences of two molecules that share sequence homology, the sequences are aligned for optimal comparison purposes (e.g., gaps can be introduced in one or both of a first and a second amino acid or nucleic acid sequence for optimal alignment and non-homologous sequences can be disregarded for comparison purposes). In a preferred embodiment, at least 30%, 40%, 50%, 60%, 70%, 80%, or 90% or more of the length of a reference sequence is aligned for comparison purposes. The amino acid residues or nucleotides at corresponding amino acid positions or nucleotide positions are then compared. When a position in the first sequence is occupied by the same amino acid residue or nucleotide as the corresponding position in the second sequence, then the molecules are identical at that position (as used herein, amino acid or nucleic acid “identity” is equivalent to amino acid or nucleic acid “homology”). The percent identity between the two sequences is a function of the number of identical positions shared by the sequences, taking into account the number of gaps, and the length of each gap, which need to be introduced for optimal alignment of the two sequences.

[0133] The comparison of sequences and determination of percent identity between two sequences can be accomplished using a mathematical algorithm. (Computational Molecular Biology, Lesk, A. M., ed., Oxford University Press, New York, 1988; Biocomputing: Informatics and Genome Projects, Smith, D. W., ed., Academic Press, New York, 1993; Computer Analysis of Sequence Data, Part 1, Griffin, A. M., and Griffin, H. G., eds., Humana Press, New Jersey, 1994; Sequence Analysis in Molecular Biology, von Heinje, G., Academic Press, 1987; and Sequence Analysis Primer, Gribskov, M. and Devereux, J., eds., M Stockton Press, New York, 1991). In a preferred embodiment, the percent identity between two amino acid sequences is determined using the Needleman and Wunsch algorithm (J. Mol. Biol. (48):444-453 (1970)) which has been incorporated into the GAP program in the GCG software package, using either a Blossom 62 matrix or a PAM250 matrix, and a gap weight of 16, 14, 12, 10, 8, 6, or 4 and a length weight of 1, 2, 3, 4, 5, or 6.

[0134] In yet another preferred embodiment, the percent identity between two nucleotide sequences is determined using the GAP program in the GCG software package (Devereux, J., et al., Nucleic Acids Res. 12(1):387 (1984)), using a NWSgapdna.CMP matrix and a gap weight of 40, 50, 60, 70, or 80 and a length weight of 1, 2, 3, 4, 5, or 6. In another embodiment, the percent identity between two amino acid or nucleotide sequences is determined using the algorithm of E. Myers and W. Miller (CABIOS, 4:11-17 (1989)) which has been incorporated into the ALIGN program (version 2.0), using a PAM120 weight residue table, a gap length penalty of 12, and a gap penalty of 4.

[0135] The nucleotide and amino acid sequences of the present invention can further be used as a “query sequence” to perform a search against sequence databases to, for example, identify other family members or related sequences. Such searches can be performed using the NBLAST and XBLAST programs (version 2.0) of Altschul, et al. (J. Mol. Biol. 215:403-10 (1990)). BLAST nucleotide searches can be performed with the NBLAST program, score=100, wordlength=12 to obtain nucleotide sequences homologous to the nucleic acid molecules of the invention. BLAST protein searches can be performed with the XBLAST program, score=50, wordlength=3 to obtain amino acid sequences homologous to the proteins of the invention. To obtain gapped alignments for comparison purposes, Gapped BLAST can be utilized as described in Altschul et al. (Nucleic Acids Res. 25(17):3389-3402 (1997)). When utilizing BLAST and gapped BLAST programs, the default parameters of the respective programs (e.g., XBLAST and NBLAST) can be used. In addition to BLAST, examples of other search and sequence comparison programs used in the art include, but are not limited to, FASTA (Pearson, Methods Mol. Biol. 25, 365-389 (1994)) and KERR (Dufresne et al., Nat Biotechnol 2002 December; 20(12): 1269-71). For further information regarding bioinformatics techniques, see Current Protocols in Bioinformatics, John Wiley & Sons, Inc., N.Y.

[0136] The present invention further provides non-coding fragments of the nucleic acid molecules disclosed in Table 1 and/or Table 2. Preferred non-coding fragments include, but are not limited to, promoter sequences, enhancer sequences, intronic sequences, 5′ untranslated regions (UTRs), 3′ untranslated regions, gene modulating sequences and gene termination sequences. Such fragments are useful, for example, in controlling heterologous gene expression and in developing screens to identify gene-modulating agents.

[0137] SNP Detection Reagents

[0138] In a specific aspect of the present invention, the SNPs disclosed in Table 1 and/or Table 2, and their associated transcript sequences (provided in Table 1 as SEQ ID NOS:1-580), genomic sequences (provided in Table 2 as SEQ ID NOS:9840-10,061), and context sequences (transcript-based context sequences are provided in Table 1 as SEQ ID NOS:1161-9839; genomic-based context sequences are provided in Table 2 as SEQ ID NOS:10,062-55,128), can be used for the design of SNP detection reagents. As used herein, a “SNP detection reagent” is a reagent that specifically detects a specific target SNP position disclosed herein, and that is preferably specific for a particular nucleotide (allele) of the target SNP position (i.e., the detection reagent preferably can differentiate between different alternative nucleotides at a target SNP position, thereby allowing the identity of the nucleotide present at the target SNP position to be determined). Typically, such detection reagent hybridizes to a target SNP-containing nucleic acid molecule by complementary base-pairing in a sequence specific manner, and discriminates the target variant sequence from other nucleic acid sequences such as an art-known form in a test sample. An example of a detection reagent is a probe that hybridizes to a target nucleic acid containing one or more of the SNPs provided in Table 1 and/or Table 2. In a preferred embodiment, such a probe can differentiate between nucleic acids having a particular nucleotide (allele) at a target SNP position from other nucleic acids that have a different nucleotide at the same target SNP position. In addition, a detection reagent may hybridize to a specific region 5′ and/or 3′ to a SNP position, particularly a region corresponding to the context sequences provided in Table 1 and/or Table 2 (transcript-based context sequences are provided in Table 1 as SEQ ID NOS:1161-9839; genomic-based context sequences are provided in Table 2 as SEQ ID NOS:10,062-55,128). Another example of a detection reagent is a primer that acts as an initiation point of nucleotide extension along a complementary strand of a target polynucleotide. The SNP sequence information provided herein is also useful for designing primers, e.g. allele-specific primers, to amplify (e.g., using PCR) any SNP of the present invention.

[0139] In one preferred embodiment of the invention, a SNP detection reagent is an isolated or synthetic DNA or RNA polynucleotide probe or primer or PNA oligomer, or a combination of DNA, RNA and/or PNA, that hybridizes to a segment of a target nucleic acid molecule containing a SNP identified in Table 1 and/or Table 2. A detection reagent in the form of a polynucleotide may optionally contain modified base analogs, intercalators or minor groove binders. Multiple detection reagents such as probes may be, for example, affixed to a solid support (e.g., arrays or beads) or supplied in solution (e.g., probe/primer sets for enzymatic reactions such as PCR, RT-PCR, TaqMan assays, or primer-extension reactions) to form a SNP detection kit.

[0140] A probe or primer typically is a substantially purified oligonucleotide or PNA oligomer. Such oligonucleotide typically comprises a region of complementary nucleotide sequence that hybridizes under stringent conditions to at least about 8, 10, 12, 16, 18, 20, 22, 25, 30, 40, 50, 55, 60, 65, 70, 80, 90, 100, 120 (or any other number in-between) or more consecutive nucleotides in a target nucleic acid molecule. Depending on the particular assay, the consecutive nucleotides can either include the target SNP position, or be a specific region in close enough proximity 5′ and/or 3′ to the SNP position to carry out the desired assay.

[0141] Other preferred primer and probe sequences can readily be determined using the transcript sequences (SEQ ID NOS:1-580), genomic sequences (SEQ ID NOS:9840-10,061), and SNP context sequences (transcript-based context sequences are provided in Table 1 as SEQ ID NOS:1161-9839; genomic-based context sequences are provided in Table 2 as SEQ ID NOS:10,062-55,128) disclosed in the Sequence Listing and in Tables 1-2. It will be apparent to one of skill in the art that such primers and probes are directly useful as reagents for genotyping the SNPs of the present invention, and can be incorporated into any kit/system format.

[0142] In order to produce a probe or primer specific for a target SNP-containing sequence, the gene/transcript and/or context sequence surrounding the SNP of interest is typically examined using a computer algorithm which starts at the 5′ or at the 3′ end of the nucleotide sequence. Typical algorithms will then identify oligomers of defined length that are unique to the gene/SNP context sequence, have a GC content within a range suitable for hybridization, lack predicted secondary structure that may interfere with hybridization, and/or possess other desired characteristics or that lack other undesired characteristics.

[0143] A primer or probe of the present invention is typically at least about 8 nucleotides in length. In one embodiment of the invention, a primer or a probe is at least about 10 nucleotides in length. In a preferred embodiment, a primer or a probe is at least about 12 nucleotides in length. In a more preferred embodiment, a primer or probe is at least about 16, 17, 18, 19, 20, 21, 22, 23, 24 or 25 nucleotides in length. While the maximal length of a probe can be as long as the target sequence to be detected, depending on the type of assay in which it is employed, it is typically less than about 50, 60, 65, or 70 nucleotides in length. In the case of a primer, it is typically less than about 30 nucleotides in length. In a specific preferred embodiment of the invention, a primer or a probe is within the length of about 18 and about 28 nucleotides. However, in other embodiments, such as nucleic acid arrays and other embodiments in which probes are affixed to a substrate, the probes can be longer, such as on the order of 30-70, 75, 80, 90, 100, or more nucleotides in length (see the section below entitled “SNP Detection Kits and Systems”).

[0144] For analyzing SNPs, it may be appropriate to use oligonucleotides specific for alternative SNP alleles. Such oligonucleotides which detect single nucleotide variations in target sequences may be referred to by such terms as “allele-specific oligonucleotides”, “allele-specific probes”, or “allele-specific primers”. The design and use of allele-specific probes for analyzing polymorphisms is described in, e.g., Mutation Detection A Practical Approach, ed. Cotton et al. Oxford University Press, 1998; Saiki et al., Nature 324, 163-166 (1986); Dattagupta, EP235,726; and Saiki, WO 89/11548.

[0145] While the design of each allele-specific primer or probe depends on variables such as the precise composition of the nucleotide sequences flanking a SNP position in a target nucleic acid molecule, and the length of the primer or probe, another factor in the use of primers and probes is the stringency of the condition under which the hybridization between the probe or primer and the target sequence is performed. Higher stringency conditions utilize buffers with lower ionic strength and/or a higher reaction temperature, and tend to require a more perfect match between probe/primer and a target sequence in order to form a stable duplex. If the stringency is too high, however, hybridization may not occur at all. In contrast, lower stringency conditions utilize buffers with higher ionic strength and/or a lower reaction temperature, and permit the formation of stable duplexes with more mismatched bases between a probe/primer and a target sequence. By way of example and not limitation, exemplary conditions for high stringency hybridization conditions using an allele-specific probe are as follows: Prehybridization with a solution containing 5× standard saline phosphate EDTA (SSPE), 0.5% NaDodSO₄ (SDS) at 55° C., and incubating probe with target nucleic acid molecules in the same solution at the same temperature, followed by washing with a solution containing 2×SSPE, and 0.1% SDS at 55° C. or room temperature.

[0146] Moderate stringency hybridization conditions may be used for allele-specific primer extension reactions with a solution containing, e.g., about 50 mM KCl at about 46° C. Alternatively, the reaction may be carried out at an elevated temperature such as 60° C. In another embodiment, a moderately stringent hybridization condition suitable for oligonucleotide ligation assay (OLA) reactions wherein two probes are ligated if they are completely complementary to the target sequence may utilize a solution of about 100 mM KCl at a temperature of 46° C.

[0147] In a hybridization-based assay, allele-specific probes can be designed that hybridize to a segment of target DNA from one individual but do not hybridize to the corresponding segment from another individual due to the presence of different polymorphic forms (e.g., alternative SNP alleles/nucleotides) in the respective DNA segments from the two individuals. Hybridization conditions should be sufficiently stringent that there is a significant detectable difference in hybridization intensity between alleles, and preferably an essentially binary response, whereby a probe hybridizes to only one of the alleles or significantly more strongly to one allele. While a probe may be designed to hybridize to a target sequence that contains a SNP site such that the SNP site aligns anywhere along the sequence of the probe, the probe is preferably designed to hybridize to a segment of the target sequence such that the SNP site aligns with a central position of the probe (e.g., a position within the probe that is at least three nucleotides from either end of the probe). This design of probe generally achieves good discrimination in hybridization between different allelic forms.

[0148] In another embodiment, a probe or primer may be designed to hybridize to a segment of target DNA such that the SNP aligns with either the 5′ most end or the 3′ most end of the probe or primer. In a specific preferred embodiment which is particularly suitable for use in a oligonucleotide ligation assay (U.S. Pat. No. 4,988,617), the 3′ most nucleotide of the probe aligns with the SNP position in the target sequence.

[0149] Oligonucleotide probes and primers may be prepared by methods well known in the art. Chemical synthetic methods include, but are not limited to, the phosphotriester method described by Narang et al., 1979, Methods in Enzymology 68:90; the phosphodiester method described by Brown et al., 1979, Methods in Enzymology 68:109, the diethylphosphoamidate method described by Beaucage et al., 1981, Tetrahedron Letters 22:1859; and the solid support method described in U.S. Pat. No. 4,458,066.

[0150] Allele-specific probes are often used in pairs (or, less commonly, in sets of 3 or 4, such as if a SNP position is known to have 3 or 4 alleles, respectively, or to assay both strands of a nucleic acid molecule for a target SNP allele), and such pairs may be identical except for a one nucleotide mismatch that represents the allelic variants at the SNP position. Commonly, one member of a pair perfectly matches a reference form of a target sequence that has a more common SNP allele (i.e., the allele that is more frequent in the target population) and the other member of the pair perfectly matches a form of the target sequence that has a less common SNP allele (i.e., the allele that is rarer in the target population). In the case of an array, multiple pairs of probes can be immobilized on the same support for simultaneous analysis of multiple different polymorphisms.

[0151] In one type of PCR-based assay, an allele-specific primer hybridizes to a region on a target nucleic acid molecule that overlaps a SNP position and only primes amplification of an allelic form to which the primer exhibits perfect complementarity (Gibbs, 1989, Nucleic Acid Res. 17 2427-2448). Typically, the primer's 3′-most nucleotide is aligned with and complementary to the SNP position of the target nucleic acid molecule. This primer is used in conjunction with a second primer that hybridizes at a distal site. Amplification proceeds from the two primers, producing a detectable product that indicates which allelic form is present in the test sample. A control is usually performed with a second pair of primers, one of which shows a single base mismatch at the polymorphic site and the other of which exhibits perfect complementarity to a distal site. The single-base mismatch prevents amplification or substantially reduces amplification efficiency, so that either no detectable product is formed or it is formed in lower amounts or at a slower pace. The method generally works most effectively when the mismatch is at the 3′-most position of the oligonucleotide (i.e., the 3′-most position of the oligonucleotide aligns with the target SNP position) because this position is most destabilizing to elongation from the primer (see, e.g., WO 93/22456). This PCR-based assay can be utilized as part of the TaqMan assay, described below.

[0152] In a specific embodiment of the invention, a primer of the invention contains a sequence substantially complementary to a segment of a target SNP-containing nucleic acid molecule except that the primer has a mismatched nucleotide in one of the three nucleotide positions at the 3′-most end of the primer, such that the mismatched nucleotide does not base pair with a particular allele at the SNP site. In a preferred embodiment, the mismatched nucleotide in the primer is the second from the last nucleotide at the 3′-most position of the primer. In a more preferred embodiment, the mismatched nucleotide in the primer is the last nucleotide at the 3′-most position of the primer.

[0153] In another embodiment of the invention, a SNP detection reagent of the invention is labeled with a fluorogenic reporter dye that emits a detectable signal. While the preferred reporter dye is a fluorescent dye, any reporter dye that can be attached to a detection reagent such as an oligonucleotide probe or primer is suitable for use in the invention. Such dyes include, but are not limited to, Acridine, AMCA, BODIPY, Cascade Blue, Cy2, Cy3, Cy5, Cy7, Dabcyl, Edans, Eosin, Erythrosin, Fluorescein, 6-Fam, Tet, Joe, Hex, Oregon Green, Rhodamine, Rhodol Green, Tamra, Rox, and Texas Red.

[0154] In yet another embodiment of the invention, the detection reagent may be further labeled with a quencher dye such as Tamra, especially when the reagent is used as a self-quenching probe such as a TaqMan (U.S. Pat. Nos. 5,210,015 and 5,538,848) or Molecular Beacon probe (U.S. Pat. Nos. 5,118,801 and 5,312,728), or other stemless or linear beacon probe (Livak et al., 1995, PCR Method Appl. 4:357-362; Tyagi et al., 1996, Nature Biotechnology 14: 303-308; Nazarenko et al., 1997, Nucl. Acids Res. 25:2516-2521; U.S. Pat. Nos. 5,866,336 and 6,117,635).

[0155] The detection reagents of the invention may also contain other labels, including but not limited to, biotin for streptavidin binding, hapten for antibody binding, and oligonucleotide for binding to another complementary oligonucleotide such as pairs of zipcodes.

[0156] The present invention also contemplates reagents that do not contain (or that are complementary to) a SNP nucleotide identified herein but that are used to assay one or more SNPs disclosed herein. For example, primers that flank, but do not hybridize directly to a target SNP position provided herein are useful in primer extension reactions in which the primers hybridize to a region adjacent to the target SNP position (i.e., within one or more nucleotides from the target SNP site). During the primer extension reaction, a primer is typically not able to extend past a target SNP site if a particular nucleotide (allele) is present at that target SNP site, and the primer extension product can be detected in order to determine which SNP allele is present at the target SNP site. For example, particular ddNTPs are typically used in the primer extension reaction to terminate primer extension once a ddNTP is incorporated into the extension product (a primer extension product which includes a ddNTP at the 3′-most end of the primer extension product, and in which the ddNTP is a nucleotide of a SNP disclosed herein, is a composition that is specifically contemplated by the present invention). Thus, reagents that bind to a nucleic acid molecule in a region adjacent to a SNP site and that are used for assaying the SNP site, even though the bound sequences do not necessarily include the SNP site itself, are also contemplated by the present invention.

[0157] SNP Detection Kits and Systems

[0158] A person skilled in the art will recognize that, based on the SNP and associated sequence information disclosed herein, detection reagents can be developed and used to assay any SNP of the present invention individually or in combination, and such detection reagents can be readily incorporated into one of the established kit or system formats which are well known in the art. The terms “kits” and “systems”, as used herein in the context of SNP detection reagents, are intended to refer to such things as combinations of multiple SNP detection reagents, or one or more SNP detection reagents in combination with one or more other types of elements or components (e.g., other types of biochemical reagents, containers, packages such as packaging intended for commercial sale, substrates to which SNP detection reagents are attached, electronic hardware components, etc.). Accordingly, the present invention further provides SNP detection kits and systems, including but not limited to, packaged probe and primer sets (e.g., TaqMan probe/primer sets), arrays/microarrays of nucleic acid molecules, and beads that contain one or more probes, primers, or other detection reagents for detecting one or more SNPs of the present invention. The kits/systems can optionally include various electronic hardware components; for example, arrays (“DNA chips”) and microfluidic systems (“lab-on-a-chip” systems) provided by various manufacturers typically comprise hardware components. Other kits/systems (e.g., probe/primer sets) may not include electronic hardware components, but may be comprised of, for example, one or more SNP detection reagents (along with, optionally, other biochemical reagents) packaged in one or more containers.

[0159] In some embodiments, a SNP detection kit typically contains one or more detection reagents and other components (e.g., a buffer, enzymes such as DNA polymerases or ligases, chain extension nucleotides such as deoxynucleotide triphosphates, and in the case of Sanger-type DNA sequencing reactions, chain terminating nucleotides, positive control sequences, negative control sequences, and the like) necessary to carry out an assay or reaction, such as amplification and/or detection of a SNP-containing nucleic acid molecule. A kit may further contain means for determining the amount of a target nucleic acid, and means for comparing the amount with a standard, and can comprise instructions for using the kit to detect the SNP-containing nucleic acid molecule of interest. In one embodiment of the present invention, kits are provided which contain the necessary reagents to carry out one or more assays to detect one or more SNPs disclosed herein. In a preferred embodiment of the present invention, SNP detection kits/systems are in the form of nucleic acid arrays, or compartmentalized kits, including microfluidic/lab-on-a-chip systems.

[0160] SNP detection kits/systems may contain, for example, one or more probes, or pairs of probes, that hybridize to a nucleic acid molecule at or near each target SNP position. Multiple pairs of allele-specific probes may be included in the kit/system to simultaneously assay large numbers of SNPs, at least one of which is a SNP of the present invention. In some kits/systems, the allele-specific probes are immobilized to a substrate such as an array or bead. For example, the same substrate can comprise allele-specific probes for detecting at least 1; 10; 100; 1000; 10,000; 100,000 (or any other number in-between) or substantially all of the SNPs shown in Table 1 and/or Table 2.

[0161] The terms “arrays”, “microarrays”, and “DNA chips” are used herein interchangeably to refer to an array of distinct polynucleotides affixed to a substrate, such as glass, plastic, paper, nylon or other type of membrane, filter, chip, or any other suitable solid support. The polynucleotides can be synthesized directly on the substrate, or synthesized separate from the substrate and then affixed to the substrate. In one embodiment, the microarray is prepared and used according to the methods described in U.S. Pat. No. 5,837,832, Chee et al., PCT application WO95/11995 (Chee et al.), Lockhart, D. J. et al. (1996; Nat. Biotech. 14: 1675-1680) and Schena, M. et al. (1996; Proc. Natl. Acad. Sci. 93: 10614-10619), all of which are incorporated herein in their entirety by reference. In other embodiments, such arrays are produced by the methods described by Brown et al., U.S. Pat. No. 5,807,522.

[0162] Nucleic acid arrays are reviewed in the following references: Zammatteo et al., “New chips for molecular biology and diagnostics”, Biotechnol Annu Rev. 2002; 8:85-101; Sosnowski et al., “Active microelectronic array system for DNA hybridization, genotyping and pharmacogenomic applications”, Psychiatr Genet. 2002 December; 12(4):181-92; Heller, “DNA microarray technology: devices, systems, and applications”, Annu Rev Biomed Eng. 2002; 4:129-53. Epub 2002 Mar. 22; Kolchinsky et al., “Analysis of SNPs and other genomic variations using gel-based chips”, Hum Mutat. 2002 April; 19(4):343-60; and McGall et al., “High-density genechip oligonucleotide probe arrays”, Adv Biochem Eng Biotechnol. 2002; 77:21-42.

[0163] Any number of probes, such as allele-specific probes, may be implemented in an array, and each probe or pair of probes can hybridize to a different SNP position. In the case of polynucleotide probes, they can be synthesized at designated areas (or synthesized separately and then affixed to designated areas) on a substrate using a light-directed chemical process. Each DNA chip can contain, for example, thousands to millions of individual synthetic polynucleotide probes arranged in a grid-like pattern and miniaturized (e.g., to the size of a dime). Preferably, probes are attached to a solid support in an ordered, addressable array.

[0164] A microarray can be composed of a large number of unique, single-stranded polynucleotides, usually either synthetic antisense polynucleotides or fragments of cDNAs, fixed to a solid support. Typical polynucleotides are preferably about 6-60 nucleotides in length, more preferably about 15-30 nucleotides in length, and most preferably about 18-25 nucleotides in length. For certain types of microarrays or other detection kits/systems, it may be preferable to use oligonucleotides that are only about 7-20 nucleotides in length. In other types of arrays, such as arrays used in conjunction with chemiluminescent detection technology, preferred probe lengths can be, for example, about 15-80 nucleotides in length, preferably about 50-70 nucleotides in length, more preferably about 55-65 nucleotides in length, and most preferably about 60 nucleotides in length. The microarray or detection kit can contain polynucleotides that cover the known 5′ or 3′ sequence of a gene/transcript or target SNP site, sequential polynucleotides that cover the full-length sequence of a gene/transcript; or unique polynucleotides selected from particular areas along the length of a target gene/transcript sequence, particularly areas corresponding to one or more SNPs disclosed in Table 1 and/or Table 2. Polynucleotides used in the microarray or detection kit can be specific to a SNP or SNPs of interest (e.g., specific to a particular SNP allele at a target SNP site, or specific to particular SNP alleles at multiple different SNP sites), or specific to a polymorphic gene/transcript or genes/transcripts of interest.

[0165] Hybridization assays based on polynucleotide arrays rely on the differences in hybridization stability of the probes to perfectly matched and mismatched target sequence variants. For SNP genotyping, it is generally preferable that stringency conditions used in hybridization assays are high enough such that nucleic acid molecules that differ from one another at as little as a single SNP position can be differentiated (e.g., typical SNP hybridization assays are designed so that hybridization will occur only if one particular nucleotide is present at a SNP position, but will not occur if an alternative nucleotide is present at that SNP position). Such high stringency conditions may be preferable when using, for example, nucleic acid arrays of allele-specific probes for SNP detection. Such high stringency conditions are described in the preceding section, and are well known to those skilled in the art and can be found in, for example, Current Protocols in Molecular Biology, John Wiley & Sons, N.Y. (1989), 6.3.1-6.3.6.

[0166] In other embodiments, the arrays are used in conjunction with chemiluminescent detection technology. The following patents and patent applications, which are all hereby incorporated by reference, provide additional information pertaining to chemiluminescent detection: U.S. patent application Ser. Nos. 10/620,332 and 10/620,333 describe chemiluminescent approaches for microarray detection; U.S. Pat. Nos. 6,124,478, 6,107,024, 5,994,073, 5,981,768, 5,871,938, 5,843,681, 5,800,999, and 5,773,628 describe methods and compositions of dioxetane for performing chemiluminescent detection; and U.S. published application US2002/0110828 discloses methods and compositions for microarray controls.

[0167] In one embodiment of the invention, a nucleic acid array can comprise an array of probes of about 15-25 nucleotides in length. In further embodiments, a nucleic acid array can comprise any number of probes, in which at least one probe is capable of detecting one or more SNPs disclosed in Table 1 and/or Table 2, and/or at least one probe comprises a fragment of one of the sequences selected from the group consisting of those disclosed in Table 1, Table 2, the Sequence Listing, and sequences complementary thereto, said fragment comprising at least about 8 consecutive nucleotides, preferably 10, 12, 15, 16, 18, 20, more preferably 22, 25, 30, 40, 47, 50, 55, 60, 65, 70, 80, 90, 100, or more consecutive nucleotides (or any other number in-between) and containing (or being complementary to) a novel SNP allele disclosed in Table 1 and/or Table 2. In some embodiments, the nucleotide complementary to the SNP site is within 5, 4, 3, 2, or 1 nucleotide from the center of the probe, more preferably at the center of said probe.

[0168] A polynucleotide probe can be synthesized on the surface of the substrate by using a chemical coupling procedure and an ink jet application apparatus, as described in PCT application WO95/251116 (Baldeschweiler et al.) which is incorporated herein in its entirety by reference. In another aspect, a “gridded” array analogous to a dot (or slot) blot may be used to arrange and link cDNA fragments or oligonucleotides to the surface of a substrate using a vacuum system, thermal, UV, mechanical or chemical bonding procedures. An array, such as those described above, may be produced by hand or by using available devices (slot blot or dot blot apparatus), materials (any suitable solid support), and machines (including robotic instruments), and may contain 8, 24, 96, 384, 1536, 6144 or more polynucleotides, or any other number which lends itself to the efficient use of commercially available instrumentation.

[0169] Using such arrays or other kits/systems, the present invention provides methods of identifying the SNPs disclosed herein in a test sample. Such methods typically involve incubating a test sample of nucleic acids with an array comprising one or more probes corresponding to at least one SNP position of the present invention, and assaying for binding of a nucleic acid from the test sample with one or more of the probes. Conditions for incubating a SNP detection reagent (or a kit/system that employs one or more such SNP detection reagents) with a test sample vary. Incubation conditions depend on such factors as the format employed in the assay, the detection methods employed, and the type and nature of the detection reagents used in the assay. One skilled in the art will recognize that any one of the commonly available hybridization, amplification and array assay formats can readily be adapted to detect the SNPs disclosed herein.

[0170] A SNP detection kit/system of the present invention may include components that are used to prepare nucleic acids from a test sample for the subsequent amplification and/or detection of a SNP-containing nucleic acid molecule. Such sample preparation components can be used to produce nucleic acid extracts (including DNA and/or RNA), proteins or membrane extracts from any bodily fluids (such as blood, serum, plasma, urine, saliva, phlegm, gastric juices, semen, tears, sweat, etc.), skin, hair, cells (especially nucleated cells), biopsies, buccal swabs or tissue specimens. The test samples used in the above-described methods will vary based on such factors as the assay format, nature of the detection method, and the specific tissues, cells or extracts used as the test sample to be assayed. Methods of preparing nucleic acids, proteins, and cell extracts are well known in the art and can be readily adapted to obtain a sample that is compatible with the system utilized. Automated sample preparation systems for extracting nucleic acids from a test sample are commercially available, and examples are Qiagen's BioRobot 9600, Applied Biosystems' PRISM 6700, and Roche Molecular Systems' COBAS AmpliPrep System.

[0171] Another form of kit contemplated by the present invention is a compartmentalized kit. A compartmentalized kit includes any kit in which reagents are contained in separate containers. Such containers include, for example, small glass containers, plastic containers, strips of plastic, glass or paper, or arraying material such as silica. Such containers allow one to efficiently transfer reagents from one compartment to another compartment such that the test samples and reagents are not cross-contaminated, or from one container to another vessel not included in the kit, and the agents or solutions of each container can be added in a quantitative fashion from one compartment to another or to another vessel. Such containers may include, for example, one or more containers which will accept the test sample, one or more containers which contain at least one probe or other SNP detection reagent for detecting one or more SNPs of the present invention, one or more containers which contain wash reagents (such as phosphate buffered saline, Tris-buffers, etc.), and one or more containers which contain the reagents used to reveal the presence of the bound probe or other SNP detection reagents. The kit can optionally further comprise compartments and/or reagents for, for example, nucleic acid amplification or other enzymatic reactions such as primer extension reactions, hybridization, ligation, electrophoresis (preferably capillary electrophoresis), mass spectrometry, and/or laser-induced fluorescent detection. The kit may also include instructions for using the kit. Exemplary compartmentalized kits include microfluidic devices known in the art (see, e.g., Weigl et al., “Lab-on-a-chip for drug development”, Adv Drug Deliv Rev. 2003 Feb. 24; 55(3):349-77). In such microfluidic devices, the containers may be referred to as, for example, microfluidic “compartments”, “chambers”, or “channels”.

[0172] Microfluidic devices, which may also be referred to as “lab-on-a-chip” systems, biomedical micro-electro-mechanical systems (bioMEMs), or multicomponent integrated systems, are exemplary kits/systems of the present invention for analyzing SNPs. Such systems miniaturize and compartmentalize processes such as probe/target hybridization, nucleic acid amplification, and capillary electrophoresis reactions in a single functional device. Such microfluidic devices typically utilize detection reagents in at least one aspect of the system, and such detection reagents may be used to detect one or more SNPs of the present invention. One example of a microfluidic system is disclosed in U.S. Pat. No. 5,589,136, which describes the integration of PCR amplification and capillary electrophoresis in chips. Exemplary microfluidic systems comprise a pattern of microchannels designed onto a glass, silicon, quartz, or plastic wafer included on a microchip. The movements of the samples may be controlled by electric, electroosmotic or hydrostatic forces applied across different areas of the microchip to create functional microscopic valves and pumps with no moving parts. Varying the voltage can be used as a means to control the liquid flow at intersections between the micro-machined channels and to change the liquid flow rate for pumping across different sections of the microchip. See, for example, U.S. Pat. No. 6,153,073, Dubrow et al., and U.S. Pat. No. 6,156,181, Parce et al.

[0173] For genotyping SNPs, an exemplary microfluidic system may integrate, for example, nucleic acid amplification, primer extension, capillary electrophoresis, and a detection method such as laser induced fluorescence detection. In a first step of an exemplary process for using such an exemplary system, nucleic acid samples are amplified, preferably by PCR. Then, the amplification products are subjected to automated primer extension reactions using ddNTPs (specific fluorescence for each ddNTP) and the appropriate oligonucleotide primers to carry out primer extension reactions which hybridize just upstream of the targeted SNP. Once the extension at the 3′ end is completed, the primers are separated from the unincorporated fluorescent ddNTPs by capillary electrophoresis. The separation medium used in capillary electrophoresis can be, for example, polyacrylamide, polyethyleneglycol or dextran. The incorporated ddNTPs in the single nucleotide primer extension products are identified by laser-induced fluorescence detection. Such an exemplary microchip can be used to process, for example, at least 96 to 384 samples, or more, in parallel.

[0174] Uses of Nucleic Acid Molecules

[0175] The nucleic acid molecules of the present invention have a variety of uses, especially in predicting and individual's risk for developing a stroke, particularly the risk of experiencing a first or second stroke, for prognosing the progression of the stroke in an individual (e.g., the severity or consequences of stroke), in evaluating the likelihood of an individual who has a stroke of responding to treatment of the disorder with a therapeutic agent, and/or predicting the likelihood that the individual will experience toxicity or other undesirable side effects from the therapeutic treatment, etc. For example, the nucleic acid molecules are useful as hybridization probes, such as for genotyping SNPs in messenger RNA, transcript, cDNA, genomic DNA, amplified DNA or other nucleic acid molecules, and for isolating full-length cDNA and genomic clones encoding the variant peptides disclosed in Table 1 as well as their orthologs.

[0176] A probe can hybridize to any nucleotide sequence along the entire length of a nucleic acid molecule provided in Table 1 and/or Table 2. Preferably, a probe of the present invention hybridizes to a region of a target sequence that encompasses a SNP position indicated in Table 1 and/or Table 2. More preferably, a probe hybridizes to a SNP-containing target sequence in a sequence-specific manner such that it distinguishes the target sequence from other nucleotide sequences which vary from the target sequence only by which nucleotide is present at the SNP site. Such a probe is particularly useful for detecting the presence of a SNP-containing nucleic acid in a test sample, or for determining which nucleotide (allele) is present at a particular SNP site (i.e., genotyping the SNP site).

[0177] A nucleic acid hybridization probe may be used for determining the presence, level, form, and/or distribution of nucleic acid expression. The nucleic acid whose level is determined can be DNA or RNA. Accordingly, probes specific for the SNPs described herein can be used to assess the presence, expression and/or gene copy number in a given cell, tissue, or organism. These uses are relevant for diagnosis of disorders involving an increase or decrease in gene expression relative to normal levels. In vitro techniques for detection of mRNA include, for example, Northern blot hybridizations and in situ hybridizations. In vitro techniques for detecting DNA include Southern blot hybridizations and in situ hybridizations (Sambrook and Russell, 2000, Molecular Cloning: A Laboratory Manual, Cold Spring Harbor Press, Cold Spring Harbor, N.Y.).

[0178] Probes can be used as part of a diagnostic test kit for identifying cells or tissues in which a variant protein is expressed, such as by measuring the level of a variant protein-encoding nucleic acid (e.g., mRNA) in a sample of cells from a subject or determining if a polynucleotide contains a SNP of interest.

[0179] Thus, the nucleic acid molecules of the invention can be used as hybridization probes to detect the SNPs disclosed herein, thereby determining whether an individual with the polymorphisms is likely or unlikely to develop a stroke or the likelihood that an individual will respond positively to therapeutic treatment for stroke. Detection of a SNP associated with a disease phenotype provides a diagnostic tool for an active disease and/or genetic predisposition to the disease.

[0180] Furthermore, the nucleic acid molecules of the invention are therefore useful for detecting a gene (gene information is disclosed in Table 2, for example) that contains a SNP disclosed herein and/or products of such genes, such as expressed mRNA transcript molecules (transcript information is disclosed in Table 1, for example), and are thus useful for detecting gene expression. The nucleic acid molecules can optionally be implemented in, for example, an array or kit format for use in detecting gene expression.

[0181] The nucleic acid molecules of the invention are also useful as primers to amplify any given region of a nucleic acid molecule, particularly a region containing a SNP identified in Table 1 and/or Table 2.

[0182] The nucleic acid molecules of the invention are also useful for constructing recombinant vectors (described in greater detail below). Such vectors include expression vectors that express a portion of, or all of, any of the variant peptide sequences provided in Table 1. Vectors also include insertion vectors, used to integrate into another nucleic acid molecule sequence, such as into the cellular genome, to alter in situ expression of a gene and/or gene product. For example, an endogenous coding sequence can be replaced via homologous recombination with all or part of the coding region containing one or more specifically introduced SNPs.

[0183] The nucleic acid molecules of the invention are also useful for expressing antigenic portions of the variant proteins, particularly antigenic portions that contain a variant amino acid sequence (e.g., an amino acid substitution) caused by a SNP disclosed in Table 1 and/or Table 2.

[0184] The nucleic acid molecules of the invention are also useful for constructing vectors containing a gene regulatory region of the nucleic acid molecules of the present invention.

[0185] The nucleic acid molecules of the invention are also useful for designing ribozymes corresponding to all, or a part, of an mRNA molecule expressed from a SNP-containing nucleic acid molecule described herein.

[0186] The nucleic acid molecules of the invention are also useful for constructing host cells expressing a part, or all, of the nucleic acid molecules and variant peptides.

[0187] The nucleic acid molecules of the invention are also useful for constructing transgenic animals expressing all, or a part, of the nucleic acid molecules and variant peptides. The production of recombinant cells and transgenic animals having nucleic acid molecules which contain the SNPs disclosed in Table 1 and/or Table 2 allow, for example, effective clinical design of treatment compounds and dosage regimens.

[0188] The nucleic acid molecules of the invention are also useful in assays for drug screening to identify compounds that, for example, modulate nucleic acid expression.

[0189] The nucleic acid molecules of the invention are also useful in gene therapy in patients whose cells have aberrant gene expression. Thus, recombinant cells, which include a patient's cells that have been engineered ex vivo and returned to the patient, can be introduced into an individual where the recombinant cells produce the desired protein to treat the individual.

[0190] SNP Genotyping Methods

[0191] The process of determining which specific nucleotide (i.e., allele) is present at each of one or more SNP positions, such as a SNP position in a nucleic acid molecule disclosed in Table 1 and/or Table 2, is referred to as SNP genotyping. The present invention provides methods of SNP genotyping, such as for use in evaluating an individual's risk for developing stroke, and for evaluating an individual's prognosis for disease severity and recovery, for predicting the likelihood that an individual who has previously experienced a stroke will experience a second stroke, for implementing a preventive treatment regime for an individual based on that individual having an increases susceptibility for developing a stroke, in evaluating an individual's likelihood of responding to therapeutic treatment for stroke, in selecting a treatment regime (e.g., in deciding whether or not to administer therapeutic treatment to an individual having a stroke, or in formulating or selecting a particular therapeutic-based treatment regimen such as dosage and/or frequency of administration of therapeutic treatment or choosing which form/type of therapeutic to be administered such as a particular pharmaceutical composition or compound, etc.), determining the likelihood of experiencing toxicity or other undesirable side effects from the therapeutic treatment, or selecting individuals for a clinical trial of a therapeutic (e.g., selecting individuals to participate in the trial who are most likely to respond positively from the therapeutic treatment), etc.

[0192] Nucleic acid samples can be genotyped to determine which allele(s) is/are present at any given genetic region (e.g., SNP position) of interest by methods well known in the art. The neighboring sequence can be used to design SNP detection reagents such as oligonucleotide probes, which may optionally be implemented in a kit format. Exemplary SNP genotyping methods are described in Chen et al., “Single nucleotide polymorphism genotyping: biochemistry, protocol, cost and throughput”, Pharmacogenomics J. 2003; 3(2):77-96; Kwok et al., “Detection of single nucleotide polymorphisms”, Curr Issues Mol Biol. 2003 April; 5(2):43-60; Shi, “Technologies for individual genotyping: detection of genetic polymorphisms in drug targets and disease genes”, Am J Pharmacogenomics. 2002; 2(3):197-205; and Kwok, “Methods for genotyping single nucleotide polymorphisms”, Annu Rev Genomics Hum Genet 2001; 2:235-58. Exemplary techniques for high-throughput SNP genotyping are described in Marnellos, “High-throughput SNP analysis for genetic association studies”, Curr Opin Drug Discov Devel. 2003 May; 6(3):317-21. Common SNP genotyping methods include, but are not limited to, TaqMan assays, molecular beacon assays, nucleic acid arrays, allele-specific primer extension, allele-specific PCR, arrayed primer extension, homogeneous primer extension assays, primer extension with detection by mass spectrometry, pyrosequencing, multiplex primer extension sorted on genetic arrays, ligation with rolling circle amplification, homogeneous ligation, OLA (U.S. Pat. No. 4,988,167), multiplex ligation reaction sorted on genetic arrays, restriction-fragment length polymorphism, single base extension-tag assays, and the Invader assay. Such methods may be used in combination with detection mechanisms such as, for example, luminescence or chemiluminescence detection, fluorescence detection, time-resolved fluorescence detection, fluorescence resonance energy transfer, fluorescence polarization, mass spectrometry, and electrical detection.

[0193] Various methods for detecting polymorphisms include, but are not limited to, methods in which protection from cleavage agents is used to detect mismatched bases in RNA/RNA or RNA/DNA duplexes (Myers et al., Science 230:1242 (1985); Cotton et al., PNAS 85:4397 (1988); and Saleeba et al., Meth. Enzymol. 217:286-295 (1992)), comparison of the electrophoretic mobility of variant and wild type nucleic acid molecules (Orita et al., PNAS 86:2766 (1989); Cotton et al., Mutat. Res. 285:125-144 (1993); and Hayashi et al., Genet. Anal. Tech. Appl. 9:73-79 (1992)), and assaying the movement of polymorphic or wild-type fragments in polyacrylamide gels containing a gradient of denaturant using denaturing gradient gel electrophoresis (DGGE) (Myers et al., Nature 313:495 (1985)). Sequence variations at specific locations can also be assessed by nuclease protection assays such as RNase and S1 protection or chemical cleavage methods.

[0194] In a preferred embodiment, SNP genotyping is performed using the TaqMan assay, which is also known as the 5′ nuclease assay (U.S. Pat. Nos. 5,210,015 and 5,538,848). The TaqMan assay detects the accumulation of a specific amplified product during PCR. The TaqMan assay utilizes an oligonucleotide probe labeled with a fluorescent reporter dye and a quencher dye. The reporter dye is excited by irradiation at an appropriate wavelength, it transfers energy to the quencher dye in the same probe via a process called fluorescence resonance energy transfer (FRET). When attached to the probe, the excited reporter dye does not emit a signal. The proximity of the quencher dye to the reporter dye in the intact probe maintains a reduced fluorescence for the reporter. The reporter dye and quencher dye may be at the 5′ most and the 3′ most ends, respectively, or vice versa. Alternatively, the reporter dye may be at the 5′ or 3′ most end while the quencher dye is attached to an internal nucleotide, or vice versa. In yet another embodiment, both the reporter and the quencher may be attached to internal nucleotides at a distance from each other such that fluorescence of the reporter is reduced.

[0195] During PCR, the 5′ nuclease activity of DNA polymerase cleaves the probe, thereby separating the reporter dye and the quencher dye and resulting in increased fluorescence of the reporter. Accumulation of PCR product is detected directly by monitoring the increase in fluorescence of the reporter dye. The DNA polymerase cleaves the probe between the reporter dye and the quencher dye only if the probe hybridizes to the target SNP-containing template which is amplified during PCR, and the probe is designed to hybridize to the target SNP site only if a particular SNP allele is present.

[0196] Preferred TaqMan primer and probe sequences can readily be determined using the SNP and associated nucleic acid sequence information provided herein. A number of computer programs, such as Primer Express (Applied Biosystems, Foster City, Calif.), can be used to rapidly obtain optimal primer/probe sets. It will be apparent to one of skill in the art that such primers and probes for detecting the SNPs of the present invention are useful in screening for individuals who are susceptible to developing stroke, or in screening individuals who have had a stroke for their likelihood of responding to therapeutic treatment. These probes and primers can be readily incorporated into a kit format. The present invention also includes modifications of the Taqman assay well known in the art such as the use of Molecular Beacon probes (U.S. Pat. Nos. 5,118,801 and 5,312,728) and other variant formats (U.S. Pat. Nos. 5,866,336 and 6,117,635).

[0197] Another preferred method for genotyping the SNPs of the present invention is the use of two oligonucleotide probes in an OLA (see, e.g., U.S. Pat. No. 4,988,617). In this method, one probe hybridizes to a segment of a target nucleic acid with its 3′ most end aligned with the SNP site. A second probe hybridizes to an adjacent segment of the target nucleic acid molecule directly 3′ to the first probe. The two juxtaposed probes hybridize to the target nucleic acid molecule, and are ligated in the presence of a linking agent such as a ligase if there is perfect complementarity between the 3′ most nucleotide of the first probe with the SNP site. If there is a mismatch, ligation would not occur. After the reaction, the ligated probes are separated from the target nucleic acid molecule, and detected as indicators of the presence of a SNP.

[0198] The following patents, patent applications, and published international patent applications, which are all hereby incorporated by reference, provide additional information pertaining to techniques for carrying out various types of OLA: U.S. Pat. Nos. 6,027,889, 6,268,148, 5,494,810, 5,830,711, and 6,054,564 describe OLA strategies for performing SNP detection; WO 97/31256 and WO 00/56927 describe OLA strategies for performing SNP detection using universal arrays, wherein a zipcode sequence can be introduced into one of the hybridization probes, and the resulting product, or amplified product, hybridized to a universal zip code array; U.S. application US01/17329 (and Ser. No. 09/584,905) describes OLA (or LDR) followed by PCR, wherein zipcodes are incorporated into OLA probes, and amplified PCR products are determined by electrophoretic or universal zipcode array readout; U.S. application 60/427,818, 60/445,636, and 60/445,494 describe SNPlex methods and software for multiplexed SNP detection using OLA followed by PCR, wherein zipcodes are incorporated into OLA probes, and amplified PCR products are hybridized with a zipchute reagent, and the identity of the SNP determined from electrophoretic readout of the zipchute. In some embodiments, OLA is carried out prior to PCR (or another method of nucleic acid amplification). In other embodiments, PCR (or another method of nucleic acid amplification) is carried out prior to OLA.

[0199] Another method for SNP genotyping is based on mass spectrometry. Mass spectrometry takes advantage of the unique mass of each of the four nucleotides of DNA. SNPs can be unambiguously genotyped by mass spectrometry by measuring the differences in the mass of nucleic acids having alternative SNP alleles. MALDI-TOF (Matrix Assisted Laser Desorption Ionization—Time of Flight) mass spectrometry technology is preferred for extremely precise determinations of molecular mass, such as SNPs. Numerous approaches to SNP analysis have been developed based on mass spectrometry. Preferred mass spectrometry-based methods of SNP genotyping include primer extension assays, which can also be utilized in combination with other approaches, such as traditional gel-based formats and microarrays.

[0200] Typically, the primer extension assay involves designing and annealing a primer to a template PCR amplicon upstream (5′) from a target SNP position. A mix of dideoxynucleotide triphosphates (ddNTPs) and/or deoxynucleotide triphosphates (dNTPs) are added to a reaction mixture containing template (e.g., a SNP-containing nucleic acid molecule which has typically been amplified, such as by PCR), primer, and DNA polymerase. Extension of the primer terminates at the first position in the template where a nucleotide complementary to one of the ddNTPs in the mix occurs. The primer can be either immediately adjacent (i.e., the nucleotide at the 3′ end of the primer hybridizes to the nucleotide next to the target SNP site) or two or more nucleotides removed from the SNP position. If the primer is several nucleotides removed from the target SNP position, the only limitation is that the template sequence between the 3′ end of the primer and the SNP position cannot contain a nucleotide of the same type as the one to be detected, or this will cause premature termination of the extension primer. Alternatively, if all four ddNTPs alone, with no dNTPs, are added to the reaction mixture, the primer will always be extended by only one nucleotide, corresponding to the target SNP position. In this instance, primers are designed to bind one nucleotide upstream from the SNP position (i.e., the nucleotide at the 3′ end of the primer hybridizes to the nucleotide that is immediately adjacent to the target SNP site on the 5′ side of the target SNP site). Extension by only one nucleotide is preferable, as it minimizes the overall mass of the extended primer, thereby increasing the resolution of mass differences between alternative SNP nucleotides. Furthermore, mass-tagged ddNTPs can be employed in the primer extension reactions in place of unmodified ddNTPs. This increases the mass difference between primers extended with these ddNTPs, thereby providing increased sensitivity and accuracy, and is particularly useful for typing heterozygous base positions. Mass-tagging also alleviates the need for intensive sample-preparation procedures and decreases the necessary resolving power of the mass spectrometer.

[0201] The extended primers can then be purified and analyzed by MALDI-TOF mass spectrometry to determine the identity of the nucleotide present at the target SNP position. In one method of analysis, the products from the primer extension reaction are combined with light absorbing crystals that form a matrix. The matrix is then hit with an energy source such as a laser to ionize and desorb the nucleic acid molecules into the gas-phase. The ionized molecules are then ejected into a flight tube and accelerated down the tube towards a detector. The time between the ionization event, such as a laser pulse, and collision of the molecule with the detector is the time of flight of that molecule. The time of flight is precisely correlated with the mass-to-charge ratio (m/z) of the ionized molecule. Ions with smaller m/z travel down the tube faster than ions with larger m/z and therefore the lighter ions reach the detector before the heavier ions. The time-of-flight is then converted into a corresponding, and highly precise, m/z. In this manner, SNPs can be identified based on the slight differences in mass, and the corresponding time of flight differences, inherent in nucleic acid molecules having different nucleotides at a single base position. For further information regarding the use of primer extension assays in conjunction with MALDI-TOF mass spectrometry for SNP genotyping, see, e.g., Wise et al., “A standard protocol for single nucleotide primer extension in the human genome using matrix-assisted laser desorption/ionization time-of-flight mass spectrometry”, Rapid Commun Mass Spectrom. 2003; 17(11):1195-202.

[0202] The following references provide further information describing mass spectrometry-based methods for SNP genotyping: Bocker, “SNP and mutation discovery using base-specific cleavage and MALDI-TOF mass spectrometry”, Bioinformatics. 2003 July; 19 Suppl 1:I44-I53; Storm et al., “MALDI-TOF mass spectrometry-based SNP genotyping”, Methods Mol Biol. 2003; 212:241-62; Jurinke et al., “The use of MassARRAY technology for high throughput genotyping”, Adv Biochem Eng Biotechnol. 2002; 77:57-74; and Jurinke et al., “Automated genotyping using the DNA MassArray technology”, Methods Mol Biol. 2002; 187:179-92.

[0203] SNPs can also be scored by direct DNA sequencing. A variety of automated sequencing procedures can be utilized ((1995) Biotechniques 19:448), including sequencing by mass spectrometry (see, e.g., PCT International Publication No. WO94/16101; Cohen et al., Adv. Chromatogr. 36:127-162 (1996); and Griffin et al., Appl. Biochem. Biotechnol. 38:147-159 (1993)). The nucleic acid sequences of the present invention enable one of ordinary skill in the art to readily design sequencing primers for such automated sequencing procedures. Commercial instrumentation, such as the Applied Biosystems 377, 3100, 3700, 3730, and 3730x1 DNA Analyzers (Foster City, Calif.), is commonly used in the art for automated sequencing.

[0204] Other methods that can be used to genotype the SNPs of the present invention include single-strand conformational polymorphism (SSCP), and denaturing gradient gel electrophoresis (DGGE) (Myers et al., Nature 313:495 (1985)). SSCP identifies base differences by alteration in electrophoretic migration of single stranded PCR products, as described in Orita et al., Proc. Nat. Acad. Single-stranded PCR products can be generated by heating or otherwise denaturing double stranded PCR products. Single-stranded nucleic acids may refold or form secondary structures that are partially dependent on the base sequence. The different electrophoretic mobilities of single-stranded amplification products are related to base-sequence differences at SNP positions. DGGE differentiates SNP alleles based on the different sequence-dependent stabilities and melting properties inherent in polymorphic DNA and the corresponding differences in electrophoretic migration patterns in a denaturing gradient gel (Erlich, ed., PCR Technology, Principles and Applications for DNA Amplification, W.H. Freeman and Co, New York, 1992, Chapter 7).

[0205] Sequence-specific ribozymes (U.S. Pat. No. 5,498,531) can also be used to score SNPs based on the development or loss of a ribozyme cleavage site. Perfectly matched sequences can be distinguished from mismatched sequences by nuclease cleavage digestion assays or by differences in melting temperature. If the SNP affects a restriction enzyme cleavage site, the SNP can be identified by alterations in restriction enzyme digestion patterns, and the corresponding changes in nucleic acid fragment lengths determined by gel electrophoresis

[0206] SNP genotyping can include the steps of, for example, collecting a biological sample from a human subject (e.g., sample of tissues, cells, fluids, secretions, etc.), isolating nucleic acids (e.g., genomic DNA, mRNA or both) from the cells of the sample, contacting the nucleic acids with one or more primers which specifically hybridize to a region of the isolated nucleic acid containing a target SNP under conditions such that hybridization and amplification of the target nucleic acid region occurs, and determining the nucleotide present at the SNP position of interest, or, in some assays, detecting the presence or absence of an amplification product (assays can be designed so that hybridization and/or amplification will only occur if a particular SNP allele is present or absent). In some assays, the size of the amplification product is detected and compared to the length of a control sample; for example, deletions and insertions can be detected by a change in size of the amplified product compared to a normal genotype.

[0207] SNP genotyping is useful for numerous practical applications, as described below. Examples of such applications include, but are not limited to, SNP-disease association analysis, disease predisposition screening, disease diagnosis, disease prognosis, disease progression monitoring, determining therapeutic strategies based on an individual's genotype (“pharmacogenomics”), developing therapeutic agents based on SNP genotypes associated with a disease or likelihood of responding to a drug, stratifying a patient population for clinical trial for a treatment regimen, predicting the likelihood that an individual will experience toxic side effects from a therapeutic agent, and human identification applications such as forensics.

[0208] Analysis of Genetic Association Between SNPs and Phenotypic Traits

[0209] SNP genotyping for disease diagnosis, disease predisposition screening, disease prognosis, determining drug responsiveness (pharmacogenomics), drug toxicity screening, and other uses described herein, typically relies on initially establishing a genetic association between one or more specific SNPs and the particular phenotypic traits of interest.

[0210] Different study designs may be used for genetic association studies (Modern Epidemiology, Lippincott Williams & Wilkins (1998), 609-622). Observational studies are most frequently carried out in which the response of the patients is not interfered with. The first type of observational study identifies a sample of persons in whom the suspected cause of the disease is present and another sample of persons in whom the suspected cause is absent, and then the frequency of development of disease in the two samples is compared. These sampled populations are called cohorts, and the study is a prospective study. The other type of observational study is case-control or a retrospective study. In typical case-control studies, samples are collected from individuals with the phenotype of interest (cases) such as certain manifestations of a disease, and from individuals without the phenotype (controls) in a population (target population) that conclusions are to be drawn from. Then the possible causes of the disease are investigated retrospectively. As the time and costs of collecting samples in case-control studies are considerably less than those for prospective studies, case-control studies are the more commonly used study design in genetic association studies, at least during the exploration and discovery stage.

[0211] In both types of observational studies, there may be potential confounding factors that should be taken into consideration. Confounding factors are those that are associated with both the real cause(s) of the disease and the disease itself, and they include demographic information such as age, gender, ethnicity as well as environmental factors. When confounding factors are not matched in cases and controls in a study, and are not controlled properly, spurious association results can arise. If potential confounding factors are identified, they should be controlled for by analysis methods explained below.

[0212] In a genetic association study, the cause of interest to be tested is a certain allele or a SNP or a combination of alleles or a haplotype from several SNPs. Thus, tissue specimens (e.g., whole blood) from the sampled individuals may be collected and genomic DNA genotyped for the SNP(s) of interest. In addition to the phenotypic trait of interest, other information such as demographic (e.g., age, gender, ethnicity, etc.), clinical, and environmental information that may influence the outcome of the trait can be collected to further characterize and define the sample set. In many cases, these factors are known to be associated with diseases and/or SNP allele frequencies. There are likely gene-environment and/or gene-gene interactions as well. Analysis methods to address gene-environment and gene-gene interactions (for example, the effects of the presence of both susceptibility alleles at two different genes can be greater than the effects of the individual alleles at two genes combined) are discussed below.

[0213] After all the relevant phenotypic and genotypic information has been obtained, statistical analyses are carried out to determine if there is any significant correlation between the presence of an allele or a genotype with the phenotypic characteristics of an individual. Preferably, data inspection and cleaning are first performed before carrying out statistical tests for genetic association. Epidemiological and clinical data of the samples can be summarized by descriptive statistics with tables and graphs. Data validation is preferably performed to check for data completion, inconsistent entries, and outliers. Chi-squared tests and t-tests (Wilcoxon rank-sum tests if distributions are not normal) may then be used to check for significant differences between cases and controls for discrete and continuous variables, respectively. To ensure genotyping quality, Hardy-Weinberg disequilibrium tests can be performed on cases and controls separately. Significant deviation from Hardy-Weinberg equilibrium (HWE) in both cases and controls for individual markers can be indicative of genotyping errors. If HWE is violated in a majority of markers, it is indicative of population substructure that should be further investigated. Moreover, Hardy-Weinberg disequilibrium in cases only can indicate genetic association of the markers with the disease (Genetic Data Analysis, Weir B., Sinauer (1990)).

[0214] To test whether an allele of a single SNP is associated with the case or control status of a phenotypic trait, one skilled in the art can compare allele frequencies in cases and controls. Standard chi-squared tests and Fisher exact tests can be carried out on a 2×2 table (2 SNP alleles×2 outcomes in the categorical trait of interest). To test whether genotypes of a SNP are associated, chi-squared tests can be carried out on a 3×2 table (3 genotypes×2 outcomes). Score tests are also carried out for genotypic association to contrast the three genotypic frequencies (major homozygotes, heterozygotes and minor homozygotes) in cases and controls, and to look for trends using 3 different modes of inheritance, namely dominant (with contrast coefficients 2, −1, −1), additive (with contrast coefficients 1, 0, −1) and recessive (with contrast coefficients 1, 1, −2). Odds ratios for minor versus major alleles, and odds ratios for heterozygote and homozygote variants versus the wild type genotypes are calculated with the desired confidence limits, usually 95%.

[0215] In order to control for confounders and to test for interaction and effect modifiers, stratified analyses may be performed using stratified factors that are likely to be confounding, including demographic information such as age, ethnicity, and gender, or an interacting element or effect modifier, such as a known major gene (e.g., APOE for Alzheimer's disease or HLA genes for autoimmune diseases), or environmental factors such as smoking in lung cancer. Stratified association tests may be carried out using Cochran-Mantel-Haenszel tests that take into account the ordinal nature of genotypes with 0, 1, and 2 variant alleles. Exact tests by StatXact may also be performed when computationally possible. Another way to adjust for confounding effects and test for interactions is to perform stepwise multiple logistic regression analysis using statistical packages such as SAS or R. Logistic regression is a model-building technique in which the best fitting and most parsimonious model is built to describe the relation between the dichotomous outcome (for instance, getting a certain disease or not) and a set of independent variables (for instance, genotypes of different associated genes, and the associated demographic and environmental factors). The most common model is one in which the logit transformation of the odds ratios is expressed as a linear combination of the variables (main effects) and their cross-product terms (interactions) (Applied Logistic Regression, Hosmer and Lemeshow, Wiley (2000)). To test whether a certain variable or interaction is significantly associated with the outcome, coefficients in the model are first estimated and then tested for statistical significance of their departure from zero.

[0216] In addition to performing association tests one marker at a time, haplotype association analysis may also be performed to study a number of markers that are closely linked together. Haplotype association tests can have better power than genotypic or allelic association tests when the tested markers are not the disease-causing mutations themselves but are in linkage disequilibrium with such mutations. The test will even be more powerful if the disease is indeed caused by a combination of alleles on a haplotype (e.g., APOE is a haplotype formed by 2 SNPs that are very close to each other). In order to perform haplotype association effectively, marker-marker linkage disequilibrium measures, both D′ and R², are typically calculated for the markers within a gene to elucidate the haplotype structure. Recent studies (Daly et al, Nature Genetics, 29, 232-235, 2001) in linkage disequilibrium indicate that SNPs within a gene are organized in block pattern, and a high degree of linkage disequilibrium exists within blocks and very little linkage disequilibrium exists between blocks. Haplotype association with the disease status can be performed using such blocks once they have been elucidated.

[0217] Haplotype association tests can be carried out in a similar fashion as the allelic and genotypic association tests. Each haplotype in a gene is analogous to an allele in a multi-allelic marker. One skilled in the art can either compare the haplotype frequencies in cases and controls or test genetic association with different pairs of haplotypes. It has been proposed (Schaid et al, Am. J. Hum. Genet., 70, 425-434, 2002) that score tests can be done on haplotypes using the program “haplo.score”. In that method, haplotypes are first inferred by EM algorithm and score tests are carried out with a generalized linear model (GLM) framework that allows the adjustment of other factors.

[0218] An important decision in the performance of genetic association tests is the determination of the significance level at which significant association can be declared when the p-value of the tests reaches that level. In an exploratory analysis where positive hits will be followed up in subsequent confirmatory testing, an unadjusted p-value <0.2 (a significance level on the lenient side), for example, may be used for generating hypotheses for significant association of a SNP with certain phenotypic characteristics of a disease. It is preferred that a p-value <0.05 (a significance level traditionally used in the art) is achieved in order for a SNP to be considered to have an association with a disease. It is more preferred that a p-value <0.01 (a significance level on the stringent side) is achieved for an association to be declared. When hits are followed up in confirmatory analyses in more samples of the same source or in different samples from different sources, adjustment for multiple testing will be performed as to avoid excess number of hits while maintaining the experiment-wise error rates at 0.05. While there are different methods to adjust for multiple testing to control for different kinds of error rates, a commonly used but rather conservative method is Bonferroni correction to control the experiment-wise or family-wise error rate (Multiple comparisons and multiple tests, Westfall et al, SAS Institute (1999)). Permutation tests to control for the false discovery rates, FDR, can be more powerful (Benjamini and Hochberg, Journal of the Royal Statistical Society, Series B 57, 1289-1300, 1995, Resampling-based Multiple Testing, Westfall and Young, Wiley (1993)). Such methods to control for multiplicity would be preferred when the tests are dependent and controlling for false discovery rates is sufficient as opposed to controlling for the experiment-wise error rates.

[0219] In replication studies using samples from different populations after statistically significant markers have been identified in the exploratory stage, meta-analyses can then be performed by combining evidence of different studies (Modern Epidemiology, Lippincott Williams & Wilkins, 1998, 643-673). If available, association results known in the art for the same SNPs can be included in the meta-analyses.

[0220] Since both genotyping and disease status classification can involve errors, sensitivity analyses may be performed to see how odds ratios and p-values would change upon various estimates on genotyping and disease classification error rates.

[0221] It has been well known that subpopulation-based sampling bias between cases and controls can lead to spurious results in case-control association studies (Ewens and Spielman, Am. J. Hum. Genet. 62, 450-458, 1995) when prevalence of the disease is associated with different subpopulation groups. Such bias can also lead to a loss of statistical power in genetic association studies. To detect population stratification, Pritchard and Rosenberg (Pritchard et al. Am. J. Hum. Gen. 1999, 65:220-228) suggested typing markers that are unlinked to the disease and using results of association tests on those markers to determine whether there is any population stratification. When stratification is detected, the genomic control (GC) method as proposed by Devlin and Roeder (Devlin et al., Biometrics 1999, 55:997-1004) can be used to adjust for the inflation of test statistics due to population stratification. GC method is robust to changes in population structure levels as well as being applicable to DNA pooling designs (Devlin et al., Genet. Epidem. 20001, 21:273-284).

[0222] While Pritchard's method recommended using 15-20 unlinked microsatellite markers, it suggested using more than 30 biallelic markers to get enough power to detect population stratification. For the GC method, it has been shown (Bacanu et al., Am. J. Hum. Genet. 2000, 66:1933-1944) that about 60-70 biallelic markers are sufficient to estimate the inflation factor for the test statistics due to population stratification. Hence, 70 intergenic SNPs can be chosen in unlinked regions as indicated in a genome scan (Kehoe et al., Hum. Mol. Genet. 1999, 8:237-245).

[0223] Once individual risk factors, genetic or non-genetic, have been found for the predisposition to disease, the next step is to set up a classification/prediction scheme to predict the category (for instance, disease or no-disease) that an individual will be in depending on his genotypes of associated SNPs and other non-genetic risk factors. Logistic regression for discrete trait and linear regression for continuous trait are standard techniques for such tasks (Applied Regression Analysis, Draper and Smith, Wiley (1998)). Moreover, other techniques can also be used for setting up classification. Such techniques include, but are not limited to, MART, CART, neural network, and discriminant analyses that are suitable for use in comparing the performance of different methods (The Elements of Statistical Learning, Hastie, Tibshirani & Friedman, Springer (2002)).

[0224] Disease Diagnosis and Predisposition Screening

[0225] Information on association/correlation between genotypes and disease-related phenotypes can be exploited in several ways. For example, in the case of a highly statistically significant association between one or more SNPs with predisposition to a disease for which treatment is available, detection of such a genotype pattern in an individual may justify immediate administration of treatment, or at least the institution of regular monitoring of the individual. Detection of the susceptibility alleles associated with serious disease in a couple contemplating having children may also be valuable to the couple in their reproductive decisions. In the case of a weaker but still statistically significant association between a SNP and a human disease, immediate therapeutic intervention or monitoring may not be justified after detecting the susceptibility allele or SNP. Nevertheless, the subject can be motivated to begin simple life-style changes (e.g., diet, exercise) that can be accomplished at little or no cost to the individual but would confer potential benefits in reducing the risk of developing conditions for which that individual may have an increased risk by virtue of having the susceptibility allele(s).

[0226] The SNPs of the invention may contribute to stroke, or to responsiveness of an individual to therapeutic treatment in different ways. Some polymorphisms occur within a protein coding sequence and contribute to disease phenotype by affecting protein structure. Other polymorphisms occur in noncoding regions but may exert phenotypic effects indirectly via influence on, for example, replication, transcription, and/or translation. A single SNP may affect more than one phenotypic trait. Likewise, a single phenotypic trait may be affected by multiple SNPs in different genes.

[0227] As used herein, the terms “diagnose”, “diagnosis”, and “diagnostics” include, but are not limited to, any of the following: detection of a vascular disease that an individual may presently have, predisposition/susceptibility screening (e.g., determining whether an individual has an increased risk of developing stroke, or determining whether an individual has a decreased risk of developing a stroke), determining a particular type or subclass of stroke in an individual known to currently have or to have previously experienced a stroke, confirming or reinforcing a previously made diagnosis of a stroke, evaluating an individual's likelihood of responding to therapeutic treatment for stroke, predisposition screening (e.g., evaluating an individual's likelihood of responding to therapeutic treatment if the individual were to develop a stroke in the future), determining a particular type or subclass of responder/non-responder in an individual known to respond or not respond to a therapeutic treatment, confirming or reinforcing a previously made classification of an individual as a responder/non-responder to therapeutic treatment, pharmacogenomic evaluation of an individual to determine which therapeutic strategy that individual is most likely to positively respond to or to predict whether a patient is likely to respond to a particular treatment such as statin treatment, predicting whether a patient is likely to experience toxic effects from a particular treatment or therapeutic compound, and evaluating the future prognosis of an individual having a stroke. Such diagnostic uses are based on the SNPs individually or in a unique combination or SNP haplotypes of the present invention.

[0228] Haplotypes are particularly useful in that, for example, fewer SNPs can be genotyped to determine if a particular genomic region harbors a locus that influences a particular phenotype, such as in linkage disequilibrium-based SNP association analysis.

[0229] Linkage disequilibrium (LD) refers to the co-inheritance of alleles (e.g., alternative nucleotides) at two or more different SNP sites at frequencies greater than would be expected from the separate frequencies of occurrence of each allele in a given population. The expected frequency of co-occurrence of two alleles that are inherited independently is the frequency of the first allele multiplied by the frequency of the second allele. Alleles that co-occur at expected frequencies are said to be in “linkage equilibrium”. In contrast, LD refers to any non-random genetic association between allele(s) at two or more different SNP sites, which is generally due to the physical proximity of the two loci along a chromosome. LD can occur when two or more SNPs sites are in close physical proximity to each other on a given chromosome and therefore alleles at these SNP sites will tend to remain unseparated for multiple generations with the consequence that a particular nucleotide (allele) at one SNP site will show a non-random association with a particular nucleotide (allele) at a different SNP site located nearby. Hence, genotyping one of the SNP sites will give almost the same information as genotyping the other SNP site that is in LD.

[0230] Various degrees of LD can be encountered between two or more SNPs with the result being that some SNPs are more closely associated (i.e., in stronger LD) than others. Furthermore, the physical distance over which LD extends along a chromosome differs between different regions of the genome, and therefore the degree of physical separation between two or more SNP sites necessary for LD to occur can differ between different regions of the genome.

[0231] For diagnostic purposes and similar uses, if a particular SNP site is found to be useful for example, predicting an individual's susceptibility to stroke or an individuals response to a particular therapeutic treatment, then the skilled artisan would recognize that other SNP sites which are in LD with this SNP site would also be useful for predicting and individual's response to the same therapeutic treatment. Various degrees of LD can be encountered between two or more SNPs with the result being that some SNPs are more closely associated (i.e., in stronger LD) than others. Furthermore, the physical distance over which LD extends along a chromosome differs between different regions of the genome, and therefore the degree of physical separation between two or more SNP sites necessary for LD to occur can differ between different regions of the genome. Thus, polymorphisms (e.g., SNPs and/or haplotypes) that are not the actual disease-causing (causative) polymorphisms, but are in LD with such causative polymorphisms, are also useful. In such instances, the genotype of the polymorphism(s) that is/are in LD with the causative polymorphism is predictive of the genotype of the causative polymorphism and, consequently, predictive of the phenotype (e.g., responder/non-responder to statin treatment) that is influenced by the causative SNP(s). Therefore, polymorphic markers that are in LD with causative polymorphisms are useful as diagnostic markers, and are particularly useful when the actual causative polymorphism(s) is/are unknown.

[0232] Examples of polymorphisms that can be in LD with one or more causative polymorphisms (and/or in LD with one or more polymorphisms that have a significant statistical association with a condition) and therefore useful for diagnosing the same condition that the causative/associated SNP(s) is used to diagnose, include, for example, other SNPs in the same gene, protein-coding, or mRNA transcript-coding region as the causative/associated SNP, other SNPs in the same exon or same intron as the causative/associated SNP, other SNPs in the same haplotype block as the causative/associated SNP, other SNPs in the same intergenic region as the causative/associated SNP, SNPs that are outside but near a gene (e.g., within 6 kb on either side, 5′ or 3′, of a gene boundary) that harbors a causative/associated SNP, etc. Such useful LD SNPs can be selected from among the SNPs disclosed in Tables 1-2, for example.

[0233] Linkage disequilibrium in the human genome is reviewed in: Wall et al., “Haplotype blocks and linkage disequilibrium in the human genome”, Nat Rev Genet. 2003 August; 4(8):587-97; Garner et al., “On selecting markers for association studies: patterns of linkage disequilibrium between two and three diallelic loci”, Genet Epidemiol. 2003 January; 24(1):57-67; Ardlie et al., “Patterns of linkage disequilibrium in the human genome”, Nat Rev Genet. 2002 April; 3(4):299-309 (erratum in Nat Rev Genet 2002 July; 3(7):566); and Remm et al., “High-density genotyping and linkage disequilibrium in the human genome using chromosome 22 as a model”; Curr Opin Chem Biol. 2002 February; 6(1):24-30.

[0234] The contribution or association of particular SNPs and/or SNP haplotypes with disease phenotypes, such as susceptibility to stroke or responsiveness to therapeutic treatment, enables the SNPs of the present invention to be used to develop superior diagnostic tests capable of identifying individuals who express a detectable trait, such as a predisposition to stroke or responder/non-responder to a specific therapeutic treatment, as the result of a specific genotype, or individuals whose genotype places them at an increased or decreased risk of developing a detectable trait at a subsequent time as compared to individuals who do not have that genotype. As described herein, diagnostics may be based on a single SNP or a group of SNPs. Combined detection of a plurality of SNPs (for example, 2, 3, 4, 5, 6, 7, 8, 9, 10, 11, 12, 13, 14, 15, 16, 17, 18, 19, 20, 24, 25, 30, 32, 48, 50, 64, 96, 100, or any other number in-between, or more, of the SNPs provided in Table 1 and/or Table 2) typically increases the probability of an accurate diagnosis. For example, the presence of a single SNP known to correlate with stroke might indicate a probability of 20% that an individual has or is at risk of developing stroke, whereas detection of five SNPs, each of which correlates with stroke, might indicate a probability of 80% that an individual has or is at risk of developing a stroke. To further increase the accuracy of diagnosis or predisposition screening, analysis of the SNPs of the present invention can be combined with that of other polymorphisms or other risk factors of stroke, such as disease symptoms, pathological characteristics, family history, diet, environmental factors or lifestyle factors.

[0235] It will, of course, be understood by practitioners skilled in the treatment or diagnosis of stroke that the present invention generally does not intend to provide an absolute identification of individuals who will or will not develop stroke, or those individuals who will or will not respond to therapeutic treatment for stroke, but rather to indicate a certain increased (or decreased) degree or likelihood of developing a stroke or responding to therapeutic treatment based on statistically significant association results. However, this information is extremely valuable as it can be used to, for example, initiate preventive treatments or to allow an individual carrying one or more significant SNPs or SNP haplotypes to foresee warning signs such as minor clinical symptoms, or to have regularly scheduled physical exams to monitor for appearance of a condition in order to identify and begin treatment of the condition at an early stage. Particularly with diseases that are extremely debilitating or fatal if not treated on time, the knowledge of a potential predisposition, even if this predisposition is not absolute, would likely contribute in a very significant manner to treatment efficacy.

[0236] The diagnostic techniques of the present invention may employ a variety of methodologies to determine whether a test subject has a SNP or a SNP pattern associated with an increased or decreased risk of developing a detectable trait or whether the individual suffers from a detectable trait as a result of a particular polymorphism/mutation, including, for example, methods which enable the analysis of individual chromosomes for haplotyping, family studies, single sperm DNA analysis, or somatic hybrids. The trait analyzed using the diagnostics of the invention may be any detectable trait that is commonly observed in stroke or during the course of therapeutic treatment.

[0237] Another aspect of the present invention relates to a method of determining whether an individual is at risk (or less at risk) of developing one or more traits or whether an individual expresses one or more traits as a consequence of possessing a particular trait-causing or trait-influencing allele. These methods generally involve obtaining a nucleic acid sample from an individual and assaying the nucleic acid sample to determine which nucleotide(s) is/are present at one or more SNP positions, wherein the assayed nucleotide(s) is/are indicative of an increased or decreased risk of developing the trait or indicative that the individual expresses the trait as a result of possessing a particular trait-causing or trait-influencing allele.

[0238] In another embodiment, the SNP detection reagents of the present invention are used to determine whether an individual has one or more SNP allele(s) affecting the level (e.g., the concentration of mRNA or protein in a sample, etc.) or pattern (e.g., the kinetics of expression, rate of decomposition, stability profile, Km, Vmax, etc.) of gene expression (collectively, the “gene response” of a cell or bodily fluid). Such a determination can be accomplished by screening for mRNA or protein expression (e.g., by using nucleic acid arrays, RT-PCR, TaqMan assays, or mass spectrometry), identifying genes having altered expression in an individual, genotyping SNPs disclosed in Table 1 and/or Table 2 that could affect the expression of the genes having altered expression (e.g., SNPs that are in and/or around the gene(s) having altered expression, SNPs in regulatory/control regions, SNPs in and/or around other genes that are involved in pathways that could affect the expression of the gene(s) having altered expression, or all SNPs could be genotyped), and correlating SNP genotypes with altered gene expression. In this manner, specific SNP alleles at particular SNP sites can be identified that affect gene expression.

[0239] Pharmacogenomics and Therapeutics/Drug Development

[0240] The present invention provides methods for assessing the pharmacogenomics of a subject harboring particular SNP alleles or haplotypes to a particular therapeutic agent or pharmaceutical compound, or to a class of such compounds. Pharmacogenomics deals with the roles which clinically significant hereditary variations (e.g., SNPs) play in the response to drugs due to altered drug disposition and/or abnormal action in affected persons. See, e.g., Roses, Nature 405, 857-865 (2000); Gould Rothberg, Nature Biotechnology 19, 209-211 (2001); Eichelbaum, Clin. Exp. Pharmacol. Physiol. 23(10-11):983-985 (1996); and Linder, Clin. Chem. 43(2):254-266 (1997). The clinical outcomes of these variations can result in severe toxicity of therapeutic drugs in certain individuals or therapeutic failure of drugs in certain individuals as a result of individual variation in metabolism. Thus, the SNP genotype of an individual can determine the way a therapeutic compound acts on the body or the way the body metabolizes the compound. For example, SNPs in drug metabolizing enzymes can affect the activity of these enzymes, which in turn can affect both the intensity and duration of drug action, as well as drug metabolism and clearance.

[0241] The discovery of SNPs in drug metabolizing enzymes, drug transporters, proteins for pharmaceutical agents, and other drug targets has explained why some patients do not obtain the expected drug effects, show an exaggerated drug effect, or experience serious toxicity from standard drug dosages. SNPs can be expressed in the phenotype of the extensive metabolizer and in the phenotype of the poor metabolizer. Accordingly, SNPs may lead to allelic variants of a protein in which one or more of the protein functions in one population are different from those in another population. SNPs and the encoded variant peptides thus provide targets to ascertain a genetic predisposition that can affect treatment modality. For example, in a ligand-based treatment, SNPs may give rise to amino terminal extracellular domains and/or other ligand-binding regions of a receptor that are more or less active in ligand binding, thereby affecting subsequent protein activation. Accordingly, ligand dosage would necessarily be modified to maximize the therapeutic effect within a given population containing particular SNP alleles or haplotypes.

[0242] As an alternative to genotyping, specific variant proteins containing variant amino acid sequences encoded by alternative SNP alleles could be identified. Thus, pharmacogenomic characterization of an individual permits the selection of effective compounds and effective dosages of such compounds for prophylactic or therapeutic uses based on the individual's SNP genotype, thereby enhancing and optimizing the effectiveness of the therapy. Furthermore, the production of recombinant cells and transgenic animals containing particular SNPs/haplotypes allow effective clinical design and testing of treatment compounds and dosage regimens. For example, transgenic animals can be produced that differ only in specific SNP alleles in a gene that is orthologous to a human disease susceptibility gene.

[0243] Pharmacogenomic uses of the SNPs of the present invention provide several significant advantages for patient care, particularly in predicting and individual's predisposition to stroke and other vascular disorders and in predicting an individual's responsiveness to therapeutic treatment for treating stroke and vascular disorders. Pharmacogenomic characterization of an individual, based on an individual's SNP genotype, can identify those individuals unlikely to respond to treatment with a particular medication and thereby allows physicians to avoid prescribing the ineffective medication to those individuals. On the other hand, SNP genotyping of an individual may enable physicians to select the appropriate medication and dosage regimen that will be most effective based on an individual's SNP genotype. This information increases a physician's confidence in prescribing medications and motivates patients to comply with their drug regimens. Furthermore, pharmacogenomics may identify patients predisposed to toxicity and adverse reactions to particular drugs or drug dosages. Adverse drug reactions lead to more than 100,000 avoidable deaths per year in the United States alone and therefore represent a significant cause of hospitalization and death, as well as a significant economic burden on the healthcare system (Pfost et. al., Trends in Biotechnology, August 2000.). Thus, pharmacogenomics based on the SNPs disclosed herein has the potential to both save lives and reduce healthcare costs substantially.

[0244] Pharmacogenomics in general is discussed further in Rose et al., “Pharmacogenetic analysis of clinically relevant genetic polymorphisms”, Methods Mol Med. 2003; 85:225-37. Pharmacogenomics as it relates to Alzheimer's disease and other neurodegenerative disorders is discussed in Cacabelos, “Pharmacogenomics for the treatment of dementia”, Ann Med. 2002; 34(5):357-79, Maimone et al., “Pharmacogenomics of neurodegenerative diseases”, Eur J Pharmacol. 2001 Feb. 9; 413(1):11-29, and Poirier, “Apolipoprotein E: a pharmacogenetic target for the treatment of Alzheimer's disease”, Mol Diagn. 1999 December; 4(4):335-41. Pharmacogenomics as it relates to cardiovascular disorders is discussed in Siest et al., “Pharmacogenomics of drugs affecting the cardiovascular system”, Clin Chem Lab Med. 2003 April; 41(4):590-9, Mukherjee et al., “Pharmacogenomics in cardiovascular diseases”, Prog Cardiovasc Dis. 2002 May-June; 44(6):479-98, and Mooser et al., “Cardiovascular pharmacogenetics in the SNP era”, J Thromb Haemost. 2003 July; 1(7):1398-402. Pharmacogenomics as it relates to cancer is discussed in McLeod et al., “Cancer pharmacogenomics: SNPs, chips, and the individual patient”, Cancer Invest. 2003; 21(4):630-40 and Watters et al., “Cancer pharmacogenomics: current and future applications”, Biochim Biophys Acta. 2003 Mar. 17; 1603(2):99-111.

[0245] The SNPs of the present invention also can be used to identify novel therapeutic targets for stroke. For example, genes containing the disease-associated variants (“variant genes”) or their products, as well as genes or their products that are directly or indirectly regulated by or interacting with these variant genes or their products, can be targeted for the development of therapeutics that, for example, treat the disease or prevent or delay disease onset. The therapeutics may be composed of, for example, small molecules, proteins, protein fragments or peptides, antibodies, nucleic acids, or their derivatives or mimetics which modulate the functions or levels of the target genes or gene products.

[0246] The SNP-containing nucleic acid molecules disclosed herein, and their complementary nucleic acid molecules, may be used as antisense constructs to control gene expression in cells, tissues, and organisms. Antisense technology is well established in the art and extensively reviewed in Antisense Drug Technology: Principles, Strategies, and Applications, Crooke (ed.), Marcel Dekker, Inc.: New York (2001). An antisense nucleic acid molecule is generally designed to be complementary to a region of mRNA expressed by a gene so that the antisense molecule hybridizes to the mRNA and thereby blocks translation of mRNA into protein. Various classes of antisense oligonucleotides are used in the art, two of which are cleavers and blockers. Cleavers, by binding to target RNAs, activate intracellular nucleases (e.g., RNaseH or RNase L) that cleave the target RNA. Blockers, which also bind to target RNAs, inhibit protein translation through steric hindrance of ribosomes. Exemplary blockers include peptide nucleic acids, morpholinos, locked nucleic acids, and methylphosphonates (see, e.g., Thompson, Drug Discovery Today, 7 (17): 912-917 (2002)). Antisense oligonucleotides are directly useful as therapeutic agents, and are also useful for determining and validating gene function (e.g., in gene knock-out or knock-down experiments).

[0247] Antisense technology is further reviewed in: Lavery et al., “Antisense and RNAi: powerful tools in drug target discovery and validation”, Curr Opin Drug Discov Devel. 2003 July; 6(4):561-9; Stephens et al., “Antisense oligonucleotide therapy in cancer”, Curr Opin Mol Ther. 2003 April; 5(2): 118-22; Kurreck, “Antisense technologies. Improvement through novel chemical modifications”, Eur J Biochem. 2003 April; 270(8):1628-44; Dias et al., “Antisense oligonucleotides: basic concepts and mechanisms”, Mol Cancer Ther. 2002 March; 1(5):347-55; Chen, “Clinical development of antisense oligonucleotides as anti-cancer therapeutics”, Methods Mol Med. 2003; 75:621-36; Wang et al., “Antisense anticancer oligonucleotide therapeutics”, Curr Cancer Drug Targets. 2001 November; 1(3):177-96; and Bennett, “Efficiency of antisense oligonucleotide drug discovery”, Antisense Nucleic Acid Drug Dev. 2002 June; 12(3):215-24.

[0248] The SNPs of the present invention are particularly useful for designing antisense reagents that are specific for particular nucleic acid variants. Based on the SNP information disclosed herein, antisense oligonucleotides can be produced that specifically target mRNA molecules that contain one or more particular SNP nucleotides. In this manner, expression of mRNA molecules that contain one or more undesired polymorphisms (e.g., SNP nucleotides that lead to a defective protein such as an amino acid substitution in a catalytic domain) can be inhibited or completely blocked. Thus, antisense oligonucleotides can be used to specifically bind a particular polymorphic form (e.g., a SNP allele that encodes a defective protein), thereby inhibiting translation of this form, but which do not bind an alternative polymorphic form (e.g., an alternative SNP nucleotide that encodes a protein having normal function).

[0249] Antisense molecules can be used to inactivate mRNA in order to inhibit gene expression and production of defective proteins. Accordingly, these molecules can be used to treat a disorder, such as a stroke, characterized by abnormal or undesired gene expression or expression of certain defective proteins. This technique can involve cleavage by means of ribozymes containing nucleotide sequences complementary to one or more regions in the mRNA that attenuate the ability of the mRNA to be translated. Possible mRNA regions include, for example, protein-coding regions and particularly protein-coding regions corresponding to catalytic activities, substrate/ligand binding, or other functional activities of a protein.

[0250] The SNPs of the present invention are also useful for designing RNA interference reagents that specifically target nucleic acid molecules having particular SNP variants. RNA interference (RNAi), also referred to as gene silencing, is based on using double-stranded RNA (dsRNA) molecules to turn genes off. When introduced into a cell, dsRNAs are processed by the cell into short fragments (generally about 21, 22, or 23 nucleotides in length) known as small interfering RNAs (siRNAs) which the cell uses in a sequence-specific manner to recognize and destroy complementary RNAs (Thompson, Drug Discovery Today, 7 (17): 912-917 (2002)). Accordingly, an aspect of the present invention specifically contemplates isolated nucleic acid molecules that are about 18-26 nucleotides in length, preferably 19-25 nucleotides in length, and more preferably 20, 21, 22, or 23 nucleotides in length, and the use of these nucleic acid molecules for RNAi. Because RNAi molecules, including siRNAs, act in a sequence-specific manner, the SNPs of the present invention can be used to design RNAi reagents that recognize and destroy nucleic acid molecules having specific SNP alleles/nucleotides (such as deleterious alleles that lead to the production of defective proteins), while not affecting nucleic acid molecules having alternative SNP alleles (such as alleles that encode proteins having normal function). As with antisense reagents, RNAi reagents may be directly useful as therapeutic agents (e.g., for turning off defective, disease-causing genes), and are also useful for characterizing and validating gene function (e.g., in gene knock-out or knock-down experiments).

[0251] The following references provide a further review of RNAi: Reynolds et al., “Rational siRNA design for RNA interference”, Nat Biotechnol. 2004 March; 22(3):326-30. Epub 2004 Feb. 01; Chi et al., “Genomewide view of gene silencing by small interfering RNAs”, PNAS 100(11):6343-6346, 2003; Vickers et al., “Efficient Reduction of Target RNAs by Small Interfering RNA and RNase H-dependent Antisense Agents”, J. Biol. Chem. 278: 7108-7118, 2003; Agami, “RNAi and related mechanisms and their potential use for therapy”, Curr Opin Chem Biol. 2002 December; 6(6):829-34; Lavery et al., “Antisense and RNAi: powerful tools in drug target discovery and validation”, Curr Opin Drug Discov Devel. 2003 July; 6(4):561-9; Shi, “Mammalian RNAi for the masses”, Trends Genet 2003 January; 19(1):9-12), Shuey et al., “RNAi: gene-silencing in therapeutic intervention”, Drug Discovery Today 2002 October; 7(20):1040-1046; McManus et al., Nat Rev Genet 2002 October; 3(10):737-47; Xia et al., Nat Biotechnol 2002 October; 20(10):1006-10; Plasterk et al., Curr Opin Genet Dev 2000 October; 10(5):562-7; Bosher et al., Nat Cell Biol 2000 February; 2(2):E31-6; and Hunter, Curr Biol 1999 Jun. 17; 9(12):R440-2).

[0252] A subject suffering from a pathological condition, such as a stroke, ascribed to a SNP may be treated so as to correct the genetic defect (see Kren et al., Proc. Natl. Acad. Sci. USA 96:10349-10354 (1999)). Such a subject can be identified by any method that can detect the polymorphism in a biological sample drawn from the subject. Such a genetic defect may be permanently corrected by administering to such a subject a nucleic acid fragment incorporating a repair sequence that supplies the normal/wild-type nucleotide at the position of the SNP. This site-specific repair sequence can encompass an RNA/DNA oligonucleotide that operates to promote endogenous repair of a subject's genomic DNA. The site-specific repair sequence is administered in an appropriate vehicle, such as a complex with polyethylenimine, encapsulated in anionic liposomes, a viral vector such as an adenovirus, or other pharmaceutical composition that promotes intracellular uptake of the administered nucleic acid. A genetic defect leading to an inborn pathology may then be overcome, as the chimeric oligonucleotides induce incorporation of the normal sequence into the subject's genome. Upon incorporation, the normal gene product is expressed, and the replacement is propagated, thereby engendering a permanent repair and therapeutic enhancement of the clinical condition of the subject.

[0253] In cases in which a cSNP results in a variant protein that is ascribed to be the cause of, or a contributing factor to, a pathological condition, a method of treating such a condition can include administering to a subject experiencing the pathology the wild-type/normal cognate of the variant protein. Once administered in an effective dosing regimen, the wild-type cognate provides complementation or remediation of the pathological condition.

[0254] The invention further provides a method for identifying a compound or agent that can be used to treat stroke. The SNPs disclosed herein are useful as targets for the identification and/or development of therapeutic agents. A method for identifying a therapeutic agent or compound typically includes assaying the ability of the agent or compound to modulate the activity and/or expression of a SNP-containing nucleic acid or the encoded product and thus identifying an agent or a compound that can be used to treat a disorder characterized by undesired activity or expression of the SNP-containing nucleic acid or the encoded product. The assays can be performed in cell-based and cell-free systems. Cell-based assays can include cells naturally expressing the nucleic acid molecules of interest or recombinant cells genetically engineered to express certain nucleic acid molecules.

[0255] Variant gene expression in a patient having a stroke can include, for example, either expression of a SNP-containing nucleic acid sequence (for instance, a gene that contains a SNP can be transcribed into an mRNA transcript molecule containing the SNP, which can in turn be translated into a variant protein) or altered expression of a normal/wild-type nucleic acid sequence due to one or more SNPs (for instance, a regulatory/control region can contain a SNP that affects the level or pattern of expression of a normal transcript).

[0256] Assays for variant gene expression can involve direct assays of nucleic acid levels (e.g., mRNA levels), expressed protein levels, or of collateral compounds involved in a signal pathway. Further, the expression of genes that are up- or down-regulated in response to the signal pathway can also be assayed. In this embodiment, the regulatory regions of these genes can be operably linked to a reporter gene such as luciferase.

[0257] Modulators of variant gene expression can be identified in a method wherein, for example, a cell is contacted with a candidate compound/agent and the expression of mRNA determined. The level of expression of mRNA in the presence of the candidate compound is compared to the level of expression of mRNA in the absence of the candidate compound. The candidate compound can then be identified as a modulator of variant gene expression based on this comparison and be used to treat a disorder such as a stroke that is characterized by variant gene expression (e.g., either expression of a SNP-containing nucleic acid or altered expression of a normal/wild-type nucleic acid molecule due to one or more SNPs that affect expression of the nucleic acid molecule) due to one or more SNPs of the present invention. When expression of mRNA is statistically significantly greater in the presence of the candidate compound than in its absence, the candidate compound is identified as a stimulator of nucleic acid expression. When nucleic acid expression is statistically significantly less in the presence of the candidate compound than in its absence, the candidate compound is identified as an inhibitor of nucleic acid expression.

[0258] The invention further provides methods of treatment, with the SNP or associated nucleic acid domain (e.g., catalytic domain, ligand/substrate-binding domain, regulatory/control region, etc.) or gene, or the encoded mRNA transcript, as a target, using a compound identified through drug screening as a gene modulator to modulate variant nucleic acid expression. Modulation can include either up-regulation (i.e., activation or agonization) or down-regulation (i.e., suppression or antagonization) of nucleic acid expression.

[0259] Expression of mRNA transcripts and encoded proteins, either wild type or variant, may be altered in individuals with a particular SNP allele in a regulatory/control element, such as a promoter or transcription factor binding domain, that regulates expression. In this situation, methods of treatment and compounds can be identified, as discussed herein, that regulate or overcome the variant regulatory/control element, thereby generating normal, or healthy, expression levels of either the wild type or variant protein.

[0260] The SNP-containing nucleic acid molecules of the present invention are also useful for monitoring the effectiveness of modulating compounds on the expression or activity of a variant gene, or encoded product, in clinical trials or in a treatment regimen. Thus, the gene expression pattern can serve as an indicator for the continuing effectiveness of treatment with the compound, particularly with compounds to which a patient can develop resistance, as well as an indicator for toxicities. The gene expression pattern can also serve as a marker indicative of a physiological response of the affected cells to the compound. Accordingly, such monitoring would allow either increased administration of the compound or the administration of alternative compounds to which the patient has not become resistant. Similarly, if the level of nucleic acid expression falls below a desirable level, administration of the compound could be commensurately decreased.

[0261] In another aspect of the present invention, there is provided a pharmaceutical pack comprising a therapeutic agent (e.g., a small molecule drug, antibody, peptide, antisense or RNAi nucleic acid molecule, etc.) and a set of instructions for administration of the therapeutic agent to humans diagnostically tested for one or more SNPs or SNP haplotypes provided by the present invention.

[0262] The SNPs/haplotypes of the present invention are also useful for improving many different aspects of the drug development process. For instance, an aspect of the present invention includes selecting individuals for clinical trials based on their SNP genotype. For example, individuals with SNP genotypes that indicate that they are likely to positively respond to a drug can be included in the trials, whereas those individuals whose SNP genotypes indicate that they are less likely to or would not respond to the drug, or who are at risk for suffering toxic effects or other adverse reactions, can be excluded from the clinical trials. This not only can improve the safety of clinical trials, but also can enhance the chances that the trial will demonstrate statistically significant efficacy. Furthermore, the SNPs of the present invention may explain why certain previously developed drugs performed poorly in clinical trials and may help identify a subset of the population that would benefit from a drug that had previously performed poorly in clinical trials, thereby “rescuing” previously developed drugs, and enabling the drug to be made available to a particular stroke patient population that can benefit from it.

[0263] SNPs have many important uses in drug discovery, screening, and development. A high probability exists that, for any gene/protein selected as a potential drug target, variants of that gene/protein will exist in a patient population. Thus, determining the impact of gene/protein variants on the selection and delivery of a therapeutic agent should be an integral aspect of the drug discovery and development process. (Jazwinska, A Trends Guide to Genetic Variation and Genomic Medicine, 2002 March; S30-S36).

[0264] Knowledge of variants (e.g., SNPs and any corresponding amino acid polymorphisms) of a particular therapeutic target (e.g., a gene, mRNA transcript, or protein) enables parallel screening of the variants in order to identify therapeutic candidates (e.g., small molecule compounds, antibodies, antisense or RNAi nucleic acid compounds, etc.) that demonstrate efficacy across variants (Rothberg, Nat Biotechnol 2001 March; 19(3):209-11). Such therapeutic candidates would be expected to show equal efficacy across a larger segment of the patient population, thereby leading to a larger potential market for the therapeutic candidate.

[0265] Furthermore, identifying variants of a potential therapeutic target enables the most common form of the target to be used for selection of therapeutic candidates, thereby helping to ensure that the experimental activity that is observed for the selected candidates reflects the real activity expected in the largest proportion of a patient population (Jazwinska, A Trends Guide to Genetic Variation and Genomic Medicine, 2002 March; S30-S36).

[0266] Additionally, screening therapeutic candidates against all known variants of a target can enable the early identification of potential toxicities and adverse reactions relating to particular variants. For example, variability in drug absorption, distribution, metabolism and excretion (ADME) caused by, for example, SNPs in therapeutic targets or drug metabolizing genes, can be identified, and this information can be utilized during the drug development process to minimize variability in drug disposition and develop therapeutic agents that are safer across a wider range of a patient population. The SNPs of the present invention, including the variant proteins and encoding polymorphic nucleic acid molecules provided in Tables 1-2, are useful in conjunction with a variety of toxicology methods established in the art, such as those set forth in Current Protocols in Toxicology, John Wiley & Sons, Inc., N.Y.

[0267] Furthermore, therapeutic agents that target any art-known proteins (or nucleic acid molecules, either RNA or DNA) may cross-react with the variant proteins (or polymorphic nucleic acid molecules) disclosed in Table 1, thereby significantly affecting the pharmacokinetic properties of the drug. Consequently, the protein variants and the SNP-containing nucleic acid molecules disclosed in Tables 1-2 are useful in developing, screening, and evaluating therapeutic agents that target corresponding art-known protein forms (or nucleic acid molecules). Additionally, as discussed above, knowledge of all polymorphic forms of a particular drug target enables the design of therapeutic agents that are effective against most or all such polymorphic forms of the drug target.

[0268] Pharmaceutical Compositions and Administration Thereof

[0269] Any of the stroke-associated proteins, and encoding nucleic acid molecules, disclosed herein can be used as therapeutic targets (or directly used themselves as therapeutic compounds) for treating stroke and related pathologies, and the present disclosure enables therapeutic compounds (e.g., small molecules, antibodies, therapeutic proteins, RNAi and antisense molecules, etc.) to be developed that target (or are comprised of) any of these therapeutic targets.

[0270] In general, a therapeutic compound will be administered in a therapeutically effective amount by any of the accepted modes of administration for agents that serve similar utilities. The actual amount of the therapeutic compound of this invention, i.e., the active ingredient, will depend upon numerous factors such as the severity of the disease to be treated, the age and relative health of the subject, the potency of the compound used, the route and form of administration, and other factors.

[0271] Therapeutically effective amounts of therapeutic compounds may range from, for example, approximately 0.01-50 mg per kilogram body weight of the recipient per day; preferably about 0.1-20 mg/kg/day. Thus, as an example, for administration to a 70 kg person, the dosage range would most preferably be about 7 mg to 1.4 g per day.

[0272] In general, therapeutic compounds will be administered as pharmaceutical compositions by any one of the following routes: oral, systemic (e.g., transdermal, intranasal, or by suppository), or parenteral (e.g., intramuscular, intravenous, or subcutaneous) administration. The preferred manner of administration is oral or parenteral using a convenient daily dosage regimen, which can be adjusted according to the degree of affliction. Oral compositions can take the form of tablets, pills, capsules, semisolids, powders, sustained release formulations, solutions, suspensions, elixirs, aerosols, or any other appropriate compositions.

[0273] The choice of formulation depends on various factors such as the mode of drug administration (e.g., for oral administration, formulations in the form of tablets, pills, or capsules are preferred) and the bioavailability of the drug substance. Recently, pharmaceutical formulations have been developed especially for drugs that show poor bioavailability based upon the principle that bioavailability can be increased by increasing the surface area, i.e., decreasing particle size. For example, U.S. Pat. No. 4,107,288 describes a pharmaceutical formulation having particles in the size range from 10 to 1,000 nm in which the active material is supported on a cross-linked matrix of macromolecules. U.S. Pat. No. 5,145,684 describes the production of a pharmaceutical formulation in which the drug substance is pulverized to nanoparticles (average particle size of 400 nm) in the presence of a surface modifier and then dispersed in a liquid medium to give a pharmaceutical formulation that exhibits remarkably high bioavailability.

[0274] Pharmaceutical compositions are comprised of, in general, a therapeutic compound in combination with at least one pharmaceutically acceptable excipient. Acceptable excipients are non-toxic, aid administration, and do not adversely affect the therapeutic benefit of the therapeutic compound. Such excipients may be any solid, liquid, semi-solid or, in the case of an aerosol composition, gaseous excipient that is generally available to one skilled in the art.

[0275] Solid pharmaceutical excipients include starch, cellulose, talc, glucose, lactose, sucrose, gelatin, malt, rice, flour, chalk, silica gel, magnesium stearate, sodium stearate, glycerol monostearate, sodium chloride, dried skim milk and the like. Liquid and semisolid excipients may be selected from glycerol, propylene glycol, water, ethanol and various oils, including those of petroleum, animal, vegetable or synthetic origin, e.g., peanut oil, soybean oil, mineral oil, sesame oil, etc. Preferred liquid carriers, particularly for injectable solutions, include water, saline, aqueous dextrose, and glycols.

[0276] Compressed gases may be used to disperse a compound of this invention in aerosol form. Inert gases suitable for this purpose are nitrogen, carbon dioxide, etc.

[0277] Other suitable pharmaceutical excipients and their formulations are described in Remington's Pharmaceutical Sciences, edited by E. W. Martin (Mack Publishing Company, 18th ed., 1990).

[0278] The amount of the therapeutic compound in a formulation can vary within the full range employed by those skilled in the art. Typically, the formulation will contain, on a weight percent (wt %) basis, from about 0.01-99.99 wt % of the therapeutic compound based on the total formulation, with the balance being one or more suitable pharmaceutical excipients. Preferably, the compound is present at a level of about 1-80 wt %.

[0279] Therapeutic compounds can be administered alone or in combination with other therapeutic compounds or in combination with one or more other active ingredient(s). For example, an inhibitor or stimulator of a stroke-associated protein can be administered in combination with another agent that inhibits or stimulates the activity of the same or a different stroke-associated protein to thereby counteract the affects of a stroke.

[0280] For further information regarding pharmacology, see Current Protocols in Pharmacology, John Wiley & Sons, Inc., N.Y.

[0281] Human Identification Applications

[0282] In addition to their diagnostic and therapeutic uses in stroke and therapeutic treatment of stroke, the SNPs provided by the present invention are also useful as human identification markers for such applications as forensics, paternity testing, and biometrics (see, e.g., Gill, “An assessment of the utility of single nucleotide polymorphisms (SNPs) for forensic purposes”, Int J Legal Med. 2001; 114(4-5):204-10). Genetic variations in the nucleic acid sequences between individuals can be used as genetic markers to identify individuals and to associate a biological sample with an individual. Determination of which nucleotides occupy a set of SNP positions in an individual identifies a set of SNP markers that distinguishes the individual. The more SNP positions that are analyzed, the lower the probability that the set of SNPs in one individual is the same as that in an unrelated individual. Preferably, if multiple sites are analyzed, the sites are unlinked (i.e., inherited independently). Thus, preferred sets of SNPs can be selected from among the SNPs disclosed herein, which may include SNPs on different chromosomes, SNPs on different chromosome arms, and/or SNPs that are dispersed over substantial distances along the same chromosome arm.

[0283] Furthermore, among the SNPs disclosed herein, preferred SNPs for use in certain forensic/human identification applications include SNPs located at degenerate codon positions (i.e., the third position in certain codons which can be one of two or more alternative nucleotides and still encode the same amino acid), since these SNPs do not affect the encoded protein. SNPs that do not affect the encoded protein are expected to be under less selective pressure and are therefore expected to be more polymorphic in a population, which is typically an advantage for forensic/human identification applications. However, for certain forensics/human identification applications, such as predicting phenotypic characteristics (e.g., inferring ancestry or inferring one or more physical characteristics of an individual) from a DNA sample, it may be desirable to utilize SNPs that affect the encoded protein.

[0284] For many of the SNPs disclosed in Tables 1-2 (which are identified as “Applera” SNP source), Tables 1-2 provide SNP allele frequencies obtained by re-sequencing the DNA of chromosomes from 39 individuals (Tables 1-2 also provide allele frequency information for “Celera” source SNPs and, where available, public SNPs from dbEST, HGBASE, and/or HGMD). The allele frequencies provided in Tables 1-2 enable these SNPs to be readily used for human identification applications. Although any SNP disclosed in Table 1 and/or Table 2 could be used for human identification, the closer that the frequency of the minor allele at a particular SNP site is to 50%, the greater the ability of that SNP to discriminate between different individuals in a population since it becomes increasingly likely that two randomly selected individuals would have different alleles at that SNP site. Using the SNP allele frequencies provided in Tables 1-2, one of ordinary skill in the art could readily select a subset of SNPs for which the frequency of the minor allele is, for example, at least 1%, 2%, 5%, 10%, 20%, 25%, 30%, 40%, 45%, or 50%, or any other frequency in-between. Thus, since Tables 1-2 provide allele frequencies based on the re-sequencing of the chromosomes from 39 individuals, a subset of SNPs could readily be selected for human identification in which the total allele count of the minor allele at a particular SNP site is, for example, at least 1, 2, 4, 8, 10, 16, 20, 24, 30, 32, 36, 38, 39, 40, or any other number in-between.

[0285] Furthermore, Tables 1-2 also provide population group (interchangeably referred to herein as ethnic or racial groups) information coupled with the extensive allele frequency information. For example, the group of 39 individuals whose DNA was re-sequenced was made-up of 20 Caucasians and 19 African-Americans. This population group information enables further refinement of SNP selection for human identification. For example, preferred SNPs for human identification can be selected from Tables 1-2 that have similar allele frequencies in both the Caucasian and African-American populations; thus, for example, SNPs can be selected that have equally high discriminatory power in both populations. Alternatively, SNPs can be selected for which there is a statistically significant difference in allele frequencies between the Caucasian and African-American populations (as an extreme example, a particular allele may be observed only in either the Caucasian or the African-American population group but not observed in the other population group); such SNPs are useful, for example, for predicting the race/ethnicity of an unknown perpetrator from a biological sample such as a hair or blood stain recovered at a crime scene. For a discussion of using SNPs to predict ancestry from a DNA sample, including statistical methods, see Frudakis et al., “A Classifier for the SNP-Based Inference of Ancestry”, Journal of Forensic Sciences 2003; 48(4):771-782.

[0286] SNPs have numerous advantages over other types of polymorphic markers, such as short tandem repeats (STRs). For example, SNPs can be easily scored and are amenable to automation, making SNPs the markers of choice for large-scale forensic databases. SNPs are found in much greater abundance throughout the genome than repeat polymorphisms. Population frequencies of two polymorphic forms can usually be determined with greater accuracy than those of multiple polymorphic forms at multi-allelic loci. SNPs are mutationaly more stable than repeat polymorphisms. SNPs are not susceptible to artefacts such as stutter bands that can hinder analysis. Stutter bands are frequently encountered when analyzing repeat polymorphisms, and are particularly troublesome when analyzing samples such as crime scene samples that may contain mixtures of DNA from multiple sources. Another significant advantage of SNP markers over STR markers is the much shorter length of nucleic acid needed to score a SNP. For example, STR markers are generally several hundred base pairs in length. A SNP, on the other hand, comprises a single nucleotide, and generally a short conserved region on either side of the SNP position for primer and/or probe binding. This makes SNPs more amenable to typing in highly degraded or aged biological samples that are frequently encountered in forensic casework in which DNA may be fragmented into short pieces.

[0287] SNPs also are not subject to microvariant and “off-ladder” alleles frequently encountered when analyzing STR loci. Microvariants are deletions or insertions within a repeat unit that change the size of the amplified DNA product so that the amplified product does not migrate at the same rate as reference alleles with normal sized repeat units. When separated by size, such as by electrophoresis on a polyacrylamide gel, microvariants do not align with a reference allelic ladder of standard sized repeat units, but rather migrate between the reference alleles. The reference allelic ladder is used for precise sizing of alleles for allele classification; therefore alleles that do not align with the reference allelic ladder lead to substantial analysis problems. Furthermore, when analyzing multi-allelic repeat polymorphisms, occasionally an allele is found that consists of more or less repeat units than has been previously seen in the population, or more or less repeat alleles than are included in a reference allelic ladder. These alleles will migrate outside the size range of known alleles in a reference allelic ladder, and therefore are referred to as “off-ladder” alleles. In extreme cases, the allele may contain so few or so many repeats that it migrates well out of the range of the reference allelic ladder. In this situation, the allele may not even be observed, or, with multiplex analysis, it may migrate within or close to the size range for another locus, further confounding analysis.

[0288] SNP analysis avoids the problems of microvariants and off-ladder alleles encountered in STR analysis. Importantly, microvariants and off-ladder alleles may provide significant problems, and may be completely missed, when using analysis methods such as oligonucleotide hybridization arrays, which utilize oligonucleotide probes specific for certain known alleles. Furthermore, off-ladder alleles and microvariants encountered with STR analysis, even when correctly typed, may lead to improper statistical analysis, since their frequencies in the population are generally unknown or poorly characterized, and therefore the statistical significance of a matching genotype may be questionable. All these advantages of SNP analysis are considerable in light of the consequences of most DNA identification cases, which may lead to life imprisonment for an individual, or re-association of remains to the family of a deceased individual.

[0289] DNA can be isolated from biological samples such as blood, bone, hair, saliva, or semen, and compared with the DNA from a reference source at particular SNP positions. Multiple SNP markers can be assayed simultaneously in order to increase the power of discrimination and the statistical significance of a matching genotype. For example, oligonucleotide arrays can be used to genotype a large number of SNPs simultaneously. The SNPs provided by the present invention can be assayed in combination with other polymorphic genetic markers, such as other SNPs known in the art or STRs, in order to identify an individual or to associate an individual with a particular biological sample.

[0290] Furthermore, the SNPs provided by the present invention can be genotyped for inclusion in a database of DNA genotypes, for example, a criminal DNA databank such as the FBI's Combined DNA Index System (CODIS) database. A genotype obtained from a biological sample of unknown source can then be queried against the database to find a matching genotype, with the SNPs of the present invention providing nucleotide positions at which to compare the known and unknown DNA sequences for identity. Accordingly, the present invention provides a database comprising novel SNPs or SNP alleles of the present invention (e.g., the database can comprise information indicating which alleles are possessed by individual members of a population at one or more novel SNP sites of the present invention), such as for use in forensics, biometrics, or other human identification applications. Such a database typically comprises a computer-based system in which the SNPs or SNP alleles of the present invention are recorded on a computer readable medium (see the section of the present specification entitled “Computer-Related Embodiments”).

[0291] The SNPs of the present invention can also be assayed for use in paternity testing. The object of paternity testing is usually to determine whether a male is the father of a child. In most cases, the mother of the child is known and thus, the mother's contribution to the child's genotype can be traced. Paternity testing investigates whether the part of the child's genotype not attributable to the mother is consistent with that of the putative father. Paternity testing can be performed by analyzing sets of polymorphisms in the putative father and the child, with the SNPs of the present invention providing nucleotide positions at which to compare the putative father's and child's DNA sequences for identity. If the set of polymorphisms in the child attributable to the father does not match the set of polymorphisms of the putative father, it can be concluded, barring experimental error, that the putative father is not the father of the child. If the set of polymorphisms in the child attributable to the father match the set of polymorphisms of the putative father, a statistical calculation can be performed to determine the probability of coincidental match, and a conclusion drawn as to the likelihood that the putative father is the true biological father of the child.

[0292] In addition to paternity testing, SNPs are also useful for other types of kinship testing, such as for verifying familial relationships for immigration purposes, or for cases in which an individual alleges to be related to a deceased individual in order to claim an inheritance from the deceased individual, etc. For further information regarding the utility of SNPs for paternity testing and other types of kinship testing, including methods for statistical analysis, see Krawczak, “Informativity assessment for biallelic single nucleotide polymorphisms”, Electrophoresis 1999 June; 20(8):1676-81.

[0293] The use of the SNPs of the present invention for human identification further extends to various authentication systems, commonly referred to as biometric systems, which typically convert physical characteristics of humans (or other organisms) into digital data. Biometric systems include various technological devices that measure such unique anatomical or physiological characteristics as finger, thumb, or palm prints; hand geometry; vein patterning on the back of the hand; blood vessel patterning of the retina and color and texture of the iris; facial characteristics; voice patterns; signature and typing dynamics; and DNA. Such physiological measurements can be used to verify identity and, for example, restrict or allow access based on the identification. Examples of applications for biometrics include physical area security, computer and network security, aircraft passenger check-in and boarding, financial transactions, medical records access, government benefit distribution, voting, law enforcement, passports, visas and immigration, prisons, various military applications, and for restricting access to expensive or dangerous items, such as automobiles or guns (see, for example, O'Connor, Stanford Technology Law Review and U.S. Pat. No. 6,119,096).

[0294] Groups of SNPs, particularly the SNPs provided by the present invention, can be typed to uniquely identify an individual for biometric applications such as those described above. Such SNP typing can readily be accomplished using, for example, DNA chips/arrays. Preferably, a minimally invasive means for obtaining a DNA sample is utilized. For example, PCR amplification enables sufficient quantities of DNA for analysis to be obtained from buccal swabs or fingerprints, which contain DNA-containing skin cells and oils that are naturally transferred during contact.

[0295] Further information regarding techniques for using SNPs in forensic/human identification applications can be found in, for example, Current Protocols in Human Genetics, John Wiley & Sons, N.Y. (2002), 14.1-14.7.

[0296] Variant Proteins, Antibodies, Vectors & Host Cells, & Uses Thereof

[0297] Variant Proteins Encoded by SNP-Containing Nucleic Acid Molecules

[0298] The present invention provides SNP-containing nucleic acid molecules, many of which encode proteins having variant amino acid sequences as compared to the art-known (i.e., wild-type) proteins. Amino acid sequences encoded by the polymorphic nucleic acid molecules of the present invention are provided as SEQ ID NOS:581-1160 in Table 1 and the Sequence Listing. These variants will generally be referred to herein as variant proteins/peptides/polypeptides, or polymorphic proteins/peptides/polypeptides of the present invention. The terms “protein”, “peptide”, and “polypeptide” are used herein interchangeably.

[0299] A variant protein of the present invention may be encoded by, for example, a nonsynonymous nucleotide substitution at any one of the cSNP positions disclosed herein. In addition, variant proteins may also include proteins whose expression, structure, and/or function is altered by a SNP disclosed herein, such as a SNP that creates or destroys a stop codon, a SNP that affects splicing, and a SNP in control/regulatory elements, e.g. promoters, enhancers, or transcription factor binding domains.

[0300] As used herein, a protein or peptide is said to be “isolated” or “purified” when it is substantially free of cellular material or chemical precursors or other chemicals. The variant proteins of the present invention can be purified to homogeneity or other lower degrees of purity. The level of purification will be based on the intended use. The key feature is that the preparation allows for the desired function of the variant protein, even if in the presence of considerable amounts of other components.

[0301] As used herein, “substantially free of cellular material” includes preparations of the variant protein having less than about 30% (by dry weight) other proteins (i.e., contaminating protein), less than about 20% other proteins, less than about 10% other proteins, or less than about 5% other proteins. When the variant protein is recombinantly produced, it can also be substantially free of culture medium, i.e., culture medium represents less than about 20% of the volume of the protein preparation.

[0302] The language “substantially free of chemical precursors or other chemicals” includes preparations of the variant protein in which it is separated from chemical precursors or other chemicals that are involved in its synthesis. In one embodiment, the language “substantially free of chemical precursors or other chemicals” includes preparations of the variant protein having less than about 30% (by dry weight) chemical precursors or other chemicals, less than about 20% chemical precursors or other chemicals, less than about 10% chemical precursors or other chemicals, or less than about 5% chemical precursors or other chemicals.

[0303] An isolated variant protein may be purified from cells that naturally express it, purified from cells that have been altered to express it (recombinant host cells), or synthesized using known protein synthesis methods. For example, a nucleic acid molecule containing SNP(s) encoding the variant protein can be cloned into an expression vector, the expression vector introduced into a host cell, and the variant protein expressed in the host cell. The variant protein can then be isolated from the cells by any appropriate purification scheme using standard protein purification techniques. Examples of these techniques are described in detail below (Sambrook and Russell, 2000, Molecular Cloning: A Laboratory Manual, Cold Spring Harbor Laboratory Press, Cold Spring Harbor, N.Y.).

[0304] The present invention provides isolated variant proteins that comprise, consist of or consist essentially of amino acid sequences that contain one or more variant amino acids encoded by one or more codons that contain a SNP of the present invention.

[0305] Accordingly, the present invention provides variant proteins that consist of amino acid sequences that contain one or more amino acid polymorphisms (or truncations or extensions due to creation or destruction of a stop codon, respectively) encoded by the SNPs provided in Table 1 and/or Table 2. A protein consists of an amino acid sequence when the amino acid sequence is the entire amino acid sequence of the protein.

[0306] The present invention further provides variant proteins that consist essentially of amino acid sequences that contain one or more amino acid polymorphisms (or truncations or extensions due to creation or destruction of a stop codon, respectively) encoded by the SNPs provided in Table 1 and/or Table 2. A protein consists essentially of an amino acid sequence when such an amino acid sequence is present with only a few additional amino acid residues in the final protein.

[0307] The present invention further provides variant proteins that comprise amino acid sequences that contain one or more amino acid polymorphisms (or truncations or extensions due to creation or destruction of a stop codon, respectively) encoded by the SNPs provided in Table 1 and/or Table 2. A protein comprises an amino acid sequence when the amino acid sequence is at least part of the final amino acid sequence of the protein. In such a fashion, the protein may contain only the variant amino acid sequence or have additional amino acid residues, such as a contiguous encoded sequence that is naturally associated with it or heterologous amino acid residues. Such a protein can have a few additional amino acid residues or can comprise many more additional amino acids. A brief description of how various types of these proteins can be made and isolated is provided below.

[0308] The variant proteins of the present invention can be attached to heterologous sequences to form chimeric or fusion proteins. Such chimeric and fusion proteins comprise a variant protein operatively linked to a heterologous protein having an amino acid sequence not substantially homologous to the variant protein. “Operatively linked” indicates that the coding sequences for the variant protein and the heterologous protein are ligated in-frame. The heterologous protein can be fused to the N-terminus or C-terminus of the variant protein. In another embodiment, the fusion protein is encoded by a fusion polynucleotide that is synthesized by conventional techniques including automated DNA synthesizers. Alternatively, PCR amplification of gene fragments can be carried out using anchor primers which give rise to complementary overhangs between two consecutive gene fragments which can subsequently be annealed and re-amplified to generate a chimeric gene sequence (see Ausubel et al., Current Protocols in Molecular Biology, 1992). Moreover, many expression vectors are commercially available that already encode a fusion moiety (e.g., a GST protein). A variant protein-encoding nucleic acid can be cloned into such an expression vector such that the fusion moiety is linked in-frame to the variant protein.

[0309] In many uses, the fusion protein does not affect the activity of the variant protein. The fusion protein can include, but is not limited to, enzymatic fusion proteins, for example, beta-galactosidase fusions, yeast two-hybrid GAL fusions, poly-His fusions, MYC-tagged, HI-tagged and Ig fusions. Such fusion proteins, particularly poly-His fusions, can facilitate their purification following recombinant expression. In certain host cells (e.g., mammalian host cells), expression and/or secretion of a protein can be increased by using a heterologous signal sequence. Fusion proteins are further described in, for example, Terpe, “Overview of tag protein fusions: from molecular and biochemical fundamentals to commercial systems”, Appl Microbiol Biotechnol. 2003 January; 60(5):523-33. Epub 2002 Nov. 07; Graddis et al., “Designing proteins that work using recombinant technologies”, Curr Pharm Biotechnol. 2002 December; 3(4):285-97; and Nilsson et al., “Affinity fusion strategies for detection, purification, and immobilization of recombinant proteins”, Protein Expr Purif. 1997 October; 11(1): 1-16.

[0310] The present invention also relates to further obvious variants of the variant polypeptides of the present invention, such as naturally-occurring mature forms (e.g., allelic variants), non-naturally occurring recombinantly-derived variants, and orthologs and paralogs of such proteins that share sequence homology. Such variants can readily be generated using art-known techniques in the fields of recombinant nucleic acid technology and protein biochemistry. It is understood, however, that variants exclude those known in the prior art before the present invention.

[0311] Further variants of the variant polypeptides disclosed in Table 1 can comprise an amino acid sequence that shares at least 70-80%, 80-85%, 85-90%, 91%, 92%, 93%, 94%, 95%, 96%, 97%, 98%, or 99% sequence identity with an amino acid sequence disclosed in Table 1 (or a fragment thereof) and that includes a novel amino acid residue (allele) disclosed in Table 1 (which is encoded by a novel SNP allele). Thus, an aspect of the present invention that is specifically contemplated are polypeptides that have a certain degree of sequence variation compared with the polypeptide sequences shown in Table 1, but that contain a novel amino acid residue (allele) encoded by a novel SNP allele disclosed herein. In other words, as long as a polypeptide contains a novel amino acid residue disclosed herein, other portions of the polypeptide that flank the novel amino acid residue can vary to some degree from the polypeptide sequences shown in Table 1.

[0312] Full-length pre-processed forms, as well as mature processed forms, of proteins that comprise one of the amino acid sequences disclosed herein can readily be identified as having complete sequence identity to one of the variant proteins of the present invention as well as being encoded by the same genetic locus as the variant proteins provided herein.

[0313] Orthologs of a variant peptide can readily be identified as having some degree of significant sequence homology/identity to at least a portion of a variant peptide as well as being encoded by a gene from another organism. Preferred orthologs will be isolated from non-human mammals, preferably primates, for the development of human therapeutic targets and agents. Such orthologs can be encoded by a nucleic acid sequence that hybridizes to a variant peptide-encoding nucleic acid molecule under moderate to stringent conditions depending on the degree of relatedness of the two organisms yielding the homologous proteins.

[0314] Variant proteins include, but are not limited to, proteins containing deletions, additions and substitutions in the amino acid sequence caused by the SNPs of the present invention. One class of substitutions is conserved amino acid substitutions in which a given amino acid in a polypeptide is substituted for another amino acid of like characteristics. Typical conservative substitutions are replacements, one for another, among the aliphatic amino acids Ala, Val, Leu, and Ile; interchange of the hydroxyl residues Ser and Thr; exchange of the acidic residues Asp and Glu; substitution between the amide residues Asn and Gln; exchange of the basic residues Lys and Arg; and replacements among the aromatic residues Phe and Tyr. Guidance concerning which amino acid changes are likely to be phenotypically silent are found in, for example, Bowie et al., Science 247:1306-1310 (1990).

[0315] Variant proteins can be fully functional or can lack function in one or more activities, e.g. ability to bind another molecule, ability to catalyze a substrate, ability to mediate signaling, etc. Fully functional variants typically contain only conservative variations or variations in non-critical residues or in non-critical regions. Functional variants can also contain substitution of similar amino acids that result in no change or an insignificant change in function. Alternatively, such substitutions may positively or negatively affect function to some degree. Non-functional variants typically contain one or more non-conservative amino acid substitutions, deletions, insertions, inversions, truncations or extensions, or a substitution, insertion, inversion, or deletion of a critical residue or in a critical region.

[0316] Amino acids that are essential for function of a protein can be identified by methods known in the art, such as site-directed mutagenesis or alanine-scanning mutagenesis (Cunningham et al., Science 244:1081-1085 (1989)), particularly using the amino acid sequence and polymorphism information provided in Table 1. The latter procedure introduces single alanine mutations at every residue in the molecule. The resulting mutant molecules are then tested for biological activity such as enzyme activity or in assays such as an in vitro proliferative activity. Sites that are critical for binding partner/substrate binding can also be determined by structural analysis such as crystallization, nuclear magnetic resonance or photoaffinity labeling (Smith et al., J. Mol. Biol. 224:899-904 (1992); de Vos et al. Science 255:306-312 (1992)).

[0317] Polypeptides can contain amino acids other than the 20 amino acids commonly referred to as the 20 naturally occurring amino acids. Further, many amino acids, including the terminal amino acids, may be modified by natural processes, such as processing and other post-translational modifications, or by chemical modification techniques well known in the art. Accordingly, the variant proteins of the present invention also encompass derivatives or analogs in which a substituted amino acid residue is not one encoded by the genetic code, in which a substituent group is included, in which the mature polypeptide is fused with another compound, such as a compound to increase the half-life of the polypeptide (e.g., polyethylene glycol), or in which additional amino acids are fused to the mature polypeptide, such as a leader or secretory sequence or a sequence for purification of the mature polypeptide or a pro-protein sequence.

[0318] Known protein modifications include, but are not limited to, acetylation, acylation, ADP-ribosylation, amidation, covalent attachment of flavin, covalent attachment of a heme moiety, covalent attachment of a nucleotide or nucleotide derivative, covalent attachment of a lipid or lipid derivative, covalent attachment of phosphotidylinositol, cross-linking, cyclization, disulfide bond formation, demethylation, formation of covalent crosslinks, formation of cystine, formation of pyroglutamate, formylation, gamma carboxylation, glycosylation, GPI anchor formation, hydroxylation, iodination, methylation, myristoylation, oxidation, proteolytic processing, phosphorylation, prenylation, racemization, selenoylation, sulfation, transfer-RNA mediated addition of amino acids to proteins such as arginylation, and ubiquitination.

[0319] Such protein modifications are well known to those of skill in the art and have been described in great detail in the scientific literature. Several particularly common modifications, glycosylation, lipid attachment, sulfation, gamma-carboxylation of glutamic acid residues, hydroxylation and ADP-ribosylation, for instance, are described in most basic texts, such as Proteins—Structure and Molecular Properties, 2nd Ed., T. E. Creighton, W. H. Freeman and Company, New York (1993); Wold, F., Posttranslational Covalent Modification of proteins, B. C. Johnson, Ed., Academic Press, New York 1-12 (1983); Seifter et al., Meth. Enzymol. 182: 626-646 (1990); and Rattan et al., Ann. N.Y. Acad. Sci. 663:48-62 (1992).

[0320] The present invention further provides fragments of the variant proteins in which the fragments contain one or more amino acid sequence variations (e.g., substitutions, or truncations or extensions due to creation or destruction of a stop codon) encoded by one or more SNPs disclosed herein. The fragments to which the invention pertains, however, are not to be construed as encompassing fragments that have been disclosed in the prior art before the present invention.

[0321] As used herein, a fragment may comprise at least about 4, 8, 10, 12, 14, 16, 18, 20, 25, 30, 50, 100 (or any other number in-between) or more contiguous amino acid residues from a variant protein, wherein at least one amino acid residue is affected by a SNP of the present invention, e.g., a variant amino acid residue encoded by a nonsynonymous nucleotide substitution at a cSNP position provided by the present invention. The variant amino acid encoded by a cSNP may occupy any residue position along the sequence of the fragment. Such fragments can be chosen based on the ability to retain one or more of the biological activities of the variant protein or the ability to perform a function, e.g., act as an immunogen. Particularly important fragments are biologically active fragments. Such fragments will typically comprise a domain or motif of a variant protein of the present invention, e.g., active site, transmembrane domain, or ligand/substrate binding domain. Other fragments include, but are not limited to, domain or motif-containing fragments, soluble peptide fragments, and fragments containing immunogenic structures. Predicted domains and functional sites are readily identifiable by computer programs well known to those of skill in the art (e.g., PROSITE analysis) (Current Protocols in Protein Science, John Wiley & Sons, N.Y. (2002)).

[0322] Uses of Variant Proteins

[0323] The variant proteins of the present invention can be used in a variety of ways, including but not limited to, in assays to determine the biological activity of a variant protein, such as in a panel of multiple proteins for high-throughput screening; to raise antibodies or to elicit another type of immune response; as a reagent (including the labeled reagent) in assays designed to quantitatively determine levels of the variant protein (or its binding partner) in biological fluids; as a marker for cells or tissues in which it is preferentially expressed (either constitutively or at a particular stage of tissue differentiation or development or in a disease state); as a target for screening for a therapeutic agent; and as a direct therapeutic agent to be administered into a human subject. Any of the variant proteins disclosed herein may be developed into reagent grade or kit format for commercialization as research products. Methods for performing the uses listed above are well known to those skilled in the art (see, e.g., Molecular Cloning: A Laboratory Manual, Cold Spring Harbor Laboratory Press, Sambrook and Russell, 2000, and Methods in Enzymology: Guide to Molecular Cloning Techniques, Academic Press, Berger, S. L. and A. R. Kimmel eds., 1987).

[0324] In a specific embodiment of the invention, the methods of the present invention include detection of one or more variant proteins disclosed herein. Variant proteins are disclosed in Table 1 and in the Sequence Listing as SEQ ID NOS: 581-1160. Detection of such proteins can be accomplished using, for example, antibodies, small molecule compounds, aptamers, ligands/substrates, other proteins or protein fragments, or other protein-binding agents. Preferably, protein detection agents are specific for a variant protein of the present invention and can therefore discriminate between a variant protein of the present invention and the wild-type protein or another variant form. This can generally be accomplished by, for example, selecting or designing detection agents that bind to the region of a protein that differs between the variant and wild-type protein, such as a region of a protein that contains one or more amino acid substitutions that is/are encoded by a non-synonymous cSNP of the present invention, or a region of a protein that follows a nonsense mutation-type SNP that creates a stop codon thereby leading to a shorter polypeptide, or a region of a protein that follows a read-through mutation-type SNP that destroys a stop codon thereby leading to a longer polypeptide in which a portion of the polypeptide is present in one version of the polypeptide but not the other.

[0325] In another specific aspect of the invention, the variant proteins of the present invention are used as targets for evaluating an individual's predisposition to developing a stroke, for treating and/or preventing stroke, for predicting an individuals response to therapeutic treatment of stroke, etc. Accordingly, the invention provides methods for detecting the presence of, or levels of, one or more variant proteins of the present invention in a cell, tissue, or organism. Such methods typically involve contacting a test sample with an agent (e.g., an antibody, small molecule compound, or peptide) capable of interacting with the variant protein such that specific binding of the agent to the variant protein can be detected. Such an assay can be provided in a single detection format or a multi-detection format such as an array, for example, an antibody or aptamer array (arrays for protein detection may also be referred to as “protein chips”). The variant protein of interest can be isolated from a test sample and assayed for the presence of a variant amino acid sequence encoded by one or more SNPs disclosed by the present invention. The SNPs may cause changes to the protein and the corresponding protein function/activity, such as through non-synonymous substitutions in protein coding regions that can lead to amino acid substitutions, deletions, insertions, and/or rearrangements; formation or destruction of stop codons; or alteration of control elements such as promoters. SNPs may also cause inappropriate post-translational modifications.

[0326] One preferred agent for detecting a variant protein in a sample is an antibody capable of selectively binding to a variant form of the protein (antibodies are described in greater detail in the next section). Such samples include, for example, tissues, cells, and biological fluids isolated from a subject, as well as tissues, cells and fluids present within a subject.

[0327] In vitro methods for detection of the variant proteins associated with stroke and/or therapeutic response that are disclosed herein and fragments thereof include, but are not limited to, enzyme linked immunosorbent assays (ELISAs), radioimmunoassays (RIA), Western blots, immunoprecipitations, immunofluorescence, and protein arrays/chips (e.g., arrays of antibodies or aptamers). For further information regarding immunoassays and related protein detection methods, see Current Protocols in Immunology, John Wiley & Sons, N.Y., and Hage, “Immunoassays”, Anal Chem. 1999 Jun. 15; 71(12):294R-304R.

[0328] Additional analytic methods of detecting amino acid variants include, but are not limited to, altered electrophoretic mobility, altered tryptic peptide digest, altered protein activity in cell-based or cell-free assay, alteration in ligand or antibody-binding pattern, altered isoelectric point, and direct amino acid sequencing.

[0329] Alternatively, variant proteins can be detected in vivo in a subject by introducing into the subject a labeled antibody (or other type of detection reagent) specific for a variant protein. For example, the antibody can be labeled with a radioactive marker whose presence and location in a subject can be detected by standard imaging techniques.

[0330] Other uses of the variant peptides of the present invention are based on the class or action of the protein. For example, proteins isolated from humans and their mammalian orthologs serve as targets for identifying agents (e.g., small molecule drugs or antibodies) for use in therapeutic applications, particularly for modulating a biological or pathological response in a cell or tissue that expresses the protein. Pharmaceutical agents can be developed that modulate protein activity.

[0331] As an alternative to modulating gene expression, therapeutic compounds can be developed that modulate protein function. For example, many SNPs disclosed herein affect the amino acid sequence of the encoded protein (e.g., non-synonymous cSNPs and nonsense mutation-type SNPs). Such alterations in the encoded amino acid sequence may affect protein function, particularly if such amino acid sequence variations occur in functional protein domains, such as catalytic domains, ATP-binding domains, or ligand/substrate binding domains. It is well established in the art that variant proteins having amino acid sequence variations in functional domains can cause or influence pathological conditions. In such instances, compounds (e.g., small molecule drugs or antibodies) can be developed that target the variant protein and modulate (e.g., up- or down-regulate) protein function/activity.

[0332] The therapeutic methods of the present invention further include methods that target one or more variant proteins of the present invention. Variant proteins can be targeted using, for example, small molecule compounds, antibodies, aptamers, ligands/substrates, other proteins, or other protein-binding agents. Additionally, the skilled artisan will recognize that the novel protein variants (and polymorphic nucleic acid molecules) disclosed in Table 1 may themselves be directly used as therapeutic agents by acting as competitive inhibitors of corresponding art-known proteins (or nucleic acid molecules such as mRNA molecules).

[0333] The variant proteins of the present invention are particularly useful in drug screening assays, in cell-based or cell-free systems. Cell-based systems can utilize cells that naturally express the protein, a biopsy specimen, or cell cultures. In one embodiment, cell-based assays involve recombinant host cells expressing the variant protein. Cell-free assays can be used to detect the ability of a compound to directly bind to a variant protein or to the corresponding SNP-containing nucleic acid fragment that encodes the variant protein.

[0334] A variant protein of the present invention, as well as appropriate fragments thereof, can be used in high-throughput screening assays to test candidate compounds for the ability to bind and/or modulate the activity of the variant protein. These candidate compounds can be further screened against a protein having normal function (e.g., a wild-type/non-variant protein) to further determine the effect of the compound on the protein activity. Furthermore, these compounds can be tested in animal or invertebrate systems to determine in vivo activity/effectiveness. Compounds can be identified that activate (agonists) or inactivate (antagonists) the variant protein, and different compounds can be identified that cause various degrees of activation or inactivation of the variant protein.

[0335] Further, the variant proteins can be used to screen a compound for the ability to stimulate or inhibit interaction between the variant protein and a target molecule that normally interacts with the protein. The target can be a ligand, a substrate or a binding partner that the protein normally interacts with (for example, epinephrine or norepinephrine). Such assays typically include the steps of combining the variant protein with a candidate compound under conditions that allow the variant protein, or fragment thereof, to interact with the target molecule, and to detect the formation of a complex between the protein and the target or to detect the biochemical consequence of the interaction with the variant protein and the target, such as any of the associated effects of signal transduction.

[0336] Candidate compounds include, for example, 1) peptides such as soluble peptides, including Ig-tailed fusion peptides and members of random peptide libraries (see, e.g., Lam et al., Nature 354:82-84 (1991); Houghten et al., Nature 354:84-86 (1991)) and combinatorial chemistry-derived molecular libraries made of D- and/or L-configuration amino acids; 2) phosphopeptides (e.g., members of random and partially degenerate, directed phosphopeptide libraries, see, e.g., Songyang et al., Cell 72:767-778 (1993)); 3) antibodies (e.g., polyclonal, monoclonal, humanized, anti-idiotypic, chimeric, and single chain antibodies as well as Fab, F(ab′)₂, Fab expression library fragments, and epitope-binding fragments of antibodies); and 4) small organic and inorganic molecules (e.g., molecules obtained from combinatorial and natural product libraries).

[0337] One candidate compound is a soluble fragment of the variant protein that competes for ligand binding. Other candidate compounds include mutant proteins or appropriate fragments containing mutations that affect variant protein function and thus compete for ligand. Accordingly, a fragment that competes for ligand, for example with a higher affinity, or a fragment that binds ligand but does not allow release, is encompassed by the invention.

[0338] The invention further includes other end point assays to identify compounds that modulate (stimulate or inhibit) variant protein activity. The assays typically involve an assay of events in the signal transduction pathway that indicate protein activity. Thus, the expression of genes that are up or down-regulated in response to the variant protein dependent signal cascade can be assayed. In one embodiment, the regulatory region of such genes can be operably linked to a marker that is easily detectable, such as luciferase. Alternatively, phosphorylation of the variant protein, or a variant protein target, could also be measured. Any of the biological or biochemical functions mediated by the variant protein can be used as an endpoint assay. These include all of the biochemical or biological events described herein, in the references cited herein, incorporated by reference for these endpoint assay targets, and other functions known to those of ordinary skill in the art.

[0339] Binding and/or activating compounds can also be screened by using chimeric variant proteins in which an amino terminal extracellular domain or parts thereof, an entire transmembrane domain or subregions, and/or the carboxyl terminal intracellular domain or parts thereof, can be replaced by heterologous domains or subregions. For example, a substrate-binding region can be used that interacts with a different substrate than that which is normally recognized by a variant protein. Accordingly, a different set of signal transduction components is available as an end-point assay for activation. This allows for assays to be performed in other than the specific host cell from which the variant protein is derived.

[0340] The variant proteins are also useful in competition binding assays in methods designed to discover compounds that interact with the variant protein. Thus, a compound can be exposed to a variant protein under conditions that allow the compound to bind or to otherwise interact with the variant protein. A binding partner, such as ligand, that normally interacts with the variant protein is also added to the mixture. If the test compound interacts with the variant protein or its binding partner, it decreases the amount of complex formed or activity from the variant protein. This type of assay is particularly useful in screening for compounds that interact with specific regions of the variant protein (Hodgson, Bio/technology, 1992, September 10(9), 973-80).

[0341] To perform cell-free drug screening assays, it is sometimes desirable to immobilize either the variant protein or a fragment thereof, or its target molecule, to facilitate separation of complexes from uncomplexed forms of one or both of the proteins, as well as to accommodate automation of the assay. Any method for immobilizing proteins on matrices can be used in drug screening assays. In one embodiment, a fusion protein containing an added domain allows the protein to be bound to a matrix. For example, glutathione-S-transferase/¹²⁵I fusion proteins can be adsorbed onto glutathione sepharose beads (Sigma Chemical, St. Louis, Mo.) or glutathione derivatized microtitre plates, which are then combined with the cell lysates (e.g., ³⁵S-labeled) and a candidate compound, such as a drug candidate, and the mixture incubated under conditions conducive to complex formation (e.g., at physiological conditions for salt and pH). Following incubation, the beads can be washed to remove any unbound label, and the matrix immobilized and radiolabel determined directly, or in the supernatant after the complexes are dissociated. Alternatively, the complexes can be dissociated from the matrix, separated by SDS-PAGE, and the level of bound material found in the bead fraction quantitated from the gel using standard electrophoretic techniques.

[0342] Either the variant protein or its target molecule can be immobilized utilizing conjugation of biotin and streptavidin. Alternatively, antibodies reactive with the variant protein but which do not interfere with binding of the variant protein to its target molecule can be derivatized to the wells of the plate, and the variant protein trapped in the wells by antibody conjugation. Preparations of the target molecule and a candidate compound are incubated in the variant protein-presenting wells and the amount of complex trapped in the well can be quantitated. Methods for detecting such complexes, in addition to those described above for the GST-immobilized complexes, include immunodetection of complexes using antibodies reactive with the protein target molecule, or which are reactive with variant protein and compete with the target molecule, and enzyme-linked assays that rely on detecting an enzymatic activity associated with the target molecule.

[0343] Modulators of variant protein activity identified according to these drug screening assays can be used to treat a subject with a disorder mediated by the protein pathway, such as stroke. These methods of treatment typically include the steps of administering the modulators of protein activity in a pharmaceutical composition to a subject in need of such treatment.

[0344] The variant proteins, or fragments thereof, disclosed herein can themselves be directly used to treat a disorder characterized by an absence of, inappropriate, or unwanted expression or activity of the variant protein. Accordingly, methods for treatment include the use of a variant protein disclosed herein or fragments thereof.

[0345] In yet another aspect of the invention, variant proteins can be used as “bait proteins” in a two-hybrid assay or three-hybrid assay (see, e.g., U.S. Pat. No. 5,283,317; Zervos et al. (1993) Cell 72:223-232; Madura et al. (1993) J. Biol. Chem. 268:12046-12054; Bartel et al. (1993) Biotechniques 14:920-924; Iwabuchi et al. (1993) Oncogene 8:1693-1696; and Brent WO94/10300) to identify other proteins that bind to or interact with the variant protein and are involved in variant protein activity. Such variant protein-binding proteins are also likely to be involved in the propagation of signals by the variant proteins or variant protein targets as, for example, elements of a protein-mediated signaling pathway. Alternatively, such variant protein-binding proteins are inhibitors of the variant protein.

[0346] The two-hybrid system is based on the modular nature of most transcription factors, which typically consist of separable DNA-binding and activation domains. Briefly, the assay typically utilizes two different DNA constructs. In one construct, the gene that codes for a variant protein is fused to a gene encoding the DNA binding domain of a known transcription factor (e.g., GAL-4). In the other construct, a DNA sequence, from a library of DNA sequences, that encodes an unidentified protein (“prey” or “sample”) is fused to a gene that codes for the activation domain of the known transcription factor. If the “bait” and the “prey” proteins are able to interact, in vivo, forming a variant protein-dependent complex, the DNA-binding and activation domains of the transcription factor are brought into close proximity. This proximity allows transcription of a reporter gene (e.g., LacZ) that is operably linked to a transcriptional regulatory site responsive to the transcription factor. Expression of the reporter gene can be detected, and cell colonies containing the functional transcription factor can be isolated and used to obtain the cloned gene that encodes the protein that interacts with the variant protein.

[0347] Antibodies Directed to Variant Proteins

[0348] The present invention also provides antibodies that selectively bind to the variant proteins disclosed herein and fragments thereof. Such antibodies may be used to quantitatively or qualitatively detect the variant proteins of the present invention. As used herein, an antibody selectively binds a target variant protein when it binds the variant protein and does not significantly bind to non-variant proteins, i.e., the antibody does not significantly bind to normal, wild-type, or art-known proteins that do not contain a variant amino acid sequence due to one or more SNPs of the present invention (variant amino acid sequences may be due to, for example, nonsynonymous cSNPs, nonsense SNPs that create a stop codon, thereby causing a truncation of a polypeptide or SNPs that cause read-through mutations resulting in an extension of a polypeptide).

[0349] As used herein, an antibody is defined in terms consistent with that recognized in the art: they are multi-subunit proteins produced by an organism in response to an antigen challenge. The antibodies of the present invention include both monoclonal antibodies and polyclonal antibodies, as well as antigen-reactive proteolytic fragments of such antibodies, such as Fab, F(ab)′₂, and Fv fragments. In addition, an antibody of the present invention further includes any of a variety of engineered antigen-binding molecules such as a chimeric antibody (U.S. Pat. Nos. 4,816,567 and 4,816,397; Morrison et al., Proc. Natl. Acad. Sci. USA, 81:6851, 1984; Neuberger et al., Nature 312:604, 1984), a humanized antibody (U.S. Pat. Nos. 5,693,762; 5,585,089; and 5,565,332), a single-chain Fv (U.S. Pat. No. 4,946,778; Ward et al., Nature 334:544, 1989), a bispecific antibody with two binding specificities (Segal et al., J. Immunol. Methods 248:1, 2001; Carter, J. Immunol. Methods 248:7, 2001), a diabody, a triabody, and a tetrabody (Todorovska et al., J. Immunol. Methods, 248:47, 2001), as well as a Fab conjugate (dimer or trimer), and a minibody.

[0350] Many methods are known in the art for generating and/or identifying antibodies to a given target antigen (Harlow, Antibodies, Cold Spring Harbor Press, (1989)). In general, an isolated peptide (e.g., a variant protein of the present invention) is used as an immunogen and is administered to a mammalian organism, such as a rat, rabbit, hamster or mouse. Either a full-length protein, an antigenic peptide fragment (e.g., a peptide fragment containing a region that varies between a variant protein and a corresponding wild-type protein), or a fusion protein can be used. A protein used as an immunogen may be naturally-occurring, synthetic or recombinantly produced, and may be administered in combination with an adjuvant, including but not limited to, Freund's (complete and incomplete), mineral gels such as aluminum hydroxide, surface active substance such as lysolecithin, pluronic polyols, polyanions, peptides, oil emulsions, keyhole limpet hemocyanin, dinitrophenol, and the like.

[0351] Monoclonal antibodies can be produced by hybridoma technology (Kohler and Milstein, Nature, 256:495, 1975), which immortalizes cells secreting a specific monoclonal antibody. The immortalized cell lines can be created in vitro by fusing two different cell types, typically lymphocytes, and tumor cells. The hybridoma cells may be cultivated in vitro or in vivo. Additionally, fully human antibodies can be generated by transgenic animals (He et al., J. Immunol., 169:595, 2002). Fd phage and Fd phagemid technologies may be used to generate and select recombinant antibodies in vitro (Hoogenboom and Chames, Immunol. Today 21:371, 2000; Liu et al., J. Mol. Biol. 315:1063, 2002). The complementarity-determining regions of an antibody can be identified, and synthetic peptides corresponding to such regions may be used to mediate antigen binding (U.S. Pat. No. 5,637,677).

[0352] Antibodies are preferably prepared against regions or discrete fragments of a variant protein containing a variant amino acid sequence as compared to the corresponding wild-type protein (e.g., a region of a variant protein that includes an amino acid encoded by a nonsynonymous cSNP, a region affected by truncation caused by a nonsense SNP that creates a stop codon, or a region resulting from the destruction of a stop codon due to read-through mutation caused by a SNP). Furthermore, preferred regions will include those involved in function/activity and/or protein/binding partner interaction. Such fragments can be selected on a physical property, such as fragments corresponding to regions that are located on the surface of the protein, e.g., hydrophilic regions, or can be selected based on sequence uniqueness, or based on the position of the variant amino acid residue(s) encoded by the SNPs provided by the present invention. An antigenic fragment will typically comprise at least about 8-10 contiguous amino acid residues in which at least one of the amino acid residues is an amino acid affected by a SNP disclosed herein. The antigenic peptide can comprise, however, at least 12, 14, 16, 20, 25, 50, 100 (or any other number in-between) or more amino acid residues, provided that at least one amino acid is affected by a SNP disclosed herein.

[0353] Detection of an antibody of the present invention can be facilitated by coupling (i.e., physically linking) the antibody or an antigen-reactive fragment thereof to a detectable substance. Detectable substances include, but are not limited to, various enzymes, prosthetic groups, fluorescent materials, luminescent materials, bioluminescent materials, and radioactive materials. Examples of suitable enzymes include horseradish peroxidase, alkaline phosphatase, β-galactosidase, or acetylcholinesterase; examples of suitable prosthetic group complexes include streptavidin/biotin and avidin/biotin; examples of suitable fluorescent materials include umbelliferone, fluorescein, fluorescein isothiocyanate, rhodamine, dichlorotriazinylamine fluorescein, dansyl chloride or phycoerythrin; an example of a luminescent material includes luminol; examples of bioluminescent materials include luciferase, luciferin, and aequorin, and examples of suitable radioactive material include ¹²⁵I, ¹³¹I, ³⁵S or ³H.

[0354] Antibodies, particularly the use of antibodies as therapeutic agents, are reviewed in: Morgan, “Antibody therapy for Alzheimer's disease”, Expert Rev Vaccines. 2003 February; 2(1):53-9; Ross et al., “Anticancer antibodies”, Am J Clin Pathol. 2003 April; 119(4):472-85; Goldenberg, “Advancing role of radiolabeled antibodies in the therapy of cancer”, Cancer Immunol Immunother. 2003 May; 52(5):281-96. Epub 2003 Mar. 11; Ross et al., “Antibody-based therapeutics in oncology”, Expert Rev Anticancer Ther. 2003 February; 3(1):107-21; Cao et al., “Bispecific antibody conjugates in therapeutics”, Adv Drug Deliv Rev. 2003 Feb. 10; 55(2):171-97; von Mehren et al., “Monoclonal antibody therapy for cancer”, Annu Rev Med. 2003; 54:343-69. Epub 2001 Dec. 03; Hudson et al., “Engineered antibodies”, Nat Med. 2003 January; 9(1):129-34; Brekke et al., “Therapeutic antibodies for human diseases at the dawn of the twenty-first century”, Nat Rev Drug Discov. 2003 January; 2(1):52-62 (Erratum in: Nat Rev Drug Discov. 2003 March; 2(3):240); Houdebine, “Antibody manufacture in transgenic animals and comparisons with other systems”, Curr Opin Biotechnol. 2002 December; 13(6):625-9; Andreakos et al., “Monoclonal antibodies in immune and inflammatory diseases”, Curr Opin Biotechnol. 2002 December; 13(6):615-20; Kellermann et al., “Antibody discovery: the use of transgenic mice to generate human monoclonal antibodies for therapeutics”, Curr Opin Biotechnol. 2002 December; 13(6):593-7; Pini et al., “Phage display and colony filter screening for high-throughput selection of antibody libraries”, Comb Chem High Throughput Screen. 2002 November; 5(7):503-10; Batra et al., “Pharmacokinetics and biodistribution of genetically engineered antibodies”, Curr Opin Biotechnol. 2002 December; 13(6):603-8; and Tangri et al., “Rationally engineered proteins or antibodies with absent or reduced immunogenicity”, Curr Med Chem. 2002 December; 9(24):2191-9.

[0355] Uses of Antibodies

[0356] Antibodies can be used to isolate the variant proteins of the present invention from a natural cell source or from recombinant host cells by standard techniques, such as affinity chromatography or immunoprecipitation. In addition, antibodies are useful for detecting the presence of a variant protein of the present invention in cells or tissues to determine the pattern of expression of the variant protein among various tissues in an organism and over the course of normal development or disease progression. Further, antibodies can be used to detect variant protein in situ, in vitro, in a bodily fluid, or in a cell lysate or supernatant in order to evaluate the amount and pattern of expression. Also, antibodies can be used to assess abnormal tissue distribution, abnormal expression during development, or expression in an abnormal condition, such as in stroke or during therapeutic treatment. Additionally, antibody detection of circulating fragments of the full-length variant protein can be used to identify turnover.

[0357] Antibodies to the variant proteins of the present invention are also useful in pharmacogenomic analysis. Thus, antibodies against variant proteins encoded by alternative SNP alleles can be used to identify individuals that require modified treatment modalities.

[0358] Further, antibodies can be used to assess expression of the variant protein in disease states such as in active stages of the disease or in an individual with a predisposition to a disease related to the protein's function, such as stroke, or during the course of a treatment regime. Antibodies specific for a variant protein encoded by a SNP-containing nucleic acid molecule of the present invention can be used to assay for the presence of the variant protein, such as to predict and individual's response to statin treatment or predisposition/susceptibility to an acute event such as stroke, as indicated by the presence of the variant protein.

[0359] Antibodies are also useful as diagnostic tools for evaluating the variant proteins in conjunction with analysis by electrophoretic mobility, isoelectric point, tryptic peptide digest, and other physical assays well known in the art.

[0360] Antibodies are also useful for tissue typing. Thus, where a specific variant protein has been correlated with expression in a specific tissue, antibodies that are specific for this protein can be used to identify a tissue type.

[0361] Antibodies can also be used to assess aberrant subcellular localization of a variant protein in cells in various tissues. The diagnostic uses can be applied, not only in genetic testing, but also in monitoring a treatment modality. Accordingly, where treatment is ultimately aimed at correcting the expression level or the presence of variant protein or aberrant tissue distribution or developmental expression of a variant protein, antibodies directed against the variant protein or relevant fragments can be used to monitor therapeutic efficacy.

[0362] The antibodies are also useful for inhibiting variant protein function, for example, by blocking the binding of a variant protein to a binding partner. These uses can also be applied in a therapeutic context in which treatment involves inhibiting a variant protein's function. An antibody can be used, for example, to block or competitively inhibit binding, thus modulating (agonizing or antagonizing) the activity of a variant protein. Antibodies can be prepared against specific variant protein fragments containing sites required for function or against an intact variant protein that is associated with a cell or cell membrane. For in vivo administration, an antibody may be linked with an additional therapeutic payload such as a radionuclide, an enzyme, an immunogenic epitope, or a cytotoxic agent. Suitable cytotoxic agents include, but are not limited to, bacterial toxin such as diphtheria, and plant toxin such as ricin. The in vivo half-life of an antibody or a fragment thereof may be lengthened by pegylation through conjugation to polyethylene glycol (Leong et al., Cytokine 16:106, 2001).

[0363] The invention also encompasses kits for using antibodies, such as kits for detecting the presence of a variant protein in a test sample. An exemplary kit can comprise antibodies such as a labeled or labelable antibody and a compound or agent for detecting variant proteins in a biological sample; means for determining the amount, or presence/absence of variant protein in the sample; means for comparing the amount of variant protein in the sample with a standard; and instructions for use.

[0364] Vectors and Host Cells

[0365] The present invention also provides vectors containing the SNP-containing nucleic acid molecules described herein. The term “vector” refers to a vehicle, preferably a nucleic acid molecule, which can transport a SNP-containing nucleic acid molecule. When the vector is a nucleic acid molecule, the SNP-containing nucleic acid molecule can be covalently linked to the vector nucleic acid. Such vectors include, but are not limited to, a plasmid, single or double stranded phage, a single or double stranded RNA or DNA viral vector, or artificial chromosome, such as a BAC, PAC, YAC, or MAC.

[0366] A vector can be maintained in a host cell as an extrachromosomal element where it replicates and produces additional copies of the SNP-containing nucleic acid molecules. Alternatively, the vector may integrate into the host cell genome and produce additional copies of the SNP-containing nucleic acid molecules when the host cell replicates.

[0367] The invention provides vectors for the maintenance (cloning vectors) or vectors for expression (expression vectors) of the SNP-containing nucleic acid molecules. The vectors can function in prokaryotic or eukaryotic cells or in both (shuttle vectors).

[0368] Expression vectors typically contain cis-acting regulatory regions that are operably linked in the vector to the SNP-containing nucleic acid molecules such that transcription of the SNP-containing nucleic acid molecules is allowed in a host cell. The SNP-containing nucleic acid molecules can also be introduced into the host cell with a separate nucleic acid molecule capable of affecting transcription. Thus, the second nucleic acid molecule may provide a trans-acting factor interacting with the cis-regulatory control region to allow transcription of the SNP-containing nucleic acid molecules from the vector. Alternatively, a trans-acting factor may be supplied by the host cell. Finally, a trans-acting factor can be produced from the vector itself. It is understood, however, that in some embodiments, transcription and/or translation of the nucleic acid molecules can occur in a cell-free system.

[0369] The regulatory sequences to which the SNP-containing nucleic acid molecules described herein can be operably linked include promoters for directing mRNA transcription. These include, but are not limited to, the left promoter from bacteriophage λ, the lac, TRP, and TAC promoters from E. coli, the early and late promoters from SV40, the CMV immediate early promoter, the adenovirus early and late promoters, and retrovirus long-terminal repeats.

[0370] In addition to control regions that promote transcription, expression vectors may also include regions that modulate transcription, such as repressor binding sites and enhancers. Examples include the SV40 enhancer, the cytomegalovirus immediate early enhancer, polyoma enhancer, adenovirus enhancers, and retrovirus LTR enhancers.

[0371] In addition to containing sites for transcription initiation and control, expression vectors can also contain sequences necessary for transcription termination and, in the transcribed region, a ribosome-binding site for translation. Other regulatory control elements for expression include initiation and termination codons as well as polyadenylation signals. A person of ordinary skill in the art would be aware of the numerous regulatory sequences that are useful in expression vectors (see, e.g., Sambrook and Russell, 2000, Molecular Cloning: A Laboratory Manual, Cold Spring Harbor Laboratory Press, Cold Spring Harbor, N.Y.).

[0372] A variety of expression vectors can be used to express a SNP-containing nucleic acid molecule. Such vectors include chromosomal, episomal, and virus-derived vectors, for example, vectors derived from bacterial plasmids, from bacteriophage, from yeast episomes, from yeast chromosomal elements, including yeast artificial chromosomes, from viruses such as baculoviruses, papovaviruses such as SV40, Vaccinia viruses, adenoviruses, poxviruses, pseudorabies viruses, and retroviruses. Vectors can also be derived from combinations of these sources such as those derived from plasmid and bacteriophage genetic elements, e.g., cosmids and phagemids. Appropriate cloning and expression vectors for prokaryotic and eukaryotic hosts are described in Sambrook and Russell, 2000, Molecular Cloning: A Laboratory Manual, Cold Spring Harbor Laboratory Press, Cold Spring Harbor, N.Y.

[0373] The regulatory sequence in a vector may provide constitutive expression in one or more host cells (e.g., tissue specific expression) or may provide for inducible expression in one or more cell types such as by temperature, nutrient additive, or exogenous factor, e.g., a hormone or other ligand. A variety of vectors that provide constitutive or inducible expression of a nucleic acid sequence in prokaryotic and eukaryotic host cells are well known to those of ordinary skill in the art.

[0374] A SNP-containing nucleic acid molecule can be inserted into the vector by methodology well-known in the art. Generally, the SNP-containing nucleic acid molecule that will ultimately be expressed is joined to an expression vector by cleaving the SNP-containing nucleic acid molecule and the expression vector with one or more restriction enzymes and then ligating the fragments together. Procedures for restriction enzyme digestion and ligation are well known to those of ordinary skill in the art.

[0375] The vector containing the appropriate nucleic acid molecule can be introduced into an appropriate host cell for propagation or expression using well-known techniques. Bacterial host cells include, but are not limited to, E. coli, Streptomyces, and Salmonella typhimurium. Eukaryotic host cells include, but are not limited to, yeast, insect cells such as Drosophila, animal cells such as COS and CHO cells, and plant cells.

[0376] As described herein, it may be desirable to express the variant peptide as a fusion protein. Accordingly, the invention provides fusion vectors that allow for the production of the variant peptides. Fusion vectors can, for example, increase the expression of a recombinant protein, increase the solubility of the recombinant protein, and aid in the purification of the protein by acting, for example, as a ligand for affinity purification. A proteolytic cleavage site may be introduced at the junction of the fusion moiety so that the desired variant peptide can ultimately be separated from the fusion moiety. Proteolytic enzymes suitable for such use include, but are not limited to, factor Xa, thrombin, and enterokinase. Typical fusion expression vectors include pGEX (Smith et al., Gene 67:31-40 (1988)), pMAL (New England Biolabs, Beverly, Mass.) and pRIT5 (Pharmacia, Piscataway, N.J.) which fuse glutathione S-transferase (GST), maltose E binding protein, or protein A, respectively, to the target recombinant protein. Examples of suitable inducible non-fusion E. coli expression vectors include pTrc (Amann et al., Gene 69:301-315 (1988)) and pET 11d (Studier et al., Gene Expression Technology: Methods in Enzymology 185:60-89 (1990)).

[0377] Recombinant protein expression can be maximized in a bacterial host by providing a genetic background wherein the host cell has an impaired capacity to proteolytically cleave the recombinant protein (Gottesman, S., Gene Expression Technology: Methods in Enzymology 185, Academic Press, San Diego, Calif. (1990) 119-128). Alternatively, the sequence of the SNP-containing nucleic acid molecule of interest can be altered to provide preferential codon usage for a specific host cell, for example, E. coli (Wada et al., Nucleic Acids Res. 20:2111-2118 (1992)).

[0378] The SNP-containing nucleic acid molecules can also be expressed by expression vectors that are operative in yeast. Examples of vectors for expression in yeast (e.g., S. cerevisiae) include pYepSec1 (Baldari, et al., EMBO J. 6:229-234 (1987)), pMFa (Kurjan et al., Cell 30:933-943 (1982)), pJRY88 (Schultz et al., Gene 54:113-123 (1987)), and pYES2 (Invitrogen Corporation, San Diego, Calif.).

[0379] The SNP-containing nucleic acid molecules can also be expressed in insect cells using, for example, baculovirus expression vectors. Baculovirus vectors available for expression of proteins in cultured insect cells (e.g., Sf 9 cells) include the pAc series (Smith et al., Mol. Cell Biol. 3:2156-2165 (1983)) and the pVL series (Lucklow et al., Virology 170:31-39 (1989)).

[0380] In certain embodiments of the invention, the SNP-containing nucleic acid molecules described herein are expressed in mammalian cells using mammalian expression vectors. Examples of mammalian expression vectors include pCDM8 (Seed, B. Nature 329:840 (1987)) and pMT2PC (Kaufman et al., EMBO J. 6:187-195 (1987)).

[0381] The invention also encompasses vectors in which the SNP-containing nucleic acid molecules described herein are cloned into the vector in reverse orientation, but operably linked to a regulatory sequence that permits transcription of antisense RNA. Thus, an antisense transcript can be produced to the SNP-containing nucleic acid sequences described herein, including both coding and non-coding regions. Expression of this antisense RNA is subject to each of the parameters described above in relation to expression of the sense RNA (regulatory sequences, constitutive or inducible expression, tissue-specific expression).

[0382] The invention also relates to recombinant host cells containing the vectors described herein. Host cells therefore include, for example, prokaryotic cells, lower eukaryotic cells such as yeast, other eukaryotic cells such as insect cells, and higher eukaryotic cells such as mammalian cells.

[0383] The recombinant host cells can be prepared by introducing the vector constructs described herein into the cells by techniques readily available to persons of ordinary skill in the art. These include, but are not limited to, calcium phosphate transfection, DEAE-dextran-mediated transfection, cationic lipid-mediated transfection, electroporation, transduction, infection, lipofection, and other techniques such as those described in Sambrook and Russell, 2000, Molecular Cloning: A Laboratory Manual, Cold Spring Harbor Laboratory, Cold Spring Harbor Laboratory Press, Cold Spring Harbor, N.Y.).

[0384] Host cells can contain more than one vector. Thus, different SNP-containing nucleotide sequences can be introduced in different vectors into the same cell. Similarly, the SNP-containing nucleic acid molecules can be introduced either alone or with other nucleic acid molecules that are not related to the SNP-containing nucleic acid molecules, such as those providing trans-acting factors for expression vectors. When more than one vector is introduced into a cell, the vectors can be introduced independently, co-introduced, or joined to the nucleic acid molecule vector.

[0385] In the case of bacteriophage and viral vectors, these can be introduced into cells as packaged or encapsulated virus by standard procedures for infection and transduction. Viral vectors can be replication-competent or replication-defective. In the case in which viral replication is defective, replication can occur in host cells that provide functions that complement the defects.

[0386] Vectors generally include selectable markers that enable the selection of the subpopulation of cells that contain the recombinant vector constructs. The marker can be inserted in the same vector that contains the SNP-containing nucleic acid molecules described herein or may be in a separate vector. Markers include, for example, tetracycline or ampicillin-resistance genes for prokaryotic host cells, and dihydrofolate reductase or neomycin resistance genes for eukaryotic host cells. However, any marker that provides selection for a phenotypic trait can be effective.

[0387] While the mature variant proteins can be produced in bacteria, yeast, mammalian cells, and other cells under the control of the appropriate regulatory sequences, cell-free transcription and translation systems can also be used to produce these variant proteins using RNA derived from the DNA constructs described herein.

[0388] Where secretion of the variant protein is desired, which is difficult to achieve with multi-transmembrane domain containing proteins such as G-protein-coupled receptors (GPCRs), appropriate secretion signals can be incorporated into the vector. The signal sequence can be endogenous to the peptides or heterologous to these peptides.

[0389] Where the variant protein is not secreted into the medium, the protein can be isolated from the host cell by standard disruption procedures, including freeze/thaw, sonication, mechanical disruption, use of lysing agents, and the like. The variant protein can then be recovered and purified by well-known purification methods including, for example, ammonium sulfate precipitation, acid extraction, anion or cationic exchange chromatography, phosphocellulose chromatography, hydrophobic-interaction chromatography, affinity chromatography, hydroxylapatite chromatography, lectin chromatography, or high performance liquid chromatography.

[0390] It is also understood that, depending upon the host cell in which recombinant production of the variant proteins described herein occurs, they can have various glycosylation patterns, or may be non-glycosylated, as when produced in bacteria. In addition, the variant proteins may include an initial modified methionine in some cases as a result of a host-mediated process.

[0391] For further information regarding vectors and host cells, see Current Protocols in Molecular Biology, John Wiley & Sons, N.Y.

[0392] Uses of Vectors and Host Cells, and Transgenic Animals

[0393] Recombinant host cells that express the variant proteins described herein have a variety of uses. For example, the cells are useful for producing a variant protein that can be further purified into a preparation of desired amounts of the variant protein or fragments thereof. Thus, host cells containing expression vectors are useful for variant protein production.

[0394] Host cells are also useful for conducting cell-based assays involving the variant protein or variant protein fragments, such as those described above as well as other formats known in the art. Thus, a recombinant host cell expressing a variant protein is useful for assaying compounds that stimulate or inhibit variant protein function. Such an ability of a compound to modulate variant protein function may not be apparent from assays of the compound on the native/wild-type protein, or from cell-free assays of the compound. Recombinant host cells are also useful for assaying functional alterations in the variant proteins as compared with a known function.

[0395] Genetically-engineered host cells can be further used to produce non-human transgenic animals. A transgenic animal is preferably a non-human mammal, for example, a rodent, such as a rat or mouse, in which one or more of the cells of the animal include a transgene. A transgene is exogenous DNA containing a SNP of the present invention which is integrated into the genome of a cell from which a transgenic animal develops and which remains in the genome of the mature animal in one or more of its cell types or tissues. Such animals are useful for studying the function of a variant protein in vivo, and identifying and evaluating modulators of variant protein activity. Other examples of transgenic animals include, but are not limited to, non-human primates, sheep, dogs, cows, goats, chickens, and amphibians. Transgenic non-human mammals such as cows and goats can be used to produce variant proteins which can be secreted in the animal's milk and then recovered.

[0396] A transgenic animal can be produced by introducing a SNP-containing nucleic acid molecule into the male pronuclei of a fertilized oocyte, e.g., by microinjection or retroviral infection, and allowing the oocyte to develop in a pseudopregnant female foster animal. Any nucleic acid molecules that contain one or more SNPs of the present invention can potentially be introduced as a transgene into the genome of a non-human animal.

[0397] Any of the regulatory or other sequences useful in expression vectors can form part of the transgenic sequence. This includes intronic sequences and polyadenylation signals, if not already included. A tissue-specific regulatory sequence(s) can be operably linked to the transgene to direct expression of the variant protein in particular cells or tissues.

[0398] Methods for generating transgenic animals via embryo manipulation and microinjection, particularly animals such as mice, have become conventional in the art and are described in, for example, U.S. Pat. Nos. 4,736,866 and 4,870,009, both by Leder et al., U.S. Pat. No. 4,873,191 by Wagner et al., and in Hogan, B., Manipulating the Mouse Embryo, (Cold Spring Harbor Laboratory Press, Cold Spring Harbor, N.Y., 1986). Similar methods are used for production of other transgenic animals. A transgenic founder animal can be identified based upon the presence of the transgene in its genome and/or expression of transgenic mRNA in tissues or cells of the animals. A transgenic founder animal can then be used to breed additional animals carrying the transgene. Moreover, transgenic animals carrying a transgene can further be bred to other transgenic animals carrying other transgenes. A transgenic animal also includes a non-human animal in which the entire animal or tissues in the animal have been produced using the homologously recombinant host cells described herein.

[0399] In another embodiment, transgenic non-human animals can be produced which contain selected systems that allow for regulated expression of the transgene. One example of such a system is the cre/loxP recombinase system of bacteriophage P1 (Lakso et al. PNAS 89:6232-6236 (1992)). Another example of a recombinase system is the FLP recombinase system of S. cerevisiae (O'Gorman et al. Science 251:1351-1355 (1991)). If a cre/loxP recombinase system is used to regulate expression of the transgene, animals containing transgenes encoding both the Cre recombinase and a selected protein are generally needed. Such animals can be provided through the construction of “double” transgenic animals, e.g., by mating two transgenic animals, one containing a transgene encoding a selected variant protein and the other containing a transgene encoding a recombinase.

[0400] Clones of the non-human transgenic animals described herein can also be produced according to the methods described in, for example, Wilmut, I. et al. Nature 385:810-813 (1997) and PCT International Publication Nos. WO 97/07668 and WO 97/07669. In brief, a cell (e.g., a somatic cell) from the transgenic animal can be isolated and induced to exit the growth cycle and enter Gₒ phase. The quiescent cell can then be fused, e.g., through the use of electrical pulses, to an enucleated oocyte from an animal of the same species from which the quiescent cell is isolated. The reconstructed oocyte is then cultured such that it develops to morula or blastocyst and then transferred to pseudopregnant female foster animal. The offspring born of this female foster animal will be a clone of the animal from which the cell (e.g., a somatic cell) is isolated.

[0401] Transgenic animals containing recombinant cells that express the variant proteins described herein are useful for conducting the assays described herein in an in vivo context. Accordingly, the various physiological factors that are present in vivo and that could influence ligand or substrate binding, variant protein activation, signal transduction, or other processes or interactions, may not be evident from in vitro cell-free or cell-based assays. Thus, non-human transgenic animals of the present invention may be used to assay in vivo variant protein function as well as the activities of a therapeutic agent or compound that modulates variant protein function/activity or expression. Such animals are also suitable for assessing the effects of null mutations (i.e., mutations that substantially or completely eliminate one or more variant protein functions).

[0402] For further information regarding transgenic animals, see Houdebine, “Antibody manufacture in transgenic animals and comparisons with other systems”, Curr Opin Biotechnol. 2002 December; 13(6):625-9; Petters et al., “Transgenic animals as models for human disease”, Transgenic Res. 2000; 9(4-5):347-51; discussion 345-6; Wolf et al., “Use of transgenic animals in understanding molecular mechanisms of toxicity”, J Pharm Pharmacol. 1998 June; 50(6):567-74; Echelard, “Recombinant protein production in transgenic animals”, Curr Opin Biotechnol. 1996 October; 7(5):536-40; Houdebine, “Transgenic animal bioreactors”, Transgenic Res. 2000; 9(4-5):305-20; Pirity et al., “Embryonic stem cells, creating transgenic animals”, Methods Cell Biol. 1998; 57:279-93; and Robl et al., “Artificial chromosome vectors and expression of complex proteins in transgenic animals”, Theriogenology. 2003 Jan. 1; 59(1):107-13.

[0403] Computer-Related Embodiments

[0404] The SNPs provided in the present invention may be “provided” in a variety of mediums to facilitate use thereof. As used in this section, “provided” refers to a manufacture, other than an isolated nucleic acid molecule, that contains SNP information of the present invention. Such a manufacture provides the SNP information in a form that allows a skilled artisan to examine the manufacture using means not directly applicable to examining the SNPs or a subset thereof as they exist in nature or in purified form. The SNP information that may be provided in such a form includes any of the SNP information provided by the present invention such as, for example, polymorphic nucleic acid and/or amino acid sequence information such as SEQ ID NOS:1-580, SEQ ID NOS:581-1160, SEQ ID NOS:9840-10,061, SEQ ID NOS:1161-9839, and SEQ ID NOS:10,062-55,128; information about observed SNP alleles, alternative codons, populations, allele frequencies, SNP types, and/or affected proteins; or any other information provided by the present invention in Tables 1-2 and/or the Sequence Listing.

[0405] In one application of this embodiment, the SNPs of the present invention can be recorded on a computer readable medium. As used herein, “computer readable medium” refers to any medium that can be read and accessed directly by a computer. Such media include, but are not limited to: magnetic storage media, such as floppy discs, hard disc storage medium, and magnetic tape; optical storage media such as CD-ROM; electrical storage media such as RAM and ROM; and hybrids of these categories such as magnetic/optical storage media. A skilled artisan can readily appreciate how any of the presently known computer readable media can be used to create a manufacture comprising computer readable medium having recorded thereon a nucleotide sequence of the present invention. One such medium is provided with the present application, namely, the present application contains computer readable medium (CD-R) that has nucleic acid sequences (and encoded protein sequences) containing SNPs provided/recorded thereon in ASCII text format in a Sequence Listing along with accompanying Tables that contain detailed SNP and sequence information (transcript sequences are provided as SEQ ID NOS:1-580, protein sequences are provided as SEQ ID NOS:581-1160, genomic sequences are provided as SEQ ID NOS:9840-10,061, transcript-based context sequences are provided as SEQ ID NOS:1161-9839, and genomic-based context sequences are provided as SEQ ID NOS:10,062-55,128).

[0406] As used herein, “recorded” refers to a process for storing information on computer readable medium. A skilled artisan can readily adopt any of the presently known methods for recording information on computer readable medium to generate manufactures comprising the SNP information of the present invention.

[0407] A variety of data storage structures are available to a skilled artisan for creating a computer readable medium having recorded thereon a nucleotide or amino acid sequence of the present invention. The choice of the data storage structure will generally be based on the means chosen to access the stored information. In addition, a variety of data processor programs and formats can be used to store the nucleotide/amino acid sequence information of the present invention on computer readable medium. For example, the sequence information can be represented in a word processing text file, formatted in commercially-available software such as WordPerfect and Microsoft Word, represented in the form of an ASCII file, or stored in a database application, such as OB2, Sybase, Oracle, or the like. A skilled artisan can readily adapt any number of data processor structuring formats (e.g., text file or database) in order to obtain computer readable medium having recorded thereon the SNP information of the present invention.

[0408] By providing the SNPs of the present invention in computer readable form, a skilled artisan can routinely access the SNP information for a variety of purposes. Computer software is publicly available which allows a skilled artisan to access sequence information provided in a computer readable medium. Examples of publicly available computer software include BLAST (Altschul et at, J. Mol. Biol. 215:403-410 (1990)) and BLAZE (Brutlag et at, Comp. Chem. 17:203-207 (1993)) search algorithms.

[0409] The present invention further provides systems, particularly computer-based systems, which contain the SNP information described herein. Such systems may be designed to store and/or analyze information on, for example, a large number of SNP positions, or information on SNP genotypes from a large number of individuals. The SNP information of the present invention represents a valuable information source. The SNP information of the present invention stored/analyzed in a computer-based system may be used for such computer-intensive applications as determining or analyzing SNP allele frequencies in a population, mapping disease genes, genotype-phenotype association studies, grouping SNPs into haplotypes, correlating SNP haplotypes with response to particular drugs, or for various other bioinformatic, pharmacogenomic, drug development, or human identification/forensic applications.

[0410] As used herein, “a computer-based system” refers to the hardware means, software means, and data storage means used to analyze the SNP information of the present invention. The minimum hardware means of the computer-based systems of the present invention typically comprises a central processing unit (CPU), input means, output means, and data storage means. A skilled artisan can readily appreciate that any one of the currently available computer-based systems are suitable for use in the present invention. Such a system can be changed into a system of the present invention by utilizing the SNP information provided on the CD-R, or a subset thereof, without any experimentation.

[0411] As stated above, the computer-based systems of the present invention comprise a data storage means having stored therein SNPs of the present invention and the necessary hardware means and software means for supporting and implementing a search means. As used herein, “data storage means” refers to memory which can store SNP information of the present invention, or a memory access means which can access manufactures having recorded thereon the SNP information of the present invention.

[0412] As used herein, “search means” refers to one or more programs or algorithms that are implemented on the computer-based system to identify or analyze SNPs in a target sequence based on the SNP information stored within the data storage means. Search means can be used to determine which nucleotide is present at a particular SNP position in the target sequence. As used herein, a “target sequence” can be any DNA sequence containing the SNP position(s) to be searched or queried.

[0413] As used herein, “a target structural motif,” or “target motif,” refers to any rationally selected sequence or combination of sequences containing a SNP position in which the sequence(s) is chosen based on a three-dimensional configuration that is formed upon the folding of the target motif. There are a variety of target motifs known in the art. Protein target motifs include, but are not limited to, enzymatic active sites and signal sequences. Nucleic acid target motifs include, but are not limited to, promoter sequences, hairpin structures, and inducible expression elements (protein binding sequences).

[0414] A variety of structural formats for the input and output means can be used to input and output the information in the computer-based systems of the present invention. An exemplary format for an output means is a display that depicts the presence or absence of specified nucleotides (alleles) at particular SNP positions of interest. Such presentation can provide a rapid, binary scoring system for many SNPs simultaneously.

[0415] One exemplary embodiment of a computer-based system comprising SNP information of the present invention is provided in FIG. 1. FIG. 1 provides a block diagram of a computer system 102 that can be used to implement the present invention. The computer system 102 includes a processor 106 connected to a bus 104. Also connected to the bus 104 are a main memory 108 (preferably implemented as random access memory, RAM) and a variety of secondary storage devices 110, such as a hard drive 112 and a removable medium storage device 114. The removable medium storage device 114 may represent, for example, a floppy disk drive, a CD-ROM drive, a magnetic tape drive, etc. A removable storage medium 116 (such as a floppy disk, a compact disk, a magnetic tape, etc.) containing control logic and/or data recorded therein may be inserted into the removable medium storage device 114. The computer system 102 includes appropriate software for reading the control logic and/or the data from the removable storage medium 116 once inserted in the removable medium storage device 114.

[0416] The SNP information of the present invention may be stored in a well-known manner in the main memory 108, any of the secondary storage devices 110, and/or a removable storage medium 116. Software for accessing and processing the SNP information (such as SNP scoring tools, search tools, comparing tools, etc.) preferably resides in main memory 108 during execution.

### EXAMPLES

[0417] The following examples are offered to illustrate, but not to limit, the claimed invention.

[0418] Statistical Analysis of SNP Allele Association with Stroke as a Vascular Disease

[0419] A case-control genetic study to determine the association of SNPs in the human genome with vascular diseases, particularly stroke, was carried out using genomic DNA extracted from four independently collected case-control studies. A sample set from the University of California, San Francisco (UCSF1), consisted of DNA obtained from 1,654 Caucasian patients. A subset of these patients were diagnosed with stroke and may have had other vascular diseases. All patients had varying degrees of cardiovascular disease, such as stenosis as evidenced by coronary angiography. The patients were divided into cases and controls depending on the study design (see Table 6). A second sample set, obtained from UCSF (UCSF2), were samples obtained from an additional 210 patients, all of whom were diagnosed with stroke (cases). A sample set obtained from the Cleveland Clinic (CCF1) consisted of DNA from 1,501 Caucasian patients. A subset of these patients had a history of stroke and may have had other cardiovascular diseases. All patients had either very little or severe coronary artery stenosis, also evidenced by coronary angiography. These samples were divided into cases and controls depending on the study design (see Table 6). A second sample set obtained from the Cleveland Clinic (CCF2) consisted of DNA from 1,160 Caucasian patients, with stroke or coronary artery disease. These samples were also divided into cases and controls depending on the study design (see Table 6). All samples were obtained from people between the ages of 18-75. All individuals included in each study had signed a written informed consent form. The study protocols were IRB approved.

[0420] DNA was extracted from blood samples at CCF or UCSF using conventional DNA extraction methods or commercially available kits according to the manufacturer's suggested conditions, such as the QIA-amp kit from Qiagen (Valencia, Calif.). SNP markers in the extracted DNA samples were analyzed by genotyping. While some samples were individually genotyped, the same samples were also used for pooling studies, in which DNA samples from about 50 individuals were pooled and allele frequencies were obtained using a PRISM® 7900HT Sequence Detection System (Applied Biosystems, Foster City, Calif.) by kinetic allele-specific PCR, similar to the method described by Germer et al., Genome Research 10:258-266 (2000). Alternatively, the sample genotypes were obtained by performing an oligonucleotide ligation assay (OLA). Briefly, the genomic regions containing the SNPs of interest were amplified from DNA obtained from patient samples using PCR primers. Then the individual samples were genotyped by ligating the allele specific probes and a ligation specific probe. Each allele specific probe is attached to a Luminex® bead that has a specific fluorescence. The ligated products are then detected in a Luminex® 100™ fluorimeter (Luminex Corporation, Austin, Tex.).

[0421] Genotype or allele frequency results of 125 SNPs in the UCSF and CCF samples were analyzed for association with stroke based on different study designs. The case and control groups were further stratified by sex (“F”, “M”), age, and smoking status (“smoke−” and “smoke+”). The allele or genotype frequencies for the tested SNPs were obtained and compared between cases and controls. No multiple testing corrections were made.

[0422] Several tests of association were calculated for both unstratified and stratified settings: 1) Fisher's exact test for allelic association (“Allelic”), 2) asymptotic chi-square test of genotype association of two different modes of inheritance: dominant (“Dom”) and recessive (“Rec”), and 3) Armitage trend test for the additive mode of genotypic association (“Add”).

[0423] Effect sizes were estimated through genotype or allelic odds ratios. The reported allele or genotype may be under represented in cases (with a lower frequency in cases than in controls, indicating that the reported allele or genotype is associated with a decreased risk and the other allele or genotype is a risk factor for disease) or over represented in cases (indicating that the reported allele or genotype is a risk factor for disease).

[0424] The replicated stroke markers are reported in Table 6. A SNP is considered a replicated marker if the association analyses in two or more studies showed that the risk allele is the same, the p-values are each less than or equal to 0.2, and the significant association is seen in either the same stratum, or in a stratum and its substratum. The p-value of 0.2 was used as a cutoff for significance because the low power of the sample sets to show association due to the limited number of stroke cases in the sample sets.

[0425] An example of a replicated marker, where the homozygous reported allele is associated with an increased risk for stroke is hCV1624173. Individuals with 2 copies of the reported allele of hCV1624173 (inheritance mode “Rec”) showed significant association (p-values 0.0824 and 0.0644) with increased risk (odds ratios of 1.35 and 1.45 times of the reference) when compared to those carrying one or no copies of the reported allele (heterozygotes and homozygotes of the non risk allele) in both the UCSF1 and CCF1 sample sets.

[0426] An example of a replicated marker where the homozygous reported allele is associated with a decreased risk of stroke is hCV1329260 (Table 6). Among the study population, all carriers of one or two copies of the reported allele (inheritance mode “Dom”) of hCV1329260 showed significant association (p-values of 0.1112 and 0.1093) with stroke with a decreased risk (OR of 0.84 and 0.84) compared with those carrying no copies of the reported allele (homozygotes of the non-risk allele) in both the UCSF1 and CCF1 samples.

[0427] The SNPs presented in Table 6 as associated with stroke may also be used to determine risk associated with the development of other vascular diseases such as cerebrovascular disease, carotid artery disease, coronary artery disease, peripheral artery disease, aortic aneurysm, and vascular dementia, as well to predict an individual's responsiveness to drug therapy, particularly statin treatment.

[0428] All publications and patents cited in this specification are herein incorporated by reference in their entirety. Various modifications and variations of the described compositions, methods and systems of the invention will be apparent to those skilled in the art without departing from the scope and spirit of the invention. Although the invention has been described in connection with specific preferred embodiments and certain working examples, it should be understood that the invention as claimed should not be unduly limited to such specific embodiments. Indeed, various modifications of the above-described modes for carrying out the invention that are obvious to those skilled in the field of molecular biology, genetics and related fields are intended to be within the scope of the following claims.

TABLE 5

| | | Sequence A | Sequence B | Sequence C |
|---|---|---|---|---|
| Marker | Alleles | (allele-specific primer) | (allele-specific primer) | (common primer) |
| hCV1022614 | C/T | CTGCAGCCTCTCCTACG | CCTGCAGCCTCTCCTACA | GATTCCCCATCGGTCATAA |
| | | (SEQ ID NO: 55129) | (SEQ ID NO: 55130) | (SEQ ID NO: 55131) |
| hCV103654 | C/G | CACCCCCAGTACATGAATC | CACCCCCAGTACATGAATG | CAATGTCCTCTGGAAACTCAC |
| | | (SEQ ID NO: 55132) | (SEQ ID NO: 55133) | (SEQ ID NO: 55134) |
| hCV11226061 | C/T | CGTGTTCTTCCACATTCC | CCGTGTTCTTCCACATTCT | CTGTGAAGGCAAGAACACTTATA |
| | | (SEQ ID NO: 55135) | (SEQ ID NO: 55136) | (SEQ ID NO: 55137) |
| hCV11369602 | A/G | TGGCTCACGGGGTGA | GGCTCACGGGGTGG | CCAGGCCTACAATTTCATTATTA |
| | | (SEQ ID NO: 55138) | (SEQ ID NO: 55139) | (SEQ ID NO: 55140) |
| hCV11410105 | G/A | CCATGCTTTCACGGTCTC | CCATGCTTTCACGGTCTT | CCCTTTTAAAAAGTTAGCTTCTGTT |
| | | (SEQ ID NO: 55141) | (SEQ ID NO: 55142) | (SEQ ID NO: 55143) |
| hCV11446339 | A/G | GACGRTGCAGCAGAT | GACGTGCAGCAGAC | TGGGTGACGCTGTTTATCA |
| | | (SEQ ID NO: 55144) | (SEQ ID NO: 55145) | (SEQ ID NO: 55146) |
| hCV11474611 | G/T | ATCGCCCATGTGCTG | CATCGCCCATGTGCTT | TCAAACCAGGAACCCTATCT |
| | | (SEQ ID NO: 55147) | (SEQ ID NO: 55148) | (SEQ ID NO: 55149) |
| hCV11515507 | G/A | CTGTGTTGCAGCTCCAG | CTGTGTTGCAGCTCCAA | TCAAGCCCTCATCAGTTTATAAC |
| | | (SEQ ID NO: 55150) | (SEQ ID NO: 55151) | (SEQ ID NO: 55152) |
| hCV11628130 | T/A | CTGCCCTCTTTTTAGCAGA | CTGCCCTCTTTTTAGCAGT | CCCTTTCTCATTCATTCATTTT |
| | | (SEQ ID NO: 55153) | (SEQ ID NO: 55154) | (SEQ ID NO: 55155) |
| hCV11652653 | T/C | CCTTCTGCTGCTGCTTTA | CTTCTGCTGCTGCTTTG | ACACACCCAGGTCATTAACA |
| | | (SEQ ID NO: 55156) | (SEQ ID NO: 55157) | (SEQ ID NO: 55158) |
| hCV11755246 | G/A | CTGGAACAGAAGGACAAGG | CCTGGAACAGAAGGACAAGA | CAACACTTCTGACTTTTTGATCTAAG |
| | | (SEQ ID NO: 55159) | (SEQ ID NO: 55160) | (SEQ ID NO: 55161) |
| hCV11881857 | G/A | CTTGTTAACTTTCCCTTCAG | CTTGGTAACTTTCCCTTCAA | CCAAGGTTGAAGCAATAAATAGA |
| | | (SEQ ID NO: 55162) | (SEQ ID NO: 55163) | (SEQ ID NO: 55164) |
| hCV11970864 | G/C | TGGCATCAGGTCCATG | CTTGGCATCAGGTCCATA | TCTGGACAGCTGCCTCTACT |
| | | (SEQ ID NO: 55165) | (SEQ ID NO: 55166) | (SEQ ID NO: 55167) |
| hCV11975273 | C/T | GATGCTCAAGGGCTTATG | GATGCTCAAGGGCTTATC | TGATGACCCTGAASTACAGACATA |
| | | (SEQ ID NO: 55168) | (SEQ ID NO: 55169) | (SEQ ID NO: 55170) |
| hCV12107274 | C/T | TGATGCTAATCTGTTCTCTGTG | TCTGATGCTAATCTGTTCTCTGTA | ATAACAAGAGGAAGGAGATCAGA |
| | | (SEQ ID NO: 55171) | (SEQ ID NO: 55172) | (SEQ ID NO: 55173) |
| hCV12108773 | G/T | CAGCCAGCTCACAAAGAAC | CAGCCAGCTCACAAAGAAA | GCTCTTGGTCCGTTGTCTT |
| | | (SEQ ID NO: 55174) | (SEQ ID NO: 55175) | (SEQ ID NO: 55176) |
| hCV12127954 | A/T | CTCTTTCTCTTTGGATGCCT | TCTTTCTCTTTGGATGCCA | TGAGGCCAGGGTAGACAAG |
| | | (SEQ ID NO: 55177) | (SEQ ID NO: 55178) | (SEQ ID NO: 55179) |
| hCV1251033 | A/G | GTTGTTTTGGCGGCA | TGTTTTGGCGGCG | GGGTTTGAGGCAGATTCTAC |
| | | (SEQ ID NO: 55180) | (SEQ ID NO: 55181) | (SEQ ID NO: 55182) |
| hCV1329260 | A/G | TAGTGCAATATTGCTGAAAATACT | TGCAATATTGCTGAAAATACC | TTGGTTGAACTCCTGAAACTTAT |
| | | (SEQ ID NO: 55183) | (SEQ ID NO: 55184) | (SEQ ID NO: 55185) |
| hCV1331211 | A/G | GCTGGGCCAAGATGGT | CTGGGCCAAGATGGC | CCCTGCCTTCCTCTTATCTC |
| | | (SEQ ID NO: 55186) | (SEQ ID NO: 55187) | (SEQ ID NO: 55188) |
| hCV1449414 | C/T | CACACATATGGTGGTTCATAAC | ACACACATATGGTGGTTCATAAT | CATGTCCCAGCTCTTCTTG |
| | | (SEQ ID NO: 55189) | (SEQ ID NO: 55190) | (SEQ ID NO: 55191) |
| hCV1496698 | T/C | CTTGAAGGTGCTGTGTGTTT | CTTGAAGGTGCTGTGTGTTC | TCTCTACCCCAGCTCATATACTC |
| | | (SEQ ID NO: 55192) | (SEQ ID NO: 55193) | (SEQ ID NO: 55194) |
| hCV1567672 | C/A | GAAGACAGTGAGCACAGCAC | GAAGACAGTGAGCACAGCAA | GGGTCACTTGAGTTTCTCTCTA |
| | | (SEQ ID NO: 55195) | (SEQ ID NO: 55196) | (SEQ ID NO: 55197) |
| hCV15752716 | C/T | ACGCTGCTGTTCCG | ACGCTGCTGTTCCA | CAGACAGACAACAATTCAGAAGAA |
| | | (SEQ ID NO: 55198) | (SEQ ID NO: 55198) | (SEQ ID NO: 55200) |
| hCV15853281 | C/T | TGGTGGTGCTGTCAAC | TGGTGGTGCTGTCAAT | CCCGTGGAGGGTCTGA |
| | | (SEQ ID NO: 55201) | (SEQ ID NO: 55202) | (SEQ ID NO: 55203) |
| hCV15959718 | C/T | CTTCCTCTATCAAGTAATCTACAGTC | CTTCCTCTATCAAGTAATCTACAGTT | GGGTAAATGCAGACAACATATTC |
| | | (SEQ ID NO: 55204) | (SEQ ID NO: 55205) | (SEQ ID NO: 55206) |
| hCV16025875 | C/T | CCCACATGGTTTTTACAAGG | CCCACATGGTTTTTACAAGA | ACCCCCACGTCTGACTTA |
| | | (SEQ ID NO: 55207) | (SEQ ID NO: 55208) | (SEQ ID NO: 55209) |
| hCV1605791 | T/A | ACGGGATATAGAAAACACAGATGA | ACGGGATATAGAAAACACAGATGT | TGAACCTGGTCCTTATTGTTATCT |
| | | (SEQ ID NO: 55210) | (SEQ ID NO: 55211) | (SEQ ID NO: 55212) |
| hCV16070505 | G/A | CCACTGTTTATCTGTATGAGTTCAC | CCACTGTTTATCTGTATGAGTTCAT | GCCTCAATCGACTGAATCAA |
| | | (SEQ ID NO: 55213) | (SEQ ID NO: 55214) | (SEQ ID NO: 55215) |
| hCV16093418 | G/A | AAGAAGTTCACAGCTGAAGG | CAAGAAGTTCACAGCTGAAGA | CCTGCTGGAGAGACAGAGT |
| | | (SEQ ID NO: 55216) | (SEQ ID NO: 55217) | (SEQ ID NO: 55218) |
| hCV16149795 | T/C | CCTCACTCCCTCACAGTTGT | CTCACTCCCTCACAGTTGC | GGCTGTAGGGTTTTTCATCTTA |
| | | (SEQ ID NO: 55219) | (SEQ ID NO: 55220) | (SEQ ID NO: 55221) |
| hCV16173091 | C/T | CAGACTTGATGTTTTTGAAAGC | CACAGACTTGATGTTTTTGAAAGT | TGCAAAGGAAGCAACTTCA |
| | | (SEQ ID NO: 55222) | (SEQ ID NO: 55223) | (SEQ ID NO: 55224) |
| hCV16177220 | C/T | ATCTGGTGGTCATTCAAATG | CATCTGGTGGTCATTCAAATA | TGATTGTGAGGTTCTAAAAGAGATA |
| | | (SEQ ID NO: 55225) | (SEQ ID NO: 55226) | (SEQ ID NO: 55227) |
| hCV16235909 | A/G | CCCAAAAGGCAATGAGAT | CCCAAAAGGCAATGAGAC | AAGCTTTTTCCTGTTGAAGTAGA |
| | | (SEQ ID NO: 55228) | (SEQ ID NO: 55229) | (SEQ ID NO: 55230) |
| hCV1624173 | G/A | TGGACAACAGCACCTTAC | TGGACAACAGCACCTTAT | TTCCAGAGGTTCCTTCAATC |
| | | (SEQ ID NO: 55231) | (SEQ ID NO: 55232) | (SEQ ID NO: 55233) |
| hCV1639945 | C/T | TGAAGTTTTGCATGTAAATCG | GTGAAGTTTGCATGTAAATCA | TTTCTATGGTATTGACACTTTTCTCT |
| | | (SEQ ID NO: 55234) | (SEQ ID NO: 55235) | (SEQ ID NO: 55236) |
| hCV1741111 | C/T | CCTCAGAATGGCCAAAAAC | CCTCAGAATGGCCAAAAAT | CCAGGCAGCCAGACTTCT |
| | | (SEQ ID NO: 55237) | (SEQ ID NO: 55238) | (SEQ ID NO: 55239) |
| hCV1964590 | G/A | TGGCCAAGTGATAGAAATTG | TCTGGCCAAGTGATAGAAATTA | CCCCAACCCACAACTTACT |
| | | (SEQ ID NO: 55240) | (SEQ ID NO: 55241) | (SEQ ID NO: 55242) |
| hCV1985480 | G/A | CAGCTGDCTGCTGTCCAC | CAGCTGCTGCTGTTCCAT | CATGAACCTGTCAATCTTCTCA |
| | | (SEQ ID NO: 55243) | (SEQ ID NO: 55244) | (SEQ ID NO: 55245) |
| hCV2084293 | G/T | CAATGAGCATTTAGCATCG | TTCAATGAGCATTTAGCATCT | TGGAGGAAAAGTGGAAGATATTA |
| | | (SEQ ID NO: 55246) | (SEQ ID NO: 55247) | (SEQ ID NO: 55248) |
| hCV2092598 | T/A | TTGAGCCAGATAAAGAATGTAAAT | TGAGCCAGATAAAGAATGTAAAA | GGGCTCAGATTCTTTTTCTTC |
| | | (SEQ ID NO: 55249) | (SEQ ID NO: 55250) | (SEQ ID NO: 55251) |
| hCV210485 | G/C | GGCGTTCAGTTTTTAGCG | GGCGTTAGTTTTTAGCC | CAATACGCCAGCAAAATACC |
| | | (SEQ ID NO: 55252) | (SEQ ID NO: 55253) | (SEQ ID NO: 55254) |
| hCV2119739 | C/T | GAGCCAGAGGAGTCCTG | GGAGCCAGAGGAGTCCTA | CGGGTGTCTGTCTTGAGATAC |
| | | (SEQ ID NO: 55255) | (SEQ ID NO: 55256) | (SEQ ID NO: 55257) |
| hCV2119740 | C/T | GCTGTGGCTGCATTTCAC | GCTGTGGCTGCATTTCAT | CCCCACCCTCGCTTATC |
| | | (SEQ ID NO: 55258) | (SEQ ID NO: 55259) | (SEQ ID NO: 55260) |
| hCV2143203 | T/C | CAGATATGGACTCCAGTCATAGTAT | CAGATATGGACTCCAGTCATAGTAC | TGGCTGAGCATCGTTATTC |
| | | (SEQ ID NO: 55261) | (SEQ ID NO: 55262) | (SEQ ID NO: 55263) |
| hCV2146578 | T/C | CCTCCTAGAGAAGATCTGCAT | CCTCCTAGAGAAGATCTGCAC | AAGGCCCCTCTTCTGTCT |
| | | (SEQ ID NO: 55264) | (SEQ ID NO: 55265) | (SEQ ID NO: 55266) |
| hCV2146579 | C/A | TCCTAACAGAGGCTTGGC | TTCCTAACAGAGGCTTGGA | TGCATGTCCCCTAGAATG |
| | | (SEQ ID NO: 55267) | (SEQ ID NO: 55268) | (SEQ ID NO: 55269) |
| hCV2199708 | G/T | AAAACTGTATACGTGTTTTGTCC | AAAAACTGTATACGTGTTTTGTCA | ACCAGCATTCAAGATACTGTTTAC |
| | | (SEQ ID NO: 55270) | (SEQ ID NO: 55271) | (SEQ ID NO: 55272) |
| hCV22271537 | A/G | TCCAGGTTTAGAATATCTTCAATTA | CCAGGTTTAGAATATCTTCAATTG | TCAGAAGAGCTTTCCTTGTTAAA |
| | | (SEQ ID NO: 55273) | (SEQ ID NO: 55274) | (SEQ ID NO: 55275) |
| hCV2230606 | A/G | AAATGTTGTCAACGTCCA | AATGTTGTCAACGTCCG | AGTCACTGGCAGCAATGAT |
| | | (SEQ ID NO: 55276) | (SEQ ID NO: 55277) | (SEQ ID NO: 55278) |
| hCV236059 | T/A | GAAGCTTTGTAGGAAATTGTTTA | GAAGCTTTGTAGGAAATTGTTTT | CACAGTTCCAGATCTATTATTGTAAC |
| | | (SEQ ID NO: 55279) | (SEQ ID NO: 55280) | (SEQ ID NO: 55281) |
| hCV239712 | A/C | CACTTGTTCAGAGTGTTTTCAA | CACTTGTTCAGAGTGTTTTCAC | GCTTGGTCCTTCAAAATCAT |
| | | (SEQ ID NO: 55282) | (SEQ ID NO: 55283) | (SEQ ID NO: 55284) |
| hCV2451180 | A/G | GGCTATCATTATTTGCAGTTCT | GCTATCATTATTTGCAGTTCC | AGTACCACTGCAGATGAACAGTA |
| | | (SEQ ID NO: 55285) | (SEQ ID NO: 55286) | (SEQ ID NO: 55287) |
| hCV2476746 | C/T | AGGCTTCCCAAGACATC | AGGCTTCCCAAGACATT | TCGGAATCTCTCTGAACACA |
| | | (SEQ ID NO: 55288) | (SEQ ID NO: 55289) | (SEQ ID NO: 55290) |
| hCV2478358 | C/T | CCACCTTAGCCCTGGC | TCCACCTTAGCCCTGGT | AAGTTCCTGGTAGCTTTTCAGA |
| | | (SEQ ID NO: 55291) | (SEQ ID NO: 55292) | (SEQ ID NO: 55293) |
| hCV2485201 | C/A | CACTCGCGTAGCAGGTG | CACTCGCGTAGCAGGTT | CAAGTACCGAGTAAGGAAGAAGTT |
| | | (SEQ ID NO: 55294) | (SEQ ID NO: 55295) | (SEQ ID NO: 55296) |
| hCV2547673 | T/C | TGGGCTCCATCCCAT | TGGGCTCCATCCCAC | CCAATTCTTTTTCTTCTTTCAGTT |
| | | (SEQ ID NO: 55297) | (SEQ ID NO: 55298) | (SEQ ID NO: 55299) |
| hCV25474460 | A/C | ATGTTTTTGTGGTTTGAAGTTTAT | TGTTTTTGTGGTTTGAAGTTTAG | ACACAAGGCAACCAAATAAT |
| | | (SEQ ID NO: 55300) | (SEQ ID NO: 55301) | (SEQ ID NO: 55302) |
| hCV25601073 | A/G | CCGCTGCCTGCACAA | CCGCTGCCTGCACAG | CGTGCTTGGGAGCAGATAA |
| | | (SEQ ID NO: 55303) | (SEQ ID NO: 55304) | (SEQ ID NO: 55305) |
| hCV25604912 | G/A | GAGACCAATAACAACGACG | GAGACCAATAACAACGACA | TGGCCCACGCTACCT |
| | | (SEQ ID NO: 55306) | (SEQ ID NO: 55307) | (SEQ ID NO: 55308) |
| hCV25610470 | G/A | ACAATCACCACGGTCC | CACAATCACCACGGTCT | CCTTCTGCATCAGATCTTC |
| | | (SEQ ID NO: 55309) | (SEQ ID NO: 55310) | (SEQ ID NO: 55311) |
| hCV25610647 | A/C | GAGGGCTGCTGGGAGT | GGGCTGCTGGGAGG | GCGTGTCTGGAAAATGTGA |
| | | (SEQ ID NO: 55312) | (SEQ ID NO: 55313) | (SEQ ID NO: 55314) |
| hCV25617360 | C/T | GGTCTCCCACTCCATAC | GGTCTCCCACTCCATAT | GGGCCCATTAACTCACATAC |
| | | (SEQ ID NO: 55315) | (SEQ ID NO: 55316) | (SEQ ID NO: 55317) |
| hCV2561826 | G/A | AAGAGGCCATTTCTCAGG | GAAGAGGCCATTTCTCAGA | AGTGGAATAAGCATGTCTGATAAG |
| | | (SEQ ID NO: 55318) | (SEQ ID NO: 55319) | (SEQ ID NO: 55320) |
| hCV25623831 | C/T | GGGACCTGGATCATCAC | GGGACCTGGATCATCAT | GGGAAGAAGGGCTGTCTAAG |
| | | (SEQ ID NO: 55321) | (SEQ ID NO: 55322) | (SEQ ID NO: 55323) |
| hCV25640761 | C/A | AATTTGGTCTGTCGTGAAGG | CAATTTGGTCTGTCGTGAAGT | GCCACCAAAGAAAAAGAAATAAC |
| | | (SEQ ID NO: 55324) | (SEQ ID NO: 55325) | (SEQ ID NO: 55326) |
| hCV25643507 | C/T | ATACCGACCCCGAGC | TATACCGACCCCGAGT | GCCCCGAGGAAAATACAG |
| | | (SEQ ID NO: 55327) | (SEQ ID NO: 55328) | (SEQ ID NO: 55329) |
| hCV25644769 | T/A | ATATTTACTTAAAGCTCCACTCTTTT | CATATTTACTTAAAGCTCCACTCTTTA | TTGCTTACCCAGTACATATTAAATC |
| | | (SEQ ID NO: 55330) | (SEQ ID NO: 55331) | (SEQ ID NO: 55332) |
| hCV25651109 | C/G | GGTCCTGCTTGATGCG | AGGTCCTGCTTGATGCC | CGACCATGGACATTCACAT |
| | | (SEQ ID NO: 55333) | (SEQ ID NO: 55334) | (SEQ ID NO: 55335) |
| hCV25742059 | A/G | CTGCCTCTTCTGCATTAGA | TGCCTCTTCTGCATTAGG | CCTTCACTGCCGTGTTTCTCT |
| | | (SEQ ID NO: 55336) | (SEQ ID NO: 55337) | (SEQ ID NO: 55338) |
| hCV25746098 | T/A | AAAAAGTGGTCTTTGAACGAT | AAAAGTGGTCTTTGAACGAA | AAAGATCTCCAGCATATTGATTC |
| | | (SEQ ID NO: 55339) | (SEQ ID NO: 55340) | (SEQ ID NO: 55341) |
| hCV25753038 | C/T | GAGCCACCTATGTTCTCTACC | GGAGCCACCTATGTTCTCTACT | TCCCTCTTTGCTCATTCATC |
| | | (SEQ ID NO: 55342) | (SEQ ID NO: 55343) | (SEQ ID NO: 55344) |
| hCV25927820 | C/T | AGGCAACARTGAAGCCC | GAGGCAACATGAAGCCT | CCTCCGCCTGGTAATACTG |
| | | (SEQ ID NO: 55345) | (SEQ ID NO: 55346) | (SEQ ID NO: 55347) |
| hCV25929042 | A/C | TCTGTCCAGGTACCAGCA | TCTGTCCAGGTACCAGCC | CAAGGCTGACGAGTTCACTAT |
| | | (SEQ ID NO: 55348) | (SEQ ID NO: 55349) | (SEQ ID NO: 55350) |
| hCV25937798 | C/G | GGGGCTGTCCAGAAAAC | GGGGCTGTCCAGAAAAG | GGTTACCTGCATTCCAGAGTAT |
| | | (SEQ ID NO: 55351) | (SEQ ID NO: 55352) | (SEQ ID NO: 55353) |
| hCV25943718 | T/C | TCTTCTCTTGCCCAATCTTT | TCTTCTCTTGCCCAATCTTC | CGTAAGAAGGCAACAAGTTCT |
| | | (SEQ ID NO: 55354) | (SEQ ID NO: 55355) | (SEQ ID NO: 55356) |
| hCV25952089 | C/A | CCCTGCCTCTGTCTGACTC | CCCTGCCTCTGTCTGACTA | AAGACAAGCCCAGGTTCA |
| | | (SEQ ID NO: 55357) | (SEQ ID NO: 55358) | (SEQ ID NO: 55359) |
| hCV25957006 | C/T | CCTTCCAGACTGTGAGAAATAG | CCTTCCAGACTGTGAGAAATAA | CCTAATGCTTGATCATCATCATAC |
| | | (SEQ ID NO: 55360) | (SEQ ID NO: 55361) | (SEQ ID NO: 55362) |
| hCV25959417 | T/C | CAGGCGGAAGTAGGACTCT | AGGCGGAAGTAGGACTCC | GCAGCTGACCATCTGTCTC |
| | | (SEQ ID NO: 55363) | (SEQ ID NO: 55364) | (SEQ ID NO: 55365) |
| hCV25960573 | G/A | GCTGGAGGAGTCACTTGC | TGCTGGAGGAGTCACTTGT | GCAAAATGCCCTTCAATG |
| | | (SEQ ID NO: 55366) | (SEQ ID NO: 55367) | (SEQ ID NO: 55368) |
| hCV25966452 | A/G | GGCTGGAATATTCTCGGCT | GCTGGAATATTCTCGGCC | GAAAGATATTTGGACTACTCAAGTCTA |
| | | (SEQ ID NO: 55369) | (SEQ ID NO: 55370) | (SEQ ID NO: 55371) |
| hCV25996687 | T/G | CTTTCAGGCTTCTGTAGATTCTT | TTTCAGGCTTCTGTAGATTCTG | CACTATTGCCTTTATTTTGTTTACA |
| | | (SEQ ID NO: 55372) | (SEQ ID NO: 55373) | (SEQ ID NO: 55374) |
| hCV2731613 | C/T | GCATAAGTTTCCAGTTGCC | TGCATAAGTTTCCAGTTGCT | TGTCTGGTTTCAGGATTCATAT |
| | | (SEQ ID NO: 55375) | (SEQ ID NO: 55376) | (SEQ ID NO: 55377) |
| hCV2734178 | T/G | GATAAAACTGGGCTGCATATA | ATAAAACTGGGCTGCATATC | AAAGATGCACACATTAAGGTTATC |
| | | (SEQ ID NO: 55378) | (SEQ ID NO: 55379) | (SEQ ID NO: 55380) |
| hCV2743605 | G/A | TGAAACATCCTCGTGTATACC | GTTGAAACATCCTCGTGTATACT | TGGATACAAATGAAATGAACATCT |
| | | (SEQ ID NO: 55381) | (SEQ ID NO: 55382) | (SEQ ID NO: 55383) |
| hCV2806721 | T/C | GTGAGGGCCACTAGCTTT | GTGAGGGGCCACTAGCTTC | TGGTGAAGAGTCATCAGAATAATC |
| | | (SEQ ID NO: 55384) | (SEQ ID NO: 55385) | (SEQ ID NO: 55386) |
| hCV2870586 | G/A | CTCTTCAGATTCAGCAGAAC | CTCTTCAGATTCAGCAGAAT | GGTGCTCAGCAAAGAAATAAC |
| | | (SEQ ID NO: 55387) | (SEQ ID NO: 55388) | (SEQ ID NO: 55389) |
| hCV2932115 | T/C | TGGACGTGGGCTTTTTT | TGGACGTGGGCTTTTTC | GCTGCAGCCCTTTTTCTC |
| | | (SEQ ID NO: 55390) | (SEQ ID NO: 55391) | (SEQ ID NO: 55392) |
| hCV2987426 | C/T | ATGACACAGGTAATACAGACTTTTC | ATGACACAGGTAATACAGACTTTTT | TGAAATAAGGCACTTTGAACAT |
| | | (SEQ ID NO: 55393) | (SEQ ID NO: 55394) | (SEQ ID NO: 55395) |
| hCV3091588 | G/T | CTGGTGTCAGCTCTCTGG | CTCTGGTGTCAGCTCTCTGT | TTTGCATTCTGTGAAGTGAGAT |
| | | (SEQ ID NO: 55396) | (SEQ ID NO: 55397) | (SEQ ID NO: 55398) |
| hCV3130332 | A/G | AGTTTATCTGTGCTCCCTAATTAA | AGTTTATCTGTGCTCCCTAATTAG | CCTGCTCCTTGCTGATG |
| | | (SEQ ID NO: 55399) | (SEQ ID NO: 55400) | (SEQ ID NO: 55401) |
| hCV3155879 | C/T | CCATTCTCTTGGTGTCG | TTCCATTCTCTTGGTGTCA | CGCACTGCGCACAGTAT |
| | | (SEQ ID NO: 55402) | (SEQ ID NO: 55403) | (SEQ ID NO: 55404) |
| hCV3193216 | C/T | GCACTTGGGCTTTTGAC | AGCACTTGGGCTTTTGAT | CATATAATGGCTCTTGCATGTAGT |
| | | (SEQ ID NO: 55405) | (SEQ ID NO: 55406) | (SEQ ID NO: 55407) |
| hCV3200162 | A/G | CAAATCAGATTCAGAGTTAAACAA | CAAATCAGATTCAGAGTTAAACAG | ACGTTATATGGCTCTATCTCTACAAC |
| | | (SEQ ID NO: 55408) | (SEQ ID NO: 55409) | (SEQ ID NO: 55410) |
| hCV3215412 | C/G | GGAGGTTTGACCAACTGC | GGAGGTTTGACCAACTGG | TGCCATGATTCAAGAAATAGAT |
| | | (SEQ ID NO: 55411) | (SEQ ID NO: 55412) | (SEQ ID NO: 55413) |
| hCV3216148 | T/C | AGTACCCCTTTGCACAGATAA | AGTACCCCTTTGACAGATAG | CTCAACACTTGAATTCATCTATGA |
| | | (SEQ ID NO: 55414) | (SEQ ID NO: 55415) | (SEQ ID NO: 55416) |
| hCV3233728 | C/A | AGGGCCTCATAGAAAGCTC | CAGGGCCTCATAGAAAGCTA | TTCCCTTGCCTGGTATCA |
| | | (SEQ ID NO: 55417) | (SEQ ID NO: 55418) | (SEQ ID NO: 55419) |
| hCV3295359 | A/G | ACTATGACTGTGTCTTGGGTAAT | ACTATGACTGTGTCTTGGGTAAC | TCATTTGCAAACTTGTTCTCA |
| | | (SEQ ID NO: 55420) | (SEQ ID NO: 55421) | (SEQ ID NO: 55422) |
| hCV3295754 | G/C | CATCAGCCTCTAGCTTGG | CATCAGCCTCTAGCTTGC | CATCCCGGCCTTCTACTT |
| | | (SEQ ID NO: 55423) | (SEQ ID NO: 55424) | (SEQ ID NO: 55425) |
| hCV447208 | A/G | CCACCTCCAGCACCTGT | CACCTCCAGCACCTGC | TCAAGGAGGAATACTCGAAGAG |
| | | (SEQ ID NO: 55426) | (SEQ ID NO: 55427) | (SEQ ID NO: 55428) |
| hCV447698 | T/A | TTCAGTTTGACATCTTCTTTTGT | TCAGTTTGACATCTTCTTTTGA | CATTCTTGTTTTTGTCTTAGAGA |
| | | (SEQ ID NO: 55429) | (SEQ ID NO: 55430) | (SEQ ID NO: 55431) |
| hCV466781 | T/C | AAAGCCCCCAGCAAA | AAAGCCCCCAGCAAG | GCTGACACCTTCCCAAGAT |
| | | (SEQ ID NO: 55432) | (SEQ ID NO: 55433) | (SEQ ID NO: 55434) |
| hCV594695 | A/T | ATATCGTGGGTGAGTTCATTTA | TCGTGGGTGAGTTCATTTT | GGGTGCTGCTGATGAAATAC |
| | | (SEQ ID NO: 55435) | (SEQ ID NO: 55436) | (SEQ ID NO: 55437) |
| hCV612081 | G/A | CACTAGCCCAGGAGACG | TCACTAGCCCAGGAGACA | CAGAGATGGATCTGAGAGAAGA |
| | | (SEQ ID NO: 55438) | (SEQ ID NO: 55439) | (SEQ ID NO: 55440) |
| hCV626116 | C/G | CGGCCGAGATCTCCC | CGGCCGAGATCTCCG | CCTTCGGCCTTCTTGTCA |
| | | (SEQ ID NO: 55441) | (SEQ ID NO: 55442) | (SEQ ID NO: 55443) |
| hCV638094 | G/A | TTGTCTTTTATCCCAGTCATTC | TTGTCTTTTATCCCAGTCATTT | TTACCAGAGAGGACTTTAGAATCTC |
| | | (SEQ ID NO: 55444) | (SEQ ID NO: 55445) | (SEQ ID NO: 55446) |
| hCV679051 | C/G | CAGGTACTATAGGAGGATTGGAC | CAGGTACTATAGGAGGATTGGAG | TCATTCAGCCTTTTGTCTTCT |
| | | (SEQ ID NO: 55447) | (SEQ ID NO: 55448) | (SEQ ID NO: 55449) |
| hCV7433876 | A/C | GGGTGTGCAGGGTTGT | GGTGTGCAGGGTTGGA | GGCCTCCGCATCAATAT |
| | | (SEQ ID NO: 55450) | (SEQ ID NO: 55451) | (SEQ ID NO: 55452) |
| hCV463288 | A/G | TCATCTTTCAAACGTATTCTCAT | TCATCTTTCAAACGTATTCTCAC | CTAGCTTTGACAAAGATGATAACC |
| | | (SEQ ID NO: 55453) | (SEQ ID NO: 55454) | (SEQ ID NO: 55455) |
| hCV7479431 | G/T | CTCACACACCTAGCTCTGG | GCTCACACACCTAGCTCTGT | CACATGTGGACGAGAACTAT |
| | | (SEQ ID NO: 55456) | (SEQ ID NO: 55457) | (SEQ ID NO: 55458) |
| hCV7494113 | T/A | CAAGGCATCTCTGTTAACCAA | CAAGGCATCTCTGTTAACCAT | GGCTCCAGCCTCTGTAGAA |
| | | (SEQ ID NO: 55459) | (SEQ ID NO: 55460) | (SEQ ID NO: 55461) |
| hCV6514103 | C/G | GCCGAGGCCAACTAGG | GCCGAGGCCAACTAGC | GTCAGGAGAGAATCTTGATAA |
| | | (SEQ ID NO: 55462) | (SEQ ID NO: 55463) | (SEQ ID NO: 55464) |
| hCV7514722 | A/G | GGAGCCATGGACTCTCAA | GGAGCCATGGACTCTCAG | CCTCTCCCCGAAACACA |
| | | (SEQ ID NO: 55465) | (SEQ ID NO: 55466) | (SEQ ID NO: 55467) |
| hCV7484364 | C/T | AGGAACAGCAAGAACCG | CAGGAACAGCAAGAACCA | CAGGAGCCTGCACTCTG |
| | | (SEQ ID NO: 55468) | (SEQ ID NO: 55469) | (SEQ ID NO: 55470) |
| hCV7586198 | T/C | AGTGCAGGCTCCCAA | AGTGCAGGCTCCCAG | TGAATCCGAAGTTTGAAGTCT |
| | | (SEQ ID NO: 55471) | (SEQ ID NO: 55472) | (SEQ ID NO: 55473) |
| hCV7602438 | T/A | AGAATCCTTGCTGCTTTCA | AAGAATCCTTGCTGCTTTCT | TGAGGACTAGTGAACATCAAGTAGA |
| | | (SEQ ID NO: 55474) | (SEQ ID NO: 55475) | (SEQ ID NO: 55476) |
| hCV7952834 | A/G | CTTCTGTTTGGTGTCTGGA | TTCTGTTTGGTGTCTGGG | CAGATGAATGAACACTGAAGTGT |
| | | (SEQ ID NO: 55477) | (SEQ ID NO: 55478) | (SEQ ID NO: 55479) |
| hCV8332900 | T/G | GGGCACTGAAGATGATGA | GGGCACTGAAGATGATGC | CAAAATCACACAAATCTACATATATCAC |
| | | (SEQ ID NO: 55480) | (SEQ ID NO: 55481) | (SEQ ID NO: 55482) |
| hCV8709053 | A/G | GCCCAGATACCCCAAAA | GCCCAGATACCCCAAAG | GCCCAGCCTGCGTATA |
| | | (SEQ ID NO: 55483) | (SEQ ID NO: 55484) | (SEQ ID NO: 55485) |
| hCV8726331 | G/A | GGTCTGTTCCCTGGACG | TGGTCTGTTCCCTGGACA | TGCGGTCACACTGACTGAG |
| | | (SEQ ID NO: 55486) | (SEQ ID NO: 55487) | (SEQ ID NO: 55488) |
| hCV8807844 | A/G | CAATTTGTATAATCTAAAGGAGCAT | CAATTTGTATAATCTAAAGGAGCAC | GGGCCCGCCTTATGTA |
| | | (SEQ ID NO: 55489) | (SEQ ID NO: 55490) | (SEQ ID NO: 55491) |
| hCV8938071 | G/T | GCTTTTCGGGTGTTGATTC | GCTTTCGGGTGTTGATTA | CCACCGTGCCGTTAGTAAC |
| | | (SEQ ID NO: 55492) | (SEQ ID NO: 55493) | (SEQ ID NO: 55494) |
| hCV945234 | C/T | ACGCACTTTCTGGATCTC | ACGCACTTTCTGGATCTT | CCTGTGTGCCCAACTGTAT |
| | | (SEQ ID NO: 55495) | (SEQ ID NO: 55496) | (SEQ ID NO: 55497) |
| hCV945276 | G/T | CGCCACAAACACATACCTG | CGCCACAAACACATACCTT | CCGCTGCTTGGAACAG |
| | | (SEQ ID NO: 55498) | (SEQ ID NO: 55499) | (SEQ ID NO: 55500) |
| hCV9693763 | C/G | CGGGCGGGTAAAGC | CGGGCGGGTAAAGG | GAGTCGAGAGTGGGAGAAGA |
| | | (SEQ ID NO: 55501) | (SEQ ID NO: 55502) | (SEQ ID NO: 55503) |

[0429] TABLE 6

| hCV# | Gene Name | Sample Set | p value | OR | Case Freq. | Control Freq. | mode | Risk allele | Strata | Design |
|---|---|---|---|---|---|---|---|---|---|---|
| hCV11446339 | CYP11B2 | UCSF1 | 0.0005 | — | 0.03 | 0.00 | Rec | G | Age T3 | A |
| hCV11446339 | CYP11B2 | UCSF1 | 0.0342 | 10.87 | 0.01 | 0.00 | Rec | G | ALL | A |
| hCV11446339 | CYP11B2 | UCSF1 | 0.0363 | 10.76 | 0.02 | 0.00 | Rec | G | M | A |
| hCV11446339 | CYP11B2 | UCSF1 | 0.0002 | — | 0.03 | 0.00 | Rec | G | Smoke− | A |
| hCV11446339 | CYP11B2 | CCF1 | 0.0034 | 5.05 | 0.04 | 0.01 | Allelic | G | ALL | B |
| hCV11446339 | CYP11B2 | CCF1 | 0.1374 | 2.61 | 0.02 | 0.01 | Allelic | G | M | B |
| hCV11446339 | CYP11B2 | CCF1 | 0.0259 | 2.90 | 0.03 | 0.01 | Allelic | G | F | B |
| hCV2230606 | FBLN1 | UCSF1 | 0.0200 | 3.50 | 0.07 | 0.02 | Add | G | Age T1 | A |
| hCV2230606 | FBLN1 | CCF2/UCSF2 | 0.1926 | 1.46 | 0.04 | 0.03 | Allelic | G | ALL | C |
| hCV25604912 | LRP5 | UCSF1 | 0.0353 | 10.76 | 0.02 | 0.00 | Rec | A | M | A |
| hCV25604912 | LRP5 | UCSF1 | 0.0497 | 9.79 | 0.01 | 0.00 | Rec | A | Smoke+ | A |
| hCV25604912 | LRP5 | CCF2/UCSF2 | 0.1982 | 1.25 | 0.08 | 0.06 | Allelic | A | ALL | D |
| hCV25604912 | LRP5 | CCF2/UCSF2 | 0.1024 | 1.38 | 0.08 | 0.06 | Allelic | A | ALL | C |
| hCV3130332 | K6IRS4 | UCSF1 | 0.0469 | 1.43 | 0.80 | 0.73 | Allelic | G | ALL | A |
| hCV3130332 | K6IRS4 | CCF1 | 0.0450 | 1.46 | 0.79 | 0.72 | Allelic | G | ALL | A |
| hCV25640761 | SLC25A2 | UCSF1 | 0.0224 | 0.57 | 0.89 | 0.94 | Allelic | A | ALL | A |
| hCV25640761 | SLC25A2 | CCF1 | 0.0565 | 0.56 | 0.91 | 0.95 | Allelic | A | ALL | A |
| hCV1624173 | CENPE | UCSF1 | 0.0824 | 1.35 | 0.84 | 0.79 | Rec | G | ALL | A |
| hCV1624173 | CENPE | CCF1 | 0.0644 | 1.45 | 0.84 | 0.78 | Rec | G | ALL | A |
| hCV1329260 | DNM3 | UCSF1 | 0.1112 | 0.84 | 0.52 | 0.57 | Dom | A | ALL | A |
| hCV1329260 | DNM3 | CCF1 | 0.1093 | 0.84 | 0.48 | 0.53 | Dom | A | ALL | A |
| hCV16070505 | CLCA1 | UCSF1 | 0.0985 | 1.46 | 0.88 | 0.83 | Allelic | G | ALL | A |
| hCV16070505 | CLCA1 | CCF1 | 0.1752 | 1.37 | 0.87 | 0.83 | Allelic | G | ALL | A |
| hCV25610470 | EDG3 | UCSF1 | 0.1204 | 2.20 | 0.98 | 0.96 | Rec | G | ALL | A |
| hCV25610470 | EDG3 | CCF1 | 0.1893 | 1.96 | 0.98 | 0.96 | Rec | G | ALL | A |
| hCV945276 | KRT5 | UCSF1 | 0.1127 | 1.16 | 0.48 | 0.44 | Rec | T | ALL | A |
| hCV945276 | KRT5 | CCF1 | 0.1297 | 1.20 | 0.49 | 0.44 | Rec | T | ALL | A |
| hCV1022614 | ITGAE | UCSF1 | 0.1974 | 1.17 | 0.21 | 0.19 | Dom | T | ALL | A |
| hCV1022614 | ITGAE | CCF1 | 0.0154 | 1.18 | 0.20 | 0.18 | Rec | T | ALL | A |
| hCV15752716 | C10orf33 | UCSF1 | 0.0027 | 1.17 | 0.92 | 0.91 | Dom | T | ALL | A |
| hCV15752716 | C10orf33 | CCF1 | 0.1971 | 1.57 | 0.94 | 0.91 | Allelic | T | ALL | A |
| hCV1605791 | none | UCSF1 | 0.0636 | 0.70 | 0.82 | 0.86 | Allelic | A | ALL | A |
| hCV1605791 | none | CCF1 | 0.1826 | 0.83 | 0.87 | 0.89 | Dom | A | ALL | A |
| hCV16149795 | none | UCSF1 | 0.0434 | 0.79 | 0.89 | 0.91 | Dom | C | ALL | A |
| hCV16149795 | none | CCF1 | 0.1992 | 0.74 | 0.90 | 0.92 | Rec | C | ALL | A |
| hCV25742059 | RC3 | UCSF1 | 0.1932 | 1.21 | 0.53 | 0.49 | Allelic | G | ALL | A |
| hCV25742059 | RC3 | CCF1 | 0.0984 | 1.21 | 0.56 | 0.52 | Rec | G | ALL | A |
| hCV25753038 | AQP10 | UCSF1 | 0.1598 | 0.79 | 0.74 | 0.69 | Allelic | T | ALL | A |
| hCV25753038 | AQP10 | CCF1 | 0.1032 | 0.83 | 0.71 | 0.67 | Rec | T | ALL | A |
| hCV11474611 | CALM1 | CCF2/UCSF2 | 0.0716 | 0.61 | 0.03 | 0.05 | Allelic | T | ALL | B |
| hCV11474611 | CALM1 | CCF2/UCSF2 | 0.0787 | 0.60 | 0.03 | 0.05 | Allelic | T | ALL | D |
| hCV16025875 | IL1F5 | CCF2/UCSF2 | 0.1920 | 0.96 | 0.38 | 0.39 | Dom. | C | ALL | B |
| hCV16025875 | IL1F5 | CCF2/UCSF2 | 0.0709 | 1.04 | 0.40 | 0.39 | Rec. | T | ALL | D |
| hCV1741111 | GJA4 | CCF2/UCSF2 | 0.0489 | 1.14 | 0.32 | 0.29 | Rec. | T | ALL | B |
| hCV1741111 | GJA4 | CCF2/UCSF2 | 0.0433 | 1.21 | 0.33 | 0.29 | Rec. | T | ALL | D |
| hCV2146579 | IL1F10 | CCF2/UCSF2 | 0.1140 | 1.02 | 0.36 | 0.36 | Rec. | C | ALL | D |
| hCV2199708 | CHCHD3 | CCF2/UCSF2 | 0.0491 | 0.83 | 0.45 | 0.50 | Add. | G | ALL | B |
| hCV2199708 | CHCHD3 | CCF2/UCSF2 | 0.1950 | 0.88 | 0.47 | 0.50 | Add. | G | ALL | D |
| hCV25644769 | AP3B1 | CCF2/UCSF2 | 0.0292 | 1.13 | 0.07 | 0.06 | Rec. | A | ALL | B |
| hCV25644769 | AP3B1 | CCF2/UCSF2 | 0.0545 | 1.17 | 0.07 | 0.06 | Rec. | A | ALL | D |
| hCV25651109 | SLC39A7 | CCF2/UCSF2 | 0.1490 | 0.72 | 0.04 | 0.06 | Add. | G | ALL | B |
| hCV25651109 | SLC39A7 | CCF2/UCSF2 | 0.1810 | 0.72 | 0.04 | 0.06 | Add. | G | ALL | D |
| hCV1022614 | ITGAE | CCF2 | 0.0561 | 1.14 | 0.21 | 0.19 | Rec. | T | ALL | B |
| hCV12107274 | PRH1 | CCF2 | 0.1020 | 1.23 | 0.34 | 0.29 | Allelic | T | ALL | B |
| hCV1449414 | OR13g1 | CCF2 | 0.0419 | 1.28 | 0.48 | 0.42 | Allelic | C | ALL | B |
| hCV16093418 | none | CCF2 | 0.0315 | 1.39 | 0.20 | 0.15 | Allelic | A | ALL | B |
| hCV2146578 | IL1F10 | CCF2 | 0.0408 | 0.88 | 0.41 | 0.44 | Dom. | C | ALL | B |
| hCV2476746 | PNPLA1 | CCF2 | 0.1780 | 0.87 | 0.37 | 0.40 | Dom. | C | ALL | B |
| hCV25472673 | NPC1 | CCF2 | 0.0199 | 1.32 | 0.43 | 0.36 | Allelic | C | ALL | B |
| hCV25623831 | C6orf47 | CCF2 | 0.0860 | 0.41 | 0.01 | 0.02 | Allelic | C | ALL | B |
| hCV25952089 | LY6G5B | CCF2 | 0.1200 | 0.59 | 0.03 | 0.04 | Allelic | C | ALL | B |
| hCV3200162 | PDK1 | CCF2 | 0.0867 | 0.81 | 0.32 | 0.37 | Allelic | A | ALL | B |
| hCV7494113 | PGRP-L | CCF2 | 0.0948 | 0.95 | 0.36 | 0.37 | Rec. | A | ALL | B |
| hCV8709053 | SOD2 | CCF2 | 0.0202 | 0.84 | 0.47 | 0.51 | Dom. | G | ALL | B |
| hCV103654 | SGNE1 | CCF1 | 0.0166 | 1.48 | 0.11 | 0.08 | Allelic | G | M | B |
| hCV103654 | SGNE1 | CCF1 | 0.0166 | 1.48 | 0.13 | 0.09 | Allelic | G | F | B |
| hCV103654 | SGNE1 | CCF2/UCSF2 | 0.0639 | 1.35 | 0.10 | 0.07 | Allelic | G | All | D |
| hCV103654 | SGNE1 | CCF2/UCSF2 | 0.0440 | 1.42 | 0.10 | 0.07 | Allelic | G | All | C |
| hCV11226061 | none | CCF1 | 0.0840 | 0.81 | 0.23 | 0.26 | Allelic | C | M | B |
| hCV11226061 | none | CCF1 | 0.0840 | 0.81 | 0.22 | 0.26 | Allelic | C | F | B |
| hCV11226061 | none | CCF2/UCSF2 | 0.0903 | 0.85 | 0.23 | 0.26 | Allelic | C | All | B |
| hCV11226061 | none | CCF2/UCSF2 | 0.0907 | 0.83 | 0.23 | 0.26 | Allelic | C | All | D |
| hCV11369602 | none | CCF1 | 0.0240 | 0.76 | 0.75 | 0.81 | Allelic | A | M | B |
| hCV11369602 | none | CCF1 | 0.0240 | 0.76 | 0.76 | 0.79 | Allelic | A | F | B |
| hCV11369602 | none | CCF2/UCSF2 | 0.0484 | 0.79 | 0.73 | 0.77 | Allelic | A | All | C |
| hCV11410105 | EIF2AK3 | CCF1 | 0.0001 | 0.67 | 0.63 | 0.70 | Allelic | A | M | B |
| hCV11410105 | EIF2AK3 | CCF1 | 0.0001 | 0.67 | 0.58 | 0.70 | Allelic | A | F | B |
| hCV11410105 | EIF2AK3 | CCF2/UCSF2 | 0.0564 | 0.83 | 0.65 | 0.69 | Allelic | A | All | D |
| hCV11410105 | EIF2AK3 | CCF2/UCSF2 | 0.0545 | 0.82 | 0.65 | 0.69 | Allelic | A | All | C |
| hCV11515507 | none | CCF1 | 0.0238 | 0.78 | 0.67 | 0.71 | Allelic | A | M | B |
| hCV11515507 | none | CCF1 | 0.0238 | 0.78 | 0.65 | 0.71 | Allelic | A | F | B |
| hCV11515507 | none | CCF2/UCSF2 | 0.0014 | 0.75 | 0.65 | 0.72 | Allelic | A | All | B |
| hCV11515507 | none | CCF2/UCSF2 | 0.0079 | 0.77 | 0.66 | 0.72 | Allelic | A | All | D |
| hCV11515507 | none | CCF2/UCSF2 | 0.0155 | 0.75 | 0.66 | 0.72 | Allelic | A | All | E |
| hCV11515507 | none | CCF2/UCSF2 | 0.0259 | 0.78 | 0.66 | 0.71 | Allelic | A | All | C |
| hCV11652653 | none | CCF1 | 0.0605 | 1.28 | 0.79 | 0.77 | Allelic | T | M | B |
| hCV11652653 | none | CCF1 | 0.0605 | 1.28 | 0.85 | 0.78 | Allelic | T | F | B |
| hCV11652653 | none | CCF2/UCSF2 | 0.0332 | 1.25 | 0.79 | 0.75 | Allelic | T | All | B |
| hCV11652653 | none | CCF2/UCSF2 | 0.0663 | 1.23 | 0.79 | 0.75 | Allelic | T | All | D |
| hCV11652653 | none | CCF2/UCSF2 | 0.0162 | 1.33 | 0.79 | 0.74 | Allelic | T | All | C |
| hCV11755246 | MAP1A | CCF1 | 0.0025 | 1.58 | 0.84 | 0.81 | Allelic | G | M | B |
| hCV11755246 | MAP1A | CCF1 | 0.0025 | 1.58 | 0.92 | 0.83 | Allelic | G | F | B |
| hCV11755246 | MAP1A | CCF2/UCSF2 | 0.0742 | 1.24 | 0.83 | 0.79 | Allelic | G | All | D |
| hCV11755246 | MAP1A | CCF2/UCSF2 | 0.0635 | 1.30 | 0.83 | 0.79 | Allelic | G | All | E |
| hCV11881857 | none | CCF1 | 0.0591 | 0.74 | 0.85 | 0.90 | Allelic | A | M | B |
| hCV11881857 | none | CCF1 | 0.0591 | 0.74 | 0.90 | 0.90 | Allelic | A | F | B |
| hCV11881857 | none | CCF2/UCSF2 | 0.0359 | 0.74 | 0.89 | 0.92 | Allelic | A | All | B |
| hCV11881857 | none | CCF2/UCSF2 | 0.0660 | 0.74 | 0.89 | 0.92 | Allelic | A | All | D |
| hCV11881857 | none | CCF2/UCSF2 | 0.0130 | 0.65 | 0.89 | 0.93 | Allelic | A | All | C |
| hCV12108773 | none | CCF1 | 0.0340 | 1.29 | 0.24 | 0.18 | Allelic | T | M | B |
| hCV12108773 | none | CCF1 | 0.0340 | 1.29 | 0.27 | 0.24 | Allelic | T | F | B |
| hCV12108773 | none | CCF2/UCSF2 | 0.0225 | 1.34 | 0.25 | 0.20 | Allelic | T | All | E |
| hCV12127954 | SNCG | CCF1 | 0.0977 | 1.21 | 0.27 | 0.23 | Allelic | T | M | B |
| hCV12127954 | SNCG | CCF1 | 0.0977 | 1.21 | 0.27 | 0.24 | Allelic | T | F | B |
| hCV12127954 | SNCG | CCF2/UCSF2 | 0.0932 | 1.18 | 0.26 | 0.23 | Allelic | T | All | B |
| hCV12127954 | SNCG | CCF2/UCSF2 | 0.0587 | 1.22 | 0.26 | 0.23 | Allelic | T | All | D |
| hCV12127954 | SNCG | CCF2/UCSF2 | 0.0333 | 1.28 | 0.26 | 0.22 | Allelic | T | All | C |
| hCV1251033 | PAX2 | CCF1 | 0.0906 | 1.24 | 0.81 | 0.79 | Allelic | G | M | B |
| hCV1251033 | PAX2 | CCF1 | 0.0906 | 1.24 | 0.82 | 0.76 | Allelic | G | F | B |
| hCV1251033 | PAX2 | CCF2/UCSF2 | 0.0294 | 1.25 | 0.79 | 0.75 | Allelic | G | All | B |
| hCV1251033 | PAX2 | CCF2/UCSF2 | 0.0230 | 1.29 | 0.80 | 0.75 | Allelic | G | All | D |
| hCV1251033 | PAX2 | CCF2/UCSF2 | 0.0438 | 1.31 | 0.80 | 0.75 | Allelic | G | All | E |
| hCV1251033 | PAX2 | CCF2/UCSF2 | 0.0423 | 1.28 | 0.80 | 0.75 | Allelic | G | All | C |
| hCV1331211 | ATP6V0A4 | CCF1 | 0.0476 | 1.27 | 0.76 | 0.73 | Allelic | G | M | B |
| hCV1331211 | ATP6V0A4 | CCF1 | 0.0476 | 1.27 | 0.79 | 0.73 | Allelic | G | F | B |
| hCV1331211 | ATP6V0A4 | CCF2/UCSF2 | 0.0753 | 1.24 | 0.72 | 0.68 | Allelic | G | All | E |
| hCV1496698 | FABP3 | CCF1 | 0.0590 | 1.75 | 0.96 | 0.95 | Allelic | T | M | B |
| hCV1496698 | FABP3 | CCF1 | 0.0590 | 1.75 | 0.98 | 0.96 | Allelic | T | F | B |
| hCV1496698 | FABP3 | CCF2/UCSF2 | 0.0904 | 1.52 | 0.97 | 0.96 | Allelic | T | All | B |
| hCV1496698 | FABP3 | CCF2/UCSF2 | 0.0637 | 1.65 | 0.98 | 0.96 | Allelic | T | All | D |
| hCV1496698 | FABP3 | CCF2/UCSF2 | 0.0035 | 2.34 | 0.98 | 0.94 | Allelic | T | All | E |
| hCV1567672 | PVRL1 | CCF1 | 0.0086 | 1.83 | 0.95 | 0.92 | Allelic | C | M | B |
| hCV1567672 | PVRL1 | CCF1 | 0.0086 | 1.83 | 0.95 | 0.91 | Allelic | C | F | B |
| hCV1567672 | FLJ45300 | CCF2/UCSF2 | 0.0762 | 1.39 | 0.95 | 0.93 | Allelic | C | All | B |
| hCV1567672 | FLJ45300 | CCF2/UCSF2 | 0.0661 | 1.43 | 0.95 | 0.93 | Allelic | C | All | D |
| hCV15853281 | ALDH4A1 | CCF1 | 0.0705 | 1.28 | 0.18 | 0.14 | Allelic | T | M | B |
| hCV15853281 | ALDH4A1 | CCF1 | 0.0705 | 1.28 | 0.17 | 0.14 | Allelic | T | F | B |
| hCV15853281 | ALDH4A1 | CCF2/UCSF2 | 0.0355 | 1.40 | 0.17 | 0.12 | Allelic | T | All | E |
| hCV15959718 | none | CCF1 | 0.0529 | 0.80 | 0.23 | 0.30 | Allelic | C | M | B |
| hCV15959718 | none | CCF1 | 0.0529 | 0.80 | 0.29 | 0.31 | Allelic | C | F | B |
| hCV15959718 | none | CCF2/UCSF2 | 0.0585 | 0.84 | 0.27 | 0.30 | Allelic | C | All | B |
| hCV15959718 | none | CCF2/UCSF2 | 0.0963 | 0.84 | 0.27 | 0.30 | Allelic | C | All | D |
| hCV15959718 | none | CCF2/UCSF2 | 0.0324 | 0.79 | 0.27 | 0.32 | Allelic | C | All | C |
| hCV16149795 | none | CCF1 | 0.0001 | 0.54 | 0.87 | 0.94 | Allelic | C | M | B |
| hCV16149795 | none | CCF1 | 0.0001 | 0.54 | 0.85 | 0.90 | Allelic | C | F | B |
| hCV16149795 | none | CCF2/UCSF2 | 0.0608 | 0.69 | 0.91 | 0.93 | Allelic | C | All | C |
| hCV16173091 | FABP1 | CCF1 | 0.0709 | 0.82 | 0.27 | 0.34 | Allelic | T | M | B |
| hCV16173091 | FABP1 | CCF1 | 0.0709 | 0.82 | 0.31 | 0.33 | Allelic | T | F | B |
| hCV16173091 | FABP1 | CCF2/UCSF2 | 0.0530 | 0.82 | 0.28 | 0.32 | Allelic | T | All | D |
| hCV16173091 | FABP1 | CCF2/UCSF2 | 0.0724 | 0.82 | 0.28 | 0.32 | Allelic | T | All | C |
| hCV16177220 | ODZ1 | CCF1 | 0.0036 | 0.65 | 0.12 | 0.18 | Allelic | C | M | B |
| hCV16177220 | ODZ1 | CCF1 | 0.0036 | 0.65 | 0.13 | 0.18 | Allelic | C | F | B |
| hCV16177220 | ODZ1 | CCF2/UCSF2 | 0.0614 | 0.77 | 0.15 | 0.19 | Allelic | C | All | E |
| hCV16235909 | PCDHGA1 | CCF1 | 0.0172 | 0.51 | 0.05 | 0.06 | Allelic | A | M | B |
| hCV16235909 | PCDHGA1 | CCF1 | 0.0172 | 0.51 | 0.01 | 0.06 | Allelic | A | F | B |
| hCV16235909 | PCDHGC5 | CCF2/UCSF2 | 0.0271 | 0.59 | 0.03 | 0.05 | Allelic | A | All | B |
| hCV16235909 | PCDHGC5 | CCF2/UCSF2 | 0.0079 | 0.50 | 0.02 | 0.05 | Allelic | A | All | D |
| hCV16235909 | PCDHGC5 | CCF2/UCSF2 | 0.0002 | 0.35 | 0.02 | 0.07 | Allelic | A | All | E |
| hCV1639945 | none | CCF1 | 0.0711 | 1.22 | 0.67 | 0.61 | Allelic | T | M | B |
| hCV1639945 | none | CCF1 | 0.0711 | 1.22 | 0.67 | 0.64 | Allelic | T | F | B |
| hCV1639945 | F13A1 | CCF2/UCSF2 | 0.0379 | 1.24 | 0.66 | 0.61 | Allelic | T | All | C |
| hCV1964590 | PATE | CCF1 | 0.0349 | 0.80 | 0.60 | 0.63 | Allelic | A | M | B |
| hCV1964590 | PATE | CCF1 | 0.0349 | 0.80 | 0.57 | 0.65 | Allelic | A | F | B |
| hCV1964590 | PATE | CCF2/UCSF2 | 0.0217 | 0.81 | 0.60 | 0.65 | Allelic | A | All | B |
| hCV1964590 | PATE | CCF2/UCSF2 | 0.0040 | 0.76 | 0.58 | 0.65 | Allelic | A | All | D |
| hCV1964590 | PATE | CCF2/UCSF2 | 0.0023 | 0.73 | 0.58 | 0.65 | Allelic | A | All | C |
| hCV2084293 | IL12B | CCF1 | 0.0157 | 0.76 | 0.71 | 0.78 | Allelic | G | M | B |
| hCV2084293 | IL12B | CCF1 | 0.0157 | 0.76 | 0.73 | 0.77 | Allelic | G | F | B |
| hCV2084293 | IL12B | CCF2/UCSF2 | 0.0119 | 0.78 | 0.75 | 0.79 | Allelic | G | All | B |
| hCV2084293 | IL12B | CCF2/UCSF2 | 0.0203 | 0.77 | 0.75 | 0.79 | Allelic | G | All | D |
| hCV2084293 | IL12B | CCF2/UCSF2 | 0.0018 | 0.68 | 0.75 | 0.81 | Allelic | G | All | C |
| hCV2092598 | PNN | CCF1 | 0.0039 | 0.54 | 0.92 | 0.96 | Allelic | A | M | B |
| hCV2092598 | PNN | CCF1 | 0.0039 | 0.54 | 0.94 | 0.96 | Allelic | A | F | B |
| hCV2092598 | PNN | CCF2/UCSF2 | 0.0990 | 0.69 | 0.93 | 0.95 | Allelic | A | All | C |
| hCV2119739 | FLJ10851 | CCF1 | 0.0207 | 0.79 | 0.43 | 0.53 | Allelic | C | M | B |
| hCV2119739 | FLJ10851 | CCF1 | 0.0207 | 0.79 | 0.52 | 0.53 | Allelic | C | F | B |
| hCV2119739 | OGDHL | CCF2/UCSF2 | 0.0083 | 0.80 | 0.46 | 0.52 | Allelic | C | All | B |
| hCV2119739 | OGDHL | CCF2/UCSF2 | 0.0051 | 0.77 | 0.45 | 0.52 | Allelic | C | All | D |
| hCV2119739 | OGDHL | CCF2/UCSF2 | 0.0016 | 0.72 | 0.45 | 0.53 | Allelic | C | All | C |
| hCV2119740 | FLJ10851 | CCF1 | 0.0455 | 1.23 | 0.50 | 0.43 | Allelic | T | M | B |
| hCV2119740 | FLJ10851 | CCF1 | 0.0455 | 1.23 | 0.45 | 0.42 | Allelic | T | F | B |
| hCV2119740 | OGDHL | CCF2/UCSF2 | 0.0349 | 1.20 | 0.47 | 0.43 | Allelic | T | All | B |
| hCV2119740 | OGDHL | CCF2/UCSF2 | 0.0300 | 1.22 | 0.48 | 0.43 | Allelic | T | All | D |
| hCV2119740 | OGDHL | CCF2/UCSF2 | 0.0074 | 1.31 | 0.48 | 0.41 | Allelic | T | All | C |
| hCV22271537 | C20orf42 | CCF1 | 0.0663 | 1.32 | 0.15 | 0.12 | Allelic | G | M | B |
| hCV22271537 | C20orf42 | CCF1 | 0.0663 | 1.32 | 0.13 | 0.10 | Allelic | G | F | B |
| hCV22271537 | C20orf42 | CCF2/UCSF2 | 0.0720 | 1.40 | 0.12 | 0.09 | Allelic | G | All | E |
| hCV236059 | none | CCF1 | 0.0786 | 0.76 | 0.87 | 0.91 | Allelic | T | M | B |
| hCV236059 | none | CCF1 | 0.0786 | 0.76 | 0.88 | 0.90 | Allelic | T | F | B |
| hCV236059 | PRPS1L1 | CCF2/UCSF2 | 0.0193 | 0.73 | 0.88 | 0.91 | Allelic | T | All | B |
| hCV236059 | PRPS1L1 | CCF2/UCSF2 | 0.0926 | 0.78 | 0.88 | 0.91 | Allelic | T | All | D |
| hCV236059 | PRPS1L1 | CCF2/UCSF2 | 0.0122 | 0.62 | 0.88 | 0.93 | Allelic | T | All | E |
| hCV239712 | SEC8 | CCF1 | 0.0087 | 0.76 | 0.58 | 0.65 | Allelic | A | M | B |
| hCV239Z12 | SEC8 | CCF1 | 0.0087 | 0.76 | 0.56 | 0.62 | Allelic | A | F | B |
| hCV239712 | SEC8L1 | CCF2/UCSF2 | 0.0920 | 0.85 | 0.57 | 0.61 | Allelic | A | All | D |
| hCV239712 | SEC8L1 | CCF2/UCSF2 | 0.0522 | 0.80 | 0.57 | 0.63 | Allelic | A | All | E |
| hCV2451180 | ODZ1 | CCF1 | 0.0031 | 0.58 | 0.07 | 0.13 | Allelic | A | M | B |
| hCV2451180 | ODZ1 | CCF1 | 0.0031 | 0.58 | 0.08 | 0.11 | Allelic | A | F | B |
| hCV2451180 | ODZ1 | CCF2/UCSF2 | 0.0717 | 0.74 | 0.06 | 0.08 | Allelic | A | All | B |
| hCV2451180 | ODZ1 | CCF2/UCSF2 | 0.0309 | 0.66 | 0.06 | 0.08 | Allelic | A | All | D |
| hCV2451180 | ODZ1 | CCF2/UCSF2 | 0.0104 | 0.57 | 0.06 | 0.10 | Allelic | A | All | E |
| hCV2478358 | MYH6 | CCF1 | 0.0045 | 0.60 | 0.08 | 0.13 | Allelic | C | M | B |
| hCV2478358 | MYH6 | CCF1 | 0.0045 | 0.60 | 0.08 | 0.12 | Allelic | C | F | B |
| hCV2478358 | MYH7 | CCF2/UCSF2 | 0.0938 | 0.74 | 0.10 | 0.14 | Allelic | C | All | E |
| hCV2485201 | SIX6 | CCF1 | 0.0305 | 0.79 | 0.34 | 0.38 | Allelic | A | M | B |
| hCV2485201 | SIX6 | CCF1 | 0.0305 | 0.79 | 0.32 | 0.39 | Allelic | A | F | B |
| hCV2485201 | SIX6 | CCF2/UCSF2 | 0.0480 | 0.84 | 0.36 | 0.40 | Allelic | A | All | B |
| hCV2485201 | SIX6 | CCF2/UCSF2 | 0.0667 | 0.84 | 0.36 | 0.40 | Allelic | A | All | D |
| hCV2485201 | SIX6 | CCF2/UCSF2 | 0.0933 | 0.83 | 0.36 | 0.40 | Allelic | A | All | E |
| hCV25474460 | RNF103 | CCF1 | 0.0872 | 0.60 | 0.97 | 0.98 | Allelic | A | M | B |
| hCV25474460 | RNF103 | CCF1 | 0.0872 | 0.60 | 0.96 | 0.98 | Allelic | A | F | B |
| hCV25474460 | RNF103 | CCF2/UCSF2 | 0.0753 | 0.52 | 0.97 | 0.98 | Allelic | A | All | C |
| hCV25601073 | PPP1R3C | CCF1 | 0.0001 | 2.13 | 0.05 | 0.05 | Allelic | G | M | B |
| hCV25601073 | PPP1R3C | CCF1 | 0.0001 | 2.13 | 0.11 | 0.03 | Allelic | G | F | B |
| hCV25601073 | PPP1R3C | CCF2/UCSF2 | 0.0333 | 1.82 | 0.06 | 0.03 | Allelic | G | All | E |
| hCV25610647 | KIAA0605 | CCF1 | 0.0434 | 0.77 | 0.79 | 0.83 | Allelic | A | M | B |
| hCV25610647 | KIAA0605 | CCF1 | 0.0434 | 0.77 | 0.79 | 0.82 | Allelic | A | F | B |
| hCV25610647 | KIAA0605 | CCF2/UCSF2 | 0.0480 | 0.76 | 0.83 | 0.87 | Allelic | A | All | C |
| hCV25617360 | IL12RB1 | CCF1 | 0.0281 | 0.73 | 0.14 | 0.19 | Allelic | C | M | B |
| hCV25617360 | IL12RB1 | CCF1 | 0.0281 | 0.73 | 0.14 | 0.17 | Allelic | C | F | B |
| hCV25617360 | IL12RB1 | CCF2/UCSF2 | 0.0930 | 0.82 | 0.17 | 0.20 | Allelic | C | All | D |
| hCV25617360 | IL12RB1 | CCF2/UCSF2 | 0.0285 | 0.74 | 0.17 | 0.22 | Allelic | C | All | E |
| hCV25617826 | VEZATIN | CCF1 | 0.0003 | 0.46 | 0.93 | 0.97 | Allelic | A | M | B |
| hCV25617826 | VEZATIN | CCF1 | 0.0003 | 0.46 | 0.93 | 0.96 | Allelic | A | F | B |
| hCV25617826 | VEZATIN | CCF2/UCSF2 | 0.0380 | 0.54 | 0.95 | 0.97 | Allelic | A | All | E |
| hCV25643507 | FLJ21802 | CCF1 | 0.0313 | 1.25 | 0.61 | 0.56 | Allelic | T | M | B |
| hCV25643507 | FLJ21802 | CCF1 | 0.0313 | 1.25 | 0.61 | 0.55 | Allelic | T | F | B |
| hCV25643507 | C14orf169 | CCF2/UCSF2 | 0.0703 | 1.20 | 0.57 | 0.52 | Allelic | T | All | C |
| hCV25746098 | none | CCF1 | 0.0176 | 0.59 | 0.06 | 0.09 | Allelic | T | M | B |
| hCV25746098 | none | CCF1 | 0.0176 | 0.59 | 0.04 | 0.08 | Allelic | T | F | B |
| hCV25746098 | none | CCF2/UCSF2 | 0.0373 | 0.66 | 0.07 | 0.11 | Allelic | T | All | E |
| hCV25927820 | none | CCF1 | 0.0795 | 1.30 | 0.15 | 0.11 | Allelic | T | M | B |
| hCV25927820 | none | CCF1 | 0.0795 | 1.30 | 0.13 | 0.11 | Allelic | T | F | B |
| hCV25927820 | none | CCF2/UCSF2 | 0.0999 | 1.33 | 0.12 | 0.09 | Allelic | T | All | C |
| hCV25929042 | none | CCF1 | 0.0085 | 9.04 | 1.00 | 0.98 | Allelic | C | M | B |
| hCV25929042 | none | CCF1 | 0.0085 | 9.04 | 1.00 | 0.98 | Allelic | C | F | B |
| hCV25929042 | LOXHD1 | CCF2/UCSF2 | 0.0069 | 2.72 | 0.99 | 0.98 | Allelic | C | All | B |
| hCV25929042 | LOXHD1 | CCF2/UCSF2 | 0.0284 | 2.51 | 0.99 | 0.98 | Allelic | C | All | D |
| hCV25929042 | LOXHD1 | CCF2/UCSF2 | 0.0165 | 2.83 | 0.99 | 0.97 | Allelic | C | All | C |
| hCV25937798 | NDUFA2 | CCF1 | 0.0109 | 1.34 | 0.25 | 0.23 | Allelic | G | M | B |
| hCV25937798 | NDUFA2 | CCF1 | 0.0109 | 1.34 | 0.31 | 0.21 | Allelic | G | F | B |
| hCV25937798 | NDUFA2 | CCF2/UCSF2 | 0.0512 | 1.26 | 0.26 | 0.22 | Allelic | G | All | C |
| hCV25943718 | DJ122O8.2 | CCF1 | 0.0360 | 1.30 | 0.20 | 0.16 | Allelic | C | M | B |
| hCV25943718 | DJ122O8.2 | CCF1 | 0.0360 | 1.30 | 0.24 | 0.20 | Allelic | C | F | B |
| hCV25943718 | DJ122O8.2 | CCF2/UCSF2 | 0.0261 | 1.29 | 0.23 | 0.19 | Allelic | C | All | D |
| hCV25943718 | DJ122O8.2 | CCF2/UCSF2 | 0.0178 | 1.34 | 0.23 | 0.18 | Allelic | C | All | C |
| hCV25957006 | none | CCF1 | 0.0955 | 1.34 | 0.91 | 0.88 | Allelic | T | M | B |
| hCV25957006 | none | CCF1 | 0.0955 | 1.34 | 0.91 | 0.89 | Allelic | T | F | B |
| hCV25957006 | none | CCF2/UCSF2 | 0.0974 | 1.33 | 0.89 | 0.86 | Allelic | T | All | E |
| hCV25959417 | LEPRE1 | CCF1 | 0.0924 | 1.34 | 0.09 | 0.07 | Allelic | T | M | B |
| hCV25959417 | LEPRE1 | CCF1 | 0.0924 | 1.34 | 0.10 | 0.08 | Allelic | T | F | B |
| hCV25959417 | LEPRE1 | CCF2/UCSF2 | 0.0046 | 1.52 | 0.10 | 0.07 | Allelic | T | All | B |
| hCV25959417 | LEPRE1 | CCF2/UCSF2 | 0.0172 | 1.48 | 0.10 | 0.07 | Allelic | T | All | D |
| hCV25959417 | LEPRE1 | CCF2/UCSF2 | 0.0829 | 1.41 | 0.10 | 0.07 | Allelic | T | All | E |
| hCV25959417 | LEPRE1 | CCF2/UCSF2 | 0.0173 | 1.54 | 0.10 | 0.07 | Allelic | T | All | C |
| hCV25960573 | MGC40368 | CCF1 | 0.0140 | 1.34 | 0.25 | 0.18 | Allelic | G | M | B |
| hCV25960573 | MGC40368 | CCF1 | 0.0140 | 1.34 | 0.26 | 0.22 | Allelic | G | F | B |
| hCV25960573 | MGC40368 | CCF2/UCSF2 | 0.0605 | 1.26 | 0.24 | 0.20 | Allelic | G | All | C |
| hCV25966452 | none | CCF1 | 0.0532 | 1.22 | 0.49 | 0.47 | Allelic | G | M | B |
| hCV25966452 | none | CCF1 | 0.0532 | 1.22 | 0.56 | 0.48 | Allelic | G | F | B |
| hCV25966452 | none | CCF2/UCSF2 | 0.0025 | 1.29 | 0.51 | 0.45 | Allelic | G | All | B |
| hCV25966452 | none | CCF2/UCSF2 | 0.0018 | 1.33 | 0.52 | 0.45 | Allelic | G | All | D |
| hCV25966452 | none | CCF2/UCSF2 | 0.0386 | 1.25 | 0.52 | 0.46 | Allelic | G | All | E |
| hCV25966452 | none | CCF2/UCSF2 | 0.0011 | 1.39 | 0.52 | 0.44 | Allelic | G | All | C |
| hCV25996687 | none | CCF1 | 0.0075 | 2.01 | 0.97 | 0.92 | Allelic | T | M | B |
| hCV25996687 | none | CCF1 | 0.0075 | 2.01 | 0.96 | 0.95 | Allelic | T | F | B |
| hCV25996687 | none | CCF2/UCSF2 | 0.0407 | 1.50 | 0.96 | 0.94 | Allelic | T | All | B |
| hCV25996687 | none | CCF2/UCSF2 | 0.0433 | 1.57 | 0.96 | 0.94 | Allelic | T | All | D |
| hCV25996687 | none | CCF2/UCSF2 | 0.0811 | 1.58 | 0.96 | 0.94 | Allelic | T | All | E |
| hCV25996687 | none | CCF2/UCSF2 | 0.0700 | 1.56 | 0.96 | 0.94 | Allelic | T | All | C |
| hCV2731613 | none | CCF1 | 0.0789 | 1.27 | 0.84 | 0.79 | Allelic | T | M | B |
| hCV2731613 | none | CCF1 | 0.0789 | 1.27 | 0.82 | 0.79 | Allelic | T | F | B |
| hCV2731613 | none | CCF2/UCSF2 | 0.0275 | 1.34 | 0.84 | 0.80 | Allelic | T | All | C |
| hCV2734178 | none | CCF1 | 0.0342 | 1.24 | 0.52 | 0.47 | Allelic | T | M | B |
| hCV2734178 | none | CCF1 | 0.0342 | 1.24 | 0.54 | 0.48 | Allelic | T | F | B |
| hCV2734178 | none | CCF2/UCSF2 | 0.0004 | 1.35 | 0.53 | 0.46 | Allelic | T | All | B |
| hCV2734178 | none | CCF2/UCSF2 | 0.0025 | 1.33 | 0.53 | 0.46 | Allelic | T | All | D |
| hCV2734178 | none | CCF2/UCSF2 | 0.0387 | 1.26 | 0.53 | 0.47 | Allelic | T | All | E |
| hCV2734178 | none | CCF2/UCSF2 | 0.0022 | 1.37 | 0.53 | 0.45 | Allelic | T | All | C |
| hCV2743605 | none | CCF1 | 0.0450 | 1.46 | 0.09 | 0.06 | Allelic | A | M | B |
| hCV2743605 | none | CCF1 | 0.0450 | 1.46 | 0.09 | 0.06 | Allelic | A | F | B |
| hCV2743605 | CDC42BPA | CCF2/UCSF2 | 0.0651 | 1.38 | 0.08 | 0.06 | Allelic | A | All | D |
| hCV2743605 | CDC42BPA | CCF2/UCSF2 | 0.0184 | 1.61 | 0.08 | 0.05 | Allelic | A | All | C |
| hCV2806721 | none | CCF1 | 0.0295 | 1.44 | 0.91 | 0.85 | Allelic | T | M | B |
| hCV2806721 | none | CCF1 | 0.0295 | 1.44 | 0.90 | 0.88 | Allelic | T | F | B |
| hCV2806721 | none | CCF2/UCSF2 | 0.0991 | 1.30 | 0.88 | 0.84 | Allelic | T | All | E |
| hCV2870586 | C21orf107 | CCF1 | 0.0690 | 0.83 | 0.54 | 0.61 | Allelic | A | M | B |
| hCV2870586 | C21orf107 | CCF1 | 0.0690 | 0.83 | 0.57 | 0.58 | Allelic | A | F | B |
| hCV2870586 | C21orf107 | CCF2/UCSF2 | 0.0435 | 0.82 | 0.53 | 0.58 | Allelic | A | All | C |
| hCV2987428 | USP9X | CCF1 | 0.0057 | 0.75 | 0.55 | 0.60 | Allelic | C | M | B |
| hCV2987428 | USP9X | CCF1 | 0.0057 | 0.75 | 0.52 | 0.61 | Allelic | C | F | B |
| hCV2987428 | USP9X | CCF2/UCSF2 | 0.0983 | 0.84 | 0.60 | 0.64 | Allelic | C | All | C |
| hCV3091588 | SLAM | CCF1 | 0.0169 | 1.46 | 0.14 | 0.09 | Allelic | T | M | B |
| hCV3091588 | SLAM | CCF1 | 0.0169 | 1.46 | 0.11 | 0.09 | Allelic | T | F | B |
| hCV3091588 | SLAMF1 | CCF2/UCSF2 | 0.0702 | 1.41 | 0.10 | 0.08 | Allelic | T | All | E |
| hCV3155879 | none | CCF1 | 0.0331 | 0.69 | 0.10 | 0.13 | Allelic | C | M | B |
| hCV3155879 | none | CCF1 | 0.0331 | 0.69 | 0.08 | 0.12 | Allelic | C | F | B |
| hCV3155879 | none | CCF2/UCSF2 | 0.0650 | 0.79 | 0.12 | 0.14 | Allelic | C | All | B |
| hCV3193216 | FLJ36664 | CCF1 | 0.0628 | 0.82 | 0.62 | 0.68 | Allelic | C | M | B |
| hCV3193216 | FLJ36664 | CCF1 | 0.0628 | 0.82 | 0.63 | 0.65 | Allelic | C | F | B |
| hCV3193216 | C9orf126 | CCF2/UCSF2 | 0.0685 | 0.85 | 0.64 | 0.68 | Allelic | C | All | B |
| hCV3215412 | APRG1 | CCF1 | 0.0033 | 1.36 | 0.57 | 0.50 | Allelic | G | M | B |
| hCV3215412 | APRG1 | CCF1 | 0.0033 | 1.36 | 0.64 | 0.55 | Allelic | G | F | B |
| hCV3215412 | ITGA9 | CCF2/UCSF2 | 0.0375 | 1.26 | 0.59 | 0.53 | Allelic | G | All | E |
| hCV3216148 | HNRPD | CCF1 | 0.0218 | 0.75 | 0.77 | 0.80 | Allelic | T | M | B |
| hCV3216148 | HNRPD | CCF1 | 0.0218 | 0.75 | 0.77 | 0.82 | Allelic | T | F | B |
| hCV3216148 | HNRPD | CCF2/UCSF2 | 0.0001 | 0.66 | 0.74 | 0.81 | Allelic | T | All | B |
| hCV3216148 | HNRPD | CCF2/UCSF2 | 0.0008 | 0.69 | 0.75 | 0.81 | Allelic | T | All | D |
| hCV3216148 | HNRPD | CCF2/UCSF2 | 0.0024 | 0.67 | 0.75 | 0.82 | Allelic | T | All | E |
| hCV3216148 | HNRPD | CCF2/UCSF2 | 0.0041 | 0.70 | 0.75 | 0.81 | Allelic | T | All | C |
| hCV3233728 | BAT4 | CCF1 | 0.0419 | 0.76 | 0.83 | 0.86 | Allelic | A | M | B |
| hCV3233728 | BAT4 | CCF1 | 0.0419 | 0.76 | 0.80 | 0.85 | Allelic | T | F | B |
| hCV3233728 | CSNK2B | CCF2/UCSF2 | 0.0665 | 0.81 | 0.81 | 0.84 | Allelic | A | All | B |
| hCV3233728 | CSNK2B | CCF2/UCSF2 | 0.0289 | 0.77 | 0.80 | 0.84 | Allelic | A | All | D |
| hCV3233728 | CSNK2B | CCF2/UCSF2 | 0.0060 | 0.70 | 0.80 | 0.85 | Allelic | A | All | C |
| hCV3295359 | PCSK2 | CCF1 | 0.0023 | 1.58 | 0.12 | 0.09 | Allelic | G | M | B |
| hCV3295359 | PCSK2 | CCF1 | 0.0023 | 1.58 | 0.17 | 0.10 | Allelic | G | F | B |
| hCV3295359 | PCSK2 | CCF2/UCSF2 | 0.0943 | 1.33 | 0.11 | 0.09 | Allelic | G | All | C |
| hCV3297574 | PCDHA1 | CCF1 | 0.0256 | 0.80 | 0.46 | 0.52 | Allelic | C | M | B |
| hCV3297574 | PCDHA1 | CCF1 | 0.0256 | 0.80 | 0.47 | 0.52 | Allelic | C | F | B |
| hCV3297574 | PCDHAC2 | CCF2/UCSF2 | 0.0663 | 0.84 | 0.45 | 0.49 | Allelic | C | All | D |
| hCV3297574 | PCDHAC2 | CCF2/UCSF2 | 0.0160 | 0.78 | 0.45 | 0.51 | Allelic | C | All | C |
| hCV447208 | none | CCF1 | 0.0535 | 1.24 | 0.28 | 0.25 | Allelic | G | M | B |
| hCV447208 | none | CCF1 | 0.0535 | 1.24 | 0.31 | 0.26 | Allelic | G | F | B |
| hCV447208 | none | CCF2/UCSF2 | 0.0983 | 1.18 | 0.27 | 0.24 | Allelic | G | All | B |
| hCV447208 | none | CCF2/UCSF2 | 0.0555 | 1.23 | 0.28 | 0.24 | Allelic | G | All | D |
| hCV447208 | none | CCF2/UCSF2 | 0.0229 | 1.31 | 0.28 | 0.22 | Allelic | G | All | C |
| hCV447698 | VAV3 | CCF1 | 0.0072 | 0.73 | 0.26 | 0.34 | Allelic | A | M | B |
| hCV447698 | VAV3 | CCF1 | 0.0072 | 0.73 | 0.26 | 0.30 | Allelic | A | F | B |
| hCV447698 | VAV3 | CCF2/UCSF2 | 0.0315 | 0.82 | 0.29 | 0.34 | Allelic | A | All | B |
| hCV466781 | none | CCF1 | 0.0945 | 0.82 | 0.79 | 0.81 | Allelic | C | M | B |
| hCV466781 | none | CCF1 | 0.0945 | 0.82 | 0.74 | 0.79 | Allelic | C | F | B |
| hCV466781 | none | CCF2/UCSF2 | 0.0956 | 0.84 | 0.71 | 0.75 | Allelic | C | All | D |
| hCV466781 | none | CCF2/UCSF2 | 0.0599 | 0.80 | 0.71 | 0.76 | Allelic | C | All | C |
| hCV594695 | SERPINA1 | CCF1 | 0.0914 | 0.66 | 0.95 | 0.98 | Allelic | A | M | B |
| hCV594695 | SERPINA1 | CCF1 | 0.0914 | 0.66 | 0.95 | 0.96 | Allelic | A | F | B |
| hCV594695 | SERPINA1 | CCF2/UCSF2 | 0.0815 | 0.68 | 0.95 | 0.96 | Allelic | A | All | D |
| hCV594695 | SERPINA1 | CCF2/UCSF2 | 0.0819 | 0.62 | 0.95 | 0.97 | Allelic | A | All | E |
| hCV612081 | none | CCF1 | 0.0459 | 0.80 | 0.69 | 0.73 | Allelic | A | M | B |
| hCV612081 | none | CCF1 | 0.0459 | 0.80 | 0.63 | 0.68 | Allelic | A | F | B |
| hCV612081 | none | CCF2/UCSF2 | 0.0884 | 0.84 | 0.68 | 0.71 | Allelic | A | All | D |
| hCV612081 | none | CCF2/UCSF2 | 0.0501 | 0.79 | 0.68 | 0.72 | Allelic | A | All | E |
| hCV626116 | ARPC4 | CCF1 | 0.0066 | 0.70 | 0.81 | 0.85 | Allelic | C | M | B |
| hCV626116 | ARPC4 | CCF1 | 0.0066 | 0.70 | 0.79 | 0.85 | Allelic | C | F | B |
| hCV626116 | TADA3L | CCF2/UCSF2 | 0.0162 | 0.76 | 0.82 | 0.85 | Allelic | C | All | B |
| hCV626116 | TADA3L | CCF2/UCSF2 | 0.0759 | 0.80 | 0.82 | 0.85 | Allelic | C | All | D |
| hCV626116 | TADA3L | CCF2/UCSF2 | 0.0441 | 0.76 | 0.82 | 0.86 | Allelic | C | All | C |
| hCV638094 | FRZB | CCF1 | 0.0907 | 1.32 | 0.91 | 0.86 | Allelic | G | M | B |
| hCV638094 | FRZB | CCF1 | 0.0907 | 1.32 | 0.89 | 0.88 | Allelic | G | F | B |
| hCV638094 | FRZB | CCF2/UCSF2 | 0.0502 | 1.31 | 0.90 | 0.87 | Allelic | G | All | B |
| hCV638094 | FRZB | CCF2/UCSF2 | 0.0645 | 1.32 | 0.90 | 0.87 | Allelic | G | All | D |
| hCV638094 | FRZB | CCF2/UCSF2 | 0.0601 | 1.39 | 0.90 | 0.87 | Allelic | G | All | E |
| hCV679051 | FBP2 | CCF1 | 0.0574 | 0.73 | 0.12 | 0.14 | Allelic | G | M | B |
| hCV679051 | FBP2 | CCF1 | 0.0574 | 0.73 | 0.08 | 0.13 | Allelic | G | F | B |
| hCV679051 | FBP2 | CCF2/UCSF2 | 0.0937 | 0.81 | 0.12 | 0.14 | Allelic | G | All | B |
| hCV7433876 | SNCG | CCF1 | 0.0223 | 0.79 | 0.48 | 0.54 | Allelic | A | M | B |
| hCV7433876 | SNCG | CCF1 | 0.0223 | 0.79 | 0.47 | 0.53 | Allelic | A | F | B |
| hCV7433876 | MMRN2 | CCF2/UCSF2 | 0.0630 | 0.83 | 0.51 | 0.56 | Allelic | A | All | C |
| hCV7463288 | R3HDM | CCF1 | 0.0004 | 0.61 | 0.13 | 0.23 | Allelic | A | M | B |
| hCV7463288 | R3HDM | CCF1 | 0.0004 | 0.61 | 0.17 | 0.22 | Allelic | A | F | B |
| hCV7463288 | R3HDM | CCF2/UCSF2 | 0.0736 | 0.83 | 0.19 | 0.22 | Allelic | A | All | B |
| hCV7463288 | R3HDM | CCF2/UCSF2 | 0.0504 | 0.80 | 0.19 | 0.22 | Allelic | A | All | D |
| hCV7463288 | R3HDM | CCF2/UCSF2 | 0.0046 | 0.70 | 0.19 | 0.25 | Allelic | A | All | C |
| hCV7479431 | IGSF9 | CCF1 | 0.0854 | 1.45 | 0.08 | 0.04 | Allelic | T | M | B |
| hCV7479431 | IGSF9 | CCF1 | 0.0082 | 1.57 | 0.13 | 0.07 | Allelic | T | M | B |
| hCV7479431 | IGSF9 | CCF1 | 0.0854 | 1.45 | 0.05 | 0.05 | Allelic | T | F | B |
| hCV7479431 | IGSF9 | CCF1 | 0.0082 | 1.57 | 0.09 | 0.08 | Allelic | T | F | B |
| hCV7479431 | IGSF9 | CCF2/UCSF2 | 0.0744 | 1.34 | 0.09 | 0.07 | Allelic | T | All | B |
| hCV7479431 | IGSF9 | CCF2/UCSF2 | 0.0272 | 1.44 | 0.09 | 0.07 | Allelic | T | All | D |
| hCV7479431 | IGSF9 | CCF2/UCSF2 | 0.0690 | 1.44 | 0.09 | 0.07 | Allelic | T | All | E |
| hCV7479431 | IGSF9 | CCF2/UCSF2 | 0.0470 | 1.45 | 0.09 | 0.07 | Allelic | T | All | C |
| hCV7514103 | none | CCF1 | 0.0309 | 0.74 | 0.82 | 0.88 | Allelic | C | M | B |
| hCV7514103 | none | CCF1 | 0.0309 | 0.74 | 0.85 | 0.86 | Allelic | C | F | B |
| hCV7514103 | none | CCF2/UCSF2 | 0.0941 | 0.82 | 0.84 | 0.87 | Allelic | C | All | B |
| hCV7514103 | none | CCF2/UCSF2 | 0.0320 | 0.73 | 0.85 | 0.88 | Allelic | C | All | C |
| hCV7514722 | BAT2 | CCF1 | 0.0457 | 1.29 | 0.20 | 0.16 | Allelic | G | M | B |
| hCV7514722 | BAT2 | CCF1 | 0.0457 | 1.29 | 0.22 | 0.18 | Allelic | G | F | B |
| hCV7514722 | BAT2 | CCF2/UCSF2 | 0.0688 | 1.23 | 0.21 | 0.18 | Allelic | G | All | D |
| hCV7514722 | BAT2 | CCF2/UCSF2 | 0.0337 | 1.31 | 0.21 | 0.17 | Allelic | G | All | C |
| hCV7602438 | none | CCF1 | 0.0034 | 1.37 | 0.66 | 0.58 | Allelic | T | M | B |
| hCV7602438 | none | CCF1 | 0.0034 | 1.37 | 0.65 | 0.57 | Allelic | T | F | B |
| hCV7602438 | none | CCF2/UCSF2 | 0.0942 | 1.19 | 0.60 | 0.56 | Allelic | T | All | C |
| hCV7952834 | none | CCF1 | 0.0880 | 0.84 | 0.54 | 0.59 | Allelic | A | M | B |
| hCV7952834 | none | CCF1 | 0.0880 | 0.84 | 0.56 | 0.60 | Allelic | A | F | B |
| hCV7952834 | none | CCF2/UCSF2 | 0.0036 | 0.78 | 0.55 | 0.61 | Allelic | A | All | B |
| hCV7952834 | none | CCF2/UCSF2 | 0.0044 | 0.77 | 0.54 | 0.61 | Allelic | A | All | D |
| hCV7952834 | none | CCF2/UCSF2 | 0.0151 | 0.76 | 0.54 | 0.61 | Allelic | A | All | E |
| hCV7952834 | none | CCF2/UCSF2 | 0.0110 | 0.77 | 0.54 | 0.61 | Allelic | A | All | C |
| hCV8332900 | GLO1 | CCF1 | 0.0650 | 0.83 | 0.55 | 0.57 | Allelic | G | M | B |
| hCV8332900 | GLO1 | CCF1 | 0.0650 | 0.83 | 0.52 | 0.59 | Allelic | G | F | B |
| hCV8332900 | GLO1 | CCF2/UCSF2 | 0.0013 | 0.76 | 0.53 | 0.60 | Allelic | G | All | B |
| hCV8332900 | GLO1 | CCF2/UCSF2 | 0.0364 | 0.82 | 0.55 | 0.60 | Allelic | G | All | D |
| hCV8332900 | GLO1 | CCF2/UCSF2 | 0.0422 | 0.81 | 0.55 | 0.60 | Allelic | G | All | C |
| hCV8807844 | NRP2 | CCF1 | 0.0034 | 0.69 | 0.78 | 0.84 | Allelic | A | M | B |
| hCV8807844 | NRP2 | CCF1 | 0.0034 | 0.69 | 0.77 | 0.83 | Allelic | A | F | B |
| hCV8807844 | NRP2 | CCF2/UCSF2 | 0.0890 | 0.85 | 0.75 | 0.78 | Allelic | A | All | B |
| hCV8938071 | none | CCF1 | 0.0019 | 0.71 | 0.32 | 0.40 | Allelic | G | M | B |
| hCV8938071 | none | CCF1 | 0.0019 | 0.71 | 0.32 | 0.39 | Allelic | G | F | B |
| hCV8938071 | WASF2 | CCF2/UCSF2 | 0.0013 | 0.75 | 0.32 | 0.39 | Allelic | G | All | B |
| hCV8938071 | WASF2 | CCF2/UCSF2 | 0.0050 | 0.76 | 0.32 | 0.39 | Allelic | G | All | D |
| hCV8938071 | WASF2 | CCF2/UCSF2 | 0.0200 | 0.76 | 0.32 | 0.39 | Allelic | G | All | E |
| hCV8938071 | WASF2 | CCF2/UCSF2 | 0.0091 | 0.76 | 0.32 | 0.39 | Allelic | G | All | C |
| hCV945234 | KRT6IRS | CCF1 | 0.0015 | 1.44 | 0.26 | 0.21 | Allelic | T | M | B |
| hCV945234 | KRT6IRS | CCF1 | 0.0015 | 1.44 | 0.30 | 0.22 | Allelic | T | F | B |
| hCV945234 | KRT6IRS | CCF2/UCSF2 | 0.0767 | 1.21 | 0.27 | 0.23 | Allelic | T | All | D |
| hCV945234 | KRT6IRS | CCF2/UCSF2 | 0.0356 | 1.32 | 0.27 | 0.22 | Allelic | T | All | E |
| hCV9693763 | GLUL | CCF1 | 0.0569 | 0.79 | 0.78 | 0.82 | Allelic | C | M | B |
| hCV9693763 | GLUL | CCF1 | 0.0569 | 0.79 | 0.77 | 0.81 | Allelic | C | F | B |
| hCV9693763 | GLUL | CCF2/UCSF2 | 0.0732 | 0.83 | 0.77 | 0.80 | Allelic | C | All | B |
| hCV9693763 | GLUL | CCF2/UCSF2 | 0.0498 | 0.80 | 0.76 | 0.80 | Allelic | C | All | D |
| hCV9693763 | GLUL | CCF2/UCSF2 | 0.0514 | 0.79 | 0.76 | 0.80 | Allelic | C | All | C |
| hCV11628130 | GH1 | CCF1 | 0.0123 | 3.78 | 0.38 | 0.14 | Rec | A | Age T1 | A |
| hCV11628130 | GH1 | UCSF1 | 0.0369 | 2.26 | 0.37 | 0.20 | Rec | A | Age T1 | A |
| hCV11628130 | GH1 | CCF1 | 0.0054 | 2.08 | 0.79 | 0.65 | Dom | A | ALL | A |
| hCV11628130 | GH1 | UCSF1 | 0.0247 | 1.52 | 0.52 | 0.41 | Allelic | A | M | A |
| hCV11628130 | GH1 | CCF1 | 0.0441 | 1.85 | 0.77 | 0.64 | Dom | A | Smoke+ | A |
| hCV11628130 | GH1 | UCSF1 | 0.0202 | 1.96 | 0.78 | 0.64 | Dom | A | Smoke+ | A |
| hCV11970864 | NTRK1 | CCF1 | 0.0339 | 11.43 | 0.06 | 0.01 | Rec | T | Age T1 | A |
| hCV11970864 | NTRK1 | CCF1 | 0.0012 | 31.70 | 0.02 | 0.00 | Rec | T | M | A |
| hCV11970864 | NTRK1 | CCF1 | 0.0016 | 30.00 | 0.04 | 0.00 | Rec | T | Smoke− | A |
| hCV11970864 | NTRK1 | UCSF1 | 0.0217 | 1.85 | 0.18 | 0.11 | Dom | T | ALL | A |
| hCV11975273 | F5 | CCF1 | 0.0006 | 2.36 | 0.11 | 0.05 | Add | G | ALL | A |
| hCV11975273 | F5 | CCF1 | 0.0494 | 9.90 | 0.02 | 0.00 | Rec | G | M | A |
| hCV11975273 | F5 | UCSF1 | 0.0469 | 1.96 | 0.19 | 0.11 | Dom | G | M | A |
| hCV1985480 | AGT | CCF1 | 0.0144 | 5.56 | 0.07 | 0.01 | Rec | A | F | A |
| hCV1985480 | AGT | UCSF1 | 0.0498 | 4.61 | 0.05 | 0.01 | Rec | A | F | A |
| hCV210485 | IGF1R | CCF1 | 0.0146 | 0.48 | 0.25 | 0.41 | Allelic | C | Age T3 | A |
| hCV210485 | IGF1R | UCSF1 | 0.0419 | 0.61 | 0.29 | 0.40 | Add | C | Age T3 | A |
| hCV210485 | IGF1R | UCSF1 | 0.0288 | 0.45 | 0.08 | 0.15 | Rec | C | ALL | A |
| hCV2143203 | CD44 | CCF1 | 0.0328 | 1.93 | 0.46 | 0.30 | Dom | T | M | A |
| hCV2143203 | CD44 | UCSF1 | 0.0216 | 1.64 | 0.24 | 0.16 | Add | T | M | A |
| hCV2932115 | KLK1 | UCSF1 | 0.0222 | 0.22 | 0.02 | 0.08 | Rec | T | ALL | A |
| hCV2932115 | KLK1 | CCF1 | 0.0082 | 0.33 | 0.12 | 0.28 | Allelic | T | Smoke− | A |
| hCV7584364 | PTGS1 | CCF1 | 0.0358 | 11.23 | 0.06 | 0.01 | Rec | T | Age T1 | A |
| hCV7584364 | PTGS1 | UCSF1 | 0.0003 | 39.50 | 0.03 | 0.00 | Rec | T | Age T1 | A |
| hCV7586198 | SERPINA10 | UCSF1 | 0.0121 | 0.39 | 0.43 | 0.66 | Dom | T | Age T1 | A |
| hCV7586198 | SERPINA10 | CCF1 | 0.0269 | 0.62 | 0.53 | 0.65 | Dom | T | ALL | A |
| hCV8726331 | ICAM1 | UCSF1 | 0.0469 | 4.74 | 0.05 | 0.01 | Rec | A | M | A |

A Stroke cases vs. no-stroke controls
B Stroke cases vs. clean controls
C Non-cardiogenic stroke cases vs. no atrial fibrillation controls
D Non-cardiogenic stroke cases vs. clean controls
E Non-cardiogenic stroke cases vs. clean controls

The application's sequence listing, which the Patent Office published only in electronic form, follows.

SEQUENCE LISTING (55503 sequences)

SEQ ID NO: 1 - DNA, 2284 bp, Homo sapiens
aaagaaaggcgatgctaagaaacrtgctgcaggggaggctggcacattctgctccttagctaaccgcacaggcccatgggtccacacacatcagaccatggctctctgtggtctatctttgccattactttaaccaggctgtttctcatgcgctcatggagggtgactgaagatgccaccccgaggtgcaccctcagcctcgctggacacttacggctcgcattctccagccggaccaggcagttgaggaagtcatcgaagtccagctggagctcctcatccgcatacctgagcacaatcagctgcaggaggtggctgctcagctgaaagcctgtggggacaaaggaggagacccaggactcgctgtatccgagccccgagggtatgcrgaagcsagcaccccagtctgagatggctcctgccggtgtgagcctgagggccmccatcctctgcctcctggcctgggctggcctggctgcaggtgaccgggtgtacatacaccccttccacytcgtcatccacaatgagagtaccygtgagyagctggcaaaggccaatgccgggaagcccaaagaccccaccttcatacctgctccaattcaggccaagacatcccctgtggatgaaaaggccctacaggaccagctggtgctagtygctgcaaaacttgacacyraagacaagttgagggccgcaatggtcgggatgctggcyaacttcttgkgcttccgtatatatggcatgcacagtgagctatggggcgtggtccatggggccaccgtcctctccccaayggctgtctttggcaccctggcctctctctatctgggagccttggaccacacagctgacaggctacaggcaatcctgggtgttccttggaaggacaagaactgcacctcccggctggatgcgcacaaggtcctgtctgccctgcaggctgtacagggcctgctagtggcccagggcagggctgatagccaggcccagctgctgctgtccayggtggtgggcgtgttcacagccccaggcctgcacctgaagcagccgtttgtgcagggcctggctctctatacccctgtggtcctcccacgctctctggacttcayagaackggatgttgctgctgagaagattgacaggttcatgcaggctgtgacaggatggaagactggctgctccctgayrggagccagtgtggacagcaccctggctttcaacacctrcgtccacttccaagggaagatgaagggcttctccctgctggccgagccccaggagttctgggtggacaacagcacctcagtgtctgttcccatgctctctggcatgggcaccttccagcactggagtgacatccaggacaacttctcggtgactcaagtgcccttcactgagagcgcctgyctgctgctgatccagcctcactatgcctctgacctggacaaggtggagggtctcactttccagcaaaactccctcaactggagaagaaactgrctccccggaccatccacctgaccatgccccaactggtyctgcaaggatcttatgaccmgcaggacctgctcgcccaggctgagctgcccgccattctgcacaccgagctgaacctgcaaaaattgagcaatgaccgcatcagggtgggggaggtgctgaacagcattttttttgagcttgaagcggatgagagagagcccacagagtctacccaacagcttaacaagcctgaggtcttggaggtgaccctgaaccgcccattcctgtttgctgtgtatgatcaaagcgccactgccctgcacttcctgggccgcgtggccaacccgctgagcacagcatgaggccagggccccagaacacagtgcctggcaaggcctctgcycctggcctttgaggcaaaggccagcagcagataacaaccccggacaaatcagcgatgtgtcacccccagtctcccaccttttcttctaatgagtcgactttgagctggaaagcagccstttctcctyggtctaagtgtgctgcytgkkgtgagcagtagaagcctgcagcggcacaaatgcacctcccagtttgctgggtttattttagagaatgggggtggggaggcaagaaccagtgtttagcgcgggactactgttccaaaaagaattccaarcgaccagcttgtttgtgaaacmaaaaagtgttcccttttcaagttgagaacaaaaattgggttttaaaaacatgacctccgtgtagtgtctgtaataccttagttttttccacagatgcttgtgat

SEQ ID NO: 2 - DNA, 2674 bp, Homo sapiens
aagacttcctggaagaggtcccagcrtgagtgtcgcttctggcatctgtccttctggccagcctgtggtctggccaagtgatgtaaccctcctctccagcctgtgcacaggcagcctgggaacagctccatccccacccctcagctataaatagggcmtygtgacccggccrggggaagaagctgcygttgttctgggtactacagcagaagggtatgcrgaagcsagcaccccagtctgagatggctcctgccggtgtgagcctgagggccmccatcctctgcctcctggcctgggctggcctggctgcaggtgaccgggtgtacatacaccccttccacytcgtcatccacaatgagagtaccygtgagyagctggcaaaggccaatgccgggaagcccaaagaccccaccttcatacctgctccaattcaggccaagacatcccctgtggatgaaaaggccctacaggaccagctggtgctagtygctgcaaaacttgacacyraagacaagttgagggccgcaatggtcgggatgctggcyaacttcttgkgcttccgtatatatggcatgcacagtgagctatggggcgtggtccatggggccaccgtcctctccccaayggctgtctttggcaccctggcctctctctatctgggagccttggaccacacagctgacaggctacaggcaatcctgggtgttccttggaaggacaagaactgcacctcccggctggatgcgcacaaggtcctgtctgccctgcaggctgtacagggcctgctagtggcccagggcagggctgatagccaggcccagctgctgctgtccayggtggtgggcgtgttcacagccccaggcctgcacctgaagcagccgtttgtgcagggcctggctctctatacccctgtggtcctcccacgctctctggacttcayagaackggatgttgctgctgagaagattgacaggttcatgcaggctgtgacaggatggaagactggctgctccctgayrggagccagtgtggacagcaccctggctttcaacacctrcgtccacttccaagggaagatgaagggcttctccctgctggccgagccccaggagttctgggtggacaacagcacctcagtgtctgttcccatgctctctggcatgggcaccttccagcactggagtgacatccaggacaacttctcggtgactcaagtgcccttcactgagagcgcctgyctgctgctgatccagcctcactatgcctctgacctggacaaggtggagggtctcactttccagcaaaactccctcaactggagaagaaactgrctccccggaccatccacctgaccatgccccaactggtyctgcaaggatcttatgaccmgcaggacctgctcgcccaggctgagctgcccgccattctgcacaccgagctgaacctgcaaaaattgagcaatgaccgcatcagggtgggggaggtgctgaacagcattttttttgagcttgaagcggatgagagagagcccacagagtctacccaacagcttaacaagcctgaggtcttggaggtgaccctgaaccgcccattcctgtttgctgtgtatgatcaaagcgccactgccctgcacttcctgggccgcgtggccaacccgctgagcacagcatgaggccagggccccagaacacagtgcctggcaaggcctctgcycctggcctttgaggcaaaggccagcagcagataacaaccccggacaaatcagcgatgtgtcacccccagtctcccaccttttcttctaatgagtcgactttgagctggaaagcagccstttctcctyggtctaagtgtgctgcytgkkgtgagcagtagaagcctgcagcggcacaaatgcacctcccagtttgctgggtttattttagagaatgggggtggggaggcaagaaccagtgtttagcgcgggactactgttccaaaaagaattccaarcgaccagcttgtttgtgaaacmaaaaagtgttcccttttcaagttgagaacaaaaattgggttttaaaattaaagtatacatttttgcattgccttcggtttgtakttagtgtcttgaatgtaagaacatgacctccgtgtagtgtctgtaataccttagttttttccacagatgcttgtgatttttgaacaatacgtgaaagatgcaagcacctgaatttctgtttgaatgcggaaccmtagctggttatttctcccttgtgttagtaataaacgtcttgccacaataagcctccaaaaattttatctttyatttagcagccaaacagatgtatacaattcagcagatagactgtgcaaacgaaagtgctttcctggactttggatggaatttccatgggaggtctgagccagtacttagcagtcctttgaagttttaggtgatgcttttctctygacacttccattggtaagcagtggtggccatctgtgtgatggacagggggcgggaagagggtgacagggaaggccccataccccatgtggcacctgggaaaggaaccaggcagatgggacttcttccgtcctggtgacacagggccagactgctgctggtattgtgccccgggagtggaaggtagagaaataaatcttcacaaataaatatttgcaattttcccccatc

SEQ ID NO: 3 - DNA, 6336 bp, Homo sapiens
agagaggagcagagcatgtttgggacataacaaaggatctgagtacccaaacaccgtacgccacccaactcctcttgtaacgccatcgcgcgtggcattgtgttgggttctgcgtgtgtggcatcggagtcgtggaatttagggggaacaaggcttttccccccgtccccccggggtctcccttgggtgggggcgacacggccaagggcggcgcgccctgggggtgcccgggggcgcttcttccccagggcgttacgcaccggcggcccggcgcggaggagctactctcctcctggtgaggtggaaattccagcaagaatagaggtgaagacaagccaccaggactcaggagggaaacgctgaccattagaaacctctgcataagacgttgtaaggaggaaaataaaagagagaaaaacacaaagatttaaacaagaaacctacgaacccagctctggaaagagccacyttctccaaaatggatatgtttcctctcacctgggttttcttagccctctacttttcaagacaccaagtgagaggccaaccagacccaccgtgcggaggtcgtttgaattccaaagatgctggctatatcacctctcccggttacccccaggactacccctcccaccagaactgcgagtggattgtttacgcccccgaacccaaccagaagattgtcctcaacttcaaccctcactttgaaatcgagaagcacgactgcaagtatgactttatcgagattcgggatggggacagtgaatccgcagacctcctgggcaaacactgtgggaacatcgccccgcccaccatcatctcctcgggctccatgctctacatcargttcacctccgactaygcccggcagggggcaggcttctctctgcgctacgagatcttcaagacaggctctgaagattgctcaaaaaacttcacaagccccaacsggaccatcgaatctcctgggtttcctgagaagtatccacacaacttggactgcacctttaccatcctggccaaacccaagatggagatcatcctgcagttcctgatctttgacctggagcatgaccctttgcaggtgggagagggggactgcaagtacgattggctggacatctgggatggcattccacatgttggccccctgattggcaagtactgtgggaccaaaacaccctctgaacttcgttcatcgacrgggatcctctccctgacctttcacacggacatggcggtggccaaggatggcttctctgcgcgttactacctggtccaccaagagccactagagaactttcagtgcaatgttcctctgggcatggagtctggccggattgctaaygaacagatcagtgcctcatctacctactctgatgggaggtggacccctcaacaaagccggctccatggtgatgacaatggctggacccccaacttggattccaacaaggagtatctccaggtggacctgcgctttttaaccatgctcacggccatcgcaacacagggagcgatttccagggaaacacagaatggctactaygtcaaatcctacaagctggaagtcagcactaatggagaggactggatggtgtaccggcatggcaaaaaccacaaggtatttcaagccaacaacgatgcaactgaggtggttctgaacaagctccacgctccactgctgacaaggtttgttagaatccgccctcagacctggcactcaggtatcgccctccggctggagctcttcggctgccgggtcacagatgctccctgctccaacatgctggggatgctctcaggcctcattgcagactcccagatctccgcctcttccacccaggaatacctctggagccccagtgcagcccgcctggtyagcagccgctcgggctggttccctcgaatccctcaggcccagcccggtgaggagtggcttcaggtagatctgggaacacccaagacagtgaaaggtgtcatcatccagggagcccgcggaggagacagtatcactgctgtggaagccagagcatttgtgcgcaagttcaaagtctcctacagcctaaacggcaaggactgggaatacattcaggaccccaggacccagcagccaaagctgttcgaagggaacatgcactatgacacccckgacatccgaaggtttgaccccattccggcacagtatgtgcgggtatacccggagaggtggtcgccggcggggattgggatgcggctggaggtgctgggctgtgactggacagactccaagcccacggtagagacgctgggacccactgtgaagagcgaagagacaaccaccccctaccccaccgaagaggaggccacagagtgtggggagaactgcagctttgaggatgacaaagatttgcagctcccttcgggattcaattgcaacttcgatttcctcgaggagccctgtggttggatgtatgaccatgccaagtggctccggaccacctgggccagcagctccagcccaaacgaccggacgtttccagatgacaggaatttcttgcggctgcagagtgacagccagagagagggccagtatgcccggctcatcagcccccctgtccacctgccccgaagcccggtgtgcatggagttccagtaccaggccacgggcggccgcggggtggcgctgcaggtggtgcgggaagccagccaggagagcaagttgctgtgggtcatccgtgaggaccagggcggcgagtggaagcacgggcggatcatcctgcccagctacgacatggagtaccagattgtgttcgagggagtgatagggaaaggacgttccggagagattgccattgatgacattcggataagcactgatgtcccactggagaactgcatggaacccatctcggcttttgcagtggacatcccagaaatacatgagagagaaggatatgaagatgaaattgatgatgaatacgaggtggactggagcaattcttcttctgcaacctcagggtctggcgccccctcgaccgacaaagaaaagagctggctgtacaccctggatcccatcctcatcaccatcatcgccatgagctcactgggcgtcctcctgggggccacctgtgcaggcctcctgctctactgcacctgttcctactcgggcctgagytcccgaagctgcaccacactggagaactacaacttcgagctctaygatggccttaagcacaaggtcaagatgaaccaccaraagtgctgctccgaggcatgacrgattgcacctgaatcctatctgacgtttcattccagcaagaggggctggggaagattacatttttttttcctttggaaactgaatgccataatctcgatcaaaccratccagaataccgaaggtatggacaggacagaaaagcgagtcgcaggaggaagggagatgcagccgcacaggggatgattaccctcctaggaccgcggtggctaagtcattgcaggaacggggctgtgttctctgctgggacaaaacaggagctcatctctttggggtcacagttctattttgtttgtgagtttgwattattattattattattattattattattatattttatttctttggtctgtgagcaactcaaagaggcagaagaggagaatgacttttccagaatagaagtggagcagtgatcattattctccgctttctctttctaatcaacacttgaaaagcaaagtgtcttttcagcctttccatctttacaaataaaactcaaaaaagccgtccagcttatcccatcctctgattgtcttctgacttaagggatttactgtggtgtaggttctgccagccaaccctacaagctgccatttccagtcctagcatttaagtaggatgttgttgcctttaacttttcttatccaggggaaaattgccattttagggtcagcatgaacagctctttcttgtatgcgatttaaaacaaactggaaaggaaacttcacacgtcaaaatccatagaagcgcctggacgaggcttaaagtgctttgtgagtgaataggagccattcgctaattctagacccacagtgtctggtggtggggcttcccttgtggggcttctggtggtggttttgccttttcttttccctcctccatgttcttctaaaacatatacatatatacatacacacatacacatattcttcaggtctctaagcccctggaagcagcattgtgtgatattctcagaggcaggggaaaatagagggaaaaatagagactattggtatgttctccccatcagcgagttattgtaactggtcaccactggacgggaaggagaacagaggagagggaaagagaagcccaacctctgtgatcatatgagggccaaggctgagcagtgtagacagagaccctttgaaatgcatttgtctctcaaatagactagtaaacaccgacttctcctttgggttacaaacaccatttcaacctttcgggagagtcagagctaggatgtacaagaactgattctaaccagaagtccgcaagtactgtggacaagaatgcttaaccatgctgcttcagccttgagagacctaggttcttacacatatgcacacacgcatacacacatgcacgcacacacacatacacacatgcacgcacgcacgcatgcacaccaatttatgtttttattaagtgccttgaaaaaatgaagaaaaatgtattttccctttatgtaaaaattagtgaatatcttatgaattaaggcattcctctttccctaaccccgatggctccattcccaagtaccccaactcactgctgatcctattaaaggaatgagtcctgctacccgagtggtagtcatagccctagatgactctcaactactcttcaaagggaggcatcaggaatagaatgaaactgtgtgaaggataagattgttcgcatcaagatccaaatcttgatttcatattaacgcctaaggattgcctgtgtgctggaaatatatttgaaactcaaccagtatgcccagcctattgcatatcattgtcagaccatttttgctgctgtggtcacccacgatttcatttgtcttatacccaggtgaaaggggaagggtgaatgggactggctggttcctttaaatgttaacttatggaaatgctagttcaaatggtaatgtcacagtgttttgtatgcagagagcaagagttcaaccaacagctgtttattcatgtgtgtgtgtctttgctgctttgagttctctgtatctactgtgtatgtgaatggtcatgtgggactcagtggtggtgttgtgactttgacctagggtccgagtgtcacagctgatcttggcactcggcactcattggcacagtggtagttagaggtgaaaagtagagctgtcaagcccaagggcttagctttagggctcctcctgagttcggcccacagtagaagcaagattttaactagccccttttcctcttcaccctcccatgatgcgcagtgttcagaaagctggtaagtcctagggatttccagaagtagcctgcagaagaaggtaagtttgaaagccactccaggggtcctgatgctgtcatgctcagtgagccattttacagttctccaaagtctagccctgtttcggacctgcacttcacctctaagttatgtacaactcaacctgcatccctctaaaagtcctatatccatattcaccattggctaatttgaggccctgagtgggccttgaatgctaaaaagaagcagggtacgsagggctacatgtagataccacaccaaggctggaggctgstctgtcrtaagacagaaagaaagacgctgggcccaattttgacttggccaggggacaccttggtgtgtttgttatctttatctgtgggtaggctagctgacccatctccttgagtcattccctttgggaaaccccactgccagtattgatctcctttttgccttgtactgaatgacacattacctccacactctcccggactaggtggtcaacagggccacagggttgctttctgtctttggtggggcaggggagttgacagggatgagggtccaaggaataagcatgaatgacaagaaaacaagggaaagagttaacctgtcacatagcaggttaactttttcagggtttgcagttagaggtattcgaccattcactggctgagccagatcacgggaacttgagagcttttactgtgattcttcaatgtaaaaaataaacaacaatgtcaaactgtgtttatatgatttgtataaagcctttttaagattactatttaaataaacattataccagagat

SEQ ID NO: 4 - DNA, 6020 bp, Homo sapiens
ctgggacctgccagggacctccagctccccaaaatgcgatctcaagccgtgagctgctcaggctttcaggcggagcaaagcactggcaccctgggagccggcagcgggtggccagggcgaggccaagcyacacctctgactcacccggtgtgcgccggccgggaagggggcctggttcagccgccgccgccggcgacgagaaccaattctgggaaggagcaagatggggcagaagacccaccgtgcggaggtcgtttgaattccaaagatgctggctatatcacctctcccggttacccccaggactacccctcccaccagaactgcgagtggattgtttacgcccccgaacccaaccagaagattgtcctcaacttcaaccctcactttgaaatcgagaagcacgactgcaagtatgactttatcgagattcgggatggggacagtgaatccgcagacctcctgggcaaacactgtgggaacatcgccccgcccaccatcatctcctcgggctccatgctctacatcargttcacctccgactaygcccggcagggggcaggcttctctctgcgctacgagatcttcaagacaggctctgaagattgctcaaaaaacttcacaagccccaacsggaccatcgaatctcctgggtttcctgagaagtatccacacaacttggactgcacctttaccatcctggccaaacccaagatggagatcatcctgcagttcctgatctttgacctggagcatgaccctttgcaggtgggagagggggactgcaagtacgattggctggacatctgggatggcattccacatgttggccccctgattggcaagtactgtgggaccaaaacaccctctgaacttcgttcatcgacrgggatcctctccctgacctttcacacggacatggcggtggccaaggatggcttctctgcgcgttactacctggtccaccaagagccactagagaactttcagtgcaatgttcctctgggcatggagtctggccggattgctaaygaacagatcagtgcctcatctacctactctgatgggaggtggacccctcaacaaagccggctccatggtgatgacaatggctggacccccaacttggattccaacaaggagtatctccaggtggacctgcgctttttaaccatgctcacggccatcgcaacacagggagcgatttccagggaaacacagaatggctactaygtcaaatcctacaagctggaagtcagcactaatggagaggactggatggtgtaccggcatggcaaaaaccacaaggtatttcaagccaacaacgatgcaactgaggtggttctgaacaagctccacgctccactgctgacaaggtttgttagaatccgccctcagacctggcactcaggtatcgccctccggctggagctcttcggctgccgggtcacagatgctccctgctccaacatgctggggatgctctcaggcctcattgcagactcccagatctccgcctcttccacccaggaatacctctggagccccagtgcagcccgcctggtyagcagccgctcgggctggttccctcgaatccctcaggcccagcccggtgaggagtggcttcaggtagatctgggaacacccaagacagtgaaaggtgtcatcatccagggagcccgcggaggagacagtatcactgctgtggaagccagagcatttgtgcgcaagttcaaagtctcctacagcctaaacggcaaggactgggaatacattcaggaccccaggacccagcagccaaagctgttcgaagggaacatgcactatgacacccckgacatccgaaggtttgaccccattccggcacagtatgtgcgggtatacccggagaggtggtcgccggcggggattgggatgcggctggaggtgctgggctgtgactggacagactccaagcccacggtagagacgctgggacccactgtgaagagcgaagagacaaccaccccctaccccaccgaagaggaggccacagagtgtggggagaactgcagctttgaggatgacaaagatttgcagctcccttcgggattcaattgcaacttcgatttcctcgaggagccctgtggttggatgtatgaccatgccaagtggctccggaccacctgggccagcagctccagcccaaacgaccggacgtttccagatgacaggaatttcttgcggctgcagagtgacagccagagagagggccagtatgcccggctcatcagcccccctgtccacctgccccgaagcccggtgtgcatggagttccagtaccaggccacgggcggccgcggggtggcgctgcaggtggtgcgggaagccagccaggagagcaagttgctgtgggtcatccgtgaggaccagggcggcgagtggaagcacgggcggatcatcctgcccagctacgacatggagtaccagattgtgttcgagggagtgatagggaaaggacgttccggagagattgccattgatgacattcggataagcactgatgtcccactggagaactgcatggaacccatctcggcttttgcagtggacatcccagaaatacatgagagagaaggatatgaagatgaaattgatgatgaatacgaggtggactggagcaattcttcttctgcaacctcagggtctggcgccccctcgaccgacaaagaaaagagctggctgtacaccctggatcccatcctcatcaccatcatcgccatgagctcactgggcgtcctcctgggggccacctgtgcaggcctcctgctctactgcacctgttcctactcgggcctgagytcccgaagctgcaccacactggagaactacaacttcgagctctaygatggccttaagcacaaggtcaagatgaaccaccaraagtgctgctccgaggcatgacrgattgcacctgaatcctatctgacgtttcattccagcaagaggggctggggaagattacatttttttttcctttggaaactgaatgccataatctcgatcaaaccratccagaataccgaaggtatggacaggacagaaaagcgagtcgcaggaggaagggagatgcagccgcacaggggatgattaccctcctaggaccgcggtggctaagtcattgcaggaacggggctgtgttctctgctgggacaaaacaggagctcatctctttggggtcacagttctattttgtttgtgagtttgwattattattattattattattattattattatattttatttctttggtctgtgagcaactcaaagaggcagaagaggagaatgacttttccagaatagaagtggagcagtgatcattattctccgctttctctttctaatcaacacttgaaaagcaaagtgtcttttcagcctttccatctttacaaataaaactcaaaaaagccgtccagcttatcccatcctctgattgtcttctgacttaagggatttactgtggtgtaggttctgccagccaaccctacaagctgccatttccagtcctagcatttaagtaggatgttgttgcctttaacttttcttatccaggggaaaattgccattttagggtcagcatgaacagctctttcttgtatgcgatttaaaacaaactggaaaggaaacttcacacgtcaaaatccatagaagcgcctggacgaggcttaaagtgctttgtgagtgaataggagccattcgctaattctagacccacagtgtctggtggtggggcttcccttgtggggcttctggtggtggttttgccttttcttttccctcctccatgttcttctaaaacatatacatatatacatacacacatacacatattcttcaggtctctaagcccctggaagcagcattgtgtgatattctcagaggcaggggaaaatagagggaaaaatagagactattggtatgttctccccatcagcgagttattgtaactggtcaccactggacgggaaggagaacagaggagagggaaagagaagcccaacctctgtgatcatatgagggccaaggctgagcagtgtagacagagaccctttgaaatgcatttgtctctcaaatagactagtaaacaccgacttctcctttgggttacaaacaccatttcaacctttcgggagagtcagagctaggatgtacaagaactgattctaaccagaagtccgcaagtactgtggacaagaatgcttaaccatgctgcttcagccttgagagacctaggttcttacacatatgcacacacgcatacacacatgcacgcacacacacatacacacatgcacgcacgcacgcatgcacaccaatttatgtttttattaagtgccttgaaaaaatgaagaaaaatgtattttccctttatgtaaaaattagtgaatatcttatgaattaaggcattcctctttccctaaccccgatggctccattcccaagtaccccaactcactgctgatcctattaaaggaatgagtcctgctacccgagtggtagtcatagccctagatgactctcaactactcttcaaagggaggcatcaggaatagaatgaaactgtgtgaaggataagattgttcgcatcaagatccaaatcttgatttcatattaacgcctaaggattgcctgtgtgctggaaatatatttgaaactcaaccagtatgcccagcctattgcatatcattgtcagaccatttttgctgctgtggtcacccacgatttcatttgtcttatacccaggtgaaaggggaagggtgaatgggactggctggttcctttaaatgttaacttatggaaatgctagttcaaatggtaatgtcacagtgttttgtatgcagagagcaagagttcaaccaacagctgtttattcatgtgtgtgtgtctttgctgctttgagttctctgtatctactgtgtatgtgaatggtcatgtgggactcagtggtggtgttgtgactttgacctagggtccgagtgtcacagctgatcttggcactcggcactcattggcacagtggtagttagaggtgaaaagtagagctgtcaagcccaagggcttagctttagggctcctcctgagttcggcccacagtagaagcaagattttaactagccccttttcctcttcaccctcccatgatgcgcagtgttcagaaagctggtaagtcctagggatttccagaagtagcctgcagaagaaggtaagtttgaaagccactccaggggtcctgatgctgtcatgctcagtgagccattttacagttctccaaagtctagccctgtttcggacctgcacttcacctctaagttatgtacaactcaacctgcatccctctaaaagtcctatatccatattcaccattggctaatttgaggccctgagtgggccttgaatgctaaaaagaagcagggtacgsagggctacatgtagataccacaccaaggctggaggctgstctgtcrtaagacagaaagaaagacgctgggcccaattttgacttggccaggggacaccttggtgtgtttgttatctttatctgtgggtaggctagctgacccatctccttgagtcattccctttgggaaaccccactgccagtattgatctcctttttgccttgtactgaatgacacattacctccacactctcccggactaggtggtcaacagggccacagggttgctttctgtctttggtggggcaggggagttgacagggatgagggtccaaggaataagcatgaatgacaagaaaacaagggaaagagttaacctgtcacatagcaggttaactttttcagggtttgcagttagaggtattcgaccattcactggctgagccagatcacgggaacttgagagcttttactgtgattcttcaatgtaaaaaataaacaacaatgtcaaactgtgtttatatgatttgtataaagcctttttaagattactatttaaataaacattataccagagat

SEQ ID NO: 5 - DNA, 6369 bp, Homo sapiens
agagaggagcagagcatgtttgggacataacaaaggatctgagtacccaaacaccgtacgccacccaactcctcttgtaacgccatcgcgcgtggcattgtgttgggttctgcgtgtgtggcatcggagtcgtggaatttagggggaacaaggcttttccccccgtccccccggggtctcccttgggtgggggcgacacggccaagggcggcgcgccctgggggtgcccgggggcgcttcttccccagggcgttacgcaccggcggcccggcgcggaggagctactctcctcctggtgaggtggaaattccagcaagaatagaggtgaagacaagccaccaggactcaggagggaaacgctgaccattagaaacctctgcataagacgttgtaaggaggaaaataaaagagagaaaaacacaaagatttaaacaagaaacctacgaacccagctctggaaagagccacyttctccaaaatggatatgtttcctctcacctgggttttcttagccctctacttttcaagacaccaagtgagaggccaaccagacccaccgtgcggaggtcgtttgaattccaaagatgctggctatatcacctctcccggttacccccaggactacccctcccaccagaactgcgagtggattgtttacgcccccgaacccaaccagaagattgtcctcaacttcaaccctcactttgaaatcgagaagcacgactgcaagtatgactttatcgagattcgggatggggacagtgaatccgcagacctcctgggcaaacactgtgggaacatcgccccgcccaccatcatctcctcgggctccatgctctacatcargttcacctccgactaygcccggcagggggcaggcttctctctgcgctacgagatcttcaagacaggctctgaagattgctcaaaaaacttcacaagccccaacsggaccatcgaatctcctgggtttcctgagaagtatccacacaacttggactgcacctttaccatcctggccaaacccaagatggagatcatcctgcagttcctgatctttgacctggagcatgaccctttgcaggtgggagagggggactgcaagtacgattggctggacatctgggatggcattccacatgttggccccctgattggcaagtactgtgggaccaaaacaccctctgaacttcgttcatcgacrgggatcctctccctgacctttcacacggacatggcggtggccaaggatggcttctctgcgcgttactacctggtccaccaagagccactagagaactttcagtgcaatgttcctctgggcatggagtctggccggattgctaaygaacagatcagtgcctcatctacctactctgatgggaggtggacccctcaacaaagccggctccatggtgatgacaatggctggacccccaacttggattccaacaaggagtatctccaggtggacctgcgctttttaaccatgctcacggccatcgcaacacagggagcgatttccagggaaacacagaatggctactaygtcaaatcctacaagctggaagtcagcactaatggagaggactggatggtgtaccggcatggcaaaaaccacaaggtatttcaagccaacaacgatgcaactgaggtggttctgaacaagctccacgctccactgctgacaaggtttgttagaatccgccctcagacctggcactcaggtatcgccctccggctggagctcttcggctgccgggtcacagatgctccctgctccaacatgctggggatgctctcaggcctcattgcagactcccagatctccgcctcttccacccaggaatacctctggagccccagtgcagcccgcctggtyagcagccgctcgggctggttccctcgaatccctcaggcccagcccggtgaggagtggcttcaggtagatctgggaacacccaagacagtgaaaggtgtcatcatccagggagcccgcggaggagacagtatcactgctgtggaagccagagcatttgtgcgcaagttcaaagtctcctacagcctaaacggcaaggactgggaatacattcaggaccccaggacccagcagccaaagctgttcgaagggaacatgcactatgacacccckgacatccgaaggtttgaccccattccggcacagtatgtgcgggtatacccggagaggtggtcgccggcggggattgggatgcggctggaggtgctgggctgtgactggacagactccaagcccacggtagagacgctgggacccactgtgaagagcgaagagacaaccaccccctaccccaccgaagaggaggccacagagtgtggggagaactgcagctttgaggatgacaaagatttgcagctcccttcgggattcaattgcaacttcgatttcctcgaggagccctgtggttggatgtatgaccatgccaagtggctccggaccacctgggccagcagctccagcccaaacgaccggacgtttccagatgacaggaatttcttgcggctgcagagtgacagccagagagagggccagtatgcccggctcatcagcccccctgtccacctgccccgaagcccggtgtgcatggagttccagtaccaggccacgggcggccgcggggtggcgctgcaggtggtgcgggaagccagccaggagagcaagttgctgtgggtcatccgtgaggaccagggcggcgagtggaagcacgggcggatcatcctgcccagctacgacatggagtaccagattgtgttcgagggagtgatagggaaaggacgttccggagagattgccattgatgacattcggataagcactgatgtcccactggagaactgcatggaacccatctcggcttttgcagggggcaccctcctgccagggaccgagcccacagtggacacggtgcccatgcagcccatcccagcctactggtattacgtaatggccgccgggggcgccgtgctggtgctggtctccgtcgcgctggccctggtgctccactaccaccggttccgctatgcggccaagaagaccgatcactccatcacctacaaaacctcccactacaccaacggggcccctctggcggtggagcccaccctaaccattaagctagagcaagaccgtggctcgcactgctgagggccgaagcaagaacagcacccaaaacaaacgagaaagactgcaaacatgttgcctcgattttgcacttttttctcctcgcctagtttctgtgtgaactctcagacatctctttcccggatccccaaccctgagcactcttatcaatcccaaccatcctccttgggttcattttggtttctggkttttctttttcctttttgttgattccaaaccaacaaacccaactctaatgctgcatcttggactatccgaagagatccacccccaagcactccacaactcaaggctcagctggttttgttccagagactggttcgcttgttttttccccttgccttatcccatacctcctctcagtgggcagtctgccaggagacgtgaggggaagcctggatctgtgtgtatgtacatagtagacatgtgtgtgtgtgaatagctctctgtgtgtgggtgtgtgagagagcggctggttcattgtgtgtgtgtttgggcgaggggtgagtgttcagagagggcccctttaactcttatgttacttctcctggggtacattttacaagaaaataatatactgtacaagttttgtttacttggagaagagattgaagctttttgttgccttatctagctctggctgggtttctgttggctgtcattgtcatctccaggtacctaaagaaatagaggccacatgggatgcagtgtggcttctcccatccctatccccaacycacctgacccaagagaaggttcccctagcacactcaaacaagacccccttgtcttctggtgtctttgaaatgtcaagataacagccactgggtgtctgcggaaccacctctccagccctaaagcaaatctgtctcatgttgccttataaaagagaagctcataatgaatgtttagcctttatcagttacatccaatcttggaataagtcatagagaataacaagtctgggactgaygtaggaaaaacagtagtctgtttaagttgagaggaggaggaggtggacgagagaagggaggagagggaagaactgaaatgtctcctcacccagggtggttattgggcccaacttggratggggttgagtacgaaggttaaaaaacatatactttggtattatattggtcattgtaatagcagttgtaaaatatggggggaaaagggatcatttgctttcctttcatggtgttaatgtgtgcctgaatctatagccgctaaaatgtaaggctgtccacctgacttatttaaatattatcagagaatagaaagtaatcactttttaagtgtacctatgtgctgccccttaaaacattcatggcatctggcaaatagacccttgtaggctggcctggcatattcagatgttgccgcatcatcacagagaaggtcaaatgaagatgtaaccattgctgctcatgtgtcttctctaagcaacaaggggagcgggatgtaagagagaagttgctaatgatactgtacaaaggatggattaaataatgaagtcaatttcattgatagaaaatgcaaattttaagattctcagtgtatgaggtctcagcctcgggagcatttattttttactttcctgctaaaaatccactggggaggtataaaattcactccaaagaagtttgcctgggccaaaagcctccaggttccttctgagaacaaaatactaatgattttttttttttttttggctgcttgggasagactttcagcattctttcacgatatccagatatgtcccttcagcacacacactcaactttctcatctggttcgtttcatcctcccgaaagaayggtgctctcccactcttactctatttcaaagagctactctgtctcaaccacagcagccctgccaagaaaaggcaagatgaaaggctagagcatgtgctaccttgagatttcaagaagtgtcctacctcagctgargatggagaaacggggagtggagaggggatcagcccagggtaccatgtgatgactaatatgccactcattaagggcttttacctcggctgtccacatccagtcatgcatttggggccaggcatgcctgcgaaatgattgacattcctgtaggtgccccatagaggtgtggcattgagaaattatgtctggaaaatacagccagtgtagtgaccagctgagttaccatatascctgatgattccccttctgtaacagaaggtgacaacaactttgtgaactttctatatctttatctgatgccccaagtggcatcwtctttatgtacatgccttagttgagaatatgagactgctctaatctttgtgaatgccttcacacttcagctgaggatgtcaccttctctgtcactccccatcctgcaacctctgcctttgctctgtctaccccagcaattttcatagtgttatccaggtactgtgctaaaaggtcagctcttctgtaaaatgccatgcttcgcagcttcaaaaagcaaaattctgtatttcatggagggagggaagggtcattctcttctaagaaaaatagactggacaggcgaatgcatgcatgcatgtgtttagagttgcttctcagaagacaaagagatgatagcaactattaaaatatgaatgaatgaatgagtgaatgagttgaaggcctagctcgggctgataaagcttttgccttagtagaggttttatgtcaacaccttcaggagggaagcccttatttctgggttgaactccccttccatgatattatgctagcaattgccatcacttagttcctggcgaaggcagaaaaagaaaacaaaaaatcagcattgtcattgacaaaactggatgctgaagataaagtaaaattgtcttttcccttgtcccacatttttgggattaaagccagaattgaataggaaatacagtactatttctgaagttgatagccgatctttaagaagaccctgtctttaaaatgaaactagcaggcaaacacctaaataatcgaaaattaccaaagaacaacaacgaaacaagaaaacctaaagatttttacttcctattcttattcctttccttattactgtgacaccccttgcattgctcagttgcctgtgtgtcaaaataacttgtggacgttggaaattatttgaaaatgtattgtgtggaatgtaataaaatgatgatatttttatac

SEQ ID NO: 6 - DNA, 4834 bp, Homo sapiens
agagaggagcagagcatgtttgggacataacaaaggatctgagtacccaaacaccgtacgccacccaactcctcttgtaacgccatcgcgcgtggcattgtgttgggttctgcgtgtgtggcatcggagtcgtggaatttagggggaacaaggcttttccccccgtccccccggggtctcccttgggtgggggcgacacggccaagggcggcgcgccctgggggtgcccgggggcgcttcttccccagggcgttacgcaccggcggcccggcgcggaggagctactctcctcctggtgaggtggaaattccagcaagaatagaggtgaagacaagccaccaggactcaggagggaaacgctgaccattagaaacctctgcataagacgttgtaaggaggaaaataaaagagagaaaaacacaaagatttaaacaagaaacctacgaacccagctctggaaagagccacyttctccaaaatggatatgtttcctctcacctgggttttcttagccctctacttttcaagacaccaagtgagaggccaaccagacccaccgtgcggaggtcgtttgaattccaaagatgctggctatatcacctctcccggttacccccaggactacccctcccaccagaactgcgagtggattgtttacgcccccgaacccaaccagaagattgtcctcaacttcaaccctcactttgaaatcgagaagcacgactgcaagtatgactttatcgagattcgggatggggacagtgaatccgcagacctcctgggcaaacactgtgggaacatcgccccgcccaccatcatctcctcgggctccatgctctacatcargttcacctccgactaygcccggcagggggcaggcttctctctgcgctacgagatcttcaagacaggctctgaagattgctcaaaaaacttcacaagccccaacsggaccatcgaatctcctgggtttcctgagaagtatccacacaacttggactgcacctttaccatcctggccaaacccaagatggagatcatcctgcagttcctgatctttgacctggagcatgaccctttgcaggtgggagagggggactgcaagtacgattggctggacatctgggatggcattccacatgttggccccctgattggcaagtactgtgggaccaaaacaccctctgaacttcgttcatcgacrgggatcctctccctgacctttcacacggacatggcggtggccaaggatggcttctctgcgcgttactacctggtccaccaagagccactagagaactttcagtgcaatgttcctctgggcatggagtctggccggattgctaaygaacagatcagtgcctcatctacctactctgatgggaggtggacccctcaacaaagccggctccatggtgatgacaatggctggacccccaacttggattccaacaaggagtatctccaggtggacctgcgctttttaaccatgctcacggccatcgcaacacagggagcgatttccagggaaacacagaatggctactaygtcaaatcctacaagctggaagtcagcactaatggagaggactggatggtgtaccggcatggcaaaaaccacaaggtatttcaagccaacaacgatgcaactgaggtggttctgaacaagctccacgctccactgctgacaaggtttgttagaatccgccctcagacctggcactcaggtatcgccctccggctggagctcttcggctgccgggtcacagatgctccctgctccaacatgctggggatgctctcaggcctcattgcagactcccagatctccgcctcttccacccaggaatacctctggagccccagtgcagcccgcctggtyagcagccgctcgggctggttccctcgaatccctcaggcccagcccggtgaggagtggcttcaggtagatctgggaacacccaagacagtgaaaggtgtcatcatccagggagcccgcggaggagacagtatcactgctgtggaagccagagcatttgtgcgcaagttcaaagtctcctacagcctaaacggcaaggactgggaatacattcaggaccccaggacccagcagccaaaggtaggctgttcttggaggcctctgtaacgttaccctcaacagggaggctaagtgtggtacagggagttgagactgatgatgtcccatctaaacagtcgtcatccaactcctgaaatccaataaaacaaatatcgtttgagagattactttgtgccaggcactgtgctaaataccttatttctgactcttttktttgtttgtttgtttgtttttgagatggagtctctgtcacccaggctggagtgcagtggcctgttctcggctcactgcaacctccgcctccagggttcaagcgattctccagcctcagcctcctgagtggctgggattacaggtgcccgccaccacacctagctaatttttgtatttctggtagagatggggtttcaccgtattggtcaggctggtctcgaactcctgacctcaagtgatccacttgccttggcctctcaaagtgctgggattataggcatgaaccaccgcgcccggcctggactcttttttaatcgttacaacatctgtgcaaagtagatctttttgtcactcccatttyagagatgataaactgacacttgatatcatgcccagggtcacacagttcacctgtgatagagccgattcagaaaccggaagtctgactccaaagtccagatgcctaacccctactgaacactgcctttttataaagttcaacactctttatacactctttcagataaagtttccttgaaattggccagacatctaaaggggatgtggtttttggaggccaagctatagaaactagaggatgacttccaaaaataacgatgtttttctgaatgtcgctgcattcctttgtattctcctagttttgactgcttagatctttccggcctctcagactgagkcaagggagaagcaagagaaactcaccccgagccagaagctcaggccagtacagcttactcccctgccaccagagtgaaggtcagccttcaacacagayacaaggagccccagaaggggaggagaygtcatacctctgtccctccccagatcagtctcctggcaggccaggctctctgattcttatctctagttaccccttgtttttctcaaaagaacaggtccctaaaaaaggagggagtttgcatgtctcggggccacctttgctaagcaaatgtctccattctgaatacagaggcaagagttgggttggaggttttgcgatgctgaggtaaactcccagctctcaactccagaggcttagaaaggctcagggcttggtaactggaaccttgcatcgatggagcagaagttggaccgcaggcttccccatggagagctgagcctggtttttcttgggaaagaagttgatctttgccattgtgggagacagccctatccgagacagtgcttctggttcagaattgtggacgcagggcatcctgaaaactggagcggtcctgctgaatttctgggggctaatcagctgcaggccctggccacccactcctgtccttcccccggatgagtgtctccaagtgtactctaggctggtcctccaaagcagccccctgctccccgcatcatcagttttatgtactggggctccrtgtgaggtttcttttgacaggagtgctttccctaaacaaaggtttgggaaacagtctaagactatcgatgtgtgaccagaagacagtgtcattggcctaggggtcattttcccrtaaggttctcagtgagctaggaactatcagtcagcttgggttacctcaatggaggctttcacrcattagaaaaagaagtgtycctttccctgtagaccaggaattcagaacggtcaaagatcgcccaaactgccttccccsctctctagccaaagtcagctgaaaacgcagttggagccaaattcttccccagatactccattttagtcaccaggtaaaagacacaacctggaaattgccacctttgtttacttcctattttccataattctgggtccataaccaccttccaaatgaataaaatccttggtctgaaaatgaagctcgcgtggatcagaatgtcccagtgaccaggaatcaactaggaagctgccttcctagcaggacgtgcggggcagggaggagaaggggaaggaaagggaagaaggtgatagggactgggtcccacaccagaagggctgagtggcctctctccctgcagctgttcgaagggaacatgcactatgacacccckgacatccgaaggtttgaccccattccggcacagtatgtgcgggtatacccggagaggtggtcgccggcggggattgggatgcggctggaggtgctgggctgtgactggacaggtaagatgacatttcctcctctttgcatctcacccacatggtcctctgaccctggcatcccaygaggccctgggagggctgtggagggggcagccatcccaggagctggaaatgctgcagacccctgccatgttctcctgcctcagaccacgggtactgcagcctctggacttgggacagtttctcaagggatgtactttgtcttttttaagggatcatttcagttctccaacccgagtctctcaaaaacaaatcataaccacacaccacccacccaaattcaattagaccctggctcttcaggccagagggctgtggctgttgatttagggaagaaaaaaacccctcatgataataaagtaatcggtttatgtctg

SEQ ID NO: 7 - DNA, 5823 bp, Homo sapiens
gccggctggcttgggaatccaagcgctggcccaactagacccaccgtgcggaggtcgtttgaattccaaagatgctggctatatcacctctcccggttacccccaggactacccctcccaccagaactgcgagtggattgtttacgcccccgaacccaaccagaagattgtcctcaacttcaaccctcactttgaaatcgagaagcacgactgcaagtatgactttatcgagattcgggatggggacagtgaatccgcagacctcctgggcaaacactgtgggaacatcgccccgcccaccatcatctcctcgggctccatgctctacatcargttcacctccgactaygcccggcagggggcaggcttctctctgcgctacgagatcttcaagacaggctctgaagattgctcaaaaaacttcacaagccccaacsggaccatcgaatctcctgggtttcctgagaagtatccacacaacttggactgcacctttaccatcctggccaaacccaagatggagatcatcctgcagttcctgatctttgacctggagcatgaccctttgcaggtgggagagggggactgcaagtacgattggctggacatctgggatggcattccacatgttggccccctgattggcaagtactgtgggaccaaaacaccctctgaacttcgttcatcgacrgggatcctctccctgacctttcacacggacatggcggtggccaaggatggcttctctgcgcgttactacctggtccaccaagagccactagagaactttcagtgcaatgttcctctgggcatggagtctggccggattgctaaygaacagatcagtgcctcatctacctactctgatgggaggtggacccctcaacaaagccggctccatggtgatgacaatggctggacccccaacttggattccaacaaggagtatctccaggtggacctgcgctttttaaccatgctcacggccatcgcaacacagggagcgatttccagggaaacacagaatggctactaygtcaaatcctacaagctggaagtcagcactaatggagaggactggatggtgtaccggcatggcaaaaaccacaaggtatttcaagccaacaacgatgcaactgaggtggttctgaacaagctccacgctccactgctgacaaggtttgttagaatccgccctcagacctggcactcaggtatcgccctccggctggagctcttcggctgccgggtcacagatgctccctgctccaacatgctggggatgctctcaggcctcattgcagactcccagatctccgcctcttccacccaggaatacctctggagccccagtgcagcccgcctggtyagcagccgctcgggctggttccctcgaatccctcaggcccagcccggtgaggagtggcttcaggtagatctgggaacacccaagacagtgaaaggtgtcatcatccagggagcccgcggaggagacagtatcactgctgtggaagccagagcatttgtgcgcaagttcaaagtctcctacagcctaaacggcaaggactgggaatacattcaggaccccaggacccagcagccaaagctgttcgaagggaacatgcactatgacacccckgacatccgaaggtttgaccccattccggcacagtatgtgcgggtatacccggagaggtggtcgccggcggggattgggatgcggctggaggtgctgggctgtgactggacagactccaagcccacggtagagacgctgggacccactgtgaagagcgaagagacaaccaccccctaccccaccgaagaggaggccacagagtgtggggagaactgcagctttgaggatgacaaagatttgcagctcccttcgggattcaattgcaacttcgatttcctcgaggagccctgtggttggatgtatgaccatgccaagtggctccggaccacctgggccagcagctccagcccaaacgaccggacgtttccagatgacaggaatttcttgcggctgcagagtgacagccagagagagggccagtatgcccggctcatcagcccccctgtccacctgccccgaagcccggtgtgcatggagttccagtaccaggccacgggcggccgcggggtggcgctgcaggtggtgcgggaagccagccaggagagcaagttgctgtgggtcatccgtgaggaccagggcggcgagtggaagcacgggcggatcatcctgcccagctacgacatggagtaccagattgtgttcgagggagtgatagggaaaggacgttccggagagattgccattgatgacattcggataagcactgatgtcccactggagaactgcatggaacccatctcggcttttgcagtggacatcccagaaatacatgagagagaaggatatgaagatgaaattgatgatgaatacgaggtggactggagcaattcttcttctgcaacctcagggtctggcgccccctcgaccgacaaagaaaagagctggctgtacaccctggatcccatcctcatcaccatcatcgccatgagctcactgggcgtcctcctgggggccacctgtgcaggcctcctgctctactgcacctgttcctactcgggcctgagytcccgaagctgcaccacactggagaactacaacttcgagctctaygatggccttaagcacaaggtcaagatgaaccaccaraagtgctgctccgaggcatgacrgattgcacctgaatcctatctgacgtttcattccagcaagaggggctggggaagattacatttttttttcctttggaaactgaatgccataatctcgatcaaaccratccagaataccgaaggtatggacaggacagaaaagcgagtcgcaggaggaagggagatgcagccgcacaggggatgattaccctcctaggaccgcggtggctaagtcattgcaggaacggggctgtgttctctgctgggacaaaacaggagctcatctctttggggtcacagttctattttgtttgtgagtttgwattattattattattattattattattattatattttatttctttggtctgtgagcaactcaaagaggcagaagaggagaatgacttttccagaatagaagtggagcagtgatcattattctccgctttctctttctaatcaacacttgaaaagcaaagtgtcttttcagcctttccatctttacaaataaaactcaaaaaagccgtccagcttatcccatcctctgattgtcttctgacttaagggatttactgtggtgtaggttctgccagccaaccctacaagctgccatttccagtcctagcatttaagtaggatgttgttgcctttaacttttcttatccaggggaaaattgccattttagggtcagcatgaacagctctttcttgtatgcgatttaaaacaaactggaaaggaaacttcacacgtcaaaatccatagaagcgcctggacgaggcttaaagtgctttgtgagtgaataggagccattcgctaattctagacccacagtgtctggtggtggggcttcccttgtggggcttctggtggtggttttgccttttcttttccctcctccatgttcttctaaaacatatacatatatacatacacacatacacatattcttcaggtctctaagcccctggaagcagcattgtgtgatattctcagaggcaggggaaaatagagggaaaaatagagactattggtatgttctccccatcagcgagttattgtaactggtcaccactggacgggaaggagaacagaggagagggaaagagaagcccaacctctgtgatcatatgagggccaaggctgagcagtgtagacagagaccctttgaaatgcatttgtctctcaaatagactagtaaacaccgacttctcctttgggttacaaacaccatttcaacctttcgggagagtcagagctaggatgtacaagaactgattctaaccagaagtccgcaagtactgtggacaagaatgcttaaccatgctgcttcagccttgagagacctaggttcttacacatatgcacacacgcatacacacatgcacgcacacacacatacacacatgcacgcacgcacgcatgcacaccaatttatgtttttattaagtgccttgaaaaaatgaagaaaaatgtattttccctttatgtaaaaattagtgaatatcttatgaattaaggcattcctctttccctaaccccgatggctccattcccaagtaccccaactcactgctgatcctattaaaggaatgagtcctgctacccgagtggtagtcatagccctagatgactctcaactactcttcaaagggaggcatcaggaatagaatgaaactgtgtgaaggataagattgttcgcatcaagatccaaatcttgatttcatattaacgcctaaggattgcctgtgtgctggaaatatatttgaaactcaaccagtatgcccagcctattgcatatcattgtcagaccatttttgctgctgtggtcacccacgatttcatttgtcttatacccaggtgaaaggggaagggtgaatgggactggctggttcctttaaatgttaacttatggaaatgctagttcaaatggtaatgtcacagtgttttgtatgcagagagcaagagttcaaccaacagctgtttattcatgtgtgtgtgtctttgctgctttgagttctctgtatctactgtgtatgtgaatggtcatgtgggactcagtggtggtgttgtgactttgacctagggtccgagtgtcacagctgatcttggcactcggcactcattggcacagtggtagttagaggtgaaaagtagagctgtcaagcccaagggcttagctttagggctcctcctgagttcggcccacagtagaagcaagattttaactagccccttttcctcttcaccctcccatgatgcgcagtgttcagaaagctggtaagtcctagggatttccagaagtagcctgcagaagaaggtaagtttgaaagccactccaggggtcctgatgctgtcatgctcagtgagccattttacagttctccaaagtctagccctgtttcggacctgcacttcacctctaagttatgtacaactcaacctgcatccctctaaaagtcctatatccatattcaccattggctaatttgaggccctgagtgggccttgaatgctaaaaagaagcagggtacgsagggctacatgtagataccacaccaaggctggaggctgstctgtcrtaagacagaaagaaagacgctgggcccaattttgacttggccaggggacaccttggtgtgtttgttatctttatctgtgggtaggctagctgacccatctccttgagtcattccctttgggaaaccccactgccagtattgatctcctttttgccttgtactgaatgacacattacctccacactctcccggactaggtggtcaacagggccacagggttgctttctgtctttggtggggcaggggagttgacagggatgagggtccaaggaataagcatgaatgacaagaaaacaagggaaagagttaacctgtcacatagcaggttaactttttcagggtttgcagttagaggtattcgaccattcactggctgagccagatcacgggaacttgagagcttttactgtgattcttcaatgtaaaaaataaacaacaatgtcaaactgtgtttatatgatttgtataaagcctttttaagattactatttaaataaacattataccagagat

SEQ ID NO: 8 - DNA, 6285 bp, Homo sapiens
agagaggagcagagcatgtttgggacataacaaaggatctgagtacccaaacaccgtacgccacccaactcctcttgtaacgccatcgcgcgtggcattgtgttgggttctgcgtgtgtggcatcggagtcgtggaatttagggggaacaaggcttttccccccgtccccccggggtctcccttgggtgggggcgacacggccaagggcggcgcgccctgggggtgcccgggggcgcttcttccccagggcgttacgcaccggcggcccggcgcggaggagctactctcctcctggtgaggtggaaattccagcaagaatagaggtgaagacaagccaccaggactcaggagggaaacgctgaccattagaaacctctgcataagacgttgtaaggaggaaaataaaagagagaaaaacacaaagatttaaacaagaaacctacgaacccagctctggaaagagccacyttctccaaaatggatatgtttcctctcacctgggttttcttagccctctacttttcaagacaccaagtgagaggccaaccagacccaccgtgcggaggtcgtttgaattccaaagatgctggctatatcacctctcccggttacccccaggactacccctcccaccagaactgcgagtggattgtttacgcccccgaacccaaccagaagattgtcctcaacttcaaccctcactttgaaatcgagaagcacgactgcaagtatgactttatcgagattcgggatggggacagtgaatccgcagacctcctgggcaaacactgtgggaacatcgccccgcccaccatcatctcctcgggctccatgctctacatcargttcacctccgactaygcccggcagggggcaggcttctctctgcgctacgagatcttcaagacaggctctgaagattgctcaaaaaacttcacaagccccaacsggaccatcgaatctcctgggtttcctgagaagtatccacacaacttggactgcacctttaccatcctggccaaacccaagatggagatcatcctgcagttcctgatctttgacctggagcatgaccctttgcaggtgggagagggggactgcaagtacgattggctggacatctgggatggcattccacatgttggccccctgattggcaagtactgtgggaccaaaacaccctctgaacttcgttcatcgacrgggatcctctccctgacctttcacacggacatggcggtggccaaggatggcttctctgcgcgttactacctggtccaccaagagccactagagaactttcagtgcaatgttcctctgggcatggagtctggccggattgctaaygaacagatcagtgcctcatctacctactctgatgggaggtggacccctcaacaaagccggctccatggtgatgacaatggctggacccccaacttggattccaacaaggagtatctccaggtggacctgcgctttttaaccatgctcacggccatcgcaacacagggagcgatttccagggaaacacagaatggctactaygtcaaatcctacaagctggaagtcagcactaatggagaggactggatggtgtaccggcatggcaaaaaccacaaggtatttcaagccaacaacgatgcaactgaggtggttctgaacaagctccacgctccactgctgacaaggtttgttagaatccgccctcagacctggcactcaggtatcgccctccggctggagctcttcggctgccgggtcacagatgctccctgctccaacatgctggggatgctctcaggcctcattgcagactcccagatctccgcctcttccacccaggaatacctctggagccccagtgcagcccgcctggtyagcagccgctcgggctggttccctcgaatccctcaggcccagcccggtgaggagtggcttcaggtagatctgggaacacccaagacagtgaaaggtgtcatcatccagggagcccgcggaggagacagtatcactgctgtggaagccagagcatttgtgcgcaagttcaaagtctcctacagcctaaacggcaaggactgggaatacattcaggaccccaggacccagcagccaaagctgttcgaagggaacatgcactatgacacccckgacatccgaaggtttgaccccattccggcacagtatgtgcgggtatacccggagaggtggtcgccggcggggattgggatgcggctggaggtgctgggctgtgactggacagactccaagcccacggtagagacgctgggacccactgtgaagagcgaagagacaaccaccccctaccccaccgaagaggaggccacagagtgtggggagaactgcagctttgaggatgacaaagatttgcagctcccttcgggattcaattgcaacttcgatttcctcgaggagccctgtggttggatgtatgaccatgccaagtggctccggaccacctgggccagcagctccagcccaaacgaccggacgtttccagatgacaggaatttcttgcggctgcagagtgacagccagagagagggccagtatgcccggctcatcagcccccctgtccacctgccccgaagcccggtgtgcatggagttccagtaccaggccacgggcggccgcggggtggcgctgcaggtggtgcgggaagccagccaggagagcaagttgctgtgggtcatccgtgaggaccagggcggcgagtggaagcacgggcggatcatcctgcccagctacgacatggagtaccagattgtgttcgagggagtgatagggaaaggacgttccggagagattgccattgatgacattcggataagcactgatgtcccactggagaactgcatggaacccatctcggcttttgcagatgaatacgaggtggactggagcaattcttcttctgcaacctcagggtctggcgccccctcgaccgacaaagaaaagagctggctgtacaccctggatcccatcctcatcaccatcatcgccatgagctcactgggcgtcctcctgggggccacctgtgcaggcctcctgctctactgcacctgttcctactcgggcctgagytcccgaagctgcaccacactggagaactacaacttcgagctctaygatggccttaagcacaaggtcaagatgaaccaccaraagtgctgctccgaggcatgacrgattgcacctgaatcctatctgacgtttcattccagcaagaggggctggggaagattacatttttttttcctttggaaactgaatgccataatctcgatcaaaccratccagaataccgaaggtatggacaggacagaaaagcgagtcgcaggaggaagggagatgcagccgcacaggggatgattaccctcctaggaccgcggtggctaagtcattgcaggaacggggctgtgttctctgctgggacaaaacaggagctcatctctttggggtcacagttctattttgtttgtgagtttgwattattattattattattattattattattatattttatttctttggtctgtgagcaactcaaagaggcagaagaggagaatgacttttccagaatagaagtggagcagtgatcattattctccgctttctctttctaatcaacacttgaaaagcaaagtgtcttttcagcctttccatctttacaaataaaactcaaaaaagccgtccagcttatcccatcctctgattgtcttctgacttaagggatttactgtggtgtaggttctgccagccaaccctacaagctgccatttccagtcctagcatttaagtaggatgttgttgcctttaacttttcttatccaggggaaaattgccattttagggtcagcatgaacagctctttcttgtatgcgatttaaaacaaactggaaaggaaacttcacacgtcaaaatccatagaagcgcctggacgaggcttaaagtgctttgtgagtgaataggagccattcgctaattctagacccacagtgtctggtggtggggcttcccttgtggggcttctggtggtggttttgccttttcttttccctcctccatgttcttctaaaacatatacatatatacatacacacatacacatattcttcaggtctctaagcccctggaagcagcattgtgtgatattctcagaggcaggggaaaatagagggaaaaatagagactattggtatgttctccccatcagcgagttattgtaactggtcaccactggacgggaaggagaacagaggagagggaaagagaagcccaacctctgtgatcatatgagggccaaggctgagcagtgtagacagagaccctttgaaatgcatttgtctctcaaatagactagtaaacaccgacttctcctttgggttacaaacaccatttcaacctttcgggagagtcagagctaggatgtacaagaactgattctaaccagaagtccgcaagtactgtggacaagaatgcttaaccatgctgcttcagccttgagagacctaggttcttacacatatgcacacacgcatacacacatgcacgcacacacacatacacacatgcacgcacgcacgcatgcacaccaatttatgtttttattaagtgccttgaaaaaatgaagaaaaatgtattttccctttatgtaaaaattagtgaatatcttatgaattaaggcattcctctttccctaaccccgatggctccattcccaagtaccccaactcactgctgatcctattaaaggaatgagtcctgctacccgagtggtagtcatagccctagatgactctcaactactcttcaaagggaggcatcaggaatagaatgaaactgtgtgaaggataagattgttcgcatcaagatccaaatcttgatttcatattaacgcctaaggattgcctgtgtgctggaaatatatttgaaactcaaccagtatgcccagcctattgcatatcattgtcagaccatttttgctgctgtggtcacccacgatttcatttgtcttatacccaggtgaaaggggaagggtgaatgggactggctggttcctttaaatgttaacttatggaaatgctagttcaaatggtaatgtcacagtgttttgtatgcagagagcaagagttcaaccaacagctgtttattcatgtgtgtgtgtctttgctgctttgagttctctgtatctactgtgtatgtgaatggtcatgtgggactcagtggtggtgttgtgactttgacctagggtccgagtgtcacagctgatcttggcactcggcactcattggcacagtggtagttagaggtgaaaagtagagctgtcaagcccaagggcttagctttagggctcctcctgagttcggcccacagtagaagcaagattttaactagccccttttcctcttcaccctcccatgatgcgcagtgttcagaaagctggtaagtcctagggatttccagaagtagcctgcagaagaaggtaagtttgaaagccactccaggggtcctgatgctgtcatgctcagtgagccattttacagttctccaaagtctagccctgtttcggacctgcacttcacctctaagttatgtacaactcaacctgcatccctctaaaagtcctatatccatattcaccattggctaatttgaggccctgagtgggccttgaatgctaaaaagaagcagggtacgsagggctacatgtagataccacaccaaggctggaggctgstctgtcrtaagacagaaagaaagacgctgggcccaattttgacttggccaggggacaccttggtgtgtttgttatctttatctgtgggtaggctagctgacccatctccttgagtcattccctttgggaaaccccactgccagtattgatctcctttttgccttgtactgaatgacacattacctccacactctcccggactaggtggtcaacagggccacagggttgctttctgtctttggtggggcaggggagttgacagggatgagggtccaaggaataagcatgaatgacaagaaaacaagggaaagagttaacctgtcacatagcaggttaactttttcagggtttgcagttagaggtattcgaccattcactggctgagccagatcacgggaacttgagagcttttactgtgattcttcaatgtaaaaaataaacaacaatgtcaaactgtgtttatatgatttgtataaagcctttttaagattactatttaaataaacattataccagagat

SEQ ID NO: 9 - DNA, 5207 bp, Homo sapiens
agagaggagcagagcatgtttgggacataacaaaggatctgagtacccaaacaccgtacgccacccaactcctcttgtaacgccatcgcgcgtggcattgtgttgggttctgcgtgtgtggcatcggagtcgtggaatttagggggaacaaggcttttccccccgtccccccggggtctcccttgggtgggggcgacacggccaagggcggcgcgccctgggggtgcccgggggcgcttcttccccagggcgttacgcaccggcggcccggcgcggaggagctactctcctcctggtgaggtggaaattccagcaagaatagaggtgaagacaagccaccaggactcaggagggaaacgctgaccattagaaacctctgcataagacgttgtaaggaggaaaataaaagagagaaaaacacaaagatttaaacaagaaacctacgaacccagctctggaaagagccacyttctccaaaatggatatgtttcctctcacctgggttttcttagccctctacttttcaagacaccaagtgagaggccaaccagacccaccgtgcggaggtcgtttgaattccaaagatgctggctatatcacctctcccggttacccccaggactacccctcccaccagaactgcgagtggattgtttacgcccccgaacccaaccagaagattgtcctcaacttcaaccctcactttgaaatcgagaagcacgactgcaacttgctgtctgcttggaaaatttcactcacaagccgcagctttgcctgactcagtgcaatccaaggccaycatctctggtgaacttcccttgactcctccctccagccacttgcagaaatgcaaatcctgggcacccacaggctgtttgggggcctgtatagaagctgtgggcagaaaccagaggccactgtggtactgctggactcctgcagccaaaggacaaaagggcgagactacgggccgtctgggcaaacagagagaagccactttattccctgtggagtggaggatgctaggatgttgctgctccrgcagacagaggcctttcgcttgagtcatcagccaacagactgaatgttatggttttagaaacccatacacaaagttgagtggttttttccatttctaaaatttaaaatgtatgtatttttaaaacacccacctgcatgtaatacacagcttgttcaggagttctcaaacagccccagcacccaccccatcccagaggctcaaccaaataaaaccaaaaccaggaggctgggtccttttaagcactggtaatttctacctgtaattccagccctttgggaggccgaggcaggcaggtcacctgaggtcaggagttcgagaccagcctggtcaacatggtgaaaccccgtctctactaaaaatacaaaaaaaattagccaagcttggtggtgcgtgcctgtaatctcagctactctggaggctgaggcaggagaatcacttgaacctgggaggcagaggctgcagtgagctgagattgtgccactgcactccggcctgggtgaaagagtgagactctgtctcaaaaaaaaaaaaaaaaagaattggtaatttctagatgggtaccttgatgggtctcagaaagagcaaaacccactagcaagaaatgaaagaacatttcttaggctaaaatcctcaaggaagtctacataaatgattgtatgtgctatgttcagcccagcaatrtctcatataccacgtatcattgaagaatgacattccatttaggtgaagtgtccagatactgaaatatccacctttaaagttcttaaaagagaactttaaagagttccaagagttcttttttaaaggatttctgataaagaacattctaaatcatgtgctgcacttccctgtctttttaaaacctacattgagaggagtcaactttttctcaatgattcaggcttttaattctaagcttcacttttgtgacagcagccagtattgccataattggaacaggcagattaagatttgaatttttattgaccttttaaacttcccaggcctcagtttcctcatctgcaaagctgtcataataataaatatcttgcaagattgctctgcctttttatgtagatgcccaataagttagcaactgtgttagcatcattggactttgtcaggggacagtttgggactattttctatcaatcctcctgctttcacacatcctgttacgagtatgcctgtctcctgtagccttcccattctgacttgtttttgcttttttatggggttatcaattttgcttcaggagcccttgctgtctcttgggaagtttgagttctgggacctaagctttgctcaagccagtgcaatcccaaggccagcatttccagttggcttcagccagccaagcttgcagcagagttaggactggggagtgatccccaagtgacaaagcgtaagagcaacagaggatggagttctcaacatcagtgtagctgctcacaatctttttttctgaactcccccacaccgttatattctgcatatttaaggttttggatatttgcctctaagtgtcctagataaacaaggtgctcttgtgtttatttacagccagaggggccctctatatcttagaagatatgtctgtttctcccaaagtaagagatgatatcttagaaaggtagcagtttcccagttgataacctgatcatagtaaacagagagatcagaccagaccttagtcatctggcccctccccattcagccagcagtgtttccctgtgctcagtaaacaccctcgattccctgcaaacaaccaagcatagtcttgcatctgcatgagccccctgagttcccagggctccagccctcctttccctccctccacagtgtccagctgcaagctcccatcttcctcccctgagtttccttgcttcctgcagttcccttttatcaccctttcctctgaactcccagagcacttgatgttgcctgagtcccttgctttttgttcatatgtggtcatcttgagttctcagcaagtaaattctacaagggcacaaagcatgtacttcatatctaaactcccatggcgcctagtctaggagggtgctaggcaggtgtgtgcaggtgatttcgtgatattttttacattggaaatgccaggcaataggtcagcatgagctgaatctgtgttggaaggcagacagatctgtgttccctatttgtccctctgggaatatgacataatcttagggggtaggacacaggccaagaatgtcactaactgatttgggacatgagtctctcaccaacaaaatggtaatagaccattcattcattcatcaggaaatagctattaaacacctactatgtgctaagcacgttggtattattgggaatacagtgatgaataaatcatattcttttccctaaagtcactgttactctttccattttacagatgaagaaacttgggctcaaagaagttaagcaactggcccaaggttctactcccataagtggcagagaagggttttgaagccagataccctagttttcaatctctgctttactcttgtgctgtctgcctccccggcatcatgcatttggcaggggacatgatatggacctgttacgtgggcccacagcatccaggtccagcctaagctgggaagatcaaggaaggctccctggaggaggtgacgcctatackaattctaaagaatttggccaggcagcagggagtgtgtttggctggtgtcataggcagacagcagcatgcccaaagacaagaaggagggagggtytgatgccttcaggaaccaaaataattgaacatgcctgaacccaatttcttaaccagtgagcattgtaagggtagactaaaaggggctgtccttgtgacttgctgacacaaacccttttcccggtgaagaggtgcctgagcaatactatttaattgtatttcctggccagacaacttccaccatctccttaggagacagggtggtcaggaagcaggaaagactaagatgatggggactctctgctgtccccaccttccctgtccattgtagggtctytgcagcctcataccctatgtccagcgacctcccccaccccgccgccagtggaatgcctgaaagtggggtttggcctgggaaagtccaggtaacacttcagattaagctcctcttgtcaatttcctgctacacaagactttctgaatccaagtctctttcctatgaatagagggcgggaggccagattgcccagttggaggtgtggcttcagctggtctccgttgaagtctgaaaagccaacaaagcatagtgagaattctgtgtggttcaagagggtgccttgtgcttgttgaggagaggccgttggcttgatcactcacgacactattactgacgttattatttactgcctgcccaaccacagaaatattctgattcccctaaggagccagtgagcagtaataattttctgtattgcaacaatcctcctaatgacagaaacagatccacctccaggtacgtggtggacgaatgggagcagctggctgctggccccacacttaccaaccttgaccacagggtccacccagcaactccacctcacccatggatcrgggggaaaaacaactcacagactgttctcctcttaccaaggttaaaacgcagctggaattactttgggcagtttgtttttaaaaatgagtgttgcaattgtaactgtctcaatgcaagcttcgctgtagatgcccttcttaacaatatgctttatcttctgactgagaaaatcacttgagatgttatcatgcmcaatcccacttgttctgcctctccaccctggcaccttctccgaacccagagatcccagagggccagcatctcaccccatgtaactccatgtaattctcccatctaattacaccggctgagagtctgtcttaagaaattcagtgggagctccaggtgtggaggggataaagaagagatggaaatataccaagtgaaaacatcagatttttctaaaaagggatttgtgtattttcctggagtcatgagtcctatagaaaaaaatktatattctttttgttttgtcctttttactggcaagggatttaagcctttggattaagagaaactcaaaagataatttaattccattcttatacttctgcctggataaataattccag

SEQ ID NO: 10 - DNA, 2269 bp, Homo sapiens
agctgaggtgtgagcagctgycgaagtcagttccttgtggagccggagctgggcgcggattcgccgaggcaccgaggcactcagaggaggtgagagagcggcggcagacaacaggggaccccgggccggcggcccagagccgagccaagcgtgcccgcgtgtgtccctgcgtgtccgcgaggatgcgtgttcgcgggtgtgtgctgcgttcacaggtgtttctgcggcaggcgccatgtcagaacyrgctggggatgtccgtcagaacccatgcggcagcaaggcctgccgccgcctcttcggcccagtggacagcgagcagctgagmcgcgactgtgatgcgctaatggcgggctgcatccaggaggcccgtgagcratggaacttcgactttgtcaccgagacaccactggagggtgacttmgcctgggagcgtgtgcggggccttggcctgcccaagctctaccttcccacggggccccggcraggccgggatgagttgggaggaggcaggcggcctggcacctcacctgctctgctgcaggggacagcagaggaagaccatgtggacctgtcactgtcttgtacccttgtgcctcgctcaggggagcaggctgaagggtccccaggtggacctggagactctcagggtcgaaaacggcggcagaccagcatgacagrtttctaccactccaaacgccggctgatcttctccaagaggaagccctaatccgcccacaggaagcctgyagtcctggaagcrcgagsgcctcaaaggccygctctacatcttctgccttagtctcagtttgtgtgtcttaattattatttgtgttttaatttaaacacctcctcatgtacataccctggccgccccctgccccccagcctctggcattagaattatttaaacaaaaactaggcggttgaatgagaggttcctaagagtgctgggcatttttattttatgaaatactatttaaagcctcctcatcccgtgttctccttttcctctctcccggaggttgggtgggccggcttcatgccagctacttcctcctccccacttgtccgctgggtggtaccctctggaggggtgtggctccttcccatcrctgtcacaggcggttatgaaattcaccccctttcctggacactcagacctgaattctttttcatttgagaagtaaacagatggcactttgaaggggcctcaccgagtgggggcatcatcaaaaactttggagtcccctcacctcctctaaggttgggcagggtgaccctgaagtgagcacagcctagggctgagctggggacctggtaccctcctggctcttgatacccccctctgtcttgtgaaggcagggggaaggtggggtcctggagcagaccaccccgcctgccctcatggcccctctgacctgcactggggagcccgtctcagtgttgagccttttccctctttggctcccctgtaccttttgaggagccccagctacccttyttctccagctgggctctgcaattcccctctgctgctgtccctcccccttgtcctttcccttcagtaccctctcagctccaggtggctctgaggtgcctgtcccacccccmcccccagctcaatggactggaaggggaagggacacacaagaagaagggcaccctagttctacctcaggcagctcaagcagcgaccgccccctcctctagctgtgggggtgagggtcccatgtggtggcacaggccccyttgagtggggttatctctgtgttaggggtatatgatgggggagtagatctttctaggagggagacactggcccctcaaatcgtccagcgaccttcctcatccaccccatccctccccagttcattgcactttgattagcagcrgaacaaggagtcagacattttaagatggtggcagtagaggctatggacagggcatgccacgtgggctcatatggggctgggagtagttgtytttcctggcactaacgttgagcccctggaggcactgaaktgcttagtgtacttggagtattggggtctgaccccaaacaccttccagctcctgtaacatactggcctggactgttttctctcggctccccatgtgtcctggttcccgtttctccacctagactgtaaacctctcgagggcagggaccacaccctgtactgttctgtgtctttcacagctcctcccmcaatgctgaatatacagcaggtgctcaataaatgattcttagtgactttacttgtaa

SEQ ID NO: 11 - DNA, 1848 bp, Homo sapiens
agctgaggtgtgagcagctgycgaagtcagttccttgtggagccggagctgggcgcggattcgccgaggcaccgaggcactcagaggaggcgccatgtcagaacyrgctggggatgtccgtcagaacccatgcggcagcaaggcctgccgccgcctcttcggcccagtggacagcgagcagctgagmcgcgactgtgatgcgctaatggcgggctgcatccaggaggcccgtgagcratggaacttcgactttgtcaccgagacaccactggagggtgacttmgcctgggagcgtgtgcggggccttggcctgcccaagctctaccttcccacggggccccggcraggccgggatgagttgggaggaggcaggcggcctggcacctcacctgctctgctgcaggggacagcagaggaagaccatgtggacctgtcactgtcttgtacccttgtgcctcgctcaggggagcaggctgaagggtccccaggtggacctggagactctcagggtcgaaaacggcggcagaccagcatgacagrtttctaccactccaaacgccggctgatcttctccaagaggaagccctaatccgcccacaggaagcctgyagtcctggaagcrcgagsgcctcaaaggccygctctacatcttctgccttagtctcagtttgtgtgtcttaattattatttgtgttttaatttaaacacctcctcatgtacataccctggccgccccctgccccccagcctctggcattagaattatttaaacaaaaactaggcggttgaatgagaggttcctaagagtgctgggcatttttattttatgaaatactatttaaagcctcctcatcccgtgttctccttttcctctctcccggagggtggtaccctctggaggggtgtggctccttcccatcrctgtcacaggcggttatgaaattcaccccctttcctggacactcagacctgaattctttttcatttgagaagtaaacagatggcactttgaaggggcctcaccgagtgggggcatcatcaaaaactttggagtcccctcacctcctctaaggttgggcagggtgaccctgaagtgagcacagcctagggctgagctggggacctggtaccctcctggctcttgatacccccctctgtcttgtgaaggcagggggaaggtggggtcctggagcagaccaccccgcctgccctcatggcccctctgacctgcactggggagcccgtctcagtgttgagccttttccctctttggctcccctgtaccttttgaggagccccagctacccttyttctccagctgggctctgcaattcccctctgctgctgtccctcccccttgtcctttcccttcagtaccctctcagctccaggtggctctgaggtgcctgtcccacccccmcccccagctcaatggactggaaggggaagggacacacaagaagaagggcaccctagttctacctcaggcagctcaagcagcgaccgccccctcctctagctgtgggggtgagggtcccatgtggtggcacaggccccyttgagtggggttatctctgtgttaggggtatatgatgggggagtagatctttctaggagggagacactggcccctcaaatcgtccagcgaccttcctcatccaccccatccctccccagttcattgcactttgattagcagcrgaacaaggagtcagacattttaagatggtggcagtagaggctatggacagggcatgccacgtgggctcactgaaktgcttagtgtacttggagtattggggtctgaccccaaacaccttccagctcctgtaacatactggcctggac

SEQ ID NO: 12 - DNA, 2128 bp, Homo sapiens
agctgaggtgtgagcagctgycgaagtcagttccttgtggagccggagctgggcgcggattcgccgaggcaccgaggcactcagaggaggcgccatgtcagaacyrgctggggatgtccgtcagaacccatgcggcagcaaggcctgccgccgcctcttcggcccagtggacagcgagcagctgagmcgcgactgtgatgcgctaatggcgggctgcatccaggaggcccgtgagcratggaacttcgactttgtcaccgagacaccactggagggtgacttmgcctgggagcgtgtgcggggccttggcctgcccaagctctaccttcccacggggccccggcraggccgggatgagttgggaggaggcaggcggcctggcacctcacctgctctgctgcaggggacagcagaggaagaccatgtggacctgtcactgtcttgtacccttgtgcctcgctcaggggagcaggctgaagggtccccaggtggacctggagactctcagggtcgaaaacggcggcagaccagcatgacagrtttctaccactccaaacgccggctgatcttctccaagaggaagccctaatccgcccacaggaagcctgyagtcctggaagcrcgagsgcctcaaaggccygctctacatcttctgccttagtctcagtttgtgtgtcttaattattatttgtgttttaatttaaacacctcctcatgtacataccctggccgccccctgccccccagcctctggcattagaattatttaaacaaaaactaggcggttgaatgagaggttcctaagagtgctgggcatttttattttatgaaatactatttaaagcctcctcatcccgtgttctccttttcctctctcccggaggttgggtgggccggcttcatgccagctacttcctcctccccacttgtccgctgggtggtaccctctggaggggtgtggctccttcccatcrctgtcacaggcggttatgaaattcaccccctttcctggacactcagacctgaattctttttcatttgagaagtaaacagatggcactttgaaggggcctcaccgagtgggggcatcatcaaaaactttggagtcccctcacctcctctaaggttgggcagggtgaccctgaagtgagcacagcctagggctgagctggggacctggtaccctcctggctcttgatacccccctctgtcttgtgaaggcagggggaaggtggggtcctggagcagaccaccccgcctgccctcatggcccctctgacctgcactggggagcccgtctcagtgttgagccttttccctctttggctcccctgtaccttttgaggagccccagctacccttyttctccagctgggctctgcaattcccctctgctgctgtccctcccccttgtcctttcccttcagtaccctctcagctccaggtggctctgaggtgcctgtcccacccccmcccccagctcaatggactggaaggggaagggacacacaagaagaagggcaccctagttctacctcaggcagctcaagcagcgaccgccccctcctctagctgtgggggtgagggtcccatgtggtggcacaggccccyttgagtggggttatctctgtgttaggggtatatgatgggggagtagatctttctaggagggagacactggcccctcaaatcgtccagcgaccttcctcatccaccccatccctccccagttcattgcactttgattagcagcrgaacaaggagtcagacattttaagatggtggcagtagaggctatggacagggcatgccacgtgggctcatatggggctgggagtagttgtytttcctggcactaacgttgagcccctggaggcactgaaktgcttagtgtacttggagtattggggtctgaccccaaacaccttccagctcctgtaacatactggcctggactgttttctctcggctccccatgtgtcctggttcccgtttctccacctagactgtaaacctctcgagggcagggaccacaccctgtactgttctgtgtctttcacagctcctcccmcaatgctgaatatacagcaggtgctcaataaatgattcttagtgactttacttgtaa

SEQ ID NO: 13 - DNA, 2232 bp, Homo sapiens
aggaaggggatggtaggagacaggagacctctaaagaccccagttaggtcaccagacttctctgagccccmgtttccccagcagtgtatacgggctatgtggggagtattcaggagacagacaactcactcgtcaaatcctccccttcctggccaacaaagctgctgcaaccrcagggrtttcttctgttcaggcgccatgtcagaacyrgctggggatgtccgtcagaacccatgcggcagcaaggcctgccgccgcctcttcggcccagtggacagcgagcagctgagmcgcgactgtgatgcgctaatggcgggctgcatccaggaggcccgtgagcratggaacttcgactttgtcaccgagacaccactggagggtgacttmgcctgggagcgtgtgcggggccttggcctgcccaagctctaccttcccacggggccccggcraggccgggatgagttgggaggaggcaggcggcctggcacctcacctgctctgctgcaggggacagcagaggaagaccatgtggacctgtcactgtcttgtacccttgtgcctcgctcaggggagcaggctgaagggtccccaggtggacctggagactctcagggtcgaaaacggcggcagaccagcatgacagrtttctaccactccaaacgccggctgatcttctccaagaggaagccctaatccgcccacaggaagcctgyagtcctggaagcrcgagsgcctcaaaggccygctctacatcttctgccttagtctcagtttgtgtgtcttaattattatttgtgttttaatttaaacacctcctcatgtacataccctggccgccccctgccccccagcctctggcattagaattatttaaacaaaaactaggcggttgaatgagaggttcctaagagtgctgggcatttttattttatgaaatactatttaaagcctcctcatcccgtgttctccttttcctctctcccggaggttgggtgggccggcttcatgccagctacttcctcctccccacttgtccgctgggtggtaccctctggaggggtgtggctccttcccatcrctgtcacaggcggttatgaaattcaccccctttcctggacactcagacctgaattctttttcatttgagaagtaaacagatggcactttgaaggggcctcaccgagtgggggcatcatcaaaaactttggagtcccctcacctcctctaaggttgggcagggtgaccctgaagtgagcacagcctagggctgagctggggacctggtaccctcctggctcttgatacccccctctgtcttgtgaaggcagggggaaggtggggtcctggagcagaccaccccgcctgccctcatggcccctctgacctgcactggggagcccgtctcagtgttgagccttttccctctttggctcccctgtaccttttgaggagccccagctacccttyttctccagctgggctctgcaattcccctctgctgctgtccctcccccttgtcctttcccttcagtaccctctcagctccaggtggctctgaggtgcctgtcccacccccmcccccagctcaatggactggaaggggaagggacacacaagaagaagggcaccctagttctacctcaggcagctcaagcagcgaccgccccctcctctagctgtgggggtgagggtcccatgtggtggcacaggccccyttgagtggggttatctctgtgttaggggtatatgatgggggagtagatctttctaggagggagacactggcccctcaaatcgtccagcgaccttcctcatccaccccatccctccccagttcattgcactttgattagcagcrgaacaaggagtcagacattttaagatggtggcagtagaggctatggacagggcatgccacgtgggctcatatggggctgggagtagttgtytttcctggcactaacgttgagcccctggaggcactgaaktgcttagtgtacttggagtattggggtctgaccccaaacaccttccagctcctgtaacatactggcctggactgttttctctcggctccccatgtgtcctggttcccgtttctccacctagactgtaaacctctcgagggcagggaccacaccctgtactgttctgtgtctttcacagctcctcccmcaatgctgaatatacagcaggtgctcaataaatgattcttagtgactttacttgtaa

SEQ ID NO: 14 - DNA, 2215 bp, Homo sapiens
cagcgttggctgccgaggctcggccggagcgtggagcccgcgccgctgccccaggaccgcgcccgcgcctttgtccgccgccgcccaccgcccgtcgcccgccgcccatggagcgcgccgcgccgtcgcgccgggtcccgcttccgctgctgctgctcggcggccttgcgctgctggcggccggagtggacgcggatgtcctcctggaggcctgctgtgcggacggacaccggatggccactcatcagaaggactgctcgctgccatatgctacggaatccaaagaatgcaggatggtgcaggagcagtgctgccacagccagctggaggagctgcactgtgccacgggcatcagcctggccaacgagcaggaccgctgtgccacgccccacggtgacaacgccagcctggaggccacrtttgtgaagaggtgctgccattgctgtctgctggggagggcggcccaggcccagggccagagctgcgagtacagcctcatggttggctaccagtgtggacaggtcttccrggcatgctgtgtcaagagccaggagaccggagatttggatgtcgggggcctccaagaaacggataagatcattgaggttgaggaggaacaagaggacccatatctgaatgaccgctgccgaggaggcgggccctgcaagcagcagtgccgagacacgggtgacgaggtggtctgctcctgcttcgtgggctaccagctgctgtctgatggtgtctcctgtgaagatgtcaatgaatgcatcacgggcagccacagctgccggcttggagaatcctgcatcaacacagtgggctctttccgctgccagcgggacagcagctgcgggactggctatgagctcacagaggacaatagctgcaaagatattgacgagtgtgagagtggtattcataactgcctccccgattttatctgtcagaatactctgggatccttccgctgccgacccaagctacagtgcaagagtggctttatacaagatgctctaggcaactgtattgatatcaatgagtgtttgagtatcagtgccccgtgccctatygggcatacatgcatcaacacagagggctcctacacgtgccagaagaacgtgcccaactgtggccgtggctaccatctcaacgaggagggaacgcgctgtgttgatgtggacgagtgcgcgccacctgctgagccctgtgggaagggacatcgctgcrtgaactctcccggcagtttccgctgcgaatgcaagacgggttactattttgacggcatcagcaggatgtgtgtcgatgtcaacgagtgccagcgctaccccgggcgcctgtgtggccacaagtgcgagaacacgctgggctcctacctctgcagctgttccgtgggcttccggctctctgtggatggcaggtcatgtgaagacatcaatgagtgcagcagcagcccctgtagccaggagtgtgccaacgtytacggctcctaccagtgttactgccggcgaggctaccagctcagcgatgtggatggagtcacctgtgaagacatcgacgagtgcgccctgcccaccgggggccacatctgctcctaccgctgcatcaacatccctggaagcttccagtgcagctscccctcgtctggctacaggctggcccccaatggccgcaactgccaagwcattgatgagtgtgtgactggcatccacaactgctccatcaacgagacctgcttcaacatccagggcggcttccgctgcctggccttcgagtgccctgagaactaccgccgctccgcagccacccgctgtgagcgcttgccttgccatgagaatcgggagtgctccaagctgcctctgagaataacctactaccacctctctttccccaccaacatccaagcgcccgcggtggttttccgcatgggcccctccagtgctgtccccggggacagcatgcagctggccatcaccggcggcaatgaggagggctttttcaccaccckgaaggtgacctgtccccgagcccagggacttgctcctgacygtcaagatggatctctctcgccacggcaccgtcagctcctttgtggccaagcttttcatctttgtgtctgcagagctctgagcactcgcttcgcgtcgcggggtctccctcctgttgctttcctaamcctgccctccggggcgttaataaagtcttagcaagcgtccca

SEQ ID NO: 15 - DNA, 1850 bp, Homo sapiens
cagcgttggctgccgaggctcggccggagcgtggagcccgcgccgctgccccaggaccgcgcccgcgcctttgtccgccgccgcccaccgcccgtcgcccgccgcccatggagcgcgccgcgccgtcgcgccgggtcccgcttccgctgctgctgctcggcggccttgcgctgctggcggccggagtggacgcggatgtcctcctggaggcctgctgtgcggacggacaccggatggccactcatcagaaggactgctcgctgccatatgctacggaatccaaagaatgcaggatggtgcaggagcagtgctgccacagccagctggaggagctgcactgtgccacgggcatcagcctggccaacgagcaggaccgctgtgccacgccccacggtgacaacgccagcctggaggccacrtttgtgaagaggtgctgccattgctgtctgctggggagggcggcccaggcccagggccagagctgcgagtacagcctcatggttggctaccagtgtggacaggtcttccrggcatgctgtgtcaagagccaggagaccggagatttggatgtcgggggcctccaagaaacggataagatcattgaggttgaggaggaacaagaggacccatatctgaatgaccgctgccgaggaggcgggccctgcaagcagcagtgccgagacacgggtgacgaggtggtctgctcctgcttcgtgggctaccagctgctgtctgatggtgtctcctgtgaagatgtcaatgaatgcatcacgggcagccacagctgccggcttggagaatcctgcatcaacacagtgggctctttccgctgccagcgggacagcagctgcgggactggctatgagctcacagaggacaatagctgcaaagatattgacgagtgtgagagtggtattcataactgcctccccgattttatctgtcagaatactctgggatccttccgctgccgacccaagctacagtgcaagagtggctttatacaagatgctctaggcaactgtattgatatcaatgagtgtttgagtatcagtgccccgtgccctatygggcatacatgcatcaacacagagggctcctacacgtgccagaagaacgtgcccaactgtggccgtggctaccatctcaacgaggagggaacgcgctgtgttgatgtggacgagtgcgcgccacctgctgagccctgtgggaagggacatcgctgcrtgaactctcccggcagtttccgctgcgaatgcaagacgggttactattttgacggcatcagcaggatgtgtgtcgatgtcaacgagtgccagcgctaccccgggcgcctgtgtggccacaagtgcgagaacacgctgggctcctacctctgcagctgttccgtgggcttccggctctctgtggatggcaggtcatgtgaagacatcaatgagtgcagcagcagcccctgtagccaggagtgtgccaacgtytacggctcctaccagtgttactgccggcgaggctaccagctcagcgatgtggatggagtcacctgtgaagacatcgacgagtgcgccctgcccaccgggggccacatctgctcctaccgctgcatcaacatccctggaagcttccagtgcagctscccctcgtctggctacaggctggcccccaatggccgcaactgccaagwcattgatgagtgtgtgactggcatccacaactgctccatcaacgagacctgcttcaacatccagggcggcttccgctgcctggccttcgagtgccctgagaactaccgccgctccgcagccacggtggaagccttgggcaagctctctgggcctcagtttcctcatctg

SEQ ID NO: 16 - DNA, 2255 bp, Homo sapiens
cagcgttggctgccgaggctcggccggagcgtggagcccgcgccgctgccccaggaccgcgcccgcgcctttgtccgccgccgcccaccgcccgtcgcccgccgcccatggagcgcgccgcgccgtcgcgccgggtcccgcttccgctgctgctgctcggcggccttgcgctgctggcggccggagtggacgcggatgtcctcctggaggcctgctgtgcggacggacaccggatggccactcatcagaaggactgctcgctgccatatgctacggaatccaaagaatgcaggatggtgcaggagcagtgctgccacagccagctggaggagctgcactgtgccacgggcatcagcctggccaacgagcaggaccgctgtgccacgccccacggtgacaacgccagcctggaggccacrtttgtgaagaggtgctgccattgctgtctgctggggagggcggcccaggcccagggccagagctgcgagtacagcctcatggttggctaccagtgtggacaggtcttccrggcatgctgtgtcaagagccaggagaccggagatttggatgtcgggggcctccaagaaacggataagatcattgaggttgaggaggaacaagaggacccatatctgaatgaccgctgccgaggaggcgggccctgcaagcagcagtgccgagacacgggtgacgaggtggtctgctcctgcttcgtgggctaccagctgctgtctgatggtgtctcctgtgaagatgtcaatgaatgcatcacgggcagccacagctgccggcttggagaatcctgcatcaacacagtgggctctttccgctgccagcgggacagcagctgcgggactggctatgagctcacagaggacaatagctgcaaagatattgacgagtgtgagagtggtattcataactgcctccccgattttatctgtcagaatactctgggatccttccgctgccgacccaagctacagtgcaagagtggctttatacaagatgctctaggcaactgtattgatatcaatgagtgtttgagtatcagtgccccgtgccctatygggcatacatgcatcaacacagagggctcctacacgtgccagaagaacgtgcccaactgtggccgtggctaccatctcaacgaggagggaacgcgctgtgttgatgtggacgagtgcgcgccacctgctgagccctgtgggaagggacatcgctgcrtgaactctcccggcagtttccgctgcgaatgcaagacgggttactattttgacggcatcagcaggatgtgtgtcgatgtcaacgagtgccagcgctaccccgggcgcctgtgtggccacaagtgcgagaacacgctgggctcctacctctgcagctgttccgtgggcttccggctctctgtggatggcaggtcatgtgaagacatcaatgagtgcagcagcagcccctgtagccaggagtgtgccaacgtytacggctcctaccagtgttactgccggcgaggctaccagctcagcgatgtggatggagtcacctgtgaagacatcgacgagtgcgccctgcccaccgggggccacatctgctcctaccgctgcatcaacatccctggaagcttccagtgcagctscccctcgtctggctacaggctggcccccaatggccgcaactgccaagwcattgatgagtgtgtgactggcatccacaactgctccatcaacgagacctgcttcaacatccagggcggcttccgctgcctggccttcgagtgccctgagaactaccgccgctccgcagccacccgctgtgagcgcttgccttgccatgagaatcgggagtgctccaagctgcctctgagaataacctactaccacctctctttccccaccaacatccaagcgcccgcggtggttttccgcatgggcccctccagtgctgtccccggggacagcatgcagctggccatcaccggcggcaatgaggagggctttttcaccaccckgaaggtgagcccccacagtggggtggtggccctcaccaagcctgtccccgagcccagggacttgctcctgacygtcaagatggatctctctcgccacggcaccgtcagctcctttgtggccaagcttttcatctttgtgtctgcagagctctgagcactcgcttcgcgtcgcggggtctccctcctgttgctttcctaamcctgccctccggggcgttaataaagtcttagcaagcgtcccacacagtga

SEQ ID NO: 17 - DNA, 2445 bp, Homo sapiens
cagcgttggctgccgaggctcggccggagcgtggagcccgcgccgctgccccaggaccgcgcccgcgcctttgtccgccgccgcccaccgcccgtcgcccgccgcccatggagcgcgccgcgccgtcgcgccgggtcccgcttccgctgctgctgctcggcggccttgcgctgctggcggccggagtggacgcggatgtcctcctggaggcctgctgtgcggacggacaccggatggccactcatcagaaggactgctcgctgccatatgctacggaatccaaagaatgcaggatggtgcaggagcagtgctgccacagccagctggaggagctgcactgtgccacgggcatcagcctggccaacgagcaggaccgctgtgccacgccccacggtgacaacgccagcctggaggccacrtttgtgaagaggtgctgccattgctgtctgctggggagggcggcccaggcccagggccagagctgcgagtacagcctcatggttggctaccagtgtggacaggtcttccrggcatgctgtgtcaagagccaggagaccggagatttggatgtcgggggcctccaagaaacggataagatcattgaggttgaggaggaacaagaggacccatatctgaatgaccgctgccgaggaggcgggccctgcaagcagcagtgccgagacacgggtgacgaggtggtctgctcctgcttcgtgggctaccagctgctgtctgatggtgtctcctgtgaagatgtcaatgaatgcatcacgggcagccacagctgccggcttggagaatcctgcatcaacacagtgggctctttccgctgccagcgggacagcagctgcgggactggctatgagctcacagaggacaatagctgcaaagatattgacgagtgtgagagtggtattcataactgcctccccgattttatctgtcagaatactctgggatccttccgctgccgacccaagctacagtgcaagagtggctttatacaagatgctctaggcaactgtattgatatcaatgagtgtttgagtatcagtgccccgtgccctatygggcatacatgcatcaacacagagggctcctacacgtgccagaagaacgtgcccaactgtggccgtggctaccatctcaacgaggagggaacgcgctgtgttgatgtggacgagtgcgcgccacctgctgagccctgtgggaagggacatcgctgcrtgaactctcccggcagtttccgctgcgaatgcaagacgggttactattttgacggcatcagcaggatgtgtgtcgatgtcaacgagtgccagcgctaccccgggcgcctgtgtggccacaagtgcgagaacacgctgggctcctacctctgcagctgttccgtgggcttccggctctctgtggatggcaggtcatgtgaagacatcaatgagtgcagcagcagcccctgtagccaggagtgtgccaacgtytacggctcctaccagtgttactgccggcgaggctaccagctcagcgatgtggatggagtcacctgtgaagacatcgacgagtgcgccctgcccaccgggggccacatctgctcctaccgctgcatcaacatccctggaagcttccagtgcagctscccctcgtctggctacaggctggcccccaatggccgcaactgccaagwcattgatgagtgtgtgactggcatccacaactgctccatcaacgagacctgcttcaacatccagggcggcttccgctgcctggccttcgagtgccctgagaactaccgccgctccgcagccacatgatcgtagggaactctgcatgaggccatcggtgcaggctggagaagagaaggcaagttggcaggagtggagaccacrggcatttgagccacttcctcatgtaacttaacttgtgccttcaggacctgctcaagcccgatcacgtatataccacttccatttgatgatggaatgctgctgttcatgaccaactttatggctagatgggtcagaaagcacccagttcatgataggcagttcaggtcatatggtgacttgatgacccagagtcaaacattcagtttccaccaaagcccagtaacaggccaagagctgtctctcaaaagragagtagttatctgcagaagatggcagggccttgctccgaaagcctagagaccgccactgtgattcacctatgggggcctgccaaaggctgcagccagcatccttatctgccactgacacctcaagcaacattggatctgctgggtcatatggcccaagtggcagagcaacttgcacaacagcctggacctgtcatagagctttctcctgttctggaccccactcaaaactggcagcctttcaggtcactcrataaatgtgctggagtaamactcaaacgaggaatgtgttgcctccaaaatccaataggccc

SEQ ID NO: 18 - DNA, 2909 bp, Homo sapiens
cagcgttggctgccgaggctcggccggagcgtggagcccgcgccgctgccccaggaccgcgcccgcgcctttgtccgccgccgcccaccgcccgtcgcccgccgcccatggagcgcgccgcgccgtcgcgccgggtcccgcttccgctgctgctgctcggcggccttgcgctgctggcggccggagtggacgcggatgtcctcctggaggcctgctgtgcggacggacaccggatggccactcatcagaaggactgctcgctgccatatgctacggaatccaaagaatgcaggatggtgcaggagcagtgctgccacagccagctggaggagctgcactgtgccacgggcatcagcctggccaacgagcaggaccgctgtgccacgccccacggtgacaacgccagcctggaggccacrtttgtgaagaggtgctgccattgctgtctgctggggagggcggcccaggcccagggccagagctgcgagtacagcctcatggttggctaccagtgtggacaggtcttccrggcatgctgtgtcaagagccaggagaccggagatttggatgtcgggggcctccaagaaacggataagatcattgaggttgaggaggaacaagaggacccatatctgaatgaccgctgccgaggaggcgggccctgcaagcagcagtgccgagacacgggtgacgaggtggtctgctcctgcttcgtgggctaccagctgctgtctgatggtgtctcctgtgaagatgtcaatgaatgcatcacgggcagccacagctgccggcttggagaatcctgcatcaacacagtgggctctttccgctgccagcgggacagcagctgcgggactggctatgagctcacagaggacaatagctgcaaagatattgacgagtgtgagagtggtattcataactgcctccccgattttatctgtcagaatactctgggatccttccgctgccgacccaagctacagtgcaagagtggctttatacaagatgctctaggcaactgtattgatatcaatgagtgtttgagtatcagtgccccgtgccctatygggcatacatgcatcaacacagagggctcctacacgtgccagaagaacgtgcccaactgtggccgtggctaccatctcaacgaggagggaacgcgctgtgttgatgtggacgagtgcgcgccacctgctgagccctgtgggaagggacatcgctgcrtgaactctcccggcagtttccgctgcgaatgcaagacgggttactattttgacggcatcagcaggatgtgtgtcgatgtcaacgagtgccagcgctaccccgggcgcctgtgtggccacaagtgcgagaacacgctgggctcctacctctgcagctgttccgtgggcttccggctctctgtggatggcaggtcatgtgaagacatcaatgagtgcagcagcagcccctgtagccaggagtgtgccaacgtytacggctcctaccagtgttactgccggcgaggctaccagctcagcgatgtggatggagtcacctgtgaagacatcgacgagtgcgccctgcccaccgggggccacatctgctcctaccgctgcatcaacatccctggaagcttccagtgcagctscccctcgtctggctacaggctggcccccaatggccgcaactgccaagwcattgatgagtgtgtgactggcatccacaactgctccatcaacgagacctgcttcaacatccagggcggcttccgctgcctggccttcgagtgccctgagaactaccgccgctccgcagccacgctccagcaggagaagacagacacggtccgctgcatcaagtcctgccgccccaacgatgtcacatgcgtgttcgaccccgtgcacaccatctcccacaccgtcatctcgctgcctaccttccgcgagttcacccgccctgaagagatcatcttcctccgggccatcacgccaccrcatcctgccagccaggctaacatcatcttcgacatcacggaagggaacctgcgggactcttttgacatcatcaagcgttacatggacggcatgaccgtgggtgtcgtgcgccaggtgcggcccatcgtgggcccatttcatgccgtcctgaagctggagatgaactatgtggtcgggggcgtggtctcccaccgaaatgttgtcaaygtccrcatcttcgtctctgagtactggttctgagggctggtctgccgcacagccgcaggtgcacctcsaggccaaatcattgctgccagtgactgtggtctgtacttgtttataccctcagacttttttaatgttaggtatttgtagcattaggccaacatgtattaagctgagccagatgaataagtccatctgatgtattttcggtgtttraaaaatgagcccagttgctcaactgtttrgttgaaaaccttgctcattttttaatgcgaaggctaagtgtcaccccctttctctgcctctggctgggccttgctaagggccaaggaaagaaagacattttttagggggcagccagtccaaatgccaaaagaagaccagttcttgccctgattgtatgaaatttgacattttggcactttttttttttttttggccaatcagattttctatgttctaaggacatggctgctgtagaatagcacagaygtggatgataaattatccccagaagcagcatgacagaatgcctcggggagcacwtggaagggaaattgcagttctgttgaaatagaggaaaatcccttggtaaaracacagcctgttaggctcgtgtgggcctccagtatgttcaccaggggaatggctgggatttctcggcactctgcatcatccatcttttyttataggtgggaaaataaacaactttgtgatcctcctgat

SEQ ID NO: 19 - DNA, 2622 bp, Homo sapiens
cagcgttggctgccgaggctcggccggagcgtggagcccgcgccgctgccccaggaccgcgcccgcgcctttgtccgccgccgcccaccgcccgtcgcccgccgcccatggagcgcgccgcgccgtcgcgccgggtcccgcttccgctgctgctgctcggcggccttgcgctgctggcggccggagtggacgcggatgtcctcctggaggcctgctgtgcggacggacaccggatggccactcatcagaaggactgctcgctgccatatgctacggaatccaaagaatgcaggatggtgcaggagcagtgctgccacagccagctggaggagctgcactgtgccacgggcatcagcctggccaacgagcaggaccgctgtgccacgccccacggtgacaacgccagcctggaggccacrtttgtgaagaggtgctgccattgctgtctgctggggagggcggcccaggcccagggccagagctgcgagtacagcctcatggttggctaccagtgtggacaggtcttccrggcatgctgtgtcaagagccaggagaccggagatttggatgtcgggggcctccaagaaacggataagatcattgaggttgaggaggaacaagaggacccatatctgaatgaccgctgccgaggaggcgggccctgcaagcagcagtgccgagacacgggtgacgaggtggtctgctcctgcttcgtgggctaccagctgctgtctgatggtgtctcctgtgaagatgtcaatgaatgcatcacgggcagccacagctgccggcttggagaatcctgcatcaacacagtgggctctttccgctgccagcgggacagcagctgcgggactggctatgagctcacagaggacaatagctgcaaagatattgacgagtgtgagagtggtattcataactgcctccccgattttatctgtcagaatactctgggatccttccgctgccgacccaagctacagtgcaagagtggctttatacaagatgctctaggcaactgtattgatatcaatgagtgtttgagtatcagtgccccgtgccctatygggcatacatgcatcaacacagagggctcctacacgtgccagaagaacgtgcccaactgtggccgtggctaccatctcaacgaggagggaacgcgctgtgttgatgtggacgagtgcgcgccacctgctgagccctgtgggaagggacatcgctgcrtgaactctcccggcagtttccgctgcgaatgcaagacgggttactattttgacggcatcagcaggatgtgtgtcgatgtcaacgagtgccagcgctaccccgggcgcctgtgtggccacaagtgcgagaacacgctgggctcctacctctgcagctgttccgtgggcttccggctctctgtggatggcaggtcatgtgaagacatcaatgagtgcagcagcagcccctgtagccaggagtgtgccaacgtytacggctcctaccagtgttactgccggcgaggctaccagctcagcgatgtggatggagtcacctgtgaagacatcgacgagtgcgccctgcccaccgggggccacatctgctcctaccgctgcatcaacatccctggaagcttccagtgcagctscccctcgtctggctacaggctggcccccaatggccgcaactgccaagwcattgatgagtgtgtgactggcatccacaactgctccatcaacgagacctgcttcaacatccagggcggcttccgctgcctggccttcgagtgccctgagaactaccgccgctccgcagccacgcagaaatccaagaagggaaggcagaacaccccagcgggatcaagtaaagaggactgcagggttcttccatggaagcaggggttggaggatacccaccttgatgcctagtgaggaagatggacctggacagacagtcagctccacaccttgcgctgagcagctgtgattgtgccacgggagcatgagcccttttccccacggcccttgccactgtctcctggccctctctctgatcatgccaggtttgcaccagcctcgagtctcccatgttgtagtacattctccaagatgcagcccaggagcctctctgaaggaccagtctggttacgatggtctgagcttccttagaaccttccatggttgtcttttcccagcagatgaagcatagcctccttggaatggcatgggaggcctggcctgatctggcctctgcccaccctttgagctgyacctgccccaccccagctcatccatgtgcttgtaccctggccccacggggaggcttgcccttccctgaatstgccttcttgtggctttagcatgtgccatgctgtccccctgcagactgccattctccttgcagacttggctcagaagtcacctcctcagtgcagttagcctgagctcccctggccccaggtgcctccatcagagcatttaccccattgtgttgtggctgttccttaacgtccccactagccaggctctttgagggcagggattgtgtctggttaatttctgtattctctgcaactttgcaatgtttggcttgaagaaggagctcagtaaacatctgaataaacatgcaggttgatgg

SEQ ID NO: 20 - DNA, 2367 bp, Homo sapiens
agacacaaaatcagccagggggagcccacattggagggcagtccacaatggaaggcttcttggaggaggagatgattgagctgcttctactaagatgagtatctcagagtcctcaacgtgggtgtggccgaggtgaagaaatccttcctggggcccttgtccccgtcctgtaagatggtgcagatgatgaggcagtttctgtaccgggtcctgcccgaggactcctacaaggtcaccacggggaagctccatgtgagcctcacccgcttaacggacggggagaatgtggtggtttcagagttcacgtccaaggaggagctcattgaggccctatactgcagctgcttygtcccggtgtactgtggcctcatccccccgacttaccgcggtgtgaggtacatcgatgggggcttcacgggcatgcagccctgtgccttctggaccgacrccatcaccatctccaccttcagtgggcagcaggacatctgtccccgggactgcccggccatcttccacgacttccgcatgttcaactgctccttccagttctccctggagaacatcgccaggatgacccacgcattgttccccccggacctggtgatcctgcacgattactactaccgagggtacgaggatgcagttttgtacttgaggcggctgaatgctgtttatcttaattcttcctccaagagagtgattttcccccgggtggaagtgtactgccagatagaactcgcccttggcaatgrgtgccctgaacgcagtcaaccaagccttcgagcacggcaggccagtctggaaggagccacacaacctcacaaggagtgggttcccaaaggggatggaaggggcagccatggtccgcctgtgtcccaacctgtgcagacacttgaattcacatgcgagtcacctgtttcagcaccagtctctccacttgagcagccacctgcacagccactggcctcttcaactccactttctctaagtggcatgccacctgtatcattcccagctgtgcacaagccacccagctccacacctggttcatcactgcccaccccaccacctggactgtcacctctgtcacctcagcagcaggtacaaccgtctggatcaccagccagatccctacactctcaggcacccacttcacmcaggccatccctggggccttcaactgtgggggcacctcaaacactgccccgaagttctctttcagccttccctgctcagccacctgtggaggaactaggccaagaacagccccaagctgtagctcttcttgtctcttcaaaaccaaaaagcgccgtgcctctggttcatgtgaaggaaaccgtcagcaagccttatgtaayggagagccctgctgaagactcaaactgggtgaataaggtcttcaagaagaacaagcaaaagacaagtggcaccagaaaaggcttcccaagacatycgggatccaaaaamccaagcagcaaagtgcagtgagcatgtctaatgttccttaaatcccacggagaggagcagctttgggaactgtgttcagagagattccgaggaatagaggagagtgtaagggagtagggggtgcagtgggagattgggctttggaacagacacatccgacataaaattcctgctctgccacagctccactcagggatcatggttgggacacttgctctccctgagcctccatttcctgtaaaatggggatgataccacttcataaagttgtgagagttaaatgtgatcgatgatgtaaattgcttcatagaatgcagaatgtgtaatagctcacaataagtaggtattatgtttacatattatgtttgtatttatgctacttaaatacaaaactggacaggccaggcatggtggctcatgcctgtaatcccagcactttgggaggctgaggtaggtggaaaacctgaggtcaggagttcaagaacagcctgaccaacatggtgaaactccatctctactaaaaatacmaaaattaaccaggcttgatggtgtgcacctgtaatctcagctactcgggaggctgaggcaagagaatcgcttgaacccaggaggcagaggttgcagtgcaccaagactgcgccattgcactccagcccgggcaacaagagcgaaaccccatctcgaaaaaaaacaaaacaaaactagacaagtgagtgcctacgtgacactcaaatgttgccagcatacagttaagggccctagtcaatgtaggcctgcttcttatagctttttgactatattatgctgtctttgacttagtcagtcaacacttattgagcacctactaagtgccaaacactctcctggactctggcaaaataaaaaatgaattaaaactct

SEQ ID NO: 21 - DNA, 2621 bp, Homo sapiens
actcagcccagtggccctctgagctgttccttcttgaccggcacacacagctcgcttcttcactttcttttccatccactgccggacccaagccagccttccagggagcagccatgccttacctctaccgggccccagggcctcaggcacacccggttcccaaggacgcccggatcacccactcctcaggccagagctttgagcaaatgaggcaggagtgcctgcagagaggcaccctgtttgaggatgcagacttcccagccagcaattcctccctgttctacagtgagaggccgcagatcccctttgtgtggaaacgaccaggggaaatcgtgaaaaacccagaattcattcttggaggggccaccaggactgatatctgccagggagagctgggagactgctggctattagccgycatcgcctcccttacgcttaatcaaaaagcactggccagagtcatcccccaggaccaaagmtttggccctggttatgccgggatattccatttccagttctggcagcacagtgagtggctggacgtggtgatcgatgaccgcctgcccaccttcagggaccgcttggttttcctccactctgccgaccacaaygagttctggagcgccttgctggaaaaagcctacgccaagctaaatgggagctatgaagctctgaagggaggcagcgccatcgaggccatggaagacttcacygggggtgtggcagagaccttccaaactaaagaggcccccgagaacttctatgagattctagagaaggctttgaagagaggctccctgctgggctgcttcaytgataccagaagtrctgcagaatctgaggcccggacgccgtttggtcttattaagggtcatgcctacagtgtaacgggaattgaccaggtaagcttccgaggccagagaatcgagctcatccgaatccggaacccttggggccaggttgagtggaacgggtcgtggagcgacaggatggcatttmaggacttcaaggcccamtttgataaagtggagatctgcaacctcactcccgatgccctgraggaagacgcgatccacaaatgggaggtgacggtccatcagggaagctgggttcgcggctccacggctgggggctgccgcaatttcctggataccttttggaccaatccacaaataaaattgtctctgactgagaaagatgaggggcaggaggagtgtagtttccttgtagccctgatgcagaaagatagaaggaaactcaagagatttggtgccaatgtgctgacaatcggctatgccatttatgagtgccctgacaaagacgaacacctgaacaaagacttcttcagataccacgcttctcgggccagaagcaagacgttcatcaacctgagagaagtctccgaccggttcaagctgccccctggggagtacatcctgattcccagcacttttgagccccaccaggaagctgatttctgtctgagaatcttttcagagaaaaaagccattacccgggatatggatggaaatgtagacattgaccttcctgagcctccaaagccaactccacctgaccaggagacagaggaggagcagyggtttcgggctctgtttgaacaagtcgctggtgaggacatggaggtgacagcagaggaacttgagtatgttttaaatgctgtgctgcaaaagaaaaaggacatcaaattcaagaagctaagcctgatctcctgtaaaaacatcatttccctgatggacaccagcggcaatgggaagctggagtttgatgaattcaaagtgttctgggacaagctgaagcagtggattaaccttttccttcggtttgatgctgacaagtccggcaccatrtctacctatgaactacggactgcactgaaagctgcaggctttcagctgagcagccacctcctgcagctgattgtgctcaggtatgcggatgaggagctccagctggacttcgatgacttcctcaactgcctggtccggctggagaatgcgagccgggtgttccaggctctcagtacaaagaacaaggagttcattcatctcaatataaatgagttcatccatttgacaatgaacatctgaggctgccttgtagagatgcagcctgcccagctgaatcttggcttctggaccttgaccttcagaacttctcttggtgtggaaccattacgcccagggttcactcccctctcatcgtccggccttctcccttcatcttgatctgggaagaatgaaatgaactcagctacactctctgattttgtgctactcctttgtaaagtcactgccttaagggggctgatggcgccacctgtgccttacatccaggttcaggcatcactagctttcccacactctactttccttatttccttccattaagaattactcagagttctaacgcacagaatcctgacttccatgtagctccagtcattgtgatcagacatcctttataaaacatgtttttataaatgtgtatgtggaataagatgaggaggaaaaggagtgaggtcataattyagcatttctgcatcataagtgtgcttccttatcagggaagacatcaggtagttccgataattggacaagagt

SEQ ID NO: 22 - DNA, 2699 bp, Homo sapiens
actcagcccagtggccctctgagctgttccttcttgaccggcacacacagctcgcttcttcactttcttttccatccactgccggacccaagccagccttccagggagcagccatgccttacctctaccgggccccagggcctcaggcacacccggttcccaaggacgcccggatcacccactcctcaggccagagctttgagcaaatgaggcaggagtgcctgcagagaggcaccctgtttgaggatgcagacttcccagccagcaattcctccctgttctacagtgagaggccgcagatcccctttgtgtggaaacgaccaggggaaatcgtgaaaaacccagaattcattcttggaggggccaccaggactgatatctgccagggagagctgggagactgctggctattagccgycatcgcctcccttacgcttaatcaaaaagcactggccagagtcatcccccaggaccaaagmtttggccctggttatgccgggatattccatttccagttctggcagcacagtgagtggctggacgtggtgatcgatgaccgcctgcccaccttcagggaccgcttggttttcctccactctgccgaccacaaygagttctggagcgccttgctggaaaaagcctacgccaagctaaatgggagctatgaagctctgaagggaggcagcgccatcgaggccatggaagacttcacygggggtgtggcagagaccttccaaactaaagaggcccccgagaacttctatgagattctagagaaggctttgaagagaggctccctgctgggctgcttcaytgataccagaagtrctgcagaatctgaggcccggacgccgtttggtcttattaagggtcatgcctacagtgtaacgggaattgaccaggtaagcttccgaggccagagaatcgagctcatccgaatccggaacccttggggccaggttgagtggaacgggtcgtggagcgacagttctccggagtggcgttctgttggtccagctgagcagaarcgtctgtgtcacactgctctggatgatggggaattctggatggcatttmaggacttcaaggcccamtttgataaagtggagatctgcaacctcactcccgatgccctgraggaagacgcgatccacaaatgggaggtgacggtccatcagggaagctgggttcgcggctccacggctgggggctgccgcaatttcctggataccttttggaccaatccacaaataaaattgtctctgactgagaaagatgaggggcaggaggagtgtagtttccttgtagccctgatgcagaaagatagaaggaaactcaagagatttggtgccaatgtgctgacaatcggctatgccatttatgagtgccctgacaaagacgaacacctgaacaaagacttcttcagataccacgcttctcgggccagaagcaagacgttcatcaacctgagagaagtctccgaccggttcaagctgccccctggggagtacatcctgattcccagcacttttgagccccaccaggaagctgatttctgtctgagaatcttttcagagaaaaaagccattacccgggatatggatggaaatgtagacattgaccttcctgagcctccaaagccaactccacctgaccaggagacagaggaggagcagyggtttcgggctctgtttgaacaagtcgctggtgaggacatggaggtgacagcagaggaacttgagtatgttttaaatgctgtgctgcaaaagaaaaaggacatcaaattcaagaagctaagcctgatctcctgtaaaaacatcatttccctgatggacaccagcggcaatgggaagctggagtttgatgaattcaaagtgttctgggacaagctgaagcagtggattaaccttttccttcggtttgatgctgacaagtccggcaccatrtctacctatgaactacggactgcactgaaagctgcaggctttcagctgagcagccacctcctgcagctgattgtgctcaggtatgcggatgaggagctccagctggacttcgatgacttcctcaactgcctggtccggctggagaatgcgagccgggtgttccaggctctcagtacaaagaacaaggagttcattcatctcaatataaatgagttcatccatttgacaatgaacatctgaggctgccttgtagagatgcagcctgcccagctgaatcttggcttctggaccttgaccttcagaacttctcttggtgtggaaccattacgcccagggttcactcccctctcatcgtccggccttctcccttcatcttgatctgggaagaatgaaatgaactcagctacactctctgattttgtgctactcctttgtaaagtcactgccttaagggggctgatggcgccacctgtgccttacatccaggttcaggcatcactagctttcccacactctactttccttatttccttccattaagaattactcagagttctaacgcacagaatcctgacttccatgtagctccagtcattgtgatcagacatcctttataaaacatgtttttataaatgtgtatgtggaataagatgaggaggaaaaggagtgaggtcataattyagcatttctgcatcataagtgtgcttccttatcagggaagacatcaggtagttccgataattggacaagagt

SEQ ID NO: 23 - DNA, 2307 bp, Homo sapiens
agatgtgtcaccagcagttggtcatctcttggttttccctggtttttctggcatctcccctcgtggccatatgggaactgaagaaagatgtttatgtcrtagaattggattggtatccggatgcccctggagaaatggtggtcctcacctgtgacacccctgaagaagatggtatcacctggaccttggaccagagcagtgaggtcttaggctctggcaaaaccctgaccatccaagtcaaagagtttggagatgctggccagtacacctgtcacaaaggaggcgaggttctaagccattcgctcctgctgcttcacaaaaaggaagatggaatttggtccactgatattttaaaggaccagaaagaacccaaaaataagacctttctaagatgcgaggccaagaattattctggacgtttcacctgctggtggctgacgacaatcagtactgatttgacattcagtgtcaaaagcagcagaggctcttctgacccccaaggggtgacgtgcggagctgctacactctctgcagagagagtcagargggacaacaaggagtatgagtactcagtggagtgccaggaggacagtgcctgcccagctgctgaggagagtctgcccattgaggtcatggtggatgccgttcacaagctcaagtatgaaaactacaccagcagcttcttcatcagggacatcatcaaacctgacccacccaagaacttgcagctgaagccattaaagaattctcggcaggtggaggtcagctgggagtaccctgacacctggagtactccacattcctacttctccctgacattctgcgttcaggtccagggcaagagcaagagagaaaagaaagatagagtcttcacggacaagacctcagccacgktcatctgccgcaaaaatgccagcattagcgtgcgggcccaggaccgctactatagctcatcttggagcgaatgggcatctgtgccctgcagttagrttctgatccaggatgaaaatttggaggaaaagtggaagatattaagcaaaatgtttaaagacacaacggaatagacccaaaaagataatttctatctgatttgctttaaaacgtttttttaggatcacaatgatatctttgctgtatttgtatagttmgatgctaaatgctcattgaaacaatcagmtaatttatgtatagattttccagctctcaagttgccmtgggccttcatgctatttaaatatttaagtaatttatgtatttattagtatattactgttatttaacgtttgtctgccaggatgtatggaatgtttcatactcttatgacctgatccatcaggatcagtccctattatgcaaaatgtgaatttaattttatttgtactgacaacttttcaagcaaggctgcaagtacatcagttttatgacaatcaggaagaatgcagtgttctgataccagtgccatcatacacttgtgatggatgggaacgcaagagatacttacatggaaayctgacaatgcaaacctgttgagaagatccaggagaacaagatgctagttcccatgtctgtgaagacttcctggagatggtgttgataaagcaatttagggccacttacacttctaagcaagtttaatctttggatgcctgaattttaaaagggctagaaaaaaatgattgaccagcctgggaaacataacaagaccccgtctctacaaaaaaaatttaaaattagccaggcgtggtggctcatgcttgtggtcccagctgttcaggaggatgaggcaggaggatctcttgagcccaggaggtcaaggctatggtgagccgtgattgtgccactgcataccagcctaggtgacagaatgagaccctgtctcaaaaaaaaaaatgattgaaattaaaattcagctttagcttccatggcagtcctcacccccacctctctaaaagacacaggaggatgacacagaaacaccgtaagtgtctggaaggcaaaaagatcttaagattcaagagagaggacaagtagttatggctaaggacatgaaattgtcagaatggcaggtggcttcttaacagccmtgtgagaagcagacagatgcaaagaaaatctggaatccctttctcattagcatgaatgaacctgatacacaattatgaccagaaaatatggctccatgaaggtgctacttttaagtaatgtatgtgcgctctgtaaagtgattacatttgtttcctgtttgtttatttatttatttatttttgcattctgaggctgaactaataaaaactcttctttgtaatc

SEQ ID NO: 24 - DNA, 3015 bp, Homo sapiens
gagcaagccgagtggagggaggcaaaggccaggctgaggatcagggtggcccgggtggcagcggggaggcgctgcatgctggaggctgtgctgagtgcccggtgcaggtgagccggtcctgcggagttgtgccgagtgcctgctgcagaccgaggctgggccaagatggygtctgtgtttcgaagcgaggagatgtgtttgtcacaactgtttctccaggtggaagctgcatattgctgtgtggctgagctcggagagctcggattggttcagttcaaagatttaaatatgaatgtgaacagctttcaaaggaaatttgtgaatgaagtcagaaggtgtgaatcactggagagaatcctccgttttctggaagacgagatgcaaaatgagattgtagttcagttgctcgagaaaagcccactgaccccgctcccacgggaaatgattaccctggagactgttctagaaaaactggaaggagagttacaggaagccaaccagaaccagcaggccttgaaacaaagcttcctagaactgacagaactgaaatacctcctgaagaaaacccaagacttctttgagacrgaaaccaatttagctgatgatttctttactgaggacacttctggcctcctggagttgaaagcagtgcctgcatatatgaccggaaagttggggttcatagccgrtgtgatcaacagggagaggatggcttcctttgagcggttactgtggcgaatctgcygaggaaacgtgtacttgaagttcagtgagatggacgcccctctggaggatcctgtgacgaaagaagaaattcagaagaacatattcatcatattttaccaaggagagcagctcaggcagaaaatcaagaagatctgtgatgggtttcgagccactgtctacccttgcccagagcstgcggtggagcgcagagagatgttggagagcgtcaatgtgaggctggaagatttaatcaccgtcataacacaaacagagtctcaccgccagcgcctgctgcaggaagccgctgccaactggcactcctggctcatcaaggtgcagaagatgaaagctgtctaccacatcctgaacatgtgcaacatcgacgtcacccagcagtgtgtcatcgccgagatctggttcccggtggcagatgccacacgtatcaagagggcactggagcaaggcatggaamtaagtggctcctccatggcccccatcatgaccacagtgyaatctaaaacagcccctcccacatttaacaggaccaataaattcacagctggcttccagaatattgttgatgcctatggtgtyggcagctaccgggagataaacccagccccctacaccatcatcactttccccttcctgttcgctgtgatgtttggagactgtggtcatggaaccgtgatgctcctggctgcactttggatgattctgaatgagagacgcttgctctcccagaagacagacaatgagatttggaacaccttcttccacgggcgctatctgatcctacttatgggcatcttctccatctacacgggtttgatctacaatgactgcttctccaagtccttgaacatctttggctcttcttggagtgtccaacccatgttcagaaacggcacatggaatactcatgtaatggaggaaagtctatatctgcagctggacccagccataccaggagtgtattttggaaatccatacccgtttgggattgatcgatttggaacttggcttcaaacaaactcacatttctgaactcgtataaaatgaagatgtcggtgatcctgggaattgtccagatggtttttygtgtcatcctcagccttttcaatcacatatacttcagaagaactctcaacatcattctgcaatttatccctgagatyatttttatcctgtgtctgtttggatacctggttttcatgatcattttcaaatggtgctgctttgacgtccaygtatctcagcacgcccccagcatcctcatccacttcatcaacatgtttctgtttaactacagtgactcttccaacgcacccctctacaaacatcagcaagaagtccaaagtttctttgtggttatggctttgatttctgtgccgtggatgcttctgattaagccgtttattcttagagccagtcatcggaaatcccagctgcaggcatccaggatccaagaagatgccactgagaacattgaaggtgatagctccagcccttctagccgttctggccagaggacttctgcagatacccacggggctctggacgaccatggagaagagttcaactttggagacgtctttgtccaccaagccatccacaccatcgagtactgcctgggctgcatttcaaacacagcctcctacctgcggctctgggccctcagcctggctcatgcacactgtctgaagtgctctggactatggtgatgaacagcggccttcagacgyraggctggggaggaatcgtcggggtttttattatttttgccgtatttgctgtcctgacagtagccatccttctgatcatggagggcctctctgctttcctgcacgccctgcgartgcactgggttgagttccagaacaagttctatgtcgggatggttacaagttttctccrttctcctttaaacacatcctggatggcacagccgaggagtagyctgagggctgcacctcccacggtggtcaccatgccaatgaaggaagttcagtcttgtctttgatatcagcccctgcaaggcgctcaatgggaaggttgttcttggctcacctgaagcatgaaactgtgtattatttggacgtcagcctgtggatttgatacgacttaaccacgtcagaggaaggactttggcaagtgatattgtcttcatgtggggtattaattctcaaataataaagtarttgacaaatgaggggagaatgctaaacagatgtcttcttgcaatattttaaatattgtatttgagaaaataaacatctgagtcattca

SEQ ID NO: 25 - DNA, 3118 bp, Homo sapiens
gagcaagccgagtggagggaggcaaaggccaggctgaggatcagggtggcccgggtggcagcggggaggcgctgcatgctggaggctgtgctgagtgcccggtgcaggtgagccggtcctgcggagttgtgccgagtgcctgctgcagtctcatttccagttcctccatgacgtggcaagtgaagacaggaatgaaaggaatgtaaagcagcttttctctgaagagaagaagagagagagacasagccaagaccgaggctgggccaagatggygtctgtgtttcgaagcgaggagatgtgtttgtcacaactgtttctccaggtggaagctgcatattgctgtgtggctgagctcggagagctcggattggttcagttcaaagatttaaatatgaatgtgaacagctttcaaaggaaatttgtgaatgaagtcagaaggtgtgaatcactggagagaatcctccgttttctggaagacgagatgcaaaatgagattgtagttcagttgctcgagaaaagcccactgaccccgctcccacgggaaatgattaccctggagactgttctagaaaaactggaaggagagttacaggaagccaaccagaaccagcaggccttgaaacaaagcttcctagaactgacagaactgaaatacctcctgaagaaaacccaagacttctttgagacrgaaaccaatttagctgatgatttctttactgaggacacttctggcctcctggagttgaaagcagtgcctgcatatatgaccggaaagttggggttcatagccgrtgtgatcaacagggagaggatggcttcctttgagcggttactgtggcgaatctgcygaggaaacgtgtacttgaagttcagtgagatggacgcccctctggaggatcctgtgacgaaagaagaaattcagaagaacatattcatcatattttaccaaggagagcagctcaggcagaaaatcaagaagatctgtgatgggtttcgagccactgtctacccttgcccagagcstgcggtggagcgcagagagatgttggagagcgtcaatgtgaggctggaagatttaatcaccgtcataacacaaacagagtctcaccgccagcgcctgctgcaggaagccgctgccaactggcactcctggctcatcaaggtgcagaagatgaaagctgtctaccacatcctgaacatgtgcaacatcgacgtcacccagcagtgtgtcatcgccgagatctggttcccggtggcagatgccacacgtatcaagagggcactggagcaaggcatggaamtaagtggctcctccatggcccccatcatgaccacagtgyaatctaaaacagcccctcccacatttaacaggaccaataaattcacagctggcttccagaatattgttgatgcctatggtgtyggcagctaccgggagataaacccagccccctacaccatcatcactttccccttcctgttcgctgtgatgtttggagactgtggtcatggaaccgtgatgctcctggctgcactttggatgattctgaatgagagacgcttgctctcccagaagacagacaatgagatttggaacaccttcttccacgggcgctatctgatcctacttatgggcatcttctccatctacacgggtttgatctacaatgactgcttctccaagtccttgaacatctttggctcttcttggagtgtccaacccatgttcagaaacggcacatggaatactcatgtaatggaggaaagtctatatctgcagctggacccagccataccaggagtgtattttggaaatccatacccgtttgggattgatcgatttggaacttggcttcaaacaaactcacatttctgaactcgtataaaatgaagatgtcggtgatcctgggaattgtccagatggtttttygtgtcatcctcagccttttcaatcacatatacttcagaagaactctcaacatcattctgcaatttatccctgagatyatttttatcctgtgtctgtttggatacctggttttcatgatcattttcaaatggtgctgctttgacgtccaygtatctcagcacgcccccagcatcctcatccacttcatcaacatgtttctgtttaactacagtgactcttccaacgcacccctctacaaacatcagcaagaagtccaaagtttctttgtggttatggctttgatttctgtgccgtggatgcttctgattaagccgtttattcttagagccagtcatcggaaatcccagctgcaggcatccaggatccaagaagatgccactgagaacattgaaggtgatagctccagcccttctagccgttctggccagaggacttctgcagatacccacggggctctggacgaccatggagaagagttcaactttggagacgtctttgtccaccaagccatccacaccatcgagtactgcctgggctgcatttcaaacacagcctcctacctgcggctctgggccctcagcctggctcatgcacactgtctgaagtgctctggactatggtgatgaacagcggccttcagacgyraggctggggaggaatcgtcggggtttttattatttttgccgtatttgctgtcctgacagtagccatccttctgatcatggagggcctctctgctttcctgcacgccctgcgartgcactgggttgagttccagaacaagttctatgtcgggatggttacaagttttctccrttctcctttaaacacatcctggatggcacagccgaggagtagyctgagggctgcacctcccacggtggtcaccatgccaatgaaggaagttcagtcttgtctttgatatcagcccctgcaaggcgctcaatgggaaggttgttcttggctcacctgaagcatgaaactgtgtattatttggacgtcagcctgtggatttgatacgacttaaccacgtcagaggaaggactttggcaagtgatattgtcttcatgtggggtattaattctcaaataataaagtarttgacaaatgaggggagaatgctaaacagatgtcttcttgcaatattttaaatattgtatttgagaaaataaacatctgagtcattca

SEQ ID NO: 26 - DNA, 2821 bp, Homo sapiens
tggaagttgtcctcttccaaagtgagtggaaaaaaaccctagttggctgaatgctagggttaggttcgagcttatgaaattgccattgttataggtgaaaattgttcaatatcagcaattttctgtggttcaaatggaatagccccggtgaaaattcctaagaatttaaacatcgccctcctcccttataagcagagccagaagcgagggagggactggccctacttggggctattccacaagaaaagctgctgggaagacccaacgattcagtgcagttaaacttgtcttctgattctgagctcccatcataagcaaggcactgtcgggtctcatttccagttcctccatgacgtggcaagtgaagacaggaatgaaaggaatgtaaagcagcttttctctgaagagaagaagagagagagacasagccaagaccgaggctgggccaagatggygtctgtgtttcgaagcgaggagatgtgtttgtcacaactgtttctccaggtggaagctgcatattgctgtgtggctgagctcggagagctcggattggttcagttcaaagatttaaatatgaatgtgaacagctttcaaaggaaatttgtgaatgaagtcagaaggtgtgaatcactggagagaatcctccgttttctggaagacgagatgcaaaatgagattgtagttcagttgctcgagaaaagcccactgaccccgctcccacgggaaatgattaccctggagactgttctagaaaaactggaaggagagttacaggaagccaaccagaaccagcaggccttgaaacaaagcttcctagaactgacagaactgaaatacctcctgaagaaaacccaagacttctttgagacrgaaaccaatttagctgatgatttctttactgaggacacttctggcctcctggagttgaaagcagtgcctgcatatatgaccggaaagttggggttcatagccgrtgtgatcaacagggagaggatggcttcctttgagcggttactgtggcgaatctgcygaggaaacgtgtacttgaagttcagtgagatggacgcccctctggaggatcctgtgacgaaagaagaaattcagaagaacatattcatcatattttaccaaggagagcagctcaggcagaaaatcaagaagatctgtgatgggtttcgagccactgtctacccttgcccagagcstgcggtggagcgcagagagatgttggagagcgtcaatgtgaggctggaagatttaatcaccgtcataacacaaacagagtctcaccgccagcgcctgctgcaggaagccgctgccaactggcactcctggctcatcaaggtgcagaagatgaaagctgtctaccacatcctgaacatgtgcaacatcgacgtcacccagcagtgtgtcatcgccgagatctggttcccggtggcagatgccacacgtatcaagagggcactggagcaaggcatggaamtaagtggctcctccatggcccccatcatgaccacagtgyaatctaaaacagcccctcccacatttaacaggaccaataaattcacagctggcttccagaatattgttgatgcctatggtgtyggcagctaccgggagataaacccagccccctacaccatcatcactttccccttcctgttcgctgtgatgtttggagactgtggtcatggaaccgtgatgctcctggctgcactttggatgattctgaatgagagacgcttgctctcccagaagacagacaatgagatttggaacaccttcttccacgggcgctatctcatcctcatccacttcatcaacatgtttctgtttaactacagtgactcttccaacgcacccctctacaaacatcagcaagaagtccaaagtttctttgtggttatggctttgatttctgtgccgtggatgcttctgattaagccgtttattcttagagccagtcatcggaaatcccagctgcaggcatccaggatccaagaagatgccactgagaacattgaaggtgatagctccagcccttctagccgttctggccagaggacttctgcagatacccacggggctctggacgaccatggagaagagttcaactttggagacgtctttgtccaccaagccatccacaccatcgagtactgcctgggctgcatttcaaacacagcctcctacctgcggctctgggccctcagcctggctcatgcaaactgtctgaagtgctctggactatggtgatgaacagcggccttcagacyrgaggctggggaggaatcgtcggggtttttattatttttgccgtatttgctgtcctgacagtagccatccttctgatcatggagggcctctctgctttcctgcacgccctgcgrctgcactgggttgagttccagaacaagttctatgtcgggatggttacaagttttctccrttctcctttaaacacatcctggatggcacagccgaggagtaygctgagggctgcacctcccacggtggtcaccatgccaatgaaggaagttcagtcttgtctttgatatcagcccctgcaaggcgctcaatgggaaggttgttcttggctcacctgaagcatgaaactgtgtattatttggacgtcagcctgtggatttgatacgacttaaccacgtcagaggaaggactttggcaagtgatattgtcttcatgtggggtattaattctcaaataataaagtrattgacaaatgaggggagaatgctaaacagatgtcttcttgcaatattttaaatattgtatttgagaaaataaacatctgagtcattca

SEQ ID NO: 27 - DNA, 3300 bp, Homo sapiens
tggaagttgtcctcttccaaagtgagtggaaaaaaaccctagttggctgaatgctagggttaggttcgagcttatgaaattgccattgttataggtgaaaattgttcaatatcagcaattttctgtggttcaaatggaatagccccggtgaaaattcctaagaatttaaacatcgccctcctcccttataagcagagccagaagcgagggagggactggccctacttggggctattccacaagaaaagctgctgggaagacccaacgattcagtgcagttaaacttgtcttctgattctgagctcccatcataagcaaggcactgtcgggtctcatttccagttcctccatgacgtggcaagtgaagacaggaatgaaaggaatgtaaagcagcttttctctgaagagaagaagagagagagacasagccaagaccgaggctgggccaagatggygtctgtgtttcgaagcgaggagatgtgtttgtcacaactgtttctccaggtggaagctgcatattgctgtgtggctgagctcggagagctcggattggttcagttcaaagatttaaatatgaatgtgaacagctttcaaaggaaatttgtgaatgaagtcagaaggtgtgaatcactggagagaatcctccgttttctggaagacgagatgcaaaatgagattgtagttcagttgctcgagaaaagcccactgaccccgctcccacgggaaatgattaccctggagactgttctagaaaaactggaaggagagttacaggaagccaaccagaaccagcaggccttgaaacaaagcttcctagaactgacagaactgaaatacctcctgaagaaaacccaagacttctttgagacrgaaaccaatttagctgatgatttctttactgaggacacttctggcctcctggagttgaaagcagtgcctgcatatatgaccggaaagttggggttcatagccgrtgtgatcaacagggagaggatggcttcctttgagcggttactgtggcgaatctgcygaggaaacgtgtacttgaagttcagtgagatggacgcccctctggaggatcctgtgacgaaagaagaaattcagaagaacatattcatcatattttaccaaggagagcagctcaggcagaaaatcaagaagatctgtgatgggtttcgagccactgtctacccttgcccagagcstgcggtggagcgcagagagatgttggagagcgtcaatgtgaggctggaagatttaatcaccgtcataacacaaacagagtctcaccgccagcgcctgctgcaggaagccgctgccaactggcactcctggctcatcaaggtgcagaagatgaaagctgtctaccacatcctgaacatgtgcaacatcgacgtcacccagcagtgtgtcatcgccgagatctggttcccggtggcagatgccacacgtatcaagagggcactggagcaaggcatggaamtaagtggctcctccatggcccccatcatgaccacagtgyaatctaaaacagcccctcccacatttaacaggaccaataaattcacagctggcttccagaatattgttgatgcctatggtgtyggcagctaccgggagataaacccagccccctacaccatcatcactttccccttcctgttcgctgtgatgtttggagactgtggtcatggaaccgtgatgctcctggctgcactttggatgattctgaatgagagacgcttgctctcccagaagacagacaatgagatttggaacaccttcttccacgggcgctatctgatcctacttatgggcatcttctccatctacacgggtttgatctacaatgactgcttctccaagtccttgaacatctttggctcttcttggagtgtccaacccatgttcagaaacggcacatggaatactcatgtaatggaggaaagtctatatctgcagctggacccagccataccaggagtgtattttggaaatccatacccgtttgggattgatcgatttggaacttggcttcaaacaaactcacatttctgaactcgtataaaatgaagatgtcggtgatcctgggaattgtccagatggtttttygtgtcatcctcagccttttcaatcacatatacttcagaagaactctcaacatcattctgcaatttatccctgagatyatttttatcctgtgtctgtttggatacctggttttcatgatcattttcaaatggtgctgctttgacgtccaygtatctcagcacgcccccagcatcctcatccacttcatcaacatgtttctgtttaactacagtgactcttccaacgcacccctctacaaacatcagcaagaagtccaaagtttctttgtggttatggctttgatttctgtgccgtggatgcttctgattaagccgtttattcttagagccagtcatcggaaatcccagctgcaggcatccaggatccaagaagatgccactgagaacattgaaggtgatagctccagcccttctagccgttctggccagaggacttctgcagatacccacggggctctggacgaccatggagaagagttcaactttggagacgtctttgtccaccaagccatccacaccatcgagtactgcctgggctgcatttcaaacacagcctcctacctgcggctctgggccctcagcctggctcatgcacactgtctgaagtgctctggactatggtgatgaacagcggccttcagacgyraggctggggaggaatcgtcggggtttttattatttttgccgtatttgctgtcctgacagtagccatccttctgatcatggagggcctctctgctttcctgcacgccctgcgartgcactgggttgagttccagaacaagttctatgtcgggatggttacaagttttctccrttctcctttaaacacatcctggatggcacagccgaggagtagyctgagggctgcacctcccacggtggtcaccatgccaatgaaggaagttcagtcttgtctttgatatcagcccctgcaaggcgctcaatgggaaggttgttcttggctcacctgaagcatgaaactgtgtattatttggacgtcagcctgtggatttgatacgacttaaccacgtcagaggaaggactttggcaagtgatattgtcttcatgtggggtattaattctcaaataataaagtarttgacaaatgaggggagaatgctaaacagatgtcttcttgcaatattttaaatattgtatttgagaaaataaacatctgagtcattca

SEQ ID NO: 28 - DNA, 3017 bp, Homo sapiens
gagcaagccgagtggagggaggcaaaggccaggctgaggatcagggtggcccgggtggcagcggggaggcgctgcatgctggaggctgtgctgagtgcccggtgcaggtgagccggtcctgcggagttgtgccgagtgcctgctgcagagaccgaggctgggccaagatggygtctgtgtttcgaagcgaggagatgtgtttgtcacaactgtttctccaggtggaagctgcatattgctgtgtggctgagctcggagagctcggattggttcagttcaaagatttaaatatgaatgtgaacagctttcaaaggaaatttgtgaatgaagtcagaaggtgtgaatcactggagagaatcctccgttttctggaagacgagatgcaaaatgagattgtagttcagttgctcgagaaaagcccactgaccccgctcccacgggaaatgattaccctggagactgttctagaaaaactggaaggagagttacaggaagccaaccagaaccagcaggccttgaaacaaagcttcctagaactgacagaactgaaatacctcctgaagaaaacccaagacttctttgagacrgaaaccaatttagctgatgatttctttactgaggacacttctggcctcctggagttgaaagcagtgcctgcatatatgaccggaaagttggggttcatagccgrtgtgatcaacagggagaggatggcttcctttgagcggttactgtggcgaatctgcygaggaaacgtgtacttgaagttcagtgagatggacgcccctctggaggatcctgtgacgaaagaagaaattcagaagaacatattcatcatattttaccaaggagagcagctcaggcagaaaatcaagaagatctgtgatgggtttcgagccactgtctacccttgcccagagcstgcggtggagcgcagagagatgttggagagcgtcaatgtgaggctggaagatttaatcaccgtcataacacaaacagagtctcaccgccagcgcctgctgcaggaagccgctgccaactggcactcctggctcatcaaggtgcagaagatgaaagctgtctaccacatcctgaacatgtgcaacatcgacgtcacccagcagtgtgtcatcgccgagatctggttcccggtggcagatgccacacgtatcaagagggcactggagcaaggcatggaamtaagtggctcctccatggcccccatcatgaccacagtgyaatctaaaacagcccctcccacatttaacaggaccaataaattcacagctggcttccagaatattgttgatgcctatggtgtyggcagctaccgggagataaacccagccccctacaccatcatcactttccccttcctgttcgctgtgatgtttggagactgtggtcatggaaccgtgatgctcctggctgcactttggatgattctgaatgagagacgcttgctctcccagaagacagacaatgagatttggaacaccttcttccacgggcgctatctgatcctacttatgggcatcttctccatctacacgggtttgatctacaatgactgcttctccaagtccttgaacatctttggctcttcttggagtgtccaacccatgttcagaaacggcacatggaatactcatgtaatggaggaaagtctatatctgcagctggacccagccataccaggagtgtattttggaaatccatacccgtttgggattgatcgatttggaacttggcttcaaacaaactcacatttctgaactcgtataaaatgaagatgtcggtgatcctgggaattgtccagatggtttttygtgtcatcctcagccttttcaatcacatatacttcagaagaactctcaacatcattctgcaatttatccctgagatyatttttatcctgtgtctgtttggatacctggttttcatgatcattttcaaatggtgctgctttgacgtccaygtatctcagcacgcccccagcatcctcatccacttcatcaacatgtttctgtttaactacagtgactcttccaacgcacccctctacaaacatcagcaagaagtccaaagtttctttgtggttatggctttgatttctgtgccgtggatgcttctgattaagccgtttattcttagagccagtcatcggaaatcccagctgcaggcatccaggatccaagaagatgccactgagaacattgaaggtgatagctccagcccttctagccgttctggccagaggacttctgcagatacccacggggctctggacgaccatggagaagagttcaactttggagacgtctttgtccaccaagccatccacaccatcgagtactgcctgggctgcatttcaaacacagcctcctacctgcggctctgggccctcagcctggctcatgcacactgtctgaagtgctctggactatggtgatgaacagcggccttcagacgyraggctggggaggaatcgtcggggtttttattatttttgccgtatttgctgtcctgacagtagccatccttctgatcatggagggcctctctgctttcctgcacgccctgcgartgcactgggttgagttccagaacaagttctatgtcgggatggttacaagttttctccrttctcctttaaacacatcctggatggcacagccgaggagtagyctgagggctgcacctcccacggtggtcaccatgccaatgaaggaagttcagtcttgtctttgatatcagcccctgcaaggcgctcaatgggaaggttgttcttggctcacctgaagcatgaaactgtgtattatttggacgtcagcctgtggatttgatacgacttaaccacgtcagaggaaggactttggcaagtgatattgtcttcatgtggggtattaattctcaaataataaagtarttgacaaatgaggggagaatgctaaacagatgtcttcttgcaatattttaaatattgtatttgagaaaataaacatctgagtcattca

SEQ ID NO: 29 - DNA, 3088 bp, Homo sapiens
aacagagctgcctcctggctctttgggagcctgggaggagaaggagccgggaggggcgctgcggggaagccacctgcggattcactggctgctgctccgcccaggactgctagcaagcacggagggctgccagacctggggctccctgctccgtgcgtcaggttggggaaaccaccgtctgccccagaccctgacccaggacccgcctggaggaagctgggaccgaggctgggccaagatggygtctgtgtttcgaagcgaggagatgtgtttgtcacaactgtttctccaggtggaagctgcatattgctgtgtggctgagctcggagagctcggattggttcagttcaaagatttaaatatgaatgtgaacagctttcaaaggaaatttgtgaatgaagtcagaaggtgtgaatcactggagagaatcctccgttttctggaagacgagatgcaaaatgagattgtagttcagttgctcgagaaaagcccactgaccccgctcccacgggaaatgattaccctggagactgttctagaaaaactggaaggagagttacaggaagccaaccagaaccagcaggccttgaaacaaagcttcctagaactgacagaactgaaatacctcctgaagaaaacccaagacttctttgagacrgaaaccaatttagctgatgatttctttactgaggacacttctggcctcctggagttgaaagcagtgcctgcatatatgaccggaaagttggggttcatagccgrtgtgatcaacagggagaggatggcttcctttgagcggttactgtggcgaatctgcygaggaaacgtgtacttgaagttcagtgagatggacgcccctctggaggatcctgtgacgaaagaagaaattcagaagaacatattcatcatattttaccaaggagagcagctcaggcagaaaatcaagaagatctgtgatgggtttcgagccactgtctacccttgcccagagcstgcggtggagcgcagagagatgttggagagcgtcaatgtgaggctggaagatttaatcaccgtcataacacaaacagagtctcaccgccagcgcctgctgcaggaagccgctgccaactggcactcctggctcatcaaggtgcagaagatgaaagctgtctaccacatcctgaacatgtgcaacatcgacgtcacccagcagtgtgtcatcgccgagatctggttcccggtggcagatgccacacgtatcaagagggcactggagcaaggcatggaamtaagtggctcctccatggcccccatcatgaccacagtgyaatctaaaacagcccctcccacatttaacaggaccaataaattcacagctggcttccagaatattgttgatgcctatggtgtyggcagctaccgggagataaacccagccccctacaccatcatcactttccccttcctgttcgctgtgatgtttggagactgtggtcatggaaccgtgatgctcctggctgcactttggatgattctgaatgagagacgcttgctctcccagaagacagacaatgagatttggaacaccttcttccacgggcgctatctgatcctacttatgggcatcttctccatctacacgggtttgatctacaatgactgcttctccaagtccttgaacatctttggctcttcttggagtgtccaacccatgttcagaaacggcacatggaatactcatgtaatggaggaaagtctatatctgcagctggacccagccataccaggagtgtattttggaaatccatacccgtttgggattgatcgatttggaacttggcttcaaacaaactcacatttctgaactcgtataaaatgaagatgtcggtgatcctgggaattgtccagatggtttttygtgtcatcctcagccttttcaatcacatatacttcagaagaactctcaacatcattctgcaatttatccctgagatyatttttatcctgtgtctgtttggatacctggttttcatgatcattttcaaatggtgctgctttgacgtccaygtatctcagcacgcccccagcatcctcatccacttcatcaacatgtttctgtttaactacagtgactcttccaacgcacccctctacaaacatcagcaagaagtccaaagtttctttgtggttatggctttgatttctgtgccgtggatgcttctgattaagccgtttattcttagagccagtcatcggaaatcccagctgcaggcatccaggatccaagaagatgccactgagaacattgaaggtgatagctccagcccttctagccgttctggccagaggacttctgcagatacccacggggctctggacgaccatggagaagagttcaactttggagacgtctttgtccaccaagccatccacaccatcgagtactgcctgggctgcatttcaaacacagcctcctacctgcggctctgggccctcagcctggctcatgcacactgtctgaagtgctctggactatggtgatgaacagcggccttcagacgyraggctggggaggaatcgtcggggtttttattatttttgccgtatttgctgtcctgacagtagccatccttctgatcatggagggcctctctgctttcctgcacgccctgcgartgcactgggttgagttccagaacaagttctatgtcgggatggttacaagttttctccrttctcctttaaacacatcctggatggcacagccgaggagtagyctgagggctgcacctcccacggtggtcaccatgccaatgaaggaagttcagtcttgtctttgatatcagcccctgcaaggcgctcaatgggaaggttgttcttggctcacctgaagcatgaaactgtgtattatttggacgtcagcctgtggatttgatacgacttaaccacgtcagaggaaggactttggcaagtgatattgtcttcatgtggggtattaattctcaaataataaagtarttgacaaatgaggggagaatgctaaacagatgtcttcttgcaatattttaaatattgtatttgagaaaataaacatctgagtcattca

SEQ ID NO: 30 - DNA, 2804 bp, Homo sapiens
cgcgatgtttgcgtttgaacctcttggcgggtgccggccatggcggcttcgctcccgggacctgggagccggcttttccgcacatatggggctgcggacggcaggagacagcggcggccgggccgggaagccgcgcagtggttcccgccgcaggaccggaggcgtttcttcaacagcagcggcagcagcgacgccagcatcggcgacccctcgcagtccgacgatcctgacgatcccgacgaccccgacttccccggcagcccggwgaggcggcggcggaggygtcccggcggccgagtgcccaaggaccggcccagcctgaccgtgaccccaaagcgctggaagctgcgagctcgcccaagcctaaccgtgaccccaagacgcctggggctgcgagctcggcccccgcagaagtgcagcacaccctgyggcccgctccgacttccgcccttccccagccgcgactccggccgcctcagcccggacctcagcgtgtgcggccagcccagggacggcgacgagctgggcatcagtgcctccctgttcagctctctggcctcgccctgccccgggtccccaacgccaagggacagtgtcatctcgatcggcacctccgcctgtctggttgcagcctcagccgtcccgagcgrcctccacctcccagaagtctccctggaccgagcatctctcccctgctcccaggaggaagcgacaggaggagccaaggacaccaggatggtccaccaaacccgcgccagcctcaggtcagttctctttggccttatgaactcaggaacccctgaggattctgagtttcgggcagatgggaagaatatgagagagtcctgctgtaaaaggaaactggtggtgggaaatggaccagagggtccaggtctgtcaagcacaggcaagaggagggccacaggccaggactcttgtcaagagagagggcttcaagaggccgtccggagagagcatcaggaggccagtgttcccaagggccgcattgtgccaaggggaayagacaggctggagagaactagatcaagccggaagagcaaacatcaggaggcaacggaaacctctctcctccattcccaccgctttaaaaagggccaaaagctgggaaaagattcgttccccacccaggacctgactcctttacagaatgyctgcttttggaccaaaaccagggcttccttcagtttccacaagaagaaaattgtgactgatgtgtcagaggtctgcagcatctataccactgccacttctctctctggatccctcytatcagaatgttcaraccggcctgtcatgaacagaacaagtggtgctccgtcctcttggcactcctcctctatgtatttgctaagccccttaaacactctaagtatttcaaacaaaaaggcatctgatgctgaaaaggtttatggggaatgcagtcagaagggtcctgtcccctttagccattgccttcccacagaaaaactgcaackctgtgagaagattggggaaggggtgtttggcgaagtgtttcaaacaattgctgatcacacacccgtagccataaaaatcattgctattgaaggaccagatttagtcaatggatcccatcagaaaacctttgaggaaatcctgccagagatcatcatctccaaagagttgagcctcttatccggtgaagtgtgcaaccgcacagaaggctttatcgggctgaactcagtgcactgtgtccagggatcttaccctcccttgctcctcaaagcctgggatcactataattcaaccaaaggctctgcaaatgaccggcctgatttttttaaagacgaccagctcttcattgtgctggaatttgagtttggagggattgacttagagcaaatgcgaaccaagttgtcttccttggctactgcaaagagcattctacaccagctcacagcctccctcgcagtggcagaggcatcactgcgctttgagcaccgagacttacactgggggaacgtgctcttaaagaaaaccagcctcaaaaaactccactacaccctcaatgggaagagcagcactatccccagctgtgggttgcaagtgagcatcattgactacaccctgtcgcgcttggaacgggatgggattgtggttttctgtgacgtttccatggatgaggacctgtttaccggtgacggtgactaccagtttgacatctacaggctcatgaagaaggagaataacaaccgctggggtgaatatcacccttatagtaatgtgctctggttacattacctgacagacaagatgctgaaacaaatgaccttcaagactaaatgtaacactcctgccatgaagcaaattaagagaaaaatccaggagttccacaggacaatgctgaacttcagctctgccactgacttgctctgccagcacagtctgtttaagtaagctaaatgtatcttactgccccgaaatgagaggagactggtcttgaagcctctggtgctgtttcaacctccrtccccacaggagggtggaactcccattctcacaggtttccagtcagcttttcaaacaagaattttgtttccaaatggaaactgaaatatttgttgaaatgtttaaatttgctgataacaaatgttctgaaagaagtaaactagccgggcrcagtggcgtgcgcctgtartcccagctactcgggaggctgaggcaggaggatcgcttgagcccaagagttcatatctagcctggtcaacatagcaagacccctgtctctatttttttaaataaataaactacatgtgaaaacaaac

SEQ ID NO: 31 - DNA, 2010 bp, Homo sapiens
ccaaaaaataaattggaaaaattttggagatttcctacagtttggaaaacagatgaactacatagcctaggaatattgaaaacattgctcacctgggccctgcggccagcagaattggccccgctctatggctgctggggcctgcgcactggaatcgccgtggcctgcgcaccccaccatgccagtttgaacctccatggcctcaaccagattcggaatgtcaaaaagcagagtgtctatttgatgaatttgaggaaatcgggaactttgggccacccaggctctgtagatgagaccacctatgaaagactagcggaggaatcactggactctttagcagagttttttgaagaccttgcagacaagccatacacgtttgagkactatgatgtttcctttgggagtggtgtcttaactggtaaactgggtagagatctagcaacctacgtgatcaacaagcagacaccaaacaagcaaatctggttatcttctccatccagtggactcaagcgttatgactggactgagaaaaactgggtgtactcccacgattgcgtgtccctccatgatgtgctcgctgcagagctcactaaagccttaaaaaccaaactggrcttgtcttccttggcctattctggagaagacgcttgatgcccagcccggttttaaggatattaaaagctgtcaggccaagaccccagcttcattatgcagctgaggtctgtttttttgtttttcgttttttgtttttcattcctgcttttgargaacagctctgtggaaagaacgtgttgcctcctaccttgcccacaagttttgatttttaatttctacagaagatttttttggattaattgtctgatttcctccctcatatgatatcctttatcttttataatgtcttatccctatacctgaatataacaacctttaaaaaagcaaaagaataagaaggaaaaattccagcaggagaaatgaattgtcttcactcttcattctttgaaggacttactgcaagaagtacatgaagagcaactggttaacctgctcactgttctgtctcaaaatgagacacattaacgggtaggctacaatgttcctggrcttctttcaaagtggaagcacttctgagctctttagcattgaagtgtcaaaagcaattcacatgggaagacaatttcttatatgtgctttgtgactgccagggtgtggcctgcactgggttgtcctgggagacctagtgctgtttcttccacatattcacgtgtgtgtgtgtgtgtgtatttttttattattttttcattttaagggttagtatggaatcagctgctacaagaatgcaaaaaacttccaatgacaagaaaggaggaaaaaaaagccattttcatgagctgagtgatgtagcataataaacaaaatcatggagctgaggaggtgctttgtaaacgtgaaggggcataaaaaggaaagagatacttgtgtcaataaagagagcctggtcctagacgtagttcagccacaaagtagttgtgcctttgtggacaagtttcccaaactccctgagcctctgctttcccatctgttaaatgaggggatagaatatggttgatttccagcattcagtggtcctgtcaagcagcctaacaggctagctctaattcccattgggtagatgaggggatgacaaagaacaatttgtgagctatataggaaacattgttattggtgttgccctatcaggatttcagttgaattcatgttaaaattacagccgtcctttattgtacacttattgggttaagcctattataccatattacctcattttaatttttactgacctgcactttatacatgaagcaacaaggctccaggacattaaaactcacacaaagttatgctcatgttatattattttcttacttaaagaaggatttattagtgacaagtttgtattaatatgtagcaaaggcttttccaatgggtgaataaaaacacattccattatag

SEQ ID NO: 32 - DNA, 5985 bp, Homo sapiens
gggaagcaccaagatgaccgatgcccagatggctgactttggggcagcggcccagtacctccgcaagtcagagaaggagcgtctagaggcccagacccggccctttgacattcgcactgagtgcttcgtgcccgatgacaaggaagagtttgtcaaagccaagattttgtcccgggagrgaggcaaggtcattgctgaaaccgagaatgggaagacggtgactgtgaaggaggaccaggtgttgcagcagaacccacccaagttcgacaagattsaggacatggccatgctgaccttcctgcacgagcccgcggtgcttttcaacctcaaggagcgctacgcggcctggatgatatatacctactcgggcctcttctgtgtcactgtcaacccctacaagtggctrccggtgtacaatgccgargtggtggccgcctacmggggcaagaagaggagtgaggccccgccccacatcttctccatctccgacaacgcctatcagtacatgctgacagatcgggagaaccagtccatcctcatcacgggagaatccggggcggggaagactgtgaacaccaagcgtgtcatccagtactttgccagcattgcagccataggtgaccgtggcaagaaggacaatgccaatgcgaacaagggcaccctggaggaccagatcatccaggccaaccccgctctggaggccttcggcaatgccaagactgtccggaacgacaactcctcccgctttgggaaattcattaggatccactttggggccactggaaagctggcttctgcagacatagagacctacctgctggaraagtcccgggtgatcttccagctgaaagctgagagaaactaccacatcttctaccagattctgtccaacaagaagccggagttgctggacatgctgctggtcaccaacaatccctacgactacgccttcgtgtctcagggagaggtgtccgtggcctccattgatgactccgaggagctcatggccaccgatagtgcctttgacgtgctgggcttcacttcagaggagaaagctggcgtctacaagctgacgggagccatcatgcactacgggaacatgaagttcaagcagaagcagcgggaggagcaggcggagcmmgasggcaccgaagatgctgacaagtcggcctacctcatggggctgaactcagctgacctgctcaaggggctgtgccaccctcgggtgaaagtgggcaacgagtatgtcaccaaggggcagagcgtgcagcaggtgtactactccatyggggctctggccaaggcagtgtatgagaagatgttcaactggatggtgacgcgcatcaaygccaccctggagaccaagcagccacgccagtacttcataggagtcctggacatcgctggcttcgagatcttcgacttcaacagctttgagcagctctgcatcaacttcaccaacgagaagctgcagcagttcttcaaccaccacatgttcgtgctggagcaggaggagtacaagaaggagggcattgagtggacattcattgactttggcatggacctgcaggcctgcattgacctcatcgagaagcccatgggcatcatgtccatcctggaggaggagtgcatgttccccaaggccactgacatgaccttcaaggccaagctgtacgacaaccacctgggcaagtccaacaatttccagaagccacgcaacatcaaggggaagcaggaagcccacttctccctgatccactacgccggcactgtggactacaacatcctgggctggctggaaaaaaacaaggatcctctcaacgagactgttgtggccctgtaccagaagtcctccctcaagctcatggccactctcttctcctcctacgcaactgccgatactggggacagtggtaaaagcaaaggaggcaagaaaaagggctcatccttccagacggtgtcggctctccaccgggaaaatctcaacaagctaatgaccaacctgaggaccacccatcctcactttgtgcgttgcatcatccccaatgagcggaaggctccaggggtgatggacaaccccctggtcatgcaccagctgcgctgcaatggcgtgctggagggcatccgcatctgcaggaagggcttccccaaccgcatcctctacggggacttccggcagaggtatcgcatcctgaacccagtggccatccctgagggacagttcattgatagcaggaaggggacagagaagctgctcagctctctggacattgatcacaaccagtacaagtttggccacaccaaggtgttcttcaaggcagggctgcttgggctgctggaggagatgcgggatgagaggmtgagccgcatcatcacgcgcatgcaggcccaagcccrgggccagctcatgcgcattgagttcaagaagatagtggaacgcagggatgccctgctggtaatccagtggaacattcgggccttcatgggggtcaagaattggccctggatgaagctctacttcaagatcaagccgctgctgaagagcgcagagacggagaaggagatggccaccatgaaggaagagttcgggcgcatcaaagagacgctggagaagtccgaggctcgccgcaaggagctggaggagaagatggtgtccctgctgcaggagaagaatgacctgcagctccaagtgcaggcggaacaagacaacctcaatgatgctgaggagcgctgcgaccagctgatcaaaaacaagattcagctggaggccaaagtaaaggagatgaatgagaggctggaggatgaggaggagatgaacgcggagctcactgccaagaagcgcaagytggaagacgagtgctcagagctcaagaaggacattgatgacctggagctgacactggccaaggtggagaaggagaagcatgcaacagagaacaaggtgaagaacctaacagaggagatggctgggctggatgaaatcatcgctaagctgaccaaggagaagaaagctctacaagaggcccatcagcaggccctggatgaccttcaggttgaggaagacaaggtcaacagcctgtccaagtctaaggtcaagctggagcagcaggtggatgatctggagggatccctagagcaagagaagaaggtgcgcatggacctggagcgagcaaagcggaaactggagggcgacctgaagctgacccaggagagcatcatggacctggaaaatgataaactgcagctggaagaaaagcttaagaagaaggagtttgacattaatcagcagaacagtaagattgaggatgagcaggygctggcccttcaactacagaagaaactgaaggaaaaccaggcacgcatcgaggagctggaggaggagctggaggccgagcgcaccrccagggctaaggtggagaarctgcgctcagacctgtctcgggagctggaggagatcagcgagcggctggaagaggccggcggggccacgtccgtgcagatcgagatgaacaagaagcgcgaggccgagttccagaagatgcggcgggacctggaggaggccacgctgcagcacgaggccactgccgcggccctgcgcaagaagcacgccgacagcgtggccgagctgggcgagcagatcgacaacctgcagcgggtgaagcagaagctggagaaggagaagagcgagttcaagctggagctggatgacgtcacctccaacatggagcagatcatcaaggccaaggcagcaaacctggagaaagtgtctcggacgctggaggaccaggccaatgagtaccgcgtgaagctagaagaggcccaacgctccctcaatgatttcaccacccagcgagccaagctgcagaccgagaatggagagttggcccggcagctagagsaaaaggaggcgctaatctcgcagctgacccgggggaagctctcttatacccagcaaatggaggacctcaaaaggcagctggaggaggagggcaaggcgaagaacgccctggcccatgcactgcagtcrgcccggcatgactgcgacctgctgcgggagcagtacgaggaggagacagaggccaaggccgagctgcagcgcgtcctgtccaaggccaactcggaggtggcccagtggaggaccaagtatgagacggacgccattcagcggactgaggagctcgaagaggccaaaaagaagctggcccagcggctgcaggatgccgaggaggccgtggaggctgttaatgccaagtgctcctcactggagaagaccaagcaccggctacagaatgagatagaggacttgatggtggacgtagagcgctccaaygcygctgctgcagccctggacaagaagcagagaaactttgacaagatcctggccgagtggaagcagaagtatgaggagtcgcagtctgagctggagtcctcacagaaggaggctcgctccctcagcacagagctcttcaagctcaagaacgcctacgaggagtccctggagcacctagagaccttcaagcgggagaacaagaaccttcaggargaaatctcggaccttactgagcagctaggagaaggaggaaagaatgtgcatgagctggagaaggtcckcaaacagctggaggtggagaagctggagctgcagtcagccctggaggaggcagaggcctccctggagcacgaggagggcaagatcctccgggcccagctagagttcaaccagatcaaggcagagatcgagcggaagctggcagagaaggacgaggagatggaacaggccaagcgcaaccaccwgcgggtggtggactcgctgcagacctccctggatgcagagacacgcagccgcaacgaggycctgagggtgaagaagaagatggaaggagacctcaatgagatggagatccagctcagccaygccaaccgcatggcygccgaggcccagaagcaagtcaagagcctccagagcttgctgaaggacacccagatccagctggaygatgcggtccgtgccaacgacgacctgaaggagaacatcgccatcgtggagcggcgcaacaacctgctgcaggctgagctggaggagctgcgtgccgtggtggagcagacagagcggtcccggaagctggcggagcaggagctgattgagaccagcgagcgggtgcagctgctgcattcccagaacaccagcctcatcaaccagaagaagaagatggagtckgayctgwcccagctccagtcggaagtggaggaggcagtgcaggagtgcagaaacgcygaggagaaggccaagaaggccatcacggatgccgccatgatggcagaggagctgaagaaggagcaggacaccagcgcccacctggagcgcatgaagaagaacatggagcagaccattaaggacctgcagcaccggctggacgaggccgagcagatcgccctcaagggaggcaagaagcagctgcagaagctggaagcgcgggtgcgggagctggagggtgagctggaggccgagcagaagcgcaacgcagagtcggtgaagggcatgaggaagagcgagcggcgcatcaaggagctcacctaccagacagaggaagacaaaaagaacctgctgcggctacaggacctggtggacaagctgcaactgaaggtcaaggcctacaagcgccaggccgaggaggcggaggagcaagccaacaccaacctgtccaagttccrcaaggtgcagcatgagctggatgaggcagaggagcgggcggacatcgctgagtcccaggtcaacaagcttcgagccaagagccgtgacattggtgccaagcaaaaaatgcacgatgaggagtgacactgcctcgggaacctcactcttgccaacctgtaataaatatgagtgccaaactctgcctgagcccatctgtccttcctgccagctgtccatcctggatcagggcagtagggggcctgagaggagggaggcccccagcccctgtatca

SEQ ID NO: 33 - DNA, 1765 bp, Homo sapiens
attttatttgtatcaactcaaagcaaaatagagcattttattaaatatgtcttcataaattacgcacagtaaaatcccattaattggaccacacccagttcattatagtgtttattataattttagcattagttgaactgaaaattggtttttgtttactatgagaaaaaggtagactaaacaagatgaaacctgttgtttgcatattatgtttgtacatctttattagcaactatttttccaactattttcaactatttttccaactattttctagttataaaagcaatacataaatactatagaaaatttagcaatgcagaaatgaatttttaaaaatccctcatagatagccattgttaacattttggtgtattttcttcaagtcttagtaaaatggaacctttaaatatagatccctgtatcttaggaattagaaaggcagcaaaggcagttcctaatgagatggagaaaatgttgatttagtcatgcccttgtactgtgggggccatactgtctgttgacagagcatattaaaagacgttccctacattcgtcagccttagctaattggcagtctggtatttatgattttatattttgttaatcagcttgggagctgcagtaccccccagcctcctagaaacttggcttcccctgcctgggaggcctcgttccaggagtcgttgttgagagtcaagccagggaagtgtgtttttgtcagggagcagccagtcctgtgctgggagcrtctcagggggcacctgccgttgaattgttctcacttgtgtttgtaagaatccaagtatgtcacccttacaccaagtgagcacacagtgacacartcccctttcaatgtagataacattgcttcagagctggagaacttcatggggctcatcgaggtggtgacgggctacgtgaagatccgccattctcatgccttggtctccttgtccttcctaaaaaaccttcgcctcatcctaggagaggagcagctagaagggtaagtgccccaaatttcatgagctgacgttctattacaaaataagcagcgtgcttatgaaactgtgttgctgaggtaagagccctccctgccttgttaaagagaagaaaggaggaagccgcagtattgcctgtgctgctcgagtaggtcttgggtggagtcatggttctccattcttaggaggttgctgtttggaaaacagrgatgttatcacccttactggattttgcctcatcagtcaagggttgcgtgtctgactgtgaccagtgagacggcagacgggggtgcrcttagggcttttctgccaagartgacagcagttggtctggagtgctcacctccctgtgaaatcattgttcgcgcgaccctcatctgcctcaggatgctgtactctactacgcacaactgctccatcttttaagatattggaagtgagagcacrggaggagcatgggcggttcgttttgttagaaagaaaccyggattcacgagatggtttttattgattagtttacaggatttgcactattgatagagtttttgccttggcacaggcctgctttgtgataggggttttaaaataaccgtgggcttttcactggaggataaaagccggtgcttattgcatgcacaattgctttccagccgtcagcctgtgtgtacctttgcatatgtacttttctctttaaactctcccttttaaatacgactcttgccaggctttaagtgaatgcttcaaaataaaaggagttatcaatt

SEQ ID NO: 34 - DNA, 5232 bp, Homo sapiens
ttttttttttttttttgagaaaggggaatttcatcccaaataaaaggaatgaagtctggctccggaggagggtccccgacctcgctgtgggggctcctgtttctctccgccgcgctctcgctctggccgacgagtggagaaatctgcgggccaggcatcgacatccgcaacgactatcagcagctgaagcgcctggagaactgcacggtgatcgagggctacctccacatcctgctcatctccaaggccgaggactaccgcagctaccgcttccccaagctcackgtcattaccgagtacttgctgctgttccgagtggctggcctcgagagcctcggagacctcttccccaacctcacggtcatccgcggctggaaactcttctacaactacgccctggtcatcttcgagatgaccaatctcaaggatattgggctttacaacctgagraacattactcggggggccatcaggattgagaaaaatgctgacctctgttacctctccactgtggactggtccctgatcctggatgcggtgtccaataactacattgtggggaataagcccccaaaggaatgtggggacctgtgtccagggaccatggaggagaagccgatgtgtgagaagaccaccatcaacaatgagtacaactaccgctgctggaccacaaaccgctgccagaaaatgtgcccaagcacgtgtgggaagcgggcgtgcaccgagaacaatgagtgctgccaccccgagtgcctgggcagctgcagcgcgcctgacaacgacacggcctgtgtagcttgccgccactactactatgccggtgtctgtgtgcctgcctgcccgcccaacacctacaggtttgagggctggcgctgtgtggaccgtgacttctgcgccaacatcctcagcgccgagagcagcgactccgagggrtttgtgatccacgacggcgagtgcatgcaggagtgcccctcgggcttcatccgcaacggcagccagagcatgtactgcatcccttgtgaaggtccttgcccgaaggtctgtgaggaagaaaagaaaacaaagaccattgattctgttacttctgctcagatgctccaaggatgcaccatcttcaagggcaatttgctcattaacatccgacgggggaataacattgcttcagagctggagaacttcatggggctcatcgaggtggtgacgggctacgtgaagatccgccattctcatgccttggtctccttgtccttcctaaaaaaccttcgcctcatcctaggagaggagcagctagaagggaattactccttctacgtcctcgacaaccagaacttgcagcaactgtgggactgggaccaccgcaacctgaccatcaaagcagggaaaatgtactttgctttcaatcccaaattatgtgtttccgaaatttaccgcatggaggaagtgacggggactaaagggcgccaaagcaaaggggacataaacaccaggaacaacggggagagagcctcctgtgaaagtgacrtcctgcatttcacctccaccaccacgtcgaagaatcgcatcatcataacctggcaccrgtaccggccccctgactacagggatctcatcagcttcaccgtttactacaaggaagcaccctttaagaatgtcacagagtatgatgggcaggatgcctgcggctccaacagctggaacatggtggacgtggacctcccgcccaacaaggacgtrgagccyggcatcttactacatgggctgaagccctggactcagtacgccgtttacgtcaaggctgtgaccctcaccatggtggagaacgaccatatccgtggggccaagagtgagatcttgtacattcgcaccaatgcttcagttccttccattcccttggacgttctttcagcatcgaactcctcttctcagttaatcgtgaagtggaaccctccctctctgcccaayggcaacctgagttactacattgtgcgctggcagcrgcagcctcaggacggctacctttaccggcacaattactgctccaaagaagacaaaatccccatcaggaagtatgccgacggcaccatcgacattgaggaggtcacagagaaccccaagactgaggtgtgtggtggggagaaagggccttgctgcgcctgccccaaaactgaagccgagaagcaggccgagaaggaggaggctgaataccgcaaagtctttgagaatttcctgcacaactccatcttcgtgcccagacctgaaaggaagcggagagatgtcatgcaagtggccaacaccaccatgtccagccgaagcaggaacaccacggccgcagacacctacaacatcacygacccggaagagctggagacagagtaccctttctttgagagcagagtggataacaaggagagaactgtcatttctaaccttcggcctttcacattgtaccgcatcgatatccacagctgcaaccacgaggctgagaagctgggctgcagcgcctccaacttcgtctttgcaaggactatgcccgcagaaggagcagatgacattcctgggccagtgacctgggagccaaggcctgaaaactccatctttttaaagtggccggaacctgagaatcccaatggattgattctaatgtatgaaataaaatacggatcacaagttgaggatcagcgagaatgtgtgtccagacaggaatacaggaagtatggaggggccaagctaaaccggctaaacccggggaactacacagcccggattcaggccacatctctctctgggaatgggtcgtggacagatcctgtgttcttctatgtccaggccaaaacaggatatgaaaacttcatccatctgatcatcgctctgcccgtcgctgtcctgttgatcgtgggagggttggtgattatgctgtacgtcttccatagaaagagaaataacagcaggctggggaatggagtgctgtatgcctctgtgaacccggagtacttcagcgctgctgatgtgtacgttcctgatgagtgggaggtggctcgggagaagatcaccatgagccgggaacttgggcaggggtcgtttgggatggtctatgaaggagttgccaagggtgtggtgaaagatgaacctgaaaccagagtggccattaaaacagtgaacgaggccgcaagcatgcgtgaraggattgagtttctcaacgaagcttctgtgatgaaggagttcaattgtcaccatgtggtgcgattgctgggtgtggtgtcccaaggccagccaacactggtcatcatggaactgatgacacggggcgatctcaaaagttatctccggtctctgaggccagaaatggagaataatccagtcctagcacctccaagcctgagcaagatgattcagatggccggagagattgcagacggcatggcatacctcaacgccaataagttcgtccacagagaccttgctgcccggaattgcatggtagccgaagatttcacagtcaaaatcggagattttggtatgacgcgagatatctatgagacagactattaccggaaaggagggaaagggctgctgcccgtgcgctggatgtctcctgagtccctcaaggatggagtcttcaccacttactcggacgtctggtccttcggggtcgtcctctgggagatcgccacactggccgagcagccctaccagggcttgtccaacgagcaagtccttcgcttcgtcatggagggcggccttctggacaagccagacaactgtcctgacatgctgtttgaactgatgygcatgtgctggcagtataaccccaagatgaggccttccttcctggagatcatcagcagcatcaaagaggagatggagcctggcttccgggaggtctccttctactacagcgaggagaacaagctgcccgagccggaggagctggacctggagccagagaacatggagagcgtccccctggacccctcggcctcctcgtcctccctgccactgcccgacagacactcaggacacaaggccgagaacggccccggccctggggtgctggtcctccgcgccagcttcgacgagagacagccttaygcccacatgaacgggggccgcaagaacgagcgggccttgccgctgccccagtcttcgacctgctgatccttggatcctgaatctgtgcaaacagtaacgtgtgcgcacrcgcagcggggtssggkgggagagagagttttaacaatccattcacaagcctcctgtacctcagtggatcttcagwwctgcccttgctgccygcgggagacagcttctctgcagtaaaacacatttgggatgttccttttttcaatatgcaagcagctttttattccctgcccaaacccttaactgacatgggcctttaagaaccttaatgacaacacttaatagcaacagagcacttgagaaccagtctcctcactctgtccctgtccttccctgttctccctttctctctcctctctgcttcataacggaaaaataattgccacaagtccagctgggaagccctttttatcagtttgaggaagtggctgtccctgtggccccatccaaccactgtacacacccgcctgacaccgtgggtcattacaaaaaaacacgtggagatggaaatttttacctttatctttcacctttctagggacatgaaatttacaaagggccatcgttcatccaaggctgttaccattttaacgctgcctaattttgccaaaatcctgaactttctccctcatcggcccggcgctgattcctcgtgtccggaggcatgggtgagcatggcagctggttgctccatttgagagacacgctggcgacacactccgtccatcygactgcccctgctgtgctgctcaaggccacaggcacacaggtctcattgcttctgactagattattatttgggggaactggacacaataggtctttctctcagtgaaggtggggagaagctgaaccggcttccctgccctgcctccccagccccctgcccaacccccaagaatctggtggccatgggccccgaagcagyctggcggacaggcttggagtcaaggggccccatgcctgcttctctcccagccccagctcccccgcccgcccccaaggacacagatgggaaggggtttccagggactcagccccactgttgatgcaggtttgcaaggaaagaaattcaaacaccacaacagcagtaag

SEQ ID NO: 35 - DNA, 5229 bp, Homo sapiens
ttttttttttttttttgagaaaggggaatttcatcccaaataaaaggaatgaagtctggctccggaggagggtccccgacctcgctgtgggggctcctgtttctctccgccgcgctctcgctctggccgacgagtggagaaatctgcgggccaggcatcgacatccgcaacgactatcagcagctgaagcgcctggagaactgcacggtgatcgagggctacctccacatcctgctcatctccaaggccgaggactaccgcagctaccgcttccccaagctcackgtcattaccgagtacttgctgctgttccgagtggctggcctcgagagcctcggagacctcttccccaacctcacggtcatccgcggctggaaactcttctacaactacgccctggtcatcttcgagatgaccaatctcaaggatattgggctttacaacctgagraacattactcggggggccatcaggattgagaaaaatgctgacctctgttacctctccactgtggactggtccctgatcctggatgcggtgtccaataactacattgtggggaataagcccccaaaggaatgtggggacctgtgtccagggaccatggaggagaagccgatgtgtgagaagaccaccatcaacaatgagtacaactaccgctgctggaccacaaaccgctgccagaaaatgtgcccaagcacgtgtgggaagcgggcgtgcaccgagaacaatgagtgctgccaccccgagtgcctgggcagctgcagcgcgcctgacaacgacacggcctgtgtagcttgccgccactactactatgccggtgtctgtgtgcctgcctgcccgcccaacacctacaggtttgagggctggcgctgtgtggaccgtgacttctgcgccaacatcctcagcgccgagagcagcgactccgagggrtttgtgatccacgacggcgagtgcatgcaggagtgcccctcgggcttcatccgcaacggcagccagagcatgtactgcatcccttgtgaaggtccttgcccgaaggtctgtgaggaagaaaagaaaacaaagaccattgattctgttacttctgctcagatgctccaaggatgcaccatcttcaagggcaatttgctcattaacatccgacgggggaataacattgcttcagagctggagaacttcatggggctcatcgaggtggtgacgggctacgtgaagatccgccattctcatgccttggtctccttgtccttcctaaaaaaccttcgcctcatcctaggagaggagcagctagaagggaattactccttctacgtcctcgacaaccagaacttgcagcaactgtgggactgggaccaccgcaacctgaccatcaaagcagggaaaatgtactttgctttcaatcccaaattatgtgtttccgaaatttaccgcatggaggaagtgacggggactaaagggcgccaaagcaaaggggacataaacaccaggaacaacggggagagagcctcctgtgaaagtgacrtcctgcatttcacctccaccaccacgtcgaagaatcgcatcatcataacctggcaccrgtaccggccccctgactacagggatctcatcagcttcaccgtttactacaaggaagcaccctttaagaatgtcacagagtatgatgggcaggatgcctgcggctccaacagctggaacatggtggacgtggacctcccgcccaacaaggacgtrgagccyggcatcttactacatgggctgaagccctggactcagtacgccgtttacgtcaaggctgtgaccctcaccatggtggagaacgaccatatccgtggggccaagagtgagatcttgtacattcgcaccaatgcttcagttccttccattcccttggacgttctttcagcatcgaactcctcttctcagttaatcgtgaagtggaaccctccctctctgcccaayggcaacctgagttactacattgtgcgctggcagcrgcagcctcaggacggctacctttaccggcacaattactgctccaaagacaaaatccccatcaggaagtatgccgacggcaccatcgacattgaggaggtcacagagaaccccaagactgaggtgtgtggtggggagaaagggccttgctgcgcctgccccaaaactgaagccgagaagcaggccgagaaggaggaggctgaataccgcaaagtctttgagaatttcctgcacaactccatcttcgtgcccagacctgaaaggaagcggagagatgtcatgcaagtggccaacaccaccatgtccagccgaagcaggaacaccacggccgcagacacctacaacatcacygacccggaagagctggagacagagtaccctttctttgagagcagagtggataacaaggagagaactgtcatttctaaccttcggcctttcacattgtaccgcatcgatatccacagctgcaaccacgaggctgagaagctgggctgcagcgcctccaacttcgtctttgcaaggactatgcccgcagaaggagcagatgacattcctgggccagtgacctgggagccaaggcctgaaaactccatctttttaaagtggccggaacctgagaatcccaatggattgattctaatgtatgaaataaaatacggatcacaagttgaggatcagcgagaatgtgtgtccagacaggaatacaggaagtatggaggggccaagctaaaccggctaaacccggggaactacacagcccggattcaggccacatctctctctgggaatgggtcgtggacagatcctgtgttcttctatgtccaggccaaaacaggatatgaaaacttcatccatctgatcatcgctctgcccgtcgctgtcctgttgatcgtgggagggttggtgattatgctgtacgtcttccatagaaagagaaataacagcaggctggggaatggagtgctgtatgcctctgtgaacccggagtacttcagcgctgctgatgtgtacgttcctgatgagtgggaggtggctcgggagaagatcaccatgagccgggaacttgggcaggggtcgtttgggatggtctatgaaggagttgccaagggtgtggtgaaagatgaacctgaaaccagagtggccattaaaacagtgaacgaggccgcaagcatgcgtgaraggattgagtttctcaacgaagcttctgtgatgaaggagttcaattgtcaccatgtggtgcgattgctgggtgtggtgtcccaaggccagccaacactggtcatcatggaactgatgacacggggcgatctcaaaagttatctccggtctctgaggccagaaatggagaataatccagtcctagcacctccaagcctgagcaagatgattcagatggccggagagattgcagacggcatggcatacctcaacgccaataagttcgtccacagagaccttgctgcccggaattgcatggtagccgaagatttcacagtcaaaatcggagattttggtatgacgcgagatatctatgagacagactattaccggaaaggagggaaagggctgctgcccgtgcgctggatgtctcctgagtccctcaaggatggagtcttcaccacttactcggacgtctggtccttcggggtcgtcctctgggagatcgccacactggccgagcagccctaccagggcttgtccaacgagcaagtccttcgcttcgtcatggagggcggccttctggacaagccagacaactgtcctgacatgctgtttgaactgatgygcatgtgctggcagtataaccccaagatgaggccttccttcctggagatcatcagcagcatcaaagaggagatggagcctggcttccgggaggtctccttctactacagcgaggagaacaagctgcccgagccggaggagctggacctggagccagagaacatggagagcgtccccctggacccctcggcctcctcgtcctccctgccactgcccgacagacactcaggacacaaggccgagaacggccccggccctggggtgctggtcctccgcgccagcttcgacgagagacagccttaygcccacatgaacgggggccgcaagaacgagcgggccttgccgctgccccagtcttcgacctgctgatccttggatcctgaatctgtgcaaacagtaacgtgtgcgcacrcgcagcggggtssggkgggagagagagttttaacaatccattcacaagcctcctgtacctcagtggatcttcagwwctgcccttgctgccygcgggagacagcttctctgcagtaaaacacatttgggatgttccttttttcaatatgcaagcagctttttattccctgcccaaacccttaactgacatgggcctttaagaaccttaatgacaacacttaatagcaacagagcacttgagaaccagtctcctcactctgtccctgtccttccctgttctccctttctctctcctctctgcttcataacggaaaaataattgccacaagtccagctgggaagccctttttatcagtttgaggaagtggctgtccctgtggccccatccaaccactgtacacacccgcctgacaccgtgggtcattacaaaaaaacacgtggagatggaaatttttacctttatctttcacctttctagggacatgaaatttacaaagggccatcgttcatccaaggctgttaccattttaacgctgcctaattttgccaaaatcctgaactttctccctcatcggcccggcgctgattcctcgtgtccggaggcatgggtgagcatggcagctggttgctccatttgagagacacgctggcgacacactccgtccatcygactgcccctgctgtgctgctcaaggccacaggcacacaggtctcattgcttctgactagattattatttgggggaactggacacaataggtctttctctcagtgaaggtggggagaagctgaaccggcttccctgccctgcctccccagccccctgcccaacccccaagaatctggtggccatgggccccgaagcagyctggcggacaggcttggagtcaaggggccccatgcctgcttctctcccagccccagctcccccgcccgcccccaaggacacagatgggaaggggtttccagggactcagccccactgttgatgcaggtttgcaaggaaagaaattcaaacaccacaacagcagtaag

SEQ ID NO: 36 - DNA, 1677 bp, Homo sapiens
gamgtctggccgtgagatgtttcgggagccggggtctctccgctgcagacatgacgaagggccttgttttaggaatctattccaaagaaaaagaagatgatgtgccacagttcacaagtgcaggagagaatcttgataaattgatagctggaaagctgagagagactttgaacatatctggaccacctctgaaggcaggcaagactcgaamcttttatggtctgcatcaggacttccccagygtggtsctagttggcctcggcaaaaaggcagccagaatcgacgaacaggaaaactggcaggaaggcaaagaaaacatcagagctgctgttgcagcaggatgcaggcagattcaagacctggagctctcttccgtggaggtggawccctgtagagaygctcaggctgctgaggagggcgcggtgcttggtctctatgaatacgatgacctaaagcaaaaaaagaagatggctatgtcggygaagctctatggaactggggatcaggaggcctggcagaaaggagtcctgtttgcttctgggcagaacttggcatgatggagacgccagccagcgagatgatgcmaaccagatttgccgaaattattgagaagaatctcaaaagygctagtagtaaaccgagkttcrtatcagacccaggtcttggattgaggaacaggcaatgggatcattcctcagtgtggccaaaggatctgaygagccctcagtcttcttggaaattcactacataggcagccccaatgcagacaaaccaccccttgtttgttgggaaaggaattacctttgacagtggtggtatctccatcaaggcttctgcaaatatggacctcatgagggcygacatgggaggagctacaactatatgctcagccattgtgtctgctgcaaatctcagtttgcccattaatattataggtctggcccctctgtgaaaacatgcccagcggcaaggccaacaagctgggggatgttgttagagccaggaacrggaagaccatccaggttggtaacactgatgctgaggggaggctcatactggctgatgcgctctgttacgtgcacacatttaacccgaaggtcatcctcaatgccaccaccttaacaggtgtcatagatgtagctttggggtcaggtgccactggggtctttaccaattcatcctggctctggaacaagctcttcgaggccagcattgaaacaggggaccgtgtctggaggatgcctctcttcaaacattgtacaagacaggttgtagattgccagctggctgatrttaacaacattggaaaatatagatctgcgggagcatgtacatctgcggcattcctgaaagaattcgtgactcatcctaagtgggcacatttagacatagcaggtgtgatgaccaacaaagatgaggttccctatytatggaaaggcatgaccgggaggcccamaaggactctcatagagttcttacttcgtttcagtcaagacaatgcttagttcagatacwcaaaaatgtcttcactctatcttaaattggacagttgaagttaaaaggtttttgaatgaatggatgaaaatattttaaaggaggcaatttatatttaaaaatgtagaacacaatgaaatttttatgccttgatttttttttcattttacacaaagatttata

SEQ ID NO: 37 - DNA, 3462 bp, Homo sapiens
atcttgctctgcccccgacatcgtggtgagaggggaaccttcctcatatctgggcgctggcctctccgggcttggragagaggaactcagtgatcatagagctggccgaatgccggggtagaggggaccggaagttgtttttttcgcccccgcccagcggccggatcgcatctcagctggttggctttggttagasctcccgtcagactttmgttcggccctaggatttggtakccccgaagtgtgggctctctccagtaccagactcatttcagtaccagcctttgggaagtcgtgtgaatacctcggtctcttagccacagggatagaatggcggcctgacggagccgcggcgccggcgaagtcgctgaggcgcgagctggaacccccagaccagctcaaacgggagccaaamctcgaagcttggaagaattagcaggaaatggcggatgaggcgttgtttttgcttctccataacgagatggtgtctggagtgtacaagtccgcggagcagggggaggtggaaaacggacgatgtattactaagctggaaaacatgssgtttcgagtgggacaaggattgatagaaaggtttacaaaagatactgcaaggttcaaggatgagttagatatcatgaagttcatttgtaaagatttttggactacggtattcaagaaacaaatcgacaatctaaggacaaatcatcagggcatctatgtacttcaggacaacaaatttcgcctgcttactcagatgtctgcaggaaaacagtatttagaacatgcatctaagtatttagcatttacgtgtggcttaatcagaggtggcttatcaaacttgggaataaaaagtattgtaacagctgaagtgtcttcaatgcctgcttgcaaatttcaggtgatgatacagaagctgtagaacatactgaaatgcaaggcttcaacagtgtaaagagataaattattcatgtaaaagtatttcaagtagtgatgatttaattacattgttcgatgtttgtacaggagtaagcatgtatttttatcaatttaacacagatcaaaggagatgaagggacattctgccatgacatacacttaaccaaaactattcaaaatgaaaaccggatttcaaataaccagacaccaagatgcagggcccttattttaaacctttttatttggttagagtgatatgtatttagccatagatggagaaacaaagctcagggtttgttgaattagcatgagagaaaattatgtaccaacagaattatttgtgagaagaatgaacaaattttgataaagtatgaatttgttttattttaaaaagcaaacatactaaattttttttattttattgcttataatttattaagaatgtttacacctgtataaggatttcatatatacattgtatgtgtgtatatataaatacatatatgactgcctaaattgtttataaatttaatttttctttaataggtttcattccttcagagctccattaatgtaatcaaaatgaaatatagattagtttaaatgtgaattcagtgactctagggccaaagaatattaggtatgtttggaaagaatttttgtatttattcctgttacagttttgactttcaacttctctccccgtgcatggaagtcctggtaaaggatctaacatctttattcccttctttcctcttccagctgagcagagttggataattgaattagtcattctgacattctttggaccatatcatcttagtggtttggggtcagtgctcatctgatawatctttcttaccacctcttctacttactttctcttacttaaattatctggcataagcagttatctccagcttttgttagaatcttgcatgttgattactaaaactatactttgtttcccatttatttattacccttttgcatgtatttgtgtgacagggaactctgcagcagggggtgactgacacaccaaacaagatgtttcactgggtactctgccatagaaatggcagattaagaagattgactataccaaacattatattaaaaacacaraataaaaactataaaaatgtactttaggacattaaagaaaactcaagttagaagcataccattttcctttcatggaagggtacagtattacaaagataatttgtttaacttgatttattaaattctagttatgtgccctataatgatktttcagtcagtgacagacctcatatatggcagtggttccataagattacaatactgtatttttactgtaccttctttatgtttagatatgcaagtacttaccattgtgttacagtgtcctacagtattcactacaataatatgctgtacaggtttgtagcctaggagcaataggccatagcttaggtgtatagtagatcataccatctaggtttgtgtaagtacactctgtgattgtacaattttaaaatctcctaatgatgatgcatttctcagaatgtatcccctttgctaagcaatgcatgactgcaatcctaattctcacatgttttggggaaaaaattttaattttgaaaaaatttaggaaagttcctacyaaatatacatgtataaagtttattaaaagtcataatgacccaggaatagctaatgacacagaagtagatcaaaatagaacacaatagagaacttcaaaataaaacaggtgtgagaattgtgtgtgtgaaaaagctgggttcaaataagttggtttgttagacattcatatgcctacycatcagccatttcgttctcccttccttgctgacaaagccccattttttttttctttttttttggcctaaaactctgtatggctgccttgtgctatagaatagggtgcttccctagcctagagagggtgagtgttgattagattctgtgccaatcatggtaattggcttacttgatcatttgatggaatctaggctaacgagacaaaggaagtctgaaggctttgaataagaaattttctgttgctcttaacaattgatacaagttagggatttgccagcatccctcttctgcttctcagtgaagatatgtgatatggatgtttgaagctaatctgcaacagccttctgatggccatgaaaggacaagtatggagatgaaagctatcacactgagaatagtgggatgtagatagaaagcacctgaattgtgcttctgaattaaccaatccaggaactgctttacctttggactttttgttatgtgagatattctttatattgttccatttgctttgggtatatgtatattgttacttgtagccaaaaagaaacctctcttagtagaaacaaagggagagttaggttattcaaaaattagtatgggacarttgaatatgcctttttctgcgggagtaggtggggagaaacttaaaggttcacttgtaaaacaataaagtactaaagaaaatgtgataatact

SEQ ID NO: 38 - DNA, 564 bp, Homo sapiens
caggagtcactgagtggccaggccatgagcctgtcttgggtcaactctgtgggyctcaatgtccctgcttctgttcgttattcccatacagacatyaatgtgcctgacttccctgattactgttgcattgagatttttgatgggacaaagtcttcaaaagaggatggcgaggctaggaaagggttctcctatttggtaactgcaacaactgctgtgggtgtcacatatgctgccaagaatgtcatctcccagtttgtttccagcatcagtgcttctgctgatgagtcggccgtgtcgaaaattgcaatcaagttatttgatattccagaaggcaagaacatggctttcaaatggagaggcaaatccctgtttgtatgccacagaaccaagaaggaaattgaccaagaacctgcagttgaagagcgtttgcattcatcctgttgtacacctattgcaaatgaagattttggtgatgcrtctgggaggatctggaaggggcctgcmcctcttgagcttggagctccctcatatgrgttcaccagtgaggacacagtcattgttggt

SEQ ID NO: 39 - DNA, 1237 bp, Homo sapiens
atgaagtccggtcctggcatccaagccgccatcgacctcacagcgggggccgcaggggggacagcgtgtgtactgactgggcagcccttcgacacaataaaagtgaagatgcagacgttccctgacctgtacaagggcctcaccgactgcttcctgaagacatacgcycaagtgggtctccggggcttctacaagggcaccggcccggcacttatggcctacgtcgccgaaaactcggtcctcttcatgtgctacgggttctgccagcagtttgtcaggaaagtggctggaatggacaagcaggcaaagctgagtgatctccagactgcagccgcggggtccttcgcctctgcatttgctgcactggctctctgccccactgagcttgtgaagtgccggctacagaccatgtatgaaatggagatgtcagggaagatagyaaaaagccataatacaatttggtctgtcgtgaagkgtatccttaaaaaggatggccccttgggcttctaccatggactctcgagtactctacttcaagaagkaccgggttatttctttttctttggtggctatgaactgagccgatcgttttttgcgtcagggagatcaaaagatgaactaggccctgtccatttgatgttaagtggtggagttgctggaatttgcctgtggcttrtcgtgttcccagtggattgtattaaatccagaattcaagttctttccatgtatgggaaacaggcaggatttattggtaccctyttaagtgttgtgagaaatgaaggaatagtagccttatattctggactgaaagctactatgattcgagcaatccctgccaatggggcactgtttgtggcctacgaatacagcaggaagatgatgatgaaacagttggaagcatactgaagtgtcttggtgaacctggatccgagtccatgagtttgaggactacagttcatcacagggttcagcagagtacaagaccactgtctaattttgacttcatgggaattttggttttatcttcccttcttctaccctaaatcttaactttatggaagggcctctattttacatcatataatttctgcccataattgtattgaaataggaaagttgctgctcttgcacttgctggaatgtacagggtgggctggttggccctatgtacctaatctgaaaaactaaatatcgttctgtcagggcctttgcataaagccatttgtgtgtacatgca

SEQ ID NO: 40 - DNA, 2567 bp, Homo sapiens
gtcacctgggagcttttctggggctgtcaactggaacaccgcaggatttctccatgtggcctgggtttcctcataccartggtggctaggttcccaagttcgaaaaagaaaaacagcatgatattcgatcattttttgtaccacaacctaaaaaaagacagttgatgacctcctgtgacraatcaaagagattccrggaggaaaatactgtagtgtcatcagaccctacaaaaacagctgcaagagatatcatcgattatgaaagtgatgttgaacctgaaacgaaaagattgaaattggctgcctcggaagaccactgcagtccgtcggaagagacaccatcccagtccaagcaaayccgaactccactcrtggaaagtgtacaggaggccaaggcccagttaaccacyccagcctttcctgtagagggctggcaatgtagtctctgcacctatatcaataattcagwgttaccttattgtgaaatgtgtgagactcctcaaggcagtgctgttatgcaaatagatagcctcaaccatatccaggataaaaacgagaaggatgattctcagaaagacacctccaaaaaggttcaaactatctcagactgtgaaaaacaagcccttgcacagtcagaacctggccagttggctgacagcaaggaagaaacaccaaaaattgagaaagaagacggacttacatcccagccagaacagtggaagagttcagacactttgccagtgtatgacaccttaatgttctgtgcaagtaggaatactgaccggattcacatctatactaaggatggaaarcagatgagctgtaatttcattcctctggatataaaattagacctttgggaagatttaccagcaagctttcagctgaaacaatatcgctcactgattttgagatttgttcgagaatggagtagtctaactgccatgaagcaaaggataatcaggaaaagtggacagctattctgtagcccaattcttgctttggaagagatcacaaagcaacaaaccaaacaaaattgcaccaaaagatacataaccaaagaagatgttgccgtagcctcaatggacaaagtgaagaatgttgggggccatgtccgtctgatcacaaaggagtccaggccacgggatcctttcacaaaaaaacttcttgaagatggagcctgtgtcccrtttctaaatccatacacagtccaggcagatctcactgtgaagccctctacatccaaaggctatttgcaagctgtggataatgaaggaaatccactttgccttcgctgtcagcaacccacttgccagactaagcaagcatgtaaagcgaactcttgggattcacggttttgctctctgaaatgtcaggaagagttttggattcgatctaataacagttacctgagagccaaagtatttgaaactgaacatggtgtgtgtcagctctgtaatgtgaacgcacaagaactctttttacgtctgagagatgcccctaaaagtcagaggaagaatcttctgtatgctacctggacttcaaagctcccattagaacayctaaatgaaatgataagaaacccaggggaaggacatttctggcaggtggatcacatcaagccagtgtatgggggaggaggacagtgttccctggacaacctgcagactctctgcacagtctgtcacaaagagagaactgccagacaagctaaggaaagaagccaggtgagaagacaatctctagcatcaaagcatggatcagacatcacacgatttttggtaaagaactgcatgaatcacacaaggtaacaggtgccgagcaaggtctgcaggtttctggattgccagatagtgcagcacctgaaggaggtgcagcrcacacaaatgatcagcrcaggtgtcaaaggatgaagcagccacttacagaagtgcaaatcctcagccactcatcttaatccttaacaagacagcactccagataggcagccacgaccccaaaggcttctggaaccaaactgattaaagttttactcagtggatagttctatagaattaatgatgatgtatgccaaaaacctttcagtgattctaacttcaagcttggaaaaaaagacgaggcttcccagtgtttgtggtggtggatctgcctggttctcaatttgacaccctaagmgatcatactcaagaatagtacagatgtgtggaatacgccaayacctttaactacagacatcatgttctcaagataaaagcctttaaaacaaaaagccatcgtaggtatcaagtcaacatgaaattggaatgcaaaattaatactgctgaggatttccttcatatcccatgctgtttaactatctcttccacagtcctagaatcaatctttttwaattaagagacagggtctgtctttgttacccaggctggagtacagtggtgtcatcaaagctcagtgcagcctccaactcctgggctcaatactcttgcctcagcctcctcttcctgagtagctgcaactacagacacatgccccaatactcagctaatttttaaatttttgtggagatg

SEQ ID NO: 41 - DNA, 3856 bp, Homo sapiens
caggtgtatggtggctgatgaaatgggtctaggaaagacaatccaggcaattggaattacttacttctataaagaggaatggcctctgttaatagtggtcccttcgtctctgaggtacccttggacagaagaaattgaaaaatggatcccagagctaagtccagaagaaatcaatgttattcagaataaaactgatgttaggagaatgtygaccagtaaagtgacagttstgggttatggtctcttaaccgcagatgcaaagactttgatagatgcmctgaataatcagaacttcaaagtagttatagtggatgaatcacactacatgaaatccagaaatgcaactcgcagcaggattttattgccaatagtacagaaagccagacgagccattcttcttacaggaacaccagctttaggaaggcctgaagagctttttatgcagattgaagctctctttccacaaaaatttggaagatggaccgactatgcaaaaagatactgtaatgcacacatcagatattttggtaaaagacctcagtgggattgtagaggggcatcaaatcttaatgaacttcaccagctattaagtgacataatgattagaagattaaagactgaagttttaacccagctaccccctaaagtcagacagcgtattccatttgatcttccatcagcagctgccaaggaattgaataccagctttgaagagtgggaaaaaataatgagaactccaaattcaggtgccatggagacagtcatggggttgataactcgcatgtttaaacaaactgctattgccaaggcaggtgctgtaaaggattatattaagatgatgcttcagaatgattygcttaaatttctggtttttgctcaccatttaagcatgctccaagcttgcacagaagcagtcatcgaaaataagactcgttacattaggatagatggaagtgtttcatcttcagaaagaatacatctggttaatcagtttcaaaaggatcctgacactcgcgtggctatcctaagcattcaggctgctggccagggattaacatttactgcagcaagtcatgttgtatttgctgagttgtactgggaccctggacatataaaacaagcagaagaccgagctcacagaattggccagtgcagttctgtgaatattcactaccttattgcaaatggaaccctagacacccttatgtggggaatgttgaatcgcaaggctcaagttacagggagcacactgaacggtaggaaagaaaaaattcaggctgaggaaggtgataaggaaaaatgggatttcctgcagtttgctgaagcttggactccaaatgacagttctgaagagttaaggaaggaagctttgttcactcacttcgaaaaagaaaaacagcatgatattcgatcattttttgtaccacaacctaaaaaaagacagttgatgacctcctgtgacraatcaaagagattccrggaggaaaatactgtagtgtcatcagaccctacaaaaacagctgcaagagatatcatcgattatgaaagtgatgttgaacctgaaacgaaaagattgaaattggctgcctcggaagaccactgcagtccgtcggaagagacaccatcccagtccaagcaaayccgaactccactcrtggaaagtgtacaggaggccaaggcccagttaaccacyccagcctttcctgtagagggctggcaatgtagtctctgcacctatatcaataattcagwgttaccttattgtgaaatgtgtgagactcctcaaggcagtgctgttatgcaaatagatagcctcaaccatatccaggataaaaacgagaaggatgattctcagaaagacacctccaaaaaggttcaaactatctcagactgtgaaaaacaagcccttgcacagtcagaacctggccagttggctgacagcaaggaagaaacaccaaaaattgagaaagaagacggacttacatcccagccaggtaatgaacagtggaagagttcagacactttgccagtgtatgacaccttaatgttctgtgcaagtaggaatactgaccggattcacatctatactaaggatggaaarcagatgagctgtaatttcattcctctggatataaaattagacctttgggaagatttaccagcaagctttcagctgaaacaatatcgctcactgattttgagatttgttcgagaatggagtagtctaactgccatgaagcaaaggataatcaggaaaagtggacagctattctgtagcccaattcttgctttggaagagatcacaaagcaacaaaccaaacaaaattgcaccaaaagatacataaccaaagaagatgttgccgtagcctcaatggacaaagtgaagaatgttgggggccatgtccgtctgatcacaaaggagtccaggccacgggatcctttcacaaaaaaacttcttgaagatggagcctgtgtcccrtttctaaatccatacacagtccaggcagatctcactgtgaagccctctacatccaaaggctatttgcaagctgtggataatgaaggaaatccactttgccttcgctgtcagcaacccacttgccagactaagcaagcatgtaaagcgaactcttgggattcacggttttgctctctgaaatgtcaggaagagttttggattcgatctaataacagttacctgagagccaaagtatttgaaactgaacatggtgtgtgtcagctctgtaatgtgaacgcacaagaactctttttacgtctgagagatgcccctaaaagtcagaggaagaatcttctgtatgctacctggacttcaaagctcccattagaacayctaaatgaaatgataagaaacccaggggaaggacatttctggcaggtggatcacatcaagccagtgtatgggggaggaggacagtgttccctggacaacctgcagactctctgcacagtctgtcacaaagagagaactgccagacaagctaaggaaagaagccaggtgagaagacaatctctagcatcaaagcatggatcagacatcacacgatttttggtaaagaactgcatgaatcacacaaggtaacaggtgccgagcaaggtctgcaggtttctggattgccagatagtgcagcacctgaaggaggtgcagcrcacacaaatgatcagcrcaggtgtcaaaggatgaagcagccacttacagaagtgcaaatcctcagccactcatcttaatccttaacaagacagcactccagataggcagccacgaccccaaaggcttctggaaccaaactgattaaagttttactcagtggatagttctatagaattaatgatgatgtatgccaaaaacctttcagtgattctaacttcaagcttggaaaaaaagacgaggcttcccagtgtttgtggtggtggatctgcctggttctcaatttgacaccctaagmgatcatactcaagaatagtacagatgtgtggaatacgccaayacctttaactacagacatcatgttctcaagataaaagcctttaaaacaaaaagccatcgtaggtatcaagtcaacatgaaattggaatgcaaaattaatactgctgaggatttccttcatatcccatgctgtttaactatctcttccacagtcctagaatcaatctttttwaattaagagacagggtctgtctttgttacccaggctggagtacagtggtgtcatcaaagctcagtgcagcctccaactcctgggctcaatactcttgcctcagcctcctcttcctgagtagctgcaactacagacacatgccccaatactcagctaatttttaaatttttgtggagatg

SEQ ID NO: 42 - DNA, 2356 bp, Homo sapiens
aaaaaaacaaaacttagttgtgttctctttatctgaaaatatactatttacctatttgttaattttattgtctttctctgccatttagaatggagtctagaatgcagggatttctctgtcctgttcctgctgtctcttcagcatctagaatagtactgggtatatagtatgctcctgataaatgttttgaacatatgaataaacattattcactttctttttataagacctaactgttacattctttttactttacttttaaatgtaaattattacatttttgtaataatttttattttaatagttatgcaaatagatagcctcaaccatatccaggataaaaacgagaaggatgattctcagaaagacacctccaaaaaggttcaaactatctcagactgtgaaaaacaagcccttgcacagtcagaacctggccagttggctgacagcaaggaagaaacaccaaaaattgagaaagaagacggacttacatcccagccaggtaatgaacagtggaagagttcagacactttgccagtgtatgacaccttaatgttctgtgcaagtaggaatactgaccggattcacatctatactaaggatggaaarcagatgagctgtaatttcattcctctggatataaaattagacctttgggaagatttaccagcaagctttcagctgaaacaatatcgctcactgattttgagatttgttcgagaatggagtagtctaactgccatgaagcaaaggataatcaggaaaagtggacagctattctgtagcccaattcttgctttggaagagatcacaaagcaacaaaccaaacaaaattgcaccaaaagatacataaccaaagaagatgttgccgtagcctcaatggacaaagtgaagaatgttgggggccatgtccgtctgatcacaaaggagtccaggccacgggatcctttcacaaaaaaacttcttgaagatggagcctgtgtcccrtttctaaatccatacacagtccaggcagatctcactgtgaagccctctacatccaaaggctatttgcaagctgtggataatgaaggaaatccactttgccttcgctgtcagcaacccacttgccagactaagcaagcatgtaaagcgaactcttgggattcacggttttgctctctgaaatgtcaggaagagttttggattcgatctaataacagttacctgagagccaaagtatttgaaactgaacatggtgtgtgtcagctctgtaatgtgaacgcacaagaactctttttacgtctgagagatgcccctaaaagtcagaggaagaatcttctgtatgctacctggacttcaaagctcccattagaacayctaaatgaaatgataagaaacccaggggaaggacatttctggcaggtggatcacatcaagccagtgtatgggggaggaggacagtgttccctggacaacctgcagactctctgcacagtctgtcacaaagagagaactgccagacaagctaaggaaagaagccaggtgagaagacaatctctagcatcaaagcatggatcagacatcacacgatttttggtaaagaactgcatgaatcacacaaggtaacaggtgccgagcaaggtctgcaggtttctggattgccagatagtgcagcacctgaaggaggtgcagcrcacacaaatgatcagcrcaggtgtcaaaggatgaagcagccacttacagaagtgcaaatcctcagccactcatcttaatccttaacaagacagcactccagataggcagccacgaccccaaaggcttctggaaccaaactgattaaagttttactcagtggatagttctatagaattaatgatgatgtatgccaaaaacctttcagtgattctaacttcaagcttggaaaaaaagacgaggcttcccagtgtttgtggtggtggatctgcctggttctcaatttgacaccctaagmgatcatactcaagaatagtacagatgtgtggaatacgccaayacctttaactacagacatcatgttctcaagataaaagcctttaaaacaaaaagccatcgtaggtatcaagtcaacatgaaattggaatgcaaaattaatactgctgaggatttccttcatatcccatgctgtttaactatctcttccacagtcctagaatcaatctttttwaattaagagacagggtctgtctttgttacccaggctggagtacagtggtgtcatcaaagctcagtgcagcctccaactcctgggctcaatactcttgcctcagcctcctcttcctgagtagctgcaactacagacacatgccccaatactcagctaatttttaaatttttg

SEQ ID NO: 43 - DNA, 4019 bp, Homo sapiens
ccaatggtaaaactaggaggacagccattttgcccacttgtaaaagagctaccttttcccacgagttggagcctgaggtgcggagtttcgtgagtttttactgactcgaggatcatcatgcctagggttcataacataaaaaagtctcttacacctcacatttcttgtgtgacaaatgaatctgataatctgctggattttttgcctgacagactaagagcaaagctacttccattccagaaagatggcatcatttttgccctcaaaagaaatggcaggtaaagttctttgaagacatatgggtctaggaaagacaatccaggcaattggaattacttacttctataaagaggaatggcctctgttaatagtggtcccttcgtctctgaggtacccttggacagaagaaattgaaaaatggatcccagagctaagtccagaagaaatcaatgttattcagaataaaactgatgttaggagaatgtygaccagtaaagtgacagttstgggttatggtctcttaaccgcagatgcaaagactttgatagatgcmctgaataatcagaacttcaaagtagttatagtggatgaatcacactacatgaaatccagaaatgcaactcgcagcaggattttattgccaatagtacagaaagccagacgagccattcttcttacaggaacaccagctttaggaaggcctgaagagctttttatgcagattgaagctctctttccacaaaaatttggaagatggaccgactatgcaaaaagatactgtaatgcacacatcagatattttggtaaaagacctcagtgggattgtagaggggcatcaaatcttaatgaacttcaccagctattaagtgacataatgattagaagattaaagactgaagttttaacccagctaccccctaaagtcagacagcgtattccatttgatcttccatcagcagctgccaaggaattgaataccagctttgaagagtgggaaaaaataatgagaactccaaattcaggtgccatggagacagtcatggggttgataactcgcatgtttaaacaaactgctattgccaaggcaggtgctgtaaaggattatattaagatgatgcttcagaatgattygcttaaatttctggtttttgctcaccatttaagcatgctccaagcttgcacagaagcagtcatcgaaaataagactcgttacattaggatagatggaagtgtttcatcttcagaaagaatacatctggttaatcagtttcaaaaggatcctgacactcgcgtggctatcctaagcattcaggctgctggccagggattaacatttactgcagcaagtcatgttgtatttgctgagttgtactgggaccctggacatataaaacaagcagaagaccgagctcacagaattggccagtgcagttctgtgaatattcactaccttattgcaaatggaaccctagacacccttatgtggggaatgttgaatcgcaaggctcaagttacagggagcacactgaacggtaggaaagaaaaaattcaggctgaggaaggtgataaggaaaaatgggatttcctgcagtttgctgaagcttggactccaaatgacagttctgaagagttaaggaaggaagctttgttcactcacttcgaaaaagaaaaacagcatgatattcgatcattttttgtaccacaacctaaaaaaagacagttgatgacctcctgtgacraatcaaagagattccrggaggaaaatactgtagtgtcatcagaccctacaaaaacagctgcaagagatatcatcgattatgaaagtgatgttgaacctgaaacgaaaagattgaaattggctgcctcggaagaccactgcagtccgtcggaagagacaccatcccagtccaagcaaayccgaactccactcrtggaaagtgtacaggaggccaaggcccagttaaccacyccagcctttcctgtagagggctggcaatgtagtctctgcacctatatcaataattcagwgttaccttattgtgaaatgtgtgagactcctcaaggcagtgctgttatgcaaatagatagcctcaaccatatccaggataaaaacgagaaggatgattctcagaaagacacctccaaaaaggttcaaactatctcagactgtgaaaaacaagcccttgcacagtcagaacctggccagttggctgacagcaaggaagaaacaccaaaaattgagaaagaagacggacttacatcccagccaggtaatgaacagtggaagagttcagacactttgccagtgtatgacaccttaatgttctgtgcaagtaggaatactgaccggattcacatctatactaaggatggaaarcagatgagctgtaatttcattcctctggatataaaattagacctttgggaagatttaccagcaagctttcagctgaaacaatatcgctcactgattttgagatttgttcgagaatggagtagtctaactgccatgaagcaaaggataatcaggaaaagtggacagctattctgtagcccaattcttgctttggaagagatcacaaagcaacaaaccaaacaaaattgcaccaaaagatacataaccaaagaagatgttgccgtagcctcaatggacaaagtgaagaatgttgggggccatgtccgtctgatcacaaaggagtccaggccacgggatcctttcacaaaaaaacttcttgaagatggagcctgtgtcccrtttctaaatccatacacagtccaggcagatctcactgtgaagccctctacatccaaaggctatttgcaagctgtggataatgaaggaaatccactttgccttcgctgtcagcaacccacttgccagactaagcaagcatgtaaagcgaactcttgggattcacggttttgctctctgaaatgtcaggaagagttttggattcgatctaataacagttacctgagagccaaagtatttgaaactgaacatggtgtgtgtcagctctgtaatgtgaacgcacaagaactctttttacgtctgagagatgcccctaaaagtcagaggaagaatcttctgtatgctacctggacttcaaagctcccattagaacayctaaatgaaatgataagaaacccaggggaaggacatttctggcaggtggatcacatcaagccagtgtatgggggaggaggacagtgttccctggacaacctgcagactctctgcacagtctgtcacaaagagagaactgccagacaagctaaggaaagaagccaggtgagaagacaatctctagcatcaaagcatggatcagacatcacacgatttttggtaaagaagtaaagtagaaaaatatatgaatgaatgacaaatggtttacatgtggaagactttaatacagaagttttccatgtttgtttaatatatcgagagtaaaaattttcagaacaaaaatcaagaattcaaattctcttctactaattacttttagtattaaatacattttgaaagtacttaacagaaactaagatacaatactgaatatttctgtkgtctttttgatttgattcagactcgcaattatgtttcagcaatgttttgtaaagctctttacccctaatatgcctaatcactgtattgtgcatagattgtgtttaaaaaatgtactctcaattacctaaaaatgcttctggattagtattgttctggactgtcataggtatgagtggaacattgcaaaaccttatgggaaatttcagacgcaaatcattatttgggaattctgggccaagcatgaccagcctgcttaggattcaagagagactgtccactaaatacctccagaatgagctaggggcacacattttgggtgttgcttttcttgctttatttcttagctagtcatctttatcaaaaatatccttttcaaaatgaggtacctatggtgtttgtggacaatttgggggttctgtgtaaagtaattgttaaaactattaaataactg

SEQ ID NO: 44 - DNA, 1740 bp, Homo sapiens
caggtgtatggtggctgatgaaatgggtctaggaaagacaatccaggcaattggaattacttacttctataaagaggaatggcctctgttaatagtggtcccttcgtctctgaggtacccttggacagaagaaattgaaaaatggatcccagagctaagtccagaagaaatcaatgttattcagaataaaactgatgttaggagaatgtygaccagtaaagtgacagttstgggttatggtctcttaaccgcagatgcaaagactttgatagatgcmctgaataatcagaacttcaaagtagttatagtggatgaatcacactacatgaaatccagaaatgcaactcgcagcaggattttattgccaatagtacagaaagccagacgagccattcttcttacaggaacaccagctttaggaaggcctgaagagctttttatgcagattgaagctctctttccacaaaaatttggaagatggaccgactatgcaaaaagatactgtaatgcacacatcagatattttggtaaaagacctcagtgggattgtagaggggcatcaaatcttaatgaacttcaccagctattaagtgacataatgattagaagattaaagactgaagttttaacccagctaccccctaaagtcagacagcgtattccatttgatcttccatcagcagctgccaaggaattgaataccagctttgaagagtgggaaaaaataatgagaactccaaattcaggtgccatggagacagtcatggggttgataactcgcatgtttaaacaaactgctattgccaaggcaggtgctgtaaaggattatattaagatgatgcttcagaatgattygcttaaatttctggtttttgctcaccatttaagcatgctccaagcttgcacagaagcagtcatcgaaaataagactcgttacattaggatagatggaagtgtttcatcttcagaaagaatacatctggttaatcagtttcaaaaggatcctgacactcgcgtggctatcctaagcattcaggctgctggccagggattaacatttactgcagcaagtcatgttgtatttgctgagttgtactgggaccctggacatataaaacaagcagaagaccgagctcacagaattggccagtgcagttctgtgaatattcactaccttattgcaaatggaaccctagacacccttatgtggggaatgttgaatcgcaaggctcaagttacagggagcacactgaacggtaggaaagaaaaaattcaggctgaggaaggtgataaggaaaaatgggatttcctgcagtttgctgaagcttggactccaaatgacagttctgaagagttaaggaaggaagctttgttcactcactaactgaaaatatcatccctaccatgttacaagtcaaaaatctaggagtctgaagattactctaggcccctgcatcttcctcacccctcatgttcagtcagcatgtcccatcagatcttctygctgctagccccatgtgtcctaagttcccaggaaaccctcccattccccattcatccctcaaggaagggacgatcaagtgtcattagacatttgaagagaaaatctatagcatgaaaaagataaacaaaagtaaactaatacacaaattgatcctgaagataattttaaaaaaactcttaagtagtagtttcagatttgagattatattgcccataaaaataaaatgagaatacggt

SEQ ID NO: 45 - DNA, 4024 bp, Homo sapiens
ttgtcccgttgaacgtcacttccgcttaggggcggacacgtcccaaacctgtggcgggagttggagattctgcggcgaatacgccaggtgtgactggctggaagtggcgtggctggatcatcatgcctagggttcataacataaaaaagtctcttacacctcacatttcttgtgtgacaaatgaatctgataatctgctggattttttgcctgacagactaagagcaaagctacttccattccagaaagatggcatcatttttgccctcaaaagaaatggcaggtaaagttctttgaagacatatgggtctaggaaagacaatccaggcaattggaattacttacttctataaagaggaatggcctctgttaatagtggtcccttcgtctctgaggtacccttggacagaagaaattgaaaaatggatcccagagctaagtccagaagaaatcaatgttattcagaataaaactgatgttaggagaatgtygaccagtaaagtgacagttstgggttatggtctcttaaccgcagatgcaaagactttgatagatgcmctgaataatcagaacttcaaagtagttatagtggatgaatcacactacatgaaatccagaaatgcaactcgcagcaggattttattgccaatagtacagaaagccagacgagccattcttcttacaggaacaccagctttaggaaggcctgaagagctttttatgcagattgaagctctctttccacaaaaatttggaagatggaccgactatgcaaaaagatactgtaatgcacacatcagatattttggtaaaagacctcagtgggattgtagaggggcatcaaatcttaatgaacttcaccagctattaagtgacataatgattagaagattaaagactgaagttttaacccagctaccccctaaagtcagacagcgtattccatttgatcttccatcagcagctgccaaggaattgaataccagctttgaagagtgggaaaaaataatgagaactccaaattcaggtgccatggagacagtcatggggttgataactcgcatgtttaaacaaactgctattgccaaggcaggtgctgtaaaggattatattaagatgatgcttcagaatgattygcttaaatttctggtttttgctcaccatttaagcatgctccaagcttgcacagaagcagtcatcgaaaataagactcgttacattaggatagatggaagtgtttcatcttcagaaagaatacatctggttaatcagtttcaaaaggatcctgacactcgcgtggctatcctaagcattcaggctgctggccagggattaacatttactgcagcaagtcatgttgtatttgctgagttgtactgggaccctggacatataaaacaagcagaagaccgagctcacagaattggccagtgcagttctgtgaatattcactaccttattgcaaatggaaccctagacacccttatgtggggaatgttgaatcgcaaggctcaagttacagggagcacactgaacggtaggaaagaaaaaattcaggctgaggaaggtgataaggaaaaatgggatttcctgcagtttgctgaagcttggactccaaatgacagttctgaagagttaaggaaggaagctttgttcactcacttcgaaaaagaaaaacagcatgatattcgatcattttttgtaccacaacctaaaaaaagacagttgatgacctcctgtgacraatcaaagagattccrggaggaaaatactgtagtgtcatcagaccctacaaaaacagctgcaagagatatcatcgattatgaaagtgatgttgaacctgaaacgaaaagattgaaattggctgcctcggaagaccactgcagtccgtcggaagagacaccatcccagtccaagcaaayccgaactccactcrtggaaagtgtacaggaggccaaggcccagttaaccacyccagcctttcctgtagagggctggcaatgtagtctctgcacctatatcaataattcagwgttaccttattgtgaaatgtgtgagactcctcaaggcagtgctgttatgcaaatagatagcctcaaccatatccaggataaaaacgagaaggatgattctcagaaagacacctccaaaaaggttcaaactatctcagactgtgaaaaacaagcccttgcacagtcagaacctggccagttggctgacagcaaggaagaaacaccaaaaattgagaaagaagacggacttacatcccagccaggtaatgaacagtggaagagttcagacactttgccagtgtatgacaccttaatgttctgtgcaagtaggaatactgaccggattcacatctatactaaggatggaaarcagatgagctgtaatttcattcctctggatataaaattagacctttgggaagatttaccagcaagctttcagctgaaacaatatcgctcactgattttgagatttgttcgagaatggagtagtctaactgccatgaagcaaaggataatcaggaaaagtggacagctattctgtagcccaattcttgctttggaagagatcacaaagcaacaaaccaaacaaaattgcaccaaaagatacataaccaaagaagatgttgccgtagcctcaatggacaaagtgaagaatgttgggggccatgtccgtctgatcacaaaggagtccaggccacgggatcctttcacaaaaaaacttcttgaagatggagcctgtgtcccrtttctaaatccatacacagtccaggcagatctcactgtgaagccctctacatccaaaggctatttgcaagctgtggataatgaaggaaatccactttgccttcgctgtcagcaacccacttgccagactaagcaagcatgtaaagcgaactcttgggattcacggttttgctctctgaaatgtcaggaagagttttggattcgatctaataacagttacctgagagccaaagtatttgaaactgaacatggtgtgtgtcagctctgtaatgtgaacgcacaagaactctttttacgtctgagagatgcccctaaaagtcagaggaagaatcttctgtatgctacctggacttcaaagctcccattagaacayctaaatgaaatgataagaaacccaggggaaggacatttctggcaggtggatcacatcaagccagtgtatgggggaggaggacagtgttccctggacaacctgcagactctctgcacagtctgtcacaaagagagaactgccagacaagctaaggaaagaagccaggtgagaagacaatctctagcatcaaagcatggatcagacatcacacgatttttggtaaagaagtaaagtagaaaaatatatgaatgaatgacaaatggtttacatgtggaagactttaatacagaagttttccatgtttgtttaatatatcgagagtaaaaattttcagaacaaaaatcaagaattcaaattctcttctactaattacttttagtattaaatacattttgaaagtacttaacagaaactaagatacaatactgaatatttctgtkgtctttttgatttgattcagactcgcaattatgtttcagcaatgttttgtaaagctctttacccctaatatgcctaatcactgtattgtgcatagattgtgtttaaaaaatgtactctcaattacctaaaaatgcttctggattagtattgttctggactgtcataggtatgagtggaacattgcaaaaccttatgggaaatttcagacgcaaatcattatttgggaattctgggccaagcatgaccagcctgcttaggattcaagagagactgtccactaaatacctccagaatgagctaggggcacacattttgggtgttgcttttcttgctttatttcttagctagtcatctttatcaaaaatatccttttcaaaatgaggtacctatggtgtttgtggacaatttgggggttctgtgtaaagtaattgttaaaactattaaataactg

SEQ ID NO: 46 - DNA, 308 bp, Homo sapiens
atgattcttcagaggctcttcaagttctcctctgtcattcggtcagtagtstcactccctttgcagaagaacrttggtgtcacacagtggcatttaacaagaaacttggtcccatacagaaactcttcgtggacaacattagggactacaaatctaagccacaggcatctggaggacctgctgatactggcccagagcaccagcaagagttggagagtaaacttctgctgaaagcagacaggaatatgttatctaatttcaaatgcraagattmtaaatttgaaaccatcgaaaaaccccagtcctga

SEQ ID NO: 47 - DNA, 722 bp, Homo sapiens
gtactctcagccatggtgaatcccaccgtgttcttccacattcyagtggacagcgagcccttgggccgcgtctccttcaagctgtttgcagacaagtttccaaagacagcagaaaactttcgtgctctgagcactggagagaaaggatttggttataagtgttcttgccttcacagaattattccagggtttatatgtcagggtgatggcttcacacgccataatggcactggtggcaagtccgtctacggggagaaatttgatgatgagaacttcattctaaagcatacaggtcctggcatcttgtccctggcaaatgctggacccaacacaaacggctcccggtttttcatctgcactgccaagactgggtggttggatggcacgcatgtggtctttggcaaggcgaaagaaggcataaatattctggaggccatggagcgcttgggtccaggaatggaaagaccagcaagaagatcaccatttctgactgtggacaactctaataaatttgacttgtgttttatcttaaccaccagaccattccttctgtagctcaggagagcagccctccaccccatttgctcgcagtatcctagaatctttgtgctcttgctgcagttccctttgggttccatgttttccttgttcccttccatgactagctggattgcagagttgaattaagtttatgattakgaaataaaaactaaataacaaaa

SEQ ID NO: 48 - DNA, 645 bp, Homo sapiens
atggccaagagttcacagaggaagcaacgtgactgtgtaaaccaatgcaaatcaaagcctggcttgagcacctcaatccctttgagaatgtccagttacacattcaagaggccagtaacgagaattacaccccatcctggcaatgaggtcagataccatcaatgggaggagagcttggagaagcctcagcaggtctgctggcagaggagactgcagggactccaggcttacagcagtgcaggagaactttcaagcactttggatcttgccaataccttgcaaaaacttgtccctagttacacaggtggatctctgctggaggatcttgccagtggtctggagcactcctgccccatgccccaccttgcctgctcttcagatgcggtggagataattcctgcagagggagtgggtatctcgcagctcctctgcaaacaatttctggtyactgaggaagatatcaggaaacaggaagggaaagtgaagacagtcagagagagactcgcaatagcactgattgcggatggactcgctaatgaggcagagaaagtgagagaccaagaaggcygtcctgaaaaacgctaagaaaaaaagggaagatagtgcagatgaaataaagtgtaatcctttattaacatctctttg

SEQ ID NO: 49 - DNA, 1410 bp, Homo sapiens
atgcagaagcaccwcttcccagaagcactggcaaacatctcctggagtgccattggccctgatcgggttgcaggcccacacctaagccagtctctgtggtcaaagatgggatacactgatgagcttatgagccaaggaatcaccgaggagactataattccccatcatttccatcagcctctgctyccttttatagaaatacttggtgtcattgcagtcttatttaaggtgctgtgcaaacatggcttcagcataagttcccaagctgaatatccaactagactgctgcctttacgggagacagaagatgaagcccagaacctgtccaaggaacccaaagctatgccacatggctggaagctgtgtttacaagcttttcatccgtcttccttaacttgtggtcgctatggtttcctttgcctgctgggctggccctttaagggggacaagctgtccactcaaccaaatgccagaggcactggctccaatagcttgggtcttttggctatgggcttaaccatatctcatcacctgctcattctgagccccaaacttctcccctgttgggttccctggagaacagaccccaaagtggagatctgtgcacaggtttatgagacacctctcagcaacarcaactgtgagggagtgagggtggcaggcttggaagaggcctcagccaatcccatgggaagttctgaaaccgggagkgtccttctgaattatccacagggagsgggtattgcctccaaatggagtgcagtggagggagtaattgactctgctgccctggcacctggtgtttctgccaaatgcctaagaccagaggcaccgaagggagggaggatgcgagatgaccggccctttggcaacctgaccatcgacttagcagagccttcaaaagcaagccaggggctggctgcacgaccaaagaggcgccgcgcctctcgtggatgtgtgtgtgctcagctttggcaaggaaaatctaaaagctccatccagcaggctcctcctttctctgaggatgtgccctgtgggaagcctgggctcgtgcctcttggcgtccgctttctttctggtcatggttctccttgctgcgacacaggtcctggtcaaaagcccagcgtgctcatcacctctgggcakatcctagggcaagaggagcagaaaaccctgctcttccctggtctcctgtctttggtttttcagttcaatgtggaaaacagtgacttacgatgtctcagccttgctgaaaatttagaaataagcgctttattggtctttcccatttgtgcctttactctccttaccccctgcctcccactcctatttgcctcaaatacttctgatcgcccttcaatgtctactcaaatgatgccttcttccacgatgccttccaaactcttctag

SEQ ID NO: 50 - DNA, 2568 bp, Homo sapiens
gctacagcttgaagccaaacatttaatgaaagagagcgggaggggccgaatagaagaatgatgggcgtggccaaccccgaggtggctggaggccgcgcccccttcccagagtgcaccgcagccgctgcattcaggaascgytttagcttcgsccccggccggccrggcggggaagactggtgtggtctggccatggatgggctccaggccagtgcagggccgttgaggcgcgggcggccgargcgccggcgcaagccccagccacacagcgggtcggtcctggccctgcccttgaggtccaggaagatacgaaagcagctgcgaagtgttgtatcccgcatggcagcgctgaggacgcagacgctgcctagcgagaactcggaggaatcgagggtggagtcgacggccgacgacctgggggacgcgctacccggtggggcggcggtggcggcgtcccggacgcagcccggcgagagccatacggccacctggggcccgcagagctgctggaggcctcgcccgccgcgcgctccctgcagaccccgtcggcgcgcctggtgcccgcttccgygccgcccgcgcgcctggtggaggtgcccgccgcgccggtccgggtggtggagacctcggccctgctgtgcaccgcgcaacacttagcggccgtccagtcgtccggggcccctgcgacggcgtcggggccgcaggtggataacacgggtggggagccggcctgggactccccgctgcggcgcgtcttggccgagctgaaccgcatccccagcagccggcggcgagcggcccgcctctttgagtggctcatcgcgcccatgccgccagatcacttytaccggcgcctatgggagcgcgaggcggtgctggtgcggcggcaggaccacacctactaccasggacttttctctaccgctgacctggattcgatgctgcgcaacgaggaggtgcagttcggccagcatttggacgccgctcgctacatcaacggacgacgcgagaccctgaacccacccggccgcgcgctgcccgccgccgcgtggtccctgtaccaggccggctgctccctgcgtctcctctgtccgcaggctttctctactactgtgtggcagtttttggctgtgcttcaagagcagtttggaagcatggcaggctccaacgtttacctcacgccccctaactcgcagggctttgccccccactacgacgacatcgaggccttcgtgctgcagctggaaggtaggaaactctggcgtgtataccgaccccgagycccaaccgaggaactggctctgacatccagccccaacttcagtcaggacgacctcggtgagccggtgctgcagaccgtgctggaacctggagatttgctgtattttcctcggggcttcattcaccaagctgaatgccaggatggagtccactctctgcacctcaccttgtccacgtaccagcgcaatacctggggtgacttcttagaggccatactgcctctggcagtgcaggctgcaatggaagaaaatgtggagtttcggaggggtctgccccgagacttcatggattacatgggggcccagcattcagattctaaggatccgcgaagaaccgctttcatggagaaggtgcgggtcttggttgcccgcctgggacactttgctcctgttgatgctgtggccgaccagcgagccaaagacttcattcacgattctctgccccctgttttgactgatagggagagggcactaagtgtttacgggcttccaattcgstgggaggctggagaacctgtaaacgtgggggcccagttgacaacagaaacagaagtccatatgcttcaggatgggatagctcggctggtgggtgaggggggccatttgtttctctattacacagtggaaaactcccgtgtgtatcatctggaagaacccaagtgcttggaaatatacccccagcaagctgatgccatggaactgttgcttggttcttatccagagtttgtgagagtgggggacctgccctgtgacagtgtggaggaccagctgtccttggcaaccackttgtatgataaggggctgctgctcactaagatgcctctagccctaaattagtttcttgttgattgctggaaacaaggcagtagtgattctccgctgccactgctaccttttttttttttttttccttaaactcacgttcttaccttgataagcatcagtgtgctcacatttacctttatcactgcttcagtgtcacaaacctcggaaggtcttctaggaagaaccatctcatctaggtacaaaaggaaaaggagaagttggaggtggaaaaaaaacccttgatccgtgatcatttcagagcaccaacttcatcaccttcaggcttcagtgtactgggtaacactgaccatgtcgttctgcttgagacagatattagattttttttggaatttggatctttcatctgagttctttttcatgggcgggtcggggtcagtatcctgtttgttattgttaaatttgtatgaaccttagaaaagttattaaagtgccaaagaatgtt

SEQ ID NO: 51 - DNA, 798 bp, Homo sapiens
agcatttttagcrtacaacaacatccaagtggattactatgaatgcctagacctctatggcaaacagtctcttcgtggcctgtgctgaggactacatcagtctcctgcaattatcatctacactgaaaaacaaagaggacagaggcraagctagtggccctcaccatcccctgcaagctgattgcttcttactgcaagcacttgagcatcttcctgagagctttcttgggcaatgggaaccaggcttggcccaatcacaggcaggtgaaaagtatgaggaaatggagaaggcattgtccaaggagcagtcttcaaccttcaccccgcaaacggaatctcactctgtctcccaggctggagtgcagtggtgcgatctcggctcaccgcaatctccgcctctcgggttcacgccattctcctgcctcaacctccagagcagctgggactacaggttcctgccaccacgcccggctaattctttgtatttttagtagagacggggtttcaccgtgttagccaggatggtctagatctcctgacctcgttatttgcctgcctgggcctcccaaaatgctgggattacaggcgtragccatcacacccagccggcacagtgcttttaagcatatggttgatccatatggtggcagtgtcattacttaayttttttaatagttgaataatattccattgtgtggatatataacatttaaaaaatcaattkataaattgatggacatttggattatttccactttttggctattgtaaataatggtgcaataaacatttatgtac

SEQ ID NO: 52 - DNA, 524 bp, Homo sapiens
agcatttttagcrtacaacaacatccaagtggattactatgaatgcctagacctctatggcaaacagtctcttcgtggcctgtgctgaggactacatcagtctcctgcaattatcatctacactgaaaaacaaagaggacagaggcraagctagtggccctcaccatcccctgcaagctgattgcttcttactgcaagcacttgagcatcttcctgagagctttcttgggcaatgggaaccaggcttggcccaatcacaggcaggtgaaaagtatgaggaaatggagaaggcattgtccaaggagcagtcttcaaccttcaccccgcaagtgagacaactctgaataagatgtgttctacactctcttccaaaggtccccagttggatggagctctagctgctcatgtgataagctgcctattaatacacaaaagattgcctttcctccttgctytgtcttcctgctgctmtcctactaatgtttcctgggattgcctccaaataaaccacttgaactcacata

SEQ ID NO: 53 - DNA, 900 bp, Homo sapiens
agcatttttagcrtacaacaacatccaagtggattactatgaatgcctagacctctatggcaaacaggaaggaaagaagaaagggaggaagaaaggaaaacagggagcytagagaaaggagggagaaaataagaaaaaaaaaagagagagagaaaggtagaacctggattctcttcgtggcctgtgctgaggactacatcagtctcctgcaattatcatctacactgaaaaacaaagaggacagaggcraagctagtggccctcaccatcccctgcaagctgattgcttcttactgcaagcacttgagcatcttcctgagagctttcttgggcaatgggaaccaggcttggcccaatcacaggcaggtgaaaagtatgaggaaatggagaaggcattgtccaaggagcagtcttcaaccttcaccccgcaaacggaatctcactctgtctcccaggctggagtgcagtggtgcgatctcggctcaccgcaatctccgcctctcgggttcacgccattctcctgcctcaacctccagagcagctgggactacaggttcctgccaccacgcccggctaattctttgtatttttagtagagacggggtttcaccgtgttagccaggatggtctagatctcctgacctcgttatttgcctgcctgggcctcccaaaatgctgggattacaggcgtragccatcacacccagccggcacagtgcttttaagcatatggttgatccatatggtggcagtgtcattacttaayttttttaatagttgaataatattccattgtgtggatatataacatttaaaaaatcaattkataaattgatggacatttggattatttccactttttggctattgtaaataatggtgcaataaacatttatgtac

SEQ ID NO: 54 - DNA, 760 bp, Homo sapiens
cagctcctgcaggtgggagtcgactcacctgcagcaggcactcggcacaactccgcaggaccggctcacctgcaccgggcactcagcacagcctccagcatgcagcgcctccccgctgccacccgggccaccctgatcctcagcctggcctttgcctccctccactcggcttgctcggcagaagcaagcagcagcaacagctcaascttgaccgctcaccacccagaccctgggaccctggagcagtgcctcaacgtggacttctgcccacaagcagcccggtgctgccgcacaggagtggacgagtacggctggatcgcggcagctgttggctggagcctctggttcctcaccctcatcctgctctgtgtggacaaactgatgaagctgactccagatgagcccaaggacttgcaagcgtgagacccaggctcggtgcacaaaatggtgatcgccaccaatttgtggctaatggggaaggggagtaaggctaacatggtttctattatttaagtcattttcacctttaagcttcagttacttttacaagggaaagaagaaagagcgggagaaccaaataaggcaagccagtgctgcccttgcatgtcactcccaagggsccctgggctgtgcccaggtaactcctctctcaagatagtccctctgtaatgtatcctgttttaacctttcttctaggcaccaagggaggtgcacaagaaactatragacttagtctcatcatcaacattttcagaagcaa

SEQ ID NO: 55 - DNA, 1309 bp, Homo sapiens
actgcagccgaaccctggtccctcctccacaatgtggcttctcctcactctctccttcctgctggcatccacagcagcccaggatggtgacaagttgctggaaggtgacgagtgtgcaccccactcccagccatggcaagtggctctctacgagcgtggacgctttaactgtggcgcttccctcatctccccacactgggtgctgtctgcggcmcactgccaaagccgcttcatgagagtgcgcctgggagagcacaacctgcgcaagcgcgatggcccagagcaactacggaccacgtctcgggtcattccacacccgcgctacgaagcgcgcagccaccgcaacgacatcatgttgctgcgcctagtccagcccgcacgcctgaacccccaggtgcgccccgcggtgctayccacgcgttgcccccaccygggggaggcctgtgtggtgtctggctggggcctggtgtcccacaacgagcctgggaccgctgggagcccccggtcacaagtgagtytcccagatacgttgcattgtgccaacatcagcattatctcggacacatcttgtgacaagagctacccagggcgcctgacaaacaccatggtgtgtgcaggcgcggagggcagaggcgcagaatcctgtgagggtgactctgggggacccctggtctgtgggggcatcctgcagggcattgtgtcctggggtgacgtcccttgtgacaacaccaccaagcctggtgtctataccaaagtctgccactacttggagtggatcagggaaaccatgaagaggaactgactattctagcctatctcctgtgcccctgactgagcagaagcccccacagctggccagcagccccgcctgacatggaacagaacggagccatcccccaagaccctgtccaaggcccagatgttagccaaggacttgtcccacctgaggacaaagctggcgctcaaggtcacctgtttaatgccaagataacaaagcgctgatccaagttgctctgtaggaatttctgtgacttttttctggggtcaaagagaaaccccragacactgtacactgttccttttcacccaccaccccgatccctaggtgaggagaagcrgcttgaagcagggctccattcattcaacacacatgaccacccgtgtgatcttgaacaagaggcccaatctcacttcgcyttggtttccttatctgtaaaatgagaccatcttattgctgacttcmaagggctgttgtgaggattaaatgagatgattcgtctgaactgattaaaatcgtgtctggcactga

SEQ ID NO: 56 - DNA, 1281 bp, Homo sapiens
actgcagccgaaccctggtccctcctccacaatgtggcttctcctcactctctccttcctgctggcatccacagcagcccaggatggtgacaagttgctggaaggtgacgagtgtgcaccccactcccagccatggcaagtggctctctacgagcgtggacgctttaactgtggcgcttccctcatctccccacactgggtgctgtctgcggcmcactgccaaagccgcttcatgagagtgcgcctgggagagcacaacctgcgcaagcgcgatggcccagagcaactacggaccacgtctcgggtcattccacacccgcgctacgaagcgcgcagccaccgcaacgacatcatgttgctgcgcctagtccagcccgcacgcctgaacccccaggtgcgccccgcggtgctayccacgcgttgcccccaccygggggaggcctgtgtggtgtctggctggggcctggttccactgtcttccccagtgagtytcccagatacgttgcattgtgccaacatcagcattatctcggacacatcttgtgacaagagctacccagggcgcctgacaaacaccatggtgtgtgcaggcgcggagggcagaggcgcagaatcctgtgagggtgactctgggggacccctggtctgtgggggcatcctgcagggcattgtgtcctggggtgacgtcccttgtgacaacaccaccaagcctggtgtctataccaaagtctgccactacttggagtggatcagggaaaccatgaagaggaactgactattctagcctatctcctgtgcccctgactgagcagaagcccccacagctggccagcagccccgcctgacatggaacagaacggagccatcccccaagaccctgtccaaggcccagatgttagccaaggacttgtcccacctgaggacaaagctggcgctcaaggtcacctgtttaatgccaagataacaaagcgctgatccaagttgctctgtaggaatttctgtgacttttttctggggtcaaagagaaaccccragacactgtacactgttccttttcacccaccaccccgatccctaggtgaggagaagcrgcttgaagcagggctccattcattcaacacacatgaccacccgtgtgatcttgaacaagaggcccaatctcacttcgcyttggtttccttatctgtaaaatgagaccatcttattgctgacttcmaagggctgttgtgaggattaaatgagatgattcgtctgaactgattaaaatcgtgtctggcactg

SEQ ID NO: 57 - DNA, 1191 bp, Homo sapiens
actgcagccgaaccctggtccctcctccacaatgtggcttctcctcactctctccttcctgctggcatccacagcagcccaggatggtgacaagttgctggaaggtgacgagtgtgcaccccactcccagccatggcaagtggctctctacgagcgtggacgctttaactgtggcgcttccctcatctccccacactgggtgctgtctgcggcmcactgccaaagccgcttcatgagagtgcgcctgggagagcacaacctgcgcaagcgcgatggcccagagcaactacggaccacgtctcgggtcattccacacccgcgctacgaagcgcgcagccaccgcaacgacatcatgttgctgcgcctagtccagcccgcacgcctgaacccccagtgagtytcccagatacgttgcattgtgccaacatcagcattatctcggacacatcttgtgacaagagctacccagggcgcctgacaaacaccatggtgtgtgcaggcgcggagggcagaggcgcagaatcctgtgagggtgactctgggggacccctggtctgtgggggcatcctgcagggcattgtgtcctggggtgacgtcccttgtgacaacaccaccaagcctggtgtctataccaaagtctgccactacttggagtggatcagggaaaccatgaagaggaactgactattctagcctatctcctgtgcccctgactgagcagaagcccccacagctggccagcagccccgcctgacatggaacagaacggagccatcccccaagaccctgtccaaggcccagatgttagccaaggacttgtcccacctgaggacaaagctggcgctcaaggtcacctgtttaatgccaagataacaaagcgctgatccaagttgctctgtaggaatttctgtgacttttttctggggtcaaagagaaaccccragacactgtacactgttccttttcacccaccaccccgatccctaggtgaggagaagcrgcttgaagcagggctccattcattcaacacacatgaccacccgtgtgatcttgaacaagaggcccaatctcacttcgcyttggtttccttatctgtaaaatgagaccatcttattgctgacttcmaagggctgttgtgaggattaaatgagatgattcgtctgaactgattaaaatcgtgtctggcactga

SEQ ID NO: 58 - DNA, 1172 bp, Homo sapiens
actgcagccgaaccctggtccctcctccacaatgtggcttctcctcactctctccttcctgctggcatccacagcagcccaggatggtgacaagttgctggaaggtgacgagtgtgcaccccactcccagccatggcaagtggctctctacgagcgtggacgctttaactgtggcgcttccctcatctccccacactgggtgctgtctgcggcmcactgccaaagccgcttcatgagagtgcgcctgggagagcacaacctgcgcaagcgcgatggcccagagcaactacggaccacgtctcgggtcattccacacccgcgctacgaagcgcgcagccaccgcaacgacatcatgttgctgcgcctagtccagcccgcacgcctgaacccccaggtgcgccccgcggtgctayccacgcgttgcccccaccygggggaggcctgtgtggtgtctggctggggcctggtgtcccacaacgagcctgggaccgctgggagcccccggtcacaagggtgactctgggggacccctggtctgtgggggcatcctgcagggcattgtgtcctggggtgacgtcccttgtgacaacaccaccaagcctggtgtctataccaaagtctgccactacttggagtggatcagggaaaccatgaagaggaactgactattctagcctatctcctgtgcccctgactgagcagaagcccccacagctggccagcagccccgcctgacatggaacagaacggagccatcccccaagaccctgtccaaggcccagatgttagccaaggacttgtcccacctgaggacaaagctggcgctcaaggtcacctgtttaatgccaagataacaaagcgctgatccaagttgctctgtaggaatttctgtgacttttttctggggtcaaagagaaaccccragacactgtacactgttccttttcacccaccaccccgatccctaggtgaggagaagcrgcttgaagcagggctccattcattcaacacacatgaccacccgtgtgatcttgaacaagaggcccaatctcacttcgcyttggtttccttatctgtaaaatgagaccatcttattgctgacttcmaagggctgttgtgaggattaaatgagatgattcgtctgaactgattaaaatcgtgtctggcactga

SEQ ID NO: 59 - DNA, 1054 bp, Homo sapiens
actgcagccgaaccctggtccctcctccacaatgtggcttctcctcactctctccttcctgctggcatccacagcagcccaggatggtgacaagttgctggaaggtgacgagtgtgcaccccactcccagccatggcaagtggctctctacgagcgtggacgctttaactgtggcgcttccctcatctccccacactgggtgctgtctgcggcmcactgccaaagccgcttcatgagagtgcgcctgggagagcacaacctgcgcaagcgcgatggcccagagcaactacggaccacgtctcgggtcattccacacccgcgctacgaagcgcgcagccaccgcaacgacatcatgttgctgcgcctagtccagcccgcacgcctgaacccccagggtgactctgggggacccctggtctgtgggggcatcctgcagggcattgtgtcctggggtgacgtcccttgtgacaacaccaccaagcctggtgtctataccaaagtctgccactacttggagtggatcagggaaaccatgaagaggaactgactattctagcctatctcctgtgcccctgactgagcagaagcccccacagctggccagcagccccgcctgacatggaacagaacggagccatcccccaagaccctgtccaaggcccagatgttagccaaggacttgtcccacctgaggacaaagctggcgctcaaggtcacctgtttaatgccaagataacaaagcgctgatccaagttgctctgtaggaatttctgtgacttttttctggggtcaaagagaaaccccragacactgtacactgttccttttcacccaccaccccgatccctaggtgaggagaagcrgcttgaagcagggctccattcattcaacacacatgaccacccgtgtgatcttgaacaagaggcccaatctcacttcgcyttggtttccttatctgtaaaatgagaccatcttattgctgacttcmaagggctgttgtgaggattaaatgagatgattcgtctgaactgattaaaatcgtgtctggcactga

SEQ ID NO: 60 - DNA, 1764 bp, Homo sapiens
atgagagtggtcattcgggtttgctttggaggtccagagaaaatgcaagtccaacttccaggcacagaccagttgcycgcagcaggcttcctcccattggtctcagaccaaggaagaccttgtgcgatccagggagcagagcaagagagcagctccttctcgcaccatcctgcatcaggcaacacactgcagctggcttcccacctgactgaagccttctcctgttctggcagccatgggccgctccagctggggatgctcatccttgcaagcagccatccacgcacaaagggcacagaggggaatggtgtcakgaaacaagactggggggaaaagggagaaggcctgctttctagtcgagaaaagcggagaccgtctgaaactctacttgctccaacagaaagcagtgccccagcaaaygaacaacaacagcgctcacctgaaacagtttcaccttcatttttagaggagaggaacacaataggagggcgtattactccacgggttttaaccctagcccttgatgctaccaggtgtgcacatcttccccatgtgactagccagccgccccactactccaaagaatgtgaatgcttcaagaccaccaaccaccaaacaacagctgaaagaacgccctccctgatagggctcagcagcttatttctatcagagttaagtggtctagcaccttcccsgctaaaaactgaacgcccgttcacaggcatagcttttaattctccacatttcagagatggagggaggggcagaagaataaaacccccacctcctccggccgtagacaccggggggagttctcgctccccgcatccccgcgcttccctactaacccccacccgacaccaccaaaacaaaagctatcagattgcaaaagacagcgaatgtggagcgacactgcttattaactacgtacaaaggaagtgcggggcggcagaagagagggcgacacgacgccgaccacaacaaaaccaaggccagggctccgcgctcgcaaaacacaacaccctccccgcgccgccgcagaccctggcgctgaaaccacagcgtacgacacctctcgccagggacgggcgtctaggtgtccccgtgaggcggcgactacaccccgcgctgcgagcacgtgtgtcggaatgcacgtcggctccgaccacacacccaccaacgcacactcggatgcggccctagtacccctccatcccccggcccgggagaaactgggagaccatcccagagccctctgaactggggacccagtggcgctccccggaagagacaagctgaggaagactcccggcctcgcacttcccggggggctgcccagagagcgcttcccctcaccccaccgcccagcccygggacgccgggggcaggtaacccaacgaggagcgggccaaagtgacgggcaaggccaggaacccgaggagcccgaggggcaaaagcacgttgggcgacgggaggcagcgacgggcgcttggagacgtgtcctggggcttcggggcctctccgcagggcacctsccccctcgagggcaactcgcaccccgcgggccgggcggctgcccgctccccactgcccggtcagccccagcagcggagacgcggtgcggcccagggtgctgtcgctgctgcctgcgcgccgcagggggatcagcgctgtgtgcggagaggctcktgcgcayggaaggggcgaggtgcgggtcgcggggcccgggaaccgcggagcccgccccggcaccaacttccctac

SEQ ID NO: 61 - DNA, 1062 bp, Homo sapiens
gcgccgccgcggaccacctaaaatggccgacggaagaacggcgcgtcccggtcacgtgacgcgagagcgcgcccttcgcgcgtccccccacccctatccccctagttttttttttttccctttcctcctcggtcccgccctctcgctaccctttataccttcctctcacgctccgcgttgcacagccttgggggcctttaaaaggaaccggaagtgtcgtgagctaagacagtcgcgcggggaccatcgagaacaaggartgctgtttcgaagtagcggctagaggggccccctgcctccgcccccgcccttccgaggattcctggagtccactcacccytccccaccactccagtagcggcgggagcagcagcgttaggccggggtgtggctgcacctctgcgaaggctgtcgtgccccgtgcagctgcggcgttcgggtgggggaggggaggctcacaccctgcggcggcttaagcctggatttacgcactggaggagggaattagccctgagawgtcagccctgtgcccctggcgctgtccacccggacgcccgcggagcgccaggcgccgcagcggaccgcgcgcgcactgattgccgcagctactctccctgccgtcgccgcccgggaccgggtgacattgaggttttcgtctatcgccgctgggccgatagggcttctttttaagatttggctttccaagtaagatttttgtttgcctgcttttctcctggaatttttttgtttttggtcgaagaagcagctcccactttgcagttgtgtcagccaatcacgacagcttcccagacttccgtgcaagtgcctgctttgaggccaaggtggccataaatggcagctcctcaggctcctccacaatctctggtttcttatgtttctccatgagctcagctttttcatcaactccaatgcttcaagccgaagtcattagtgaatgttctacaatccttcagctgcagctccagaccttcactcctccagcttctcctacatccatctaaccctcaattcctacattaaatctctttattccagaatact

SEQ ID NO: 62 - DNA, 925 bp, Homo sapiens
atcctcacaggacccccagccaggggaaacttcccagcttccagcgggaagtgcygcttccccaaattgggcagcacctggggatgcctctagatgcataatcacctcagaggtcctgagccagagtccagagattctttctgagattctggcaaggccccggggtactgatggaggactgggaagagcacctcagagaggcctcgttgcaacctctgccatcttccgaggacatggctacagagccacagctggcatggtttgctggaagaaccaagagctgaaaggcagatttaccaggtggtgccccccccagggacccctgagaagaccagtgtgcatgaaccagagactggacagtgcctctgttaccatcaccgtgtggtatcatgaagagggttgctttctctatggatcaaggcaaaatgagtaccttaagtctagagccccagggaaaaacaaaagcaaaacacaaaagaacactgcttctaatggcatcatagcaagsagtttatctagaaagatgatgccagcagtcacctcttttccaggaagacagaaacaaaaaccgttctcctcgagaggccaacagtgtagaagccccttttccagaactttccaaggagtaggtgaacttctttgtaagtgtatcagcacaggggagagtggtgctccatgttccaaggaagaaaagcaacccacagctcctcctgcccgtgcagcagatgaccagaaagacgagaaagggaaacaaactcccaytcatggtgaaatgaagaaccaaggatcatctgagcaaagactcaaggaccatttgaacaaagacatccacatctataccacagatgacttggcatctatggaggagtggagtttggccaccatccctgctgaagaccacagtgagtccaaagaacatggttaa

SEQ ID NO: 63 - DNA, 318 bp, Homo sapiens
atgaagtgtcaaatgtcctttgtgtttcttagcccagtttatgagaggagacctggagaaataaaggtttcaatcaacaccacaatggtgtatgactttcttcacagcatgaggaaatgtagtgacattaaccaaacacacaaagccatctcaagcctaaaaatgcctattactccaatcctgtactcacttgctccctgccagagayaacayaaagagatgagtatacacactcaggaaaacttygcccgggccttcsagcrtcagcaattccacaaggccatcaacttggggtatgaactatccgtgaaggactag

SEQ ID NO: 64 - DNA, 1027 bp, Homo sapiens
agtaacaaacccagcttgtactacccatgcctacaacagcccagatgtggcactcaaggttgaaaaggggccayaacttggtaacgggacacacatgaccccatgcaggagaacagccagggccatgaggaaagggactttggtgcacaatggcagcaggaagcagtgcagggagggggaccagcattgtcacacagcttccaattcaggttttggtggccacaacaatggggcctcaagggccacaaataaagagccgctcacggggagcagggcagagagactggcacatgtggaccccagcacaccccagaactctgccaccccacacagrgcagatggggcagccatcagaaatgcggggcatggacccaaacgccagcatagcaccacacccccaaatgaggggggaacaggctcagcaccccaagacatccaagcaccatggcttttacagctagatgcactctccacaagccaacaggagtcgcgagcgcctttactgtattactttctggaccctctgagacacacacagtctactactaacgccagcacatgctgtgatgggattcccccagcagtgcccacacgatgctgggcccacacagcctgtgacacctgctggccacttcgctcccayggagaagcctctttcacgttcatatgtgctggggatctgtgtctgctgagagctgagctgcctgcctgggatcagccagatggagcaggcagagayggcacggaccacactccagaggaacacgccatggatggctrtaytgttgatgtttcagatatccaaaaaccatttctagggaaaatcatctctgacagctggcatgaaatcaatgtccacctgaaaagtacctttgagggccatctaataaaggccaaaactatgsccacgaatccaaaactgcggaagtctagactggcgtttctaaataagctagagaaaaatactcaatgtgcgacatcttgtaaactcacagctgctgaagaacagtgtctttcagtcacatag

SEQ ID NO: 65 - DNA, 639 bp, Homo sapiens
atggccaccctgcccaatatccctgcctgctgttcaactcatgtcctgcccgcccacctccagcacctgyaagtcctactccacccagaggatgtcytggctgctcatatttcaacgaaatcaaacaacatagacaaagaaagcaaaaggaaagaaatgctgacagagacccacaaaggccgctgtgatttggtaaagcaccaagcctgccagcacgtcctatggaaaggtaactacaatgcagaagtagaaaaatacatgaactcctgtttacaagaagcttacagtatagttgggataaatcatacccacaaaatacaactgttattgaatgcaattggatacattggtctgaagctcagcagagcagagtgggcaagagatgcaaatgtgggggtcatccgcttaatgctggtattaggctcccctggccaagatgctggagcctcagattgccttctgagccctcagaaagcagtgctcctcttaaagaggtcaggggaccccactctgccagaaaaatctctggccagggctatggctgcagagtttctggcatctaaggtaacatctgagctgagctcaaggaaaagaatgaaccagcatgcagagagcctacagaacgagcaatgtgacagc

SEQ ID NO: 66 - DNA, 1056 bp, Homo sapiens
catggcaacaggggcacttytcacccagccacattttttctcattggaatcccaggtctggaagacgtccatatgtgaatctccctgcayttctgctctgtttaccttttggctttgctgggaaatgctaccattctgytagtcatcaaggcagaacagaccctccgggagcccatgttctactttctggccatcctttccacaattgatttggccctttctacaacctctgtgcctcgtacgctgggtatcttctggtttgatgytcatgagattaactttggagcttgtgtggcccagatgtttctgatccatgccttcactggcatggaggctgaggtcctggtggccatggcctttgaccrttacgtggccatctgcaatccacttcactacacaaacatcttgacatsccgggtgctggtgggcatcactatgtgcattktaattcgtccagttctgtttacactcccgataatctatctcatctaccgtttaccattttgtcaggctcatataatagcccaytcctactatgagcacatgggcattgcaaaattgtcctgtggaaacatccgtgtcaatgctatctatgggctctttgtggtctccctctttctcctgaacctggtccttattgttatctcatatgtttacattctctgtgctgtcttctgcctcccatcacatgatgctcggctaaaagccctaagcacatgtggctctcatgttggggwcatctgtgttttctatatcccgtcggtcttctctttccttactcattgatttggacacaacattccacattacatkcacattcttgttgctactctctatttggttatcccaccctctctcaaccccatcatttgtggggtgaggacyaaatggaaacgagagcgagtgctctatgtacttactaaaaaataagattctgaccatgttcttttactaaggactttgatctcccctatgaagaytgatacgttcttgctttaaggaatatctcctaatccttaccttattcctgtcaatttgcagtacaagttggtttgt

SEQ ID NO: 67 - DNA, 1014 bp, Homo sapiens
atgggtgttcacaatttgttcacggtgactcagtttatccttatagggctctcttacttctccaatgagcactaccttctttttgtggcccttgccattatctgtcaggtgttcttggtgcgaagtggagacattctcttggccattgggactgtgattaagttgcacactactcatgtattattttttggcaaatgtgtccatcttagacatattgtgttcatcagctactatacctaagatgcctaagattctctagactgaggatcacagcatttcttttgttaggtgagctttgcagccctatttcctagtggcctgggctgggaagaaagctttctcactgttacggcttatgactggtgtgtggtcacatgtttctccctttgttacatcctgatcatgaacaaattggctctgtccagctggtttatgggacctgagcagctgggtttctaaatttcctcctcctccacgtagtgtctaccctctgcctgtctttctgcaagcctgatcgagttaaccagtattactgtgatatctcaccratgggggccctgttgtgccagtccatgcacctggcaaacatgcttgttttagtggaatcagttatcttggggatcagtgcttttctggctgcctttaacttttacatatacatcatctccactatcctaaagatccagtgtgtagagtggagtgcaaagtgcttctctacatgcacttcccacctccttacggtctgtttgttctatggcatattgacatttacctacatttactccttctccagtcaacactcacatgtctaaggcaagcccagatctagccacagacaggctcatctctatgctatacagagttattaccctgatgtttaacttcatcactgacaacctgagaaacacagaggtaaaaggagcctcagaaaggttttatgtcattgaacatgtttatagaaaccataatttaaaatataatagaatgactcaatgttccacttttaattcatag

SEQ ID NO: 68 - DNA, 4431 bp, Homo sapiens
gcgggccccgcggcccgcgcgctsggcgccctgctygccgggcagaggggaaggcggcggccggctggggatgggcggcccggctgcgccgaggggcgccgggaggctccgcgcgctgctgctggcgctggtggtcgcggggatccccgcgggcgcctacaacctygacccgcagcgccccgtgcacttccagggccccgctgactcgttcttcggctacgcagttctggagcatttccacgacaacacgcgctgggtccttgtgggcgcaccaaaggcagattccaaatacagcccttcagtgaagtctcctggggctgtgtttaagtgccgtgttcacaccaaccctgaccggagatgcacmgaactggacatggctcgagggaagaatcggggcacgtcctgcggaaagacctgccgggaagaccgcgatgatgagtggatgggggtgagcctggcccgrmagcccaaggctgatggccgtgtgttggcctgtgctcatcgctggaagaacatctactatgaagccgaccacatcctaccccatggcttctgctacatcatcccctccaacctccaggccaaaggcaggacrctgatcccttgctatgaagagtataagaagaagtacggagaggaacayggctcctgccaggctgggatagcgggcttcttcacygaggagctggtggtgatgggtgctccagggtcattttattgggctggaaccatcaaagtgctgaaccttacggacaacacctatttaaaactgaacgacgaagtgatcatgaacaggcggtacacctacctgggctacgcagtgaccgctggccacttctctcacccgtccaccattgatgtggtaggaggtgccccacaggacaaaggcatcggcaaggtttatattttcagagctgaccgaagatcaggcaccttaattaagatctttcaagcatcaggtaaaaagatgggctcttacttcggctcctccttgtgcgcagttgacctgaatggggacggcctctctgacctgctggtgggggcccccatgttttctgagatcagggatgagggacaggtcactgtctacatcaacagaggaaatggagccctcgaggagcagctggctctgactggggatggtgcctacaatgcgcactttggagagagcattgccagcctggacgatctggacaatgatgggttcccagatgtggccattggtgcacccaaggaggatgacttcgcaggggcggtctatatctatcatggtgatgccrgtgggatagtccctcagtactcaatgaaactgtctgggcagaagataaatccagtgctccggatgtttggtcagtccatatcgggaggcattgatatggatggaaatggctatcctgatgtcactgttggagccttcatgtccgacagcgtggttcttctcagagcaaggcctgtcattacggtggatgtctccatcttcctcccgggctccatcaacatcacagcgcctcagtgtcacgacggacagcagcctgtgaactgcctgaacgtcaccacctgcttcagcttccatggcaaacacgttccagragagattggcctgaattatgttctgatggctgacgtggccaaaaaggagaagggccagatgcccagggtctactttgtgctgctgggagagaccatgggtcaggtcacagagaagctgcagctgacttacatggaggagacrtgtcgtcactaygtggcccatgtgaagcrgagggtgcaggacgtcatcagcccgatcgtgtttgaagcagcctacagcctcagtgagcatgtgactggagaggaggagagggaactgccgcctctgacaccagttctccgctggaaaaagggacaaaagattgcccaaaagaatcagactgtttttgaaaggaattgccgttcagaggactgtgccgcagacctgcagcttcrgggtaaactgctgctctccagtatggatgagaaaaccctgtatctagctttgggggctgtgaagaacatctccctaaacatctctatctccaacctcggagatgatgcctatgatgccaacgtgtccttcaatgttyccgggagctcytcttcatcaacatgtggcagmaggaggagatgggcatctcctgtgagctgctggaatcggacttcctcaaatgcagcgtgggatttcctttcatgaggtcaaagtcaaagtatgaattcagcgtgatctttgatacaagccacctgtctggggaagaggaagttctcagcttcattgttactgctcagagtggcaacacggagcgctctgaatccctgcatgacaacaccctcgtgctgatggtgccactgatgcacgaggtggacacgtccatcaccggaatcatgtctccaacctcctttgtatatggcgagtccgtggacgcagccaacttcattcagctggatgacctggagtgtcactttcagcccatcaatatcacccttcaggtctacaacactggcccaagcacccttccagggtcatctgtcagcatctctttccctaatcgactctcatctggtggtgcagagatgtttcatgtccaggaaatggtggtgggccaagagaagggaaactgctctttccagaaaaacccaactccctgcatcatccctcaagaacaagaaaatatcttccacacaatatttgcttttttcacaaagtctggaagaaaagtcttggactgtgaaaaaccaggaatttcttgcctaacagcacactgtaactttagtgctcttgctaaagaagaaagtcgtactatagacatttacatgctgctgaacacagaaatactgaaaaaggacagttcgtctgtcatccagttcatgtcccgcgccaaggtgaaggtggatcctgccctaagggtggtggaaatagctcatgggaacccagaagaggtgacggtggtcttcgaggccctgcacaatctggagccccgtggctacgtcgtggggtggatcatcgccatcagtttgttggtgggaatcctcatcttcctgctgctggccgtgctgctctggaagatgggcttctttcgccgaaggtacaaagaaattatcgaagctgagaagaaccggaaagagaatgaagacagttgggactgggtccagaaaaaccagtgagctgccacaccagtcacatgacctgatcactagcctgtcatccttggtctttgtatcttccatatttggaagaaaaaaatcttctccagatttttcggaggccccactgatgctgttctcttcttcattctatcaagcccaggtgccagyctgaggcagccacttcggccaggtcacacgaccggggccagcaccacttcctttaaaratgaactctgaactttggagagtgagctacagagccgagcaatatttatggatgcaacacgcatggtcaaccctcaggggaaaactgttacctaaagtatttttataaatataagccttttatactgattatgtcttttatatttgtatcgatgttttattatttctattaaatagttatataattcactcaagcactgatatctggcctaaaatcttggaagtacatgtccatgaatacaaattttaaaggatgaaaatcttaccgtactttggaacttgctgtttaaaaagacagatgaaataagttgaagaaacctcatgtaatgaatccaccaggctggcagtggtgcatataaactgtgggtgtggcaagaccccgaagacatttcacatctttatcgcctcgatcaagtgtggagtcacatgctaatgtgtgctaaagaactgtaagtgttttttcatatgtacttttcattggaagattcccaacaagaatttggatggaaaacctgatccctagcaagaagtctgctctgtatcacctttatatagcagacatgtcaccctgcttctacacagatgatggatgaaagcttggagcaatgccatgtggtcatctggtaaacctcagaatggcgtctcatcctggacatcctgcatcagagttcacacaccacaaggactaaatccttgtcccctaagcaaagaattgggtctgaatgctgtgagggattgcctttttgtggtaattttcattgagagatcttcatttcccctaccaccctggctgtcccagctagtggtgattgcagattccttcccagagaggacatttaaccgttttaaaaaaaatgtcttagattgggttcccaagaagcagtccctgaaacaaggatttgtgtgcaagtaacttattaaggaagtattcccaggggataccagtaagagagtgggggaagcaggacaaggaaggagacaaagccaggcaaatgtttgtcatttcagggagagctccatgaagtttagcctcagcctgatcagggg

SEQ ID NO: 69 - DNA, 924 bp, Homo sapiens
atgaatcacagcgttgtaactgagttcattattctgggcctcaccaaaaagcctgaactccagggaattatcttcctcttttttctcattgtctatcttgtggcttttctcggcaacatgctcatcatcattgccawaatctataacaacaccttgcatacgcccatgtatgttttccttctgacactggctgttgtggacatcatctgcacaacaagcatcataccgaagatgctggggaccatgctaacatcagaaaataccakttcwtatgcaggctgcatgtcccagctcttcttgttcacatggtctctgggagctgagatggttctcttyaccaccatggcctatgaccgctatgtggccatttgtttccctcttcattacagtactrttatgaaccaccatatgtgtgtagccttgctcagcatggtcatggctattgcagtcaccaattcctgggtgcacacagctcttatcatgaggttgactttctgtgggccaaacaccattgaccacttcttctgtgagatacccccattgctggctttgtcctgtagccctstaagaatcaaygaggtgatggtgtatgttgctgatattaccctggccataggggactttattcttacctgcatctcctatggttttatcattgttgctattctcygtatccgcacagtagaaggcaakaggaaggccttctcaacatgctcatctcatctcacagtggtgaccctttactattctcctgtaatctacacctatatccgccctgcttccagctatacatttgaaagagacaaggtggtagctgcactctatactcttgtgactcccacattaaacccgatggtgtacagcttccagaatagggagatgcaggcaggaattaggaaggtgtttgcatttctgaaacactag

SEQ ID NO: 70 - DNA, 1635 bp, Homo sapiens
atgcctgagaaagtgcacgtggagcggaggagctggaaacttgcctttcaggcagatattgcccaactcatgtctctcgtcatcaataccttctattctaacaaggagattttcyttcaggggttgatctaatgtttctgatgcattggacaagatttcctgtaagagcctgacaaacccttccaagttggacaatggtaaagagctggaagttaacatcatccccaacccatggtaatggttcccaaattaggagatcagccttggtcatgtcaatgcctgtgtctaccaaagtcagggtgtattccctggtactaaaggatttatggaggctcttcaggctagtgtagatatctccatgattgggcagtttggtgctgcctttttttctgcctaccttgtggcagagaaagtagttgtgatcacaaagcacaacaatgatgaagagtatgcctgggagtctctgctgggggttccttcactgtatgtgctgaccatggagagcccattggcaggggtaccaaagtgaccctccaccttaaagaagaccagacagagtacttagaagagaggaaggtcaaagaagtagtgaagagcacttacagttcatagcctatcccattaccctttctttggagaaggaaagagaggagaaaatcagtgatgataggcagaggaagagaaagagtgttacaccatctcaaaacaaacaaaaaaaggcagatagagatgatgagaaaaagtccaagattgaagaagatgtgggtgggttcagatgaagaggaggacaatggtaaggataagaaaaagaaaaccaacaagatcaaggagaaatcattgattgggaagaactaaacaagatcaagaacatttggatcagaaactctgatgacattcacccaggaggagtatagagaattctacaagagcttcaccagtgactaggaagaccatttggcagtcaagcacttctctgtagaaggttggttggaattcagagcattgctgttcatcccttgtttggctccctttgacttctttgagaatgagaagaaaaaaagaacaacaaactctgtgtccatcatgtgttcatcatggacagccatgatgatataagagtatctcaactttaatccttggtgtggttgacttgggatctgcccctgaacatctctcgagaaatgctccaacagagcagaatcttaacagtcattcacagaaacattgttaagaagtgccttgagctgttctctgaggtggcagaagacaaggagaattgcaagaaattcaatgaggccttatctaaaaatctaaagcttgggccagttgtggtatctcacctcttgacgcatgtcctagctgctgcagtatcacacttcccagtctggagatgagatgacatctgtgtcaaaatatgtctcctgcatgaaagaggcacagaaatccatctatagcatcactggtgagagcaaagagcaggtggccagctctgtgtttgtggagcaagtgcagaagtggggctttgaattagtatatacagccaagcccactgatgagtactgcgtgcagcagctcaaggagtttgatgggaaaagcctggtctcagttaccaaggagagtctgcagctgcctgag

SEQ ID NO: 71 - DNA, 4106 bp, Homo sapiens
gagaactagttttgttccgtgccctctggactggaaccttttggagagaacccccggcaggaccaaccccgcacccgccagcaccgcggcaatgtccagcaatagttttccttacaatgagcagtccggaggaggggaggcgacggagctgggtcaggaggcgacctcaaccatttccccctcgggggccttcggcctctttagcagcgatttgaagaagaatgaagatctaaagcaaatgttagagagcaacaaagattctgctaaactggatgctatgaagcggattgttgggatgattgcaaaagggaaaaatgcatctgaactgtttcctgctgttgtgaagaatgtggccagtaaaaatattgagatcaagaagttggtatatgtttacctggttcgatatgctgaagaacagcaggatcttgymctcctgtccataagcacttttcagcgagctctgaaggacccaaaccaactaattcgtgcaagcgctttgagagttctgtcaagtattagagtgccaattattgtacctatcatgatgcttgctattaaggaagcttctgctgacttatcaccatatgttaggaagaatgcagcccatgcaatacaaaaattatacagccttgatccagagcagaaggaaatgttaattgaagtaattgaaaaacttctgaaagataaaagcacattggtagctggcagtgttgtgatggcttttgaagaagtatgcccggacagaatagatctgattcataaaaattaccgcaagctrtgtaacttactagtggatgttgaagagtgggggcaggttgtcataatccacatgctaactcgatatgctcggacacagtttgtcagcccttggaaagagggtgatgaattagaagacaatggaaagaatttctacgaatctgatgatgatcagaaggaaaagactgacaaaaagaagaagccgtatactatggatccagatcatagactcttaattagaaatacaaagcctttgcttcagagcaggaatgctgcggtggttatggcagttgctcagctgtattggcacatatcaccaaaatctgaagctggcataatttctaaatcactagtgcgtttacttcgtagcaayagggaggtgcagtatattgtcctacaaaatatagcaactatgtcaattcaacttgaaattttgacaaacttggcaaatgaagccaacatatcaactcttcttcgagaatttcagacctatgtgaaaagccaggataaacaatttgcagcagccactattcagactataggcagatgtgcaaccaacatcttggaagtcactgacacgtgcctcaatggcttggtctgtctgctgtccaacagggatgaaatagttgttgctgaaagtgtggttgttataaagaaattactgcaaatgcaacctgcacaacatggtgaaattattaaacatatggccaaactcctggacagtatcactgttcctgttgctagagcaagtattctttggctaattggagaaaactgtgaaygagttcctaaaattgcccctgatgttttgaggaagatggctaaaagcttcactagtgargatgatctggtaaaactgcagatattaaatctgggagcaaaattgtatttaaccaactccaaacagacaaaattgcttacccagtacatattaaatctyggcaagtatgatcaaaactacgacatcagagaccgtacaagatttattaggcagcktattgttccgaatgwaaagagtggagctttaagtaaatatgccaaaaaaatattcctagcacaaaagcctgcaccactgcttgagtctccttttaaagatagagatcatttccagcttggcaccttatctcatactctcaacattaaagctactgggtacctggaattatctaattggccagaggtggcgcccgacccatcagttcgaaatgtagaagtaatagagttggcaaaagaatggaccccagcaggaaaagcaaagcaagagaattctgcyaagaagttttattctgaatctgaggaagaggaggactcttctgatagtagcagtgacagtgskagtgaatctggaagtgaaagtggagaacaaggygaaagtggggaggaaggagacagcaatgaggacagcagtgaggactcctccagtgagcaggacagtgagagtggacgggagtcaggcctagaaaacaaaagaacagccaagaggaactcaaaagccaaaggaaaaagygattctgagatggggagaaggaaaatgaaaaatctaaaacttcagattcttcaaatgacgaatctagttcaatwgaagacagttcttccgattctgaatcagagtcagaacctgaaagtgaatctgaatccagaagagtcactaaggagaaagaaaagaaaacaaagcaagatagaactcctcttaccaaagatgtttcacttctagatctggatgattttaacccagtatccactccagttgcacttcccacaccagctctttctccaagtttgatggctgatcttgaaggtttacacttgtcaacttcctcttcagtcatcagtgtcagtactcctgcatttgtaccaacgaaaactcacgtgctgcttcatcgaatgagtggaaaaggactagctgcccattatttctttccaagacagccttgcatttttggtgataagatggtctctatacaaataacactgaataacactactgatcgaaagatagaaaatatccacataggggaaaaaaaacttcctataggcatgaaaatgcatgtttttaatccaatagactctcttgagcctgagggatccattacagtttcaatgggtattgacttttgtgattctactcagactgccygtttccagttgtgtaccaaggatgattgcttcaatgttaatattcagccacctgttggagaactgcttttacctgtggccatgtcagagaaagattttaagaaagagcaaggagtgctaacaggaatgaatgaaacttctgctgtaatcattgctgcaccacagaatttcactccctctgtgatctttcagaaggttgtaaatgtagccaatgtaggtgcagtcccttctggccaggataatatacacaggtttgcagctaaaactgtgcacagtgggtcattgatgctagtcacagtggaactgaaggaaggctctacagcccagrttatcataaacactgagaaaactgtgattggctctgttctgctgcgggaactgaagcctgtcctgtctcaggggtaacctgcttacatctggactttagaatctggcacacaacaaaartgcctggcatccactactgctgcctttcatttataataatagcccttccatctggcagtgggggtagaatacactcttgacattcttgtctcctgctttagaatgctagtgtgtatctatcatgtatgcaatactttccccctttttgytttgctaaccaaagagcatatattttactgtcagttgtctcaactcttgaatccatgtggcgttttctctgtcctgctgcttcttttggcctcctcgttttccttctctttttcgacaatggtagacatgaatgagatatttaaagttcattggaaatcttcttccctacagcagtaagcaaaaattagcaaagagatagtctaaatggcctctcagcttkgtatgtgaaaatgagatcacatactttttaaatccaaatacaaaagcatagtctctgcaagattttgttctttgaatttcttgatattgtaattgattattgataactgtcatcatgaaattatctctcaataataagataaataaactagcatatgaatcatatttgtctttgcatttttaatgagaaactattaataatcctgaagttcatatgctaaagttttcttattttaaagcaagtattttgagtgttacattatgcagagaagcaatgtggtttagttagcgaaagaaaaaccacttccaaaccaagtaaattttctacttatagtttactccaaggaaaaaaaattggtgtatttaataacaaaaacaaaaatcttcatattgcaaaa

SEQ ID NO: 72 - DNA, 4110 bp, Homo sapiens
gagaactagttttgttccgtgccctctggactggaaccttttggagagaacccccggcaggaccaaccccgcacccgccagcaccgcggcaatgtccagcaatagttttccttacaatgagcagtccggaggaggggaggcgacggagctgggtcaggaggcgacctcaaccatttccccctcgggggccttcggcctctttagcagcgatttgaagaagaatgaagatctaaagcaaatgttagagagcaacaaagattctgctaaactggatgctatgaagcggattgttgggatgattgcaaaagggaaaaatgcatctgaactgtttcctgctgttgtgaagaatgtggccagtaaaaatattgagatcaagaagttggtatatgtttacctggttcgatatgctgaagaacagcaggatcttgymctcctgtccataagcacttttcagcgagctctgaaggacccaaaccaactaattcgtgcaagcgctttgagagttctgtcaagtattagagtgccaattattgtacctatcatgatgcttgctattaaggaagcttctgctgacttatcaccatatgttaggaagaatgcagcccatgcaatacaaaaattatacagccttgatccagagcagaaggaaatgttaattgaagtaattgaaaaacttctgaaagataaaagcacattggtagctggcagtgttgtgatggcttttgaagaagtatgcccggacagaatagatctgattcataaaaattaccgcaagctrtgtaacttactagtggatgttgaagagtgggggcaggttgtcataatccacatgctaactcgatatgctcggacacagtttgtcagcccttggaaagagggtgatgaattagaagacaatggaaagaatttctacgaatctgatgatgatcagaaggaaaagactgacaaaaagaagaagccgtatactatggatccagatcatagactcttaattagaaatacaaagcctttgcttcagagcaggaatgctgcggtggttatggcagttgctcagctgtattggcacatatcaccaaaatctgaagctggcataatttctaaatcactagtgcgtttacttcgtagcaayagggaggtgcagtatattgtcctacaaaatatagcaactatgtcaattcaaagagcttgaaattttgacaaacttggcaaatgaagccaacatatcaactcttcttcgagaatttcagacctatgtgaaaagccaggataaacaatttgcagcagccactattcagactataggcagatgtgcaaccaacatcttggaagtcactgacacgtgcctcaatggcttggtctgtctgctgtccaacagggatgaaatagttgttgctgaaagtgtggttgttataaagaaattactgcaaatgcaacctgcacaacatggtgaaattattaaacatatggccaaactcctggacagtatcactgttcctgttgctagagcaagtattctttggctaattggagaaaactgtgaaygagttcctaaaattgcccctgatgttttgaggaagatggctaaaagcttcactagtgargatgatctggtaaaactgcagatattaaatctgggagcaaaattgtatttaaccaactccaaacagacaaaattgcttacccagtacatattaaatctyggcaagtatgatcaaaactacgacatcagagaccgtacaagatttattaggcagcktattgttccgaatgwaaagagtggagctttaagtaaatatgccaaaaaaatattcctagcacaaaagcctgcaccactgcttgagtctccttttaaagatagagatcatttccagcttggcaccttatctcatactctcaacattaaagctactgggtacctggaattatctaattggccagaggtggcgcccgacccatcagttcgaaatgtagaagtaatagagttggcaaaagaatggaccccagcaggaaaagcaaagcaagagaattctgcyaagaagttttattctgaatctgaggaagaggaggactcttctgatagtagcagtgacagtgskagtgaatctggaagtgaaagtggagaacaaggygaaagtggggaggaaggagacagcaatgaggacagcagtgaggactcctccagtgagcaggacagtgagagtggacgggagtcaggcctagaaaacaaaagaacagccaagaggaactcaaaagccaaaggaaaaagygattctgagatggggagaaggaaaatgaaaaatctaaaacttcagattcttcaaatgacgaatctagttcaatwgaagacagttcttccgattctgaatcagagtcagaacctgaaagtgaatctgaatccagaagagtcactaaggagaaagaaaagaaaacaaagcaagatagaactcctcttaccaaagatgtttcacttctagatctggatgattttaacccagtatccactccagttgcacttcccacaccagctctttctccaagtttgatggctgatcttgaaggtttacacttgtcaacttcctcttcagtcatcagtgtcagtactcctgcatttgtaccaacgaaaactcacgtgctgcttcatcgaatgagtggaaaaggactagctgcccattatttctttccaagacagccttgcatttttggtgataagatggtctctatacaaataacactgaataacactactgatcgaaagatagaaaatatccacataggggaaaaaaaacttcctataggcatgaaaatgcatgtttttaatccaatagactctcttgagcctgagggatccattacagtttcaatgggtattgacttttgtgattctactcagactgccygtttccagttgtgtaccaaggatgattgcttcaatgttaatattcagccacctgttggagaactgcttttacctgtggccatgtcagagaaagattttaagaaagagcaaggagtgctaacaggaatgaatgaaacttctgctgtaatcattgctgcaccacagaatttcactccctctgtgatctttcagaaggttgtaaatgtagccaatgtaggtgcagtcccttctggccaggataatatacacaggtttgcagctaaaactgtgcacagtgggtcattgatgctagtcacagtggaactgaaggaaggctctacagcccagrttatcataaacactgagaaaactgtgattggctctgttctgctgcgggaactgaagcctgtcctgtctcaggggtaacctgcttacatctggactttagaatctggcacacaacaaaartgcctggcatccactactgctgcctttcatttataataatagcccttccatctggcagtgggggtagaatacactcttgacattcttgtctcctgctttagaatgctagtgtgtatctatcatgtatgcaatactttccccctttttgytttgctaaccaaagagcatatattttactgtcagttgtctcaactcttgaatccatgtggcgttttctctgtcctgctgcttcttttggcctcctcgttttccttctctttttcgacaatggtagacatgaatgagatatttaaagttcattggaaatcttcttccctacagcagtaagcaaaaattagcaaagagatagtctaaatggcctctcagcttkgtatgtgaaaatgagatcacatactttttaaatccaaatacaaaagcatagtctctgcaagattttgttctttgaatttcttgatattgtaattgattattgataactgtcatcatgaaattatctctcaataataagataaataaactagcatatgaatcatatttgtctttgcatttttaatgagaaactattaataatcctgaagttcatatgctaaagttttcttattttaaagcaagtattttgagtgttacattatgcagagaagcaatgtggtttagttagcgaaagaaaaaccacttccaaaccaagtaaattttctacttatagtttactccaaggaaaaaaaattggtgtatttaataacaaaaacaaaaatcttcatattgcaaaa

SEQ ID NO: 73 - DNA, 2018 bp, Homo sapiens
ttcctgtaacattcacgaagtatgaggaagtgggtttctccttgtttgatgtgagtggttttgcttgttgcatgggttccctgtgctttgtaacttgcatgaacacaaccaggtttctcaacaatgatttgtctgctgactcttttcagagatagtgraggaaaaaaaatgtattaaaaccccaaattatctaggtttccaagtaggaaaaataaagatacatatgacttttattattattcgatgataattagctttatataatgtggcatccttcataaaaattcactatgttgtgaggcaaacagatttctcactatcatccagtgtaccctgctcaccttctcactcctagcaccgttcttctggtctgtgttgaaaagggtatcattcatgtggtttcagtttagaagagtccctcagagctttgcctcaagcaatttcaaattgtagtgataccttaaatcatgtattcaggatgccttctttagcatttagaaccccaactagacttatactttgactaaagtcagaggcagaccaatttagggaacagattttgttctttgcttttatgatacatttgtaactcacagctgttagcatgacctcacatcactgcgtaggacccggaaatcacatctcctggtcaggtcacgarraagaacacaggcttgactattgtccagaagttactttccccttgactaaaggtttccccttagggtacacattgctatttaactttgcctcctacccttttttgttaccttccaaaatcaagacacttttaagaaacaaagatagttttctgaacattctgtgtcctgcctgtctcctgttgattcgcagatgtaatatcgagtattcatcaactggtctcmatttcctgaacacattcactgtatccctcattgtmaccgttatccccctgcttcaaaatgtgccagttccacttggtaataacgttgggaaaatgcaggtttatgaatgatgtggacttttagaggatcaaatcaataaattggattttttattttttgagggcagctgccctcactgttttaaataaagaatcttacataagaatgttgacaacattcacagtaagccattggcagaaaattgatctgcatgtcctagaccaatgattacaaktctgtgggtctgtggtttarggggcccakcccatcattccttttccccttggcactcatgagagagaygccaagttcagtgtggatttttcttggtgctctatggagaaatggagtctgtgtgcttactgaagagtcccaaaaascagagaccattttcatttactgccatcataaatattctccaccattcaagatgcctgtgtacacggctatttgggaaacttaagtgttggaggaggcaggggctgaaggtgtcaaaacctcctcagtaggataacccctttctcccctttggaccatctgccatctttcatgagtgtttcccatggtgtttttgcatccagagttgacaacaactcaattttgccttgaatttactcagtcttataaattaaaaatgtgcattttatataaagatgcattttatataaaaatgcacacctttaatctctatatggcagcatatacatatatatatataaaatgcacacttttaatctctatatggcagcatttttgaggctttatatctgcccgtgtaccctcaactgcctcctttttgcagagaacgatccccacaggaactggtctaagaacactgtctgcacatgattgatgcttaaaatccaatataccaccacatatcaaaggttgggattttcagagtccttcttgatttctgagctgaaaccttaacaaatagggaatttggcagggaagacacctgggtttttaattcagaaccctatttatatactgttaaaatttgaggtactrtagtttatataaaagtcggatgttaagatattatatttcagtactaggagcttctttgcagtcattaacatgacaaattaa

SEQ ID NO: 74 - DNA, 2142 bp, Homo sapiens
cccagccctgcgtgagcactgagtgcccgccccctcctccttgcaggtctggccgtgggcctgggcttcggggcactggcagaggtcgccaagaagagcctgcgctccgaggacccctcagggaagaaggccgtgctgggttccagtcctttcctgtccgaggccaatgcagagcggatcgtgcgcacgctctgcaaggtgcgtggtgcggcactcaagctgggccagatgctgagcatccaggatgatgcctttatcaacccccacctggctaagatcttcgagcgggtgcggcagagcgcggacttcatgccactgaagcagatgatgaaaactctcaacaacgacctgggccccaactggcgggacaagttggaatacttcgaggagcggcccttcgcygccgcatccattgggcaggtgcacttggcccgaatgaagggcggccgcgaggtggccatgaagatccagtaccctggcgtggcccagagcatcaacagtgatgtcaacaacctcatggccgtgttgaacatgagcaacatgcttccagaaggcctgttccccgagcacctgatcgacgtgctgaggcgggagctggccctggagtgtgactaccagcgagaggccgcctgtgcccgcaagttcagggacctgctgaagggccaccccttcttctatgtgcctgagattgtggatgagctctgcagcccacatgtgctgaccacagagctggtgtctggcttccccctggaccaggccgaagggctcagccaggagattcggaacgagatctgctacaacatcctggttctgtgcctgagggagctgttygagttccacttcatgcaaacagaccccaactggtccaacttcttctatgacccccagcagcacaaggtggctcttttggattttggggcaacgcgggaatatgacagatccttcaccgacctctacattcagatcatcagggctgctgccgacagggacagggagactgtgcgggcgaaatccatagagatgaagttcctcaccggctacgaggtcaaggtcatggaagacgcccacttggatgccatcctcatcctgggggaggccttcgcctcygatgagccttttgattttggcactcagagcaccaccgagaagatccacaacctgattccygtcatgctgaggcaccgtctcgtcccccsacccgaggaaacctactccctgcacaggaagatggggggctccttcctcatctgctccaagctgaaggcccgcttcccctgcaaggccatgttcgaggaggcctacagcaactactgcaagaggcaggcccagcagtagggctgcgggccacgcccaggccggctccgcgggaactctctccctcagacaggccaaaaaccagtagcgaggtcgtggtgatgctctttttaactcctttgcccaataaggggggtggctgcctggagccccgtagccagcgctttccacggtttctgttgctaaatggttgtagggtgagaagtgcaagaatgaagatgaagccccactgctcggtcagtctgcctccgtgtgtcctctgaaataagcagatgaagatgaaagggcaactttgttttcttctttttcctgatgtgaatgttaagcagaagggagagagtccttactcccttccaatctctgttcagtgcaaaacccagaaacatgaacagatacgattgtgggattttatcatctgtgtagtaggtgtgtgtatgtgtttctagagtgagatttgtgttttstgcccttttcctctccagccratgggctggagctgggagaggtgctgagctaacagtgccaacaagtgctccttaagcctgcgaggcccaggcctgtggggctggttctcacctttgacagctgaatgttcctaaagaactgctgccccacagtgagggtgggagcagcggaacagggaatgccagacacaggctcgctgctgctggaaggcggggtgggacttccttcctctgtccrgagaggcacaggtgtcaccagttccagccaaaggctcctcacaggcgctgtgaatttttgtacaagtcttgtaattatcgaatcaacaacttgtttcaatttaataaaratgctcatgggaagtgc

SEQ ID NO: 75 - DNA, 3703 bp, Homo sapiens
tggcttatgccattgaatcttgttttaagagatccttccctaccctcaaggttttctaaatttttattttcataayaagatttttagttcatctgaartgtatttttatgattgtatttagtagggacctaattttgtttttctttgtaaccaggtgtcccagcactgtttactgaacagtctctcctttctcgctggtctgtagaactctcctgacatataccaagtttccataagtgggtggatgggttcctgagctctctactgttaatagaacttgctctctcgcaggccaatgcctcaccaggtgattgaagcagagaaacttaggtggtgaaaggagaagatggggcctgtcctgagagtttctgttcctgagatkctagaggcagaggtttccagaaccacaagacagacccaagagggctgtgttggcaaaacaaatggcagagtggagctggccagaggcatctgtgcgtggcgactccaagagagcacccgactccagatggcgacactgcaggatggagcggggcatgcctgcagacaggtgtcagagacrgggtcttgctgtattgcccaggctagatttgaactcctggcctgaagtaatcctcccaccttggcctcccaaagttctgggactacaggctggagtgcaatggtgcgatttggctcactgtggcctctgcctcccgggttcaagcgattctcctgcctcagcctcccataccagttcaactttttcagattccacgtgagggagtgacggggcaaatctgcgtgctgctggtggcggtgcctcccarggctgctcggcggggacgccgagggctgcacccgagctccatcccgtgttggctgcgcgccctccaaaaccccggctgtcagcgactgcgggcacctgcacgccgacgagaccggcgggcggacagcgactccgccctgaaggatggctgccatattgggagacaccatcatggtggctaaaggccttgtcaagctgacccaggcrgccrtggaaacccacctgcagcacttgggcatcggaggggagctgatcatggcrgccagggccctgcagtccacggctgtggagcagattggcatgttcttggggaaggtgcagggtcaggataaacatgaagaatattttgctgagaacttcggcggcccagaaggggagttccacttctcagtcccgcakgcagccggagcctccacagacttctcttcagcctccgctcccgaccagtcagcgcccccatccctgggtcatgcccacagcgagggcccagctcctgcctacgtggccagtggaccctttagagaagccgggttccccggccaggcctcctcccctctgggcagggccaacgggaggctctttgcaaaccccagagactcattctctgccatgggctttcagcgaaggttcttccaccaggaccaatcccctgttgggggcctcacagccgaggacattgagaaggcccggcaggctaaggctcgccccgagaacaagcagcacaaacagacgctcagcgagcatgcccgggagcggaaggtgcctgtgacgaggattggccggctggccaacttcggaggtctggccgtgggcctgggcttcggggcactggcagaggtcgccaagaagagcctgcgctccgaggacccctcagggaagaaggccgtgctgggttccagtcctttcctgtccgaggccaatgcagagcggatcgtgcgcacgctctgcaaggtgcgtggtgcggcactcaagctgggccagatgctgagcatccaggatgatgcctttatcaacccccacctggctaagatcttcgagcgggtgcggcagagcgcggacttcatgccactgaagcagatgatgaaaactctcaacaacgacctgggccccaactggcgggacaagttggaatacttcgaggagcggcccttcgcygccgcatccattgggcaggtgcacttggcccgaatgaagggcggccgcgaggtggccatgaagatccagtaccctggcgtggcccagagcatcaacagtgatgtcaacaacctcatggccgtgttgaacatgagcaacatgcttccagaaggcctgttccccgagcacctgatcgacgtgctgaggcgggagctggccctggagtgtgactaccagcgagaggccgcctgtgcccgcaagttcagggacctgctgaagggccaccccttcttctatgtgcctgagattgtggatgagctctgcagcccacatgtgctgaccacagagctggtgtctggcttccccctggaccaggccgaagggctcagccaggagattcggaacgagatctgctacaacatcctggttctgtgcctgagggagctgttygagttccacttcatgcaaacagaccccaactggtccaacttcttctatgacccccagcagcacaaggtggctcttttggattttggggcaacgcgggaatatgacagatccttcaccgacctctacattcagatcatcagggctgctgccgacagggacagggagactgtgcgggcgaaatccatagagatgaagttcctcaccggctacgaggtcaaggtcatggaagacgcccacttggatgccatcctcatcctgggggaggccttcgcctcygatgagccttttgattttggcactcagagcaccaccgagaagatccacaacctgattccygtcatgctgaggcaccgtctcgtcccccsacccgaggaaacctactccctgcacaggaagatggggggctccttcctcatctgctccaagctgaaggcccgcttcccctgcaaggccatgttcgaggaggcctacagcaactactgcaagaggcaggcccagcagtagggctgcgggccacgcccaggccggctccgcgggaactctctccctcagacaggccaaaaaccagtagcgaggtcgtggtgatgctctttttaactcctttgcccaataaggggggtggctgcctggagccccgtagccagcgctttccacggtttctgttgctaaatggttgtagggtgagaagtgcaagaatgaagatgaagccccactgctcggtcagtctgcctccgtgtgtcctctgaaataagcagatgaagatgaaagggcaactttgttttcttctttttcctgatgtgaatgttaagcagaagggagagagtccttactcccttccaatctctgttcagtgcaaaacccagaaacatgaacagatacgattgtgggattttatcatctgtgtagtaggtgtgtgtatgtgtttctagagtgagatttgtgttttstgcccttttcctctccagccratgggctggagctgggagaggtgctgagctaacagtgccaacaagtgctccttaagcctgcgaggcccaggcctgtggggctggttctcacctttgacagctgaatgttcctaaagaactgctgccccacagtgagggtgggagcagcggaacagggaatgccagacacaggctcgctgctgctggaaggcggggtgggacttccttcctctgtccrgagaggcacaggtgtcaccagttccagccaaaggctcctcacaggcgctgtgaatttttgtacaagtcttgtaattatcgaatcaacaacttgtttcaatttaataaaratgctcatgggaagtgc

SEQ ID NO: 76 - DNA, 2270 bp, Homo sapiens
tggcttatgccattgaatcttgttttaagagatccttccctaccctcaaggttttctaaatttttattttcataayaagatttttagttcatctgaartgtatttttatgattgtatttagtagggacctaattttgtttttctttgtaaccaggtgtcccagcactgtttactgaacagtctctcctttctcgctggtctgtagaactctcctgacatataccaagtttccataagtgggtggatgggttcctgagctctctactgttaatagaacttgctctctcgcaggccaatgcctcaccaggtgattgaagcagagaaacttaggtggtgaaaggagaagatggggcctgtcctgagagtttctgttcctgagatkctagaggcagaggtttccagaaccacaagacagacccaagagggctgtgttggcaaaacaaatggcagagtggagctggccagaggcatctgtgcgtggcgactccaagagagcacccgactccagatggcgacactgcaggatggagcggggcatgcctgcagacaggtgtcagagacrgggtcttgctgtattgcccaggctagatttgaactcctggcctgaagtaatcctcccaccttggcctcccaaagttctgggactacaggctggagtgcaatggtgcgatttggctcactgtggcctctgcctcccgggttcaagcgattctcctgcctcagcctcccataccagttcaactttttcagattccacgtgagggagtgacggggcaaatctgcgtgctgctggtggcggtgcctcccarggctgctcggcggggacgccgagggctgcacccgagctccatcccgtgttggctgcgcgccctccaaaaccccggctgtcagcgactgcgggcacctgcacgccgacgagaccggcgggcggacagcgactccgccctgaaggatggctgccatattgggagacaccatcatggtggctaaaggccttgtcaagctgacccaggcrgccrtggaaacccacctgcagcacttgggcatcggaggggagctgatcatggcrgccagggccctgcagtccacggctgtggagcagattggcatgttcttggggaaggtgcagggtcaggataaacatgaagaatattttgctgagaacttcggcggcccagaaggggagttccacttctcagtcccgcakgcagccggagcctccacagacttctcttcagcctccgctcccgaccagtcagcgcccccatccctgggtcatgcccacagcgagggcccagctcctgcctacgtggccagtggaccctttagagaagccgggttccccggccaggcctcctcccctctgggcagggccaacgggaggctctttgcaaaccccagagactcattctctgccatgggctttcagcgaaggttcttccaccaggaccaatcccctgttgggggcctcacagccgaggacattgagaaggcccggcaggctaaggctcgccccgagaacaagcagcacaaacagacgctcagcgagcatgcccgggagcggaaggtgcctgtgacgaggattggccggctggccaacttcggaggtccttgccagtggagagctgtgtgcctgaaagtggccagagaacagtttgaggggggtcctgatggagggtgatgagggggacacacctctgcctgcagaaggaggagctcaatgtggcccaccctacagctgtggcatctccggtaacctgtggatccacctgcccctctcgtgggcttgtctctggacttgcttcaggcagagaagaatccagacacagagagacattggtgaaggtctggccgtgggcctgggcttcggggcactggcagaggtcgccaagaagagcctgcgctccgaggacccctcagggaagaaggccgtgctgggttccagtcctttcctgtccgaggccaatgcagagcggatcgtgcgcacgctctgcaaggtgcgtggtgcggcactcaagctgggccagatgctgagcatccaggatgatgcctttatcaacccccacctggctaagatcttcgagcgggtgcggcagagcgcggacttcatgccactgaagcagatgatgaaaactctcaacaacgacctgggccccaactggcgggacaagttggaatacttcgaggagcggcccttcgcygccgcatccattgggcaggtgcacttggcccgaatgaagggcggccgcgaggtggccatgaagatccag

SEQ ID NO: 77 - DNA, 649 bp, Homo sapiens
ggagcgcgtggcgggcgtcagcgcggtggccagcgcgcagaggcgggcgcggaggcggctagaaggtgaccgcggatcccagcttcctgcagccagggtcaggataaacatgaagaatattttgctgagaacttcggcggcccagaaggggagttccacttctcagtcccgcakgcagccggagcctccacagacttctcttcagcctccgctcccgaccagtcagcgcccccatccctgggtcatgcccacagcgagggcccagctcctgcctacgtggccagtggaccctttagagaagccgggttccccggccaggcctcctcccctctgggcagggccaacgggaggctctttgcaaaccccagagactcattctctgccatgggctttcagcgaaggttcttccaccaggaccaatcccctgttgggggcctcacagccgaggacattgagaaggcccggcaggctaaggctcgccccgagaacaagcagcacaaacagacgctcagcgagcatgcccgggagcggaaggtgcctgtgacgaggattggccggctggccaacttcggaggtctggccgtgggcctgggcttcggggcactggcagaggtcgccaagaagagcctgcgctccgaggacccctcag

SEQ ID NO: 78 - DNA, 2878 bp, Homo sapiens
gggcgagttggtaaacagatccggagcgcgtggcgggcgtcagcgcggtggccagcgcgcagaggcgggcgcggaggcggctagaaggtgaccgcggatcccagcttcctgcagccagccctgaaggatggctgccatattgggagacaccatcatggtggctaaaggccttgtcaagctgacccaggcrgccrtggaaacccacctgcagcacttgggcatcggaggggagctgatcatggcrgccagggccctgcagtccacggctgtggagcagattggcatgttcttggggaaggtgcagggtcaggataaacatgaagaatattttgctgagaacttcggcggcccagaaggggagttccacttctcagtcccgcakgcagccggagcctccacagacttctcttcagcctccgctcccgaccagtcagcgcccccatccctgggtcatgcccacagcgagggcccagctcctgcctacgtggccagtggaccctttagagaagccgggttccccggccaggcctcctcccctctgggcagggccaacgggaggctctttgcaaaccccagagactcattctctgccatgggctttcagcgaaggttcttccaccaggaccaatcccctgttgggggcctcacagccgaggacattgagaaggcccggcaggctaaggctcgccccgagaacaagcagcacaaacagacgctcagcgagcatgcccgggagcggaaggtgcctgtgacgaggattggccggctggccaacttcggaggtctggccgtgggcctgggcttcggggcactggcagaggtcgccaagaagagcctgcgctccgaggacccctcagggaagaaggccgtgctgggttccagtcctttcctgtccgaggccaatgcagagcggatcgtgcgcacgctctgcaaggtgcgtggtgcggcactcaagctgggccagatgctgagcatccaggatgatgcctttatcaacccccacctggctaagatcttcgagcgggtgcggcagagcgcggacttcatgccactgaagcagatgatgaaaactctcaacaacgacctgggccccaactggcgggacaagttggaatacttcgaggagcggcccttcgcygccgcatccattgggcaggtgcacttggcccgaatgaagggcggccgcgaggtggccatgaagatccagtaccctggcgtggcccagagcatcaacagtgatgtcaacaacctcatggccgtgttgaacatgagcaacatgcttccagaaggcctgttccccgagcacctgatcgacgtgctgaggcgggagctggccctggagtgtgactaccagcgagaggccgcctgtgcccgcaagttcagggacctgctgaagggccaccccttcttctatgtgcctgagattgtggatgagctctgcagcccacatgtgctgaccacagagctggtgtctggcttccccctggaccaggccgaagggctcagccaggagattcggaacgagatctgctacaacatcctggttctgtgcctgagggagctgttygagttccacttcatgcaaacagaccccaactggtccaacttcttctatgacccccagcagcacaaggtggctcttttggattttggggcaacgcgggaatatgacagatccttcaccgacctctacattcagatcatcagggctgctgccgacagggacagggagactgtgcgggcgaaatccatagagatgaagttcctcaccggctacgaggtcaaggtcatggaagacgcccacttggatgccatcctcatcctgggggaggccttcgcctcygatgagccttttgattttggcactcagagcaccaccgagaagatccacaacctgattccygtcatgctgaggcaccgtctcgtcccccsacccgaggaaacctactccctgcacaggaagatggggggctccttcctcatctgctccaagctgaaggcccgcttcccctgcaaggccatgttcgaggaggcctacagcaactactgcaagaggcaggcccagcagtagggctgcgggccacgcccaggccggctccgcgggaactctctccctcagacaggccaaaaaccagtagcgaggtcgtggtgatgctctttttaactcctttgcccaataaggggggtggctgcctggagccccgtagccagcgctttccacggtttctgttgctaaatggttgtagggtgagaagtgcaagaatgaagatgaagccccactgctcggtcagtctgcctccgtgtgtcctctgaaataagcagatgaagatgaaagggcaactttgttttcttctttttcctgatgtgaatgttaagcagaagggagagagtccttactcccttccaatctctgttcagtgcaaaacccagaaacatgaacagatacgattgtgggattttatcatctgtgtagtaggtgtgtgtatgtgtttctagagtgagatttgtgttttstgcccttttcctctccagccratgggctggagctgggagaggtgctgagctaacagtgccaacaagtgctccttaagcctgcgaggcccaggcctgtggggctggttctcacctttgacagctgaatgttcctaaagaactgctgccccacagtgagggtgggagcagcggaacagggaatgccagacacaggctcgctgctgctggaaggcggggtgggacttccttcctctgtccrgagaggcacaggtgtcaccagttccagccaaaggctcctcacaggcgctgtgaatttttgtacaagtcttgtaattatcgaatcaacaacttgtttcaatttaataaaratgctcatgggaagtgc

SEQ ID NO: 79 - DNA, 1451 bp, Homo sapiens
ccakcctttctttgcggaatcaccatggcggctgggaccctgtacacgtatcctgaaaactggagggccttcaaggctctcatcgctgctcagtacagcggggctcagrtccgcgtgctctccgcaccaccccacttccattttggccaaaccaaccgcaccyctgaatttctycgcaaatttcctgccggcaaggtcccagcatttgagggtgatgatggattctgtgtgtttgagagcaacgccattgcctactatgtgagcaatgaggagctgcggggaagtactccagaggcagcagccmaggtggtgcagtgggtgagctttgctgattccgatatagtgcccccagccagtacctgggtgttccccaccttgggcatcatgcaccacaacaaacaggccactgagaatgcaaaggaggaagtgaggcgaattctggggctgctggatgcttacttgaagacgaggacttttctggtgggcgaacgagtgacattggctgacatcacagttgtctgcaccctgttgtggctctataagcaggttctagagccttctttccgccrggcctttcscaataccaacygctggttcctcacctgcattaaccagccccagttccgggctgtcttgggsgaactgaaactgtgtgagaagatggcccagtttgatgctaaaaagtttgcagagacccagcctaaaaaggacacaccacggaaagagaagggttcacgggaagagaagcagaagccccaggctgagcggaaggaggagaaaaaggcggctgcccctgctcctgaggaggagatggatgaatgtgagcaggcgctggctgctgagcccaaggcyaaggaccccttcgctcacctgcccaagagtacctttgtgttggatgaatttaagcgcaagtactccaatgaggacacactctctgtggcactgccatatttctgggagcactttgataaggacggctggtccctgtggtactcagagtatcgcttccctgaagaactcactcagaccttcatgagctgcaatctcatsactggaatgttccagcgactggacaagctgaggaagaatgccttcgccagtgtcatcctttttggaaccaacaatagcagctccatttctggagtctgggtcttccgaggccaggagcttgcctttccgctgagtccagattggcaggtggactacgagtcatacacatggcggaaactggatcctggcagmgaggagacccagacgctggttcgagagtacttttcctgggagggggccttccagcatgtgggcaaagccttcaatcasggcaagatcttcaagtgaacatctcttgccatcacctagctgcctgcacctgcccttcagggagatgggggtcattaaaggaaactgaacattgaaaaaaaaaaaaaaaaaaaaaagactggatccaattg

SEQ ID NO: 80 - DNA, 1350 bp, Homo sapiens
ggcagggccagcacagatttcttatcggcttccacactgcggagctgcagccctcagaagtaagcaaggtttcctgccgggagaaaaggatttgaagcattccagccaaaatgacggacagaagccccttcgaaaccgacatgctcaccctgacccgctacgttatggaaaaggggcgtcaggccaaagggactggggagctcacccagctgctgaactcaatgctgacggccatcaaagccatctcctcggctgtgcgcaaggccggtctggcccacctgtatggaatcgcaggaagcgttaacgtgacgggagatgaggtgaagaaactggatgtgctatccaattccctggtgatcaacatgstccaatcctcctatagtacctgcgtcctggtctcagaagagaataaggacgccatcatcaccgccaaggagaagmgggggaaatacgtggtctgctttgacccactggatggatcttccaatattgactgcctggcctccatcggaaccatctttgccatctatagaaagacctcagaggatgagccttctgaaaaggatgccctgcagtgtggccgcaatattgtggccgcaggttatgcgctgtacggtagtgcaaccctggtggctctctccacagggcaaggcgtggacctcttcatgcttgacccggctcttggtgaatttgtcctggtggaaaaagatgtcaagattaagaagaaaggaaagatttacagcctgaatgagggctatgccaagtattttgatgcggccaccactgaatatgtgcagaaaaagaaattccctgaggatggcagtgctccctatggggccaggtatgtgggctccatggtggctgacgtgcaccgcaccctggtctatggaggaatcttcctgtacccagccaaccagaagagccctaagggcaagctccggctcctgtatgaatgcaatcccgtggcctacatcattgagcaggcaggaggcttggcgaccacggggacccagcctgtactggacgtgaagcccgaggcaattcaccagcgagtccccctcattctggggtcaccagaggatgtgcaggaatatctcacctgtgtgcagaaaaatcaggcaggcagctagcgagtttgaccccacatgccctcttctgtttgtcttgcaccttgtctraggaccctaaatgaacgataaacagagatggtagctatgagtatrcaaaaggtaaatccacttaatcacatacagaagagcaacaacaaactgcttacgacaggtttggaagccacaggcgattctatggtcaatgtgaaggactagaaataaaaacccacatgtggaaagt

SEQ ID NO: 81 - DNA, 855 bp, Homo sapiens
acatgcagagaaacaggtgaggagaagcagcgagagagaaggggccaggtataaaaagggcccacaagagaccagctcaaggatcccaaggcccractccccgaaccactcagggtcctgtggacagctcacctagcggcaatggctgcaggctcccggacgtccctgctcctggcttttggcctgctctgcctgtcctggcttcaagagggcagtgccttcccaaccattcccttatccaggctttttgacaacgctatgctccgcgcccgtcgcctgtaccagctggcatatgacacctatcaggagttraacccccagacctccctctgcttctcagagtctattccaacaccttccaacwgggtgaaaacgcagcagaaatctaacctagagctgctccgcatctccctgctgctcatccagtcatggctggagcccgtgcagctcctcaggagcgtcttcgccaacagcctggtgtatggcgcctcggacagcaacgtctatcgccacctgaaggacctagaggaaggcatccaaacgctgatgtggaggctggaagatggcagcccccggactgggcagatcttcaatcagtcctacagcaagtttgacacaaaatcgcacaacgatgacgcactgctcaagaactacgggctgctctactgcttcaggaaggacatggacaaggtcgagacattcctgcgcatcgtgcagtgccgctctgtggagggcagctgtggcttctagctgcccgggtggcatccctgtgacccctccccastgcctctcctggtsgtggaaggtgctactccagtgcccaccagccttgtcctaataaaattaagttgcatc

SEQ ID NO: 82 - DNA, 1354 bp, Homo sapiens
acagtgggagagaaggggccagggtataaaaagggcccacaagagaccrgctchagsatcccaaggcccractccccgmaccactcagggtcctgtggacagctcacctagcbgcaatggctrcaggctcccggacgtccctgctcctggcttttggcctgctctgcctgccctggcttcaagagggcagtgccttcccaaccattcccttatccaggctttttgacaacgctatgctcygcgcccatcgtctgcaccagctggcmtwtgacayctaccaggagtttracccccagacctccctctgtttctcagagtctattccgacaccctccaacagggaggaaacacaacagaaatycaacctaragctgctcygcatctscctgctgctcatccagtcgtggctggagcccgtgcagttcctcaggagtgtcttcgccaacagcctggtgtacggcgcctctgacwgcaacdtctatgrcctcctaaaggacctagaggaaggcatccaaacrctgatggggaggctggaagatggcagcccccggactgggcagatcttcaagcagacctacagcaagttygacacaaamtcrcacaacgatgacgcactrctcaagaactacgggctgctctactgcttcaggaaggacatggacaaggtcgagacattcctgcgcatcgtgcagtgccgctctgtggagggcagctgtggcttctagctgcccgggtggcatccctgtgacccctccccagtgcctctcctggccctggaagttgccactccagtgcccaccagccttgtcctaataaaattaagttgcatcattttgtctgactaggtgtccttctataatattatggggtggaggggggtggtatggagcaaggggcaagttgggaagacaacctgtagggcctgcggggtctattgggaaccaagctggagtgcagtggcacaatcttggctcactgcaatctccgcctcctgggttcaagcgattctcctgcctcagcctcccgagttgttgggattccaggcatgcatgaccaggctcagctaatttttgtttttttggtagagacggggtttcaccatattggccaggctggtctccaactcctaatctcaggtgatctacccaccttggcctcccaaattgctgggattacaggcgtgaaccactgctcccttccctgtccttctgattttaaaataactataccagcaggaggacgtccagacacagcataggctacctggccatgcccaaccggtgggacatttgagttgyttgcttggcactgtcctctcatgcgttgggtccactcagtagatgcctgttgaatt

SEQ ID NO: 83 - DNA, 1043 bp, Homo sapiens
ccccgmaccactcagggtcctgtggacagctcacctagcbgcaatggctrcaggtaagcgcccctaaaatccctttgggcacaaygtgtcctgaggggagaggcagcgacctgtagatgggacgggggcactaaccctcaggtttggggcttctgaatgtgagtatcgccatstaagcccagtatttgkccaatctcagaaagctcctggtccctggagggatggagagagaaaaacaaacagctcctggagcagggagagygctggcctcttgctctccggctccctctgttgccctctggtttctccccaggctcccggacgtccctgctcctggcttttggcctgctctgcctgccctggcttcaagagggcagtgccttcccaaccattcccttatccaggctttttgacaacgctatgctcygcgcccatcgtctgcaccagctggcmtwtgacayctaccaggagtttgaagaagcctatatcccaaaggaacagaagtattcattcctgcagracccccagacctccctctgtttctcagagtctattccgacaccctccaacagggaggaaacacaacagaaatycaacctaragctgctcygcatctscctgctgctcatccagtcgtggctggagcccgtgcagttcctcaggagtgtcttcgccaacagcctggtgtacggcgcctctgacwgcaacdtctatgrcctcctaaaggacctagaggaaggcatccaaacrctgatggggaggctggaagatggcagcccccggactgggcagatcttcaagcagacctacagcaagttygacacaaamtcrcacaacgatgacgcactrctcaagaactacgggctgctctactgcttcaggaaggacatggacaaggtcgagacattcctgcgcatcgtgcagtgccgctctgtggagggcagctgtggcttctagctgcccggtggcatcctgtgaccyctccccagtgcctctcctggccctgaaggtgccactccagtgcccaccagccttgtcctaat

SEQ ID NO: 84 - DNA, 437 bp, Homo sapiens
cagggagagagaactggccagggtataaaaagggcccacaagagaccggctctaggatcccaaggcccaactccccgaaccactcagggtcctgtggacagctcacctagtggcaatggctccagaggctggaagacggcagccgccggactgggcagatcctcaagcagacctacagcaagtttgacacaaactcrcacaaccatgacgcactgctcaagaactacgggctgctctactgcttcaggaaggacatggacaaggtcgagacattcctgcgcatggtgcagtgccgctctgtagagggtagctgtggcttctaggtgcccgcgtggcatcctgtgaccgacccctccccagtgcctctcctggccctggaaggtgccactccagtgcccatcagccttgtcctaataaaattaagttgtatcatttca

SEQ ID NO: 85 - DNA, 601 bp, Homo sapiens
aagcagggagagagaactggccagggtataaaaagggcccacaagagaccggctctaggatcccaaggcccaactccccgaaccactcagggtcctgtggacagctcacctagtggcaatggctccaggctcccggacgtccctgctcctggcttttgccctgctctgcctgccctggcttcaagaggctggtgccgtccaaaccgttccgttatccaggctttttgaccacgctatgctccaagcccatcgcgcgcaccagctggccattgacacctaccaggagtttaggctggaagacggcagccgccggactgggcagatcctcaagcagacctacagcaagtttgacacaaactcrcacaaccatgacgcactgctcaagaactacgggctgctctactgcttcaggaaggacatggacaaggtcgagacattcctgcgcatggtgcagtgccgctctgtagagggtagctgtggcttctaggtgcccgcgtggcatcctgtgaccgacccctccccagtgcctctcctggccctggaaggtgccactccagtgcccatcagccttgtcctaataaaattaagttgtatcatttca

SEQ ID NO: 86 - DNA, 838 bp, Homo sapiens
cagcatcccaaggcccgactccccgcaccactcagggtcctgtggacagctcacctagcggcaatggctgcaggctcccggacgtccctgctcctggcttttgccctgctctgcctgccctggcttcaagaggctggtgccgtccaaaccgttcccttatccaggctttttaaagaggctatgctccaagcccatcgcgcacaccagctggccattgacacctaccaggagtttataagctcttggggaatggaagcctatatcacaaaggaacagaagtattcattcctgcatgactcccagacctccttctgcttctcagactctattccgacatcctccaacatggaggaaacgcagcagaaatccaacttagagctgctccacatctccctgctgctcatcgagtcgcggctggagcccgtgcggttcctcaggagtaccttcaccaacaacctggtgtatgacacctcggacagygatgamtatcacctcctaaaggacctagaggaaggcatccaaatgctgatggggaggctggaagacggcagccacctgactgggcagaccctcaagcagacctacagcaagtttgacacaaactcgcacaaccatgacgcactgctcaagaactacgggctgctccactgcttcaggaaggacatggacaaggtcgagacattcctgcgcatggtgcagtgccgctctgtggagggcagctgtggcttctaggggcccgcgtggcatcctgtgaccyctccccagtgcctctcctggccctgaaggtgccactccagtgcccaccagccttgtcctaataaaattaagttgtattgtt

SEQ ID NO: 87 - DNA, 831 bp, Homo sapiens
ccccgmaccactcagggtcctgtggacagctcacctagcbgcaatggctrcaggtaagcgcccctaaaatccctttgggcacaaygtgtcctgaggggagaggcagcgacctgtagatgggacgggggcactaaccctcaggtttggggcttctgaatgtgagtatcgccatstaagcccagtatttgkccaatctcagaaagctcctggtccctggagggatggagagagaaaaacaaacagctcctggagcagggagagygctggcctcttgctctccggctccctctgttgccctctggtttctccccaggctcccggacgtccctgctcctggcttttggcctgctctgcctgccctggcttcaagagggcagtgccttcccaaccattcccttatccaggctttttgacaacgctatgctcygcgcccatcgtctgcaccagctggcmtwtgacayctaccaggagtttgaagaagcctatatcccaaaggaacagaagtattcattcctgcagracccccagacctccctctgtttctcagagtctattccgacaccctccaacagggaggaaacacaacagaaatycaacctaragctgctcygcatctscctgctgctcatccagtcgtggctggagcccgtgcacccccggactgggcagatcttcaagcagacctacagcaagttygacacaaamtcrcacaacgatgacgcactrctcaagaactacgggctgctctactgcttcaggaaggacatggacaaggtcgagacattcctgcgcatcgtgcagtgccgctctgtggagggcagctgtggcttc

SEQ ID NO: 88 - DNA, 1495 bp, Homo sapiens
atgatsccagcatgtgtgggaggagcttctaaattatccaytagcacaagcccgtcagtggccccatgcataaatgtrcacagaaacaggtggggkcaacagtgggagagaaggggccagggtataaaaagggcccacaagagaccrgctchagsatcccaaggcccractccccgmaccactcagggtcctgtggacagctcacctagcbgcaatggctrcaggctcccggacgtccctgctcctggcttttggcctgctctgcctgccctggcttcaagagggcagtgccttcccaaccattcccttatccaggctttttgacaacgctatgctcygcgcccatcgtctgcaccagctggcmtwtgacayctaccaggagtttgaagaagcctatatcccaaaggaacagaagtattcattcctgcagracccccagacctccctctgtttctcagagtctattccgacaccctccaacagggaggaaacacaacagaaatycaacctaragctgctcygcatctscctgctgctcatccagtcgtggctggagcccgtgcagttcctcaggagtgtcttcgccaacagcctggtgtacggcgcctctgacwgcaacdtctatgrcctcctaaaggacctagaggaaggcatccaaacrctgatgggggctggaagatggcagcccccggactgggcagatcttcaagcagacctacagcaagttygacacaaamtcrcacaacgatgacgcactrctcaagaactacgggctgctctactgcttcaggaaggacatggacaaggtcgagacattcctgcgcatcgtgcagtgccgctctgtggagggcagctgtggcttctagctgcccgggtggcatccctgtgacccctccccagtgcctctcctggccctggaagttgccactccagtgcccaccagccttgtcctaataaaattaagttgcatcattttgtctgactaggtgtccttctataatattatggggtggaggggggtggtatggagcaaggggcaagttgggaagacaacctgtagggcctgcggggtctattgggaaccaagctggagtgcagtggcacaatcttggctcactgcaatctccgcctcctgggttcaagcgattctcctgcctcagcctcccgagttgttgggattccaggcatgcatgaccaggctcagctaatttttgtttttttggtagagacggggtttcaccatattggccaggctggtctccaactcctaatctcaggtgatctacccaccttggcctcccaaattgctgggattacaggcgtgaaccactgctcccttccctgtccttctgattttaaaataactataccagcaggaggacgtccagacacagcataggctacctggccatgcccaaccggtgggacatttgagttgyttgcttggcactgtcctctcatgcgttgggtccactcagtagatgcctgttgaatt

SEQ ID NO: 89 - DNA, 1212 bp, Homo sapiens
atgatsccagcatgtgtgggaggagcttctaaattatccaytagcacaagcccgtcagtggccccatgcataaatgtrcacagaaacaggtggggkcaacagtgggagagaaggggccagggtataaaaagggcccacaagagaccrgctchagsatcccaaggcccractccccgmaccactcagggtcctgtggacagctcacctagcbgcaatggctrcaggctcccggacgtccctgctcctggcttttggcctgctctgcctgccctggcttcaagagggcagtgccttcccaaccattcccttatccaggctttttgacaacgctatgctcygcgcccatcgtctgcaccagctggcmtwtgacayctaccaggagtttaggctggaagatggcagcccccggactgggcagatcttcaagcagacctacagcaagttygacacaaamtcrcacaacgatgacgcactrctcaagaactacgggctgctctactgcttcaggaaggacatggacaaggtcgagacattcctgcgcatcgtgcagtgccgctctgtggagggcagctgtggcttctagctgcccgggtggcatccctgtgacccctccccagtgcctctcctggccctggaagttgccactccagtgcccaccagccttgtcctaataaaattaagttgcatcattttgtctgactaggtgtccttctataatattatggggtggaggggggtggtatggagcaaggggcaagttgggaagacaacctgtagggcctgcggggtctattgggaaccaagctggagtgcagtggcacaatcttggctcactgcaatctccgcctcctgggttcaagcgattctcctgcctcagcctcccgagttgttgggattccaggcatgcatgaccaggctcagctaatttttgtttttttggtagagacggggtttcaccatattggccaggctggtctccaactcctaatctcaggtgatctacccaccttggcctcccaaattgctgggattacaggcgtgaaccactgctcccttccctgtccttctgattttaaaataactataccagcaggaggacgtccagacacagcataggctacctggccatgcccaaccggtgggacatttgagttgyttgcttggcactgtcctctcatgcgttgggtccactcagtagatgcctgttgaatt

SEQ ID NO: 90 - DNA, 1750 bp, Homo sapiens
atgatsccagcatgtgtgggaggagcttctaaattatccaytagcacaagcccgtcagtggccccatgcataaatgtrcacagaaacaggtggggkcaacagtgggagagaaggggccagggtataaaaagggcccacaagagaccrgctchagsatcccaaggcccractccccgmaccactcagggtcctgtggacagctcacctagcbgcaatggctrcaggctcccggacgtccctgctcctggcttttggcctgctctgcctgccctggcttcaagagggcagtgccttcccaaccattcccttatccaggctttttgacaacgctatgctcygcgcccatcgtctgcaccagctggcmtwtgacayctaccaggagtttgaagaagcctatatcccaaaggaacagaagtattcattcctgcagracccccagacctccctctgtttctcagagtctattccgacaccctccaacagggaggaaacacaacagaaatycaacctaragctgctcygcatctscctgctgctcatccagtcgtggctggagcccgtgcagttcctcaggagtgtcttcgccaacagcctggtgtacggcgcctctgacwgcaacdtctatgrcctcctaaaggacctagaggaaggcatccaaacrctgatgggggtgagggtggcgccagggktccccaatcctggagccccactgactttgagagctgtrttagagaaacactgctgccctctttttagcagwcaggccctgacccaagagaactcaccttattcttcatttcccctcrtgaatcctccaggccwttctctacaccctgaaggggagggaggaaaatgaatgaatgagaaagggagggaacagtacccaagcgcttggcctctccttctcttccttcactttgcagaggctggaagatggcagcccccggactgggcagatcttcaagcagacctacagcaagttygacacaaamtcrcacaacgatgacgcactrctcaagaactacgggctgctctactgcttcaggaaggacatggacaaggtcgagacattcctgcgcatcgtgcagtgccgctctgtggagggcagctgtggcttctagctgcccgggtggcatccctgtgacccctccccagtgcctctcctggccctggaagttgccactccagtgcccaccagccttgtcctaataaaattaagttgcatcattttgtctgactaggtgtccttctataatattatggggtggaggggggtggtatggagcaaggggcaagttgggaagacaacctgtagggcctgcggggtctattgggaaccaagctggagtgcagtggcacaatcttggctcactgcaatctccgcctcctgggttcaagcgattctcctgcctcagcctcccgagttgttgggattccaggcatgcatgaccaggctcagctaatttttgtttttttggtagagacggggtttcaccatattggccaggctggtctccaactcctaatctcaggtgatctacccaccttggcctcccaaattgctgggattacaggcgtgaaccactgctcccttccctgtccttctgattttaaaataactataccagcaggaggacgtccagacacagcataggctacctggccatgcccaaccggtgggacatttgagttgyttgcttggcactgtcctctcatgcgttgggtccactcagtagatgcctgttgaatt

SEQ ID NO: 91 - DNA, 1377 bp, Homo sapiens
atgatsccagcatgtgtgggaggagcttctaaattatccaytagcacaagcccgtcagtggccccatgcataaatgtrcacagaaacaggtggggkcaacagtgggagagaaggggccagggtataaaaagggcccacaagagaccrgctchagsatcccaaggcccractccccgmaccactcagggtcctgtggacagctcacctagcbgcaatggctrcaggctcccggacgtccctgctcctggcttttggcctgctctgcctgccctggcttcaagagggcagtgccttcccaaccattcccttatccaggctttttgacaacgctatgctcygcgcccatcgtctgcaccagctggcmtwtgacayctaccaggagtttaacctaragctgctcygcatctscctgctgctcatccagtcgtggctggagcccgtgcagttcctcaggagtgtcttcgccaacagcctggtgtacggcgcctctgacwgcaacdtctatgrcctcctaaaggacctagaggaaggcatccaaacrctgatggggaggctggaagatggcagcccccggactgggcagatcttcaagcagacctacagcaagttygacacaaamtcrcacaacgatgacgcactrctcaagaactacgggctgctctactgcttcaggaaggacatggacaaggtcgagacattcctgcgcatcgtgcagtgccgctctgtggagggcagctgtggcttctagctgcccgggtggcatccctgtgacccctccccagtgcctctcctggccctggaagttgccactccagtgcccaccagccttgtcctaataaaattaagttgcatcattttgtctgactaggtgtccttctataatattatggggtggaggggggtggtatggagcaaggggcaagttgggaagacaacctgtagggcctgcggggtctattgggaaccaagctggagtgcagtggcacaatcttggctcactgcaatctccgcctcctgggttcaagcgattctcctgcctcagcctcccgagttgttgggattccaggcatgcatgaccaggctcagctaatttttgtttttttggtagagacggggtttcaccatattggccaggctggtctccaactcctaatctcaggtgatctacccaccttggcctcccaaattgctgggattacaggcgtgaaccactgctcccttccctgtccttctgattttaaaataactataccagcaggaggacgtccagacacagcataggctacctggccatgcccaaccggtgggacatttgagttgyttgcttggcactgtcctctcatgcgttgggtccactcagtagatgcctgttgaatt

SEQ ID NO: 92 - DNA, 1270 bp, Homo sapiens
cagcatcccaaggcccgactccccgcaccactcagggtcctgtggacagctcacctagcggcaatggctgcaggctcccggacgtccctgctcctggcttttgccctgctctgcctgccctggcttcaagaggctggtgccgtccaaaccgttcccttatccaggctttttaaagaggctatgctccaagcccatcgcgcacaccagctggccattgacacctaccaggagtttataagctcttggggaatggaagcctatatcacaaaggaacagaagtattcattcctgcatgactcccagacctccttctgcttctcagactctattccgacatcctccaacatggaggaaacgcagcagaaatccaacttagagctgctccacatctccctgctgctcatcgagtcgcggctggagcccgtgcggttcctcaggagtaccttcaccaacaacctggtgtatgacacctcggacagygatgamtatcacctcctaaaggacctagaggaaggcatccaaatgctgatggggaggctggaagacggcagccacctgactgggcagaccctcaagcagacctacagcaagtttgacacaaactcgcacaaccatgacgcactgctcaagaactacgggctgctccactgcttcaggaaggacatggacaaggtcgagacattcctgcgcatggtgcagtgccgctctgtggagggcagctgtggcttctaggggcccgcgtggcatcctgtgaccyctccccagtgcctctcctgcccgtgcggttcctcaggagtatgttcgccaacaacctggtgtatgacacctcggacagcgatgactatcacctcctaaaggacctagaggaaggcatccaaacgctgatggggaggctggaagacggcagccgccggactgggcagatcctcaagcagacctacagcaagtttgacacaaactcgcacaaccatgacgcactgctcaagaactacgggctgctctactgcttcaggaaggacatggacaaggtcgagacattcctgcgcatggtgcagtgccgctctgtrgagggyagctgtggcttctaggtgcccgmgtrgcatcctgtgacccctccccagtgcctctcctggccctgaaggtgccactccagtgcccaccagctgctcatcgagtcgtggctggagcccgtgcggttcctcaggagtatgttcgccaacaacctggtgtatgacacctcggacagcgatgactatcacctcctaaagga

SEQ ID NO: 93 - DNA, 889 bp, Homo sapiens
ggtcaagcagggagagagaactggccagggtataaaaagggcccacaagagaccggctctaggatcccaaggcccaactccccgaaccactcagggtcctgtggacagctcacctagtggcaatggctccaggctcccggacgtccctgctcctggcttttgccctgctctgcctgccctggcttcaagaggctggtgccgtccaaaccgttccgttatccaggctttttgaccacgctatgctccaagcccatcgcgcgcaccagctggccattgacacctaccaggagtttgaagaaacctatatcccaaaggaccagaagtattcattcctgcatgactcccagacctccttctgcttctcagactctattccgacaccctccaacatggaggaaacgcaacagaaatccaatctagagctgctccgcatctccctgctgctcatcgagtcgtggctggagcccgtgcggttcctcaggagtatgttcgccaacaacctggtgtatgacacctcggacagcgatgactatcacctcctaaaggacctagaggaaggcatccaaacgctgatggggaggctggaagacggcagccgccggactgggcagatcctcaagcagacctacagcaagtttgacacaaactcgcacaaccatgacgcactgctcaagaactacgggctgctctactgcttcaggaaggacatggacaaggtcgagacattcctgcgcatggtgcagtgccgctctgtrgagggyagctgtggcttctaggtgcccgmgtrgcatcctgtgacccctccccagtgcctctcctggccctgaaggtgccactccagtgcccaccagccttgtcctaataaaattaagttgtatcatttcatctg

SEQ ID NO: 94 - DNA, 588 bp, Homo sapiens
agcatcccaaggcccgactccccgcaccactcagggtcctgtggacagctcacctagcggcaatggctgcagactctattccgacatcctccaacatggaggaaacgcagcagaaatccaacttagagctgctccacatctccctgctgctcatcgagtcgcggctggagcccgtgcggttcctcaggagtaccttcaccaacaacctggtgtatgacacctcggacagygatgamtatcacctcctaaaggacctagaggaaggcatccaaatgctgatggggaggctggaagacggcagccacctgactgggcagaccctcaagcagacctacagcaagtttgacacaaactcgcacaaccatgacgcactgctcaagaactacgggctgctccactgcttcaggaaggacatggacaaggtcgagacattcctgcgcatggtgcagtgccgctctgtggagggcagctgtggcttctaggggcccgcgtggcatcctgtgaccyctccccagtgcctctcctggccctgaaggtgccactccagtgcccaccagccttgtcctaataaaattaagttgtattgtt

SEQ ID NO: 95 - DNA, 662 bp, Homo sapiens
cagcatcccaaggcccgactccccgcaccactcagggtcctgtggacagctcacctagcggcaatggctgcaggaagaagcctatatcacaaaggaacagaagtattcattcctgcatgactcccagacctccttctgcttctcagactctattccgacatcctccaacatggaggaaacgcagcagaaatccaacttagagctgctccacatctccctgctgctcatcgagtcgcggctggagcccgtgcggttcctcaggagtaccttcaccaacaacctggtgtatgacacctcggacagygatgamtatcacctcctaaaggacctagaggaaggcatccaaatgctgatggggaggctggaagacggcagccacctgactgggcagaccctcaagcagacctacagcaagtttgacacaaactcgcacaaccatgacgcactgctcaagaactacgggctgctccactgcttcaggaaggacatggacaaggtcgagacattcctgcgcatggtgcagtgccgctctgtggagggcagctgtggcttctaggggcccgcgtggcatcctgtgaccyctccccagtgcctctcctggccctgaaggtgccactccagtgcccaccagccttgtcctaataaaattaagttgtattgtt

SEQ ID NO: 96 - DNA, 1497 bp, Homo sapiens
atgatsccagcatgtgtgggaggagcttctaaattatccaytagcacaagcccgtcagtggccccatgcataaatgtrcacagaaacaggtggggkcaacagtgggagagaaggggccagggtataaaaagggcccacaagagaccrgctchagsatcccaaggcccractccccgmaccactcagggtcctgtggacagctcacctagcbgcaatggctrcaggctcccggacgtccctgctcctggcttttggcctgctctgcctgccctggcttcaagagggcagtgccttcccaaccattcccttatccaggctttttgacaacgctatgctcygcgcccatcgtctgcaccagctggcmtwtgacayctaccaggagtttgaagaagcctatatcccaaaggaacagaagtattcattcctgcagracccccagacctccctctgtttctcagagtctattccgacaccctccaacagggaggaaacacaacagaaatycaacctaragctgctcygcatctscctgctgctcatccagtcgtggctggagcccgtgcagttcctcaggagtgtcttcgccaacagcctggtgtacggcgcctctgacwgcaacdtctatgrcctcctaaaggacctagaggaaggcatccaaacrctgatggggaggctggaagatggcagcccccggactgggcagatcttcaagcagacctacagcaagttygacacaaamtcrcacaacgatgacgcactrctcaagaactacgggctgctctactgcttcaggaaggacatggacaaggtcgagacattcctgcgcatcgtgcagtgccgctctgtggagggcagctgtggcttctagctgcccgggtggcatccctgtgacccctccccagtgcctctcctggccctggaagttgccactccagtgcccaccagccttgtcctaataaaattaagttgcatcattttgtctgactaggtgtccttctataatattatggggtggaggggggtggtatggagcaaggggcaagttgggaagacaacctgtagggcctgcggggtctattgggaaccaagctggagtgcagtggcacaatcttggctcactgcaatctccgcctcctgggttcaagcgattctcctgcctcagcctcccgagttgttgggattccaggcatgcatgaccaggctcagctaatttttgtttttttggtagagacggggtttcaccatattggccaggctggtctccaactcctaatctcaggtgatctacccaccttggcctcccaaattgctgggattacaggcgtgaaccactgctcccttccctgtccttctgattttaaaataactataccagcaggaggacgtccagacacagcataggctacctggccatgcccaaccggtgggacatttgagttgyttgcttggcactgtcctctcatgcgttgggtccactcagtagatgcctgttgaatt

SEQ ID NO: 97 - DNA, 1138 bp, Homo sapiens
ggtcaagcagggagagagaactggccagggtataaaaagggcccacaagagaccggctctaggatcccaaggcccaactccccgaaccactcagggtcctgtggacagctcacctagtggcaatggctccaggctcccggacgtccctgctcctggcttttgccctgctctgcctgccctggcttcaagaggctggtgccgtccaaaccgttccgttatccaggctttttgaccacgctatgctccaagcccatcgcgcgcaccagctggccattgacacctaccaggagtttgaagaaacctatatcccaaaggaccagaagtattcattcctgcatgactcccagacctccttctgcttctcagactctattccgacaccctccaacatggaggaaacgcaacagaaatccaatctagagctgctccgcatctccctgctgctcatcgagtcgtggctggagcccgtgcggttcctcaggagtatgttcgccaacaacctggtgtatgacacctcggacagcgatgactatcacctcctaaaggacctagaggaaggcatccaaacgctgatgggggtgagggtggcgccaggggtcrccaatcctggaaccccactggcttcgagggctgggggagagaaatactgctgccctctttktagcagtaaggcgctgacccaagagaactcaccttattcttcatttcgcctggtgaatcctccaggcctttctctacaccctgaaggggagggaggaaaatggatraatgagagagggagggaacagtgcccaagcgcttggcctctccttctcttccttcactttgcagaggctggaagacggcagccgccggactgggcagatcctcaagcagacctacagcaagtttgacacaaactcgcacaaccatgacgcactgctcaagaactacgggctgctctactgcttcaggaaggacatggacaaggtcgagacattcctgcgcatggtgcagtgccgctctgtrgagggyagctgtggcttctaggtgcccgmgtrgcatcctgtgacccctccccagtgcctctcctggccctgaaggtgccactccagtgcccaccagccttgtcctaataaaattaagttgtatcatttca

SEQ ID NO: 98 - DNA, 376 bp, Homo sapiens
agcatcccaaggcccgactccccgcaccactcagggtcctgtggacagctcacctagcggcaatggctgcagaggctggaagacggcagccacctgactgggcagaccctcaagcagacctacagcaagtttgacacaaactcgcacaaccatgacgcactgctcaagaactacgggctgctccactgcttcaggaaggacatggacaaggtcgagacattcctgcgcatggtgcagtgccgctctgtggagggcagctgtggcttctaggggcccgcgtggcatcctgtgaccyctccccagtgcctctcctggccctgaaggtgccactccagtgcccaccagccttgtcctaataaaattaagttgtattgtt

SEQ ID NO: 99 - DNA, 488 bp, Homo sapiens
ggtcaagcagggagagagaactggccagggtataaaaagggcccacaagagaccggctctaggatcccaaggcccaactccccgaaccactcagggtcctgtggacagctcacctagtggcaatggctccaggctcccggacgtccctgctcctggcttttgccctgctctgcctgccctggcttcaagaggctggtgccgtccaaaccgttccgttatccaggctttttgaccacgctatgctccaagcccatcgcgcgcaccagctggccattgacacctaccaggagtttaggctggaagacggcagccgccggactgggcagatcctcaagcagacctacagcaagtttgacacaaactcrcacaaccatgacgcactgctcaagaactacgggctgctctactgcttcaggaaggacatggacaaggtcgagacattcctgcgcatggtgcagtgccgctctgtagagggtagctgtggcttc

SEQ ID NO: 100 - DNA, 1279 bp, Homo sapiens
acagtgggagagaaggggccagggtataaaaagggcccacaagagaccrgctchagsatcccaaggcccractccccgmaccactcagggtcctgtggacagctcacctagcbgcaatggctrcaggctcccggacgtccctgctcctggcttttggcctgctctgcctgccctggcttcaagagggcagtgccttcccaaccattcccttatccaggctttttgacaacgctatgctcygcgcccatcgtctgcaccagctggcmtwtgacayctaccaggagtttaacctaragctgctcygcatctscctgctgctcatccagtcgtggctggagcccgtgcagttcctcaggagtgtcttcgccaacagcctggtgtacggcgcctctgacwgcaacdtctatgrcctcctaaaggacctagaggaaggcatccaaacrctgatggggaggctggaagatggcagcccccggactgggcagatcttcaagcagacctacagcaagttygacacaaamtcrcacaacgatgacgcactrctcaagaactacgggctgctctactgcttcaggaaggacatggacaaggtcgagacattcctgcgcatcgtgcagtgccgctctgtggagggcagctgtggcttctagctgcccgggtggcatccctgtgacccctccccagtgcctctcctggccctggaagttgccactccagtgcccaccagccttgtcctaataaaattaagttgcatcattttgtctgactaggtgtccttctataatattatggggtggaggggggtggtatggagcaaggggcaagttgggaagacaacctgtagggcctgcggggtctattgggaaccaagctggagtgcagtggcacaatcttggctcactgcaatctccgcctcctgggttcaagcgattctcctgcctcagcctcccgagttgttgggattccaggcatgcatgaccaggctcagctaatttttgtttttttggtagagacggggtttcaccatattggccaggctggtctccaactcctaatctcaggtgatctacccaccttggcctcccaaattgctgggattacaggcgtgaaccactgctcccttccctgtccttctgattttaaaataactataccagcaggaggacgtccagacacagcataggctacctggccatgcccaaccggtgggacatttgagttgyttgcttggcactgtcctctcatgcgttgggtccactcagtagatgcctgttgaatt

SEQ ID NO: 101 - DNA, 899 bp, Homo sapiens
acatgcagagaaacaggtgaggagaagcagcgagagagaaggggccaggtataaaaagggcccacaagagaccagctcaaggatcccaaggcccractccccgaaccactcagggtcctgtggacagctcacctagcggcaatggctgcaggctcccggacgtccctgctcctggcttttggcctgctctgcctgtcctggcttcaagagggcagtgccttcccaaccattcccttatccaggctttttgacaacgctatgctccgcgcccgtcgcctgtaccagctggcatatgacacctatcaggagttrgaagaagcctatatcctgaaggagcagaagtattcattcctgcagaacccccagacctccctctgcttctcagagtctattccaacaccttccaacwgggtgaaaacgcagcagaaatctaacctagagctgctccgcatctccctgctgctcatccagtcatggctggagcccgtgcagctcctcaggagcgtcttcgccaacagcctggtgtatggcgcctcggacagcaacgtctatcgccacctgaaggacctagaggaaggcatccaaacgctgataggctggaagatggcagcccccggactgggcagatcttcaatcagtcctacagcaagtttgacacaaaatcgcacaacgatgacgcactgctcaagaactacgggctgctctactgcttcaggaaggacatggacaaggtcgagacattcctgcgcatcgtgcagtgccgctctgtggagggcagctgtggcttctagctgcccgggtggcatccctgtgacccctccccastgcctctcctggtsgtggaaggtgctactccagtgcccaccagccttgtcctaataaaattaagttgcatcatt

SEQ ID NO: 102 - DNA, 1443 bp, Homo sapiens
atgatsccagcatgtgtgggaggagcttctaaattatccaytagcacaagcccgtcagtggccccatgcataaatgtrcacagaaacaggtggggkcaacagtgggagagaaggggccagggtataaaaagggcccacaagagaccrgctchagsatcccaaggcccractccccgmaccactcagggtcctgtggacagctcacctagcbgcaatggctrcaggctcccggacgtccctgctcctggcttttggcctgctctgcctgccctggcttcaagagggcagtgccttcccaaccattcccttatccaggctttttgacaacgctatgctcygcgcccatcgtctgcaccagctggcmtwtgacayctaccaggagtttgaagaagcctatatcccaaaggaacagaagtattcattcctgcagracccccagacctccctctgtttctcagagtctattccgacaccctccaacagggaggaaacacaacagaaatycaacctaragctgctcygcatctscctgctgctcatccagtcgtggctggagcccgtgcagttcctcaggagtgtcttcgccaacagcctggtgtacggcgcctctgacwgcaacdtctatgrcctcctaaaggacctagaggaaggcatccaaacrctgatggggaggctggaagatggcagcccccggactgggcagatcttcaagcagacctacagcaagttygacacaaamtcrcacaacgatgacgcactrctcaagaactacgggctgctctactgcttcaggaaggacatggacaaggtcgagacattcctgcgcatcgtgcagtgccgctctgtggagggcagctgtggcctggaagttgccactccagtgcccaccagccttgtcctaataaaattaagttgcatcattttgtctgactaggtgtccttctataatattatggggtggaggggggtggtatggagcaaggggcaagttgggaagacaacctgtagggcctgcggggtctattgggaaccaagctggagtgcagtggcacaatcttggctcactgcaatctccgcctcctgggttcaagcgattctcctgcctcagcctcccgagttgttgggattccaggcatgcatgaccaggctcagctaatttttgtttttttggtagagacggggtttcaccatattggccaggctggtctccaactcctaatctcaggtgatctacccaccttggcctcccaaattgctgggattacaggcgtgaaccactgctcccttccctgtccttctgattttaaaataactataccagcaggaggacgtccagacacagcataggctacctggccatgcccaaccggtgggacatttgagttgyttgcttggcactgtcctctcatgcgttgggtccactcagtagatgcctgttgaatt

SEQ ID NO: 103 - DNA, 437 bp, Homo sapiens
gcagggagagagaactggccagggtataaaaagggcccacaagagaccggctctaggatcccaaggcccaactccccgaaccactcagggtcctgtggacagctcacctagtggcaatggctccagaggctggaagacggcagccgccggactgggcagatcctcaagcagacctacagcaagtttgacacaaactcgcacaaccatgacgcactgctcaagaactacgggctgctctactgcttcaggaaggacatggacaaggtcgagacattcctgcgcatggtgcagtgccgctctgtrgagggyagctgtggcttctaggtgcccgmgtrgcatcctgtgacccctccccagtgcctctcctggccctgaaggtgccactccagtgcccaccagccttgtcctaataaaattaagttgtatcatttcatctg

SEQ ID NO: 104 - DNA, 1098 bp, Homo sapiens
gcggctggagcccgtgcggttcctcaggagtaccttcaccaacaacctggtgtatgacacctcggacactcacctagtggcaatggctccaggctcccggacgtccctgctcctggcttttgccctgctctgcctgccctggcttcaagaggctggtgccgtccaaaccgttccgttatccaggctttttgaccacgctatgctccaagcccatcgcgcgcaccagctggccattgacacctaccaggagtttgaagaaacctatatcccaaaggaccagaagtattcattcctgcatgactcccagacctccttctgcttctcagactctattccgacaccctccaacatggaggaaacgcaacagaaatccaatctagagctgctccgcatctccctgctgctcatcgagtcgtggctggagcccgtgcggttcctcaggagtatgttcgccaacaacctggtgtatgacacctcggacagcgatgactatcacctcctaaaggacctagaggaaggcatccaaacgctgatgggggtgagggtggcgccaggggtcrccaatcctggaaccccactggcttcgagggctgggggagagaaatactgctgccctctttktagcagtaaggcgctgacccaagagaactcaccttattcttcatttcgcctggtgaatcctccaggcctttctctacaccctgaaggggagggaggaaaatggatraatgagagagggagggaacagtgcccaagcgcttggcctctccttctcttccttcactttgcagaggctggaagacggcagccgccggactgggcagatcctcaagcagacctacagcaagtttgacacaaactcgcacaaccatgacgcactgctcaagaactacgggctgctctactgcttcaggaaggacatggacaaggtcgagacattcctgcgcatggtgcagtgccgctctgtrgagggyagctgtggcttctaggtgcccgmgtrgcatcctgtgacccctccccagtgcctctcctggccctgaaggtgccactccagtgcccaccagccttgtcctaataaaattaagttgtatcatttca

SEQ ID NO: 105 - DNA, 886 bp, Homo sapiens
aagcagggagagagaactggccagggtataaaaagggcccacaagagaccggctctaggatcccaaggcccaactccccgaaccactcagggtcctgtggacagctcacctagtggcaatggctccaggctcccggacgtccctgctcctggcttttgccctgctctgcctgccctggcttcaagaggctggtgccgtccaaaccgttccgttatccaggctttttgaccacgctatgctccaagcccatcgcgcgcaccagctggccattgacacctaccaggagtttgaagaaacctatatcccaaaggaccagaagtattcattcctgcatgactcccagacctccttctgcttctcagactctattccgacaccctccaacatggaggaaacgcaacagaaatccaatctagagctgctccgcatctccctgctgctcatcgagtcgtggctggagcccgtgcggttcctcaggagtatgttcgccaacaacctggtgtatgacacctcggacagcgatgactatcacctcctaaaggacctagaggaaggcatccaaacgctgatggggaggctggaagacggcagccgccggactgggcagatcctcaagcagacctacagcaagtttgacacaaactcrcacaaccatgacgcactgctcaagaactacgggctgctctactgcttcaggaaggacatggacaaggtcgagacattcctgcgcatggtgcagtgccgctctgtagagggtagctgtggcttctaggtgcccgcgtggcatcctgtgaccgacccctccccagtgcctctcctggccctggaaggtgccactccagtgcccatcagccttgtcctaataaaattaagttgtatcatttca

SEQ ID NO: 106 - DNA, 604 bp, Homo sapiens
ggtcaagcagggagagagaactggccagggtataaaaagggcccacaagagaccggctctaggatcccaaggcccaactccccgaaccactcagggtcctgtggacagctcacctagtggcaatggctccaggctcccggacgtccctgctcctggcttttgccctgctctgcctgccctggcttcaagaggctggtgccgtccaaaccgttccgttatccaggctttttgaccacgctatgctccaagcccatcgcgcgcaccagctggccattgacacctaccaggagtttaggctggaagacggcagccgccggactgggcagatcctcaagcagacctacagcaagtttgacacaaactcgcacaaccatgacgcactgctcaagaactacgggctgctctactgcttcaggaaggacatggacaaggtcgagacattcctgcgcatggtgcagtgccgctctgtrgagggyagctgtggcttctaggtgcccgmgtrgcatcctgtgacccctccccagtgcctctcctggccctgaaggtgccactccagtgcccaccagccttgtcctaataaaattaagttgtatcatttcatctg

SEQ ID NO: 107 - DNA, 1114 bp, Homo sapiens
acagtgggagagaaggggccagggtataaaaagggcccacaagagaccrgctchagsatcccaaggcccractccccgmaccactcagggtcctgtggacagctcacctagcbgcaatggctrcaggctcccggacgtccctgctcctggcttttggcctgctctgcctgccctggcttcaagagggcagtgccttcccaaccattcccttatccaggctttttgacaacgctatgctcygcgcccatcgtctgcaccagctggcmtwtgacayctaccaggagtttaggctggaagatggcagcccccggactgggcagatcttcaagcagacctacagcaagttygacacaaamtcrcacaacgatgacgcactrctcaagaactacgggctgctctactgcttcaggaaggacatggacaaggtcgagacattcctgcgcatcgtgcagtgccgctctgtggagggcagctgtggcttctagctgcccgggtggcatccctgtgacccctccccagtgcctctcctggccctggaagttgccactccagtgcccaccagccttgtcctaataaaattaagttgcatcattttgtctgactaggtgtccttctataatattatggggtggaggggggtggtatggagcaaggggcaagttgggaagacaacctgtagggcctgcggggtctattgggaaccaagctggagtgcagtggcacaatcttggctcactgcaatctccgcctcctgggttcaagcgattctcctgcctcagcctcccgagttgttgggattccaggcatgcatgaccaggctcagctaatttttgtttttttggtagagacggggtttcaccatattggccaggctggtctccaactcctaatctcaggtgatctacccaccttggcctcccaaattgctgggattacaggcgtgaaccactgctcccttccctgtccttctgattttaaaataactataccagcaggaggacgtccagacacagcataggctacctggccatgcccaaccggtgggacatttgagttgyttgcttggcactgtcctctcatgcgttgggtccactcagtagatgcctgttgaatt

SEQ ID NO: 108 - DNA, 1157 bp, Homo sapiens
acatgcagagaaacaggtgaggagaagcagcgagagagaaggggccaggtataaaaagggcccacaagagaccagctcaaggatcccaaggcccractccccgaaccactcagggtcctgtggacagctcacctagcggcaatggctgcaggctcccggacgtccctgctcctggcttttggcctgctctgcctgtcctggcttcaagagggcagtgccttcccaaccattcccttatccaggctttttgacaacgctatgctccgcgcccgtcgcctgtaccagctggcatatgacacctatcaggagttrgaagaagcctatatcctgaaggagcagaagtattcattcctgcagaacccccagacctccctctgcttctcagagtctattccaacaccttccaacwgggtgaaaacgcagcagaaatctaacctagagctgctccgcatctccctgctgctcatccagtcatggctggagcccgtgcagctcctcaggagcgtcttcgccaacagcctggtgtatggcgcctcggacagcaacgtctatcgccacctgaaggacctagaggaaggcatccaaacgctgatgtgggtgagggtggcaccagggatccccaatcctggggccccactggcttccagggactggggagagaaacactgctgccctctttttagcagtcaggcgctgacccaagagaactcaccgtattcttcatttcccctcgtgaatcctccaggcctttctctacaacctgraggggrgggaggaaaatggatgaatgagagagggagggaacagtgcccaagcgcttggcctctccttctcttscttcactttgcagaggctggaagatggcagcccccggactgggcagatcttcaatcagtcctacagcaagtttgacacaaaatcgcacaacgatgacgcactgctcaagaactacgggctgctctactgcttcaggaaggacatggacaaggtcgagacattcctgcgcatcgtgcagtgccgctctgtggagggcagctgtggcttctagctgcccgggtggcatccctgtgacccctccccastgcctctcctggtsgtggaaggtgctactccagtgcccaccagccttgtcctaataaaattaagttgcatcattt

SEQ ID NO: 109 - DNA, 1452 bp, Homo sapiens
atgatsccagcatgtgtgggaggagcttctaaattatccaytagcacaagcccgtcagtggccccatgcataaatgtrcacagaaacaggtggggkcaacagtgggagagaaggggccagggtataaaaagggcccacaagagaccrgctchagsatcccaaggcccractccccgmaccactcagggtcctgtggacagctcacctagcbgcaatggctrcaggctcccggacgtccctgctcctggcttttggcctgctctgcctgccctggcttcaagagggcagtgccttcccaaccattcccttatccaggctttttgacaacgctatgctcygcgcccatcgtctgcaccagctggcmtwtgacayctaccaggagtttracccccagacctccctctgtttctcagagtctattccgacaccctccaacagggaggaaacacaacagaaatycaacctaragctgctcygcatctscctgctgctcatccagtcgtggctggagcccgtgcagttcctcaggagtgtcttcgccaacagcctggtgtacggcgcctctgacwgcaacdtctatgrcctcctaaaggacctagaggaaggcatccaaacrctgatggggaggctggaagatggcagcccccggactgggcagatcttcaagcagacctacagcaagttygacacaaamtcrcacaacgatgacgcactrctcaagaactacgggctgctctactgcttcaggaaggacatggacaaggtcgagacattcctgcgcatcgtgcagtgccgctctgtggagggcagctgtggcttctagctgcccgggtggcatccctgtgacccctccccagtgcctctcctggccctggaagttgccactccagtgcccaccagccttgtcctaataaaattaagttgcatcattttgtctgactaggtgtccttctataatattatggggtggaggggggtggtatggagcaaggggcaagttgggaagacaacctgtagggcctgcggggtctattgggaaccaagctggagtgcagtggcacaatcttggctcactgcaatctccgcctcctgggttcaagcgattctcctgcctcagcctcccgagttgttgggattccaggcatgcatgaccaggctcagctaatttttgtttttttggtagagacggggtttcaccatattggccaggctggtctccaactcctaatctcaggtgatctacccaccttggcctcccaaattgctgggattacaggcgtgaaccactgctcccttccctgtccttctgattttaaaataactataccagcaggaggacgtccagacacagcataggctacctggccatgcccaaccggtgggacatttgagttgyttgcttggcactgtcctctcatgcgttgggtccactcagtagatgcctgttgaatt

SEQ ID NO: 110 - DNA, 899 bp, Homo sapiens
agsatcccaaggcccractccccgmaccactcagggtcctgtggacagctcacctagcbgcaatggctrcagaggctggaagatggcagcccccggactgggcagatcttcaagcagacctacagcaagttygacacaaamtcrcacaacgatgacgcactrctcaagaactacgggctgctctactgcttcaggaaggacatggacaaggtcgagacattcctgcgcatcgtgcagtgccgctctgtggagggcagctgtggcttctagctgcccgggtggcatccctgtgacccctccccagtgcctctcctggccctggaagttgccactccagtgcccaccagccttgtcctaataaaattaagttgcatcattttgtctgactaggtgtccttctataatattatggggtggaggggggtggtatggagcaaggggcaagttgggaagacaacctgtagggcctgcggggtctattgggaaccaagctggagtgcagtggcacaatcttggctcactgcaatctccgcctcctgggttcaagcgattctcctgcctcagcctcccgagttgttgggattccaggcatgcatgaccaggctcagctaatttttgtttttttggtagagacggggtttcaccatattggccaggctggtctccaactcctaatctcaggtgatctacccaccttggcctcccaaattgctgggattacaggcgtgaaccactgctcccttccctgtccttctgattttaaaataactataccagcaggaggacgtccagacacagcataggctacctggccatgcccaaccggtgggacatttgagttgyttgcttggcactgtcctctcatgcgttgggtccactcagtagatgcctgttgaatt

SEQ ID NO: 111 - DNA, 1201 bp, Homo sapiens
cagcatcccaaggcccgactccccgcaccactcagggtcctgtggacagctcacctagcggcaatggctgcaggctcccggacgtccctgctcctggcttttgccctgctctgcctgccctggcttcaagaggctggtgccgtccaaaccgttcccttatccaggctttttaaagaggctatgctccaagcccatcgcgcacaccagctggccattgacacctaccaggagtttataagctcttggggaatggactctattccgacatcctccaacatggaggaaacgcagcagaaatccaacttagagctgctccacatctccctgctgctcatcgagtcgcggctggagcccgtgcggttcctcaggagtaccttcaccaacaacctggtgtatgacacctcggacagygatgamtatcacctcctaaaggacctagaggaaggcatccaaatgctgatggggaggctggaagacggcagccacctgactgggcagaccctcaagcagacctacagcaagtttgacacaaactcgcacaaccatgacgcactgctcaagaactacgggctgctccactgcttcaggaaggacatggacaaggtcgagacattcctgcgcatggtgcagtgccgctctgtggagggcagctgtggcttctaggggcccgcgtggcatcctgtgaccyctccccagtgcctctcctgcccgtgcggttcctcaggagtatgttcgccaacaacctggtgtatgacacctcggacagcgatgactatcacctcctaaaggacctagaggaaggcatccaaacgctgatggggaggctggaagacggcagccgccggactgggcagatcctcaagcagacctacagcaagtttgacacaaactcgcacaaccatgacgcactgctcaagaactacgggctgctctactgcttcaggaaggacatggacaaggtcgagacattcctgcgcatggtgcagtgccgctctgtrgagggyagctgtggcttctaggtgcccgmgtrgcatcctgtgacccctccccagtgcctctcctggccctgaaggtgccactccagtgcccaccagctgctcatcgagtcgtggctggagcccgtgcggttcctcaggagtatgttcgccaacaacctggtgtatgacacctcggacagcgatgactatcacctcctaaagga

SEQ ID NO: 112 - DNA, 965 bp, Homo sapiens
ccccgmaccactcagggtcctgtggacagctcacctagcbgcaatggctrcaggtaagcgcccctaaaatccctttgggcacaaygtgtcctgaggggagaggcagcgacctgtagatgggacgggggcactaaccctcaggtttggggcttctgaatgtgagtatcgccatstaagcccagtatttgkccaatctcagaaagctcctggtccctggagggatggagagagaaaaacaaacagctcctggagcagggagagygctggcctcttgctctccggctccctctgttgccctctggtttctccccaggctcccggacgtccctgctcctggcttttggcctgctctgcctgccctggcttcaagagggcagtgccttcccaaccattcccttatccaggctttttgacaacgctatgctcygcgcccatcgtctgcaccagctggcmtwtgacayctaccaggagtttgaagaagcctatatcctgaaggagcagaagtattcattcctgcagaacccccagacctccctctgcttctcagagtctattccaacaccttccaacwgggtgaaaacgcagcagaaatctaacctagagctgctccgcatctccctgctgctcatccagtcatggctggagcccgtgcagctcctcaggagcgtcttcgccaacagcctggtgtatggcgcctcggacagcaacgtctatcgccacctgaaggacctagaggaaggcatccaaacgctgatgtggaggctggaagatggcagcccccggactgggcagatcttcaatcagtcctacagcaagtttgacacaaaatcgcacaacgatgacgcactgctcaagaactacgggctgctctactgcttcaggaaggacatggacaaggtcgagacattcctgcgcatcgtgcagtgccgctctgtggagggcagctgtggcttctagctgcccgg

SEQ ID NO: 113 - DNA, 733 bp, Homo sapiens
gcggctggagcccgtgcggttcctcaggagtaccttcaccaacaacctggtgtatgacacctcggacactcacctagtggcaatggctccaggctcccggacgtccctgctcctggcttttgccctgctctgcctgccctggcttcaagaggctggtgccgtccaaaccgttccgttatccaggctttttgaccacgctatgctccaagcccatcgcgcgcaccagctggccattgacacctaccaggagtttgaagaaacctatatcccaaaggaccagaagtattcattcctgcatgactcccagacctccttctgcttctcagactctattccgacaccctccaacatggaggaaacgcaacagaaatccaatctagagctgctccgcatctccctgctgctcatcgagtcgtggctggagcccgtgcggttcctcaggagtatgttcgccaacaacctggtgtatgacacctcggacagcgatgactatcacctcctaaaggacctagaggaaggcatccaaacgctgatggggaggctggaagacggcagccgccggactgggcagatcctcaagcagacctacagcaagtttgacacaaactcrcacaaccatgacgcactgctcaagaactacgggctgctctactgcttcaggaaggacatggacaaggtcgagacattcctgcgcatggtgcagtgccgctctgtagagggtagctgtggcttc

SEQ ID NO: 114 - DNA, 769 bp, Homo sapiens
cagcatcccaaggcccgactccccgcaccactcagggtcctgtggacagctcacctagcggcaatggctgcaggctcccggacgtccctgctcctggcttttgccctgctctgcctgccctggcttcaagaggctggtgccgtccaaaccgttcccttatccaggctttttaaagaggctatgctccaagcccatcgcgcacaccagctggccattgacacctaccaggagtttataagctcttggggaatggactctattccgacatcctccaacatggaggaaacgcagcagaaatccaacttagagctgctccacatctccctgctgctcatcgagtcgcggctggagcccgtgcggttcctcaggagtaccttcaccaacaacctggtgtatgacacctcggacagygatgamtatcacctcctaaaggacctagaggaaggcatccaaatgctgatggggaggctggaagacggcagccacctgactgggcagaccctcaagcagacctacagcaagtttgacacaaactcgcacaaccatgacgcactgctcaagaactacgggctgctccactgcttcaggaaggacatggacaaggtcgagacattcctgcgcatggtgcagtgccgctctgtggagggcagctgtggcttctaggggcccgcgtggcatcctgtgaccyctccccagtgcctctcctggccctgaaggtgccactccagtgcccaccagccttgtcctaataaaattaagttgtattgtt

SEQ ID NO: 115 - DNA, 1139 bp, Homo sapiens
aagcagggagagagaactggccagggtataaaaagggcccacaagagaccggctctaggatcccaaggcccaactccccgaaccactcagggtcctgtggacagctcacctagtggcaatggctccaggctcccggacgtccctgctcctggcttttgccctgctctgcctgccctggcttcaagaggctggtgccgtccaaaccgttccgttatccaggctttttgaccacgctatgctccaagcccatcgcgcgcaccagctggccattgacacctaccaggagtttgaagaaacctatatcccaaaggaccagaagtattcattcctgcatgactcccagacctccttctgcttctcagactctattccgacaccctccaacatggaggaaacgcaacagaaatccaatctagagctgctccgcatctccctgctgctcatcgagtcgtggctggagcccgtgcggttcctcaggagtatgttcgccaacaacctggtgtatgacacctcggacagcgatgactatcacctcctaaaggacctagaggaaggcatccaaacgctgatgggggtgagggtggcgccaggggtcgccaatcctggaaccccactggcttmgagggctgggggagagaaayactgctgccctctttgtagcagtmaggcgctgacccaagagaactcaccttattcttcatttcgcctggtgaatcctccaggccyttctctacaccctgaaggggagggaggaaaatggatgaatgagagagggagggaacagtgcccaagcgcttggcctctccttctcttccttcactttgcagaggctggaagacggcagccgccggactgggcagatcctcaagcagacctacagcaagtttgacacaaactcrcacaaccatgacgcactgctcaagaactacgggctgctctactgcttcaggaaggacatggacaaggtcgagacattcctgcgcatggtgcagtgccgctctgtagagggtagctgtggcttctaggtgcccgcgtggcatcctgtgaccgacccctccccagtgcctctcctggccctggaaggtgccactccagtgcccatcagccttgtcctaataaaattaagttgtatcatttca

SEQ ID NO: 116 - DNA, 900 bp, Homo sapiens
acatgcagagaaacaggtgaggagaagcagcgagagagaaggggccaggtataaaaagggcccacaagagaccagctcaaggatcccaaggcccractccccgaaccactcagggtcctgtggacagctcacctagcggcaatggctgcaggctcccggacgtccctgctcctggcttttggcctgctctgcctgtcctggcttcaagagggcagtgccttcccaaccattcccttatccaggctttttgacaacgctatgctccgcgcccgtcgcctgtaccagctggcatatgacacctatcaggagttrgaagaagcctatatcctgaaggagcagaagtattcattcctgcagaacccccagacctccctctgcttctcagagtctattccaacaccttccaacwgggtgaaaacgcagcagaaatctaacctagagctgctccgcatctccctgctgctcatccagtcatggctggagcccgtgcagctcctcaggagcgtcttcgccaacagcctggtgtatggcgcctcggacagcaacgtctatcgccacctgaaggacctagaggaaggcatccaaacgctgatgtggaggctggaagatggcagcccccggactgggcagatcttcaatcagtcctacagcaagtttgacacaaaatcgcacaacgatgacgcactgctcaagaactacgggctgctctactgcttcaggaaggacatggacaaggtcgagacattcctgcgcatcgtgcagtgccgctctgtggagggcagctgtggcttctagctgcccgggtggcatccctgtgacccctccccastgcctctcctggtsgtggaaggtgctactccagtgcccaccagccttgtcctaataaaattaagttgcatc

SEQ ID NO: 117 - DNA, 1986 bp, Homo sapiens
mgggtttcactgtgttagccaggatggtctcgaactcctgacctcgtgatccacctgcctcgacmtcccraagtgctgggattacaggcgtgagccaccgcgcccaaccacggttagaggaatccagttgctctgccaaacagacctggctggaagggayggaacacacgctcacctgcgtcccraagggaaacccagctccagccttggtgtgtacctggaatggggtggtctttgaccttgaagtgccacagaaggcaacccagaaccacactggaacctaccgctgcacagccactaaccagctgggctctgtcagcaaagacattgctgtcattgttcaaggactggatgaaggaatcagctctaccctctttgtcattattaccgttgcccttggagtgggtgtcatcaccatagcactgtatttgagctatcggccctgcaaagtggacaggaggcaaattgctctataggcagaaagaggaggacaaagaggaggaaagccatttgctgttcaggaagagaaaagtacaactcatataattgacagctatttgattgaatgagacttctggctactgtggtttcccagggagggaagaagggatagaggagaaaggaagaaacacaatggcaggctgcattcccctttgtgtacgtctgtcctgtaaaacggtgtttcaggcccccatgccccatgtcctgtgtgtccaatatgtccacaagctcacctttctctctctgtctctttttttttttttgagatggagtctcgctgttgtgccctaggctggatgcaatgatgcgatctcgggctcactgcaacttcagcttcccgggttcaggtgattctcttgcctcagcctccccagtagctgggattacaggtgcacaccaccatgcctgtctaatttttgtacttttcgtagagatggggtttcaccatgttggctgggctggtctcaaactcctgacctcaagtgatccggccaccttggcctcccaaagtgctgggattacaggtgtgagccaccgcgcccagccacctttctctttagagctcactctattcattaggaatctcagtctcaatgtttgatttgtaagaaggcctcttgctccttgccaggtgcatcatcagtccactcttagatccaaaaaaaaaaaaagaaaagatcttgccgtttcttcatggttctcactgcccttttctcttaaacatcatactaaagtcaggcatatcttagaaatacaactcatatttcatggttttctgattactaactgggaactaaatctgtagtccaaggacaggactttgaagggagtaagtatcaaatatggggccaggaatcagagctctgttcctatctccactttcccttgctcccctgacctgggcttctggagggccagctcccagagctgagcttgttgacatcattaaggatcagtggcaagcttcaactcagtaaccatctgttgcgggtcttgggggagtatacagatggtaagaaattccactttgggccagacgggcatcctatctagctcagtattctgtctctgaaggagaaggtagagttcttccatgaaattggcctcataggttaagagctccaaacatctctgaattccttttcatagagtgatcaactgtgagttcgcatttgccagttttcttttttttacccatatgggcatctaggttaaagttccaatctttactctcccttttcatcaataagtgcatattttcttctgtctgtaaacaatttccttgaagcttcaagaggaatcttcttgtgaaaatgttcatatgattttatgtttcagcttctttccctgtccttgggaaagagtatattcaccctcggagaaggcgtgaggaatcacagaaccagatgttttctcccaaatcagtcaagaaatgttcactggaatgttgctatggtaaaaataaaagtggttttatgatgtcca

SEQ ID NO: 118 - DNA, 1735 bp, Homo sapiens
ccccagcgcccgggccatggcggcggcggtggcgggagctgctgtctgagcagcggttgcggaccgagcgaacttggcccaggagcccgggcctagggagaggcgcggcggcggcgggagcgcgaacggctggagctggccttcttcgccttctcctcggctgtggagccctggtggggggtctgcgcccggtcaccatgacgacgccggcgaatgcccagaatgccagcaaaacgtgggaactgagtctgtatgagctgcaccggaccccgcaggaagccataatggatggcacagagattgctgtttcccctcggtcactgcattcagaactcatgtgccctatctgcctggacatgctgaagaatacgatgaccaccaaggagtgcctccacagattctgctctgactgcattgtcacagccctacggagcgggaacaaggagtgtcctacctgccgaaagaagctggtgtccaagcgatccctacggccagaccccaactttgatgccctgatctctaagatytatcctagccgggaggaatacgaggcccatcaagaccgagtgcttatccgcctgagccgcctgcacaaccagcaggcattgagctccagcattgaggaggggctacgcatgcaggccatgcacagggcccagcgtgtgaggcggccgataccagggtcagatcagaccacaacgatgagtgggggggaaggagagcccggggagggagaaggggatggagaagatgtgagctcagactccgcccctgactctgccccaggccctgctcccaagcgaccccgtggagggggcgcaggggggagcagtgtagggacagggggaggcggcactggtggggtgggtgggggtgccggttcggaagactctggtgaccggggagggactctgggagggggaacgctgggccccccaagccctcctggggcccccagccccccagagccaggtggagaaattgagctcgtgttccggccccaccccctgctcgtggagaagggagaatactgccagacgaggtatgtgaagacaactgggaatgccacagtggaccacctctccaagtacttggccctgcgcattgccctcgagcggaggcaacagcaggaagcaggggagccaggagggcctggagggggygcctctgacaccggaggacctgatgggtgtggcggggagggtgggggtgccggaggaggtgayggtcctgaggagcctgctttgcccagcctggagggcgtcagtgaaaagcagtacaccatctacatcgcacctggaggcggggcgttcacgacgttgaatggctcgctgaccctggagctggtgaatgagaaattctggaaggtgtcccggccactggagctgtgctatgctcccaccaaggatccaaagtgaccccaccaggggacagccagaggaaggggaccmtggggtatccctgtgtcctggtctatcaccccagcttctttgtcccccagtacccccagcccagccagccaataagaggacacaaatgaggacacgtggcttttatacaaagtatctatatgagattyttytatattgtacagagtggggcaaaacacgcccccatctgctgccttttctattgccctgcaacgtcccatctatacsaggtgttggagaaggtgaagaaccctcccattcacgcccgcctaccaacaacaaacgtgcttttttcctctttgaaa

SEQ ID NO: 119 - DNA, 1526 bp, Homo sapiens
ggctrctgtttctaaaacccctttccctctaacccacaccacctttctactcactgatgccttcaggaagccataatggatggcacagagattgctgtttcccctcggtcactgcattcagaactcatgtgccctatctgcctggacatgctgaagaatacgatgaccaccaaggagtgcctccacagattctgctctgactgcattgtcacagccctacggagcgggaacaaggagtgtcctacctgccgaaagaagctggtgtccaagcgatccctacggccagaccccaactttgatgccctgatctctaagatytatcctagccgggaggaatacgaggcccatcaagaccgagtgcttatccgcctgagccgcctgcacaaccagcaggcattgagctccagcattgaggaggggctacgcatgcaggccatgcacagggcccagcgtgtgaggcggccgataccagggtcagatcagaccacaacgatgagtgggggggaaggagagcccggggagggagaaggggatggagaagatgtgagctcagactccgcccctgactctgccccaggccctgctcccaagcgaccccgtggagggggcgcaggggggagcagtgtagggacagggggaggcggcactggtggggtgggtgggggtgccggttcggaagactctggtgaccggggagggactctgggagggggaacgctgggccccccaagccctcctggggcccccagccccccagagccaggtggagaaattgagctcgtgttccggccccaccccctgctcgtggagaagggagaatactgccagacgaggtatgtgaagacaactgggaatgccacagtggaccacctctccaagtacttggccctgcgcattgccctcgagcggaggcaacagcaggaagcaggggagccaggagggcctggagggggygcctctgacaccggaggacctgatgggtgtggcggggagggtgggggtgccggaggaggtgayggtcctgaggagcctgctttgcccagcctggagggcgtcagtgaaaagcagtacaccatctacatcgcacctggaggcggggcgttcacgacgttgaatggctcgctgaccctggagctggtgaatgagaaattctggaaggtgtcccggccactggagctgtgctatgctcccaccaaggatccaaagtgaccccaccaggggacagccagaggaaggggaccmtggggtatccctgtgtcctggtctatcaccccagcttctttgtcccccagtacccccagcccagccagccaataagaggacacaaatgaggacacgtggcttttatacaaagtatctatatgagattyttytatattgtacagagtggggcaaaacacgcccccatctgctgccttttctattgccctgcaacgtcccatctatacsaggtgttggagaaggtgaagaaccctcccattcacgcccgcctaccaacaacaaacgtgcttttttcctctttgaaa

SEQ ID NO: 120 - DNA, 1829 bp, Homo sapiens
tgtcagggtgggagtcatattacaaaaccgagggcagtgaagaagctgaagaagaacaagaagagaaccttgaagcaagaggagactataaatattcagaaagagatagtttgatttttttggttgatgcctccaaggctatgtttgaatctcctagtgaagatgaattgacaccttttgacatgagcatccagtgtattcaaagtgtgtacatcagtaagatcataagcagtgatcgagatctcttggctgtggtgttctacggtaccgagaaagacaaaaattcagtgaattttaaaaatatttatgtcttataggagctggataatccaggtgcaaaatgaattctagagcttgaccagtttaaggggcagcagggacaaaaacgtttccaagacctgatgggccatggatctgactactcactcagtgaagtgctgtgggtccgtgccaacctctttagtgatgtccaattcaagatgagtcatacgaagatcacgctcttcaccaatgaagacaacccccatggcaatgagagtgccaaagccagccaggccaggaccaaagccggtgatctccgagatacaggcatcttccttgacttgatgcatctgaagaaacctggaggctttgacatatccttgttctacagagatatcatcagcatagcagaggatgaggacctcagggttcactttgaggaatccagcaagctagaagacctgttgcagaaggttcacgccaaagagaccaggaagcgagcactcagcaggttaaagctgaagctcaacaaagatatagtgatctctgtgggcatttataatctggtccagaaggctctcaagcctcctccaataaagctctatagggaaataaatgaaccagtgaaaaccaagacccggacctttaatacaagtacagacgatttgcttctgcctagcgataccaagtggtctcagatctatgggagtcgtcagattatactggagaaagaggaaacagaagagctaaaacggtttgatgatccaggtttgatgctcatgggtttcaagccattggtactgctgaagaaacgccattacctgaggccctccctgtctgtgtacccagaggagtcgctggtgattgggagctcaaccctgttcagtgctctgctcatcaagtgtctggagaaggaggttgcagcattgtgcagatacacaccccgcaggaacatccccccttattttgtggctttggtgacacaggaagaagtgttggatgaccagaaaattcaggtgactcctccgggcttccagctggtctttttaccctttgctgatgataaaaggaagatgccctttactgaaaaagtcacggcaactccagagcaggtggacaagatgaaggctatcattgagaagcttcgcttcacgtacagaagtgacagctttgagaaccccgtgctgcagcagcacttcaggaacctggaggccttggccttggatttgatggagccagaacaagcagtggacctgacattgcccaaggttgaagcaataaatagaagactgggctccctggtggatgagtttaaggagcttgttcacccaccagattwcaatcytgaagggaaagttaccaagagaaaacatgataatgaaggttctggaagcaaaaggcccaaggtggagtattcagaagaggagctgaagacccacattagcaagggcacgctgggcaagttcactgtgcccatgttgaaagaggcctgccgggcttacgggctgaagagtggkctgaagaagcaggagctgctggaagccctcaccaagcacttccaggattga

SEQ ID NO: 121 - DNA, 1787 bp, Homo sapiens
cggctgcccgcagcgcatcaaccagctcctcccgactgaggttttttggcagcagccccgcgaagggctggtccccgaggggccccgaccgttggcaggagccgcggggttgcctctgatgcctggacaaggagggagaagcaatgggagtcattccatcccgaggtgccacccattcctatctccggacgcctcttcccaaatcctgcggcctctgacaaatgcctcacaatgtctgggctgacctcgaaaattcagggcccagctcctaacawgcaggtgtcaccagagagaaatgcaccactgtgcccagcaccatagctctggctcagagagtttgcctgagaaagcagcagacagaaaacaraaggtgcgwgttgctcccgaaggaactgacttcatgtgcaacagagctcggagaagtccaaggctaagcacactctccagaacagtggaggttgtgctgaaaggcaactgggaggcgacggagagcctgggaggtgcgggctacactggaggccagcaagtctgccagagagaaacagaaaaaaagacaggtgggaagagctctcctggggtcagaacaaagcttaatatcttctttgacaaagaacgtaacatcaaaatagccaactatgggtttagttcaacatttgcaaagagagacaacactgaaaagggaacgtttgatgggactctcccttatgcaggcccagaactcttcttgggccatgggtaccaatgccctgccatcaacgtttggagccttggcatcatcgtatgcaaaatggtggctggggccctgccattttatgagcagaactgtaaggatatactgaaaaaaaaaaaattaaaatagtatgctacttttttattcattttatggaaaaaaatatttaaaaattcttcacactcaaccccagggagcagctcccactggaccagctgttgaggaactcctgggtcaatagtgaccagaagacatgattcaagccatacagagagccactcctggactacccaggccccccaacaacccagctcatagtggccatgggattctaggaagaacatatcgaggaagtgatattaaaaaaatatatgatcatcccatggccacctacctaatcatggagttcagaaaagtgcagaggagaaagggctccaacatcggagcacaatccctccctcccggggatcccatctgtccttccccatctgccacagttaagtcaaccttccctgtccaacccagaagaggactcaaaaccagccgacctttcccactttctaattcacagaagcatgaacaccatcctgggagttagggcagaaccctacttggcctggagatgaagccagccattcccagcaaagccccccagcataagtctgtggcttcaccctccccagagcaccagcagccatggggaaaacctgaaggatccttgtctctgggaacccactgggaagtcggctcgctccatgtggaagacccagaagaggtggcttggtctgagggaacccccgggaagctggatggtataacctcaatctctgtgactaaaaggagccatggctaccatgggcaaaagatgtttcagtttcatgctgcaattatgttgtttctgactagcacaaaaaagtcaaagggagaaataaggcagcaccagtgaacccaatggacagctgggcccagacaaaaaccaagtgggtggggcagtcaagctacacttcctgtgttttattacatttattatgttcttcttaatattattttaattggc

SEQ ID NO: 122 - DNA, 2608 bp, Homo sapiens
ccggctgtgtggcagcccgcgaggcggtccgcgggagcacactctgtgcagagactgggcggccagcctgcccttgctgtcgctgacggtgactgcgggaggccaggttgtttttcatcattcagaacattgcctgaagyagktccaccgtgccgttagtaacgaggaacatcgagccaaggcacctgtgccgtcagacgttgcctagcgttagaagcgagctggaatgcgtgaccaacatcaccctggcaaatgtcatccgacagctgggcagcctgagtaaatatgcagaggacatttttggagagctctttactcaggcaaatacctttgcctctccggtaagctcccttgctgagagggtcgatggactacaagttaaagtcactcagctggatcccaaggaagaagaagtgtcactgcaagkaatcaacacccgaaaagccttcagaagctccaccattcaagaccagaagctttttgacagaaactctctcccagtgcctgtcttagaaacatacaatacctgtgatactcctccccctctcaacaatcttaccccttacagggacgatggaacagaggcactcaaattctacacagacccttcatacttctttgatctttggaagaagaagatgctgcaggacaccarggatatcatgaaagagaaragaaagcayaggaaagaaaagaaagataatccaaatcgagggaatgtaaacccacgtaaaatcaagacacgwaaggaagagtgggagaaaattaagatggggcaagaatttgtggagtccaaagaaaagctggggccttttgggtatccacccaccttggtgtacyagaatggcagcaytggctgtgttgaaaacgtggatgcaagtagctatccaccaccatcacagtcagactctgcttcttcaccttctccttccttctccgaggacaacttgcctcctccaccagcagaattcagttacccagtggacaaccaaagaggatctggtttggctggacccaaaagatccagtgtggtcagcccaagccatccaccaccagctcctcctctaggctctccaccaagctctaaacccgggtttgctccaccacctgcccctccaccacccccgcctccaatgataggcatcccacctccaccaccgcctataggatttgggtctccagggacgcctccaccaccctcaagcccatctttcccacctcaccctgattttgctgcccctccacctcttcctccaccaccggcagctgactacccaactctcccaccacctcccttgtcccagccaacaagaggagcacctcctcctccccctcctcctcctccggggccccctcctccccctttcactggtgcagatggccagcctgctgtaccaccaccgctttctgacaccaccaagcccaagtcctccttgcctgccrtaagcgatgcccatagcgacctgctttcagccatctgtcaaggttttcagctgcgcagggttgaggagcagcaggaacaagagaagtgggatgtcgtgggcaatgacgtggccaccatcttgtctcgtcgcattgctgttgagtacagtgactcagaagatgactcctctgaatttgatggggacgactggtctaattaactctttctgcctgatgcccaccttctttttctttccttcctacttgccttctttgatgccaaccccaacagacccataggggagaaaagggaggaaaaacctaattttaaggggccgaagctttccctgaagcaaccaaagctatatccaagtgcttcctccaagtcacatgtatttcctcttcccattgtcaggccctgtggggctcctgagattcagtagctgggatgttccctctttccttcaagtgcctgttgcatgtttaaaggaaggagaaatcccaaagcagattcctttgattgggtttccgttggagatggggccttcccttaggagccatattcaactacagtcttctaaaacctgtgccctcagccacttcgaataatgccagccaccttctggttctaaagcagagggagtggccygaatggacacagctggcccctttcccgtacactgaaagggcagagcaggcckaaggctccaacggccaaactgcctcaccctctgccctaatcagcagggtgggcctgccttttgctaagcgatctctatgcctgggattccctttattccaggagacattaagcctctaaagaatgtctcayctcctctgcccaaaaatgatgctcttctgtaggctggtgttgttgcttccctcccaggatccctttggtgagtgtggtgttcaggatgcaccagcaccacctctacatgcyttcaggcaacacggcccagttttaacctctagtatccatgaccaaactatccctgacacataaggacaggggcctcttctggctgtcaggagcaaagccctggtctcatttgcttccctgccaggctcattgtgtgtataccacatttgtgccccactgacctgaaggttccatgtaactgtatacacatgaatacttaaatgccaacattttaaataatttgataaagtctttgtagccaca

SEQ ID NO: 123 - DNA, 4931 bp, Homo sapiens
ccggctgtgtggcagcccgcgaggcggtccgcgggagcacactctgtgcagagactgggcggccagcctgcccttgctgtcgctgacggtgactgcgggaggccaggttgtttttcatcattcagaacattgcctgaagyagktccaccgtgccgttagtaacgaggaacatcgagccaaggcacctgtgccgtcagacgttgcctagcgttagaagcgagctggaatgcgtgaccaacatcaccctggcaaatgtcatccgacagctgggcagcctgagtaaatatgcagaggacatttttggagagctctttactcaggcaaatacctttgcctctccggtaagctcccttgctgagagggtcgatggactacaagttaaagtcactcagctggatcccaaggaagaagaagtgtcactgcaagkaatcaacacccgaaaagccttcagaagctccaccattcaagaccagaagctttttgacagaaactctctcccagtgcctgtcttagaaacatacaatacctgtgatactcctccccctctcaacaatcttaccccttacagggacgatggaacagaggcactcaaattctacacagacccttcatacttctttgatctttggaagaagaagatgctgcaggacaccarggatatcatgaaagagaaragaaagcayaggaaagaaaagaaagataatccaaatcgagggaatgtaaacccacgtaaaatcaagacacgwaaggaagagtgggagaaaattaagatggggcaagaatttgtggagtccaaagaaaagctggggccttttgggtatccacccaccttggtgtacyagaatggcagcaytggctgtgttgaaaacgtggatgcaagtagctatccaccaccatcacagtcagactctgcttcttcaccttctccttccttctccgaggacaacttgcctcctccaccagcagaattcagttacccagtggacaaccaaagaggatctggtttggctggacccaaaagatccagtgtggtcagcccaagccatccaccaccagctcctcctctaggctctccaccaagctctaaacccgggtttgctccaccacctgcccctccaccacccccgcctccaatgataggcatcccacctccaccaccgcctataggatttgggtctccagggacgcctccaccaccctcaagcccatctttcccacctcaccctgattttgctgcccctccacctcttcctccaccaccggcagctgactacccaactctcccaccacctcccttgtcccagccaacaagaggagcacctcctcctccccctcctcctcctccggggccccctcctccccctttcactggtgcagatggccagcctgctgtaccaccaccgctttctgacaccaccaagcccaagtcctccttgcctgccrtaagcgatgcccatagcgacctgctttcagccatctgtcaaggttttcagctgcgcagggttgaggagcagcaggaacaagagaagtgggatgtcgtgggcaatgacgtggccaccatcttgtctcgtcgcattgctgttgagtacagtgactcagaagatgactcctctgaatttgatggggacgactggtctaattaactctttctgcctgatgcccaccttctttttctttccttcctacttgccttctttgatgccaaccccaacagacccataggggagaaaagggaggaaaaacctaattttaaggggccgaagctttccctgaagcaaccaaagctatatccaagtgcttcctccaagtcacatgtatttcctcttcccattgtcaggccctgtggggctcctgagattcagtagctgggatgttccctctttccttcaagtgcctgttgcatgtttaaaggaaggagaaatcccaaagcagattcctttgattgggtttccgttggagatggggccttcccttaggagccatattcaactacagtcttctaaaacctgtgccctcagccacttcgaataatgccagccaccttctggttctaaagcagagggagtggccygaatggacacagctggcccctttcccgtacactgaaagggcagagcaggcckaaggctccaacggccaaactgcctcaccctctgccctaatcagcagggtgggcctgccttttgctaagcgatctctatgcctgggattccctttattccaggagacattaagcctctaaagaatgtctcayctcctctgcccaaaaatgatgctcttctgtaggctggtgttgttgcttccctcccaggatccctttggtgagtgtggtgttcaggatgcaccagcaccacctctacatgcyttcaggcaacacggcccagttttaacctctagtatccatgaccaaactatccctgacacataaggacaggggcctcttctggctgtcaggagcaaagcctgaagacttggagctgcaggactggaagaacagtggagccccgtgggtcccaccctttaaggatgctgaggcctagagatgggaagtgacttgctcaaggtcacacaattggatagtgacatagctagagcccagagttcctgattccaagtcacctgtgctttctgggaccaaagaatgggcacctgctggagtcttggcagagctttcttggctgtattgctactccagacctcaycataggttggggtcccagtaggagggctcagggtctgtgccagccctgtcagtgctgctcagaccttcatagcctctcttgtcattctttgttgccccttttctgtcaccaaccaaccacatagccttgggaccagcccctctgggggaccagaagtagtgagagaaggaaggggataggcagctttgacaggtgctgttttcaattcctctgcaactcctcccccttttatttccccaatttaaacaaagattctgccaactgtggaaacttcagtccctcaggctggcagctgtgctggtacctgcctgggggggcctggcagtygtgaagcaggctgaaaggcagaggggctccaggtcctgtttccagctcccctcactgcacatggtgaagctccctccctccccacttttcccagagctaatacacaggtgctattattcagaaaaaaactggtcagctctaaccaacagtgaggtttcttctcttctgccctaactattgtgtagcctcttatgctgaaattggcttctgccggcttatctggctttcagagccctgaaacaaagagaaacaggatctgtccctacccagcacagcaaatggttgtagtaattgccaaagccctcgtaaagccctccggcttgaggagacagtgtatagtcatgagttctgcctctgtgcccttgctggccgcttcccctttgccttctttcctggaactcagggtgtggggactgagcctgtaggggccagcakgccctcctgctgtggccactcccaagtgtgccctcttccctctctccagatcaggtgtctctagcacaggacttggcaccaagctccatgctgagacaccaggctatgtgggcccccaccttgtttcccagcctgtaccttggaagccgaaggtgctttcatcagaatcctaaaatggccgttgaaggcgcctgggccgcagcccagcagtagctggagaggcaggcagagggcagtggttctcccaaataggagacctggggcctggccaggccagggtttgggcctaatggctttgactgaattamccccatcctcctcctttctggaaaagggagagctagagccactcactgtcattctgctctgaccttgaagggggcggtgttggcctggcttctggaatggactgagtccatcgtggaaagggctgggggcaggaggaggtggggaggggcactgcctgcggaaggtaggattagatcattagctcagtgacctcctagggtttcgatgtgctgtgttctcatcctacagttggtttggtaatgatctgcaagtcccggagagcaacagcaaagctctgcctgatgctctcattaaaatctatgcagccaagttcagcactttgtcacagccggccttgcgaagcctcctcagctcggggggccggggacccagtgagctgggaggccctctgggctccacttatgcatatgcaccaaaaaaaaaaaggcttctttagacccagagccctttaagatgataaaggacccaatgcaggtaatcctgtttttggactcatgtaatgtagaatgctaaatttagtgattatttaatctgggcctaagctagtgagagtgtggaacaatggcccataatgactcctaagcggtgaagccagggggcctcctcccttcctggttcaccccgcccaggggacctgctcccattcctatggccctggggcccagcttccaatagtgtcagaagtgacttgtggctttgccttggttgtgagatgggtacattctaaaggagcagcccgggggagggggcaggcttagccagcccttggaggctcagagcagctggcccaggctccagctcgcctccagtggaagcccgagcgcygtcagaaacaaccctggccaatgtcaccgcagagccgaggcggtgttgtcagggctaatgtgaaatctcttcccgtggygctgatcctccgactctgcagcaccagcttggacagactgaggtctctgtggctttgctgactctgcttaagcattcccaccgggtcccagctctgctctaggactgcctcccactgcggcccctcacctgacctcagggcatggggagggagggagccagttccccaaggccaggggactttgctcctgagagatgtcagrcttcctggrggcatcaggctttgagytctgctggggtccagctgacctggca

SEQ ID NO: 124 - DNA, 5157 bp, Homo sapiens
ccggctgtgtggcagcccgcgaggcggtccgcgggagcacactctgtgcagagactgggcggccagcctgcccttgctgtcgctgacggtgactgcgggaggccaggttgtttttcatcattcagaacattgcctgaagyagktccaccgtgccgttagtaacgaggaacatcgagccaaggcacctgtgccgtcagacgttgcctagcgttagaagcgagctggaatgcgtgaccaacatcaccctggcaaatgtcatccgacagctgggcagcctgagtaaatatgcagaggacatttttggagagctctttactcaggcaaatacctttgcctctccggtaagctcccttgctgagagggtcgatggactacaagttaaagtcactcagctggatcccaaggaagaagaagtgtcactgcaagkaatcaacacccgaaaagccttcagaagctccaccattcaagaccagaagctttttgacagaaactctctcccagtgcctgtcttagaaacatacaatacctgtgatactcctccccctctcaacaatcttaccccttacagggacgatggaacagaggcactcaaattctacacagacccttcatacttctttgatctttggaagaagaagatgctgcaggacaccarggatatcatgaaagagaaragaaagcayaggaaagaaaagaaagataatccaaatcgagggaatgtaaacccacgtaaaatcaagacacgwaaggaagagtgggagaaaattaagatggggcaagaatttgtggagtccaaagaaaagctggggccttttgggtatccacccaccttggtgtacyagaatggcagcaytggctgtgttgaaaacgtggatgcaagtagctatccaccaccatcacagtcagactctgcttcttcaccttctccttccttctccgaggacaacttgcctcctccaccagcagaattcagttacccagtggacaaccaaagaggatctggtttggctggacccaaaagatccagtgtggtcagcccaagccatccaccaccagctcctcctctaggctctccaccaagctctaaacccgggtttgctccaccacctgcccctccaccacccccgcctccaatgataggcatcccacctccaccaccgcctataggatttgggtctccagggacgcctccaccaccctcaagcccatctttcccacctcaccctgattttgctgcccctccacctcttcctccaccaccggcagctgactacccaactctcccaccacctcccttgtcccagccaacaagaggagcacctcctcctccccctcctcctcctccggggccccctcctccccctttcactggtgcagatggccagcctgctgtaccaccaccgctttctgacaccaccaagcccaagtcctccttgcctgccrtaagcgatgcccatagcgacctgctttcagccatctgtcaaggttttcagctgcgcagggttgaggagcagcaggaacaagagaagtgggatgtcgtgggcaatgacgtggccaccatcttgtctcgtcgcattgctgttgagtacagtgactcagaagatgactcctctgaatttgatggggacgactggtctaattaactctttctgcctgatgcccaccttctttttctttccttcctacttgccttctttgatgccaaccccaacagacccataggggagaaaagggaggaaaaacctaattttaaggggccgaagctttccctgaagcaaccaaagctatatccaagtgcttcctccaagtcacatgtatttcctcttcccattgtcaggccctgtggggctcctgagattcagtagctgggatgttccctctttccttcaagtgcctgttgcatgtttaaaggaaggagaaatcccaaagcagattcctttgattgggtttccgttggagatggggccttcccttaggagccatattcaactacagtcttctaaaacctgtgccctcagccacttcgaataatgccagccaccttctggttctaaagcagagggagtggccygaatggacacagctggcccctttcccgtacactgaaagggcagagcaggcckaaggctccaacggccaaactgcctcaccctctgccctaatcagcagggtgggcctgccttttgctaagcgatctctatgcctgggattccctttattccaggagacattaagcctctaaagaatgtctcayctcctctgcccaaaaatgatgctcttctgtaggctggtgttgttgcttccctcccaggatccctttggtgagtgtggtgttcaggatgcaccagcaccacctctacatgcyttcaggcaacacggcccagttttaacctctagtatccatgaccaaactatccctgacacataaggacaggggcctcttctggctgtcaggagcaaagcctgaagacttggagctgcaggactggaagaacagtggagccccgtgggtcccaccctttaaggatgctgaggcctagagatgggaagtgacttgctcaaggtcacacaattggatagtgacatagctagagcccagagttcctgattccaagtcacctgtgctttctgggaccaaagaatgggcacctgctggagtcttggcagagctttcttggctgtattgctactccagacctcaycataggttggggtcccagtaggagggctcagggtctgtgccagccctgtcagtgctgctcagaccttcatagcctctcttgtcattctttgttgccccttttctgtcaccaaccaaccacatagccttgggaccagcccctctgggggaccagaagtagtgagagaaggaaggggataggcagctttgacaggtgctgttttcaattcctctgcaactcctcccccttttatttccccaatttaaacaaagattctgccaactgtggaaacttcagtccctcaggctggcagctgtgctggtacctgcctgggggggcctggcagtygtgaagcaggctgaaaggcagaggggctccaggtcctgtttccagctcccctcactgcacatggtgaagctccctccctccccacttttcccagagctaatacacaggtgctattattcagaaaaaaactggtcagctctaaccaacagtgaggtttcttctcttctgccctaactattgtgtagcctcttatgctgaaattggcttctgccggcttatctggctttcagagccctgaaacaaagagaaacaggatctgtccctacccagcacagcaaatggttgtagtaattgccaaagccctcgtaaagccctccggcttgaggagacagtgtatagtcatgagttctgcctctgtgcccttgctggccgcttcccctttgccttctttcctggaactcagggtgtggggactgagcctgtaggggccagcakgccctcctgctgtggccactcccaagtgtgccctcttccctctctccagatcaggtgtctctagcacaggacttggcaccaagctccatgctgagacaccaggctatgtgggcccccaccttgtttcccagcctgtaccttggaagccgaaggtgctttcatcagaatcctaaaatggccgttgaaggcgcctgggccgcagcccagcagtagctggagaggcaggcagagggcagtggttctcccaaataggagacctggggcctggccaggccagggtttgggcctaatggctttgactgaattamccccatcctcctcaaaaaaaaaaaggcttctttagacccagagccctttaagatgataaaggacccaatgcaggtaatcctgtttttggactcatgtaatgtagaatgctaaatttagtgattatttaatctgggcctaagctagtgagagtgtggaacaatggcccataatgactcctaagcggtgaagccagggggcctcctcccttcctggttcaccccgcccaggggacctgctcccattcctatggccctggggcccagcttccaatagtgtcagaagtgacttgtggctttgccttggttgtgagatgggtacattctaaaggagcagcccgggggagggggcaggcttagccagcccttggaggctcagagcagctggcccaggctccagctcgcctccagtggaagcccgagcgcygtcagaaacaaccctggccaatgtcaccgcagagccgaggcggtgttgtcagggctaatgtgaaatctcttcccgtggygctgatcctccgactctgcagcaccagcttggacagactgaggtctctgtggctttgctgactctgcttaagcattcccaccgggtcccagctctgctctaggactgcctcccactgcggcccctcacctgacctcagggcatggggagggagggagccagttccccaaggccaggggactttgctcctgagagatgtcagrcttcctggrggcatcaggctttgagytctgctggggtccagctgacctggcaccaggtgtcgcacagagatgtgcctcattctgtgcctcctgccgtgttcactttaactgtgcctcagtgtgggttagggaataattttgtcattgtattaagtttatccagttaattaacttgaggaactaaccaatttttaccttctgtctrgaatgatgtacatgtagtagagtaagccataatgytcccaaagtgccttgttttctctgatacaaacrtatttataaggacgtattccagtgggttcttgggtgtgtttgccacaacaagattttagggaaggggtgtatgtgtagtagggatgccgtttgaaaacaggccctcttcccctgaggaagggaaaggaactcttcagttggagatctgggcagtgggttaagccagacccctaaagtgaccctttcctcttctgccctattcttctcagaccctcygaaagacatccaatttttttaaagccctgtagctccaagcctggtctcatttgcttccctgccaggctcattgtgtgtataccacatttgtgccccactgacctgaaggttccatgtaactgtatacacatgaatacttaaatgccaacattttaaataatttgataaagtctttgtagccacaaaaaaaa

SEQ ID NO: 125 - DNA, 1238 bp, Homo sapiens
aaagggagggctggggctgatgagctgggaggtggtgtgcgcccttctcctgcctccagctcctctctggacccctgtcctggcacctcttcggtccctggttcggtctgcccctttcccaccgcggcccgtcttaggccaggatgtgctccctgccctgcggactctggagcagggcccggccactccccggagcctgtatgacgggaaccgccccgmgccctctcccctacgcggggcaggccagccctggggcgccttaaaaaccggagctggcgcttggcatcgccactctgggcaggatccaacgtcgctccagctgctcttgacgactccacagataccccgaagccmtggcaagcaagggcttgcaggacctgaagcaacaggtggaggggaccgcccaggaagccgtgtcagcggccggagcggcagctcagcaagtggtggaccaggccacagaggcggggcagaaagccatggaccagctggccaagaccacccaggaaaccatcgacaagactgctaaccaggcctctgacaccttctctgggatyggraaaaaattcggcctcctgmaatgacagmagggagacttgggtcggcctcctgaaatgayagmagggagrcytgggtgaccccccttccaggcgccatctagcacagcytggccctgatctccgggcagccaccacctcctcggtctgccccctcattaaaattcacgttcccaccctgtgtccacttcatgattcctcgcaagctgggcccagtcctctcatcccaagagcagagccaccgtagccggagtcctagcctcccaaattcggaaatccaatccaacggtctcaggaatgttttccatcccgccacgcgcctcccgaagctcccagaccggaggctcagcccccatctcggttagtgcccctctcccgcccgactttagagccagcccctgccccttattccctgccccaggatcccggcccctcctgggagctgggctggactcggtcctcagatcctcggaaggctcagctctgggcggggcaagggaccttgcaagtcgggggggcctcgggaacttctctccgccagctgcgactggaggctgggaacaggggagacgacccagggccacggcccctcaggacttcaggcggccggaggttgtggggacgaagcggagtcgggagccgggcttccggccctcactaccccgtctcggcccgcgggtt

SEQ ID NO: 126 - DNA, 1014 bp, Homo sapiens
gacacacacctccaaaggttactggatctatgatggaggacgctattgtttccacatcaacacctggttctcctgagactaaaaatgttgacagagactcaacatcccctctgactcctgaactgaaagaggacagcaccgccctggtgatgaactcaactacagagtcaaacactgttttctccagtgtgtccctggatgctgctactgaggtctccagggcagaagtcacctactatgatcctacattcatgccagcttctgctcagtcaacaaagtccccagacatttcacctgaagccagcagcagtcattctaactctcctcccttgacaatatctacacamaagaccatcgccacacaaacaggtccttctggggtgacatctcttggccaactgaccctggacacatcaaccatagccacctcagcaggaactccatcagccagaactcaggattttgtagattcagaaacaaccagtgtcatgaacaatgatctcaatgatgtgttgaagacaagccctttctctgcagaagaagccaactctctctcttctcaggcacctctccttgtgacaacctcaccttctcctgtaacttccacattgcaagagcacagtacctcctctcttgtttctgtgacctcagtacccacccctacactggcgaagatcacagacatggacacaaacttagaacctgtgactcgttcacctcaaaatttaaggaacaccttggccacttcagaagccaccacagatacacacacaatgcatccttctataaacacagcagtggccaatrtggggaccaccagttcaccaaatgaattctattttactgtctcacctgactcagacccatataaagccacatccgcagtagttatcacttccacctcgggggactcaatagtttccacatcaatgcctagatcctctgcgatgaaaaagattgagyctgagacaaytttctccctgatatttagactgagggagactagcacctccc

SEQ ID NO: 127 - DNA, 3180 bp, Homo sapiens
tcccagcataaagttgggagtgacaccagagccttctgcaagatgcttctrattctsctgtcagtggccctgctggccttcagctcagctcaggacttagatgaagatgtcagccaagaagacgttcccttggtaatatcagatggaggagactctgagcagttcatagatgaggagcgtcagggaccacctttgggaggacagcaatctcaaccctctgctggtgatgggaaccagaatgatggccctcagcagggaccaccccaacaaggaggccagcagcaacaaggtccaccacctcctcagggaaagccacaaggaccaccccaacagggaggccatccccctcctcctcaaggaaggccacaaggaccaccccaacagggaggccatccccgtcctcctcgaggaaggccacaaggaccaccccaacagggaggccatcagcaaggtcctcccccacctcctcctggaaagccccagggaccacctccccaagggggccgcccacaaggacctccacaggggcagtctcctcagtaatctaggattcaatgayaggaagtgaataagaagatgacagtgtttcaaatgccttgaaacataatgtgatcatgctctaacttcaatataccaataaaataatcagcttgcaatttctgattatagcatctccttctgagtgtttgggactctggaatctgagacccatgttcacattgtaagaacatccaggaccccttctccttgatgtttccagcaagcttctttcctccttatccttattaagtcatctgcctggggaaggagttccactgtttctttccttctctgtcttcttagctcgaatttaaattgcacaattattttcaggtcatttcctgatagtctagtcagcttatgaatgtaagcaaaacaggaccaatgaaagaaagtcccagaagctgagagaaactttaacaagtttgagagtaacttattttgttttctaggaaagtgagtatggttctatgcctgtattccccagaagccactagacctattttcccctattttatcactgatcagttctgtccctgcctatgattcttaccattcttaagaaaacctgaatggatttcatcaaggcggcagcataatttgaagggcaattgcgtgtgaaaattgatgtgacttgatttacacaatagtcagaaaacattttagaaattgatgactttataatgcaaccaggagtattgaaaaaaaagtaagcaatgagctcaaataattaaaaaagagagacaaaatacacttgggagaacagaaataagaattaatgaaaatttaaaagattaaatgaatgagaagaaatgattcataaattttgaactaacagtaataacttcttgaaaatccaataaaattggcaaaagattgtgaaaattctggaagaataagggaaacagataatcttcagagtaatcaggtaaagcttaaacaagtgttttaaaagatgagtttttcctacattctgaaaagcaaacatgaaaaactgaacacagtttttacagatayacaatatggagtgacttatatacaaaatgaccttaaaaatatattaaactcattatagtagttaatatctaagtaaaatatgatgaaatttaatagagaattcactcctcccaaaagcaccttcatggaagattcctcattaacaggcagtcctttagtatgctgatttatacaaaatgctgaaaagaagagaaataccccaagttcttgaaaaaaaattttttgatatgactactctaacagtaataactataaatctcactttaaataatttaaaacaaattaaagtgatatatgagttaaatgaccaagcagacttgattcyaggaatgttaaggaatgtycattatttgttttggataatgaagtcagcagaggaaaaaaaaatatgaccatctcaaaagatgccaacgttgtctttgataatatttaatatattttttaaaaaacaattcttgtaaaatacttttttgattagccttctgaccatgattaaaatggtgtacctcaaagtagctgctaaccttaygtgtatctgcaacaccctgaaaaattatctaatraaaaggcacaaagaaaaagcttgtcaatgttgtggataattagraagtgaataattttatttaatattagataaacaagcacataacagagatacatatattcaaatggaaggastaaaattaccaccacatgcagatctgtttttctgtccagaaaataacaagagattctactcaggtaaaaaaggaaaggaaggaaaaccattgtaattaaaataaaatttaatacaatagccgtttattaattcaacttctaaagaatctttgtgattacacaatgaccagctagtaaatataataagaaaatgattattcacaaaggaaccaaaaggcctagtcttcgaatttttaatgccattgtgatagcaagcatctgattattttactctaagttatttccacttctgattttaagaacagcttctttcccagggatgggttccccctagtgatgtattctcttcaccacaagagtttgcagctctggctttctttctgctcatctgtaaagataactacagctcctctataaaccatctcaccattattaccgaaatcagacaaattctggagatagtcaaagctgtgaggattcgaagatctctttcacatcttgacccagtcaattccgttcaccagtgttatgaatccattccccaaaattccaattaggaattatatatttattattataatgaggatactatacaaggcatttagcatggctgcaaagagagagctccaatgtctaaatgcaacgctgacaatttcttcatctatcacatgtacctgttatacatacttattaattggatgtgcagttaatttcttcctttaaaaaaaaaactataggctcaatatgaaagtagaaagcactaaggtgtactaatgaatgggcacatagcttttttcacaaaaagattattttgccccagacagctatctgcattctgatccagatactgtatgttcttaacataaagtgaaatttctcatacttcatgatgaaagaaaaaactgaattctcattgttaataaacaaataaagacaattctctgc

SEQ ID NO: 128 - DNA, 2532 bp, Homo sapiens
aacttcattccagatgaccctgatgaacactctgaacaaagacaagtacaacttcaattgcaaccgctggctggatgccaatgaggatgacaatgagatagtgagggaaatgactgcagaaggcccaacagtgcgcaggatcatgggcatggcccggtaccatgtgactgtgtgcacaggtgaacttgaaggtgctgggaccgatgccaacgtctatctctgcctttttggtgatgygggggacacgggggaacggctgctctacaactgcaggaataacacagacctgtttgaaaagggcaatgctgacgagttcactatcgagtytgtcaccatgcggaatgtgaggcgggtgaggatcagacacgatkgcaaaggctccggcagckgctggtacctggacagagtgctggtgagagaggaggggcagcctgagagcgacaacgtggagttcccatgtctcaggtggttggacaaggataaggatgatgggcagctggtccgagagttgctacccagtgrcagcagcgcgacactgaagaactttcgctatcacatcagcttgaagactgggkatgtctctggggccagcacggattctagagtctacatcaagctctatggggataaatctgacaccatcaagcaagttcttcttgtctctgacaayaacctcaaagactactttgaacgtggccgggtggatgagttcaccctcgagaccctgaacattggaaatatcaaccggctggtgattgggcatgacagcactggcatgcatgccagctggttcctgggcagcgttcagatccgtgtgccccgtcaaggcaagcagtacacctttcccgccaaccgctggctggayaagaaccaggctgacgggcgcctggaggtggagctgtatcccagcgaggtggtggagatccagaaattggtccactatgaggttgagatttggacaggagatrtgggtggcgcaggcaccagtgcccgagtctacatgcagatctatggagagaaaggcaagacagaagtgctcttcctctccagccgctcaaaagtttttgaacgggcgtccaaggacacattccagcttgaggcggccgacgtgggcgaggtctataagctccggctcgggcacacgggcgagggctttgggcccagctggttcgtggacaccgtgtggctgcggcacctggtggtgcgggaggaggtgattgagcagcacaagttcgaagcccaccgctggctggcccggggcaaggaggacaacgaacttgtcgtggagttggtgccagctggcaagccgggtcctgagcgaaacacctatgaggttcaggtggtcacggggaatgtgcccaaggccggcactgatgctaacgtctacctaaccatctacggcgaggagtatggagacacgggcgaacgacccctgaagaagtcagacaagtccaacaaatttgagcaggggcagacagacaccttcaccatctatgccattgacctgggggccctgaccaagattcggattcgccacracaacacaggcaacagagcaggctggttcctggacagaatagacattactgacatgaacaacgagatcacgtactactttccatgccaacgttggctggcagtggaggaagatgatggccagctgtccagggagctgttgccagtggatgagtcctatgtgctgccacagagcgaggagggtrggggaggcggtgacaacaaccccctcgacaacctggccctggagcagaaagataaatctaccacattctcagtgaccataaagactggggttaagaagaatgcgggcacagatgctaatgtcttcatcacactctttggcacacaggatgacactggaatgaccctcctgaagtcctccaagacaaacagcgataagtttgagagggacagcattgaaatcttcacggtggagacgctggatctgggagacctgtggaaagtccggcttggccatgacaacacaggcaaggccccaggctggtttgtagactgggtagaggtggatgccccatctcttgggaagtgcatgacgtttccctgtggccgctggctggccaaaaacgaagahgacgggtccatcatcagagacctcttccatgcagagcttcagacgaggctgtacacaccatgtaggaaccacacacggcaaggccagcccttctctggggccccatcaccagctaccccaactcagccccagttcttccttcaggattgactgtgggccaggcccaccttgaagattttggtctttcatccctgtcctgaattttctgactctgtgggggctgtgggcagagttctggacccaggaaatgaaaatatgaaatttattctaaactctactccaagctagctggtgacaacatgtagagaacctaacctctcgagggttcagattcctcatctgcagcatagagataataatgcaggatgatagcaatatccaaaaggaagaaagataaaggtctaactgaggaatcattatca

SEQ ID NO: 129 - DNA, 1317 bp, Homo sapiens
ggcttgctgaaaataaaatcaggactcctaacctgctccagtcagcctgcttccacgaggcctgtcagtcagtgccccacttgtgactgagtgtgcagtgcccagcatgtaccaggtcagtgcagagggctgcctgagggctgtgctgagagggagaggagcagagatgctgctgagggtggagggaggccaagctgccaggtttggggctgggggccaagtggagtgagaaactgggatcccagggggagggtgcagatgagggagcgacccagattaggtgaggacagttctctcattagccttttcctacaggtggttgcattcttggcaatggtcatgggaacccacacctacagccactggcccagctgctgccccagcaaagggcaggacacctctgaggagctgctgaggtggagcactgtgcctgtgcctcccctagagcctgctaggcccaaccgccacccagagtcctgtagggccagtgaagatggacccctcaacagcagggccatytccccctggagatatgagttggacagagacttgaaccggctcccccaggacctgtaccacgcccgttgcctgtgcccgcactgcgtcagcctacagacaggctcccacatggacccccggggcaactcggagctgctctaccacaaccagactgtcttctacmggcggccatgccatggcgagaagggcacccacaagggctactgcctggagcgcaggctgtaccgtgtttccttagcttgtgtgtgtgtgcggccccgtgtgatgggctagccggacctgctggaggctggtccctttttgggaaacctggagccaggtgtacaaccacttgccatgaagggccaggatgcccagatgcttggcccctgtgaagtgctgtctggagcagcaggatcccgggacaggatggggggctttggggaaarcctgcacttctgcacattttgaaaagagcagctgctgcttagggccgccggaagctggtgtcctgtcattttctctcaggaaaggttttcaaagttctgcccatttctgkaggccaccactcctgtctcttcctcttttcccatcccctgctaccctggcccagcacaggcactttctagatatttcccccktgctggagaagaaagagcccctggttttatttgtttgtttactcatcactcagtgagcatctactttgggtgcattctagtgtagttactagtcttttgacatggatgattctgaggaggaagctgttattgaatgtatagagatttatccaaataaatatctttatttaaaaatggc

SEQ ID NO: 130 - DNA, 2319 bp, Homo sapiens
aacgcaaagcagtgtgggttgattctgaggtgcactgtgggaaagagcttgtcgctgcggtgttgytgttggagactcgattgttggtgacagcgaaagaacgataacaaaatgccggagcgagatagtgagccgttctccaaccctttggcccccgatggccacgatgtggatgatcctcactccttccaccaatcaaaactcaccaatgaagacttcaggaaacttctcatgacccccagggctgcacctacctctgcaccaccttctaagtcacgtcaccatgagatgccaagggagtacaatgaggatgaagacccagctgcacgaaggaggaaaaagaaaagttattatgccaagctacgccaacaagaaattgagagagagagagagctagcagagaagtaccgggatcgtgccaaggaacggagagatggagtgaacaaagattatgaagaaaccgagcttatcagcaccacagctaactatagggctgttggccccactgctgaggcggacaaatcagctgcagagaagagaagacagttgatccaggagtccaaattcttgggtggtgacatggaacacacccatttggtgaaaggcttggattttgctctgcttcaaaaggtacgagctgagattgccagcaaagagaaagaggaagaggaactgatggaaaagccccagaaagaaaccaagaaagatgaggatcctgaaaataaaattgaatttaaaacacgtctgggccgcaatgtttaccgaatgctttttaagagcaaagcatatgagcggaatgagttgttcctgccgggccgcatggcctatgtggtagacctggatgatgagtatgctgacacagatatccccaccactcttatccgcagcaaggctgattgccccaccatggaggcccagaccacactgaccacaaatgacattgtcattagcaagctgacccagatcctttcatacctgaggcagggaacccgtaacaagaagcttaagaagaaggataaagggaagctggaagagaagaracctcctgaggctgacatgaatatttttgaagacaytggggattacgtaccctccacaaccaagacacctcgggacaaggagcgggagagatatcgggaacgggagcgtgatcgggaaagagacagagaccgtgaccgagagcgagagcgagaacgagatcgggaacgagagcgagagcgggaccgagagagagaagaggaaaagaagagacacagctactttgagaagccaaaagtagatgatgagcccatggacgttgcaaaggacctgggtctaccaaggagttgatcaagtccatcaatgaaaagtttgctgggtctgctggctgggaaggcacacatatgctgaagaagccagaagacaaaaagcagctgggagatttctttggcatgtccaacagttatgcagagtgctacccagccacgatggatgacatggctgtggatagtgatgaggaggtggattatagcaaaatggaccagggtaacaagaaggggcccttaggccgttgggactttgatacccaggaagaatacagcgagtatatgaacaacaaagaagctttgcccaaggctgcattccagtatggtatcaaaatgtctgaagggcggaaaaccaggcgcttcaaggaaaccaatgacaaagcagagcttgatcgccagtggaagaagattagygcaatcattgagaagaggaagaagatggaagctgatggggttgaagtcaaaagaccaaaatactaatcactagttacaaccagagatgctccacaaggatatgctccccackgwtttctttctacaatttccaaaggttgcaagatgtttttttgtggatgaatataaaattttattgtgtaattacttggttccattaaaattggttaacttgctattttcttkgttgagcatgtcccctccagtgcccttgaagcaccaagaacactaattccactggttgtgtaaaatcacatgcagaaagtcatcagtcctttcctgagctgtggttctagattcctagacagtaaggatgctctctagccagtgtgcccagtagagaagagaataatgatcctcactgatgggcaagaggtggatagaggaatgtaagtatgattggtctcaaatgtcagactcattccggcccatcttcaggcctagtccctggggaaagatttcctggggattgctgtcagcctgatgggctgctaatctgatctccaggctatgaaggactgggctctggatgaaggcatctaatgaaaatcacttatgggtg

SEQ ID NO: 131 - DNA, 2325 bp, Homo sapiens
aacgcaaagcagtgtgggttgattctgaggtgcactgtgggaaagagcttgtcgctgcggtgttgytgttggagactcgattgttggtgacagcgaaagaacgataacaaaatgccggagcgagatagtgagccgttctccaaccctttggcccccgatggccacgatgtggatgatcctcactccttccaccaatcaaaactcaccaatgaagacttcaggaaacttctcatgacccccagggctgcacctacctctgcaccaccttctaagtcacgtcaccatgagatgccaagggagtacaatgaggatgaagacccagctgcacgaaggaggaaaaagaaaagttattatgccaagctacgccaacaagaaattgagagagagagagagctagcagagaagtaccgggatcgtgccaaggaacggagagatggagtgaacaaagattatgaagaaaccgagcttatcagcaccacagctaactatagggctgttggccccactgctgaggcggacaaatcagctgcagagaagagaagacagttgatccaggagtccaaattcttgggtggtgacatggaacacacccatttggtgaaaggcttggattttgctctgcttcaaaaggtacgagctgagattgccagcaaagagaaagaggaagaggaactgatggaaaagccccagaaagaaaccaagaaagatgaggatcctgaaaataaaattgaatttaaaacacgtctgggccgcaatgtttaccgaatgctttttaagagcaaagcatatgagcggaatgagttgttcctgccgggccgcatggcctatgtggtagacctggatgatgagtatgctgacacagatatccccaccactcttatccgcagcaaggctgattgccccaccatggaggcccagaccacactgaccacaaatgacattgtcattagcaagctgacccagatcctttcatacctgaggcagggaacccgtaacaagaagcttaagaagaaggataaagggaagctggaagagaagaracctcctgaggctgacatgaatatttttgaagacaytggggattacgtaccctccacaaccaagacacctcgggacaaggagcgggagagatatcgggaacgggagcgtgatcgggaaagagacagagaccgtgaccgagagcgagagcgagaacgagatcgggaacgagagcgagagcgggaccgagagagagaagaggaaaagaagagacacagctactttgagaagccaaaagtagatgatgagcccatggacgttgcaaaggacctgggtctaccaaggagttgatcaagtccatcaatgaaaagtttgctgggtctgctggctgggaaggcacagaatcacatatgctgaagaagccagaagacaaaaagcagctgggagatttctttggcatgtccaacagttatgcagagtgctacccagccacgatggatgacatggctgtggatagtgatgaggaggtggattatagcaaaatggaccagggtaacaagaaggggcccttaggccgttgggactttgatacccaggaagaatacagcgagtatatgaacaacaaagaagctttgcccaaggctgcattccagtatggtatcaaaatgtctgaagggcggaaaaccaggcgcttcaaggaaaccaatgacaaagcagagcttgatcgccagtggaagaagattagygcaatcattgagaagaggaagaagatggaagctgatggggttgaagtcaaaagaccaaaatactaatcactagttacaaccagagatgctccacaaggatatgctccccackgwtttctttctacaatttccaaaggttgcaagatgtttttttgtggatgaatataaaattttattgtgtaattacttggttccattaaaattggttaacttgctattttcttkgttgagcatgtcccctccagtgcccttgaagcaccaagaacactaattccactggttgtgtaaaatcacatgcagaaagtcatcagtcctttcctgagctgtggttctagattcctagacagtaaggatgctctctagccagtgtgcccagtagagaagagaataatgatcctcactgatgggcaagaggtggatagaggaatgtaagtatgattggtctcaaatgtcagactcattccggcccatcttcaggcctagtccctggggaaagatttcctggggattgctgtcagcctgatgggctgctaatctgatctccaggctatgaaggactgggctctggatgaaggcatctaatgaaaatcacttatgggtg

SEQ ID NO: 132 - DNA, 2305 bp, Homo sapiens
aacgcaaagcagtgtgggttgattctgaggtgcactgtgggaaagagcttgtcgctgcggtgttgytgttggagactcgattgttggtgacagcgaaagaacgataacaaaatgccggagcgagatagtgagccgttctccaaccctttggcccccgatggccacgatgtggatgatcctcactccttccaccaatcaaaactcaccaatgaagacttcaggaaacttctcatgacccccagggctgcacctacctctgcaccaccttctaagtcacgtcaccatgagatgccaagggagtacaatgaggatgaagacccagctgcacgaaggaggaaaaagaaaagttattatgccaagctacgccaacaagaaattgagagagagagagagctagcagagaagtaccgggatcgtgccaaggaacggagagatggagtgaacaaagattatgaagaaaccgagcttatcagcaccacagctaactatagggctgttggccccactgctgaggcggacaaatcagctgcagagaagagaagacagttgatccaggagtccaaattcttgggtggtgacatggaacacacccatttggtgaaaggcttggattttgctctgcttcaaaaggtacgagctgagattgccagcaaagagaaagaggaagaggaactgatggaaaagccccagaaagaaaccaagaaagatgaggatcctgaaaataaaattgaatttaaaacacgtctgggccgcaatgtttaccgaatgctttttaagagcaaagcatatgagcggaatgagttgttcctgccgggccgcatggcctatgtggtagacctggatgatgagtatgctgacacagatatccccaccactcttatccgcagcaaggctgattgccccaccatggaggcccagaccacactgaccacaaatgacattgtcattagcaagctgacccagatcctttcatacctgaggcagggaacccgtaacaagaagcttaagaagaaggataaagggaagctggaagagaagaracctcctgaggctgacatgaatatttttgaagacaytggggattacgtaccctccacaaccaagacacctcgggacaaggagcgggagagatatcgggaacgggagcgtgatcgggaaagagacagagaccgtgaccgagagcgagagcgagaacgagatcgggaacgagagcgagagcgggaccgagagagagaagaggaaaagaagagacacagctactttgagaagccaaaagtagatgatgaggtgagytaggacctgggtctaccaaggagttgatcaagtccatcaatgaaaagtttgctgggtctgctggctgggaaggcacacatatgctgaagaagccagaagacaaaaagcagctgggagatttctttggcatgtccaacagttatgcagagtgctacccagccacgatggatgacatggctgtggatagtgatgaggaggtggattatagcaaaatggaccagggtaacaagaaggggcccttaggccgttgggactttgatacccaggaagaatacagcgagtatatgaacaacaaagaagctttgcccaaggctgcattccagtatggtatcaaaatgtctgaagggcggaaaaccaggcgcttcaaggaaaccaatgacaaagcagagcttgatcgccagtggaagaagattaatcattgagaagaggaagaagatggaagctgatggggttgaagtcaaaagaccaaaatactaatcactagttacaaccagagatgctccacaaggatatgctccccackgwtttctttctacaatttccaaaggttgcaagatgtttttttgtggatgaatataaaattttattgtgtaattacttggttccattaaaattggttaacttgctattttcttkgttgagcatgtcccctccagtgcccttgaagcaccaagaacactaattccactggttgtgtaaaatcacatgcagaaagtcatcagtcctttcctgagctgtggttctagattcctagacagtaaggatgctctctagccagtgtgcccagtagagaagagaataatgatcctcactgatgggcaagaggtggatagaggaatgtaagtatgattggtctcaaatgtcagactcattccggcccatcttcaggcctagtccctggggaaagatttcctggggattgctgtcagcctgatgggctgctaatctgatctccaggctatgaaggactgggctctggatgaaggcatctaatgaaaatcacttatgggtg

SEQ ID NO: 133 - DNA, 1089 bp, Homo sapiens
cgttcgcagcctttccgcttcctgtttttccctccgaccaaccccgagcgcaaagaaattgacctcgcagcggtcctacaatrcttttatatcattggccaagctttaccccgcccctgcctcatgcagcctatgggctaggctttagggtccgcggttggtcagaccggrgcacttggcctgaagacctggaattggcgacttcgatattaacaaggatggcggcggccgcagcaagtcgaggagtcggggcaaagstgggcctgcgtgagattcgcatccacttatgtcagcgctcgcccggcagccagggcgtcagggacttcattgagaaacgctacgtggagctgaagaaggcgaatcccgacctacccatcctaatccgcgaatgctccgatgtgcagcccaagctctgggcccgctacgcatttggccaagagacgaatgtccctttgaacaacttcagtgctgatcaggtaaccagagccctggagaacgttctaagtggtaaagcctgaagcctccactgaggattaagagcaacagccccagagcctgggctctgctggacttagtataatgtgaaaaaaatgtgttctcctattcctcataaagcttgtgctgtaaaatactttctcagggtgttcttgtcctcatctaccctctaccccttactgtgcaaccactgaggcaaagtagcttaatataaaaataaaactttattctgtctcatcaaaagctaccagctgctgaagcaaacatgaagggtggcggggggkcagggattctagggccccagagtaagtagaccacactgagtcccttttggtcctcctgcctggatagtgctgagtggaaggggaggagctgggacccaaaggtcttggcttaggtgtgggagcagagaacatgagacctcattatggtcctaaatctccaaaggctctactggacaaacaagcttgatgttaagagagaggggaatgagtgacattgagaaacaagatcacccttgaagagctgtctgctggagagcatacacacgatcctggagctgggcctcttcctgatgcctttccagggcttgca

SEQ ID NO: 134 - DNA, 2122 bp, Homo sapiens
caggcacaggcgtagctccgcccccagggagaacaggcgctaccatggaggagtaccatcgccactgcgacgaggttggcctcaatgctgaggaagcccacaatattgtcaaagaatgtgcagacggggttttaggtggtgaagattataattacaacaacatcaaccagtggaccgcaagcatagtggaatwatcgttaacacatctgcctaagytgggaaaagcytataaatgtattgtgaaatgtgcagtggtccagaagagcgcatatggctttcgcacagcagctcctgtttttgggataccacatctgatggaacctgtaccgtaagatgggagaactggaccatgaactgtattgtcaatgtttttgccattgctgttctttaactgactaaaaatgttgggttaaagccattaacttaagaatttgtcagtgtatcctttcaaaaatagttatttattagtgtgctagatgacaagtgtgcaatatactttaaagctatcaacaaaaactgaatattgtaagcaagcartatcatagcaattggcagattatctcatattctatacagcatcatttaaatacgaaaaatttaatgctagcaaaaaataaatgcagaaatatggcatgacatgaaaatacaatcttacatttacactagcttttcactaatattttgtacgtaaggtgatggggaactccattcagataataaaattctctttcagctagagaagttaacaggaataaatatatgaacaaataagctgcaaggataaatgtggagaaaatgatgagaattagctaatatcttttcattttttaaaactttcttcccctcacttarttgtacacaatatttagtggaaagtaatttttaaaaattttctatcaactaatagcatagtaacaactatgattaacttgtttactttttctgaggattagtaaatcgattttttttaatttaaartttttggatttatacttgagggtgaattaaatctggtaaactgaatttcctagttaaacaaaattagttgcagtatatgatgaacagtatatgactcaaacagctgccttacaattcattccatgtggaacaaacatttatcagatgcctattatgggcatatgtctctgctgagcactatagttatcaatgtgctgtgtaaatgctaagttccttttagcaattgttcagttggaagacaagtattaatatttggggaaggaaaaaaaacagttgttttacacgggaggaaaaaagtgagtctggttacacatatagaagtaagcaaaatgaaaagcacttaactgctttctgacagaatgatagatgtaattttaagagttgctcctagcaagttaaaagtgcatgtaaaatatgcaactcttagttaaaggccttattatcagtcttatctatacaagtagtaaattttgtcattgctttaattacaaccatctgtaaataattttgaagacttattatgtggggttcaaattgagtggaataaagtatagattaaaagtatacaatcattagcaggttatctcagggcttatgaaatgtaattaaatttattaagaaaatagataaaaattagggtacacagctggccaccaaatgcgaagtcaatctgctacttaaccytgcamacaaaatcagttttgcatattaccactaacactaacacttacagagagtggaatcataactcattgaattttggagaggaataaacttagtgttaatattaacaatattaaggcaagattcwtgtaggaataccatgtgcatgttggatattttgccaaataacaataattaatacctgttaaatgtttaataataatattaacaaaataaaggagttcaacgcagtgatctttgtttttggcacatcaaaacttctcagtcattattcatgtttctttatgctgctggcttttgtgcccttgaagattataatagtgaccaacatatatatgcagacttgttttttattattgttgtttaagcctgatttaagaaaaaaatattcatacctcgtgaacttgctatctgttctgtttctagttaaaatataataaatattatcttcctgtgctga

SEQ ID NO: 135 - DNA, 4239 bp, Homo sapiens
ggccactacccagagggctgccgccgcctctccaagttcttgtggcccccgcggtgcggagtatggggcgctgatggccatggagggctactggcgcttcctggcgctgctggggtcggcactgctcgtcggcttcctgtcggtgatcttcgccctcgtctgggtcctccactaccgagaggggcttggctgggatgggagcgcactagagtttaactggcacccagtgctcatggtcaccggcttcgtcttcatccagggcatcgccatcatcgtctacagactgccgtggacctggaaatgcagcaagctcctgatgaaatccatccatgcagggttaaatgcagttgctgccattcttgcaattatctctgtggtggccgtgtttgagaaccacaatgttaacaatatagccaatatgtacagtctgcacagctgggttggactgatagctgtcatatgctatttgttacagcttctttcaggtttttcagtctttctgcttccatgggctccgctttctctccgagcatttctcatgcccatacatgtttattctggaattgtcatctttggaacagtgattgcaacagcacttatgggattgacagagaaactgattttttccctgagagatcctgcatacagtacattcccgccagaaggtgttttcgtaaatacgcttggccttctgatcctggtgttcggggccctcattttttggatagtcaccagaccgcaatggaaacgtcctaaggagccaaattctaccattcttcatccaaatggaggcactgaacagggagcaagaggttccatgccagcctactctggcaacaacatggacaaatcagattcagagttaaacartgaagtagcagcaaggaaaagaaacttagctctggatgaggctgggcagagatctaccatgtaaaatgttgtagagatagagccatataacgtcacgtttcaaaactagctctacagttttgcttctcctattagccatatgataattgggctatgtagtatcaatatttactttaatcacaaaggatggtttcttgaaataatttgtattgattgaggcctrtgaactgacctgaattggaaaggatgtgattaatataaataatagcagatataaattgkggttatgttacctttatcttgttgaggaccacaacattagcacggtgccttgtgcagaatagatactcaatatgtgaatatgtgtctaytagtagttaattggataaactggcagcatccctggcctgttgtcatgcagtcatttcctgttaattctgggagacaatgatttcacaactagmgggaagcagtcctaaaagtttaaaatccgataaggaatatctgggacagggtttagatcatgactctacacagataccatgatgagagtatattaaagaaatttaggaaagcacctggttcctttctccccatgcctgccttctgctccctccccagctggtttgggctcaaattgtccctggagactagggtttatgttagggtattgatagattagagcaggtggttgaagagatcttctctggtcagacttggaagaatttccaaaastgaagttagccccaagacttccctagggttgatgtactttatgatccagatgctaaacttcttagaatgaaaatatgcttcaacacttaagtagcatacactgccctacaaacctcagagagcacttttccccaagttcttgtttttatttttgaaagtactcacacagcacttactatgctccaaacactcctctaagcactttacacatattagctcattcagtccccagacagacgggatgaagtaggtattgttactgttcccattttacaggtgagagatttgaagcctggggaggctagtaactcaccccaaggtcacacggctcatacatggtgggactgagactcagatgcaggcagtctggcacctcagtctggattctaaccatttcactaagctatttttgtcttgtactactttgacccacccctgaataaacctcaattgctggagtggggtgtagttattaaagggatgctttttaccttttgctgtytgctgtggcagattccccagataaccaaggaaaaggggccacccatacctggaaataggccatagggcccctactactgccaacaagccatggcctaccttgacamttgtttgatcttaaaattgtgtcttggtaacaaaagatttggacaggcatatctgtagctttcaagttaattaattgcaatatttttttcttcaggattttagctgctgaacaactttcagtttggagctaaaagagacctgtctcatggtctgcccttccctggggcaatagctagggtctttcctgatttttatggaattttaggggatattttgaacttgggttctcagtagtgaattgagacttggaggtgacttttcatgtttggagtatcatctctgtctgggmtctgggctgacaaattaaaacytagagtagtgcttatgctgaaatgatacttttcattttttggttgatttttttgccttcccttcaattttaaactgaagcattttaatrtgggtagaaactctacaccaaatacactaaacattttggtgcttagtggatttctttttaggtaactggtacttacttccaaagactgaatacaagccacactccatcatatcccttaaacttcatgaaaaaccattcaagatccccttgctgcaacactgktctcttcttctctactaaattctatttccaaaattggtaatagagccagaaggatccccagtacccagccctctgcctggcacaaastggtagcacaattaaattcagtatgggtggagcatggtacagtcttggtgccatagaaggagtagttgcatagtcacacatcatttgataagttggatgttccattacatagaggaacacaaaattccagggtttttggaggaagggattagatagtgactaagccgccagaattgaggtggccattcctttttgtataggstaagaaacaggttatcagtgaaaagttaattatggctttggcactagaatagcactgttgcaaagtatttaagcaccccccatctcagccctttattttatctttcatgtgggctaatgrgaggataatcttacagatattataggaatttcttttctatctttatgaaaacaacgtatataaaatatatctagaaaacctttgtttgagactcttatttaatgggcttttgattctaatgataattgtacctttatctttcaaaagctgatatttcctacctaagcatctcccgagaaaaatatctcattaaaaagcccataaataataggggagaagaaagccttaggtatcaattccaaaacagtgattgaaatttcccaaaataattatggcttctgtcatctccagagataatctggcttggtttaccccataatctaatttcagaaaagaaagctttattttaacactcatctgaatcaacattaaagccttttctctcaaagcgtttattgagaaactcaaatgaatatactttttgaattactgtcatcaaaagtgtacggcttcctgtgctgcttgtgtcaaatggaacctgccctctaaagcactttctttcctttacttgcgtggtttcatgtaagctgtgctgtttagaaacaacatctcagactttacaaagaaatgacaaagaargcaattgcactttttaagggatatcgacaagcagtttctgttttctaaaggacaaaatacagagtgtgtgtcatttttaattagattctttcccctgctgagttggaaattccagtgcagcactgattgaccacagttgccaatctaaaagcacaaagacagaagtaaagctttatgctaattttatttcaatatgatagaaaatttatcttggyatgtccttttttagataactccagcaggaaactgtaactgctatgtctttaggaaaatgtagaagaaagaacattattrttctttaattcctacaaggtactygaaaaccttaagtgaaaaagatttctatctttttatcttagygcatttatggaaaaaatattaactrtcctgaatattttataattttgtaggaaaaatatgcatctattttttcttgacttcttttatatagtaataaaagttattttggaagctc

SEQ ID NO: 136 - DNA, 531 bp, Homo sapiens
atgctgctcttctgaggatccggcaagatggcagaagtagagcagaagaagaagcggaccttccgcaagttcacctaccgcggcgtggacctggaccagctgctggacatgtcctacgagcagctggagcagcygatgcagctgtacagtgcgcgccagcggcggcggctgaaccsgggcctgcggcggaagcagcactccctgctgaagcgcctgcgcaaggccaagaaggaggcgccgcccatggagaagcmggaagtggtgaagacgcacctgcgggacatgatcatcctacccgagatggtgggcagcatggtgggcgtctacaacggcaagaccttcaaccaggtggagatcaagcccgagatgatcggccactacctgggcgagttctccatcacctacaagcccgtaaagcacggccggcccggcatcggggccacccactcctcccgcttcatccctctcaagtaatggctcagctaataaaggcgcacatgactccaaaaaaaaaaaaaaaaagaagtccag

SEQ ID NO: 137 - DNA, 3678 bp, Homo sapiens
tgaaaagccagtaaagaggccataatacaggccagaataatagtggtttggggcagggtggtggcctcgcaggcatcacgcatgctcagaggtgcaagtcagctccagggggactcacatgcacataggcccacacacacacgtggacaggcaggcgggtgctctcacacccacagcagcacagaaacaaggcacactcaggcagacccacccgtccacaccctctgagtcactccaggactgggaggaagatgtgtgagttaaggcctgaacaaagcacatctttccaccacaaggccctggcaactagtgtggctgggggtggctgggcttccccaggcccagcacagggagcagggagttttctctagatattccctggatctagtgtcctcccaggagtcagatcataaggctccatgcaccccccacctgaactsgtctcccctcttcaccacccagcagctgtgagaccttgagctggttatttctcctctctgagcctcagtttccctgctgtagaatgggactcataactgcaacttcacagtatagtagtgaggcatccacaaagtaaacgtttcaagaatctggtctagggcaggagtccagcggagaagggaagaggaggtggtggagagcacaggctctggtacccaacagcctggccttgaatccacctcttgttttaagtgagtgacttgacctctctaaatttcacagtaatgagtagccagcatttatggggcacttactatgtactacttgctttgcaatcgttcaatgatcagtttcatctgtaagtgaggagcactgtaataactaccttatggggtcattctaagagattaaatgaggttctgctcataaagtgtttaacttcatgcctgactctgagtaaacactcaataaatggtgattgttattatcagccaaagcatatttgcttccttccagcatactagctctgttgcctttggttaagttatataaccttgctgtgcctcagtttcctatctgcagcttgggaggaataacagttctgaactcagagggtcgttgtgagtattgaacaagtcagaactcagaacactgcctggtacatagtaaatgctcaataargtcacctattcattcatacgatggtttttcctctaattctctcaggtaggcacggcccccaccaggcgccatggactggaagacactccaggccctactgagcrrtgtgaacaagtactccacagcgttcgggcgcatctggctgtccgtggtgttcgtcttcygggtgcyggtatacgtggtggctgcagagcscgtgtggggggatgagcagaaggactttgactgcaacaccaagcagcccggctgcaccaacrtctgctacgacaactacttccccatctccaacatccgcctctgggccctgcagctcatcttcgtcacawgcccctcgctgctggtcatcctgcacgtggcctaccgtgagragcgggagcgccggcaccgccagaaacacggggaccagtgcgccaagctgtacgacaaygcaggcaagaagcacggaggcctgtggtggacctacctgttcagcctcatcytcaagctcatcrttgagttcctcttcctctacctgctgcacactctctggcatggcttcaatatgccrcgcctggtgcagtgtgccaacgtggccccctgccccaacatcgtggactgctacattgccygacctaccragaagaaaatcttcacctayttcatggtgggygcctccgccgtctgcatcrtactcaccatctgtgagctctgctacctcatctgccacagggtcctgcgaggcctgcacaaggacaagcctcgagggggttgcagcccctcgtcctccgccagccgagcttccacctgccgctgccaccacaagctggtggaggctggggaggtggatccagacccaggcaataacaagctgcaggcttcagcacccaayctgacccccatctgaccacagggcaggggtggggcaacatgcgggctgccaatgggamatgcagggcrgtgtggcaggtggagaggtcctacaggggctgagtgaccccactctgagttcactaagttatgcaactttcgttttggcagatattttttgacactgggaactgggctgtctagccgggtataggtaacccacaggcccagtgccagccctcaaaggacatagactttgaaacaagcgaattaactatctacgctgcctgcaaggggccacttagggcactgctagcagggcttcaaccaggaagggatcaacccaggaagggatgatcaggagaggcttccctgaggacataatgtgtaagagaggtgagaagtsctcccaagcagacacaacagcagcacagaggtctggaggccacacaaaaagtgatgctcgccctgggctagcctcagcagacctaaggcatctctactccctccagaggagccgcccagattcytgcagtggagaggaggtcttccagcagcagcaggtctggagggctgagaatgaacctgactagagsttctggagatacccagaggtcccccaggtcatcacttggctcagtggaagccctctttccccaaatcctactccctcagcctcaggcagtggtgctcccatcttcctccccacaactgtgctcaggctggtgccagcctttcagaccctgctcccagggacttgggtggatgcgctgatagaacatcctcaagacagtttccttgaaatcaataaatactgtgttttatacaggttggctctgtctctggttctcccacactcccacccactgacagaaccctgaaggtagggaaaggtaagccctcagaaagggaaagagttccatggctcggggtggagctagggtsggggctgtggctgtgsctgcagctggggcttgagctggagctcggttaggctggggctgatgttgacagccgggagctgggtttgtaccagaggaggaggctggggtggaacctactgatacatatgttgggattctagctgtggccacaagagtgcgctgtgctccctctgcaacggtgcttccagccttcgtaattrgacttcaccctgagtacacacacaatcactgccactctcactatagacaaaccacactccctcctctgtcacccagtcactgccatctcaacacacatccccaccctgtgtacacacaatctctgttattcatactctcactccttatgcgcactctcaacagggcatgtagtctgcactcragcatgccatcccagcctcaccctgcattttattcggctcatcccattttccctgaacattttcgctgaactagggccctggcaggatgctgggactgtgcaaggaggtaggacctatgcccacggagctaagagacaggaacacaggctcatctcccgcactaaccaacccctgggatggctcacagccctgctcccagtgctgtgtcatgacctgaaatttaggggacaccaacayccaaggccagacccaaatggaaagcaaaagaggatgcaaggctatattaacccagtggaacacttagtgactatcacagccgaggccgggagtcagaaattcaggagccagtgagccaagcgccacagccagcaaagacaggtggg

SEQ ID NO: 138 - DNA, 987 bp, Homo sapiens
agattgaaatatcatactttgaatgataactctatatctatctataatatactatggtttaatgtttggaaatcaaacgcagtatttatttgtcatgtgaactactamaagtaaatctgcatggacttcttgcctggtgagttacacagaaaatgaaagtgattatcagtggctgtggcaagatgaaaggaaccaygccaggacttctgagggaaggaagagtgtttgggactgaaaaatccttgtctggatctagtcctcagccactcagaagctggcatgccatgactcaaagagcyrcccgtctggaatgaagrcagtgacccgtaactcccacctgaagagcaggtgcttggaaaatgctgccagtccgcaggaaaaagttgttactgctgctgtctgtgaccaagaggacactttatttcttgaaacaactgggggcaaactggctcycagataaggcttcagtccctactcatgtgaggaaaccagccctgcacctgagartttattcagtgacgataatactcacaagaccctttttggatttgtggcccamcccacaagttatagttccttctctgaatatttcatccagattgtgaagagcagcttctggcagccacagttgtactatgtgacccctacttcccatgcccaggactgattcgaccccgtagtagacacctaaagcaatcctgatcagtcagagtctttgttcctgacatttgggattagagcatggctgaaggtttaagacacaaacttggaagctgtggggcagcaatacacctccatgaggacagagaagcaggggaaataagaataaaccagaagctcacagaaacgcaggaaatacttctagagttctaacacttttcgggtttcttgttctagtccattcttgacacacttgtgcctcacagaagccaatggcaagaatgcagtcagatccttccaataaattccttttattctgtttacatt

SEQ ID NO: 139 - DNA, 10537 bp, Homo sapiens
gacccgggcggcggcggcggtcgaggagctcccatggcagggacgaggcggagggaaggcgaaaggggggcgaggagttaagccagagcctccgcggggcgggtttccgagggaggcacagagggaaacggctctcgcagccsgaggagggtcaggcgcggagcttgtcgcmcctcccgcgcattctgtccagcccgggctccggagatgcatctgcatcaggtcctcaccggrgctgtcaaccctggagacaactgctactccgtgggcagcgtcggggatgtcccyttcacggcatayggatcaggctgtgatattgttattttggcaaatgactttgaatgtgtacagatcattcctggkgctaagcatggaaacatccargtcagctgtgtggagtgttctaaccaacaaggaagaattgcagcttcatatggtaatgctgtttgtatatttgagcccttgggcataaattctcataaaagaaattgtcaactcaagtgccagtggcttaaaactgggcagttttttttgagttctgtgacatacaacttagcatgggatcctcaagataatagattgttgacagcaactgattctattcagttgtgggctcctccaggagatgatattctgsaagaggaggaagaaattgataatacagttcctcctgttttaaatgattggaagtgtgtctggcagtgcaaaacctcagtatctgtacatttgatggaatggtctcctgatggtgaatattttgctactgctggaaaggatgattgtcttttgaaagtgtggtatcctatgactggttggaagtcttcaattatacctcaggatcatcatgaagtaaaaaggagacagtcctctactcaattttcttttgtttacttggcacatccccgagctgtgacaggtttttcgtggcgcaaaactagcaagtatatgcccaggggttctgtctgtaatgtgttgttaacttcatgtcatgatggtgtgtgccggctctgggcagaaactttattaccagaagactgtcttttgggtgagcagatttgtgagactaccacttccagcattgccagcagcctttctcatgctggaagacacaaagacagaatacagcatgctcttgagacaatacaccatttgaaaaatttaaggaaaggacagaggaggtcatctgttcttgtaactcatgctgaattaatgcccgaccagacagcaatgcatgaagttcaaagacacatttcccaccatgcaaatgcactctgtcattttcatattgcagcaagcatcaaccctgccacagatattccaaatgtcttggttggcactgcatttaatgttgatgatggaaatgggggctttgtagttcattggttaaacaacaaggaatttcattttacatcatctacagaagtatttatgcatcaattacgaaaactttctgataagcaggtagatcatgaaaatgatgatgcagatagagaagatgaggaacattcacaggaggatagagaacggggtttacatatgaaattagaccatgatttatccctggatagagaatctgaggcaggtacaggatcatcagaacatgaagatggagaaagagaaggaagtcctagaacttactcacgacttagtgtaccaatgccactgcctacggttctgcttgatcggaagattgaaaygctgctaactgaatggaataagaatcctgatatgctttttacaatacaccctgtagatggtacctttctagtgtggcatgtgaagtatttggatgaatataatcctggaatatttagacaagttcaggtttctttttcttctcggattcctgttgcatttccctctggtgatgcaagctctcttagtaaaaatatcatgatgtatgcctgtataaatgcgacaaaagattctcaccacacgctgttacaccaggaggggatgtctgtaggcagtcctcacggatcacagccacactctagatcccacagtacacatatgaacatcttagctcccacagtaatgatgatctctaaacacatagatggttctttaaatcagtgggcagtcacttttgctgataagtctgcctttaccactgttctaactgtatctcacaaatttagatattgcggtcatcgatttcacctcaatgacctggcatgtcattcagttttaccactgttattgacatcctctcatcataatgctctattgactcctgaattagattgtcagtgggactcagacaataaattaagtagattaatggaccctgtaaaacatataaaaggttcctcgaaacaacctcttagaaatgcagcaactcgtacatttcatgacccaaatgcaatctacagtgaacttattctgtggcgtgtagacccaataggacctttgtcatacactggaggagtatcagaattggctcgaattaactctttacatacctcagcgttctctaatgtggcttggcttccaactctcattcccagttactgtctaggcacatactgcaattctgcaagtgcttgctttgttgcttctgatggcaaaaatctgagactctatcaagctgtagtggatgcaaggaaattattagatgaattgtcagacccagaatcttcaaaacttattggagaagtgtttaatattgtgagccaacagtctactgctcgacctggctgcattattgaactcgacgcaataaccaaccaatgtggctcaaatacacagttgcttcatgtgtttcaagaagacttcattataggatataaaccacataaggaagatatggagaaaaaggaaacagaaatattttttcagccatcacaaggataccgcccaccaccattttcagaaaagttctttctagtagtaattgagaaggacagcaataataactctattctgcatatgtggcaccttcatcttaaatctgtacaagcatgtttagctaaagcttcagaaggggcttcctctgagagtctactttcagtccctggacagaagaaygtagattcttctccagaaacctctcctagtgtgagccccatgccacattcttcatcaattgccaatcttcaaactgccagtaaacttattctgagttctagactggtgtatagccaaccccttgatctcccagaatcagttgaagtaataagagcaacgccttcagcaggccatctgagttcttcttcaatttatccagtgtgccttgcaccttatttagtggttacaacttgttctgacaataaagtacgcttctggaaatgttgtatggaagccaacccagagtgtaataaaagtgatgagaaagaaatttatcattggaagagatggcctttgatgaatgatgaaggagaagataatagcagtacagtgagcattgtgggaagaccagttgctgttagctgttcatacacaggtcgccttgcagtggcttataagcagcctatccaccataatggttttgtttctaaagaattttccatgcatgtttgtatatttgaatgtgaatctacaggaggatcagagtgggttttagaacaaacaattcatcttgatgatttggttaaggttgggagtgtacttgattcaagggtcagcgtcgacagtaatctgtttgtgtatagcaagtcagatgcactcttgagcaaggatagatatcttattccgaatatcaaacatttagtacatttggactgggtatcaaaagaagatggctcccacattcttacagtgggagtcggtgcgaatatcttcatgtatggaaggctttcaggaattgtgactgagcaaaccaacagtaaggatggagtagctgtcatcactttaccactaggtggtagtatcaagcaaggagttaagtcaagatgggttcttcttagatctatagacttggtatcttctgttgatggtactccttcactgcctgtttctctctcttgggtaagagatgggatattggtggtaggaatggattgtgaaatgcatgtatatgcacagtggaagcatgctgtcaaatttggagacactgaagctgatrgtyctaatgcagaagaggcagcaatgcaagatcattcgacctttaaatctaatatgctggcaagaaaaagtgttgttgaaggaacagctatttctgatgatgttttttgttcaccaactgtaattcaagatggtggcttatttgaggctgcacatgtactttcccctactcttccacaatatcatccaactcagctgttagaattgatggatttagggaaagtgcgaagggctaaagccattctctctcatttagtaaaatgtattgcaggtgaagtagcaatagttagagatcctgatgctggagaaggaactaagcgacatctctctcgaactattagtgtaagtggcagtacagcaaaggaaacagtcaccgtaggaaaagatggtactcgagattatactgagatagattctatccctccactaccactatatgcattacttgctgcagatcaagatacatcctacagaayttcagaagaaagtacaaagataccacagagctatgaagatcagacagtaagtcaaccagaggatcagtattcagagctgtttcaaatccaggatataccaacggatgrtattgatttagagcctgaaaagagagaaaacaaatcaaaagtaataaatctttctcaatatggaccagcttactttggccaagaacatgcaagggtactttcaagtcatcttatgcactcaagtctaccaggccttacccgtttggagcagatgttccttgtagctttggctgatacagtggctactactagtactgagcttgatgaaagcagagataagagttgctcaggaagagatacattagatgagtgtggtttgagatacttgttagctatgcgcctacacacatgccttttgacatcgctgcctcctttataccgagtgcagctacttcatcaaggtgtctctacatgccattttgcctgggcttttcattctgaggctgaagaagaactgattaatatgattccagcaattcagagaggggacccccagtggtctgaattaagagctatgggcataggrtggtgggtgaggaacattaacacgcttcgaagatgcattgaaaagrttgccaaagcttcttttcaaaggaacaatgatgccttagatgctgcactattctacctttcaatgaagaagaaagcagtagtgtggggtctgtttargtcacagcatgatgaaaaaatgacaacatttttcagccacaactttaatgaagatagatggcgaaaagctgctttgaaaaatgckttttccttacttggaaaacaacgctttgaacaatcggctgcttttttcttgctagctggttcattgaaagatgccatagaggtatgtcttgaaaaaatggaagatattcagctagccatggttattgcccgtttatatgaatctgaatttgagacttcatccacttatatatccatcctaaatcagaagattttgggttgccaaaaggatggctcaggattcagttgcaaaagattacatcctgatcctttcctgcgtagtcttgcctattgggtaatgaaagattacacccgagccttggacacattactggaacaaacaccaaaggaggatgatgaacatcaagttatcatcaagtcttgtaacccggtggcatttagtttttataactaccttcgaactcatcctttgctcattcgaagaaatcttgcctcccctgaaggaactttggcaaccttaggtctcaaaactgagaagaactttgttgataaaattaacctcatagaaagaaaattattctttaccactgcaaatgctcattttaaagttggatgccctgttttagccttggaggtactctccaaaattccaaaagtaaccaaaacatctgccttatctgcaaaaaaagatcagcctgacttcatttctcacaggatggatgatgtaccttcacattcaaaagctctgagtgatggcaatggaagttctggcattgaatggtcaaatgtaacttcatcacagtatgactggagtcagccaatagtaaaagttgatgaggaacctcttaatcttgattggggtgaagatcaygacagtgccttagatgaagaggaagacgatgctgttggtttagtgatgaaaagtacagatgccagggaaaaagataaacaatcagatcagaaggcctcagaccctaacatgttattaacacctcaggaagaggatgatcctgaaggtgatactgaagttgatgtgattgctgaacaactaaaattcagagcttgtttaaagatccttatgactgaattaagaacattggctacaggttatgaagtagatggaggaaaactcagatttcaactctataactggcttgaaaaggaaattgctgccttgcatgagatatgtaatcatgaatcagttattaaagagtattccagtaagacatattccaaagtagagagtgatctgctggatcaggaagaaatggtagacaaaccagatattggttcctatgagcgccatcaaatagaaagaagaagattgcaggccaaacgagagcatgcagaaagacgaaagtcgtggttgcagaaaaaccaagatctcctgagagtatttctcagctactgtagccttcatggggcccaaggtggtggtttggcttcagtaaggatggaactcaaatttttgctacaagaatcacaacaggaaactacagtaaagcagctccagtctccactaccactgcctaccaccctacctctgctttcagcaagtattgcgtcaacaaaaacagtcatagctaatcctgtattgtacttaaataatcacatccatgatatactttatactattgttcagatgaaaacaccacctcatcccagtattgaagatgtgaaggtgcacacacttcattcactagcagcatcactttctgcatcaatttaccaagcattatgtgacagtcatagctacagtcaaacagaaggaaatcagtttacaggaatggcttatcaaggacttcttttaagtgatcgtagaagactaaggacagaaagcattgaagaacacgcaacaccaaattcatctcctgctcaatggcctggtgtgagctcacttattaatcttttgagttcagcccaagatgaagaccagccaaaactgaacattttgctatgtgaagctgttgttgctgtttacttaagtttattgatacatgctcttgccacaaattcctccagtgaattatttcggcttgcagcccacccattaaataatcgaatgtgggctgctgtttttggaggcggtgtaaaacttgttgtgaaacctcgaagacaatcagaaaatatttcagcacctcctgtcctttctgaagacatagataaacaccgtaggagatttaacatgagaatgctcgtccctggaaggcctgtaaaagatgctaccccaccaccggtgcctgcagaaagaccatcttacaaagaaaaatttattcctcccgaacttagtatgtgggattattttgttgcaaagccatttcttcctttgtctgatagtggtgttatatatgattctgatgaaagcattcatagtgatgaagaagatgatgcctttttttcagatacacaaatacaggagcaccaagatccaaattcctatagctgggctcttctacatttgacaatggttaaactagcacttcacaatgtcaagaatttctttcctattgctggactggaattctctgagctgcctgtaacatcaccattaggtattgctgtgattaaaaacttggagaactgggaacagatcttgcaagagaaaatggatcagtttgaaggtccaccccctaactatatcaacacatatccaactgacctttcagtgggagctggaccagctattcttcgaaataaagcaatgctagaacctgaaaataccccattcaagtcccgggattcttctgcatttccagtcaaacgactttggcatttccttgttaaacaagaggtccttcaagagacatttattagatatattttcactaagaaaagaaagcagagtgaggttgaagctgatctgggctatccaggtggaaaggcgaaagtcatccataaggaatctgatatgatcatggcattttctgttaataaggcaaattgtaatgaaattgttttggcttcaacacatgatgttcaagaacttgatgttacttctctactggcctgtcagtcatacatatggatcggagaagaatatgacagagaatccaaaagttcagatgatgttgattatcgtggttccactacaactctttatcaacccagtgcaacatcctattcagcaagtcaggtgcatccaccttcatctctgccatggctgggcactggacagactagcactggagctagtgtgcttatgaaaaggaatctacataatgttaagagaatgacttcacacccagtccatcaatactatcttacaggtgctcaggacggcagtgtacgaatgtttgaatggacgcggcctcagcaacttgtctgctttcgtcaagctggcaatgcaagagttactagattatattttaattcacaaggcaacaagtgtggtgttgcggatggagagggttttctgagtatctggcaagttaaccaaactgcatcaaatcctaaaccttatatgagttggcagtgccacagtaaagccacaagtgactttgcatttattacctcttcaagtctagttgccacatctggacactccaatgacaataggtttcacgtgccacgatcatggtgccacggtactgcagtatgcacccaaacagcaactcctaatctcggggggtaggaaaggacacgtctgcatttttgacatcaggcaaaggcagctcattcacacgttccaggcccatgactcagctattaaggctctggccttggatccctatgaggaatattttaccacaggttcagcagaaggtaacataaaggtttggagattgacaggccatggcctaattcattcatttaaaagtgaacatgctaagcagtccatatttcgaaacattggggctggagtcatgcagattgacatcatccagggcaatcggctcttctcctgtggtgcagatggcacgctgaaaaccagggttttgcccaatgcttttaacatccctaacagaattcttgacattctataaagattggggttttatttttatatacatttcagttaaaaggcacactacagtcatcactaggcaattctgctttctaagcagttgtattgaaaacagagaatctctgtgtagaatttgaatatgayccaagctgagtattatctaaacaggttggtggaatgaatgcgcatgtaccttattatgctgacatactaaaaaaaataaaacctagtattgtatgaaggatagctattctttacagcatttagcaaacctgattcagaaaacatttgagattagcaaattagtaacttgaaataatgaaaaggacgtttataccaaattaaggaagaaaatgttgctgatttgggtttttcttcctgttcttaccactgactgaagcatgcctgcagtctcctcctctgttgaatgaaggataatcataaggtgtttgttaggagcgctagaccacctggaaaactttyttagctgtggagcagtgcgcagtgaccagttctctgctgtgagaggccgtttccattctttcctgctgaatatttttcctgttagtgtttatactgagctagtactgtaacttgcaaatgagtgcaaatttaaatgcaatgttttactcacaatttgcacattcacattttttggactgctagtttttctatttaaatatttgccttcatgttaggaatgtactatgtgaacatgacatatttgtagttaaccaaacacaccttcttagtccagtttagtactttttcttttcgtgtattcaaggttaaacacccaaacatttaaggrtatgttgaaactacaccaatagagcatttcatatcataattaaaatgaatgttaggcttcttgtggccagttaatagttgatgagattggtgacattatttattgccacagcctattgtataaactatgcagagttaaatatttgcttgtaaaatattagccaatgttgtcattattttgatgtatttccttggttatgaccaaaaatatgttgagatactgaaactaatgtctgtgtgtttaaatgtttaccagcaaattgtcttatcatgttaatgagaatgttcaatgcctgtgtggtaaatagtaaatacaatggcataaaagtaactttctctgaagatgtgatgttcaggctgtgaaatatatatgtaaaagaaaaataaatgttatttgttagagtttttagtttgatactgtttttgaccattgagatttttaatttgataaaatgtttaactgttagagaatttgcaagct

SEQ ID NO: 140 - DNA, 10590 bp, Homo sapiens
gacccgggcggcggcggcggtcgaggagctcccatggcagggacgaggcggagggaaggcgaaaggggggcgaggagttaagccagagcctccgcggggcgggtttccgagggaggcacagagggaaacggctctcgcagccsgaggagggtcaggcgcggagcttgtcgcmcctcccgcgcattctgtccagcccgggctccggagatgcatctgcatcaggtcctcaccggrgctgtcaaccctggagacaactgctactccgtgggcagcgtcggggatgtcccyttcacggcatayggatcaggctgtgatattgttattttggcaaatgactttgaatgtgtacagatcattcctggkgctaagcatggaaacatccargtcagctgtgtggagtgttctaaccaacaaggaagaattgcagcttcatatggtaatgctgtttgtatatttgagcccttgggcataaattctcataaaagaaattgtcaactcaagtgccagtggcttaaaactgggcagttttttttgagttctgtgacatacaacttagcatgggatcctcaagataatagattgttgacagcaactgattctattcagttgtgggctcctccaggagatgatattctgsaagaggaggaagaaattgataatacagttcctcctgttttaaatgattggaagtgtgtctggcagtgcaaaacctcagtatctgtacatttgatggaatggtctcctgatggtgaatattttgctactgctggaaaggatgattgtcttttgaaagtgtggtatcctatgactggttggaagtcttcaattatacctcaggatcatcatgaagtaaaaaggagacagtcctctactcaattttcttttgtttacttggcacatccccgagctgtgacaggtttttcgtggcgcaaaactagcaagtatatgcccaggggttctgtctgtaatgtgttgttaacttcatgtcatgatggtgtgtgccggctctgggcagaaactttattaccagaagactgtcttttgggtgagcagatttgtgagactaccacttccagcattgccagcagcctttctcatgctggaagacacaaagacagaatacagcatgctcttgagacaatacaccatttgaaaaatttaaggaaaggacagaggaggtcatctgttcttgtaactcatgctgaattaatgcccgaccagacagcaatgcatgaagttcaaagacacatttcccaccatgcaaatgcactctgtcattttcatattgcagcaagcatcaaccctgccacagatattccaaatgtcttggttggcactgcatttaatgttgatgatggaaatgggggctttgtagttcattggttaaacaacaaggaatttcattttacatcatctacagaagtatttatgcatcaattacgaaaactttctgataagcaggtagatcatgaaaatgatgatgcagatagagaagatgaggaacattcacaggaggatagagaacggggtttacatatgaaattagaccatgatttatccctggatagagaatctgaggcaggtacaggatcatcagaacatgaagatggagaaagagaaggaagtcctagaacttactcacgacttagtgtaccaatgccactgcctacggttctgcttgatcggaagattgaaaygctgctaactgaatggaataagaatcctgatatgctttttacaatacaccctgtagatggtacctttctagtgtggcatgtgaagtatttggatgaatataatcctggaatatttagacaagttcaggtttctttttcttctcggattcctgttgcatttccctctggtgatgcaagctctcttagtaaaaatatcatgatgtatgcctgtataaatgcgacaaaagattctcaccacacgctgttacaccaggaggggatgtctgtaggcagtcctcacggatcacagccacactctagatcccacagtacacatatgaacatcttagctcccacagtaatgatgatctctaaacacatagatggttctttaaatcagtgggcagtcacttttgctgataagtctgcctttaccactgttctaactgtatctcacaaatttagatattgcggtcatcgatttcacctcaatgacctggcatgtcattcagttttaccactgttattgacatcctctcatcataatgctctattgactcctgaattagattgtcagtgggactcagacaataaattaagtagattaatggaccctgtaaaacatataaaaggttcctcgaaacaacctcttagaaatgcagcaactcgtacatttcatgacccaaatgcaatctacagtgaacttattctgtggcgtgtagacccaataggacctttgtcatacactggaggagtatcagaattggctcgaattaactctttacatacctcagcgttctctaatgtggcttggcttccaactctcattcccagttactgtctaggcacatactgcaattctgcaagtgcttgctttgttgcttctgatggcaaaaatctgagactctatcaagctgtagtggatgcaaggaaattattagatgaattgtcagacccagaatcttcaaaacttattggagaagtgtttaatattgtgagccaacagtctactgctcgacctggctgcattattgaactcgacgcaataaccaaccaatgtggctcaaatacacagttgcttcatgtgtttcaagaagacttcattataggatataaaccacataaggaagatatggagaaaaaggaaacagaaatattttttcagccatcacaaggataccgcccaccaccattttcagaaaagttctttctagtagtaattgagaaggacagcaataataactctattctgcatatgtggcaccttcatcttaaatctgtacaagcatgtttagctaaagcttcagaaggggcttcctctgagagtctactttcagtccctggacagaagaaygtagattcttctccagaaacctctcctagtgtgagccccatgccacattcttcatcaattgccaatcttcaaactgccagtaaacttattctgagttctagactggtgtatagccaaccccttgatctcccagaatcagttgaagtaataagagcaacgccttcagcaggccatctgagttcttcttcaatttatccagtgtgccttgcaccttatttagtggttacaacttgttctgacaataaagtacgcttctggaaatgttgtatggaagccaacccagagtgtaataaaagtgatgagaaagaaatttatcattggaagagatggcctttgatgaatgatgaaggagaagataatagcagtacagtgagcattgtgggaagaccagttgctgttagctgttcatacacaggtcgccttgcagtggcttataagcagcctatccaccataatggttttgtttctaaagaattttccatgcatgtttgtatatttgaatgtgaatctacaggaggatcagagtgggttttagaacaaacaattcatcttgatgatttggttaaggttgggagtgtacttgattcaagggtcagcgtcgacagtaatctgtttgtgtatagcaagtcagatgcactcttgagcaaggatagatatcttattccgaatatcaaacatttagtacatttggactgggtatcaaaagaagatggctcccacattcttacagtgggagtcggtgcgaatatcttcatgtatggaaggctttcaggaattgtgactgagcaaaccaacagtaaggatggagtagctgtcatcactttaccactaggtggtagtatcaagcaaggagttaagtcaagatgggttcttcttagatctatagacttggtatcttctgttgatggtactccttcactgcctgtttctctctcttgggtaagagatgggatattggtggtaggaatggattgtgaaatgcatgtatatgcacagtggaagcatgctgtcaaatttggagacactgaagctgatrgtyctaatgcagaagaggcagcaatgcaagatcattcgacctttaaatctaatatgctggcaagaaaaagtgttgttgaaggaacagctatttctgatgatgttttttgttcaccaactgtaattcaagatggtggcttatttgaggctgcacatgtactttcccctactcttccacaatatcatccaactcagctgttagaattgatggatttagggaaagtgcgaagggctaaagccattctctctcatttagtaaaatgtattgcaggtgaagtagcaatagttagagatcctgatgctggagaaggaactaagcgacatctctctcgaactattagtgtaagtggcagtacagcaaaggaaacagtcaccgtaggaaaagatggtactcgagattatactgagatagattctatccctccactaccactatatgcattacttgctgcagatcaagatacatcctacagaayttcagaagaaagtacaaagataccacagagctatgaagatcagacagtaagtcaaccagaggatcagtattcagagctgtttcaaatccaggatataccaacggatgrtattgatttagagcctgaaaagagagaaaacaaatcaaaagtaataaatctttctcaatatggaccagcttactttggccaagaacatgcaagggtactttcaagtcatcttatgcactcaagtctaccaggccttacccgtttggagcagatgttccttgtagctttggctgatacagtggctactactagtactgagcttgatgaaagcagagataagagttgctcaggaagagatacattagatgagtgtggtttgagatacttgttagctatgcgcctacacacatgccttttgacatcgctgcctcctttataccgagtgcagctacttcatcaaggtgtctctacatgccattttgcctgggcttttcattctgaggctgaagaagaactgattaatatgattccagcaattcagagaggggacccccagtggtctgaattaagagctatgggcataggrtggtgggtgaggaacattaacacgcttcgaagatgcattgaaaagrttgccaaagcttcttttcaaaggaacaatgatgccttagatgctgcactattctacctttcaatgaagaagaaagcagtagtgtggggtctgtttargtcacagcatgatgaaaaaatgacaacatttttcagccacaactttaatgaagatagatggcgaaaagctgctttgaaaaatgckttttccttacttggaaaacaacgctttgaacaatcggctgcttttttcttgctagctggttcattgaaagatgccatagaggtatgtcttgaaaaaatggaagatattcagctagccatggttattgcccgtttatatgaatctgaatttgagacttcatccacttatatatccatcctaaatcagaagattttgggttgccaaaaggatggctcaggattcagttgcaaaagattacatcctgatcctttcctgcgtagtcttgcctattgggtaatgaaagattacacccgagccttggacacattactggaacaaacaccaaaggaggatgatgaacatcaagttatcatcaagtcttgtaacccggtggcatttagtttttataactaccttcgaactcatcctttgctcattcgaagaaatcttgcctcccctgaaggaactttggcaaccttaggtctcaaaactgagaagaactttgttgataaaattaacctcatagaaagaaaattattctttaccactgcaaatgctcattttaaagttggatgccctgttttagccttggaggtactctccaaaattccaaaagtaaccaaaacatctgccttatctgcaaaaaaagatcagcctgacttcatttctcacaggatggatgatgtaccttcacattcaaaagctctgagtgatggcaatggaagttctggcattgaatggtcaaatgtaacttcatcacagtatgactggagtcagccaatagtaaaagttgatgaggaacctcttaatcttgattggggtgaagatcaygacagtgccttagatgaagaggaagacgatgctgttggtttagtgatgaaaagtacagatgccagggaaaaagataaacaatcagatcagaaggcctcagaccctaacatgttattaacacctcaggaagaggatgatcctgaaggtgatactgaagttgatgtgattgctgaacaactaaaattcagagcttgtttaaagatccttatgactgaattaagaacattggctacaggttatgaagtagatggaggaaaactcagatttcaactctataactggcttgaaaaggaaattgctgccttgcatgagatatgtaatcatgaatcagttattaaagagtattccagtaagacatattccaaagtagagagtgatctgctggatcaggaagaaatggtagacaaaccagatattggttcctatgagcgccatcaaatagaaagaagaagattgcaggccaaacgagagcatgcagaaagacgaaagtcgtggttgcagaaaaaccaagatctcctgagagtatttctcagctactgtagccttcatggggcccaaggtggtggtttggcttcagtaaggatggaactcaaatttttgctacaagaatcacaacaggaaactacagtaaagcagctccagtctccactaccactgcctaccaccctacctctgctttcagcaagtattgcgtcaacaaaaacagtcatagctaatcctgtattgtacttaaataatcacatccatgatatactttatactattgttcagatgaaaacaccacctcatcccagtattgaagatgtgaaggtgcacacacttcattcactagcagcatcactttctgcatcaatttaccaagcattatgtgacagtcatagctacagtcaaacagaaggaaatcagtttacaggaatggcttatcaaggacttcttttaagtgatcgtagaagactaaggacagaaagcattgaagaacacgcaacaccaaattcatctcctgctcaatggcctggtgtgagctcacttattaatcttttgagttcagcccaagatgaagaccagccaaaactgaacattttgctatgtgaagctgttgttgctgtttacttaagtttattgatacatgctcttgccacaaattcctccagtgaattatttcggcttgcagcccacccattaaataatcgaatgtgggctgctgtttttggaggcggtgtaaaacttgttgtgaaacctcgaagacaatcagaaaatatttcagcacctcctgtcctttctgaagacatagataaacaccgtaggagatttaacatgagaatgctcgtccctggaaggcctgtaaaagatgctaccccaccaccggtgcctgcagaaagaccatcttacaaagaaaaatttattcctcccgaacttagtatgtgggattattttgttgcaaagccatttcttcctttgtctgatagtggtgttatatatgattctgatgaaagcattcatagtgatgaagaagatgatgcctttttttcagatacacaaatacaggagcaccaagatccaaattcctatagctgggctcttctacatttgacaatggttaaactagcacttcacaatgtcaagaatttctttcctattgctggactggaattctctgagctgcctgtaacatcaccattaggtattgctgtgattaaaaacttggagaactgggaacagatcttgcaagagaaaatggatcagtttgaaggtccaccccctaactatatcaacacatatccaactgacctttcagtgggagctggaccagctattcttcgaaataaagcaatgctagaacctgaaaataccccattcaagtcccgggattcttctgcatttccagtcaaacgactttggcatttccttgttaaacaagaggtccttcaagagacatttattagatatattttcactaagaaaagaaagcagagtgaggttgaagctgatctgggctatccaggtggaaaggcgaaagtcatccataaggaatctgatatgatcatggcattttctgttaataaggcaaattgtaatgaaattgttttggcttcaacacatgatgttcaagaacttgatgttacttctctactggcctgtcagtcatacatatggatcggagaagaatatgacagagaatccaaaagttcagatgatgttgattatcgtggttccactacaactctttatcaacccagtgcaacatcctattcagcaagtcaggtgcatccaccttcatctctgccatggctgggcactggacagactagcactggagctagtgtgcttatgaaaaggaatctacataatgttaagagaatgacttcacacccagtccatcaatactatcttacaggtgctcaggacggcagtgtacgaatgtttgaatggacgcggcctcagcaacttgtctgctttcgtcaagctggcaatgcaagagttactagattatattttaattcacaaggcaacaagtgtggtgttgcggatggagagggttttctgagtatctggcaagttaaccaaactgcatcaaatcctaaaccttatatgagttggcagtgccacagtaaagccacaagtgactttgcatttattacctcttcaagtctagttgccacatctggacactccaatgacaatagaaatgtttgcctctgggacacattaatatcacccggaaacagcctcattcatggtttcacgtgccacgatcatggtgccacggtactgcagtatgcacccaaacagcaactcctaatctcggggggtaggaaaggacacgtctgcatttttgacatcaggcaaaggcagctcattcacacgttccaggcccatgactcagctattaaggctctggccttggatccctatgaggaatattttaccacaggttcagcagaaggtaacataaaggtttggagattgacaggccatggcctaattcattcatttaaaagtgaacatgctaagcagtccatatttcgaaacattggggctggagtcatgcagattgacatcatccagggcaatcggctcttctcctgtggtgcagatggcacgctgaaaaccagggttttgcccaatgcttttaacatccctaacagaattcttgacattctataaagattggggttttatttttatatacatttcagttaaaaggcacactacagtcatcactaggcaattctgctttctaagcagttgtattgaaaacagagaatctctgtgtagaatttgaatatgayccaagctgagtattatctaaacaggttggtggaatgaatgcgcatgtaccttattatgctgacatactaaaaaaaataaaacctagtattgtatgaaggatagctattctttacagcatttagcaaacctgattcagaaaacatttgagattagcaaattagtaacttgaaataatgaaaaggacgtttataccaaattaaggaagaaaatgttgctgatttgggtttttcttcctgttcttaccactgactgaagcatgcctgcagtctcctcctctgttgaatgaaggataatcataaggtgtttgttaggagcgctagaccacctggaaaactttyttagctgtggagcagtgcgcagtgaccagttctctgctgtgagaggccgtttccattctttcctgctgaatatttttcctgttagtgtttatactgagctagtactgtaacttgcaaatgagtgcaaatttaaatgcaatgttttactcacaatttgcacattcacattttttggactgctagtttttctatttaaatatttgccttcatgttaggaatgtactatgtgaacatgacatatttgtagttaaccaaacacaccttcttagtccagtttagtactttttcttttcgtgtattcaaggttaaacacccaaacatttaaggrtatgttgaaactacaccaatagagcatttcatatcataattaaaatgaatgttaggcttcttgtggccagttaatagttgatgagattggtgacattatttattgccacagcctattgtataaactatgcagagttaaatatttgcttgtaaaatattagccaatgttgtcattattttgatgtatttccttggttatgaccaaaaatatgttgagatactgaaactaatgtctgtgtgtttaaatgtttaccagcaaattgtcttatcatgttaatgagaatgttcaatgcctgtgtggtaaatagtaaatacaatggcataaaagtaactttctctgaagatgtgatgttcaggctgtgaaatatatatgtaaaagaaaaataaatgttatttgttagagtttttagtttgatactgtttttgaccattgagatttttaatttgataaaatgtttaactgttagagaatttgcaagct

SEQ ID NO: 141 - DNA, 507 bp, Homo sapiens
gacccgggcggcggcggcggtcgaggagctcccatggcagggacgaggcggagggaaggcgaaaggggggcgaggagttaagccagagcctccgcggggcgggtttccgagggaggcacagagggaaacggctctcgcagccsgaggagggtcaggcgcggagcttgtcgcmcctcccgcgcattctgtccagcccgggctccggagatgcatctgcatcaggtcctcaccggrgctgtcaaccctggagacaactgctactccgtgggcagcgtcggggatgtcccyttcacggcatayggatcaggctgtgatattgttattttggcaaatgactttgaatgtgtacagatcattcctggkgctaagcatggaaacatccargtcagctgtgtggagtgttctaaccaacaaggaagaattgcagcttcatatggtaatgctgtttgtatatttgagcccttgggcataaattctcataaaagaaattgtgtaagtattaaccaa

SEQ ID NO: 142 - DNA, 10073 bp, Homo sapiens
gacccgggcggcggcggcggtcgaggagctcccatggcagggacgaggcggagggaaggcgaaaggggggcgaggagttaagccagagcctccgcggggcgggtttccgagggaggcacagagggaaacggctctcgcagccsgaggagggtcaggcgcggagcttgtcgcmcctcccgcgcattctgtccagcccgggctccggagatgcatctgcatcaggtcctcaccggrgctgtcaaccctggagacaactgctactccgtgggcagcgtcggggatgtcccyttcacggcatayggatcaggctgtgatattgttattttggcaaatgactttgaatgtgtacagatcattcctggkgctaagcatggaaacatccargtcagctgtgtggagtgttctaaccaacaaggaagaattgcagcttcatatggtaatgctgtttgtatatttgagcccttgggcataaattctcataaaagaaattgtcaactcaagtgccagtggcttaaaactgggcagttttttttgagttctgtgacatacaacttagcatgggatcctcaagataatagattgttgacagcaactgattctattcagttgtgggctcctccaggagatgatattctgsaagaggaggaagaaattgataatacagttcctcctgttttaaatgattggaagtgtgtctggcagtgcaaaacctcagtatctgtacatttgatggaatggtctcctgatggtgaatattttgctactgctggaaaggatgattgtcttttgaaagtgtggtatcctatgactggttggaagtcttcaattatacctcaggatcatcatgaagtaaaaaggagacagtcctctactcaattttcttttgtttacttggcacatccccgagctgtgacaggtttttcgtggcgcaaaactagcaagtatatgcccaggggttctgtctgtaatgtgttgttaacttcatgtcatgatggtgtgtgccggctctgggcagaaactttattaccagaagactgtcttttgggtgagcagatttgtgagactaccacttccagcattgccagcagcctttctcatgctggaagacacaaagacagaatacagcatgctcttgagacaatacaccatttgaaaaatttaaggaaaggacagaggaggtcatctgttcttgtaactcatgctgaattaatgcccgaccagacagcaatgcatgaagttcaaagacacatttcccaccatgcaaatgcactctgtcattttcatattgcagcaagcatcaaccctgccacagatattccaaatgtcttggttggcactgcatttaatgttgatgatggaaatgggggctttgtagttcattggttaaacaacaaggaatttcattttacatcatctacagaagtatttatgcatcaattacgaaaactttctgataagcaggtagatcatgaaaatgatgatgcagatagagaagatgaggaacattcacaggaggatagagaacggggtttacatatgaaattagaccatgatttatccctggatagagaatctgaggcaggtacaggatcatcagaacatgaagatggagaaagagaaggaagtcctagaacttactcacgacttagtgtaccaatgccactgcctacggttctgcttgatcggaagattgaaaygctgctaactgaatggaataagaatcctgatatgctttttacaatacaccctgtagatggtacctttctagtgtggcatgtgaagtatttggatgaatataatcctggaatatttagacaagttcaggtttctttttcttctcggattcctgttgcatttccctctggtgatgcaagctctcttagtaaaaatatcatgatgtatgcctgtataaatgcgacaaaagattctcaccacacgctgttacaccaggaggggatgtctgtaggcagtcctcacggatcacagccacactctagatcccacagtacacatatgaacatcttagctcccacagtaatgatgatctctaaacacatagatggttctttaaatcagtgggcagtcacttttgctgataagtctgcctttaccactgttctaactgtatctcacaaatttagatattgcggtcatcgatttcacctcaatgacctggcatgtcattcagttttaccactgttattgacatcctctcatcataatgctctattgactcctgaattagattgtcagtgggactcagacaataaattaagtagattaatggaccctgtaaaacatataaaaggttcctcgaaacaacctcttagaaatgcagcaactcgtacatttcatgacccaaatgcaatctacagtgaacttattctgtggcgtgtagacccaataggacctttgtcatacactggaggagtatcagaattggctcgaattaactctttacatacctcagcgttctctaatgtggcttggcttccaactctcattcccagttactgtctaggcacatactgcaattctgcaagtgcttgctttgttgcttctgatggcaaaaatctgagactctatcaagctgtagtggatgcaaggaaattattagatgaattgtcagacccagaatcttcaaaacttattggagaagtgtttaatattgtgagccaacagtctactgctcgacctggctgcattattgaactcgacgcaataaccaaccaatgtggctcaaatacacagttgcttcatgtgtttcaagaagacttcattataggatataaaccacataaggaagatatggagaaaaaggaaacagaaatattttttcagccatcacaaggataccgcccaccaccattttcagaaaagttctttctagtagtaattgagaaggacagcaataataactctattctgcatatgtggcaccttcatcttaaatctgtacaagcatgtttagctaaagcttcagaaggggcttcctctgagagtctactttcagtccctggacagaagaaygtagattcttctccagaaacctctcctagtgtgagccccatgccacattcttcatcaattgccaatcttcaaactgccagtaaacttattctgagttctagactggtgtatagccaaccccttgatctcccagaatcagttgaagtaataagagcaacgccttcagcaggccatctgagttcttcttcaatttatccagtgtgccttgcaccttatttagtggttacaacttgttctgacaataaagtacgcttctggaaatgttgtatggaagccaacccagagtgtaataaaagtgatgagaaagaaatttatcattggaagagatggcctttgatgaatgatgaaggagaagataatagcagtacagtgagcattgtgggaagaccagttgctgttagctgttcatacacaggtcgccttgcagtggcttataagcagcctatccaccataatggttttgtttctaaagaattttccatgcatgtttgtatatttgaatgtgaatctacaggaggatcagagtgggttttagaacaaacaattcatcttgatgatttggttaaggttgggagtgtacttgattcaagggtcagcgtcgacagtaatctgtttgtgtatagcaagtcagatgcactcttgagcaaggatagatatcttattccgaatatcaaacatttagtacatttggactgggtatcaaaagaagatggctcccacattcttacagtgggagtcggtgcgaatatcttcatgtatggaaggctttcaggaattgtgactgagcaaaccaacagtaaggatggagtagctgtcatcactttaccactaggtggtagtatcaagcaaggagttaagtcaagatgggttcttcttagatctatagacttggtatcttctgttgatggtactccttcactgcctgtttctctctcttgggtaagagatgggatattggtggtaggaatggattgtgaaatgcatgtatatgcacagtggaagcatgctgtcaaatttggagacactgaagctgatrgtyctaatgcagaagaggcagcaatgcaagatcattcgacctttaaatctaatatgctggcaagaaaaagtgttgttgaaggaacagctatttctgatgatgttttttgttcaccaactgtaattcaagatggtggcttatttgaggctgcacatgtactttcccctactcttccacaatatcatccaactcagctgttagaattgatggatttagggaaagtgcgaagggctaaagccattctctctcatttagtaaaatgtattgcaggtgaagtagcaatagttagagatcctgatgctggagaaggaactaagcgacatctctctcgaactattagtgtaagtggcagtacagcaaaggaaacagtcaccgtaggaaaagatggtactcgagattatactgagatagattctatccctccactaccactatatgcattacttgctgcagatcaagatacatcctacagaayttcagaagaaagtacaaagataccacagagctatgaagatcagacagtaagtcaaccagaggatcagtattcagagctgtttcaaatccaggatataccaacggatgrtattgatttagagcctgaaaagagagaaaacaaatcaaaagtaataaatctttctcaatatggaccagcttactttggccaagaacatgcaagggtactttcaagtcatcttatgcactcaagtctaccaggccttacccgtttggagcagatgttccttgtagctttggctgatacagtggctactactagtactgagcttgatgaaagcagagataagagttgctcaggaagagatacattagatgagtgtggtttgagatacttgttagctatgcgcctacacacatgccttttgacatcgctgcctcctttataccgagtgcagctacttcatcaaggtgtctctacatgccattttgcctgggcttttcattctgaggctgaagaagaactgattaatatgattccagcaattcagagaggggacccccagtggtctgaattaagagctatgggcataggrtggtgggtgaggaacattaacacgcttcgaagatgcattgaaaagrttgccaaagcttcttttcaaaggaacaatgatgccttagatgctgcactattctacctttcaatgaagaagaaagcagtagtgtggggtctgtttargtcacagcatgatgaaaaaatgacaacatttttcagccacaactttaatgaagatagatggcgaaaagctgctttgaaaaatgckttttccttacttggaaaacaacgctttgaacaatcggctgcttttttcttgctagctggttcattgaaagatgccatagaggtatgtcttgaaaaaatggaagatattcagctagccatggttattgcccgtttatatgaatctgaatttgagacttcatccacttatatatccatcctaaatcagaagattttgggttgccaaaaggatggctcaggattcagttgcaaaagattacatcctgatcctttcctgcgtagtcttgcctattgggtaatgaaagattacacccgagccttggacacattactggaacaaacaccaaaggaggatgatgaacatcaagttatcatcaagtcttgtaacccggtggcatttagtttttataactaccttcgaactcatcctttgctcattcgaagaaatcttgcctcccctgaaggaactttggcaaccttaggtctcaaaactgagaagaactttgttgataaaattaacctcatagaaagaaaattattctttaccactgcaaatgctcattttaaagttggatgccctgttttagccttggaggtactctccaaaattccaaaagtaaccaaaacatctgccttatctgcaaaaaaagatcagcctgacttcatttctcacaggatggatgatgtaccttcacattcaaaagctctgagtgatggcaatggaagttctggcattgaatggtcaaatgtaacttcatcacagtatgactggagtcagccaatagtaaaagttgatgaggaacctcttaatcttgattggggtgaagatcaygacagtgccttagatgaagaggaagacgatgctgttggtttagtgatgaaaagtacagatgccagggaaaaagataaacaatcagatcagaaggcctcagaccctaacatgttattaacacctcaggaagaggatgatcctgaaggtgatactgaagttgatgtgattgctgaacaactaaaattcagagcttgtttaaagatccttatgactgaattaagaacattggctacaggttatgaagtagatggaggaaaactcagatttcaactctataactggcttgaaaaggaaattgctgccttgcatgagatatgtaatcatgaatcagttattaaagagtattccagtaagacatattccaaagtagagagtgatctgctggatcaggaagaaatggtagacaaaccagatattggttcctatgagcgccatcaaatagaaagaagaagattgcaggccaaacgagagcatgcagaaagacgaaagtcgtggttgcagaaaaaccaagatctcctgagagtatttctcagctactgtagccttcatggggcccaaggtggtggtttggcttcagtaaggatggaactcaaatttttgctacaagaatcacaacaggaaactacagtaaagcagctccagtctccactaccactgcctaccaccctacctctgctttcagcaagtattgcgtcaacaaaaacagtcatagctaatcctgtattgtacttaaataatcacatccatgatatactttatactattgttcagatgaaaacaccacctcatcccagtattgaagatgtgaaggtgcacacacttcattcactagcagcatcactttctgcatcaatttaccaagcattatgtgacagtcatagctacagtcaaacagaaggaaatcagtttacaggaatggcttatcaaggacttcttttaagtgatcgtagaagactaaggacagaaagcattgaagaacacgcaacaccaaattcatctcctgctcaatggcctggtgtgagctcacttattaatcttttgagttcagcccaagatgaagaccagccaaaactgaacattttgctatgtgaagctgttgttgctgtttacttaagtttattgatacatgctcttgccacaaattcctccagtgaattatttcggcttgcagcccacccattaaataatcgaatgtgggctgctgtttttggaggcggtgtaaaacttgttgtgaaacctcgaagacaatcagaaaatatttcagcacctcctgtcctttctgaagacatagataaacaccgtaggagatttaacatgagaatgctcgtccctggaaggcctgtaaaagatgctaccccaccaccggtgcctgcagaaagaccatcttacaaagaaaaatttattcctcccgaacttagtatgtgggattattttgttgcaaagccatttcttcctttgtctgatagtggtgttatatatgattctgatgaaagcattcatagtgatgaagaagatgatgcctttttttcagatacacaaatacaggagcaccaagatccaaattcctatagctgggctcttctacatttgacaatggttaaactagcacttcacaatgtcaagaatttctttcctattgctggactggaattctctgagctgcctgtaacatcaccattaggtattgctgtgattaaaaacttggagaactgggaacagatcttgcaagagaaaatggatcagtttgaaggtccaccccctaactatatcaacacatatccaactgacctttcagtgggagctggaccagctattcttcgaaataaagcaatgctagaacctgaaaataccccattcaagtcccgggattcttctgcatttccagtcaaacgactttggcatttccttgttaaacaagaggtccttcaagagacatttattagatatattttcactaagaaaagaaagcagagtgaggttgaagctgatctgggctatccaggtggaaaggcgaaagtcatccataaggaatctgatatgatcatggcattttctgttaataaggcaaattgtaatgaaattgttttggcttcaacacatgatgttcaagaacttgatgttacttctctactggcctgtcagtcatacatatggatcggagaagaatatgacagagaatccaaaagttcagatgatgttgattatcgtggttccactacaactctttatcaacccagtgcaacatcctattcagcaagtcaggtgcatccaccttcatctctgccatggctgggcactggacagactagcactggagctagtgtgcttatgaaaaggaatctacataatgttaagagaatgacttcacacccagtccatcaatactatcttacaggtgctcaggacggcagtgtacgaatgtttgaatggacgcggcctcagcaacttgtctgctttcgtcaagctggcaatgcaagagttactagattatattttaattcacaaggcaacaagtgtggtgttgcggatggagagggttttctgagtatctggcaagttaaccaaactgcatcaaatcctaaaccttatatgagttggcagtgccacagtaaagccacaagtgactttgcatttattacctcttcaagtctagttgccacatctggacactccaatgacaatagaaatgtttgcctctgggacacattaatatcacccggaaacagcctcattcatggtttcacgtgccacgatcatggtgccacggtactgcagtatgcacccaaacagcaactcctaatctcggggggtaggaaaggacacgtctgcatttttgacatcaggcaaaggcagctcattcacacgttccaggcccatgactcagctattaaggctctggccttggatccctatgaggaatattttaccacaggttcagcagaaggtaacataaaggtttggagattgacaggccatggcctaattcattcatttaaaagtgaacatgctaagcagtccatatttcgaaacattggggctggagtcatgcagattgacatcatccagggcaatcggctcttctcctgtggtgcagatggcacgctgaaaaccagggttttgcccaatgcttttaacatccctaacagaattcttgacattctataaagattggggttttatttttatatacatttcagttaaaaggcacactacagtcatcactaggcaattctgctttctaagcagttgtattgaaaacagagaatctctgtgtagaatttgaatatgayccaagctgagtattatctaaacaggttggtggaatgaatgcgcatgtaccttattatgctgacatactaaaaaaaataaaacctagtattgtatgaaggatagctattctttacagcatttagcaaacctgattcagaaaacatttgagattagcaaattagtaacttgaaataatgaaaaggacgtttataccaaattaaggaagaaaatgttgctgatttgggtttttcttcctgttcttaccactgactgaagcatgcctgcagtctcctcctctgttgaatgaaggataatcataaggtgtttgttaggagcgctagaccacctaggccgtttccattctttcctgctgaatatttttcctgttagtgtttatactgagctagtactgtaacttgcaaatgagtgcaaatttaaatgcaatgttttactcacaatttgcacattcacattttttggactgctagtttttctatttaaatatttgccttcatgttaggaatgtactatgtgaacatgacatatttgtagttaaccaaacacaccttcttagtccagtttagtactttttcttttcgtgtattcaaggttaaacacccaaacatttaaggrtatgttgaaactacacc

SEQ ID NO: 143 - DNA, 10139 bp, Homo sapiens
gacccgggcggcggcggcggtcgaggagctcccatggcagggacgaggcggagggaaggcgaaaggggggcgaggagttaagccagagcctccgcggggcgggtttccgagggaggcacagagggaaacggctctcgcagccsgaggagggtcaggcgcggagcttgtcgcmcctcccgcgcattctgtccagcccgggctccggagatgcatctgcatcaggtcctcaccggrgctgtcaaccctggagacaactgctactccgtgggcagcgtcggggatgtcccyttcacggcatayggatcaggctgtgatattgttattttggcaaatgactttgaatgtgtacagatcattcctggkgctaagcatggaaacatccargtcagctgtgtggagtgttctaaccaacaaggaagaattgcagcttcatatggtaatgctgtttgtatatttgagcccttgggcataaattctcataaaagaaattgtcaactcaagtgccagtggcttaaaactgggcagttttttttgagttctgtgacatacaacttagcatgggatcctcaagataatagattgttgacagcaactgattctattcagttgtgggctcctccaggagatgatattctgsaagaggaggaagaaattgataatacagttcctcctgttttaaatgattggaagtgtgtctggcagtgcaaaacctcagtatctgtacatttgatggaatggtctcctgatggtgaatattttgctactgctggaaaggatgattgtcttttgaaagtgtggtatcctatgactggttggaagtcttcaattatacctcaggatcatcatgaagtaaaaaggagacagtcctctactcaattttcttttgtttacttggcacatccccgagctgtgacaggtttttcgtggcgcaaaactagcaagtatatgcccaggggttctgtctgtaatgtgttgttaacttcatgtcatgatggtgtgtgccggctctgggcagaaactttattaccagaagactgtcttttgggtgagcagatttgtgagactaccacttccagcattgccagcagcctttctcatgctggaagacacaaagacagaatacagcatgctcttgagacaatacaccatttgaaaaatttaaggaaaggacagaggaggtcatctgttcttgtaactcatgctgaattaatgcccgaccagacagcaatgcatgaagttcaaagacacatttcccaccatgcaaatgcactctgtcattttcatattgcagcaagcatcaaccctgccacagatattccaaatgtcttggttggcactgcatttaatgttgatgatggaaatgggggctttgtagttcattggttaaacaacaaggaatttcattttacatcatctacagaagtatttatgcatcaattacgaaaactttctgataagcaggtagatcatgaaaatgatgatgcagatagagaagatgaggaacattcacaggaggatagagaacggggtttacatatgaaattagaccatgatttatccctggatagagaatctgaggcaggtacaggatcatcagaacatgaagatggagaaagagaaggaagtcctagaacttactcacgacttagtgtaccaatgccactgcctacggttctgcttgatcggaagattgaaaygctgctaactgaatggaataagaatcctgatatgctttttacaatacaccctgtagatggtacctttctagtgtggcatgtgaagtatttggatgaatataatcctggaatatttagacaagttcaggtttctttttcttctcggattcctgttgcatttccctctggtgatgcaagctctcttagtaaaaatatcatgatgtatgcctgtataaatgcgacaaaagattctcaccacacgctgttacaccaggaggggatgtctgtaggcagtcctcacggatcacagccacactctagatcccacagtacacatatgaacatcttagctcccacagtaatgatgatctctaaacacatagatggttctttaaatcagtgggcagtcacttttgctgataagtctgcctttaccactgttctaactgtatctcacaaatttagatattgcggtcatcgatttcacctcaatgacctggcatgtcattcagttttaccactgttattgacatcctctcatcataatgctctattgactcctgaattagattgtcagtgggactcagacaataaattaagtagattaatggaccctgtaaaacatataaaaggttcctcgaaacaacctcttagaaatgcagcaactcgtacatttcatgacccaaatgcaatctacagtgaacttattctgtggcgtgtagacccaataggacctttgtcatacactggaggagtatcagaattggctcgaattaactctttacatacctcagcgttctctaatgtggcttggcttccaactctcattcccagttactgtctaggcacatactgcaattctgcaagtgcttgctttgttgcttctgatggcaaaaatctgagactctatcaagctgtagtggatgcaaggaaattattagatgaattgtcagacccagaatcttcaaaacttattggagaagtgtttaatattgtgagccaacagtctactgctcgacctggctgcattattgaactcgacgcaataaccaaccaatgtggctcaaatacacagttgcttcatgtgtttcaagaagacttcattataggatataaaccacataaggaagatatggagaaaaaggaaacagaaatattttttcagccatcacaaggataccgcccaccaccattttcagaaaagttctttctagtagtaattgagaaggacagcaataataactctattctgcatatgtggcaccttcatcttaaatctgtacaagcatgtttagctaaagcttcagaaggggcttcctctgagagtctactttcagtccctggacagaagaaygtagattcttctccagaaacctctcctagtgtgagccccatgccacattcttcatcaattgccaatcttcaaactgccagtaaacttattctgagttctagactggtgtatagccaaccccttgatctcccagaatcagttgaagtaataagagcaacgccttcagcaggccatctgagttcttcttcaatttatccagtgtgccttgcaccttatttagtggttacaacttgttctgacaataaagtacgcttctggaaatgttgtatggaagccaacccagagtgtaataaaagtgatgagaaagaaatttatcattggaagagatggcctttgatgaatgatgaaggagaagataatagcagtacagtgagcattgtgggaagaccagttgctgttagctgttcatacacaggtcgccttgcagtggcttataagcagcctatccaccataatggttttgtttctaaagaattttccatgcatgtttgtatatttgaatgtgaatctacaggaggatcagagtgggttttagaacaaacaattcatcttgatgatttggttaaggttgggagtgtacttgattcaagggtcagcgtcgacagtaatctgtttgtgtatagcaagtcagatgcactcttgagcaaggatagatatcttattccgaatatcaaacatttagtacatttggactgggtatcaaaagaagatggctcccacattcttacagtgggagtcggtgcgaatatcttcatgtatggaaggctttcaggaattgtgactgagcaaaccaacagtaaggatggagtagctgtcatcactttaccactaggtggtagtatcaagcaaggagttaagtcaagatgggttcttcttagatctatagacttggtatcttctgttgatggtactccttcactgcctgtttctctctcttgggtaagagatgggatattggtggtaggaatggattgtgaaatgcatgtatatgcacagtggaagcatgctgtcaaatttggagacactgaagctgatrgtyctaatgcagaagaggcagcaatgcaagatcattcgacctttaaatctaatatgctggcaagaaaaagtgttgttgaaggaacagctatttctgatgatgttttttgttcaccaactgtaattcaagatggtggcttatttgaggctgcacatgtactttcccctactcttccacaatatcatccaactcagctgttagaattgatggatttagggaaagtgcgaagggctaaagccattctctctcatttagtaaaatgtattgcaggtgaagtagcaatagttagagatcctgatgctggagaaggaactaagcgacatctctctcgaactattagtgtaagtggcagtacagcaaaggaaacagtcaccgtaggaaaagatggtactcgagattatactgagatagattctatccctccactaccactatatgcattacttgctgcagatcaagatacatcctacagaayttcagaagaaagtacaaagataccacagagctatgaagatcagacagtaagtcaaccagaggatcagtattcagagctgtttcaaatccaggatataccaacggatgrtattgatttagagcctgaaaagagagaaaacaaatcaaaagtaataaatctttctcaatatggaccagcttactttggccaagaacatgcaagggtactttcaagtcatcttatgcactcaagtctaccaggccttacccgtttggagcagatgttccttgtagctttggctgatacagtggctactactagtactgagcttgatgaaagcagagataagagttgctcaggaagagatacattagatgagtgtggtttgagatacttgttagctatgcgcctacacacatgccttttgacatcgctgcctcctttataccgagtgcagctacttcatcaaggtgtctctacatgccattttgcctgggcttttcattctgaggctgaagaagaactgattaatatgattccagcaattcagagaggggacccccagtggtctgaattaagagctatgggcataggrtggtgggtgaggaacattaacacgcttcgaagatgcattgaaaagrttgccaaagcttcttttcaaaggaacaatgatgccttagatgctgcactattctacctttcaatgaagaagaaagcagtagtgtggggtctgtttargtcacagcatgatgaaaaaatgacaacatttttcagccacaactttaatgaagatagatggcgaaaagctgctttgaaaaatgckttttccttacttggaaaacaacgctttgaacaatcggctgcttttttcttgctagctggttcattgaaagatgccatagaggtatgtcttgaaaaaatggaagatattcagctagccatggttattgcccgtttatatgaatctgaatttgagacttcatccacttatatatccatcctaaatcagaagattttgggttgccaaaaggatggctcaggattcagttgcaaaagattacatcctgatcctttcctgcgtagtcttgcctattgggtaatgaaagattacacccgagccttggacacattactggaacaaacaccaaaggaggatgatgaacatcaagttatcatcaagtcttgtaacccggtggcatttagtttttataactaccttcgaactcatcctttgctcattcgaagaaatcttgcctcccctgaaggaactttggcaaccttaggtctcaaaactgagaagaactttgttgataaaattaacctcatagaaagaaaattattctttaccactgcaaatgctcattttaaagttggatgccctgttttagccttggaggtactctccaaaattccaaaagtaaccaaaacatctgccttatctgcaaaaaaagatcagcctgacttcatttctcacaggatggatgatgtaccttcacattcaaaagctctgagtgatggcaatggaagttctggcattgaatggtcaaatgtaacttcatcacagtatgactggagtcagccaatagtaaaagttgatgaggaacctcttaatcttgattggggtgaagatcaygacagtgccttagatgaagaggaagacgatgctgttggtttagtgatgaaaagtacagatgccagggaaaaagataaacaatcagatcagaaggcctcagaccctaacatgttattaacacctcaggaagaggatgatcctgaaggtgatactgaagttgatgtgattgctgaacaactaaaattcagagcttgtttaaagatccttatgactgaattaagaacattggctacaggttatgaagtagatggaggaaaactcagatttcaactctataactggcttgaaaaggaaattgctgccttgcatgagatatgtaatcatgaatcagttattaaagagtattccagtaagacatattccaaagtagagagtgatctgctggatcaggaagaaatggtagacaaaccagatattggttcctatgagcgccatcaaatagaaagaagaagattgcaggccaaacgagagcatgcagaaagacgaaagtcgtggttgcagaaaaaccaagatctcctgagagtatttctcagctactgtagccttcatggggcccaaggtggtggtttggcttcagtaaggatggaactcaaatttttgctacaagaatcacaacaggaaactacagtaaagcagctccagtctccactaccactgcctaccaccctacctctgctttcagcaagtattgcgtcaacaaaaacagtcatagctaatcctgtattgtacttaaataatcacatccatgatatactttatactattgttcagatgaaaacaccacctcatcccagtattgaagatgtgaaggtgcacacacttcattcactagcagcatcactttctgcatcaatttaccaagcattatgtgacagtcatagctacagcagtcaaacagaaggaaatcagtttacaggaatggcttatcaaggacttcttttaagtgatcgtagaagactaaggacagaaagcattgaagaacacgcaacaccaaattcatctcctgctcaatggcctggtgtgagctcacttattaatcttttgagttcagcccaagatgaagaccagccaaaactgaacattttgctatgtgaagctgttgttgctgtttacttaagtttattgatacatgctcttgccacaaattcctccagtgaattatttcggcttgcagcccacccattaaataatcgaatgtgggctgctgtttttggaggcggtgtaaaacttgttgtgaaacctcgaagacaatcagaaaatatttcagcacctcctgtcctttctgaagacatagataaacaccgtaggagatttaacatgagaatgctcgtccctggaaggcctgtaaaagatgctaccccaccaccggtgcctgcagaaagaccatcttacaaagaaaaatttattcctcccgaacttagtatgtgggattattttgttgcaaagccatttcttcctttgtctgatagtggtgttatatatgattctgatgaaagcattcatagtgatgaagaagatgatgcctttttttcagatacacaaatacaggagcaccaagatccaaattcctatagctgggctcttctacatttgacaatggttaaactagcacttcacaatgtcaagaatttctttcctattgctggactggaattctctgagctgcctgtaacatcaccattaggtattgctgtgattaaaaacttggagaactgggaacagatcttgcaagagaaaatggatcagtttgaaggtccaccccctaactatatcaacacatatccaactgacctttcagtgggagctggaccagctattcttcgaaataaagcaatgctagaacctgaaaataccccattcaagtcccgggattcttctgcatttccagtcaaacgactttggcatttccttgttaaacaagaggtccttcaagagacatttattagatatattttcactaagaaaagaaagcagagtgagtctatagaagaacatgtggagcaggtcaaccaaaactgcatagcagaagattgccacatcaaggttgaagctgatctgggctatccaggtggaaaggcgaaagtcatccataaggaatctgatatgatcatggcattttctgttaataaggcaaattgtaatgaaattgttttggcttcaacacatgatgttcaagaacttgatgttacttctctactggcctgtcagtcatacatatggatcggagaagaatatgacagagaatccaaaagttcagatgatgttgattatcgtggttccactacaactctttatcaacccagtgcaacatcctattcagcaagtcaggtgcatccaccttcatctctgccatggctgggcactggacagactagcactggagctagtgtgcttatgaaaaggaatctacataatgttaagagaatgacttcacacccagtccatcaatactatcttacaggtgctcaggacggcagtgtacgaatgtttgaatggacgcggcctcagcaacttgtctgctttcgtcaagctggcaatgcaagagttactagattatattttaattcacaaggcaacaagtgtggtgttgcggatggagagggttttctgagtatctggcaagttaaccaaactgcatcaaatcctaaaccttatatgagttggcagtgccacagtaaagccacaagtgactttgcatttattacctcttcaagtctagttgccacatctggacactccaatgacaatagaaatgtttgcctctgggacacattaatatcacccggaaacagcctcattcatggtttcacgtgccacgatcatggtgccacggtactgcagtatgcacccaaacagcaactcctaatctcggggggtaggaaaggacacgtctgcatttttgacatcaggcaaaggcagctcattcacacgttccaggcccatgactcagctattaaggctctggccttggatccctatgaggaatattttaccacaggttcagcagaaggtaacataaaggtttggagattgacaggccatggcctaattcattcatttaaaagtgaacatgctaagcagtccatatttcgaaacattggggctggagtcatgcagattgacatcatccagggcaatcggctcttctcctgtggtgcagatggcacgctgaaaaccagggttttgcccaatgcttttaacatccctaacagaattcttgacattctataaagattggggttttatttttatatacatttcagttaaaaggcacactacagtcatcactaggcaattctgctttctaagcagttgtattgaaaacagagaatctctgtgtagaatttgaatatgayccaagctgagtattatctaaacaggttggtggaatgaatgcgcatgtaccttattatgctgacatactaaaaaaaataaaacctagtattgtatgaaggatagctattctttacagcatttagcaaacctgattcagaaaacatttgagattagcaaattagtaacttgaaataatgaaaaggacgtttataccaaattaaggaagaaaatgttgctgatttgggtttttcttcctgttcttaccactgactgaagcatgcctgcagtctcctcctctgttgaatgaaggataatcataaggtgtttgttaggagcgctagaccacctaggccgtttccattctttcctgctgaatatttttcctgttagtgtttatactgagctagtactgtaacttgcaaatgagtgcaaatttaaatgcaatgttttactcacaatttgcacattcacattttttggactgctagtttttctatttaaatatttgccttcatgttaggaatgtactatgtgaacatgacatatttgtagttaaccaaacacaccttcttagtccagtttagtactttttcttttcgtgtattcaaggttaaacacccaaacatttaaggrtatgttgaaactacacc

SEQ ID NO: 144 - DNA, 912 bp, Homo sapiens
atggaaagtgccctgccgagtatcttcactcttgtaataattgcagaattcataattgggaatttgagcaatggatttatagtactgatcaactgcattgactgggtcagtaaaagagagctgtcctcagtcgataaactcctcattatcttggcaatctccagaattgggctgatctgggaaatattagtaagttggtttttagctctgcattatctagccatatttgtgtctggaacaggattaagaattatgatttttagctggatagtttctaatcrcttcaatctctggcttgctacaatcttcagcatcttttatttgctcaaaatagcgagtttctctagccctgcttttctctatttgaagtggagagtaaacaaagtgattctgatgatactgctaggaaccttggtcttcttatttttaaatctgatacaaataaacatgcatataaaagactggctggaccgatatgaaagaaacacaacttggaatttcagtatgagtgactttgaaacattttcagtgtcggtcaaattcactatgactatgttcagtctaacaccatttactgtggccttcatctcttttctcctgttaattttctccctgcagaaacatctccagaaaatgcaactcaattacaaaggacacagagaccccaggaccaaggtccatacaaatgccttgaaaattgtgatctcattccttttattctatgctagtttctttctatgtgttctcatatcatggatttctgagctgtatcagarcacagtgatctacatgctttgtgagacgattggagtcttctctccttcaagccactcctttcttctgattctaggaaacgctaagttaagacaggcctttcttttggtggcagctaaggtatgggctaaacgatga

SEQ ID NO: 145 - DNA, 4326 bp, Homo sapiens
ctgtattccggggtcaaagcaacactaactcacctctctgctcatttcagacagcttgcctttttytgagatgtcctgttttgtgttgctttttttgttttgttttctatcttggtttccaccaaggtgttagatttctcctcctcctagccaggtggccctgtgaggccaacgagggcaccagagcacacctgggggagccaccaggctgtccctggctggttgtctttggaacaaactgcttctgtgcagatggaatgaccaacacatttcgtccttaagagagcagtggttcctcaggttctgaggagargaaggtgtccaggcagcaccatctctgtgcgaatccccagggtaaaggcgtgggkcattgggtttgctccccttgctgctgctccatcccygcaggaggctcgcgctgaggcaggacygtgcggccatggctgctgyattcattgagcacaaaggtgcagctgcagcagcagctggagagcaagagtcacccagcctgtgcgccagaatgcagaggctcctgacctcacagccagtccctgatagaacacacgcaggarcagagtcccctccccctccaggctgccctctcaacttctccctcacctccttccctaggggtagacagagatgtaccaaaccttccggctggaaagcccagtggccggcgccgaggctcgtggcrtcacgccccccccgccagggctgtacctccgtctccctggtcctgctgctcacaggacagacggctcgctcccctcttccagcagctgctcttacaggcactgatgatttcgctgggaagtgtggcgggcagctttgcctaagcgtggatggctcctcggcaattccagcctaagtgaaggcgctcaggagcctcctgctggaacgcgacccatctctcccaggaccccggggatcttaaggtcattgagaaatactgttggatcagggttttgttcttccacactgtaggtgaccccttggaataayggcctctcctctcgtgcacatacctaccggtttccacaactggatttctacagatcattcagctggttataagggttttgtttaaactgtccgagttactgatgtcattttgtttttgttttatgtaggtagcttttaagtagaaaacactaacagtgtagtgcccatcatagcaaatgcttcagaaacacctcaataaaagagaaaacttggcttgtgtgatggtgcagtcaytttactggaccaacccacccaccttgactataccaaggcatcatctatccacagttctagcctaacttcatgctgatttctctgcctcttgatttttctctgtgtgttccaaataatcttaagctgagttgtggcattttccatgcaacctccttctgccagcagctcacaytgcttgaagtcatatgaaccactgaggcacatcatggaattgatgtgagcattaagacgttctcccacacagcccttccctgaggcagcaggagctggtgtgtactggagacactgttgaacttgatcaagacccagaccaccccaggtctccttcgtgggatgtcatgacgtttgacatacctttggaacgagcctcctccttggaagatggaagacygtgttcgtggccgacctggcctctcctggcctgtttcttaagatgcggagtcacatttcaatggtasgaaaagtggcttcgtaaaatagaagagcagtcactgtggaactaccaaatggcgagatgctcggtgcacattggggtgctttgggataaaagatttatgagccaactattctctggcaccagattctaggccagtttgttccactgaagcttttcccacagcagtccacctctgcaggctggcagcygaatggcttgccagtggctctgtggcaagatcacactgagatcgatgggtgagaaggctaggatgcttgtctagtgttcttagctgtcacgttggctccttccaggktggccagacggtgttggccactcccttctaaaacacaggcgccctcctggtgacagtgaccygccgtggtatgccttggcccattccagcagtcccagttatgcatttcaagtttggggtttgttcttttcgttaatgttcctctgtgttgtcagctgtcttcatttcctgggctaagcagcattgggagatgtggaccagagatccactccttaagaaccagtggcgaaagacactttctttcttcactctgaagtagctggtggtacaaatgagaacttcaagagaggatgttatttagactgaacctctgttgccagagatgctgaagatacagaccttggacaggtcagagggtttcatttttggccttcatcttagatgactggttgcgtcatttggagaagtgagtgctccttgatggtggaatgaccgggtggtgggtacagaaccattgtcacagggatcctggcacagagaagagttacgagcagcagggtgcagggcttggaaggaatgtgggcaaggttttgaacttgattgttcttgaagctatyagaccacatcgaggctcagcagtcatccgtgggcatttggtttcaacaaagaaacctaacatcctactctggaaactgatctcggagttaaggcgaattgttcaagaacacaaactacatcgcactcgtcagttgtcagttctggggcatgactttagcgttttgtttctgcgagaacataacgatcactcatttttatgtcccacgtgtgtgtgtccgcatctttctggtcaacattgttttaactagtcactcattagcgttttcaatagggctcttaagtccagtagattacgggtagtcagttgacgaagatctggtttacaagaactaattaaatgtttcattgcatttttgtaagaacagaataattttataaaatgtttgtagtttataattgccgaaaataatttaaagacactttttttttctctgtgtgtgcaaatgtgtgtttgtgatccattttttttttttttttttaggacacctgtttactagctagctttacaatatgccaaaaaaggatttctccctgaccccatccgtggttcaccckcttttccccccatgctttttgccctagtttataacaaaggaatgatgatgatttaaaaagtagttctgtatcttcagtatcttggtcttccagaaccctctggttgggaaggggatcattttttactggtcatttccctttggagtgtagctactttaacagatggaaagaacctcattggccatggaaacagccgaggtgttggagcccagcagtgcatggcaccgttcggcatctggcttgattggtctggctgccgtcattgtcagcacagtgccatggacatgggaagacttgactgcacagccaatggttttcatgatgattacagcatacacagtgatcacataaacgatgacagctatggggcacacaggccatttgcttacatgcctcgtatcatgaytgattactgctttgttagaacacagaagagaccctattttatttaaggcagaaccccgaagatacgtatttccaatacagaaaagaatttttaataaaaactataacatacacaaaaattggttttaaagttgactccacttcctctaactccagtggattgttggccatgtctccccaactccacaatatctctatcatgggaaacacctggggtttttgcgctacataggagaaagatctggaaactatttgggttttgttttcaacttttcatttggatgtttggcgttgcacacacacatccaccggtggaagagacgcccggtgaaaacacctgtctgctttctaagccagtgaggttgaggtgagaggtttgccagagtttgtctacctctgggtatccctttgtctgggataaaaaaaatcaaaccagaaggcgggatggaatggatgcaccgcaaataatgcattttctgagttttcttgttaaaaaaaawtttttttaagtaagaaaaaaaaaggtaataacatggccaatttgttacataaaatgactttctgtgtataaattattcctaaaaaatcctgtttatataaaaaatcagtagatgaaaaaaatttcaaaatgtttttgtatattctgttgtaagaatttattcctgttattgcgatatactctggattctttacataatggaaaaaagaaactgtctattttgaatggctgaagctaaggcaacgttagtttctcttactctgcttttttctagtaaagtactacatggtttaagttaaataaaataattctgtatgc

SEQ ID NO: 146 - DNA, 2981 bp, Homo sapiens
atggatgagcacaaaagcaacctggaagcaagagtcctcagtaaggaagatttggggggcttcatggaagatcaagtgggtgatggttaaggagaaaccacgaagagcgtagcctcagtaggtaacgtctgctccagctagagctcaccatgcatgcacaccaaacccagatgccgaaaaccaaaaaatacagcagaacgcacccaactcccaaaccactgagaaagtattttaattttgctttgatcactccagctgcgcttcagagtccccagcatttcagcagcatcatagaagaagacatcaatcactggccatggcacaaggaaactcctgcttggctatcgggctgctcagattctggatgagggaaagcttactttagtggaaaagaatgacttaaatgaatttaaattcattccacataatcgagttacatcagcatttctcatatgcacttatgaataattcactttggtaacagcaaaagccagaccagagaaagtcacttcaaagatctaagacttaacatcaatcctacctgaatttcctgctctcaactccttccctaaccactttatttccttctgccctatcactgaggtgctttgccagcctcctgtcctacatccgttatccctcagtaagctctctggaacttyccaattgcagccacctcctaatgtccacagcctcctcttctagatctagtttcgtaggcagtccctaagggtagggcccatcctaaaaagttcgactgcttcataccattccaagtctagaacatgtcctcagtctctagtagtgtttactgaaagccacggccaacagatctatccgaggtccccaacaaccttgtcttcaaaactgaatctcagagctggaaggaaagtcagtagaagaggccagatccacctaataatatcatctacttagcaaagcagaaggggccattcagaggtcaagaaataggaacggaaacgttgtactaggttaccaccccaggaacaaagctggtcttttctaggacccaaggatctgactagtttccatttgtctctgcattacaactaatacctctgggaggtgggggtgggggtgatcctaattcaaacagtaaggctgcccaggaagtayttctaataatatcaaccttcgtctttccttttttgtactgtaggctctttgtctcctgatcttcttttattttgttccccctttttactactaagcccaactcctgtccgatgcaagccccccgagttcaaagaaaggaaatggaagtacagggcagacaggtgacgtggcaaccgtccctaggaaaggcactgctggacccagctgtccctgtccctcaccagcctcacatgccsaagtcccatgtacccctggggctgccatgctggctgctgagccatgggcgctggtttggagrtgaacttcttcgaggaaagcagcttcttatcccccagaagttctgcagatcatctgtgcactttggtttttacttaaaatgtgatttaaacagcctgctctacttaatactgcctgaaagcaagacagaggtattaacgcaacaaagaaagaggcttttcaagcacaggaagaaaccagaacaawtgtacaaataggtttaactggtgagagctgaaggggctccagatattttccaaatacttggcatgcaaaaatcaccacaagtcagtggttctgaaagctttttggtctcttagacgagatccctattaaaaacttctgaaggaggcccaggatggtgacaccatcactaatgacaattagccaaaagcaaagtctttgaggcacaaggcacacgccccaagaaatgaggtgggctaagccaggtcccagggaacctgcacacaaactgcttcaccatctcggcaacaagcgtcggcaatcaggcagaagagaatgtgagctccacacttttttttttttactacaacctgccttcattttaagtcagtgagatgccatcagtgagatggcagtaaaatgttttccttttgtcaataaaaacagccatttactgccttctcgaaggctccaatctgctattttcctggtttctcattttgagggcaataggaaatgcaacaaactccaggactgctgctcccagtcaatgcccttttaattgaaataaggctgccccaccagctaagccagcttccaacacagcccggccctgccttcctggatttcctggcaaagcccaggccttctcacacgcactcagggtgatctgagcagaccacaggctgttcatcccawtrggttaaaaagtacttggaracttagttgcagtaaggtcttaggttttgttggggttttttttgtgggaaagtgaaggcatctgcacctgaaatgaaataccagaaagcctccacagcaagcaaacaacaggcacttaggtaaattcagcaggaagtaagaaaaccacaggtactcaggaggattcacctccgtccctcccagggcagaactggccttcagcaaaactgccttacaaagtcatgaatggcttcacgtgccaagcttcaacctttcagatgatttccatacttctccatcatctttggcctggaatcatccccacaatggcaggaaagaaaagagctacccgccatagtggtcctctctgccaactaagagttgcagatgattctggtcagtactcctcagtagcaatgacagcaacaatgacacagtaaacatctgcatttcataatcctggtacaactggctcaccgaagactgccaggatacgcyactctctgctcaaggggaaaatgtatcttccgaacaataaatccttcactaagcagatgcagtgcttgcccttggggtgacagcatacagtggaggatacacccagaatttacagtggggcaaaaagtgtcccatcaggtgctgggagacaggcctcccgaaatctgcagagcctttacatccttgag

SEQ ID NO: 147 - DNA, 1183 bp, Homo sapiens
aaaaatgctgattatcatggagtcaaagataggcttgagcagttgagatgtcactttacatgggggttgctaattgaagcccttgaaatttctgatttaraaaacagggtcttggaagagatccagttcgtggacacaaagtrcagtgtgggaatgcacaacatactagcttatgtgaaacactggaagggccagaatgagaaagcactagagaaagaagttgaatgagaacacaccaaccaagcagacatgagtgaccagtatcatcacatgggcaggtgacctggggcaactttgcctgggctggggcaaatttgcctgggcgtatcaccacataggcagactggcagaagcccagacttacctggataaggtagagaacatttgcaagaagtttgcaaatgcttcccgctatagaatggagtgtcctgagatgaactgtgaggaaggatgggccttggcgaagtgtggaggaaagaattatgaacaggccaaggcctgctttgaaaaggctctagaggtgggccctgaaaatcctgaattcagcactgggtatgtcatcactgcctattgcctggacggttttaacacaacagacagtaatgagacattttctctgcaccccctaaaatgggctgtcagtctaaatccaaaagatgcacacattaaggttatccttgccctgaagcttcaggatgaaggacaggaagctgaaggagaaaagcacactgaaaaagctctaatcagtatgtcttcacagacctatgtttttckatatgcagcccagttttatcaaagaagaggcaatatagataaagctcttctgctcttaaaaatggccttgcagggaacacccacttctgccttcctgcatcaccagatagggctttgctgcaggaaacagacaaaaaaagctaaaggcaggatagagaaactgtagacaaaataataagattagttatatctcatgttgaatttgctgtagagcaaaggcccacatttgcaatggtttatgtggacctagccaacaggtatgcagagggaggtgaacaccaaaaagttgaggacatttaccagaaagcactcagcctgcatgatattaataaaagctgttgcaagagatttattatcgttatggcccctttcaggaatgtcatgggaagtctgaagctaacacaattga

SEQ ID NO: 148 - DNA, 203 bp, Homo sapiens
cctttggagtcaaaggcaggtggggtcacctgatgagctaagatccagccccagaatcctggaggagcaggagccccatcaccagcttcttgctcagggagacttccgccctcctcactgaggcaacatgaagccygaggcccagatgggggctgaacaggtagggcacatcagttaatgccagtgaggtcagcttctgccct

SEQ ID NO: 149 - DNA, 5150 bp, Homo sapiens
cctggagtctcccctggtcgggagcctcagccttctggagactgacaccaccctcttactcagagacgaatcgttttgtcgttgccttcacctccctgaccacaagtgctccggggctctttctragggaggcagctgttctagscgggaggctggagtctcctgggcctggacgcaccccggggtgtgagtgatgggtatgcctgaaaggaggggaagtggcgcggctttaatcatctgggctagtccccggcgggcctgggggaacagggaaactggaggcggccttaaagcgtcaggatgagacatcgcaagaggagctgcagatactgagcgtgcgccccgggttctcgccgccttctctccgccgagcagcccttcggccaccctttgcccttaaaaatctgcagactgcgcctcctctscgcgggagcgagacctagcaggcccggggctgggcgtgccctcgcctgccacgctgcgcgctgccctcagccgggccgctggggccgtgcagtgcaccgggcacgccgcgccaggctgggggcaggcaccgagcctccgtgggaggtcccgaggcagcttcgcctgctcgccctggctccrgccctcacctgccgcagccttagctgagcagccgccgccactgggcgccccccgctccccacttcgccagcgcccgctcstcggctcggcccggggtagtttgtagggacgcagctctccacgtgcgcgactgcgaggctggacgctacgggctccyggaaaggagcagacaccagcatttgccacaatgctgtcatccactgactttacatttgcttcctgggagcttgtggtccgcgttgaccatcccaatraagagcagcagaaagacgtcacactgagagtatctggagaccttcaygttggaggagtgatgctcaagttagtagaacagatcaatatatcccaagactggtcagactttgctctttggtgggaacagaagcattgctggcttytgaaaacccactggaccctggacaaatatggggtccaggcagatgcaaagcttctcttcacccctcagcataaaatgctgcgccttcgtctgccgaatttgaagatggtgaggttgcgagtcagcttctcagctgtggtttttaaagctgtcagtgatatctgcaaaatcctgaatattagaagatcagaagagctttccttgttaaagccgtctggtgactattttaagaagaagaagaaaaaagacaaaaataataaggaacccayaattgaagatattctaaacctggagagttctccaacagcttcaggttcatcagtaagtcctggtttatacagtaaaaccatgacccctatatatgaccccatcaatggaacaccagcatcatccaccatgacttggttcagtgacagccctttgacggaacaaaactgcagcatcctcgcattcagccaacccccccagtccccagaagcacttgcggatatgtaccagcctcggtctctggttgataaagccaagctcaatgcaggttggctagactcctcacgctcccttatggaacaaggcatccaagaggatgagcagctgctcttacgatttaaatattattctttcttcgacttgaatcctaaatatgatgctgtccgaataaaccaactctatgagcaagccaggtgggccattctcttagaagaaattgattgcacagaggaagaaatgttgatctttgcagctctacagtaccacattagcaaactgtcgttgtctgctgaaacacaggattttgcaggcgagtccgaggttgatgaaatagaagcggcgctttctaatttggaagtaaccctagaaggtggaaaagcrgacagccttttggaggacattactgatatccctaaacttgcagataatctcaaattatttaggcccaagaagttaytaccaaaagctttcaaacaatattggtttatctttaaagacacatccatagcatactttaaaaataaggaacttgaacaaggagaaccactagaaaaactaaatcttagaggctgcgaagttgtgcccgatgtaaatgtagcaggaagaaaatttggaatcaagttactaatccctgttgccgatggtatgaatgaaatgtatttgagatgtgaccatgagaatcaatacgcccaatggatggctgcctgcatgttggcatcgaagggcaaaaccatggcagacagctcctaccagccagaggtcctcaacatcctttcatttctgaggatgaaaaacaggaactctgcatctcaggtggcttccagtctcgaaaacatggatatgaacccagaatgttttgtgtcaccacggtgtgcaaararacacaaatccaaacagctggccrcccggatcctggaggcgcaccagaacgtggcccakatgcccctggtcgaagccaagctgcggttcatccaggcrtggcagtcactgcctgagttyggcctcacctactaccttgtcagatttaaaggaagcaaaaaagatgacattctgggagtttcatataacaggttgattaaaattgatgcagccaccgggattccagtgacaacatggagattcacaaatatcaaacagtggaatgtaaactgggaaacccggcaggtggtcatcgagtttgaccaaaaygtctttactgctttcacctgcctgagtgcagattgcaagattgtgcacgagtacattggcggctacattttcttgtccacccgctccaaggaccagaatgaaacactcgatgaggacttgttccacaaattgaccggcggtcaggattgaaacaagcacgcgtgctcggctcacaccaacaaggcaagccaaaggcgcccctccccagagggatccctaacktgcccagcatgtagattctggactaacagacaacatacattcaccgctggtcacccagatcctcattcaaacccactgctggcacatccctttccttactttgccctgtgctaccagccacggaaggagcctctcttgttttttctataaaatgggtaggcaggagaaaagcaggtgccctaagattgctctaaggcccagcatgtggttacagttctctgacttgcagaacctgccaggtgtatggctacaagttatcctcgtgctgatctgtctcattactaagtcaatggagaagacagaaaggtaaaaatcacgtgtagcaagaacaactcttatttcacaaactcaggtmtgaaacgaaacgcctgtccttcatggaactgcttttagctcctgtcttttcaaaatggcagagggagttcctacacacactttttccctggaggccaargtctaggggtagaaaggggaggggtggggctaccaggtagcagttgacaacccaaggtcagaggagtggccctcagtgtcatctgtccacagtgatacctgccaagatgaccactgacccacatctggtcttagtcattggtctcctcagatttctggggccacctgcaagccccattccattcctacagatctctcagccacctgtaagtcctttgtgaagatgtgggtgacacagggggacaggaaaacccatttctcaacccagatccatgtctccactgcttctactctgggttgggattcaggaagacaggcacagtcctctctgttcatagaaacacctgccagtgtcaaggattccagtcaggtgtctrtcccaactggtcagggagagaagggcagacccattctcaaagaccaccatgtccaaggtctgacagctccccactggctgcccccacaggggctttaggctggtctgggtcatggggaagcgtccctcttatcgctggtctgtgttctcctggatttggtatctatgttggtacgactcctggccttttatctaaaggaytttggcttttgtaaatcacaagccaataatagacttttttctccccctctgtyttttgctgtgtcatctctgccttgagactgccttgagacagtgcttgccttgagagagtgagccaattaacagctgcctgaattgtcattttccattttggtttgttagaggtgggaggggtgggttttgagaaggtcaaaagcaataccagaagtaaagggaaatatcagacaatattttattattttttcatagatgttctgccacacaaagaacttggggtgtaaggataaggcaaaagctccaatcccatttttcagttctcctaggatgcacccctcagggagcctggccagagttccgaggcycgtgagcgtcagctgttgctttattttccatcaaagccctctgagaagtgagacctcagcaattccgggagccacatagagacagacttggcaagggaccccctggttctgagccagtagctgccatctggaaattcctcttttagcctctccttagaggtgaatgtgaatgaagcctcccaggcacccgctgaatttctgaggccttgcttaaagctcrgaagtggtttaggcatttggaaaatctggttcacatcataaagaacttgatttgaaatgttttctatagaaacaagtgctaagtgtaccgtattatacttgatgttggtcatttctcagtcctatttctcagttctattattttagaacctagtcagttctttaagattataactggtcctacattaaaataatgcttctcgatgtcagattttacctgtttgctgctgagaacatctctgcctaatttaccaaagccagaccttcagttcaacatgcttccttagcttttcatagttgtctgacatttccatgaaaacaaaggaaccaactwtgttttaaccaaactttgtttggttacagttttcaggggagygtttcttccaygacacacagcaacatcccaaagaaataaacaagtgtgacaaaaaaaaaaaaaaacaaacctaaatgctactgttccaaagagcaacttgatggttttttttaatactgagtgcaaaaggtcacccaaattcctatgatgaaattttaaattaatgggcacctttcaacatcatttgcttccttatctacagttgattcagaaatctgcattttttattcttttatatgacttttaagtaaaagatttatatgg

SEQ ID NO: 150 - DNA, 3317 bp, Homo sapiens
aaaggaaacacaagttgcttttgataacacatgatgcaaagaaagaattagaaagaatgagcaatgaagccggtataaatgacaaacaagtgtccaaaggcccaagaagttaytaccaaaagctttcaaacaatattggtttatctttaaagacacatccatagcatactttaaaaataaggaacttgaacaaggagaaccactagaaaaactaaatcttagaggctgcgaagttgtgcccgatgtaaatgtagcaggaagaaaatttggaatcaagttactaatccctgttgccgatggtatgaatgaaatgtatttgagatgtgaccatgagaatcaatacgcccaatggatggctgcctgcatgttggcatcgaagggcaaaaccatggcagacagctcctaccagccagaggtcctcaacatcctttcatttctgaggatgaaaaacaggaactctgcatctcaggtggcttccagtctcgaaaacatggatatgaacccagaatgttttgtgtcaccacggtgtgcaaararacacaaatccaaacagctggccrcccggatcctggaggcgcaccagaacgtggcccakatgcccctggtcgaagccaagctgcggttcatccaggcrtggcagtcactgcctgagttyggcctcacctactaccttgtcagatttaaaggaagcaaaaaagatgacattctgggagtttcatataacaggttgattaaaattgatgcagccaccgggattccagtgacaacatggagattcacaaatatcaaacagtggaatgtaaactgggaaacccggcaggtggtcatcgagtttgaccaaaaygtctttactgctttcacctgcctgagtgcagattgcaagattgtgcacgagtacattggcggctacattttcttgtccacccgctccaaggaccagaatgaaacactcgatgaggacttgttccacaaattgaccggcggtcaggattgaaacaagcacgcgtgctcggctcacaccaacaaggcaagccaaaggcgcccctccccagagggatccctaacktgcccagcatgtagattctggactaacagacaacatacattcaccgctggtcacccagatcctcattcaaacccactgctggcacatccctttccttactttgccctgtgctaccagccacggaaggagcctctcttgttttttctataaaatgggtaggcaggagaaaagcaggtgccctaagattgctctaaggcccagcatgtggttacagttctctgacttgcagaacctgccaggtgtatggctacaagttatcctcgtgctgatctgtctcattactaagtcaatggagaagacagaaaggtaaaaatcacgtgtagcaagaacaactcttatttcacaaactcaggtmtgaaacgaaacgcctgtccttcatggaactgcttttagctcctgtcttttcaaaatggcagagggagttcctacacacactttttccctggaggccaargtctaggggtagaaaggggaggggtggggctaccaggtagcagttgacaacccaaggtcagaggagtggccctcagtgtcatctgtccacagtgatacctgccaagatgaccactgacccacatctggtcttagtcattggtctcctcagatttctggggccacctgcaagccccattccattcctacagatctctcagccacctgtaagtcctttgtgaagatgtgggtgacacagggggacaggaaaacccatttctcaacccagatccatgtctccactgcttctactctgggttgggattcaggaagacaggcacagtcctctctgttcatagaaacacctgccagtgtcaaggattccagtcaggtgtctrtcccaactggtcagggagagaagggcagacccattctcaaagaccaccatgtccaaggtctgacagctccccactggctgcccccacaggggctttaggctggtctgggtcatggggaagcgtccctcttatcgctggtctgtgttctcctggatttggtatctatgttggtacgactcctggccttttatctaaaggaytttggcttttgtaaatcacaagccaataatagacttttttctccccctctgtyttttgctgtgtcatctctgccttgagactgccttgagacagtgcttgccttgagagagtgagccaattaacagctgcctgaattgtcattttccattttggtttgttagaggtgggaggggtgggttttgagaaggtcaaaagcaataccagaagtaaagggaaatatcagacaatattttattattttttcatagatgttctgccacacaaagaacttggggtgtaaggataaggcaaaagctccaatcccatttttcagttctcctaggatgcacccctcagggagcctggccagagttccgaggcycgtgagcgtcagctgttgctttattttccatcaaagccctctgagaagtgagacctcagcaattccgggagccacatagagacagacttggcaagggaccccctggttctgagccagtagctgccatctggaaattcctcttttagcctctccttagaggtgaatgtgaatgaagcctcccaggcacccgctgaatttctgaggccttgcttaaagctcrgaagtggtttaggcatttggaaaatctggttcacatcataaagaacttgatttgaaatgttttctatagaaacaagtgctaagtgtaccgtattatacttgatgttggtcatttctcagtcctatttctcagttctattattttagaacctagtcagttctttaagattataactggtcctacattaaaataatgcttctcgatgtcagattttacctgtttgctgctgagaacatctctgcctaatttaccaaagccagaccttcagttcaacatgcttccttagcttttcatagttgtctgacatttccatgaaaacaaaggaaccaactwtgttttaaccaaactttgtttggttacagttttcaggggagygtttcttccaygacacacagcaacatcccaaagaaataaacaagtgtgacaaaaaaaaaaaaaaacaaacctaaatgctactgttccaaagagcaacttgatggttttttttaatactgagtgcaaaaggtcacccaaattcctatgatgaaattttaaattaatgggcacctttcaacatcatttgcttccttatctacagttgattcagaaatctgcattttttattcttttatatgacttttaagtaaaagatttatatgg

SEQ ID NO: 151 - DNA, 4215 bp, Homo sapiens
tacagaatttacgcacccttggcttccttggagcctagcggctctccccgcgtccaagatggcggcagaagcagctggtgggaaatacagaagcacagtcagcaaaagcaaagacccctcggggctgctcatctctgtgatcaggactctgtctactagtgacgatgtcgaagacagggaaaatgaaaagggtcgccttgaagaagcctacgagaaatgtgaccgtgacctggatgaattgattgtacagcactacacagaattgacgacagccattcgcacataccagagcatcacagagcgcatcactaactcccgaaataaaataaagcaggtaaaagagaacctgctttcatgcaagatgctgctgcactgcaaacgggatgagcttcggaaactgtggattgaaggaattgagcataagcatgtcctgaacttgttggatgaaattgagaatatcaagcaagtgcctcaaaagctggaacagtgcatggccagcaagcactatctcagtgccactgacatgttggtgtcagcagttgagtctttggagggccccctgctccaggtggaaggactgagtgaccttcgactagagcttcacagcaagaagatgaaccttcacttggttctcatagatgaactacaccggcacctgtacatcaaatcgactagccgagttgtgcagcgtaacaaggaaaaagggaaaatcagctccctcgtgaaagatgcttctgttcctctgattgatgttacaaacctccctactcctcgaaaattccttgatacctctcactattctactgctggragctcaagtgtgagggagataaatctgcaggacatcaaggaagatttagaattggatccagaggaaaacagcaccctgtttatgggtatcctcattaagggcttggcgaaactgaagaagatyccagaaacagttaaggcaatcatagagcgcttggagcaggagttgaagcaaattgtgaagaggtctacaacccaggtggcagacagtggctatcagcggggggagaacgttactgtggagaaccaaccaaggttgcttctagaactgctggagttactgtttgacaagtttaatgctgtagccgctgcacactctgtggtcctgggatacctgcaggacactgtagtgactccactgactcagcaggaagatatcaaactgtatgatatggcagatgtatgggtgaagatccaagatgttctacagatgctattaactgagtacttggatatgaaaaatactcgtacggcctctgaaccatcagctcaactaagctatgccagcactggacgagagtttgcagccttttttgccaagaagaaacctcaaaggccaaaaaattctcttttcaagttcgaatcgtcctcccatgccatcagtatgagcgcctatctgcgagaacagagaagggagctctatagtcggagtggagaactgcaagggggtcctgatgacaacttaattgaaggtggaggaacaaaatttgtctgcaaacctggagccagaaacattaccgtcatattccacccattactaagatttattcaggagattgagcatgctctgggtcttggcccagccaaacagtgtcctcttcgagagtttctcaccgtgtacatcaaaaacatctttctcaatcaagtcttggctgagatcaacaaggagattgaaggagtcactaaaacatctgaccctttgaagattctggccaacgcagacaccatgaaggtgctgggagtgcagcggcctctcctacagagcacaatcattgtggagaagacagttcaagacctcctgaacctgatgcatgacttgagtgcatattcagatcaattcctcaacatggtgtgygtraagctccaggagtacaaggacacctgcactgcagcttacaggggtattgtccagtcagaagaaaaacttgtcatcagtgcatcctgggcaaaagatgatgatatcagcagactcttgaaatctctaccaaactggatgaatatggctcaacccaaacagctgaggccaaaaagagaggaggaagaagatttcataagggcagcttttggcaaggagtctgaagttcttattgggaacctgggtgataaattaatccctccacaagacatccttcgtgacgtcagtgacctcaaagccttggccaacatgcatgaaagcstggaatggttggcaagtcgaacaaagtcagctttctccaatctttctacatcccagatgctttctcctgctcaagacagccacacgaacacggatctycccccagtgtcagagcagatcatgcagactctcagtgaacttgccaaatcgttccaggatatggctgaccgctgcttgcttgtcttacatctggaagtgagggttcactgtttccactatcttatccctcttgcaaaggaggggaactatgccattgtggctaatgtggaaagtatggattatgaccccctggtggtcaagctcaacaaagatatcagcgccattgaagaggccatgagcgccagccttcagcagcacaagttccagtatatcttcgaaggcctgggccacctgatctcctgcatcctcattaatggtgcccagtacttcaggcgcatcagtgagtctggcatcaagaaaatgtgtaggaacatttttgttcttcagcagaatttgaccaacatcaccatgtcgcgggaggcagacctggactttgcaaggcagtactacgagatgctttacaacacagctgacgagctcctgaacctggtggtggaccagggtgtgaagtacacggagctggagtacatccacgctctgaccctgctgcaccgcagccaractggggtgggggaactgaccacccagaacacraggctgcagaggctcaaagagatcatctgcgagcaggctgccatcaagcaagccaccaaggacaagaagataactaccgtttagcagggcgtactgcggttggtgacgggggtcccctcagtcacactcactttttttccttggtatgttattgagtatattctgagcttagytttctctacagtgatactttagtggagaggaggtgtaaggattctttctctctggttttggcttttcatataaatgctaaaggaaggcgacagtacagagtgttttggttgaacaactactttaatgcagtcaaatctaacgggactagggtgggatagggaggaaggtggtatcaaattrttggactctgaaaaacaagtggatggattactaatatttgatttattactcaatatatatataattccagccttggaaagtaggaaagtaggctgctacctaacttttagtcccttccaaaaccatttagtagggttctattacataaacagtagggtttttcctctcctgaccttatccgtttacagttcaatgaaataagtgtatgtgcattgctgtctgtctctattgccaaaatcaaataaatggcttctcagctgctgtttacaacaaacttccctaaccaaaacagaacctctaatttagggctaggaatagaagtcttttgatcccagtccstgggacagttttgtatgctgtatcttgtacacaggttgtaggttggtttattgccattttgttttatttctgctrtataaaaaccaagagccagacaattagacaactatggaggaatgaaaggcaattcaaacatctgcttgattcccgccccgccacccctaatttctgagagaataatggttagagaacattgcatctcacttgaaacatcctttgggggtaaatgattcttaggtgctcacttggtctgagctcagctgaatgcagggaagatgggacagagtgacatttctcctctgtgcggcctccagctgagcctgtctctgaattgttccctcccccgcaatgtgggcacttaccatgttcctggcacactggacctcaccatgtcccccggtcaccagtcctcttgctgcccatggttcataggtcatagaaggcagcaatgcactgactgggccacatcttgaaaactcgtggaaagggaaaggggaggagatgggactttgaccacacacagtgatgcctcacaccctgaaggtgggggattttgtacctgtttgtacaactttggtcttgatgggaaaaatggagaattaaaaagtgttttgagaagctta

SEQ ID NO: 152 - DNA, 813 bp, Homo sapiens
aaaaccaaaatgagcaaaggagaggatcccaataatcccagatctataaagcggatttctcaagggggtagagataaccacctagctattgctaaatgtgatctcactcagttgaaaaagaaacaatcagaagtgagcaatgggagccgtgaaaccatctcaatgaagacttgttgccaacatggagatagaggatattggtctacagggtactattggagagggggtcctgatgacaacttaattgaaggtggaggaacaaaatttgtctgcaaacctggagccagaaacattaccgtcatattccacccattactaagatttattcaggagattgagcatgctctgggtcttggcccagccaaacagtgtcctcttcgagagtttctcaccgtgtacatcaaaaacatctttctcaatcaagtcttggctgagatcaacaaggagattgaaggagtcactaaaacatctgaccctttgaagattctggccaacgcagacaccatgaaggtgctgggagtgcagcggcctctcctacagagcacaatcattgtggagaagacagttcaagacctcctgaacctgatgcatgacttgagtgcatattcagatcaattcctcaacatggtgtgygtraagctccaggagtacaaggacacctgcactgcagcttacaggggtattgtccagtcagaagaaaaacttgtcatcagtgcatcctgggcaaaagatgatgatatcatgcagactctcagtgaacttgccaaatcgttccaggatatggctgaccgctgcttgcttgtcttacatctg

SEQ ID NO: 153 - DNA, 2548 bp, Homo sapiens
tacagaatttacgcacccttggcttccttggagcctagcggctctccccgcgtccaagatggcggcagaagcagctggtgggaaatacagaagcacagtcagcaaaagcaaagacccctcggggctgctcatctctgtgatcaggactctgtctactagtgacgatgtcgaagacagggaaaatgaaaagggtcgccttgaagaagcctacgagaaatgtgaccgtgacctggatgaattgattgtacagcactacacagaattgacgacagccattcgcacataccagagcatcacagagcgcatcactaactcccgaaataaaataaagcaggtaaaagagaacctgctttcatgcaagatgctgctgcactgcaaacgggatgagcttcggaaactgtggattgaaggaattgagcataagcatgtcctgaacttgttggatgaaattgagaatatcaagcaagtgcctcaaaagctggaacagtgcatggccagcaagcactatctcagtgccactgacatgttggtgtcagcagttgagtctttggagggccccctgctccaggtggaaggactgagtgaccttcgactagagcttcacagcaagaagatgaaccttcacttggttctcatagatgaactacaccggcacctgtacatcaaatcgactagccgagttgtgcagcgtaacaaggaaaaagggaaaatcagctccctcgtgaaagatgcttctgttcctctgattgatgttacaaacctccctactcctcgaaaattccttgatacctctcactattctactgctggragctcaagtgtgagggagataaatctgcaggacatcaaggaagatttagaattggatccagaggaaaacagcaccctgtttatgggtatcctcattaagggcttggcgaaactgaagaagatyccagaaacagttaaggcaatcatagagcgcttggagcaggagttgaagcaaattgtgaagaggtctacaacccaggtggcagacagtggctatcagcggggggagaacgttactgtggagaaccaaccaaggttgcttctagaactgctggagttactgtttgacaagtttaatgctgtagccgctgcacactctgtggtcctgggatacctgcaggacactgtagtgactccactgactcagcaggaagatatcaaactgtatgatatggcagatgtatgggtgaagatccaagatgttctacagatgctattaactgagtacttggatatgaaaaatactcgtacggcctctgaaccatcagctcaactaagctatgccagcactggacgagagtttgcagccttttttgccaagaagaaacctcaaaggccaaaaaattctcttttcaagttcgaatcgtcctcccatgccatcagtatgagcgcctatctgcgagaacagagaagggagctctatagtcggagtggagaactgcaagggggtcctgatgacaacttaattgaaggtggaggaacaaaatttgtctgcaaacctggagccagaaacattaccgtcatattccacccattactaagatttattcaggagattgagcatgctctgggtcttggcccagccaaacagtgtcctcttcgagagtttctcaccgtgtacatcaaaaacatctttctcaatcaagtcttggctgagatcaacaaggagattgaaggagtcactaaaacatctgaccctttgaagattctggccaacgcagacaccatgaaggtgctgggagtgcagcggcctctcctacagagcacaatcattgtggagaagacagttcaagacctcctgaacctgatgcatgacttgagtgcatattcagatcaattcctcaacatggtgtgygtraagctccaggagtacaaggacacctgcactgcagcttacaggggtattgtccagtcagaagaaaaacttgtcatcagtgcatcctgggcaaaagatgatgatatcagcagactcttgaaatctctaccaaactggatgaatatggctcaacccaaacagctgaggccaaaaagagaggaggaagaagatttcataagggcagcttttggcaaggagtctgaagttcttattgggaacctgggtgataaattaatccctccacaagacatccttcgtgacgtcagtgacctcaaagccttggccaacatgcatgaaagcstggaatggttggcaagtcgaacaaagtcagctttctccaatctttctacatcccagattttacaaggcatgadcatgaaatgcaaaagtttggcagtttcccaaggtcaaaatcagtcaatgacaaaaatccagaccacatctgtctgttctcagagtgcagaccagagtgtctggaaaaacaacataatcacctattacgagttacgagtgacagagttacaagcacaccaaaccagcgtgcctttgtttccccacggaggcaatgctgttgttcagctatctcccaaagctacagcagcaaggcgaatgcaatgctgtgtgcctaatataaatggtatt

SEQ ID NO: 154 - DNA, 4768 bp, Homo sapiens
cggccgcatccttgccgcccgccccggcccagccgcgtcccggagccgtcgggcatggagccgtggaagcagtgcgcgcagtggctcatccattgcaaggtgctgcccaccaaccaccgggtgacctgggactcggctcaggtgttcgaccttgcgcagaccctccgcgatggagtcctgctctgccagctgcttaacaacctccgggcgcactccatcaacctgaaggagatcaacctgaggccgcagatgtcccagtttctctgtttgaagaacataaggacatttctcacggcctgttgtgagacgtttggaatgaggaaaagtgaacttttcgaggcatttgacytgtttgatgttcgtgactttggaaaggttatagaaacattatcacgactttctcgaacacctatagcattggccacaggaatcaggcccttcccaacagaagaaagcattaatgatgaaracatctacaaaggccttcctgatttaatagatgaaacccttgtggaagatgaagaagatctctatgactgtgtttatggggaagatgaaggtggagaagtctatgaggacttaatgaaggcagaggaagcacatcagcccaaatgtccagaaaatgatatacgaagttgttgtctagcagaaattaagcagacagaagaaaaatatacagaaactttggagtcaatagaaaartatttcatggcaccactaaaaagatttctgacagcagcagaatttgattcagtattcatcaacattcctgaacttgtaaaacttcatcggaacctaatgcaagagattcatgattccattgtaaataaaaatgaccagaacttgtaccaagtttttattaactacaaggaaagattggttatttacgggcagtactgcagtggagtggagtcagccatctctagtttagactacatttctaagwcaaaagaagatgtcaaactgaaattagaggaatgttccaaaagagcaaataatgggaaatttactcttcgagacttgcttgtggttcctatgcaacgtgttttaaagtaccaccttctcctccaggaactggtcaaacataccactgatccgactgagaaggcaaatctgaaactggctcttgatgccatgaaggacttggcacaatatgtgaatgaagtgaaaagagataatgagacccttcrtgaaattaaacagtttcagctatctatagagaatttgaaccaaccagttttgctttttggacgacctcagggagatggtgaaattcgaataaccactctagacaagcataccaaacaagaaaggcatatcttcttatttgatttggcagtgatcgtatgtaagagaaaaggtgataactatgaaatgaaggaaataatagatcttcagcagtacaagatagccaataatcytacaaccgataaagaaaacaaaaagtggtcttatggcttctacctcatccatacccaaggacaaaatgggttagaattttattgcaaaacaaaagatttaaagaagaaatggctagaacagtttgaaatggctttgtctaacataagrccagactatgcagactccaatttccacgacttcaagatgcataccttcactcgagtcacatcctgcaaagtctgccagatgctcctgaggggaacattttatcaaggctatttatgttttaagtgtggagcgagagcacacaaagaatgtttgggaagagtagacaattgtggcagagttaattctggtgaacaagggacactcaaactaccagagaaacggaccaatggactgcgaagaactcctaaacaggtggatccaggtttaccaaagatgcaggtcattaggaactattctggaacaccacccccagctctgcatgaaggacccyctttacasctccaggccggggataccgttgaacttctgaaaggagatgcacacagtctgttttggcagggcagaaatttagcatctggagaggttggattttttccaagtgatgcagtcaagccttgcccatgtgtgcccaaaccagtagattattcttgccaaccctggtatgctggagcaatggaaagattgcaagcagagaccgaacttattaatagggtaaatagtacttaccttgtgaggcacaggaccaaagagtcaggagaatatgcaattagcattaagtacaataatgaagcaaagcacatcaagattttaacaagagatggcttttttcacattgcagaaaatagaaaatttaaaagtttaatggarcttgtggagtactacaagcatcattctctcaaggaagggttcagaaccttagatacaactctgcagtttccatacaaggagccagaacattcagctggacagaggggtaatagagcaggcaacagcttgttaagtccaaaagtgctgggcattgccatcgctcggtatgacttctgtgcaagagatatgagagagttgtccttgttgaaaggagatgtggtgaagatttacacaaagatgagtgcaaatggctggtggagaggagaagtaaatggcagggtgggctggtttccatccacatatgtggaagaggatgaataaattcaaatcccgtgttgcaccctgcaccaaaaatttcagagaagggataaatagaagcctgcacagcatcgtgaattaactraagtgtttaaaaagctgcatttctggctgttcaacatcctccctccttagcccctcctaagtcttaatgctgagatttctaaagatgctggtactgacagattaatggcttgcctagagctgtgcaagaaacagcctgccagtctgtcattgtcagggaccagggcaaaaccaagagctgttcttcccagaagagccctgcaaacacattggttcgtgcttccctttacttcttctggtcagataccatgaatgccagtcatcagtaaatcttaatacacttttgctttattctcacatgccattcaccagattatttgatggtacaaagaagcagaagtgtaattttccttttcccagcatgacgaaaaattggagttctgccatttgagcagcttactggaaagatccagccttacttgtcttaaattgtccaacaaggtgactcattgccyggcaaacacttttaccctcagatgttactcatgatattataaaatatgaggccagtgctcaggtttgcatcataagtgagctatccctgaagggttttaattacttatttggtgtcctgattatatttgcaaacttctttataaaaggtgaaaaaagcacacaaaagagagggtgtcttcatattaaaccttcacaaccttcatgatttcataggattattttggaaatatagcacttgactttatgaaaggatctgggctaggtatattargggtagttgccaataacctgaagaagctggcatwgtttacagaaacagatcaagggctataatttatgtcattttatagcagcagtatctattaatacatgccttttcctcccatccacctcccccgcacacacacaaagatgacctgggacatgatttttttattcccacattttcttggagcacaaacaactttgttgaggattttggaaggaaagcacaactgggtcctttattcatttctgggacagaaagagggtcagtggacttttgtgggcctccagcttctctcagagtctccccctctgcagcccatcctgggagtgtattaactggagggaagatgggtcttgcagtacatttgttttgcccagccatcactcttttttgtgaggagcctaaatacattcttcctggggtccagagtccccattcaaggcagtcaagttaagacactaacttggccctttcctgatggaaatatttcctccatagcagaagttgtgttctgacaagactgmgwgagttacatgttgggaaaaaaaagaagcattaacttagtagaactgaaccaggagcattaagttctgaaattttgaatcatctctgaaatgaagcaggtgtagcctgccctctcatcaatccgtctgggtgccagaactcaaggttcagtggacacatccccctgttagagaccctcatgggctaggacttttcatctaggatagattcaagacctttacctcagaattatgtaaactgtgattgtgttttagaaaaattattatttgctaaaaccatttaagtctttgtatatgtgtaaatgatcacaaaaatgtattttataaaatgttctgtacaataaagttacacctcaaagtgtactcttggaatggattctttcctgtaaagtcttatctgcgactctgtctcgggaatgttttgtctgttgccgtcagccgaactttgttatggagggagcagcctcacacaagcagaaacactcctgtggatggtattgtagcatgtattgtttattttagtcaatagaccctctccttataaatggtgtttagtcttcctgttgcatttcatgggcctgggggtttcctagcagaggatattggagcccctttttgtgacattaccaattacatctttgtccacgtttaatactttgttttggaaaatttaaatgctgcagatttgtgtagagttctaataccaaagacagaagtaaatgttttccatatactttgtcttgcctgtatgcagccctygtgtaatayggtgaattagagtggtatttcactttgtattattttgtaaatatgtcaatrtaataaatagtgactaaattga

SEQ ID NO: 155 - DNA, 3107 bp, Homo sapiens
aaagcagtggtgttttaccactctgcagagaaagctaaggttgctaaccaaacaaaataactttacactgacaatgccaatttttacatttctttcagaacaagggacactcaaactaccagagaaacggaccaatggactgcgaagaactcctaaacaggtggatccaggtttaccaaagatgcaggtcattaggaactattctggaacaccacccccagctctgcatgaaggacccyctttacasctccaggccggggataccgttgaacttctgaaaggagatgcacacagtctgttttggcagggcagaaatttagcatctggagaggttggattttttccaagtgatgcagtcaagccttgcccatgtgtgcccaaaccagtagattattcttgccaaccctggtatgctggagcaatggaaagattgcaagcagagaccgaacttattaatagggtaaatagtacttaccttgtgaggcacaggaccaaagagtcaggagaatatgcaattagcattaagtacaataatgaagcaaagcacatcaagattttaacaagagatggcttttttcacattgcagaaaatagaaaatttaaaagtttaatggarcttgtggagtactacaagcatcattctctcaaggaagggttcagaaccttagatacaactctgcagtttccatacaaggagccagaacattcagctggacagaggggtaatagagcaggcaacagcttgttaagtccaaaagtgctgggcattgccatcgctcggtatgacttctgtgcaagagatatgagagagttgtccttgttgaaaggagatgtggtgaagatttacacaaagatgagtgcaaatggctggtggagaggagaagtaaatggcagggtgggctggtttccatccacatatgtggaagaggatgaataaattcaaatcccgtgttgcaccctgcaccaaaaatttcagagaagggataaatagaagcctgcacagcatcgtgaattaactraagtgtttaaaaagctgcatttctggctgttcaacatcctccctccttagcccctcctaagtcttaatgctgagatttctaaagatgctggtactgacagattaatggcttgcctagagctgtgcaagaaacagcctgccagtctgtcattgtcagggaccagggcaaaaccaagagctgttcttcccagaagagccctgcaaacacattggttcgtgcttccctttacttcttctggtcagataccatgaatgccagtcatcagtaaatcttaatacacttttgctttattctcacatgccattcaccagattatttgatggtacaaagaagcagaagtgtaattttccttttcccagcatgacgaaaaattggagttctgccatttgagcagcttactggaaagatccagccttacttgtcttaaattgtccaacaaggtgactcattgccyggcaaacacttttaccctcagatgttactcatgatattataaaatatgaggccagtgctcaggtttgcatcataagtgagctatccctgaagggttttaattacttatttggtgtcctgattatatttgcaaacttctttataaaaggtgaaaaaagcacacaaaagagagggtgtcttcatattaaaccttcacaaccttcatgatttcataggattattttggaaatatagcacttgactttatgaaaggatctgggctaggtatattargggtagttgccaataacctgaagaagctggcatwgtttacagaaacagatcaagggctataatttatgtcattttatagcagcagtatctattaatacatgccttttcctcccatccacctcccccgcacacacacaaagatgacctgggacatgatttttttattcccacattttcttggagcacaaacaactttgttgaggattttggaaggaaagcacaactgggtcctttattcatttctgggacagaaagagggtcagtggacttttgtgggcctccagcttctctcagagtctccccctctgcagcccatcctgggagtgtattaactggagggaagatgggtcttgcagtacatttgttttgcccagccatcactcttttttgtgaggagcctaaatacattcttcctggggtccagagtccccattcaaggcagtcaagttaagacactaacttggccctttcctgatggaaatatttcctccatagcagaagttgtgttctgacaagactgmgwgagttacatgttgggaaaaaaaagaagcattaacttagtagaactgaaccaggagcattaagttctgaaattttgaatcatctctgaaatgaagcaggtgtagcctgccctctcatcaatccgtctgggtgccagaactcaaggttcagtggacacatccccctgttagagaccctcatgggctaggacttttcatctaggatagattcaagacctttacctcagaattatgtaaactgtgattgtgttttagaaaaattattatttgctaaaaccatttaagtctttgtatatgtgtaaatgatcacaaaaatgtattttataaaatgttctgtacaataaagttacacctcaaagtgtactcttggaatggattctttcctgtaaagtcttatctgcgactctgtctcgggaatgttttgtctgttgccgtcagccgaactttgttatggagggagcagcctcacacaagcagaaacactcctgtggatggtattgtagcatgtattgtttattttagtcaatagaccctctccttataaatggtgtttagtcttcctgttgcatttcatgggcctgggggtttcctagcagaggatattggagcccctttttgtgacattaccaattacatctttgtccacgtttaatactttgttttggaaaatttaaatgctgcagatttgtgtagagttctaataccaaagacagaagtaaatgttttccatatactttgtcttgcctgtatgcagccctygtgtaatayggtgaattagagtggtatttcactttgtattattttgtaaatatgtcaatrtaataaatagtgactaaattga

SEQ ID NO: 156 - DNA, 4874 bp, Homo sapiens
gagaagaaagccagtgcgtctctgggcgcaggggccagtggggctcggaggcacaggcaccccgcgacactccaggttccccgacccacgtccctggcagccccgattatttacagcctcagcagagcacggggcgggggcagaggggcccgcccgggagggctgctacttcttaaaacctctgckggctgcttagtcacagccccccttgcttgggtgtgtccttcgctcgctccctccctccgtcttaggtcactgttttcaacctcgaataaaaactgcagccaacttccgaggcagcctcattgcccagcggaccccagcctctgccaggttcggtccgccatcctcgtcccgtcctccgccggcccctgccccgcgcccagggatcctccagctcctttcgcccgcgccctccgttcrctccggacaccatggacaagttttggtggcacgcagcctggggactctgcctcgtgccgctgagcctggcgcagatcgatttgaatataacctgccgctttgcaggtgtattccacgtggagaaaaatggtcgctacagcatctctcsgacggaggccgctgacctctgcaaggctttcaatagcaccttgcccacaatggcccagatggagaaagctctgagcatcggatttgagacctgcaggtatgggttcatagaagggcaygtggtgattccccggatccaccccaactccatctgtgcagcaaacaacacaggggtgtacatcctcacatmcaacacctcccagtatgacacatattgcttcaatgcttcagctccacctgaagaagattgtacatcagtcacagacctgcccaatgcctttgatggaccaattaccataactattgttaaccgtgatggcacccgctatgtccagaaaggagaatacagaacgaatcctgaagacatctaccccagcaaccctactgatgatgacgtgagcagcggctcctccagtgaaaggagcagcacttcaggaggttacatcttttacaccttttctactgtacaccccatcccagacgaagacagtccctggatcaccgacagcacagacagaatccctgctaccaatatggactccagtcatagtayaacgcttcagcctactgcaaatccaaacacaggtttggtggaasatttggacaggacaggacctctttcaatgacaacgcagcagagtaattctcagagcttctctacatcacatgaaggcttggaagaagataaagaccatccaacaacttctactctgacatcaagcaataggaatgatgtcacaggtggaagaagagacccaaatcattctgaaggctcaactactttactggaaggttatacctctcattacccacacacgaaggaaagcaggaccttcatcccagtgacctcagctaagactgggtcctttggagttactgcagttactgttggagattccaactctaatgtcaatcgttccttatcaggagaccaagacacattccaccccagtggggggtcccataccactcatggatctgaatcagatggacactcacatgggagtcaagaaggtggagcaaacacaacctctggtcctataaggacaccccaaattccagaatggctgatcatcttggcatccctcttggccttggctttgattcttgcagtttgcattgcagtcaacagtcgaagaaggtgtgggcagaagaaaaagctagtgatcaacagtggcaatggagctgtggaggacagaaagccaagtggactcaacggagaggccagcaagtctcaggaaatggtgcatttggtgaacaaggagtcgtcagaaactccagaccagtttatgacagctgatgagacaaggaacctgcagaatgtggacatgaagattggggtgtaacacctacaccattatcttggaaagaaacaaccgttggaaacataaccattacagggagctgggacacttaacagatgcaatgtgctactgattgtttcattgcgaatcttttttagcataaaattttctactyttttygttttttgtgttttgttctttaaagtcaggtccaatttgtaaaaacagcattgctttctgaaattagggcccaattaataatcagcaagaatttgatcgttccagttcccacttggaggcctttcatccctcgggtgtgctatggatggcttctaagacatttcccagggttaatagggcctggtccctgggaggaaatttgaatgggtccattttgcccttccatagcctaatccctgggcattgytttccactgaggttgggggttggggtgtactagttacayatcttcaacagaccccctctagaaatttttcagatgcttctgggagacacccaaagggtgaagctatttatctgtagtaaactatttatctgtgtttttgaaatattaaaccctggatcagtcctttgatcagtataattttttaaagttactttgtcagaggcacaaaagggtttaaactgattcataataaatatctgtacttcttcgatcttcaccttttgtgctgtgattcttcagtttctaaaccagcactgtctgggtccctacaatgtatcaggaagagctgagaatggtaaggagactcttctaagtcttcatctcagagaccctgagttcccactcagacccactcagccaaatctcatggaagaccaaggagggcagcactgtttttgttttttgttttttacactgtccaaaggttttccatcctgtcctggaatcagagttggaagctgaggagcttcagcctcttttatggtttaatggccacctgttctctcctgtgaaaggctttgcaaagtcacattaagtttgcatgacctgttatccctggggccctatttcatagaggctggccctattagtgatttccaaaaacaatatggaagtgccttttgatgtcttacaataagagaagaagccaatggaaatgaaagagattggcaaaggggaaggatgatgccatgtagatcctgtttgacatttttatggctgtatttgtaaacttaaacacaccagtgtctgttcttgatgcagttgctatttaggatgagttaagtgcctggggagtccctcaaaaggttaaagggattcccatcattggaatcttatcaccagataggcaagtttatgaccaaacaagagagtactggctttatcctctaacctcatattttctcccacttggcaagtcctttgtggcatttattcatcagtcagggtgtccgattggtcctagaacttccaaaggctgcttgtcatagaagccattgcatctataaagcaacggctcctgttaaatggtatctcctttctgaggctcctactaaaagtcatttgttacctaaacttatgtgcttaacaggcaatgcttctcagaccacaaagcagaaagaagaagaaaagctcctgactaaatcagggctgggcttagacagagttgatctrtagaatatctttaaaggagagatgtcaactttctgcactattcccagcctctgctcctccctgtctaccctctcccctccctctctccctccacttcaccccacaatctttggtctggatttctttttattttcttttcaacttgaaagaaactggacattaggccactatgtgttgttactgccactagtgttcaagtgcctcttgttttcccagagatttcctgggtctgccagaggcccagacaggctcactcaagctctttaactgaaaagcaacaagccactccaggacaaggttcaaaatggttacaacagcctctacctgtcgccccagggagaaaggggtagtgatacaagtctcatagccagagatggttttccactccttctagatattcccaaaaagaggctgagacaggaggttattttcaattttattttggaattaaatacttttttccctttattactgttgtagtccctcacttggatatacctctgttttcacgatagaaataagggaggtctagagcttytattccttggccattgtcaacggagagctggccaagtcttcacaaacccttgcaacattgcctgaagtttatggaataagatgtattctcactcccttgatctcaagggcgtaactctggaagcacagcttgactacaygtcatttttaccaatgattttcaggtgacctgggctaagtcatttaaactgggtctttataaaagtaaaaggccaacatttaattattttgcaaagcaacctaagagctaaagatgtaatttttcttgcaattgtaaatcttttgtgtctcctgaagacttcccttaaaattagctctgagtgaaaaatcaaaagagacaaaagacatcttcgaatccatatttcaagcctggtagaattggcttttctagcagaacctttccaaaagttttatattgagattcataacaacaccaagaattgattttgtagccaacattcattcaatactgttatatcagaggagtaggagagaggaaacatttgacttatctggaaaagcaaaatgtacttaagaataagaataacatggtccattcacctttatgttatagatatgtctttgtgtaaatcatttgttttgagttttcaaagaatagcccattgttcattcttgtgctgtacaatgaccactgttattgttactttgacttttcagagcacacccttcctctggtttttgtatatttattgatggatcaataataatgaggaaagcatgatatgtatattgctgagttgaaagcacttattggaaaatattaaaaggctaacattaaaagactaaaggaaacagactcagaa

SEQ ID NO: 157 - DNA, 4723 bp, Homo sapiens
gagaagaaagccagtgcgtctctgggcgcaggggccagtggggctcggaggcacaggcaccccgcgacactccaggttccccgacccacgtccctggcagccccgattatttacagcctcagcagagcacggggcgggggcagaggggcccgcccgggagggctgctacttcttaaaacctctgckggctgcttagtcacagccccccttgcttgggtgtgtccttcgctcgctccctccctccgtcttaggtcactgttttcaacctcgaataaaaactgcagccaacttccgaggcagcctcattgcccagcggaccccagcctctgccaggttcggtccgccatcctcgtcccgtcctccgccggcccctgccccgcgcccagggatcctccagctcctttcgcccgcgccctccgttcrctccggacaccatggacaagttttggtggcacgcagcctggggactctgcctcgtgccgctgagcctggcgcagatcgatttgaatataacctgccgctttgcaggtgtattccacgtggagaaaaatggtcgctacagcatctctcsgacggaggccgctgacctctgcaaggctttcaatagcaccttgcccacaatggcccagatggagaaagctctgagcatcggatttgagacctgcaggtatgggttcatagaagggcaygtggtgattccccggatccaccccaactccatctgtgcagcaaacaacacaggggtgtacatcctcacatmcaacacctcccagtatgacacatattgcttcaatgcttcagctccacctgaagaagattgtacatcagtcacagacctgcccaatgcctttgatggaccaattaccataactattgttaaccgtgatggcacccgctatgtccagaaaggagaatacagaacgaatcctgaagacatctaccccagcaaccctactgatgatgacgtgagcagcggctcctccagtgaaaggagcagcacttcaggaggttacatcttttacaccttttctactgtacaccccatcccagacgaagacagtccctggatcaccgacagcacagacagaatccctgctaccaatatggactccagtcatagtayaacgcttcagcctactgcaaatccaaacacaggtttggtggaasatttggacaggacaggacctctttcaatgacaacgcagcagagtaattctcagagcttctctacatcacatgaaggcttggaagaagataaagaccatccaacaacttctactctgacatcaagcagagaccaagacacattccaccccagtggggggtcccataccactcatggatctgaatcagatggacactcacatgggagtcaagaaggtggagcaaacacaacctctggtcctataaggacaccccaaattccagaatggctgatcatcttggcatccctcttggccttggctttgattcttgcagtttgcattgcagtcaacagtcgaagaaggtgtgggcagaagaaaaagctagtgatcaacagtggcaatggagctgtggaggacagaaagccaagtggactcaacggagaggccagcaagtctcaggaaatggtgcatttggtgaacaaggagtcgtcagaaactccagaccagtttatgacagctgatgagacaaggaacctgcagaatgtggacatgaagattggggtgtaacacctacaccattatcttggaaagaaacaaccgttggaaacataaccattacagggagctgggacacttaacagatgcaatgtgctactgattgtttcattgcgaatcttttttagcataaaattttctactyttttygttttttgtgttttgttctttaaagtcaggtccaatttgtaaaaacagcattgctttctgaaattagggcccaattaataatcagcaagaatttgatcgttccagttcccacttggaggcctttcatccctcgggtgtgctatggatggcttctaacaaaaactacacatatgtattcctgatcgccaacctttcccccaccagctaaggacatttcccagggttaatagggcctggtccctgggaggaaatttgaatgggtccattttgcccttccatagcctaatccctgggcattgytttccactgaggttgggggttggggtgtactagttacayatcttcaacagaccccctctagaaatttttcagatgcttctgggagacacccaaagggtgaagctatttatctgtagtaaactatttatctgtgtttttgaaatattaaaccctggatcagtcctttgatcagtataattttttaaagttactttgtcagaggcacaaaagggtttaaactgattcataataaatatctgtacttcttcgatcttcaccttttgtgctgtgattcttcagtttctaaaccagcactgtctgggtccctacaatgtatcaggaagagctgagaatggtaaggagactcttctaagtcttcatctcagagaccctgagttcccactcagacccactcagccaaatctcatggaagaccaaggagggcagcactgtttttgttttttgttttttacactgtccaaaggttttccatcctgtcctggaatcagagttggaagctgaggagcttcagcctcttttatggtttaatggccacctgttctctcctgtgaaaggctttgcaaagtcacattaagtttgcatgacctgttatccctggggccctatttcatagaggctggccctattagtgatttccaaaaacaatatggaagtgccttttgatgtcttacaataagagaagaagccaatggaaatgaaagagattggcaaaggggaaggatgatgccatgtagatcctgtttgacatttttatggctgtatttgtaaacttaaacacaccagtgtctgttcttgatgcagttgctatttaggatgagttaagtgcctggggagtccctcaaaaggttaaagggattcccatcattggaatcttatcaccagataggcaagtttatgaccaaacaagagagtactggctttatcctctaacctcatattttctcccacttggcaagtcctttgtggcatttattcatcagtcagggtgtccgattggtcctagaacttccaaaggctgcttgtcatagaagccattgcatctataaagcaacggctcctgttaaatggtatctcctttctgaggctcctactaaaagtcatttgttacctaaacttatgtgcttaacaggcaatgcttctcagaccacaaagcagaaagaagaagaaaagctcctgactaaatcagggctgggcttagacagagttgatctrtagaatatctttaaaggagagatgtcaactttctgcactattcccagcctctgctcctccctgtctaccctctcccctccctctctccctccacttcaccccacaatctttggtctggatttctttttattttcttttcaacttgaaagaaactggacattaggccactatgtgttgttactgccactagtgttcaagtgcctcttgttttcccagagatttcctgggtctgccagaggcccagacaggctcactcaagctctttaactgaaaagcaacaagccactccaggacaaggttcaaaatggttacaacagcctctacctgtcgccccagggagaaaggggtagtgatacaagtctcatagccagagatggttttccactccttctagatattcccaaaaagaggctgagacaggaggttattttcaattttattttggaattaaatacttttttccctttattactgttgtagtccctcacttggatatacctctgttttcacgatagaaataagggaggtctagagcttytattccttggccattgtcaacggagagctggccaagtcttcacaaacccttgcaacattgcctgaagtttatggaataagatgtattctcactcccttgatctcaagggcgtaactctggaagcacagcttgactacaygtcatttttaccaatgattttcaggtgacctgggctaagtcatttaaactgggtctttataaaagtaaaaggccaacatttaattattttgcaaagcaacctaagagctaaagatgtaatttttcttgcaattgtaaatcttttgtgtctcctgaagacttcccttaaaattagctctgagtgaaaaatcaaaagagacaaaagacatcttcgaatccatatttcaagcctggtagaattggcttttctagcagaacctttccaaaagttttatattgagattcataacaacaccaagaattgattttgtagccaacattcattcaatactgttatatcagaggagtaggagagaggaaacatttgacttatctggaaaagcaaaatgtacttaagaataagaataacatggtccattcacctttatgttatagatatgtctttgtgtaaatcatttgttttgagttttcaaagaatagcccattgttcattcttgtgctgtacaatgaccactgttattgttactttgacttttcagagcacacccttcctctggtttttgtatatttattgatggatcaataataatgaggaaagcatgatatgtatattgctgagttgaaagcacttattggaaaatattaaaaggctaacattaaaagactaaaggaaacagactcagaa

SEQ ID NO: 158 - DNA, 4633 bp, Homo sapiens
gagaagaaagccagtgcgtctctgggcgcaggggccagtggggctcggaggcacaggcaccccgcgacactccaggttccccgacccacgtccctggcagccccgattatttacagcctcagcagagcacggggcgggggcagaggggcccgcccgggagggctgctacttcttaaaacctctgckggctgcttagtcacagccccccttgcttgggtgtgtccttcgctcgctccctccctccgtcttaggtcactgttttcaacctcgaataaaaactgcagccaacttccgaggcagcctcattgcccagcggaccccagcctctgccaggttcggtccgccatcctcgtcccgtcctccgccggcccctgccccgcgcccagggatcctccagctcctttcgcccgcgccctccgttcrctccggacaccatggacaagttttggtggcacgcagcctggggactctgcctcgtgccgctgagcctggcgcagatcgatttgaatataacctgccgctttgcaggtgtattccacgtggagaaaaatggtcgctacagcatctctcsgacggaggccgctgacctctgcaaggctttcaatagcaccttgcccacaatggcccagatggagaaagctctgagcatcggatttgagacctgcaggtatgggttcatagaagggcaygtggtgattccccggatccaccccaactccatctgtgcagcaaacaacacaggggtgtacatcctcacatmcaacacctcccagtatgacacatattgcttcaatgcttcagctccacctgaagaagattgtacatcagtcacagacctgcccaatgcctttgatggaccaattaccataactattgttaaccgtgatggcacccgctatgtccagaaaggagaatacagaacgaatcctgaagacatctaccccagcaaccctactgatgatgacgtgagcagcggctcctccagtgaaaggagcagcacttcaggaggttacatcttttacaccttttctactgtacaccccatcccagacgaagacagtccctggatcaccgacagcacagacagaatccctgctaccaatatggactccagtcatagtayaacgcttcagcctactgcaaatccaaacacaggtttggtggaasatttggacaggacaggacctctttcaatgacaacgcgagaccaagacacattccaccccagtggggggtcccataccactcatggatctgaatcagatggacactcacatgggagtcaagaaggtggagcaaacacaacctctggtcctataaggacaccccaaattccagaatggctgatcatcttggcatccctcttggccttggctttgattcttgcagtttgcattgcagtcaacagtcgaagaaggtgtgggcagaagaaaaagctagtgatcaacagtggcaatggagctgtggaggacagaaagccaagtggactcaacggagaggccagcaagtctcaggaaatggtgcatttggtgaacaaggagtcgtcagaaactccagaccagtttatgacagctgatgagacaaggaacctgcagaatgtggacatgaagattggggtgtaacacctacaccattatcttggaaagaaacaaccgttggaaacataaccattacagggagctgggacacttaacagatgcaatgtgctactgattgtttcattgcgaatcttttttagcataaaattttctactyttttygttttttgtgttttgttctttaaagtcaggtccaatttgtaaaaacagcattgctttctgaaattagggcccaattaataatcagcaagaatttgatcgttccagttcccacttggaggcctttcatccctcgggtgtgctatggatggcttctaacaaaaactacacatatgtattcctgatcgccaacctttcccccaccagctaaggacatttcccagggttaatagggcctggtccctgggaggaaatttgaatgggtccattttgcccttccatagcctaatccctgggcattgytttccactgaggttgggggttggggtgtactagttacayatcttcaacagaccccctctagaaatttttcagatgcttctgggagacacccaaagggtgaagctatttatctgtagtaaactatttatctgtgtttttgaaatattaaaccctggatcagtcctttgatcagtataattttttaaagttactttgtcagaggcacaaaagggtttaaactgattcataataaatatctgtacttcttcgatcttcaccttttgtgctgtgattcttcagtttctaaaccagcactgtctgggtccctacaatgtatcaggaagagctgagaatggtaaggagactcttctaagtcttcatctcagagaccctgagttcccactcagacccactcagccaaatctcatggaagaccaaggagggcagcactgtttttgttttttgttttttacactgtccaaaggttttccatcctgtcctggaatcagagttggaagctgaggagcttcagcctcttttatggtttaatggccacctgttctctcctgtgaaaggctttgcaaagtcacattaagtttgcatgacctgttatccctggggccctatttcatagaggctggccctattagtgatttccaaaaacaatatggaagtgccttttgatgtcttacaataagagaagaagccaatggaaatgaaagagattggcaaaggggaaggatgatgccatgtagatcctgtttgacatttttatggctgtatttgtaaacttaaacacaccagtgtctgttcttgatgcagttgctatttaggatgagttaagtgcctggggagtccctcaaaaggttaaagggattcccatcattggaatcttatcaccagataggcaagtttatgaccaaacaagagagtactggctttatcctctaacctcatattttctcccacttggcaagtcctttgtggcatttattcatcagtcagggtgtccgattggtcctagaacttccaaaggctgcttgtcatagaagccattgcatctataaagcaacggctcctgttaaatggtatctcctttctgaggctcctactaaaagtcatttgttacctaaacttatgtgcttaacaggcaatgcttctcagaccacaaagcagaaagaagaagaaaagctcctgactaaatcagggctgggcttagacagagttgatctrtagaatatctttaaaggagagatgtcaactttctgcactattcccagcctctgctcctccctgtctaccctctcccctccctctctccctccacttcaccccacaatctttggtctggatttctttttattttcttttcaacttgaaagaaactggacattaggccactatgtgttgttactgccactagtgttcaagtgcctcttgttttcccagagatttcctgggtctgccagaggcccagacaggctcactcaagctctttaactgaaaagcaacaagccactccaggacaaggttcaaaatggttacaacagcctctacctgtcgccccagggagaaaggggtagtgatacaagtctcatagccagagatggttttccactccttctagatattcccaaaaagaggctgagacaggaggttattttcaattttattttggaattaaatacttttttccctttattactgttgtagtccctcacttggatatacctctgttttcacgatagaaataagggaggtctagagcttytattccttggccattgtcaacggagagctggccaagtcttcacaaacccttgcaacattgcctgaagtttatggaataagatgtattctcactcccttgatctcaagggcgtaactctggaagcacagcttgactacaygtcatttttaccaatgattttcaggtgacctgggctaagtcatttaaactgggtctttataaaagtaaaaggccaacatttaattattttgcaaagcaacctaagagctaaagatgtaatttttcttgcaattgtaaatcttttgtgtctcctgaagacttcccttaaaattagctctgagtgaaaaatcaaaagagacaaaagacatcttcgaatccatatttcaagcctggtagaattggcttttctagcagaacctttccaaaagttttatattgagattcataacaacaccaagaattgattttgtagccaacattcattcaatactgttatatcagaggagtaggagagaggaaacatttgacttatctggaaaagcaaaatgtacttaagaataagaataacatggtccattcacctttatgttatagatatgtctttgtgtaaatcatttgttttgagttttcaaagaatagcccattgttcattcttgtgctgtacaatgaccactgttattgttactttgacttttcagagcacacccttcctctggtttttgtatatttattgatggatcaataataatgaggaaagcatgatatgtatattgctgagttgaaagcacttattggaaaatattaaaaggctaacattaaaagactaaaggaaacagactcagaa

SEQ ID NO: 159 - DNA, 5053 bp, Homo sapiens
gagaagaaagccagtgcgtctctgggcgcaggggccagtggggctcggaggcacaggcaccccgcgacactccaggttccccgacccacgtccctggcagccccgattatttacagcctcagcagagcacggggcgggggcagaggggcccgcccgggagggctgctacttcttaaaacctctgckggctgcttagtcacagccccccttgcttgggtgtgtccttcgctcgctccctccctccgtcttaggtcactgttttcaacctcgaataaaaactgcagccaacttccgaggcagcctcattgcccagcggaccccagcctctgccaggttcggtccgccatcctcgtcccgtcctccgccggcccctgccccgcgcccagggatcctccagctcctttcgcccgcgccctccgttcrctccggacaccatggacaagttttggtggcacgcagcctggggactctgcctcgtgccgctgagcctggcgcagatcgatttgaatataacctgccgctttgcaggtgtattccacgtggagaaaaatggtcgctacagcatctctcsgacggaggccgctgacctctgcaaggctttcaatagcaccttgcccacaatggcccagatggagaaagctctgagcatcggatttgagacctgcaggtatgggttcatagaagggcaygtggtgattccccggatccaccccaactccatctgtgcagcaaacaacacaggggtgtacatcctcacatmcaacacctcccagtatgacacatattgcttcaatgcttcagctccacctgaagaagattgtacatcagtcacagacctgcccaatgcctttgatggaccaattaccataactattgttaaccgtgatggcacccgctatgtccagaaaggagaatacagaacgaatcctgaagacatctaccccagcaaccctactgatgatgacgtgagcagcggctcctccagtgaaaggagcagcacttcaggaggttacatcttttacaccttttctactgtacaccccatcccagacgaagacagtccctggatcaccgacagcacagacagaatccctgctaccagtacgtcttcaaataccatctcagcaggctgggagccaaatgaagaaaatgaagatgaaagagacagacacctcagtttttctggatcaggcattgatgatgatgaagattttatctccagcaccaatatggactccagtcatagtayaacgcttcagcctactgcaaatccaaacacaggtttggtggaasatttggacaggacaggacctctttcaatgacaacgcagcagagtaattctcagagcttctctacatcacatgaaggcttggaagaagataaagaccatccaacaacttctactctgacatcaagcaataggaatgatgtcacaggtggaagaagagacccaaatcattctgaaggctcaactactttactggaaggttatacctctcattacccacacacgaaggaaagcaggaccttcatcccagtgacctcagctaagactgggtcctttggagttactgcagttactgttggagattccaactctaatgtcaatcgttccttatcaggagaccaagacacattccaccccagtggggggtcccataccactcatggatctgaatcagatggacactcacatgggagtcaagaaggtggagcaaacacaacctctggtcctataaggacaccccaaattccagaatggctgatcatcttggcatccctcttggccttggctttgattcttgcagtttgcattgcagtcaacagtcgaagaaggtgtgggcagaagaaaaagctagtgatcaacagtggcaatggagctgtggaggacagaaagccaagtggactcaacggagaggccagcaagtctcaggaaatggtgcatttggtgaacaaggagtcgtcagaaactccagaccagtttatgacagctgatgagacaaggaacctgcagaatgtggacatgaagattggggtgtaacacctacaccattatcttggaaagaaacaaccgttggaaacataaccattacagggagctgggacacttaacagatgcaatgtgctactgattgtttcattgcgaatcttttttagcataaaattttctactyttttygttttttgtgttttgttctttaaagtcaggtccaatttgtaaaaacagcattgctttctgaaattagggcccaattaataatcagcaagaatttgatcgttccagttcccacttggaggcctttcatccctcgggtgtgctatggatggcttctaacaaaaactacacatatgtattcctgatcgccaacctttcccccaccagctaaggacatttcccagggttaatagggcctggtccctgggaggaaatttgaatgggtccattttgcccttccatagcctaatccctgggcattgytttccactgaggttgggggttggggtgtactagttacayatcttcaacagaccccctctagaaatttttcagatgcttctgggagacacccaaagggtgaagctatttatctgtagtaaactatttatctgtgtttttgaaatattaaaccctggatcagtcctttgatcagtataattttttaaagttactttgtcagaggcacaaaagggtttaaactgattcataataaatatctgtacttcttcgatcttcaccttttgtgctgtgattcttcagtttctaaaccagcactgtctgggtccctacaatgtatcaggaagagctgagaatggtaaggagactcttctaagtcttcatctcagagaccctgagttcccactcagacccactcagccaaatctcatggaagaccaaggagggcagcactgtttttgttttttgttttttacactgtccaaaggttttccatcctgtcctggaatcagagttggaagctgaggagcttcagcctcttttatggtttaatggccacctgttctctcctgtgaaaggctttgcaaagtcacattaagtttgcatgacctgttatccctggggccctatttcatagaggctggccctattagtgatttccaaaaacaatatggaagtgccttttgatgtcttacaataagagaagaagccaatggaaatgaaagagattggcaaaggggaaggatgatgccatgtagatcctgtttgacatttttatggctgtatttgtaaacttaaacacaccagtgtctgttcttgatgcagttgctatttaggatgagttaagtgcctggggagtccctcaaaaggttaaagggattcccatcattggaatcttatcaccagataggcaagtttatgaccaaacaagagagtactggctttatcctctaacctcatattttctcccacttggcaagtcctttgtggcatttattcatcagtcagggtgtccgattggtcctagaacttccaaaggctgcttgtcatagaagccattgcatctataaagcaacggctcctgttaaatggtatctcctttctgaggctcctactaaaagtcatttgttacctaaacttatgtgcttaacaggcaatgcttctcagaccacaaagcagaaagaagaagaaaagctcctgactaaatcagggctgggcttagacagagttgatctrtagaatatctttaaaggagagatgtcaactttctgcactattcccagcctctgctcctccctgtctaccctctcccctccctctctccctccacttcaccccacaatctttggtctggatttctttttattttcttttcaacttgaaagaaactggacattaggccactatgtgttgttactgccactagtgttcaagtgcctcttgttttcccagagatttcctgggtctgccagaggcccagacaggctcactcaagctctttaactgaaaagcaacaagccactccaggacaaggttcaaaatggttacaacagcctctacctgtcgccccagggagaaaggggtagtgatacaagtctcatagccagagatggttttccactccttctagatattcccaaaaagaggctgagacaggaggttattttcaattttattttggaattaaatacttttttccctttattactgttgtagtccctcacttggatatacctctgttttcacgatagaaataagggaggtctagagcttytattccttggccattgtcaacggagagctggccaagtcttcacaaacccttgcaacattgcctgaagtttatggaataagatgtattctcactcccttgatctcaagggcgtaactctggaagcacagcttgactacaygtcatttttaccaatgattttcaggtgacctgggctaagtcatttaaactgggtctttataaaagtaaaaggccaacatttaattattttgcaaagcaacctaagagctaaagatgtaatttttcttgcaattgtaaatcttttgtgtctcctgaagacttcccttaaaattagctctgagtgaaaaatcaaaagagacaaaagacatcttcgaatccatatttcaagcctggtagaattggcttttctagcagaacctttccaaaagttttatattgagattcataacaacaccaagaattgattttgtagccaacattcattcaatactgttatatcagaggagtaggagagaggaaacatttgacttatctggaaaagcaaaatgtacttaagaataagaataacatggtccattcacctttatgttatagatatgtctttgtgtaaatcatttgttttgagttttcaaagaatagcccattgttcattcttgtgctgtacaatgaccactgttattgttactttgacttttcagagcacacccttcctctggtttttgtatatttattgatggatcaataataatgaggaaagcatgatatgtatattgctgagttgaaagcacttattggaaaatattaaaaggctaacattaaaagactaaaggaaacagactcagaa

SEQ ID NO: 160 - DNA, 5468 bp, Homo sapiens
gagaagaaagccagtgcgtctctgggcgcaggggccagtggggctcggaggcacaggcaccccgcgacactccaggttccccgacccacgtccctggcagccccgattatttacagcctcagcagagcacggggcgggggcagaggggcccgcccgggagggctgctacttcttaaaacctctgckggctgcttagtcacagccccccttgcttgggtgtgtccttcgctcgctccctccctccgtcttaggtcactgttttcaacctcgaataaaaactgcagccaacttccgaggcagcctcattgcccagcggaccccagcctctgccaggttcggtccgccatcctcgtcccgtcctccgccggcccctgccccgcgcccagggatcctccagctcctttcgcccgcgccctccgttcrctccggacaccatggacaagttttggtggcacgcagcctggggactctgcctcgtgccgctgagcctggcgcagatcgatttgaatataacctgccgctttgcaggtgtattccacgtggagaaaaatggtcgctacagcatctctcsgacggaggccgctgacctctgcaaggctttcaatagcaccttgcccacaatggcccagatggagaaagctctgagcatcggatttgagacctgcaggtatgggttcatagaagggcaygtggtgattccccggatccaccccaactccatctgtgcagcaaacaacacaggggtgtacatcctcacatmcaacacctcccagtatgacacatattgcttcaatgcttcagctccacctgaagaagattgtacatcagtcacagacctgcccaatgcctttgatggaccaattaccataactattgttaaccgtgatggcacccgctatgtccagaaaggagaatacagaacgaatcctgaagacatctaccccagcaaccctactgatgatgacgtgagcagcggctcctccagtgaaaggagcagcacttcaggaggttacatcttttacaccttttctactgtacaccccatcccagacgaagacagtccctggatcaccgacagcacagacagaatccctgctaccactttgatgagcactagtgctacagcaactgagacagcaaccaagaggcaagaaacctgggattggttytcatggttgtttctaccatcagagtcaaagaatcatcttcacacaacaacacaaatggctgcaggctgggagccaaatgaagaaaatgaagatgaaagagacagacacctcagtttttctggatcaggcattgatgatgatgaagattttatctccagcaccatttcaaccacaccacgggcttttgaccacacaaaacagaaccaggactggacycagtggaacccaagccattcaaatccggaagtgctacttcagacaaccacaaggatgactgatgtagacagaaatggcaccactgcttatgaaggaaactggaacccagaagcacaccctcccctcattcaccatgagcatcatgargaagaagagaccccacattctacaagcacaacagcctcagctcatamcagccatccaatgcaaggaaggacaacaccaagcccagaggacagttcctggactgatttcttcaacccaatctcacaccccatgggacgaggtcatcaagcaggaagaaggatggatatggactccagtcatagtayaacgcttcagcctactgcaaatccaaacacaggtttggtggaasatttggacaggacaggacctctttcaatgacaacgcagcagagtaattctcagagcttctctacatcacatgaaggcttggaagaagataaagaccatccaacaacttctactctgacatcaagcaataggaatgatgtcacaggtggaagaagagacccaaatcattctgaaggctcaactactttactggaaggttatacctctcattacccacacacgaaggaaagcaggaccttcatcccagtgacctcagctaagactgggtcctttggagttactgcagttactgttggagattccaactctaatgtcaatcgttccttatcaggagaccaagacacattccaccccagtggggggtcccataccactcatggatctgaatcagatggacactcacatgggagtcaagaaggtggagcaaacacaacctctggtcctataaggacaccccaaattccagaatggctgatcatcttggcatccctcttggccttggctttgattcttgcagtttgcattgcagtcaacagtcgaagaaggtgtgggcagaagaaaaagctagtgatcaacagtggcaatggagctgtggaggacagaaagccaagtggactcaacggagaggccagcaagtctcaggaaatggtgcatttggtgaacaaggagtcgtcagaaactccagaccagtttatgacagctgatgagacaaggaacctgcagaatgtggacatgaagattggggtgtaacacctacaccattatcttggaaagaaacaaccgttggaaacataaccattacagggagctgggacacttaacagatgcaatgtgctactgattgtttcattgcgaatcttttttagcataaaattttctactyttttygttttttgtgttttgttctttaaagtcaggtccaatttgtaaaaacagcattgctttctgaaattagggcccaattaataatcagcaagaatttgatcgttccagttcccacttggaggcctttcatccctcgggtgtgctatggatggcttctaagacatttcccagggttaatagggcctggtccctgggaggaaatttgaatgggtccattttgcccttccatagcctaatccctgggcattgytttccactgaggttgggggttggggtgtactagttacayatcttcaacagaccccctctagaaatttttcagatgcttctgggagacacccaaagggtgaagctatttatctgtagtaaactatttatctgtgtttttgaaatattaaaccctggatcagtcctttgatcagtataattttttaaagttactttgtcagaggcacaaaagggtttaaactgattcataataaatatctgtacttcttcgatcttcaccttttgtgctgtgattcttcagtttctaaaccagcactgtctgggtccctacaatgtatcaggaagagctgagaatggtaaggagactcttctaagtcttcatctcagagaccctgagttcccactcagacccactcagccaaatctcatggaagaccaaggagggcagcactgtttttgttttttgttttttacactgtccaaaggttttccatcctgtcctggaatcagagttggaagctgaggagcttcagcctcttttatggtttaatggccacctgttctctcctgtgaaaggctttgcaaagtcacattaagtttgcatgacctgttatccctggggccctatttcatagaggctggccctattagtgatttccaaaaacaatatggaagtgccttttgatgtcttacaataagagaagaagccaatggaaatgaaagagattggcaaaggggaaggatgatgccatgtagatcctgtttgacatttttatggctgtatttgtaaacttaaacacaccagtgtctgttcttgatgcagttgctatttaggatgagttaagtgcctggggagtccctcaaaaggttaaagggattcccatcattggaatcttatcaccagataggcaagtttatgaccaaacaagagagtactggctttatcctctaacctcatattttctcccacttggcaagtcctttgtggcatttattcatcagtcagggtgtccgattggtcctagaacttccaaaggctgcttgtcatagaagccattgcatctataaagcaacggctcctgttaaatggtatctcctttctgaggctcctactaaaagtcatttgttacctaaacttatgtgcttaacaggcaatgcttctcagaccacaaagcagaaagaagaagaaaagctcctgactaaatcagggctgggcttagacagagttgatctrtagaatatctttaaaggagagatgtcaactttctgcactattcccagcctctgctcctccctgtctaccctctcccctccctctctccctccacttcaccccacaatctttggtctggatttctttttattttcttttcaacttgaaagaaactggacattaggccactatgtgttgttactgccactagtgttcaagtgcctcttgttttcccagagatttcctgggtctgccagaggcccagacaggctcactcaagctctttaactgaaaagcaacaagccactccaggacaaggttcaaaatggttacaacagcctctacctgtcgccccagggagaaaggggtagtgatacaagtctcatagccagagatggttttccactccttctagatattcccaaaaagaggctgagacaggaggttattttcaattttattttggaattaaatacttttttccctttattactgttgtagtccctcacttggatatacctctgttttcacgatagaaataagggaggtctagagcttytattccttggccattgtcaacggagagctggccaagtcttcacaaacccttgcaacattgcctgaagtttatggaataagatgtattctcactcccttgatctcaagggcgtaactctggaagcacagcttgactacaygtcatttttaccaatgattttcaggtgacctgggctaagtcatttaaactgggtctttataaaagtaaaaggccaacatttaattattttgcaaagcaacctaagagctaaagatgtaatttttcttgcaattgtaaatcttttgtgtctcctgaagacttcccttaaaattagctctgagtgaaaaatcaaaagagacaaaagacatcttcgaatccatatttcaagcctggtagaattggcttttctagcagaacctttccaaaagttttatattgagattcataacaacaccaagaattgattttgtagccaacattcattcaatactgttatatcagaggagtaggagagaggaaacatttgacttatctggaaaagcaaaatgtacttaagaataagaataacatggtccattcacctttatgttatagatatgtctttgtgtaaatcatttgttttgagttttcaaagaatagcccattgttcattcttgtgctgtacaatgaccactgttattgttactttgacttttcagagcacacccttcctctggtttttgtatatttattgatggatcaataataatgaggaaagcatgatatgtatattgctgagttgaaagcacttattggaaaatattaaaaggctaacattaaaagactaaaggaaacagactcagaa

SEQ ID NO: 161 - DNA, 5452 bp, Homo sapiens
gagaagaaagccagtgcgtctctgggcgcaggggccagtggggctcggaggcacaggcaccccgcgacactccaggttccccgacccacgtccctggcagccccgattatttacagcctcagcagagcacggggcgggggcagaggggcccgcccgggagggctgctacttcttaaaacctctgckggctgcttagtcacagccccccttgcttgggtgtgtccttcgctcgctccctccctccgtcttaggtcactgttttcaacctcgaataaaaactgcagccaacttccgaggcagcctcattgcccagcggaccccagcctctgccaggttcggtccgccatcctcgtcccgtcctccgccggcccctgccccgcgcccagggatcctccagctcctttcgcccgcgccctccgttcrctccggacaccatggacaagttttggtggcacgcagcctggggactctgcctcgtgccgctgagcctggcgcagatcgatttgaatataacctgccgctttgcaggtgtattccacgtggagaaaaatggtcgctacagcatctctcsgacggaggccgctgacctctgcaaggctttcaatagcaccttgcccacaatggcccagatggagaaagctctgagcatcggatttgagacctgcaggtatgggttcatagaagggcaygtggtgattccccggatccaccccaactccatctgtgcagcaaacaacacaggggtgtacatcctcacatmcaacacctcccagtatgacacatattgcttcaatgcttcagctccacctgaagaagattgtacatcagtcacagacctgcccaatgcctttgatggaccaattaccataactattgttaaccgtgatggcacccgctatgtccagaaaggagaatacagaacgaatcctgaagacatctaccccagcaaccctactgatgatgacgtgagcagcggctcctccagtgaaaggagcagcacttcaggagctttgatgagcactagtgctacagcaactgagacagcaaccaagaggcaagaaacctgggattggttytcatggttgtttctaccatcagagtcaaagaatcatcttcacacaacaacacaaatggctggtacgtcttcaaataccatctcagcaggctgggagccaaatgaagaaaatgaagatgaaagagacagacacctcagtttttctggatcaggcattgatgatgatgaagattttatctccagcaccatttcaaccacaccacgggcttttgaccacacaaaacagaaccaggactggacycagtggaacccaagccattcaaatccggaagtgctacttcagacaaccacaaggatgactgatgtagacagaaatggcaccactgcttatgaaggaaactggaacccagaagcacaccctcccctcattcaccatgagcatcatgargaagaagagaccccacattctacaagcacaacagcctcagctcatamcagccatccaatgcaaggaaggacaacaccaagcccagaggacagttcctggactgatttcttcaacccaatctcacaccccatgggacgaggtcatcaagcaggaagaaggatggatatggactccagtcatagtayaacgcttcagcctactgcaaatccaaacacaggtttggtggaasatttggacaggacaggacctctttcaatgacaacgcagcagagtaattctcagagcttctctacatcacatgaaggcttggaagaagataaagaccatccaacaacttctactctgacatcaagcaataggaatgatgtcacaggtggaagaagagacccaaatcattctgaaggctcaactactttactggaaggttatacctctcattacccacacacgaaggaaagcaggaccttcatcccagtgacctcagctaagactgggtcctttggagttactgcagttactgttggagattccaactctaatgtcaatcgttccttatcaggagaccaagacacattccaccccagtggggggtcccataccactcatggatctgaatcagatggacactcacatgggagtcaagaaggtggagcaaacacaacctctggtcctataaggacaccccaaattccagaatggctgatcatcttggcatccctcttggccttggctttgattcttgcagtttgcattgcagtcaacagtcgaagaaggtgtgggcagaagaaaaagctagtgatcaacagtggcaatggagctgtggaggacagaaagccaagtggactcaacggagaggccagcaagtctcaggaaatggtgcatttggtgaacaaggagtcgtcagaaactccagaccagtttatgacagctgatgagacaaggaacctgcagaatgtggacatgaagattggggtgtaacacctacaccattatcttggaaagaaacaaccgttggaaacataaccattacagggagctgggacacttaacagatgcaatgtgctactgattgtttcattgcgaatcttttttagcataaaattttctactyttttygttttttgtgttttgttctttaaagtcaggtccaatttgtaaaaacagcattgctttctgaaattagggcccaattaataatcagcaagaatttgatcgttccagttcccacttggaggcctttcatccctcgggtgtgctatggatggcttctaacaaaaactacacatatgtattcctgatcgccaacctttcccccaccagctaaggacatttcccagggttaatagggcctggtccctgggaggaaatttgaatgggtccattttgcccttccatagcctaatccctgggcattgytttccactgaggttgggggttggggtgtactagttacayatcttcaacagaccccctctagaaatttttcagatgcttctgggagacacccaaagggtgaagctatttatctgtagtaaactatttatctgtgtttttgaaatattaaaccctggatcagtcctttgatcagtataattttttaaagttactttgtcagaggcacaaaagggtttaaactgattcataataaatatctgtacttcttcgatcttcaccttttgtgctgtgattcttcagtttctaaaccagcactgtctgggtccctacaatgtatcaggaagagctgagaatggtaaggagactcttctaagtcttcatctcagagaccctgagttcccactcagacccactcagccaaatctcatggaagaccaaggagggcagcactgtttttgttttttgttttttacactgtccaaaggttttccatcctgtcctggaatcagagttggaagctgaggagcttcagcctcttttatggtttaatggccacctgttctctcctgtgaaaggctttgcaaagtcacattaagtttgcatgacctgttatccctggggccctatttcatagaggctggccctattagtgatttccaaaaacaatatggaagtgccttttgatgtcttacaataagagaagaagccaatggaaatgaaagagattggcaaaggggaaggatgatgccatgtagatcctgtttgacatttttatggctgtatttgtaaacttaaacacaccagtgtctgttcttgatgcagttgctatttaggatgagttaagtgcctggggagtccctcaaaaggttaaagggattcccatcattggaatcttatcaccagataggcaagtttatgaccaaacaagagagtactggctttatcctctaacctcatattttctcccacttggcaagtcctttgtggcatttattcatcagtcagggtgtccgattggtcctagaacttccaaaggctgcttgtcatagaagccattgcatctataaagcaacggctcctgttaaatggtatctcctttctgaggctcctactaaaagtcatttgttacctaaacttatgtgcttaacaggcaatgcttctcagaccacaaagcagaaagaagaagaaaagctcctgactaaatcagggctgggcttagacagagttgatctrtagaatatctttaaaggagagatgtcaactttctgcactattcccagcctctgctcctccctgtctaccctctcccctccctctctccctccacttcaccccacaatctttggtctggatttctttttattttcttttcaacttgaaagaaactggacattaggccactatgtgttgttactgccactagtgttcaagtgcctcttgttttcccagagatttcctgggtctgccagaggcccagacaggctcactcaagctctttaactgaaaagcaacaagccactccaggacaaggttcaaaatggttacaacagcctctacctgtcgccccagggagaaaggggtagtgatacaagtctcatagccagagatggttttccactccttctagatattcccaaaaagaggctgagacaggaggttattttcaattttattttggaattaaatacttttttccctttattactgttgtagtccctcacttggatatacctctgttttcacgatagaaataagggaggtctagagcttytattccttggccattgtcaacggagagctggccaagtcttcacaaacccttgcaacattgcctgaagtttatggaataagatgtattctcactcccttgatctcaagggcgtaactctggaagcacagcttgactacaygtcatttttaccaatgattttcaggtgacctgggctaagtcatttaaactgggtctttataaaagtaaaaggccaacatttaattattttgcaaagcaacctaagagctaaagatgtaatttttcttgcaattgtaaatcttttgtgtctcctgaagacttcccttaaaattagctctgagtgaaaaatcaaaagagacaaaagacatcttcgaatccatatttcaagcctggtagaattggcttttctagcagaacctttccaaaagttttatattgagattcataacaacaccaagaattgattttgtagccaacattcattcaatactgttatatcagaggagtaggagagaggaaacatttgacttatctggaaaagcaaaatgtacttaagaataagaataacatggtccattcacctttatgttatagatatgtctttgtgtaaatcatttgttttgagttttcaaagaatagcccattgttcattcttgtgctgtacaatgaccactgttattgttactttgacttttcagagcacacccttcctctggtttttgtatatttattgatggatcaataataatgaggaaagcatgatatgtatattgctgagttgaaagcacttattggaaaatattaaaaggctaacattaaaagactaaaggaaacagactcagaa

SEQ ID NO: 162 - DNA, 3858 bp, Homo sapiens
gagaagaaagccagtgcgtctctgggcgcaggggccagtggggctcggaggcacaggcaccccgcgacactccaggttccccgacccacgtccctggcagccccgattatttacagcctcagcagagcacggggcgggggcagaggggcccgcccgggagggctgctacttcttaaaacctctgckggctgcttagtcacagccccccttgcttgggtgtgtccttcgctcgctccctccctccgtcttaggtcactgttttcaacctcgaataaaaactgcagccaacttccgaggcagcctcattgcccagcggaccccagcctctgccaggttcggtccgccatcctcgtcccgtcctccgccggcccctgccccgcgcccagggatcctccagctcctttcgcccgcgccctccgttcrctccggacaccatggacaagttttggtggcacgcagcctggggactctgcctcgtgccgctgagcctggcgcagatcgatttgaatataacctgccgctttgcaggtgtattccacgtggagaaaaatggtcgctacagcatctctcsgacggaggccgctgacctctgcaaggctttcaatagcaccttgcccacaatggcccagatggagaaagctctgagcatcggatttgagacctgcagtttgcattgcagtcaacagtcgaagaaggtgtgggcagaagaaaaagctagtgatcaacagtggcaatggagctgtggaggacagaaagccaagtggactcaacggagaggccagcaagtctcaggaaatggtgcatttggtgaacaaggagtcgtcagaaactccagaccagtttatgacagctgatgagacaaggaacctgcagaatgtggacatgaagattggggtgtaacacctacaccattatcttggaaagaaacaaccgttggaaacataaccattacagggagctgggacacttaacagatgcaatgtgctactgattgtttcattgcgaatcttttttagcataaaattttctactyttttygttttttgtgttttgttctttaaagtcaggtccaatttgtaaaaacagcattgctttctgaaattagggcccaattaataatcagcaagaatttgatcgttccagttcccacttggaggcctttcatccctcgggtgtgctatggatggcttctaagacatttcccagggttaatagggcctggtccctgggaggaaatttgaatgggtccattttgcccttccatagcctaatccctgggcattgytttccactgaggttgggggttggggtgtactagttacayatcttcaacagaccccctctagaaatttttcagatgcttctgggagacacccaaagggtgaagctatttatctgtagtaaactatttatctgtgtttttgaaatattaaaccctggatcagtcctttgatcagtataattttttaaagttactttgtcagaggcacaaaagggtttaaactgattcataataaatatctgtacttcttcgatcttcaccttttgtgctgtgattcttcagtttctaaaccagcactgtctgggtccctacaatgtatcaggaagagctgagaatggtaaggagactcttctaagtcttcatctcagagaccctgagttcccactcagacccactcagccaaatctcatggaagaccaaggagggcagcactgtttttgttttttgttttttacactgtccaaaggttttccatcctgtcctggaatcagagttggaagctgaggagcttcagcctcttttatggtttaatggccacctgttctctcctgtgaaaggctttgcaaagtcacattaagtttgcatgacctgttatccctggggccctatttcatagaggctggccctattagtgatttccaaaaacaatatggaagtgccttttgatgtcttacaataagagaagaagccaatggaaatgaaagagattggcaaaggggaaggatgatgccatgtagatcctgtttgacatttttatggctgtatttgtaaacttaaacacaccagtgtctgttcttgatgcagttgctatttaggatgagttaagtgcctggggagtccctcaaaaggttaaagggattcccatcattggaatcttatcaccagataggcaagtttatgaccaaacaagagagtactggctttatcctctaacctcatattttctcccacttggcaagtcctttgtggcatttattcatcagtcagggtgtccgattggtcctagaacttccaaaggctgcttgtcatagaagccattgcatctataaagcaacggctcctgttaaatggtatctcctttctgaggctcctactaaaagtcatttgttacctaaacttatgtgcttaacaggcaatgcttctcagaccacaaagcagaaagaagaagaaaagctcctgactaaatcagggctgggcttagacagagttgatctrtagaatatctttaaaggagagatgtcaactttctgcactattcccagcctctgctcctccctgtctaccctctcccctccctctctccctccacttcaccccacaatctttggtctggatttctttttattttcttttcaacttgaaagaaactggacattaggccactatgtgttgttactgccactagtgttcaagtgcctcttgttttcccagagatttcctgggtctgccagaggcccagacaggctcactcaagctctttaactgaaaagcaacaagccactccaggacaaggttcaaaatggttacaacagcctctacctgtcgccccagggagaaaggggtagtgatacaagtctcatagccagagatggttttccactccttctagatattcccaaaaagaggctgagacaggaggttattttcaattttattttggaattaaatacttttttccctttattactgttgtagtccctcacttggatatacctctgttttcacgatagaaataagggaggtctagagcttytattccttggccattgtcaacggagagctggccaagtcttcacaaacccttgcaacattgcctgaagtttatggaataagatgtattctcactcccttgatctcaagggcgtaactctggaagcacagcttgactacaygtcatttttaccaatgattttcaggtgacctgggctaagtcatttaaactgggtctttataaaagtaaaaggccaacatttaattattttgcaaagcaacctaagagctaaagatgtaatttttcttgcaattgtaaatcttttgtgtctcctgaagacttcccttaaaattagctctgagtgaaaaatcaaaagagacaaaagacatcttcgaatccatatttcaagcctggtagaattggcttttctagcagaacctttccaaaagttttatattgagattcataacaacaccaagaattgattttgtagccaacattcattcaatactgttatatcagaggagtaggagagaggaaacatttgacttatctggaaaagcaaaatgtacttaagaataagaataacatggtccattcacctttatgttatagatatgtctttgtgtaaatcatttgttttgagttttcaaagaatagcccattgttcattcttgtgctgtacaatgaccactgttattgttactttgacttttcagagcacacccttcctctggtttttgtatatttattgatggatcaataataatgaggaaagcatgatatgtatattgctgagttgaaagcacttattggaaaatattaaaaggctaacattaaaagactaaaggaaacagactcagaa

SEQ ID NO: 163 - DNA, 5674 bp, Homo sapiens
gagaagaaagccagtgcgtctctgggcgcaggggccagtggggctcggaggcacaggcaccccgcgacactccaggttccccgacccacgtccctggcagccccgattatttacagcctcagcagagcacggggcgggggcagaggggcccgcccgggagggctgctacttcttaaaacctctgckggctgcttagtcacagccccccttgcttgggtgtgtccttcgctcgctccctccctccgtcttaggtcactgttttcaacctcgaataaaaactgcagccaacttccgaggcagcctcattgcccagcggaccccagcctctgccaggttcggtccgccatcctcgtcccgtcctccgccggcccctgccccgcgcccagggatcctccagctcctttcgcccgcgccctccgttcrctccggacaccatggacaagttttggtggcacgcagcctggggactctgcctcgtgccgctgagcctggcgcagatcgatttgaatataacctgccgctttgcaggtgtattccacgtggagaaaaatggtcgctacagcatctctcsgacggaggccgctgacctctgcaaggctttcaatagcaccttgcccacaatggcccagatggagaaagctctgagcatcggatttgagacctgcaggtatgggttcatagaagggcaygtggtgattccccggatccaccccaactccatctgtgcagcaaacaacacaggggtgtacatcctcacatmcaacacctcccagtatgacacatattgcttcaatgcttcagctccacctgaagaagattgtacatcagtcacagacctgcccaatgcctttgatggaccaattaccataactattgttaaccgtgatggcacccgctatgtccagaaaggagaatacagaacgaatcctgaagacatctaccccagcaaccctactgatgatgacgtgagcagcggctcctccagtgaaaggagcagcacttcaggaggttacatcttttacaccttttctactgtacaccccatcccagacgaagacagtccctggatcaccgacagcacagacagaatccctgctaccactttgatgagcactagtgctacagcaactgagacagcaaccaagaggcaagaaacctgggattggttytcatggttgtttctaccatcagagtcaaagaatcatcttcacacaacaacacaaatggctggtacgtcttcaaataccatctcagcaggctgggagccaaatgaagaaaatgaagatgaaagagacagacacctcagtttttctggatcaggcattgatgatgatgaagattttatctccagcaccatttcaaccacaccacgggcttttgaccacacaaaacagaaccaggactggacycagtggaacccaagccattcaaatccggaagtgctacttcagacaaccacaaggatgactgatgtagacagaaatggcaccactgcttatgaaggaaactggaacccagaagcacaccctcccctcattcaccatgagcatcatgargaagaagagaccccacattctacaagcacaatccaggcaactcctagtagtacaayggaagaaacagctacccagaaggaacagtggtttggcaacagatggcatgagggatatcgccaaacmcccaragaagactcccattcgacaacagggacagctgcagcctcagctcatamcagccatccaatgcaaggaaggacaacaccaagcccagaggacagttcctggactgatttcttcaacccaatctcacaccccatgggacgaggtcatcaagcaggaagaaggatggatatggactccagtcatagtayaacgcttcagcctactgcaaatccaaacacaggtttggtggaasatttggacaggacaggacctctttcaatgacaacgcagcagagtaattctcagagcttctctacatcacatgaaggcttggaagaagataaagaccatccaacaacttctactctgacatcaagcaataggaatgatgtcacaggtggaagaagagacccaaatcattctgaaggctcaactactttactggaaggttatacctctcattacccacacacgaaggaaagcaggaccttcatcccagtgacctcagctaagactgggtcctttggagttactgcagttactgttggagattccaactctaatgtcaatcgttccttatcaggagaccaagacacattccaccccagtggggggtcccataccactcatggatctgaatcagatggacactcacatgggagtcaagaaggtggagcaaacacaacctctggtcctataaggacaccccaaattccagaatggctgatcatcttggcatccctcttggccttggctttgattcttgcagtttgcattgcagtcaacagtcgaagaaggtgtgggcagaagaaaaagctagtgatcaacagtggcaatggagctgtggaggacagaaagccaagtggactcaacggagaggccagcaagtctcaggaaatggtgcatttggtgaacaaggagtcgtcagaaactccagaccagtttatgacagctgatgagacaaggaacctgcagaatgtggacatgaagattggggtgtaacacctacaccattatcttggaaagaaacaaccgttggaaacataaccattacagggagctgggacacttaacagatgcaatgtgctactgattgtttcattgcgaatcttttttagcataaaattttctactyttttygttttttgtgttttgttctttaaagtcaggtccaatttgtaaaaacagcattgctttctgaaattagggcccaattaataatcagcaagaatttgatcgttccagttcccacttggaggcctttcatccctcgggtgtgctatggatggcttctaacaaaaactacacatatgtattcctgatcgccaacctttcccccaccagctaaggacatttcccagggttaatagggcctggtccctgggaggaaatttgaatgggtccattttgcccttccatagcctaatccctgggcattgytttccactgaggttgggggttggggtgtactagttacayatcttcaacagaccccctctagaaatttttcagatgcttctgggagacacccaaagggtgaagctatttatctgtagtaaactatttatctgtgtttttgaaatattaaaccctggatcagtcctttgatcagtataattttttaaagttactttgtcagaggcacaaaagggtttaaactgattcataataaatatctgtacttcttcgatcttcaccttttgtgctgtgattcttcagtttctaaaccagcactgtctgggtccctacaatgtatcaggaagagctgagaatggtaaggagactcttctaagtcttcatctcagagaccctgagttcccactcagacccactcagccaaatctcatggaagaccaaggagggcagcactgtttttgttttttgttttttacactgtccaaaggttttccatcctgtcctggaatcagagttggaagctgaggagcttcagcctcttttatggtttaatggccacctgttctctcctgtgaaaggctttgcaaagtcacattaagtttgcatgacctgttatccctggggccctatttcatagaggctggccctattagtgatttccaaaaacaatatggaagtgccttttgatgtcttacaataagagaagaagccaatggaaatgaaagagattggcaaaggggaaggatgatgccatgtagatcctgtttgacatttttatggctgtatttgtaaacttaaacacaccagtgtctgttcttgatgcagttgctatttaggatgagttaagtgcctggggagtccctcaaaaggttaaagggattcccatcattggaatcttatcaccagataggcaagtttatgaccaaacaagagagtactggctttatcctctaacctcatattttctcccacttggcaagtcctttgtggcatttattcatcagtcagggtgtccgattggtcctagaacttccaaaggctgcttgtcatagaagccattgcatctataaagcaacggctcctgttaaatggtatctcctttctgaggctcctactaaaagtcatttgttacctaaacttatgtgcttaacaggcaatgcttctcagaccacaaagcagaaagaagaagaaaagctcctgactaaatcagggctgggcttagacagagttgatctrtagaatatctttaaaggagagatgtcaactttctgcactattcccagcctctgctcctccctgtctaccctctcccctccctctctccctccacttcaccccacaatctttggtctggatttctttttattttcttttcaacttgaaagaaactggacattaggccactatgtgttgttactgccactagtgttcaagtgcctcttgttttcccagagatttcctgggtctgccagaggcccagacaggctcactcaagctctttaactgaaaagcaacaagccactccaggacaaggttcaaaatggttacaacagcctctacctgtcgccccagggagaaaggggtagtgatacaagtctcatagccagagatggttttccactccttctagatattcccaaaaagaggctgagacaggaggttattttcaattttattttggaattaaatacttttttccctttattactgttgtagtccctcacttggatatacctctgttttcacgatagaaataagggaggtctagagcttytattccttggccattgtcaacggagagctggccaagtcttcacaaacccttgcaacattgcctgaagtttatggaataagatgtattctcactcccttgatctcaagggcgtaactctggaagcacagcttgactacaygtcatttttaccaatgattttcaggtgacctgggctaagtcatttaaactgggtctttataaaagtaaaaggccaacatttaattattttgcaaagcaacctaagagctaaagatgtaatttttcttgcaattgtaaatcttttgtgtctcctgaagacttcccttaaaattagctctgagtgaaaaatcaaaagagacaaaagacatcttcgaatccatatttcaagcctggtagaattggcttttctagcagaacctttccaaaagttttatattgagattcataacaacaccaagaattgattttgtagccaacattcattcaatactgttatatcagaggagtaggagagaggaaacatttgacttatctggaaaagcaaaatgtacttaagaataagaataacatggtccattcacctttatgttatagatatgtctttgtgtaaatcatttgttttgagttttcaaagaatagcccattgttcattcttgtgctgtacaatgaccactgttattgttactttgacttttcagagcacacccttcctctggtttttgtatatttattgatggatcaataataatgaggaaagcatgatatgtatattgctgagttgaaagcacttattggaaaatattaaaaggctaacattaaaagactaaaggaaacagactcagaa

SEQ ID NO: 164 - DNA, 5739 bp, Homo sapiens
gagaagaaagccagtgcgtctctgggcgcaggggccagtggggctcggaggcacaggcaccccgcgacactccaggttccccgacccacgtccctggcagccccgattatttacagcctcagcagagcacggggcgggggcagaggggcccgcccgggagggctgctacttcttaaaacctctgckggctgcttagtcacagccccccttgcttgggtgtgtccttcgctcgctccctccctccgtcttaggtcactgttttcaacctcgaataaaaactgcagccaacttccgaggcagcctcattgcccagcggaccccagcctctgccaggttcggtccgccatcctcgtcccgtcctccgccggcccctgccccgcgcccagggatcctccagctcctttcgcccgcgccctccgttcrctccggacaccatggacaagttttggtggcacgcagcctggggactctgcctcgtgccgctgagcctggcgcagatcgatttgaatataacctgccgctttgcaggtgtattccacgtggagaaaaatggtcgctacagcatctctcsgacggaggccgctgacctctgcaaggctttcaatagcaccttgcccacaatggcccagatggagaaagctctgagcatcggatttgagacctgcaggtatgggttcatagaagggcaygtggtgattccccggatccaccccaactccatctgtgcagcaaacaacacaggggtgtacatcctcacatmcaacacctcccagtatgacacatattgcttcaatgcttcagctccacctgaagaagattgtacatcagtcacagacctgcccaatgcctttgatggaccaattaccataactattgttaaccgtgatggcacccgctatgtccagaaaggagaatacagaacgaatcctgaagacatctaccccagcaaccctactgatgatgacgtgagcagcggctcctccagtgaaaggagcagcacttcaggaggttacatcttttacaccttttctactgtacaccccatcccagacgaagacagtccctggatcaccgacagcacagacagaatccctgctaccactttgatgagcactagtgctacagcaactgagacagcaaccaagaggcaagaaacctgggattggttytcatggttgtttctaccatcagagtcaaagaatcatcttcacacaacaacacaaatggctggtacgtcttcaaataccatctcagcaggctgggagccaaatgaagaaaatgaagatgaaagagacagacacctcagtttttctggatcaggcattgatgatgatgaagattttatctccagcaccatttcaaccacaccacgggcttttgaccacacaaaacagaaccaggactggacycagtggaacccaagccattcaaatccggaagtgctacttcagacaaccacaaggatgactgatgtagacagaaatggcaccactgcttatgaaggaaactggaacccagaagcacaccctcccctcattcaccatgagcatcatgargaagaagagaccccacattctacaagcacaatccaggcaactcctagtagtacaayggaagaaacagctacccagaaggaacagtggtttggcaacagatggcatgagggatatcgccaaacmcccaragaagactcccattcgacaacagggacagctgcagcctcagctcatamcagccatccaatgcaaggaaggacaacaccaagcccagaggacagttcctggactgatttcttcaacccaatctcacaccccatgggacgaggtcatcaagcaggaagaaggatggatatggactccagtcatagtayaacgcttcagcctactgcaaatccaaacacaggtttggtggaasatttggacaggacaggacctctttcaatgacaacgcagcagagtaattctcagagcttctctacatcacatgaaggcttggaagaagataaagaccatccaacaacttctactctgacatcaagcaataggaatgatgtcacaggtggaagaagagacccaaatcattctgaaggctcaactactttactggaaggttatacctctcattacccacacacgaaggaaagcaggaccttcatcccagtgacctcagctaagactgggtcctttggagttactgcagttactgttggagattccaactctaatgtcaatcgttccttatcaggagaccaagacacattccaccccagtggggggtcccataccactcatggatctgaatcagatggacactcacatgggagtcaagaaggtggagcaaacacaacctctggtcctataaggacaccccaaattccagaatggctgatcatcttggcatccctcttggccttggctttgattcttgcagtttgcattgcagtcaacagtcgaagaaggtgtgggcagaagaaaaagctagtgatcaacagtggcaatggagctgtggaggacagaaagccaagtggactcaacggagaggccagcaagtctcaggaaatggtgcatttggtgaacaaggagtcgtcagaaactccagaccagtttatgacagctgatgagacaaggaacctgcagaatgtggacatgaagattggggtgtaacacctacaccattatcttggaaagaaacaaccgttggaaacataaccattacagggagctgggacacttaacagatgcaatgtgctactgattgtttcattgcgaatcttttttagcataaaattttctactyttttygttttttgtgttttgttctttaaagtcaggtccaatttgtaaaaacagcattgctttctgaaattagggcccaattaataatcagcaagaatttgatcgttccagttcccacttggaggcctttcatccctcgggtgtgctatggatggcttctaacaaaaactacacatatgtattcctgatcgccaacctttcccccaccagctaaggacatttcccagggttaatagggcctggtccctgggaggaaatttgaatgggtccattttgcccttccatagcctaatccctgggcattgytttccactgaggttgggggttggggtgtactagttacayatcttcaacagaccccctctagaaatttttcagatgcttctgggagacacccaaagggtgaagctatttatctgtagtaaactatttatctgtgtttttgaaatattaaaccctggatcagtcctttgatcagtataattttttaaagttactttgtcagaggcacaaaagggtttaaactgattcataataaatatctgtacttcttcgatcttcaccttttgtgctgtgattcttcagtttctaaaccagcactgtctgggtccctacaatgtatcaggaagagctgagaatggtaaggagactcttctaagtcttcatctcagagaccctgagttcccactcagacccactcagccaaatctcatggaagaccaaggagggcagcactgtttttgttttttgttttttgttttttttttttgacactgtccaaaggttttccatcctgtcctggaatcagagttggaagctgaggagcttcagcctcttttatggtttaatggccacctgttctctcctgtgaaaggctttgcaaagtcacattaagtttgcatgacctgttatccctggggccctatttcatagaggctggccctattagtgatttccaaaaacaatatggaagtgccttttgatgtcttacaataagagaagaagccaatggaaatgaaagagattggcaaaggggaaggatgatgccatgtagatcctgtttgacatttttatggctgtatttgtaaacttaaacacaccagtgtctgttcttgatgcagttgctatttaggatgagttaagtgcctggggagtccctcaaaaggttaaagggattcccatcattggaatcttatcaccagataggcaagtttatgaccaaacaagagagtactggctttatcctctaacctcatattttctcccacttggcaagtcctttgtggcatttattcatcagtcagggtgtccgattggtcctagaacttccaaaggctgcttgtcatagaagccattgcatctataaagcaacggctcctgttaaatggtatctcctttctgaggctcctactaaaagtcatttgttacctaaacttatgtgcttaacaggcaatgcttctcagaccacaaagcagaaagaagaagaaaagctcctgactaaatcagggctgggcttagacagagttgatctrtagaatatctttaaaggagagatgtcaactttctgcactattcccagcctctgctcctccctgtctaccctctcccctccctctctccctccacttcaccccacaatcttgaaaaacttcctttctcttctgtgaacatcattggccagatccattttcagtggtctggatttctttttattttcttttcaacttgaaagaaactggacattaggccactatgtgttgttactgccactagtgttcaagtgcctcttgttttcccagagatttcctgggtctgccagaggcccagacaggctcactcaagctctttaactgaaaagcaacaagccactccaggacaaggttcaaaatggttacaacagcctctacctgtcgccccagggagaaaggggtagtgatacaagtctcatagccagagatggttttccactccttctagatattcccaaaaagaggctgagacaggaggttattttcaattttattttggaattaaatacttttttccctttattactgttgtagtccctcacttggatatacctctgttttcacgatagaaataagggaggtctagagcttytattccttggccattgtcaacggagagctggccaagtcttcacaaacccttgcaacattgcctgaagtttatggaataagatgtattctcactcccttgatctcaagggcgtaactctggaagcacagcttgactacaygtcatttttaccaatgattttcaggtgacctgggctaagtcatttaaactgggtctttataaaagtaaaaggccaacatttaattattttgcaaagcaacctaagagctaaagatgtaatttttcttgcaattgtaaatcttttgtgtctcctgaagacttcccttaaaattagctctgagtgaaaaatcaaaagagacaaaagacatcttcgaatccatatttcaagcctggtagaattggcttttctagcagaacctttccaaaagttttatattgagattcataacaacaccaagaattgattttgtagccaacattcattcaatactgttatatcagaggagtaggagagaggaaacatttgacttatctggaaaagcaaaatgtacttaagaataagaataacatggtccattcacctttatgttatagatatgtctttgtgtaaatcatttgttttgagttttcaaagaatagcccattgttcattcttgtgctgtacaatgaccactgttattgttactttgacttttcagagcacacccttcctctggtttttgtatatttattgatggatcaataataatgaggaaagcatgatatgtatattgctgagttgaaagcacttattggaaaatattaaaaggctaacattaaaagactaaaggaaacagactcagaa

SEQ ID NO: 165 - DNA, 4335 bp, Homo sapiens
gagaagaaagccagtgcgtctctgggcgcaggggccagtggggctcggaggcacaggcaccccgcgacactccaggttccccgacccacgtccctggcagccccgattatttacagcctcagcagagcacggggcgggggcagaggggcccgcccgggagggctgctacttcttaaaacctctgckggctgcttagtcacagccccccttgcttgggtgtgtccttcgctcgctccctccctccgtcttaggtcactgttttcaacctcgaataaaaactgcagccaacttccgaggcagcctcattgcccagcggaccccagcctctgccaggttcggtccgccatcctcgtcccgtcctccgccggcccctgccccgcgcccagggatcctccagctcctttcgcccgcgccctccgttcrctccggacaccatggacaagttttggtggcacgcagcctggggactctgcctcgtgccgctgagcctggcgcagatcgatttgaatataacctgccgctttgcaggtgtattccacgtggagaaaaatggtcgctacagcatctctcsgacggaggccgctgacctctgcaaggctttcaatagcaccttgcccacaatggcccagatggagaaagctctgagcatcggatttgagacctgcaggtatgggttcatagaagggcaygtggtgattccccggatccaccccaactccatctgtgcagcaaacaacacaggggtgtacatcctcacatmcaacacctcccagtatgacacatattgcttcaatgcttcagctccacctgaagaagattgtacatcagtcacagacctgcccaatgcctttgatggaccaattaccataactattgttaaccgtgatggcacccgctatgtccagaaaggagaatacagaacgaatcctgaagacatctaccccagcaaccctactgatgatgacgtgagcagcggctcctccagtgaaaggagcagcacttcaggaggttacatcttttacaccttttctactgtacaccccatcccagacgaagacagtccctggatcaccgacagcacagacagaatccctgctaccagagaccaagacacattccaccccagtggggggtcccataccactcatggatctgaatcagatggacactcacatgggagtcaagaaggtggagcaaacacaacctctggtcctataaggacaccccaaattccagaatggctgatcatcttggcatccctcttggccttggctttgattcttgcagtttgcattgcagtcaacagtcgaagaaggtgtgggcagaagaaaaagctagtgatcaacagtggcaatggagctgtggaggacagaaagccaagtggactcaacggagaggccagcaagtctcaggaaatggtgcatttggtgaacaaggagtcgtcagaaactccagaccagtttatgacagctgatgagacaaggaacctgcagaatgtggacatgaagattggggtgtaacacctacaccattatcttggaaagaaacaaccgttggaaacataaccattacagggagctgggacacttaacagatgcaatgtgctactgattgtttcattgcgaatcttttttagcataaaattttctactytttcccccaccagctaaggacatttcccagggttaatagggcctggtccctgggaggaaatttgaatgggtccattttgcccttccatagcctaatccctgggcattgytttccactgaggttgggggttggggtgtactagttacayatcttcaacagaccccctctagaaatttttcagatgcttctgggagacacccaaagggtgaagctatttatctgtagtaaactatttatctgtgtttttgaaatattaaaccctggatcagtcctttgatcagtataattttttaaagttactttgtcagaggcacaaaagggtttaaactgattcataataaatatctgtacttcttcgatcttcaccttttgtgctgtgattcttcagtttctaaaccagcactgtctgggtccctacaatgtatcaggaagagctgagaatggtaaggagactcttctaagtcttcatctcagagaccctgagttcccactcagacccactcagccaaatctcatggaagaccaaggagggcagcactgtttttgttttttgttttttacactgtccaaaggttttccatcctgtcctggaatcagagttggaagctgaggagcttcagcctcttttatggtttaatggccacctgttctctcctgtgaaaggctttgcaaagtcacattaagtttgcatgacctgttatccctggggccctatttcatagaggctggccctattagtgatttccaaaaacaatatggaagtgccttttgatgtcttacaataagagaagaagccaatggaaatgaaagagattggcaaaggggaaggatgatgccatgtagatcctgtttgacatttttatggctgtatttgtaaacttaaacacaccagtgtctgttcttgatgcagttgctatttaggatgagttaagtgcctggggagtccctcaaaaggttaaagggattcccatcattggaatcttatcaccagataggcaagtttatgaccaaacaagagagtactggctttatcctctaacctcatattttctcccacttggcaagtcctttgtggcatttattcatcagtcagggtgtccgattggtcctagaacttccaaaggctgcttgtcatagaagccattgcatctataaagcaacggctcctgttaaatggtatctcctttctgaggctcctactaaaagtcatttgttacctaaacttatgtgcttaacaggcaatgcttctcagaccacaaagcagaaagaagaagaaaagctcctgactaaatcagggctgggcttagacagagttgatctrtagaatatctttaaaggagagatgtcaactttctgcactattcccagcctctgctcctccctgtctaccctctcccctccctctctccctccacttcaccccacaatctttggtctggatttctttttattttcttttcaacttgaaagaaactggacattaggccactatgtgttgttactgccactagtgttcaagtgcctcttgttttcccagagatttcctgggtctgccagaggcccagacaggctcactcaagctctttaactgaaaagcaacaagccactccaggacaaggttcaaaatggttacaacagcctctacctgtcgccccagggagaaaggggtagtgatacaagtctcatagccagagatggttttccactccttctagatattcccaaaaagaggctgagacaggaggttattttcaattttattttggaattaaatacttttttccctttattactgttgtagtccctcacttggatatacctctgttttcacgatagaaataagggaggtctagagcttytattccttggccattgtcaacggagagctggccaagtcttcacaaacccttgcaacattgcctgaagtttatggaataagatgtattctcactcccttgatctcaagggcgtaactctggaagcacagcttgactacaygtcatttttaccaatgattttcaggtgacctgggctaagtcatttaaactgggtctttataaaagtaaaaggccaacatttaattattttgcaaagcaacctaagagctaaagatgtaatttttcttgcaattgtaaatcttttgtgtctcctgaagacttcccttaaaattagctctgagtgaaaaatcaaaagagacaaaagacatcttcgaatccatatttcaagcctggtagaattggcttttctagcagaacctttccaaaagttttatattgagattcataacaacaccaagaattgattttgtagccaacattcattcaatactgttatatcagaggagtaggagagaggaaacatttgacttatctggaaaagcaaaatgtacttaagaataagaataacatggtccattcacctttatgttatagatatgtctttgtgtaaatcatttgttttgagttttcaaagaatagcccattgttcattcttgtgctgtacaatgaccactgttattgttactttgacttttcagagcacacccttcctctggtttttgtatatttattgatggatcaataataatgaggaaagcatgatatgtatattgctgagttgaaagcacttattggaaaatattaaaaggctaacattaaaagactaaaggaaacagactcagaa

SEQ ID NO: 166 - DNA, 2936 bp, Homo sapiens
ggaatggcactcagggcaaaggcagaggtgtgcgtggcagcgccctggctgtccctgcaaagggcacgggcactgggcactagagccrctcrggcccctaggacggtgctgccrtttgaagccatgccccagcatccaggcaacaggtggctgaggctgctgcagatctggagggagcagggttatgagcacctgcacctggagatgcaccagaccttccaggagctggggcccattttcaggtacaayttgggaggaccacgcatggtgtgtgtgatgctgccggaggatgtggagaagctgcaacaggtggacagcctgcatccctgcaggatgatcctggagccctgggtggcctacagacaacatcgtgggcacaaatgtggcgtgttcttgttgaatgggcctgaatggcgcttcaaccgattgcggctgaacccagawgtgctgtcgcccaaggccgtgcagaggttcctcccgatggtggatgcagtggccagggacttctcccaggccctgargaagaaggtgctgcagaacgcccgggggagcctgaccctggacgtccagcccagcatcttccactacaccatagaagccagcaacttagctctttttggagagcggctgggcctggttggccacagccccagttctgccagcctgaacttcctccatgccctggaggtcatgttcaaatccaccgtccagctcatgttcatgcccaggagcctgtctcgctggatcagccccaaggtgtggaaggagcactttgaggcctgggactgcatcttccagtacggtgacaactgtatcyagaaaatctaycaggaactggccttcarccgccctcaacactacacaggcatcgtggcrgagctcctgttgaaggcrgaactgtcactagaagccatcaaggccaactctatggaactcactgcagggagcgtggacacgacagcgtttcccttgctgatgacgctctttgagctggctcggaaccccgacgtgcagcagaycctgcgccaggagagcctggccgccgcagccagcatcagtgaacatccccagaaggcaaccaccgagctgcccttgctgcgggcggccctcaaggagaccttgcggctctaccctgtgggtctgtttttggwgcgagtggtgagctcagacttrgtgcttcagaactaccacatcccagctgggacattggwacaggttttcctctactcgctgggtcgcaatgccgccttgttcccgaggcctgagcggtataatccccagcgctggctagacatcaggggctccrgcaggaacttccaccacgtgccctttggctttggcatgcgccagtgcctygggcggcgcctggcagaggcagagatgcygctgctgctgcaccacgtgctgaagcacttcctggtggagacactaactcaagaggacataaagatggtctacagcktcatattgaggcctggcacgtcccccctcctcrctttcagagcgattaactagtcttgcatctgcacccagggtcccagcctggccaccagcttccctctgcctgaccccaggccacctgtcttctctcccacrtgcacagcttcctgagtcacccctctgtccagccagctcctgcacaaatggaactccccagggcctccaggactggggcttgccaggcttgtcaaatagcaaggccagggcacagctggagacgatcttgctggcagggcctggccttgtccccagcyccacctggccccttctccagcaagcagtgccctctggacagcttgactctactcccagcgctggctccaggctcctcatgaggccatgcaagggtgctgtgattttgtcccttgccttcctgcctagtctcacatgtccctgtccctctcgccctggccagggcctctgtgcagacagtgtcagagtcattaagcgggatcccagcatctcagagtccagtcaagttccctcctgcagcctgaccccaggcagctcgagcatgccctgagctctctgaaagttgtcaccctgkaataygatcctgcagggtagactaaaaaggcccctgtggtcacttatcctgacacattttcaagtgatacaactgagtctcgaggggcgtgtgttccccagctgatcatgtcagcctcatgccccaggcctcrtctttcatggaccaggycttgttcaagcagcgagtgttgggtcctctgcttcctgwgctgtcccctggrgaaggtcccraggatgctgtcaggagatggaagagtcatgtggggtgggaacctggggtgtggttccagaaatgtttttggcaacaggagagacaggattgggccaacaaggactcagatgagttttattgactcattcctctggttgatacggagccatgtcatgtgccacgacctggggtgggcacagggaggctgcagttccctacgtgaacctgccttgggcctcatctgctcctagcccagcagagagagttgacccctcctgaactggccactccccagtgctcctgtgcagggataggaagtgccccagggtgagaacgtgcccagccacatcatctttatctcctgggattttcattagggcaaagatctcagcagccagctcctggtagctgatgaggatcagagcgtttgttcccccatgaaaggggaaatacytaggtaatcattccaggtgtgttcagtagttccaggactcagggactcaggccagtcaccctgtgaccgcaggttgctttcccaccctgggcaatgcagtgcagcatgggaaaggaataagggggcaacaaggtgcacagacctcagagatggcttccttgtttatggggctctcacagatacccatccaactcctctagtcagcactagatcatgggatcctaaaataaaccttggaaaaat

SEQ ID NO: 167 - DNA, 1299 bp, Homo sapiens
atggaggtcgatggagctgaagagggtctctaggaaatgtcatagtcaagaggtttgtatgcagaatgtgggggttgaagagctgtgcggctcctggtgagaggcacacttatctgggatgcagtctggggagtcctggcgaggcagcttccacctgctggaggaggggccggggcggagctaagatgcggaggagggtgacgcactagctctccagttcgcccgttcctggcctgacccccaccaaggcccataccgcwgtaggctcctcgggctgcccctcggttgacaatggtctccaggatggtctctaccatgctatctggcctactgttttggctggcatctggatggactccagcatttgcttacagcccccggacccctgaccgggtctcagaagcagatatccagaggctgcttcatggtgttatggagcaattgggcattgccaggccccgagtggaatatccagctcaccaggccatgaatcttgtgggcccccagagcattgaaggtggagctcatgaaggacttcagcatttgggtccttttggcaacatccccaacatcgtggcagagttgactggagacaacattcctaaggactttagtgaggatcaggggtacccagaccctccaaatccctgtcctgttggaaaaacagcagatgatggatgtctagaaaacacccctgacactgcagagttcagtcgagagttccagttgcaccagcatctctttgatccrgaacatgactatccaggcttgggcaagtggaacaagaaactcctttacgagaagatgaagggaggagagagacgaaagcggaggagtgtcaatccatatctacaaggacagagactggataatgttgttgcaaagaagtctgtcccccatttttcagatgaggataaggatccagagtaaagagaagatgctagacgaaaacccacattacctgttaggcctcagcatggcttatgtgcacgtgtaaatggagtccctgtgaatgacagcatgtttcttacatagataattatggatacaaagcagctgtatgtagatagtgtattgtcttcacaccgatgattctgctttttgctaaattagaataagagcttttttktttcttgggkttttaaaatgtgaatctgcaatgatcataaaaattaaaatgtgaatgtcaacaataaaaaccttgggcattgttatacaccagtaaagaaggctgtactcaagaggaggagctgacacatttcacttggctgcgtcttaataaacatgaatgcaagcatt

SEQ ID NO: 168 - DNA, 1743 bp, Homo sapiens
atggaggtcgatggagctgaagagggtctctaggaaatgtcatagtcaagaggtttgtatgcagaatgtgggggttgaagagctgtgcggctcctggtgagaggcacacttatctgggatgcagtctggggagtcctggcgaggcagcttccacctgctggaggaggggccggggcggagctaagatgcggaggagggtgacgcactagctctccagttcgcccgttcctggcctgacccccaccaaggcccataccgcwgtaggctcctcgggctgcccctcggttgacaatggtctccaggatggtctctaccatgctatctggcctactgttttggctggcatctggatggactccagcatttgcttacagcccccggacccctgaccgggtctcagaagcagatatccagaggctgcttcatggtgttatggagcaattgggcattgccaggccccgagtggaatatccagctcaccaggccatgaatcttgtgggcccccagagcattgaaggtggagctcatgaaggacttcagcatttgggtccttttggcaacatccccaacatcgtggcagagttgactggagacaacattcctaaggactttagtgaggatcaggggtacccagaccctccaaatccctgtcctgttggaaaaacagatgatggatgtctagaaaacacccctgacactgcagagttcagtcgagagttccagttgcaccagcatctctttgatccrgaacatgactatccaggcttgggcaagtggaacaagaaactcctttacgagaagatgaagggaggagagagacgaaagcggaggagtgtcaatccatatctacaaggacagagactggataatgttgttgcaaagaagtctgtcccccatttttcagatgaggataaggatccagagtaaagagaagatgctagacgaaaacccacattacctgttaggcctcagcatggcttatgtgcacgtgtaaatggagtccctgtgaatgacagcatgtttcttacatagataattatggatacaaagcagctgtatgtagatagtgtattgtcttcacaccgatgattctgctttttgctaaattagaataagagcttttttktttcttgggkttttaaaatgtgaatctgcaatgatcataaaaattaaaatgtgaatgtcaacaataaaaagcaagactatgaaaggctcagatttcttgcagtttaaaatggtgtctgaggttgtactattttggccaagtctgtagaaagctgtcatttgattttgattatgtagttcatccagcccttgggcattgttatacaccagtaaagaaggctgtactcaagaggaggagctgacacatttcacttggctgcgtcttaataaacatgaatgcaagcattggcatatggagttttctttttaaagcattataaagaacaatttctttgtttaatagaacaacctgatctacatatatgatagtatatgatccaaacaataatgctgtgaacttaatgggtctggtattatccccattttacagatggtagaactgagatgcattcaacacactgagatacgttcaacacaccattgggaatcatcagcaaaatccagcatgaagagtctctacaggataagtagcctagatttttccaacaaataaatgataggagggaaaaatggtggggtactatcatagattttaaaaggcttaagagacatacgagc

SEQ ID NO: 169 - DNA, 1740 bp, Homo sapiens
atggaggtcgatggagctgaagagggtctctaggaaatgtcatagtcaagaggtttgtatgcagaatgtgggggttgaagagctgtgcggctcctggtgagaggcacacttatctgggatgcagtctggggagtcctggcgaggcagcttccacctgctggaggaggggccggggcggagctaagatgcggaggagggtgacgcactagctctccagttcgcccgttcctggcctgacccccaccaaggcccataccgcwgtaggctcctcgggctgcccctcgaatggtctccaggatggtctctaccatgctatctggcctactgttttggctggcatctggatggactccagcatttgcttacagcccccggacccctgaccgggtctcagaagcagatatccagaggctgcttcatggtgttatggagcaattgggcattgccaggccccgagtggaatatccagctcaccaggccatgaatcttgtgggcccccagagcattgaaggtggagctcatgaaggacttcagcatttgggtccttttggcaacatccccaacatcgtggcagagttgactggagacaacattcctaaggactttagtgaggatcaggggtacccagaccctccaaatccctgtcctgttggaaaaacagcagatgatggatgtctagaaaacacccctgacactgcagagttcagtcgagagttccagttgcaccagcatctctttgatccrgaacatgactatccaggcttgggcaagtggaacaagaaactcctttacgagaagatgaagggaggagagagacgaaagcggaggagtgtcaatccatatctacaaggacagagactggataatgttgttgcaaagaagtctgtcccccatttttcagatgaggataaggatccagagtaaagagaagatgctagacgaaaacccacattacctgttaggcctcagcatggcttatgtgcacgtgtaaatggagtccctgtgaatgacagcatgtttcttacatagataattatggatacaaagcagctgtatgtagatagtgtattgtcttcacaccgatgattctgctttttgctaaattagaataagagcttttttktttcttgggkttttaaaatgtgaatctgcaatgatcataaaaattaaaatgtgaatgtcaacaataaaaagcaagactatgaaaggctcagatttcttgcagtttaaaatggtgtctgaggttgtactattttggccaagtctgtagaaagctgtcatttgattttgattatgtagttcatccagcccttgggcattgttatacaccagtaaagaaggctgtactcaagaggaggagctgacacatttcacttggctgcgtcttaataaacatgaatgcaagcattggcatatggagttttctttttaaagcattataaagaacaatttctttgtttaatagaacaacctgatctacatatatgatagtatatgatccaaacaataatgctgtgaacttaatgggtctggtattatccccattttacagatggtagaactgagatgcattcaacacactgagatacgttcaacacaccattgggaatcatcagcaaaatccagcatgaagagtctctacaggataagtagcctagatttttccaacaaataaatgataggagggaaaaatggtggggtactatcatagattttaaaaggcttaagagacatacgagc

SEQ ID NO: 170 - DNA, 1254 bp, Homo sapiens
ggcggcggcggcggcggcggcgcgcgcctgagaagaggggacgccagcccggtcaggcctcggcgcggcctacacgctccgctcgctcgctcgctcccgcctcccgccccgcgcccggccatggcggagccgtcgtccgcccgacgcccggtgcctctcatcgagtcggagctgtacttccttatcgcccggtacctatcggcgggcccgtgtcggagagcggcccaggtgctggtgcaggagctggagcagtaccagttgttgccgaagagattggactgggagggcaacgagcacaacaggagctacgaggagttggtgagcattgggcacgtttgctccccgggttttccgtgcaccgccccccgcccccgccccttcccctcgcggggaccccggcccgtggggtgcaaagtgtgacccgcactggggggcggcccgggsatagctgcgttcccggctgaagattttgttttgtttttgaggcggccaggtttgttttggcaggaaacagtcattgggggcggcgcggggcggagcggtgggggcgactcgcggaggtcctgcggcaggggtggggctccaggtgcggccgcctctgcgggggtgtggcgtgcgcagccagccattcaactgggcggtttcattcgcttccccrctccaccgcgcttgtaactcgcgctctgattggcctcsctgctcttgccccgcccgggtctgtccccccacttgttccctaggaatagaatcattggtctctgaaggtggagaaatgttcttgtgttgagctttttattttttgttttgtcagcagcgtcataaaaatcttgcagctgtatgaatatgccactgtagtgcttgtgctcctttctactgtacaatatttgttgaacgcagtagttgattgatgagtttcacactgatcttgtagataacacaataaagtgctttaaataggcacttttcttttgagctcggttaatcttgcattacagtctcatttyttttgtgaacttggttaatgtttctatataacttgcttttatctatagttacagcagttgcagggattcgtttgtttttactggagacatttttcaggaatatatttttgccgtttcgttattaggataaaggaattcattaattgccaggccatattcagcatcttgtataaggaaaacaattgagaaagaaaagagcttctgagtgatcttttaccacagttggaagacctgtaacacttgagtggta

SEQ ID NO: 171 - DNA, 8632 bp, Homo sapiens
ggcggcggcggcggcggcggcgcgcgcctgagaagaggggacgccagcccggtcaggcctcggcgcggcctacacgctccgctcgctcgctcgctcccgcctcccgccccgcgcccggccatggcggagccgtcgtccgcccgacgcccggtgcctctcatcgagtcggagctgtacttccttatcgcccggtacctatcggcgggcccgtgtcggagagcggcccaggtgctggtgcaggagctggagcagtaccagttgttgccgaagagattggactgggagggcaacgagcacaacaggagctacgaggagttggtcttgtccaataagcatgtggctcctgatcatcttttgcaaatctgcsagcgcatcggtcctatgttggataaagaaattccacccagtatttcaagagtcacttctttacttggtgcaggaaggcagtctttgctacgtacagcaaaagactgcaggcacacagtttggaagggctctgcctttgctgctcttcatagaggaagacctcctgaaatgccagtgaattatggttccccaccaaatcttgtggagatacatcgaggaaaacaactcacagggtgttccacttttagtacagcatttccaggaactatgtatcagcatataaaaatgcacagaaggattctcggacatctatctgctgtttactgtgtagcatttgataggacaggacatagaatctttacaggttcagatgactgtttggtaaagatttggtcaacacataatggccgcttgttatctacattaagaggtcattctgcagaaatttcagatatggcagtaaactatgagaatacaatgattgctgcggggagctgtgataaaattattagagtgtggtgcttgagaacttgtgccccagttgctgtgctccaaggacacacaggatcaattacatctttacagtttagcccgatggccaaaggctctcaaagatayatggtttccactggtgctgatgggacagtttgcttttggcaatgggatttagaatccttaaaatttagcccacgtcccctgaagttcactgaaaagcctaggccaggcgttcaaatgctttgttcttcttttagtgttggtggtatgtttttagccacaggtagtactgatcatgtaatcagaatgtattttttgggttttgaagcacccgaaaaaatcgcagaacttgaaagccacactgataaagtagatagtatccaattttgtaacaatggtgatcggttcctaagtggtagcagagatggaacagcacggatttggagatttgagcagttagaatggaggagcattttattggatatggctaccagaatctcaggggacttatcttcygaagaggaaaggtttatgaaacctaaagtaacaatgatagcttggaatcaaaatgatagcattgttgtcacagctgtgaatgatcatgtcctcaaagtgtggaattcttacactggacaactgcttcataacttaatgggacatgctgatgaagtatttgttctggagacacatccctttgattccagaattatgttatctgcaggacatgatggcagcatatttatatgggatattacmaaaggtaccaagatgaaacattattttaatatgattgaaggacaaggacatggagctgtgtttgactgtaagttttcacaggatggacarcattttgcctgtacagattctcatgggcaccttctgatatttggttttggatgcagcaaaccatatgaaaagattcctgatcagatgttcttccatactgactatcgaccacttattagagattctaataattatgtcttagatgagcaaactcagcaggctcctcatcttatgcctccaccattcttggtagatgtagatggaaatcctcatccaaccaagtatcagagattagtaccaggccgagaaaattctgcagatgaacatttgattccacagctgggctatgtggcaacaagtgatggagaggtgattgaacaaattataagcctgcaaaccaatgataatgatgaacgcagcccagaatcgagtattcttgatggaatgataagacagttgcagcagcagcaagatcagagaatgggagcagatcaggatactattccaagaggactttcaaatggtgaagaaacaccccggagaggttttagaaggctgagcttagacattcagtcccctccaaatattggtctgcgtcgtagtggacaagttgaaggtgttcgtcagatgcatcaaaacgctccacgcagtcagattgctacagaacgtgacctgcaggcttggaaacgaagagtggttgtaccagaggtaccactaggcatatttaggaagctggaagacttccgattagagaaaggtgaagaggaaagaaatctttatataataggaagaaaaagaaagactcttcagctctcacataagtcggattcagtggttttggtatcacagtctagacaaaggacatgtaggcgtaaatatccaaattatggtagaagaaatcgtagctggcgtgagttatcttctggaaatgagtcttcaagctctgtaaracatgagacttcctgtgatcagagtgaaggttctggttcttcagaagaggatgaatggagaagtgacagaaaaagtgagagttacagcgaaagttcaagtgactcttcatctagatattccgattggacagctgatgcgggcatcaatttgcagcctcctttaagaacatcatgtcgtcgacgaattactcgattttgtagtagttcagaagatgaaatatctactgagaatttatctcctccaaaaagaagacgaaagagaaagaaagaaaataagcctaagaaggagaatttgcggaggatgactccagcagagcttgcaaatatggagcatttatatgaatttcaccctccagtttggattactgacaccacacttagaaaatctccttttgttcctcaaatgggtgatgaggtaatatattttcgacagggtcatgaagcttatattgaggctgtaagaagaaataatatttatgaactgaaccctaataaggagccatggagaaaaatggatcttagggatcaagaattggttaaaatagttggaatacgatatgaagttgggccccctacactctgttgcctaaaactagcatttatagatccagcaactggaaaacttmyggacaaatctttctctattagatatcatgatatgccagatgttattgactttcttgtattgcgtcaattttatgatgaagcaagacagaggaattggcagtcttgtgacagattccgctctattattgatgatgcttggtggtttggaacagtgttaagtcaagagccatatcaaccacagtatcctgatagtcatttccagtgttatattgttaggtgggataatactgaaattgaaaaacttagcccatgggacatggaaccaattcctgataatgttgatccacctgaagaattaggagctagtatttctgtcacaacagatgagctagagaaattgctctataaaccacaagctggtgaatggggtcagaaatcaagagatgaagaatgtgatagaattatcagtggtatagatcaacttttgaatcttgatatagcagcagcttttgcaggccctgttgatttgtgtacatacccgaagtactgtactgtagtagcttatccaaccgatctttacacaattcgaatgagacttgttaatcgattttacaggaggctgtctgcgttagtttgggaagtcagatatatagaacataatgccagaacatttaacgaacctgagagtgtaattgcaagatcagctaaaaagataactgaccaacttttaaaatttatcaagaatcaacactgtacaaatatctcagaactttctaacacatctgaaaatgatgagcaaaatgctgaggatttggatgatagtgatcttcctaaaacatcttctggaagraggagagtccatgatgggaaaaaaagcatcagagctacgaactatgttgaaagcaactggaagaaacagtgtaaggaactagtgaacttaatttttcagtgtgaagattctgaaccatttagacaacctgttgatttggttgaatatccagactacagagatattatagataccccaatggattttggaacagtaagggaaactctagatgcgggaaattatgacagccctttggagttttgcaaagacatccggctgatatttagcaatgcaaaagcgtatacaccaaacaaaagatcaaagatttatagtatgaccttgagattatctgccttatttgaagaaaaaatgaagaaaatctcttctgattttaaaattggtcaaaaattcaatgaaaaacttcgaagaagccagaggttcaagcaacggcaaaattgtaaaggtgacagtcagcctaacaaaagtatcagaaacctcaagccgaagaggttaaaatctcagacaaaaataattcctgagttggtaggttctcctacccagtctacctcaagtaggacagcttatcttggaacccacaagacaagtgctggtatctcttcaggtgttacttctggtgactcttcagattcagcagaaycatcagaaaggaggaaaagaaatagacctataacaaatggttctacattatctgaaagtgaagtggaagattctttagctacctctttgtcatcgtcagcttccagtagttctgaggaaagcaaagagagttccagagctcgtgaatcctcctcacgcagtgggctatccagaagcagcaatctcagggtaaccagaactagagctgctcaaagaaaaactggtcccgtttcattagcaaatggatgyggcagaaaagccactcgaaagagagtctatttaagtgattctgataacaattcattggagactggtgaaattctaaaagccagagctggaaataaccgaaaagtcttaaggaagtgtgctgctgtggctgccaataaaataaagctaatgagtgatgtagaagagaattctagctctgaaagtgtctgttctggtcggaagctgcctcaccgcaatgcttctgctgtagctagaaaaaagttattacataattctgaagatgaacagagcttaaagtcagaaattgaagaagaggagctaaaagatgaaaatcaacyattaccagtgtccagttctcacactgcccagagcaatgttgatsaatctgaaaacagagactcagagtcagaaagtgatttgcgggtagcccggaaaaattggcatgctaatggttacaagtcccatactccagcaccttcaaagacaaaatttcttaaaatagagtcttctgaggaagactctaaaagtcatgattcagatcatgcatgtaacagaactgctggcccatcaacgtctgtgcagaaacttaaggcagagagcatctcagaggaagcagattctgaaccaggaagatctggtggtaggaaatacaatacatttcacaagaatgcgagtttctttaaaaaaaccaagattctgagtgactcagaagactctgaatctgaagagcaagatagagaagatgggaaatgtsataaaatggaaatgaacccaatttcaggaaatctgaactgtgaccctattgctatgtcccagtgttcctcagatcatggatgtgaaactgatttagattcagatgatgacaaaatagaaaaaccaaacaattttatgaaagattctgcatcacaagacaatggactaagcagaaaaatttccaggaaaagggtctgttccagtgactcagacagtagtttacaggtggttaagaaatcatcaaaagccagaacaggtctcctgaggattactcgaagatgtgcagctacggctgccaataagatcaagctcatgagtgatgtagaagatgtcagtttagaaaatgtgcacactagaagcaaaaatggaaggaaaaaacctytccatcttgcttgtactacagctaagaagaaattgagtgattgtgaaggaagtgtacattgtgaagtaccaagtgaacagtatgcctgtgaaggcaagccacctgatcctgactccgaaggtagtacaaaagtgcttagtcaggctctaaatggagactcagactctgaagatatgttgaattcagaacacaagcacaggcataccaatattcacaaaatagatgcaccttctaaaagaaaaagttcctctgttacatcttcaggagaagattcaaaaagtcatattccagggagtgagactgataggacattttcttcagagtcaaccttggcacaaaaagctactgcagagaataattttgaagtggaactgaattatgggctgcgcaggtggaatggcagaagactcaggacctatggaaaggctccttttagtaagacaaaagtgattcatgattcacaggaaacagcagagaaggaagtaaaaaggaagagatcgcatcctgaattggaaaatgtgaaaatctctgaaacaactgggaattcaaagtttagacctgatactagttccaratcatcagatttgggatctgtaactgaatcagatattgactgtactgataatacaaaaaccaaaaggaggaaaacgaaaggaaaagcaaaagtagttagaaaagaatttgttcctagagacagagaacccaatacaaaagtgagaacatgtatgcataatcagaaggatgcagtgcagatgcctagtgaaactctgaaagcaaaaatggtacctgagaaagttccccgcagatgtgctactgttgctgcaaataaaataaagataatgagtaatctaaaagaaacgatctcaggaccagaaaatgtctggattaggaagagtagcagaaaactgccccatcgaaatgcttctgctgcggctaagaaaaaattactgaatgtttataaagaggatgatacaaccataaattctgaaagtgaaaaagagctagaagatattaatagaaaaatgctttttttaagggggttcagatcctggaaagaaaatgcacaatagtgactatgagaatgtagaagtggcatctgaaaacaattggtacacaagtaaactggcagttacattctgctcccagctctaaaattactcccttattggcatctttggaggaattttctaaaagccataatccagtgggttcctcccagtcagctcttgtacagacatgtgctctggggaattctgaggaggaaataaattgcagagtctgtaggtggagaggtggaaagaaaagacaaatggcctgctataagactactattcctttccagaatgcaaggccttgaagacatgattccttagaggaagaatataatgggaagtgtacaggstaggaagaacttgaagtgaacaaatttcaaaatcttaacctgatgctaattttcagggttctccattacagtgtaaaaattcagaccacgacaactatggtgtcatgaggaaaaaaaatcaggcatttttccaaaggaagtgctaatgggcctatttgacttctgagtgaagcaaaaactacccagatccattccctayaattcacatccccaaaggtcaaaaacaaactaggaggacctgggaatttcagctggagatactgattattgagttctgaagtagagtgttggaaataggcaattagagaaagtccattgatgtcattttgtttataatattgcagttcatactgaatgaccacttgatatgactaattcagggaatatatatttttctatgaaagctatgaatgttactatcacggcttttccttatttttacttgtatgtagcagcatttacagaaatgccaaaaatgtgcctcattaagaggcaggtcttaatcagttagataaaaataaaatgtatagcttaagatcaaaacagtcatatttttagatacagtgaaatcttttatgtttctctacagcaccttaaaaattagaacttgaatactttgagtaaacttactacaatctcatsccaacaaactttaatggtagcatgtttggcctatttcattgtggcctgtactaggattagaaaatttggtcgtggtataacaaagaagtgtatttacaataggatttaatttgttgttaatatgtatttgttgaaattaaaattgccagattaaatgaatatactgtcgcatctttttaacatagtaacgtgttactggaaaaattaagttgttgaaagtaagttgttttcccatttaaaaatatctgaatatatgatttgcatgtgtaaatctgaaaaactaaactacagaaacctagggttttctatttcttttttaagtcaaatgcatttttttttttttgttatacagatgaaccaagtgtctaaaatacttgagaaatttgtggttgcatgtctgttttaaaaaaaaggctttttgttttttagcataagccagaatattctaacctactaagtctgtgtcctttgctccytttgtagtatactttcatctaaattactgatccccaatatgttgatacacaggtgagaaagggaagaattcctaataaactgctattacttttaggtgc

SEQ ID NO: 172 - DNA, 2814 bp, Homo sapiens
cagatcgtgtggacttggccttttcctctgggtctgatgggagcctctggaggattttgagagaggaaggacaagtccgtctttagtttktttttttttttttcttgagatggagtttcgctctcgttgcccaggctggagtacaatggctcgatctcggctcactgcaacctccacctcctgggttcaggcaattctcctgcctcagcctcctgagtagctgggattacaagcacacgccaccatacccggctaatttttgtatttttagtagagacagggtttcactgtgttggtcaggctggtctcaaactcctgacctcaggtaatccacctgccccggcctcccaaagtgctgggattacaggcatgagccactacgcctggccctgtcttaagttttaacaggatccctccagctgcctgagaatacacagaaataggatgaaggtagaagcagtaagacataagaggttgtggtgctcttccggatgagaagtgcttagattctggatacattttgaagagctgtacttccttatcgcccggtacctatcggcgggcccgtgtcggagagcggcccaggtgctggtgcaggagctggagcagtaccagttgttgccgaagagattggactgggagggcaacgagcacaacaggagctacgaggagttggtcttgtccaataagcatgtggctcctgatcatcttttgcaaatctgcsagcgcatcggtcctatgttggataaagaaattccacccagtatttcaagagtcacttctttacttggtgcaggaaggcagtctttgctacgtacagcaaaaggtaccttaatttgaagaagtgttctgctttgtattaatagcctaataattattataattgtgaagtaatgtaagcattgtggaagaaaggtgataatgtaactataaatcatgctgtggactataaaattctctgcatttagcatagaacattgaattttattacataagtgtttaatgggtccttctgcwttaaaaagttgataaagatatagatgttaagctaaaaagcttgaatttattctgagatgttgtttgaggttttatcaatgtgagttcttaattttccattttgtagctcactcataacttcattgaatgtaattgtatgtgtctaataaactctttaaatgctagaggtatttcatttgatatttagcttmtgaaagccctttgttataaagggaagtgattttctaaatttggtagcagcttgaaaacaagcaccacaaatgtaaaaytgcatggttctttttttactaatttaatttttttgccaagttatgtgctagcaaaatgtttgaaattgctattctttttctgttagcttggtatatatgacttagactaagtatatgtatgtgatataatatatgtgtacatgtggctaaactgctaatgggcaaagattgttggttcttctgatgctgagtatacatcaagttcatcccatgattattttttattacgagctattgctgatgtgatgctactcttagctgcaccaccagtataaagcttaactgagaaagaacacccctccctcttagttccgtgccagactggtttgttagctttagttgtttcttagtgctctagccatgtcaccctgtggcactaatcaggacactgtttatattcttcctcttctgtgtccctattcactttgtaattattctattttagctggttatatggtagttaattggtagcctgttttcctttgttttctttacttgtgtcaagctccatgtcgttgttttgtgatgagcagtgatttagaactggccagaccttagaagagtcttcagcaagctgccctagggtaggggcrtattctctgtttgttttgtactggtaccccaggaggatgccttgtaactgctctttggtcatgatagtggtaatgaatccattcatgtaaaatgcaatatgtctgttagtttggggcacccgaggctcagtagaggtttagtatgatgccttccctttcttctttgagttatgaagaaactaatttctggcacagtgtgactgcttcaaacctatgttctgmtgctatctcctatagaggagggcagacttttttttcttagtgcatttgctggtaggtcaaggagggatggactttgaattagtgttcagagtcacagatcctacgtatgtgctcttcagtagaggattttctgtgatcctacaatgaagggaaagctatataatttattggtacttcctaaagatagagactaaagtcatggtagtattggccaaattaattttaaaactgaacaagtcatgaattttcatataaatcaaagaactttttccttataaaagcttccatttttgaaaagttggatcagttgtaagacctttcatctttagtattgtatgatataattctacattgaaaaataaacacttggcattaaatgggacttggagtcaaaagatctggttttatggtccatctttaccaatcatttgctgtggatctctttaaaggtcctggaacctttgagcctcagttacctcacttgtaaattggcaaaaatacctacctcacagggttgttgtgaggattcaatgagctaatgtatgttgaaagcactttgtgaattgtaaagtgctacacaaatgttagttgttgttgctgctgtatctgagatgtcttaattttctttttcttcagaaatagtctaataaacctccagggcttttctgttaaagtatactagttggtaaaatgttgaataaacagtttattac

SEQ ID NO: 173 - DNA, 11887 bp, Homo sapiens
ggcggcggcggcggcggcggcgcgcgcctgagaagaggggacgccagcccggtcaggcctcggcgcggcctacacgctccgctcgctcgctcgctcccgcctcccgccccgcgcccggccatggcggagccgtcgtccgcccgacgcccggtgcctctcatcgagtcggagctgtacttccttatcgcccggtacctatcggcgggcccgtgtcggagagcggcccaggtgctggtgcaggagctggagcagtaccagttgttgccgaagagattggactgggagggcaacgagcacaacaggagctacgaggagttggtcttgtccaataagcatgtggctcctgatcatcttttgcaaatctgcsagcgcatcggtcctatgttggataaagaaattccacccagtatttcaagagtcacttctttacttggtgcaggaaggcagtctttgctacgtacagcaaaagactgcaggcacacagtttggaagggctctgcctttgctgctcttcatagaggaagacctcctgaaatgccagtgaattatggttccccaccaaatcttgtggagatacatcgaggaaaacaactcacagggtgttccacttttagtacagcatttccaggaactatgtatcagcatataaaaatgcacagaaggattctcggacatctatctgctgtttactgtgtagcatttgataggacaggacatagaatctttacaggttcagatgactgtttggtaaagatttggtcaacacataatggccgcttgttatctacattaagaggtcattctgcagaaatttcagatatggcagtaaactatgagaatacaatgattgctgcggggagctgtgataaaattattagagtgtggtgcttgagaacttgtgccccagttgctgtgctccaaggacacacaggatcaattacatctttacagtttagcccgatggccaaaggctctcaaagatayatggtttccactggtgctgatgggacagtttgcttttggcaatgggatttagaatccttaaaatttagcccacgtcccctgaagttcactgaaaagcctaggccaggcgttcaaatgctttgttcttcttttagtgttggtggtatgtttttagccacaggtagtactgatcatgtaatcagaatgtattttttgggttttgaagcacccgaaaaaatcgcagaacttgaaagccacactgataaagtagatagtatccaattttgtaacaatggtgatcggttcctaagtggtagcagagatggaacagcacggatttggagatttgagcagttagaatggaggagcattttattggatatggctaccagaatctcaggggacttatcttcygaagaggaaaggtttatgaaacctaaagtaacaatgatagcttggaatcaaaatgatagcattgttgtcacagctgtgaatgatcatgtcctcaaagtgtggaattcttacactggacaactgcttcataacttaatgggacatgctgatgaagtatttgttctggagacacatccctttgattccagaattatgttatctgcaggacatgatggcagcatatttatatgggatattacmaaaggtaccaagatgaaacattattttaatatgattgaaggacaaggacatggagctgtgtttgactgtaagttttcacaggatggacarcattttgcctgtacagattctcatgggcaccttctgatatttggttttggatgcagcaaaccatatgaaaagattcctgatcagatgttcttccatactgactatcgaccacttattagagattctaataattatgtcttagatgagcaaactcagcaggctcctcatcttatgcctccaccattcttggtagatgtagatggaaatcctcatccaaccaagtatcagagattagtaccaggccgagaaaattctgcagatgaacatttgattccacagctgggctatgtggcaacaagtgatggagaggtgattgaacaaattataagcctgcaaaccaatgataatgatgaacgcagcccagaatcgagtattcttgatggaatgataagacagttgcagcagcagcaagatcagagaatgggagcagatcaggatactattccaagaggactttcaaatggtgaagaaacaccccggagaggttttagaaggctgagcttagacattcagtcccctccaaatattggtctgcgtcgtagtggacaagttgaaggtgttcgtcagatgcatcaaaacgctccacgcagtcagattgctacagaacgtgacctgcaggcttggaaacgaagagtggttgtaccagaggtaccactaggcatatttaggaagctggaagacttccgattagagaaaggtgaagaggaaagaaatctttatataataggaagaaaaagaaagactcttcagctctcacataagtcggattcagtggttttggtatcacagtctagacaaaggacatgtaggcgtaaatatccaaattatggtagaagaaatcgtagctggcgtgagttatcttctggaaatgagtcttcaagctctgtaaracatgagacttcctgtgatcagagtgaaggttctggttcttcagaagaggatgaatggagaagtgacagaaaaagtgagagttacagcgaaagttcaagtgactcttcatctagatattccgattggacagctgatgcgggcatcaatttgcagcctcctttaagaacatcatgtcgtcgacgaattactcgattttgtagtagttcagaagatgaaatatctactgagaatttatctcctccaaaaagaagacgaaagagaaagaaagaaaataagcctaagaaggagaatttgcggaggatgactccagcagagcttgcaaatatggagcatttatatgaatttcaccctccagtttggattactgacaccacacttagaaaatctccttttgttcctcaaatgggtgatgaggtaatatattttcgacagggtcatgaagcttatattgaggctgtaagaagaaataatatttatgaactgaaccctaataaggagccatggagaaaaatggatcttagggatcaagaattggttaaaatagttggaatacgatatgaagttgggccccctacactctgttgcctaaaactagcatttatagatccagcaactggaaaacttmyggacaaatctttctctattagatatcatgatatgccagatgttattgactttcttgtattgcgtcaattttatgatgaagcaagacagaggaattggcagtcttgtgacagattccgctctattattgatgatgcttggtggtttggaacagtgttaagtcaagagccatatcaaccacagtatcctgatagtcatttccagtgttatattgttaggtgggataatactgaaattgaaaaacttagcccatgggacatggaaccaattcctgataatgttgatccacctgaagaattaggagctagtatttctgtcacaacagatgagctagagaaattgctctataaaccacaagctggtgaatggggtcagaaatcaagagatgaagaatgtgatagaattatcagtggtatagatcaacttttgaatcttgatatagcagcagcttttgcaggccctgttgatttgtgtacatacccgaagtactgtactgtagtagcttatccaaccgatctttacacaattcgaatgagacttgttaatcgattttacaggaggctgtctgcgttagtttgggaagtcagatatatagaacataatgccagaacatttaacgaacctgagagtgtaattgcaagatcagctaaaaagataactgaccaacttttaaaatttatcaagaatcaacactgtacaaatatctcagaactttctaacacatctgaaaatgatgagcaaaatgctgaggatttggatgatagtgatcttcctaaaacatcttctggaagraggagagtccatgatgggaaaaaaagcatcagagctacgaactatgttgaaagcaactggaagaaacagtgtaaggaactagtgaacttaatttttcagtgtgaagattctgaaccatttagacaacctgttgatttggttgaatatccagactacagagatattatagataccccaatggattttggaacagtaagggaaactctagatgcgggaaattatgacagccctttggagttttgcaaagacatccggctgatatttagcaatgcaaaagcgtatacaccaaacaaaagatcaaagatttatagtatgaccttgagattatctgccttatttgaagaaaaaatgaagaaaatctcttctgattttaaaattggtcaaaaattcaatgaaaaacttcgaagaagccagaggttcaagcaacggcaaaattgtaaaggtgacagtcagcctaacaaaagtatcagaaacctcaagccgaagaggttaaaatctcagacaaaaataattcctgagttggtaggttctcctacccagtctacctcaagtaggacagcttatcttggaacccacaagacaagtgctggtatctcttcaggtgttacttctggtgactcttcagattcagcagaaycatcagaaaggaggaaaagaaatagacctataacaaatggttctacattatctgaaagtgaagtggaagattctttagctacctctttgtcatcgtcagcttccagtagttctgaggaaagcaaagagagttccagagctcgtgaatcctcctcacgcagtgggctatccagaagcagcaatctcagggtaaccagaactagagctgctcaaagaaaaactggtcccgtttcattagcaaatggatgyggcagaaaagccactcgaaagagagtctatttaagtgattctgataacaattcattggagactggtgaaattctaaaagccagagctggaaataaccgaaaagtcttaaggaagtgtgctgctgtggctgccaataaaataaagctaatgagtgatgtagaagagaattctagctctgaaagtgtctgttctggtcggaagctgcctcaccgcaatgcttctgctgtagctagaaaaaagttattacataattctgaagatgaacagagcttaaagtcagaaattgaagaagaggagctaaaagatgaaaatcaacyattaccagtgtccagttctcacactgcccagagcaatgttgatsaatctgaaaacagagactcagagtcagaaagtgatttgcgggtagcccggaaaaattggcatgctaatggttacaagtcccatactccagcaccttcaaagacaaaatttcttaaaatagagtcttctgaggaagactctaaaagtcatgattcagatcatgcatgtaacagaactgctggcccatcaacgtctgtgcagaaacttaaggcagagagcatctcagaggaagcagattctgaaccaggaagatctggtggtaggaaatacaatacatttcacaagaatgcgagtttctttaaaaaaaccaagattctgagtgactcagaagactctgaatctgaagagcaagatagagaagatgggaaatgtsataaaatggaaatgaacccaatttcaggaaatctgaactgtgaccctattgctatgtcccagtgttcctcagatcatggatgtgaaactgatttagattcagatgatgacaaaatagaaaaaccaaacaattttatgaaagattctgcatcacaagacaatggactaagcagaaaaatttccaggaaaagggtctgttccagtgactcagacagtagtttacaggtggttaagaaatcatcaaaagccagaacaggtctcctgaggattactcgaagatgtgcagctacggctgccaataagatcaagctcatgagtgatgtagaagatgtcagtttagaaaatgtgcacactagaagcaaaaatggaaggaaaaaacctytccatcttgcttgtactacagctaagaagaaattgagtgattgtgaaggaagtgtacattgtgaagtaccaagtgaacagtatgcctgtgaaggcaagccacctgatcctgactccgaaggtagtacaaaagtgcttagtcaggctctaaatggagactcagactctgaagatatgttgaattcagaacacaagcacaggcataccaatattcacaaaatagatgcaccttctaaaagaaaaagttcctctgttacatcttcaggagaagattcaaaaagtcatattccagggagtgagactgataggacattttcttcagagtcaaccttggcacaaaaagctactgcagagaataattttgaagtggaactgaattatgggctgcgcaggtggaatggcagaagactcaggacctatggaaaggctccttttagtaagacaaaagtgattcatgattcacaggaaacagcagagaaggaagtaaaaaggaagagatcgcatcctgaattggaaaatgtgaaaatctctgaaacaactgggaattcaaagtttagacctgatactagttccaratcatcagatttgggatctgtaactgaatcagatattgactgtactgataatacaaaaaccaaaaggaggaaaacgaaaggaaaagcaaaagtagttagaaaaggtaaaacttttacagctaacatatctaaaactgtgagacgtcaaagacaaagcaaacgccctasgttaagtgtggatgataatgactgggaggatttggactatgcaaaatctaaaagagttcttcgacgttcaaaaataaaaacgagaaatcagggtagaaggactgtgagataccatgatggggatgatgacagaagtttagaaaatgtgttagatttcaatggttgcaccttatgaccttgagggaaagccagttcatttaagaggaaatggactggcatttatggtgaaagctggctgttaaaattatttttttgtcttacaattcagggaatatatttatatttttctatgaaaagttatgaatgtgactaaatcatgactgttatttttatttgcacttgctggtctttgtagcagcattcagcacaggtgccaaaatatgcttcattttgggggcagatctattttgacagtatttgactacatatagcaagagtttgaaatatgttaaacactagacatcctggttatcaaaaccaatgagcattactttcatggcagcaagtgtcatgcagttattttctgaatttgtcaaagaggcagtagtttctaacccctgttctatagtagttacaacaatttcacaacctatgtttacagattcttcataaatacatgcatactgacactataatcatgggasgtgtaaccatgattagtaggcgaggtacctaccactttttttttttcttcccctggctacttgagtagaatgcattataccagatctggtcactttcattgaaatggtttctaattttcttcccaagtgctgttgggtttttttcttcttaaggaaaacgttgtcacttttatgttataaacttgaatttataaagtgctggtaaattatttttaatgatttgagtgcatgttttaaacctctaggaccagagcatagtcagagcattttcttttaaattgtgcactaacaaaatgctatataatctgtcttctgtccaagatctcctggtttccattgtaagggatttaaccaaaatcttgytcttccataatcttactctgtgaaatagaggaattcgtgtgccttagatttagaagtgtgttctttaatagagtgtacagggctaaaagagtatttaagttaatatgtaggtttcccccatctgtattccaattgtagaggtgagttttgttaagagtacaattgcaaatcttatctatataggaaaatagctaaatgtcattctccatctctttgttttagtttactgcttccatgtgcaatcctaagcattctttgctggggcaactaaatgtatctttattagtgacttctagtccaaatataagaaactgtcatgttttgtgggaaaataattttataatccatttaaagtgaaagtttatcacacaaatagtacacttattttctaaccaaatacttgataggttatgctactccagtgtagatggccattcctaacttgtttgtgcctgaagatggacttgattcaaatggtttacatatttagtgggtaagggatatgttacagtaccccacctgtaagttatttattagccctaattgtgtttgatttcagacaaaattaacccttttctcctgtgtatctttgaagtggcagataaggtgaagcatcagactggtatcaatattagacaatgttatttattagccctaattgtgtttggtttcagacaaaaccttttctcctgtgtatctttgaagtggcagacaaggcgaagcatcagactggtattaatgttagagaatgttctgaagtgttcctattttgtagttatctattccatttgacatagtagaaggtacattttctttctactctgatgcatggggaaggatgtttttggacattatcaactgagataggtgggaaacctcctctcatttgtggcttagagagctatcaccatttcagaactatgatgcttttcttctcagaacttgtgttaagtagatagtaaacagattgattcatgatmattgtccttgactaagactgaaaagactaatgggatgccttttactttgctaattttaaaaactggtgatagatgtcaaatccattaatttatttaaactcttcttaaccttctcttttataatctgttctcaggttttaactccatgtttaccatcatttgcaaaaaggtaccaaaaaaatccataaataaatatggaatacattcataagtacatacattcttttggtataaaacaatattttgacagtttaggcttcattaatagaactattctgattatttggactgcattaattggtcaytgactggccatccaattaccattttttctttcagtccaaaatagttagacccttgcatacagaagtggtattttggtttttaatcagatttggtttcatcagaagcagcaagaatggacctgatgtctttaaaagcatagccgacaatggtagcttctcaagttatgaaataaaactgagagataatggagaaaataatttttatgggtttttttggttatggtgctattcctaaggttaactttgaatatgtgacacacacactcctaagtacctttaaggaaaattaataaatcattaatagttaaaatgtttacattgagcactagaacatgtttggccttttttttctacgttatgcaaaatgcccagggatttaatgcacaggtgtactttaatgtttagggtcagtttgtagtattcttgagaaaaagataaagggttataatttgaatgtgaactgatccagaaataagtgctgtacctttccactgcacttgaagttcaacttaatggtgtatgtgaaaaacaaaaactactttggttgtgtatgtccaaagtcctatggttttattcatttatggttttacaggctttgaagtactcagatttgatttttgctttcttggaaagactcactttaccaagcatataaaggaaaaatgatttcaaacattgacaagatagatgagtgttaacaaagctttcttttttcgtgtyctccttatttaaaaaggtatacttacaatgtgaagtaacttatgaataaaaggaaaagtttatcccatattcaaataattcctaaggtcagcctccctttttgtaagtggcaaatatctgattaaatcatttctcagtttattaatccttggaaacaatgatatagcagttactcacagcttgtaaattacaacagaaaggttcctttcaaatagtagagctgcacctaaagaggaaattgggtttataagaaaatggaggcaaagaacttaagttttaagaaaaagcacttcaaaacagaagggcaaatggaaaaggggratataaaacaaaccaataaaaataccatctgagggtgttactgtccaaaaktaaagaataagatgcatcactaagccctttgcactcgttatgacctcgtaagtaaaaattatcacttagaataaggggtgcacactacaktccctctgtcttctagacttttttttttgtagaagaatcagaaaacaatttactaacctccctgtttgatattaaaaahaggaagaattttaatattttctgtyagtacaagttgaacttgattgtgycaactgaaacccyagaggtttgtrtatcagtagaatgcaagaacattgttaaaggtgcttacratcttttttgttttcctttccrctccattgtatcaattttttgagtaacttttaaatggctagaaaatggtctttttgctttgcccttttaaagctgaaataaccagctccattcttttcatgartagtaagttgatatatttatttatcaggtatcttgcagttgtcmccaaatactgtagttttcttatgttgtatggaaattatagttcaattattttaatgtgatrgagtgcaacragtcattgtagaacttttcacctgttaatgttgaagttatacctctgaatttctgctgtggatatcaaggaaataataaagcagaaaccccaagaaatttgcaacttaacagtttgagactgtctcttaycctagtatttgggaagagaaggaataaatttgtcaaaactaggtgagaaaatagagcattgtgggaaaaactgagtccaactagattagcaaatgttaattcctagctcaaactgtgaatastaaggattgaaaagtaaagtatgtaatgctaagggctgtgttgtcttttcttacgattttaagttttaaaggctgttaaattacagagatgttgcccaaggatacatggggattctcaaaagtaagagatttttacctttttcataatctgccaagctggttcctaatatattgttaaattggtagaaaaatatctttaaattggtgtctgctcaagaattgcttttctagatttgatggagggagggggagagtcacatcatttggattctaccaatctgcaggctctatctttggcaacatgtaaataattagactatacatctgtttctcaagtatggcaagaccaatagtttgaatttaattatcaatgctatggtatactttctggtcatattttagttatgtcagttttaaggtaagttttttcatttattaaagcccttaaatgagattttagactgccaaagagaagaggcagtccaattgacctaactgaaatgagatgaccagtatatagagcctagatggactgtagcagctctacccctttgttttacaaggtaaatcattttaaaaattaccttttttgatcagtgggtaaaagttaaagggatctttaatttttgatatattcaagttaattttctaaatgtgaatcagtccttggactgcaactatatattcacctacaaaatcccaatcaaaaaattacatgagcctgtcaagcagatctttagttttccacttcacataagatcgttaatgttctaaattaatctattcatttagatgatttttgtcagttcttaaatgggatataataaatttagcattttcatcttaacaagcaaaagagttaaaaaacaaaacaaaacactactccaagccaaatacattctagctggttaattccagacttgtcccaagtggttccccaacctcttttccactggtaatttcttttcatgcagg

SEQ ID NO: 174 - DNA, 2457 bp, Homo sapiens
ggcggcggcggcggcggcggcgcgcgcctgagaagaggggacgccagcccggtcaggcctcggcgcggcctacacgctccgctcgctcgctcgctcccgcctcccgccccgcgcccggccatggcggagccgtcgtccgcccgacgcccggtgcctctcatcgagtcggagctgtacttccttatcgcccggtacctatcggcgggcccgtgtcggagagcggcccaggtgctggtgcaggagctggagcagtaccagttgttgccgaagagattggactgggagggcaacgagcacaacaggagctacgaggagttggtcttgtccaataagcatgtggctcctgatcatcttttgcaaatctgcsagcgcatcggtcctatgttggataaagaaattccacccagtatttcaagagtcacttctttacttggtgcaggaaggcagtctttgctacgtacagcaaaaggtaccttaatttgaagaagtgttctgctttgtattaatagcctaataattattataattgtgaagtaatgtaagcattgtggaagaaaggtgataatgtaactataaatcatgctgtggactataaaattctctgcatttagcatagaacattgaattttattacataagtgtttaatgggtccttctgcwttaaaaagttgataaagatatagatgttaagctaaaaagcttgaatttattctgagatgttgtttgaggttttatcaatgtgagttcttaattttccattttgtagctcactcataacttcattgaatgtaattgtatgtgtctaataaactctttaaatgctagaggtatttcatttgatatttagcttmtgaaagccctttgttataaagggaagtgattttctaaatttggtagcagcttgaaaacaagcaccacaaatgtaaaaytgcatggttctttttttactaatttaatttttttgccaagttatgtgctagcaaaatgtttgaaattgctattctttttctgttagcttggtatatatgacttagactaagtatatgtatgtgatataatatatgtgtacatgtggctaaactgctaatgggcaaagattgttggttcttctgatgctgagtatacatcaagttcatcccatgattattttttattacgagctattgctgatgtgatgctactcttagctgcaccaccagtataaagcttaactgagaaagaacacccctccctcttagttccgtgccagactggtttgttagctttagttgtttcttagtgctctagccatgtcaccctgtggcactaatcaggacactgtttatattcttcctcttctgtgtccctattcactttgtaattattctattttagctggttatatggtagttaattggtagcctgttttcctttgttttctttacttgtgtcaagctccatgtcgttgttttgtgatgagcagtgatttagaactggccagaccttagaagagtcttcagcaagctgccctagggtaggggcrtattctctgtttgttttgtactggtaccccaggaggatgccttgtaactgctctttggtcatgatagtggtaatgaatccattcatgtaaaatgcaatatgtctgttagtttggggcacccgaggctcagtagaggtttagtatgatgccttccctttcttctttgagttatgaagaaactaatttctggcacagtgtgactgcttcaaacctatgttctgmtgctatctcctatagaggagggcagacttttttttcttagtgcatttgctggtaggtcaaggagggatggactttgaattagtgttcagagtcacagatcctacgtatgtgctcttcagtagaggattttctgtgatcctacaatgaagggaaagctatataatttattggtacttcctaaagatagagactaaagtcatggtagtattggccaaattaattttaaaactgaacaagtcatgaattttcatataaatcaaagaactttttccttataaaagcttccatttttgaaaagttggatcagttgtaagacctttcatctttagtattgtatgatataattctacattgaaaaataaacacttggcattaaatgggacttggagtcaaaagatctggttttatggtccatctttaccaatcatttgctgtggatctctttaaaggtcctggaacctttgagcctcagttacctcacttgtaaattggcaaaaatacctacctcacagggttgttgtgaggattcaatgagctaatgtatgttgaaagcactttgtgaattgtaaagtgctacacaaatgttagttgttgttgctgctgtatctgagatgtcttaattttctttttcttcagaaatagtctaataaacctccagggcttttctgttaaagtatactagttggtaaaatgttgaataaacagtttattac

SEQ ID NO: 175 - DNA, 1471 bp, Homo sapiens
ctgggggggtttgttgggctggtgagttttcgaggtgactgtgctgtgctcggtgaggggacgcccagagagccctgacccggggtcactccgtcgccgttctcctcttgtctacgtgctggacccggtgctacctttttacccacacttaagtgacgcaaaatgcccttcaatggcgagaagcagtgtgtgggagaggaccagccaagcgattctgattcttyccggttttccgaaagcatggcttcgctcagtgactatgaatgctccaggcagagctttrcaagtgactcctccagcaaatccagctctcctgcttcaacaagccctccaagggttgtaacatttgatgaagtgatggctacagcaaggaacttatcaaacttgactcttgctcatgagattkctgtaaatgagaactttcaattgaaacaagaggctctcccagaaaagagtttggctggtcgagtgaagcacattgttcaccaggccttctgggacgtcttggattcagaactaaatgctgaccctcctgagtttgaacatgccatcaaactgtttgaagaaatcagagagattcttctctcttttctcactcccggtggcaaccggcttcgcaaccaaatctgtgaagttttggacacagacctcattaggcagcaggctgagcacagtgctgttgacatccaaggcctggccaactatgtcatcagtacgatgggaaagctgtgtgctcccgtgcgagataatgatatcagagagttaaaggctactggcaacatcgtggaggtgctgagacaaatattccatgtcctggacctcatgcaaatggacatggccaattttacaattatgagtctcagaccgcaccttcaacgccagttggtggaatatgagagaaccaagttccaggaaattttggaagaaactccaagaaaagccgaggttgcaggtgcctcatgaggctgaccttgcttttggaaccagagagagcagtcaccgtgccagcctgtgagrgtgaagtctctgccgatccctaagagaagagccaacgtttcactctaaacgcatgctccttctgctttaccggtcattctcaagtctgactacaaattagaatcatctggggcgtttaaacacagaggcctgagccctgcctcagacagaataaatcaaagtctccaggagctgtgcccatgaactctttttttyctttttaaagctccccaggtgattctaaagtcagccaggattgagaaccactatgccacactgttgcttttgttcaaggtaactaaatgggctcttaaatgtgtcagctgtaaatgattaaacttgcagtataaatgcttattactgccacattgtaattatattcacgatgatttccactcgcgctctctcagttggatgtcttttaaatgaaagactgcaagtcttttacatctttataaaacagaactagcaaacc

SEQ ID NO: 176 - DNA, 3172 bp, Homo sapiens
ggggggtttgttgggctggtgagttttcgaggtgactgtgctgtgctcggtgaggggacgcccagagagccctgacccggggtcactccgtcgccgttctcctcttgtctacgtgctggacccggtgctacctttttacccacacttaagtgacgcaaaatgcccttcaatggcgagaagcagtgtgtgggagaggaccagccaagcgattctgattcttyccggttttccgaaagcatggcttcgctcagtgactatgaatgctccaggcagagctttrcaagtgactcctccagcaaatccagctctcctgcttcaacaagccctccaagggttgtaacatttgatgaagtgatggctacagcaaggaacttatcaaacttgactcttgctcatgagattkctgtaaatgagaactttcaattgaaacaagaggctctcccagaaaagagtttggctggtcgagtgaagcacattgttcaccaggccttctgggacgtcttggattcagaactaaatgctgaccctcctgagtttgaacatgccatcaaactgtttgaagaaatcagagagattcttctctcttttctcactcccggtggcaaccggcttcgcaaccaaatctgtgaagttttggacacagacctcattaggcagcaggctgagcacagtgctgttgacatccaaggcctggccaactatgtcatcagtacgatgggaaagctgtgtgctcccgtgcgagataatgatatcagagagttaaaggctactggcaacatcgtggaggtgctgagacaaatattccatgtcctggacctcatgcaaatggacatggccaattttacaattatgagtctcagaccgcaccttcaacgccagttggtggaatatgagagaaccaagttccaggaaattttggaagaaactccaagtgagtataatataatgtgtatttatattgaaattaggttaaaatgatgattttaaatgttaaaatttaaattaaattaaattaaattaaattawataataaataaaatttaatttaatttaaattaattaaaatttaaaatgttaaaggttaaaatgaaaattaggtgatgttttcatttttgacttcatatatagtatcactaaagaattttggcctttctattaaacatttttttaccttccaaaattgacatcacaaacttacagttgtttattctgtccaggaactgtgctaagcactattcgtttcttcattcattcaagatatatttattgagtgcctcctgtgtttcagacactgcttaggtgcagtggatactgcagcgaacagaatggaatacagttgccgtccccaaggagctgacattctagtaggcatgacaaataaataaacatatattgtcaggtgtattattaagtgstatgaagaaaaataggataaagggacagtaatgggtcagaagtgaggacagcattgttttttagatgtgatggactgggaaggtctctgtaagtaacatttgagtaaagtttgcaaagaaatgaggaaggggcatgtaaagatggggaaaagaacgttctagcctgagggactgcaggtacaaaggcactgaagcagaaactgcttatgagtttgacaaacacagggcagacattgtgacgggagtagagttggtaaggggagagtggtaagagatgaggctgaaaaggagataaaggcaggtcacatagagcattgttagtaaatgagaggagtttggatttcattccatgtgcggtggaaactcatcagagagttttaatcaggggagcaacatctgattttcatttttgaagaatattcttgttcctggctacagaataggtcatgtgggaacaaagagggaaacagaggtaccaattaggtggyattacagttgctcaggcaagaaatgatggtggcttgttccagatggtaatggtggaaggagtgagaagagaccagattctggatacattttgaaagtggagtaatcagatttgctgaagattggataagggagaaaagagttgagggtgactctaaggtttttggcctcgtacaaccgggtgaatggtcatacagtttgagtgaaactggtgagaccaggagaaagaaggttgggagatgacatggaatcaagagttcagtttggtgatgtaaacttttgagatttcatttgacatcaatgtggagatgtyaggtaggcatttagatatgaattaygagtttacaggaataatggaaactgtatatgtatttgggaatcatcagtatatgtatgatatataaagccatggaactgggtactagttaacacttagaaaatccttatcacactctaagtactttacctgtacaaactaatttaatccttgcaacaactatatgaagttaccccccattttatgggtgcggaaactgaggcactgtgaggttaagtcactggcctatgtaacacacttaaaagtataggagctcacctaggaaggcagcttggctccatagtccatgttcctgtccattatattacactgggtgagactacctagggggagtgagtgtggactctgaaagaaactgacgtggggcactccagcagctagaagctgaagttgagatgaggaggagggtctaacaatggagactatgagggagtagccagagaggtagtgtgacagtcaggagaggcgggtgtcctgtaagatacgtgaagaaggtatttggagaaggaaggcatgtttggatttgacaagcattgctaagtggtcaagaaagacacaggccaacttgaccattggatttgactgtttgatgatggtcagtaaccttgatgagagtggtttcagtggatttgtgtgcattaaagccagactgggcagggcacagtggctcacacctgtaatcctagcactttgggaggccgaggcaggcacatcacctgagatcaggagttcaagaccagcctggccaacatgctgaaaccccttctytactaaaatctaaaaattagccgggatgatggcaggtgcctgtaatcccagctgctcgggaggttgagatgggagaatcgcttgaacccaggagatggtggttgcagtgagccaaggtcgcatcattgcactccagcctggggggctgagcaagactccgtctcgg

SEQ ID NO: 177 - DNA, 2336 bp, Homo sapiens
aagggccctggatccccttgccccgtcgcgccgtcgtccccccgctatccggttttgtgatggccgcgccgtggctgcctccctagagtccctcagsgccctttaaataccgcgttgggggggacrctggggctgggggggtttgttgggctggtgagttttcgaggtgactgtgctgtgctcggtgaggggacgcccagagagccctgacccggggtcactccgtcgccgttctcctcttgtctacgtgctggacccggtgctacctttttacccacacttaagtgacgcaaaatgcccttcaatggcgagaagcagtgtgtgggagaggaccagccaagcgattctgattcttyccggttttccgaaagcatggcttcgctcagtgactatgaatgctccaggcagagctttrcaagtgactcctccagcaaatccagctctcctgcttcaacaagccctccaagggttgtaacatttgatgaagtgatggctacagcaaggaacttatcaaacttgactcttgctcatgagattkctgtaaatgagaactttcaattgaaacaagaggctctcccagaaaagagtttggctggtcgagtgaagcacattgttcaccaggccttctgggacgtcttggattcagaactaaatgctgaccctcctgagtttgaacatgccatcaaactgtttgaagaaatcagagagattcttctctcttttctcactcccggtggcaaccggcttcgcaaccaaatctgtgaagttttggacacagacctcattaggcagcaggctgagcacagtgctgttgacatccaaggcctggccaactatgtcatcagtacgatgggaaagctgtgtgctcccgtgcgagataatgatatcagagagttaaaggctactggcaacatcgtggaggtgctgagacaaatattccatgtcctggacctcatgcaaatggacatggccaattttacaattatgagtctcagaccgcaccttcaacgccagttggtggaatatgagagaaccaagttccaggaaattttggaagaaactccaagtgctcttgatcagactacagaatggataaaagaatctgtaaatgaagaattattttctctttctgagagtgctttaactcctggggccgaaaatacctccaagccaagcctgagccctactttggtgctaaataatagttacttgaaactgttacagtgggattatcagaaaaaagaattaccagagacacttatgacagatggagcacgtcttcaggaactaacagaaaagctgaatcaattgaaaattattgcctgcctgtccctaattaccaacaacatggtgggtgctattacaggaggcctgcctgagcttgcaagcaggttaacaaggatttcagctgttctacttgaaggcatgaacaaagagacctttaacttgaaggaagtcctgaattctattggtattcagacttgtgttgaggttaacaagaccctgatggaaagaggtttacccactttaaatgctgagattcaagctaatcttataggtcaattttcaagcattgaagaggaggacaatcctatctggtccttgattgataaacgaattaagctttacatgagaaggctactttgtcttccaagccctcaaaaatgcatgcctcctatgccaggaggcctagctgtcattcagcaggagctagaagccctaggctctcaatatgcaaacattgtgaatctcaacaaacaagtgtatggaccattttatgcaaatatacttcgaaagctgctcttcaatgaggaagccatggggaaggtagatgcttcacctcctactaactaaagaagaactgacattggacgagagattggaaatccagtactttggtatccagtccacttccattgatggcattagagatccagcacattctcagtactgtggtgcagtattagcccaaatctgtgtaatgggtaatattagcattacagaagacacacacatcacatagaccctcagaagacgtaaacrtcacatagaccctatttgtgcatcattttcaagtttaaaacaratatttgtaatgaacagaaaacaatttgtaattaattatattacctatataatacttgtaaatgttttcttaaccatttatatttggcttatgacatttaacccctaaggagttgtttttctcacttgttattatcaaacctaatggkttttaattttggtacaactccttaaagggttgaaggttgtracaataactgagggaactgatgttctgaataaatgatgtgaagtaaacacaattgtatttg

SEQ ID NO: 178 - DNA, 2816 bp, Homo sapiens
gggtgaggtcgtgcagactgctgctgcgtccccttgccgggacctttggttaaggggaagaggtggagaaaagccgattgggcctgggctcgaacgctgaaccctcaggtgttgcttgtgcttcccaaagctgctactgtaggtggcaccactgggggtaatagcaatgatttgaggtggcatatggatgaacatagttacttgttttcgttactattaagaaaatctgttccattaagtaagcagtttcacaatgatagagtttccttttaaaataaatatatttaaatgcaaaaatctagtcaagatagagacgcggttactaaattatagtaaaggtaaggagggagacgtagaaatagtcatgaagagtggcactcaaacgacttaagtttgggaaatcttagatggttgtcctgctaccttaactgtgaagaaactggacaagttgtccttgtccccagtgggtgtctcagcacccatggtcaccagcccagtcagggactttgctcttcttacctgccaacggataatgagttaatctcagtggttcccacttgaggaggctccctgccgtggtccttttcctctcttctctagggatttcatgcatcaccctgacagccagtggaagttgcctgatttgaagaggcccagggccgaagatacccagtcatgtgtggaagcagcttcaatgccattttgtgagaggttgagggccccagagggggaagcacaggtgctacctttttacccacacttaagtgacgcaaaatgcccttcaatggcgagaagcagtgtgtgggagaggaccagccaagcgattctgattcttyccggttttccgaaagcatggcttcgctcagtgactatgaatgctccaggcagagctttrcaagtgactcctccagcaaatccagctctcctgcttcaacaagccctccaagggttgtaacatttgatgaagtgatggctacagcaaggaacttatcaaacttgactcttgctcatgagattkctgtaaatgagaactttcaattgaaacaagaggctctcccagaaaagagtttggctggtcgagtgaagcacattgttcaccaggccttctgggacgtcttggattcagaactaaatgctgaccctcctgagtttgaacatgccatcaaactgtttgaagaaatcagagagattcttctctcttttctcactcccggtggcaaccggcttcgcaaccaaatctgtgaagttttggacacagacctcattaggcagcaggctgagcacagtgctgttgacatccaaggcctggccaactatgtcatcagtacgatgggaaagctgtgtgctcccgtgcgagataatgatatcagagagttaaaggctactggcaacatcgtggaggtgctgagacaaatattccatgtcctggacctcatgcaaatggacatggccaattttacaattatgagtctcagaccgcaccttcaacgccagttggtggaatatgagagaaccaagttccaggaaattttggaagaaactccaagtgctcttgatcagactacagaatggataaaagaatctgtaaatgaagaattattttctctttctgagagtgctttaactcctggggccgaaaatacctccaagccaagcctgagccctactttggtgctaaataatagttacttgaaactgttacagtgggattatcagaaaaaagaattaccagagacacttatgacagatggagcacgtcttcaggaactaacagaaaagctgaatcaattgaaaattattgcctgcctgtccctaattaccaacaacatggtgggtgctattacaggaggcctgcctgagcttgcaagcaggttaacaaggatttcagctgttctacttgaaggcatgaacaaagagacctttaacttgaaggaagtcctgaattctattggtattcagacttgtgttgaggttaacaagaccctgatggaaagaggtttacccactttaaatgctgagattcaagctaatcttataggtcaattttcaagcattgaagaggaggacaatcctatctggtccttgattgataaacgaattaagctttacatgagaaggctactttgtcttccaagccctcaaaaatgcatgcctcctatgccaggaggcctagctgtcattcagcaggagctagaagccctaggctctcaatatgcaaacattgtgaatctcaacaaacaagtgtatggaccattttatgcaaatatacttcgaaagctgctcttcaatgaggaagccatggggaaggtagatgcttcacctcctactaactaaagaagaactgacattggacgagagattggaaatccagtactttggtatccagtccacttccattgatggcattagagatccagcacattctcagtactgtggtgcagtattagcccaaatctgtgtaatgggtaatattagcattacagaagacacacacatcacatagaccctcagaagacgtaaacrtcacatagaccctatttgtgcatcattttcaagtttaaaacaratatttgtaatgaacagaaaacaatttgtaattaattatattacctatataatacttgtaaatgttttcttaaccatttatatttggcttatgacatttaacccctaaggagttgtttttctcacttgttattatcaaacctaatggkttttaattttggtacaactccttaaagggttgaaggttgtracaataactgagggaactgatgttctgaataaatgatgtgaagtaaacacaattgtatttg

SEQ ID NO: 179 - DNA, 2533 bp, Homo sapiens
tggcactcaaacgacttaagtttgggaaatcttagatggttgtcctgctaccttaactgtgaagaaactggacaagttgtccttgtccccagtgggtgtctcagcacccatggtcaccagcccagtcagggactttgctcttcttacctgccaacggataatgagttaatctcagtggttcccacttgaggaggctccctgccgtggtccttttcctctcttctctagggatttcatgcatcaccctgacagccagtggaagttgcctgatttgaagaggcccagggccgaagatacccagtcatgtgtggaagcagcttcaatgccattttgtgagaggttgagggccccagagggggaagcacagtgacctgctatcgtgttggaggctttgcttggagtcatcttcagtcttttctgttgactttacctttgaccagtgattaaatcctccaggtgctacctttttacccacacttaagtgacgcaaaatgcccttcaatggcgagaagcagtgtgtgggagaggaccagccaagcgattctgattcttyccggttttccgaaagcatggcttcgctcagtgactatgaatgctccaggcagagctttrcaagtgactcctccagcaaatccagctctcctgcttcaacaagccctccaagggttgtaacatttgatgaagtgatggctacagcaaggaacttatcaaacttgactcttgctcatgagattkctgtaaatgagaactttcaattgaaacaagaggctctcccagaaaagagtttggctggtcgagtgaagcacattgttcaccaggccttctgggacgtcttggattcagaactaaatgctgaccctcctgagtttgaacatgccatcaaactgtttgaagaaatcagagagattcttctctcttttctcactcccggtggcaaccggcttcgcaaccaaatctgtgaagttttggacacagacctcattaggcagcaggctgagcacagtgctgttgacatccaaggcctggccaactatgtcatcagtacgatgggaaagctgtgtgctcccgtgcgagataatgatatcagagagttaaaggctactggcaacatcgtggaggtgctgagacaaatattccatgtcctggacctcatgcaaatggacatggccaattttacaattatgagtctcagaccgcaccttcaacgccagttggtggaatatgagagaaccaagttccaggaaattttggaagaaactccaagtgctcttgatcagactacagaatggataaaagaatctgtaaatgaagaattattttctctttctgagagtgctttaactcctggggccgaaaatacctccaagccaagcctgagccctactttggtgctaaataatagttacttgaaactgttacagtgggattatcagaaaaaagaattaccagagacacttatgacagatggagcacgtcttcaggaactaacagaaaagctgaatcaattgaaaattattgcctgcctgtccctaattaccaacaacatggtgggtgctattacaggaggcctgcctgagcttgcaagcaggttaacaaggatttcagctgttctacttgaaggcatgaacaaagagacctttaacttgaaggaagtcctgaattctattggtattcagacttgtgttgaggttaacaagaccctgatggaaagaggtttacccactttaaatgctgagattcaagctaatcttataggtcaattttcaagcattgaagaggaggacaatcctatctggtccttgattgataaacgaattaagctttacatgagaaggctactttgtcttccaagccctcaaaaatgcatgcctcctatgccaggaggcctagctgtcattcagcaggagctagaagccctaggctctcaatatgcaaacattgtgaatctcaacaaacaagtgtatggaccattttatgcaaatatacttcgaaagctgctcttcaatgaggaagccatggggaaggtagatgcttcacctcctactaactaaagaagaactgacattggacgagagattggaaatccagtactttggtatccagtccacttccattgatggcattagagatccagcacattctcagtactgtggtgcagtattagcccaaatctgtgtaatgggtaatattagcattacagaagacacacacatcacatagaccctcagaagacgtaaacrtcacatagaccctatttgtgcatcattttcaagtttaaaacaratatttgtaatgaacagaaaacaatttgtaattaattatattacctatataatacttgtaaatgttttcttaaccatttatatttggcttatgacatttaacccctaaggagttgtttttctcacttgttattatcaaacctaatggkttttaattttggtacaactccttaaagggttgaaggttgtracaataactgagggaactgatgttctgaataaatgatgtgaagtaaacacaattgtatttg

SEQ ID NO: 180 - DNA, 2317 bp, Homo sapiens
ttttcgaggtgactgtgctgtgctcggtgaggggacgcccagagagccctgacccggggtcactccgtcgccgttctcctcttgtctacgtgctggacccgggatttcatgcatcaccctgacagccagtggaagttgcctgatttgaagaggcccagggccgaagatacccagtcatgtgtggaagcagcttcaatgccattttgtgagaggttgagggccccagagggggaagcacaggtgctacctttttacccacacttaagtgacgcaaaatgcccttcaatggcgagaagcagtgtgtgggagaggaccagccaagcgattctgattcttyccggttttccgaaagcatggcttcgctcagtgactatgaatgctccaggcagagctttrcaagtgactcctccagcaaatccagctctcctgcttcaacaagccctccaagggttgtaacatttgatgaagtgatggctacagcaaggaacttatcaaacttgactcttgctcatgagattkctgtaaatgagaactttcaattgaaacaagaggctctcccagaaaagagtttggctggtcgagtgaagcacattgttcaccaggccttctgggacgtcttggattcagaactaaatgctgaccctcctgagtttgaacatgccatcaaactgtttgaagaaatcagagagattcttctctcttttctcactcccggtggcaaccggcttcgcaaccaaatctgtgaagttttggacacagacctcattaggcagcaggctgagcacagtgctgttgacatccaaggcctggccaactatgtcatcagtacgatgggaaagctgtgtgctcccgtgcgagataatgatatcagagagttaaaggctactggcaacatcgtggaggtgctgagacaaatattccatgtcctggacctcatgcaaatggacatggccaattttacaattatgagtctcagaccgcaccttcaacgccagttggtggaatatgagagaaccaagttccaggaaattttggaagaaactccaagtgctcttgatcagactacagaatggataaaagaatctgtaaatgaagaattattttctctttctgagagtgctttaactcctggggccgaaaatacctccaagccaagcctgagccctactttggtgctaaataatagttacttgaaactgttacagtgggattatcagaaaaaagaattaccagagacacttatgacagatggagcacgtcttcaggaactaacagaaaagctgaatcaattgaaaattattgcctgcctgtccctaattaccaacaacatggtgggtgctattacaggaggcctgcctgagcttgcaagcaggttaacaaggatttcagctgttctacttgaaggcatgaacaaagagacctttaacttgaaggaagtcctgaattctattggtattcagacttgtgttgaggttaacaagaccctgatggaaagaggtttacccactttaaatgctgagattcaagctaatcttataggtcaattttcaagcattgaagaggaggacaatcctatctggtccttgattgataaacgaattaagctttacatgagaaggctactttgtcttccaagccctcaaaaatgcatgcctcctatgccaggaggcctagctgtcattcagcaggagctagaagccctaggctctcaatatgcaaacattgtgaatctcaacaaacaagtgtatggaccattttatgcaaatatacttcgaaagctgctcttcaatgaggaagccatggggaaggtagatgcttcacctcctactaactaaagaagaactgacattggacgagagattggaaatccagtactttggtatccagtccacttccattgatggcattagagatccagcacattctcagtactgtggtgcagtattagcccaaatctgtgtaatgggtaatattagcattacagaagacacacacatcacatagaccctcagaagacgtaaacrtcacatagaccctatttgtgcatcattttcaagtttaaaacaratatttgtaatgaacagaaaacaatttgtaattaattatattacctatataatacttgtaaatgttttcttaaccatttatatttggcttatgacatttaacccctaaggagttgtttttctcacttgttattatcaaacctaatggkttttaattttggtacaactccttaaagggttgaaggttgtracaataactgagggaactgatgttctgaataaatgatgtgaagtaaacacaattgtatttg

SEQ ID NO: 181 - DNA, 1395 bp, Homo sapiens
gaagggccaaatccatcgtggactaactctgtgggtagagctcagatgacctagggagaaatataagatgtaacttaagctaaatgtaatctatttataaagcaagagactctcatctatttttatgaaaggaagggttttttaatctagggtaggcagttgtggtagcccagcattttcctgtggacgagacatggtgcatgttgttgctggattgaatggaacccattcctgtccccyggcctcgtcttctgtcctcacttttggtcatccacacccatgagcagcttcagcagagtgtaggtcccacttcaccccattctcctctcctctgacccctcagctccttggaagtcttggggtggggatctgagggggtgggtgggctgcaggaaattcagaaatgtggtgggtgggggaagggacaaggcgcattagggagggaacaagctgggctctggggataggctctgattaattagttactctgactctggtctgccgagatccatttccaacccagttgcgttgggagagggttgggaggcagcagagcatgggtracagtgggagcacacgacttccttggagcctgggcctttgcgggtcccaggtggtcaggcagctggagcaraagtggaaatggcttaagatgctcatagcccagccccggctgtgtctactccaggccaagcctgggctgcagtccttgctatgttccccccagggccctgrggggagggatcagggtgctgggggtttcctaggacaggggtcttcccccttgagacaccaagctctggctctagaagagctctctcctggagtggggagtctggaggggactgggtgggtgcaggtaaagccagattctctctggaagggaattttctakgaatggatgatttccaggctcagggtgggctgtgtgttagttctgagcaaatccctcaccaagacccttccctcccaagccctcaaagaaatgaggcaaagcccttccctgcaagaccccttgtggaygtttttgcatctacctgatttttagccccacccagggagactttataccccatgatcctgccccaccgttgctgttgtctgccagctgggtctagcatcacagggaagggggggatttatactcayggaaagactactgatcctaccggaaaccaacctgtttactgtactgttgtaaatatcatgccctttatatcctgtatattggcttcttttaaataaagtgaaatgtcttagaactgatggtgcttttttttgtttttgtttttaaacagaagatgaatctggtgttgggggaggggtaggaggacggaaggccacagaaaccctcaaactcattagttaattagccataaaataggggatttcata

SEQ ID NO: 182 - DNA, 3733 bp, Homo sapiens
cgcgcccgggctcctgcaggcggggcgctgtgcgcgccgcgatccggtacgtgggcctccgggctgtcccctctgggggcggcgatcctccctccggagccccccttcaaccctcccggaagtgagyatttgcaggaccagggatgctgtgctgctctcccatgagccagtcaccgagtcggtctgctgmagccctttctgaacctctggccgtctggatgctccactgtgcttgccaagatgaagtgcgtcttggtggccactgasggcgcagaggtcctcttctactggacagatcaggagtttgaagagagtctccggctgaagttcgggcagtcagagaatgaggaagaagagctccctgccctggaggaccagctcagcaccctcctagccccggtcatcatctcctccatgacgatgctggagaagctctcggacacctacacctgcttctccacggaaaatggcaacttcctgtatgtccttcacctggctgcggcccccagacctggcgcagcgtgtccagctgtgggagcacttccagagcctgctgtggacctacagccgcctgcgggagcaggagcagtgcttcgccgtggaggtgactactgggcgcgggagtcctcaggacttgaagctgtcagccacagtgccagctccctgcgcccggccgacctgcttgccctcatccycctggttcaggacctctaccccagcragagcacagcagaggacgacattcagccttccccgcggagggcccggagcagccagaacatccccgtgcagcaggcctggagccctcactccacgggcccaactkgggggagctctgcagagacggagacagacagcttctccctccctgaggagtacttcacaccagctccttcccctggcgatcagagctcaggtagcaccatctggctggaggggggcaccccccccatggatgcccttcagatagcagaggacaccctccaaacactggttccccactgccctgtgccttccggccccagaaggatcttcctggatgccaacgtgaaggaaagctactgccccctagtgccccacaccatgtactgcctgcccctgtggcagggcatcaacctggtgctcctgaccaggagccccagcgcgcccctggccctggttctgtcccagctgatggatggcttctccatgctggagaagaagctgaaggaagggccggagcccggggcctccctgcgctcccagcccctcgtgggagacctgcgccagaggatggacaagtttgtcaagaatcgaggggcacaggagattcagagcacctggctggagtttaaggccaaggctttctccaaaagtgagcccggatcctcctgggagctgctccaggcatgtgggaagctgaagcggcagctctgcgccatctaccggctgaactttctgaccacagcccscagcaggggaggcccacacctgccccagcacctgcaggaccaagtgcagaggctcatgcgggagaagctgacggactggaaggacttcttgctggtgaagagcaggaggaacatcaccatgaccttcacctacctagaagacttcccaggcttggtgcacttcatctatgtggaccgcaccactgggcagatggtggcgccttccctcaactgcagtcaaaagacctcgtcggagttgggcaaggggccgctggctgcctttgtcaaaactaaggtctggtctctgatccagctggcgcgcagatacctgcagaagggctacaccacgctgctgttccrggagggggatttctactgctcctacttcctgtggttcgagaatgacatggggtacaaactccagatgatcgaggtgcccgtcctctccgacgactcagtgcctatcggcatgctgggaggagactactacaggaagctcctgcgctactacagcaagaaccgcccaaccgaggctgtcaggtgctackagctgctggccctgcacctgtctgtcatccccactgacctgctggtgcagcaggccggccagctggccyggcgcctctgggaggcctcccgtatccccctgctctaggccaaggtggccgcagtctgcctttgcatcctgtcctccagccacccttgcttgccactgttccccatgacgagagcctcctgtctgcagtggccatcctgaggatagggcagagtgcccagggtggccccagggcttctaaaaccccacctagaccaccctccatgtcaggtactgagcaaggccccagatccttctctctggaggaagagggaagcccaggggtcctgtttgtaaaacaacggtggcaacagctcctcttmcagagctgyctctgcctttatcctgggagatggggaggaagccccatctctgctgttcccygcgtggaggaagcccacccagcaagctctctcctaccccaggtaaaaggtgctcctttgcctgggtttgaattccagcgctgccacttcctctctgcacctcctggcaagtttcttctattccccacrtttaaagcgatggcacctccrtcccagggtggtgtgaggattacccagtgtggtaggtgctcaataaatgttggtcattgttatcactgaagcccaacatgctagtgcttctagacccttctgtcagtgctgataagcccttgctaagtcccagccccttcatgcttggctggcgtctgccctagggctggggttctcaagcccctggccctggcccagagatttggattcccttggcggcygtggagcccagsctttgatgtctttcaaagcttctgtggtgcgccctggattgagaaccaccacccgaggggtacagcccctctcttccaaccgagaagttcctgtcccagaatggacccagggacaagagaccctgagagccctgggactgggagtgtctgctcctctgaggccaggaggccggtgctgggccagagaggacggcgtggcgaaagtcagcgtccactgcagcacaggatcagatggccgtgtgctgtgcrtgcaggagcctcgccttctgtgtcttyagtcttgagccaaaatttgctcaaagactgatctcttccttgcagggaacagctttggggctgggggaactagaacccacatgttggtctaaaccctgagaaggtggcagtgaggaagtatcccctcaggtgactggatctgtgttcctccttaacatcatctgatggaatggcaatgaaaagcrtggattgtggaaaatacagaaaaacataaaggaaaaaactccaatccycygagcccaccactgttcaggacccctgcttttgtcacctactatttccctttagtttttagcagcggctggatgtgatatgtctagtttaaccagtccccttgatctttctatataataaataacacaggagtgaacatcctgaatcagatcttagcagagatgctcacatgcggggtaactgtccatggtgtgtggaggggtcctcggaaccccctcttaggatcatctccacatactctcccagttctgagattcgttaccaatagcaggtttccgtcacactgcgatatcagagcagtgcaggaactctccgctccaaggggttttttcctcctaggggaacactctgctaagtaatgggcagagaacaaaggggctcctaattcaaggcaggcctaagggagggtcagaaagaactttagctggaggt

SEQ ID NO: 183 - DNA, 3982 bp, Homo sapiens
cgcgcccgggctcctgcaggcggggcgctgtgcgcgccgcgatccggtacgtgggcctccgggctgtcccctctgggggcggcgatcctccctccggagccccccttcaaccctcccggaagtgaggaccagggatgctgtgctgctctcccatgagccagtcaccgagtcggtctgctgmagccctttctgaacctctggccgtctggatgctccactgtgcttgccaagatgaagtgcgtcttggtggccactgasggcgcagaggtcctcttctactggacagatcaggagtttgaagagagtctccggctgaagttcgggcagtcagagaatgaggaagaagagctccctgccctggaggaccagctcagcaccctcctagccccggtcatcatctcctccatgacgatgctggagaagctctcggacacctacacctgcttctccacggaaaatggcaacttcctgtatgtccttcacctgtttggagaatgcctgttcattgccatcaatggtgaccacaccgasagcgagggggacctgcggcggaagctgtatgtgctcaagtacctgtttgaagtgcactttgggctggtgactgtggacggtcatcttatcygaaagagctgcggcccccagacctggcgcagcgtgtccagctgtgggagcacttccagagcctgctgtggacctacagccgcctgcgggagcaggagcagtgcttcgccgtggaggccctggagcgactgattcacccccagctctgtgagctgtgcatagaggygctggagcggcacgtcatccaggctgtcaacaccagccccgagcggggaggcgaggaggccctgcatgccttcctgctygtgcactccaagctgctggcattctactctagccacagtgccagctccctgcgcccggccgacctgcttgccctcatccycctggttcaggacctctaccccagcragagcacagcagaggacgacattcagccttccccgcggagggcccggagcagccagaacatccccgtgcagcaggcctggagccctcactccacgggcccaactkgggggagctctgcagagacggagacagacagcttctccctccctgaggagtacttcacaccagctccttcccctggcgatcagagctcaggtagcaccatctggctggaggggggcaccccccccatggatgcccttcagatagcagaggacaccctccaaacactggttccccactgccctgtgccttccggccccagaaggatcttcctggatgccaacgtgaaggaaagctactgccccctagtgccccacaccatgtactgcctgcccctgtggcagggcatcaacctggtgctcctgaccaggagccccagcgcgcccctggccctggttctgtcccagctgatggatggcttctccatgctggagaagaagctgaaggaagggccggagcccggggcctccctgcgctcccagcccctcgtgggagacctgcgccagaggatggacaagtttgtcaagaatcgaggggcacaggagattcagagcacctggctggagtttaaggccaaggctttctccaaaagtgagcccggatcctcctgggagctgctccaggcatgtgggaagctgaagcggcagctctgcgccatctaccggctgaactttctgaccacagcccscagcaggggaggcccacacctgccccagcacctgcaggaccaagtgcagaggctcatgcgggagaagctgacggactggaaggacttcttgctggtgaagagcaggaggaacatcaccatgcttcacctacctagaagacttcccaggcttggtgcacttcatctatgtggaccgcaccactgggcagatggtggcgccttccctcaactgcagtcaaaagacctcgtcggagttgggcaaggggccgctggctgcctttgtcaaaactaaggtctggtctctgatccagctggcgcgcagatacctgcagaagggctacaccacgctgctgttccrggagggggatttctactgctcctacttcctgtggttcgagaatgacatggggtacaaactccagatgatcgaggtgcccgtcctctccgacgactcagtgcctatcggcatgctgggaggagactactacaggaagctcctgcgctactacagcaagaaccgcccaaccgaggctgtcaggtgctacgkgctgctggccctgcacctgtctgtcatccccactgacctgctggtgcagcaggccggccagctggccyggcgcctctgggaggcctcccgtatccccctgctctaggccaaggtggccgcagtctgcctttgcatcctgtcctccagccacccttgcttgccactgttccccatgacgagagcctcctgtctgcagtggccatcctgaggatagggcagagtgcccagggtggccccagggcttctaaaaccccacctagaccaccctccatgtcaggtactgagcaaggccccagatccttctctctggaggaagagggaagcccaggggtcctgtttgtaaaacaacggtggcaacagctcctcttmcagagctgyctctgcctttatcctgggagatggggaggaagccccatctctgctgttcccygcgtggaggaagcccacccagcaagctctctcctaccccaggtaaaaggtgctcctttgcctgggtttgaattccagcgctgccacttcctctctgcacctcctggcaagtttcttctattccccacrtttaaagcgatggcacctccrtcccagggtggtgtgaggattacccagtgtggtaggtgctcaataaatgttggtcattgttatcactgaagcccaacatgctagtgcttctagacccttctgtcagtgctgataagcccttgctaagtcccagccccttcatgcttggctggcgtctgccctagggctggggttctcaagcccctggccctggcccagagatttggattcccttggcggcygtggagcccagsctttgatgtctttcaaagcttctgtggtgcgccctggattgagaaccaccacccgaggggtacagcccctctcttccaaccgagaagttcctgtcccagaatggacccagggacaagagaccctgagagccctgggactgggagtgtctgctcctctgaggccaggaggccggtgctgggccagagaggacggcgtggcgaaagtcagcgtccactgcagcacaggatcagatggccgtgtgctgtgcrtgcaggagcctcgccttctgtgtcttyagtcttgagccaaaatttgctcaaagactgatctcttccttgcagggaacagctttggggctgggggaactagaacccacatgttggtctaaaccctgagaaggtggcagtgaggaagtatcccctcaggtgactggatctgtgttcctccttaacatcatctgatggaatggcaatgaaaagcrtggattgtggaaaatacagaaaaacataaaggaaaaaactccaatccycygagcccaccactgttcaggacccctgcttttgtcacctactatttccctttagtttttagcagcggctggatgtgatatgtctagtttaaccagtccccttgatctttctatataataaataacacaggagtgaacatcctgaatcagatcttagcagagatgctcacatgcggggtaactgtccatggtgtgtggaggggtcctcggaaccccctcttaggatcatctccacatactctcccagttctgagattcgttaccaatagcaggtttccgtcacactgcgatatcagagcagtgcaggaactctccgctccaaggggttttttcctcctaggggaacactctgctaagtaatgggcagagaacaaaggggctcctaattcaaggcaggcctaagggagggtcagaaagaactttagctggaggt

SEQ ID NO: 184 - DNA, 1526 bp, Homo sapiens
cggaagcgcgcccgggctcctgcaggcggggcgctgtgcgcgccgcgatccggaccagggatgctgtgctgctctcccatgagccagtcaccgagtcggtctgctgmagccctttctgaacctctggccgtctggatgctccactgtgcttgccaagatgaagtgcgtcttggtggccactgasggcgcagaggtcctcttctactggacagatcaggagtttgaagagagtctccggctgaagttcgggcagtcagagaatgaggaagaagagctccctgccctggaggaccagctcagcaccctcctagccccggtcatcatctcctccatgacgatgctggagaagctctcggacacctacacctgcttctccacggaaaatggcaacttcctgtatgtccttcacctgtttggagaatgcctgttcattgccatcaatggtgaccacaccgasagcgagggggacctgcggcggaagctgtatgtgctcaagtacctgtttgaagtgcactttgggctggtgactgtggacggtcatcttatcygaaagagctgcggcccccagacctggcgcagcgtgtccagctgtgggagcacttccagagcctgctgtggacctacagccgcctgcgggagcaggagcagtgcttcgccgtggaggccctggagcgactgattcacccccagctctgtgagctgtgcatagaggygctggagcggcacgtcatccaggctgtcaacaccagccccgagcggggaggcgaggaggccctgcatgccttcctgctygtgcactccaagctgctggcattctactctagccacagtgccagctccctgcgcccggccgacctgcttgccctcatccycctggttcaggacctctaccccagcragagcacagcagaggacgacattcagccttccccgcggagggcccggagcagccagaacatccccgtgcagcaggcctggagccctcactccacgggcccaactkgggggagctctgcagagacggagacagacagcttctccctccctgaggagtacttcacaccagctccttcccctggcgatcagagctcaggtgaggaccggaggaaagcaggaggaaacaatagctagctgcgagcgacaggcagcccaggacatctgtcttaggctycagtggaccyccgtgcctcctaaggcttgagtgcaggtacccgtgttcctagagcacaggacgctgtctgcggctccccatcttccctgccagctccagcctgaactcaaggaytgttaagaccactccactgatccctaaagctgttgatgacaagttgattcatttaaaacttstgtacatgcattctcagactcatcttttttgtaattaaaattaaaaattaagttaaatttagtaataatcatctaatttctatacattctaaaatatattcagcatctgtagtttatactttgtttctccaaagtatgtgggtaaacaataaaaaaaaactatraatattcaaaatggt

SEQ ID NO: 185 - DNA, 2973 bp, Homo sapiens
cggaagcgcgcccgggctcctgcaggcggggcgctgtgcgcgccgcgatccggaccagggatgctgtgctgctctcccatgagccagtcaccgagtcggtctgctgmagccctttctgaacctctggccgtctggatgctccactgtgcttgccaagatgaagtgcgtcttggtggccactgasggcgcagaggtcctcttctactggacagatcaggagtttgaagagagtctccggctgaagttcgggcagtcagagaatgaggaagaagagctccctgccctggaggaccagctcagcaccctcctagccccggtcatcatctcctccatgacgatgctggagaagctctcggacacctacacctgcttctccacggaaaatggcaacttcctgtatgtccttcacctgtttggagaatgcctgttcattgccatcaatggtgaccacaccgasagcgagggggacctgcggcggaagctgtatgtgctcaagtacctgtttgaagtgcactttgggctggtgactgtggacggtcatcttatcygaaagagctgcggcccccagacctggcgcagcgtgtccagctgtgggagcacttccagagcctgctgtggacctacagccgcctgcgggagcaggagcagtgcttcgccgtggaggccctggagcgactgattcacccccagctctgtgagctgtgcatagaggygctggagcggcacgtcatccaggctgtcaacaccagccccgagcggggaggcgaggaggccctgcatgccttcctgctygtgcactccaagctgctggcattctactctagccacagtgccagctccctgcgcccggccgacctgcttgccctcatccycctggttcaggacctctaccccagcragagcacagcagaggacgacattcagccttccccgcggagggcccggagcagccagaacatccccgtgcagcaggcctggagccctcactccacgggcccaactkgggggagctctgcagagacggagacagacagcttctccctccctgaggagtacttcacaccagctccttcccctggcgatcagagctcaggtagcaccatctggctggaggggggcaccccccccatggatgcccttcagatagcagaggacaccctccaaacactggttccccactgccctgtgccttccggccccagaaggatcttcctggatgccaacgtgaaggaaagctactgccccctagtgccccacaccatgtactgcctgcccctgtggcagggcatcaacctggtgctcctgaccaggagccccagcgcgcccctggccctggttctgtcccagctgatggatggcttctccatgctggagaagaagctgaaggaagggccggagcccggggcctccctgcgctcccagcccctcgtgggagacctgcgccagaggatggacaagtttgtcaagaatcgaggggcacaggagattcagagcacctggctggagtttaaggccaaggctttctccaaaagtgagcccggatcctcctgggagctgctccaggcatgtgggaagctgaagcggcagctctgcgccatctaccggctgaactttctgaccacagcccscagcaggggaggcccacacctgccccagcacctgcaggaccaagtgcagaggctcatgcgggagaagctgacggactggaaggacttcttgctggtgaagagcaggaggaacatcaccatgaccttcacctacctagaagacttcccaggcttggtgcacttcatctatgtggaccgcaccactgggcagatggtggcgccttccctcaactgcagtcaaaagacctcgtcggagttgggcaaggggccgctggctgcctttgtcaaaactaaggtctggtctctgatccagctggcgcgcagatacctgcagaagggctacaccacgctgctgttccrggagggggatttctactgctcctacttcctgtggttcgagaatgacatggggtacaaactccagatgatcgaggtgcccgtcctctccgacgactcagtgcctatcggcatgctgggaggagactactacaggaagctcctgcgctactacagcaagaaccgcccaaccgaggctgtcaggtgctacgkgctgctggccctgcacctgtctgtcatccccactgacctgctggtgcagcaggccggccagctggccyggcgcctctgggaggcctcccgtatccccctgctctaggccaaggtggccgcagtctgcctttgcatcctgtcctccagccacccttgcttgccactgttccccatgacgagagcctcctgtctgcagtggccatcctgaggatagggcagagtgcccagggtggccccagggcttctaaaaccccacctagaccaccctccatgtcaggtactgagcaaggccccagatccttctctctggaggaagagggaagcccaggggtcctgtttgtaaaacaacggtggcaacagctcctcttmcagagctgyctctgcctttatcctgggagatggggaggaagccccatctctgctgttcccygcgtggaggaagcccacccagcaagctctctcctaccccaggtaaaaggtgctcctttgcctgggtttgaattccagcgctgccacttcctctctgcacctcctggcaagtttcttctattccccacrtttaaagcgatggcacctccrtcccagggtggtgtgaggattacccagtgtggtaggtgctcggaacagctttggggctgggggaactagaacccacatgttggtctaaaccctgagaaggtggcagtgaggaagtatcccctcaggtgactggatctgtgttcctccttaacatcatctgatggaatggcaatgaaaagcrtggattgtggaaaatacagaaaaacataaaggaaaaaactccaatccycygagccca

SEQ ID NO: 186 - DNA, 3911 bp, Homo sapiens
cgcgcccgggctcctgcaggcggggcgctgtgcgcgccgcgatccgyatttgcaggaccagggatgctgtgctgctctcccatgagccagtcaccgagtcggtctgctgmagccctttctgaacctctggccgtctggatgctccactgtgcttgccaagatgaagtgcgtcttggtggccactgasggcgcagaggtcctcttctactggacagatcaggagtttgaagagagtctccggctgaagttcgggcagtcagagaatgaggaagaagagctccctgccctggaggaccagctcagcaccctcctagccccggtcatcatctcctccatgacgatgctggagaagctctcggacacctacacctgcttctccacggaaaatggcaacttcctgtatgtccttcacctgtttggagaatgcctgttcattgccatcaatggtgaccacaccgasagcgagggggacctgcggcggaagctgtatgtgctcaagtacctgtttgaagtgcactttgggctggtgactgtggacggtcatcttatcygaaagagctgcggcccccagacctggcgcagcgtgtccagctgtgggagcacttccagagcctgctgtggacctacagccgcctgcgggagcaggagcagtgcttcgccgtggaggccctggagcgactgattcacccccagctctgtgagctgtgcatagaggygctggagcggcacgtcatccaggctgtcaacaccagccccgagcggggaggcgaggaggccctgcatgccttcctgctygtgcactccaagctgctggcattctactctagccacagtgccagctccctgcgcccggccgacctgcttgccctcatccycctggttcaggacctctaccccagcragagcacagcagaggacgacattcagccttccccgcggagggcccggagcagccagaacatccccgtgcagcaggcctggagccctcactccacgggcccaactkgggggagctctgcagagacggagacagacagcttctccctccctgaggagtacttcacaccagctccttcccctggcgatcagagctcaggtagcaccatctggctggaggggggcaccccccccatggatgcccttcagatagcagaggacaccctccaaacactggttccccactgccctgtgccttccggccccagaaggatcttcctggatgccaacgtgaaggaaagctactgccccctagtgccccacaccatgtactgcctgcccctgtggcagggcatcaacctggtgctcctgaccaggagccccagcgcgcccctggccctggttctgtcccagctgatggatggcttctccatgctggagaagaagctgaaggaagggccggagcccggggcctccctgcgctcccagcccctcgtgggagacctgcgccagaggatggacaagtttgtcaagaatcgaggggcacaggagattcagagcacctggctggagtttaaggccaaggctttctccaaaagtgagcccggatcctcctgggagctgctccaggcatgtgggaagctgaagcggcagctctgcgccatctaccggctgaactttctgaccacagcccscagcaggggaggcccacacctgccccagcacctgcaggaccaagtgcagaggctcatgcgggagaagctgacggactggaaggacttcttgctggtgaagagcaggaggaacatcaccatgcttcacctacctagaagacttcccaggcttggtgcacttcatctatgtggaccgcaccactgggcagatggtggcgccttccctcaactgcagtcaaaagacctcgtcggagttgggcaaggggccgctggctgcctttgtcaaaactaaggtctggtctctgatccagctggcgcgcagatacctgcagaagggctacaccacgctgctgttccrggagggggatttctactgctcctacttcctgtggttcgagaatgacatggggtacaaactccagatgatcgaggtgcccgtcctctccgacgactcagtgcctatcggcatgctgggaggagactactacaggaagctcctgcgctactacagcaagaaccgcccaaccgaggctgtcaggtgctacgkgctgctggccctgcacctgtctgtcatccccactgacctgctggtgcagcaggccggccagctggccyggcgcctctgggaggcctcccgtatccccctgctctaggccaaggtggccgcagtctgcctttgcatcctgtcctccagccacccttgcttgccactgttccccatgacgagagcctcctgtctgcagtggccatcctgaggatagggcagagtgcccagggtggccccagggcttctaaaaccccacctagaccaccctccatgtcaggtactgagcaaggccccagatccttctctctggaggaagagggaagcccaggggtcctgtttgtaaaacaacggtggcaacagctcctcttmcagagctgyctctgcctttatcctgggagatggggaggaagccccatctctgctgttcccygcgtggaggaagcccacccagcaagctctctcctaccccaggtaaaaggtgctcctttgcctgggtttgaattccagcgctgccacttcctctctgcacctcctggcaagtttcttctattccccacrtttaaagcgatggcacctccrtcccagggtggtgtgaggattacccagtgtggtaggtgctcaataaatgttggtcattgttatcactgaagcccaacatgctagtgcttctagacccttctgtcagtgctgataagcccttgctaagtcccagccccttcatgcttggctggcgtctgccctagggctggggttctcaagcccctggccctggcccagagatttggattcccttggcggcygtggagcccagsctttgatgtctttcaaagcttctgtggtgcgccctggattgagaaccaccacccgaggggtacagcccctctcttccaaccgagaagttcctgtcccagaatggacccagggacaagagaccctgagagccctgggactgggagtgtctgctcctctgaggccaggaggccggtgctgggccagagaggacggcgtggcgaaagtcagcgtccactgcagcacaggatcagatggccgtgtgctgtgcrtgcaggagcctcgccttctgtgtcttyagtcttgagccaaaatttgctcaaagactgatctcttccttgcagggaacagctttggggctgggggaactagaacccacatgttggtctaaaccctgagaaggtggcagtgaggaagtatcccctcaggtgactggatctgtgttcctccttaacatcatctgatggaatggcaatgaaaagcrtggattgtggaaaatacagaaaaacataaaggaaaaaactccaatccycygagcccaccactgttcaggacccctgcttttgtcacctactatttccctttagtttttagcagcggctggatgtgatatgtctagtttaaccagtccccttgatctttctatataataaataacacaggagtgaacatcctgaatcagatcttagcagagatgctcacatgcggggtaactgtccatggtgtgtggaggggtcctcggaaccccctcttaggatcatctccacatactctcccagttctgagattcgttaccaatagcaggtttccgtcacactgcgatatcagagcagtgcaggaactctccgctccaaggggttttttcctcctaggggaacactctgctaagtaatgggcagagaacaaaggggctcctaattcaaggcaggcctaagggagggtcagaaagaactttagctggaggt

SEQ ID NO: 187 - DNA, 3984 bp, Homo sapiens
cgcgcccgggctcctgcaggcggggcgctgtgcgcgccgcgatccggtacgtgggcctccgggctgtcccctctgggggcggcgatcctccctccggagccccccttcaaccctcccggaagtgaggaccagggatgctgtgctgctctcccatgagccagtcaccgagtcggtctgctgmagccctttctgaacctctggccgtctggatgctccactgtgcttgccaagatgaagtgcgtcttggtggccactgasggcgcagaggtcctcttctactggacagatcaggagtttgaagagagtctccggctgaagttcgggcagtcagagaatgaggaagaagagctccctgccctggaggaccagctcagcaccctcctagccccggtcatcatctcctccatgacgatgctggagaagctctcggacacctacacctgcttctccacggaaaatggcaacttcctgtatgtccttcacctgtttggagaatgcctgttcattgccatcaatggtgaccacaccgasagcgagggggacctgcggcggaagctgtatgtgctcaagtacctgtttgaagtgcactttgggctggtgactgtggacggtcatcttatcygaaagagctgcggcccccagacctggcgcagcgtgtccagctgtgggagcacttccagagcctgctgtggacctacagccgcctgcgggagcaggagcagtgcttcgccgtggaggccctggagcgactgattcacccccagctctgtgagctgtgcatagaggygctggagcggcacgtcatccaggctgtcaacaccagccccgagcggggaggcgaggaggccctgcatgccttcctgctygtgcactccaagctgctggcattctactctagccacagtgccagctccctgcgcccggccgacctgcttgccctcatccycctggttcaggacctctaccccagcragagcacagcagaggacgacattcagccttccccgcggagggcccggagcagccagaacatccccgtgcagcaggcctggagccctcactccacgggcccaactkgggggagctctgcagagacggagacagacagcttctccctccctgaggagtacttcacaccagctccttcccctggcgatcagagctcaggtagcaccatctggctggaggggggcaccccccccatggatgcccttcagatagcagaggacaccctccaaacactggttccccactgccctgtgccttccggccccagaaggatcttcctggatgccaacgtgaaggaaagctactgccccctagtgccccacaccatgtactgcctgcccctgtggcagggcatcaacctggtgctcctgaccaggagccccagcgcgcccctggccctggttctgtcccagctgatggatggcttctccatgctggagaagaagctgaaggaagggccggagcccggggcctccctgcgctcccagcccctcgtgggagacctgcgccagaggatggacaagtttgtcaagaatcgaggggcacaggagattcagagcacctggctggagtttaaggccaaggctttctccaaaagtgagcccggatcctcctgggagctgctccaggcatgtgggaagctgaagcggcagctctgcgccatctaccggctgaactttctgaccacagcccscagcaggggaggcccacacctgccccagcacctgcaggaccaagtgcagaggctcatgcgggagaagctgacggactggaaggacttcttgctggtgaagagcaggaggaacatcaccatgaccttcacctacctagaagacttcccaggcttggtgcacttcatctatgtggaccgcaccactgggcagatggtggcgccttccctcaactgcagtcaaaagacctcgtcggagttgggcaaggggccgctggctgcctttgtcaaaactaaggtctggtctctgatccagctggcgcgcagatacctgcagaagggctacaccacgctgctgttccrggagggggatttctactgctcctacttcctgtggttcgagaatgacatggggtacaaactccagatgatcgaggtgcccgtcctctccgacgactcagtgcctatcggcatgctgggaggagactactacaggaagctcctgcgctactacagcaagaaccgcccaaccgaggctgtcaggtgctacgkgctgctggccctgcacctgtctgtcatccccactgacctgctggtgcagcaggccggccagctggccyggcgcctctgggaggcctcccgtatccccctgctctaggccaaggtggccgcagtctgcctttgcatcctgtcctccagccacccttgcttgccactgttccccatgacgagagcctcctgtctgcagtggccatcctgaggatagggcagagtgcccagggtggccccagggcttctaaaaccccacctagaccaccctccatgtcaggtactgagcaaggccccagatccttctctctggaggaagagggaagcccaggggtcctgtttgtaaaacaacggtggcaacagctcctcttmcagagctgyctctgcctttatcctgggagatggggaggaagccccatctctgctgttcccygcgtggaggaagcccacccagcaagctctctcctaccccaggtaaaaggtgctcctttgcctgggtttgaattccagcgctgccacttcctctctgcacctcctggcaagtttcttctattccccacrtttaaagcgatggcacctccrtcccagggtggtgtgaggattacccagtgtggtaggtgctcaataaatgttggtcattgttatcactgaagcccaacatgctagtgcttctagacccttctgtcagtgctgataagcccttgctaagtcccagccccttcatgcttggctggcgtctgccctagggctggggttctcaagcccctggccctggcccagagatttggattcccttggcggcygtggagcccagsctttgatgtctttcaaagcttctgtggtgcgccctggattgagaaccaccacccgaggggtacagcccctctcttccaaccgagaagttcctgtcccagaatggacccagggacaagagaccctgagagccctgggactgggagtgtctgctcctctgaggccaggaggccggtgctgggccagagaggacggcgtggcgaaagtcagcgtccactgcagcacaggatcagatggccgtgtgctgtgcrtgcaggagcctcgccttctgtgtcttyagtcttgagccaaaatttgctcaaagactgatctcttccttgcagggaacagctttggggctgggggaactagaacccacatgttggtctaaaccctgagaaggtggcagtgaggaagtatcccctcaggtgactggatctgtgttcctccttaacatcatctgatggaatggcaatgaaaagcrtggattgtggaaaatacagaaaaacataaaggaaaaaactccaatccycygagcccaccactgttcaggacccctgcttttgtcacctactatttccctttagtttttagcagcggctggatgtgatatgtctagtttaaccagtccccttgatctttctatataataaataacacaggagtgaacatcctgaatcagatcttagcagagatgctcacatgcggggtaactgtccatggtgtgtggaggggtcctcggaaccccctcttaggatcatctccacatactctcccagttctgagattcgttaccaatagcaggtttccgtcacactgcgatatcagagcagtgcaggaactctccgctccaaggggttttttcctcctaggggaacactctgctaagtaatgggcagagaacaaaggggctcctaattcaaggcaggcctaagggagggtcagaaagaactttagctggaggt

SEQ ID NO: 188 - DNA, 2914 bp, Homo sapiens
cggaagcgcgcccgggctcctgcaggcggggcgctgtgcgcgccgcgatccggaccagggatgctgtgctgctctcccatgagccagtcaccgagtcggtctgctgmagccctttctgaacctctggccgtctggatgctccactgtgcttgccaagatgaagtgcgtcttggtggccactgasggcgcagaggtcctcttctactggacagatcaggagtttgaagagagtctccggctgaagttcgggcagtcagagaatgaggaagaagagctccctgccctggaggaccagctcagcaccctcctagccccggtcatcatctcctccatgacgatgctggagaagctctcggacacctacacctgcttctccacggaaaatggcaacttcctgtatgtccttcacctgtttggagaatgcctgttcattgccatcaatggtgaccacaccgasagcgagggggacctgcggcggaagctgtatgtgctcaagctgcggcccccagacctggcgcagcgtgtccagctgtgggagcacttccagagcctgctgtggacctacagccgcctgcgggagcaggagcagtgcttcgccgtggaggccctggagcgactgattcacccccagctctgtgagctgtgcatagaggygctggagcggcacgtcatccaggctgtcaacaccagccccgagcggggaggcgaggaggccctgcatgccttcctgctygtgcactccaagctgctggcattctactctagccacagtgccagctccctgcgcccggccgacctgcttgccctcatccycctggttcaggacctctaccccagcragagcacagcagaggacgacattcagccttccccgcggagggcccggagcagccagaacatccccgtgcagcaggcctggagccctcactccacgggcccaactkgggggagctctgcagagacggagacagacagcttctccctccctgaggagtacttcacaccagctccttcccctggcgatcagagctcaggtagcaccatctggctggaggggggcaccccccccatggatgcccttcagatagcagaggacaccctccaaacactggttccccactgccctgtgccttccggccccagaaggatcttcctggatgccaacgtgaaggaaagctactgccccctagtgccccacaccatgtactgcctgcccctgtggcagggcatcaacctggtgctcctgaccaggagccccagcgcgcccctggccctggttctgtcccagctgatggatggcttctccatgctggagaagaagctgaaggaagggccggagcccggggcctccctgcgctcccagcccctcgtgggagacctgcgccagaggatggacaagtttgtcaagaatcgaggggcacaggagattcagagcacctggctggagtttaaggccaaggctttctccaaaagtgagcccggatcctcctgggagctgctccaggcatgtgggaagctgaagcggcagctctgcgccatctaccggctgaactttctgaccacagcccscagcaggggaggcccacacctgccccagcacctgcaggaccaagtgcagaggctcatgcgggagaagctgacggactggaaggacttcttgctggtgaagagcaggaggaacatcaccatgaccttcacctacctagaagacttcccaggcttggtgcacttcatctatgtggaccgcaccactgggcagatggtggcgccttccctcaactgcagtcaaaagacctcgtcggagttgggcaaggggccgctggctgcctttgtcaaaactaaggtctggtctctgatccagctggcgcgcagatacctgcagaagggctacaccacgctgctgttccrggagggggatttctactgctcctacttcctgtggttcgagaatgacatggggtacaaactccagatgatcgaggtgcccgtcctctccgacgactcagtgcctatcggcatgctgggaggagactactacaggaagctcctgcgctactacagcaagaaccgcccaaccgaggctgtcaggtgctackagctgctggccctgcacctgtctgtcatccccactgacctgctggtgcagcaggccggccagctggccyggcgcctctgggaggcctcccgtatccccctgctctaggccaaggtggccgcagtctgcctttgcatcctgtcctccagccacccttgcttgccactgttccccatgacgagagcctcctgtctgcagtggccatcctgaggatagggcagagtgcccagggtggccccagggcttctaaaaccccacctagaccaccctccatgtcaggtactgagcaaggccccagatccttctctctggaggaagagggaagcccaggggtcctgtttgtaaaacaacggtggcaacagctcctcttmcagagctgyctctgcctttatcctgggagatggggaggaagccccatctctgctgttcccygcgtggaggaagcccacccagcaagctctctcctaccccaggtaaaaggtgctcctttgcctgggtttgaattccagcgctgccacttcctctctgcacctcctggcaagtttcttctattccccacrtttaaagcgatggcacctccrtcccagggtggtgtgaggattacccagtgtggtaggtgctcggaacagctttggggctgggggaactagaacccacatgttggtctaaaccctgagaaggtggcagtgaggaagtatcccctcaggtgactggatctgtgttcctccttaacatcatctgatggaatggcaatgaaaagcrtggattgtggaaaatacagaaaaacataaaggaaaaaactccaatccycygagccca

SEQ ID NO: 189 - DNA, 900 bp, Homo sapiens
gctgtggcmtctcctagygaggggacatgactccygcagaagtcctggctcaccgtccagtctgcatgcagggccaggccaggtgtgcccatgtccagttccttcctgcctgagcctttacctgccaagagcctgcaacatggggttcccttgtcccttgactcttctctctcttccctcctagagaagatctgcayacttcctaacagaggcttggmccgcaccaaggtccccattttcctggggatycagggagggagccgctgcctggcatgtgtggagacagaagaggggccttccctacagctggaggatgtgaacattgaggaactgtacaaaggtggtgaagaggccacacgcttcaccttcttccagagcagctcaggctccgccttcaggcttgaggctgctgcctggcctggctggttcctgtgtggcccggcagagccccagcagccagtacagctcaccaaggagagtgagccctcagcccgtaccaagttttactttgaacagagctggtagggagacaggaaactgcgttttagccttgtgcccccaaacyaagctcatcctgctcagggtctatggtaggcagaataatgtcccccraaatatgtccacatcctaatcccaagatctgtgcatatgttaccatacatgtccaaagaggttttgcaaatgtgattatgttaaggatcttgaaatgaggagacaatcctgggttatccttgtgggctcagtttaatcacaagaaggaggcaggaagggagagtcagagagagaatggaagataccatgcttctaattttgaagatggagtgaggggccttgagccaacaaatgcaggtgtttttagaaggtggaaaagccaagggaacggattctcctctagagtct

SEQ ID NO: 190 - DNA, 1364 bp, Homo sapiens
ggcagtgggactgggtttgagctgggcttatcctccaactgtgagggaggctacagcacactccaccccactctcagggctgggaattgttgtggctcagctatttgggggaatctgttttccagtttctcagaaccagcgcaagcacacacatcccaggctyacacccctggtggctggacttgctcccggatagcctcagtcagggagaggcagagctgcctggagcctgctgggctggtggaagccttggtgkattctggcaggccaattatagaygaatggcctggggaacccgtgcagcccktggctgagtggttctaagccccagcacrtctgcctctggcttcacccagyctccttttctaactgcccttctctcctccccatcagtgaggaccagacaccactgattgcaggaatgtgttccctccccatggcaagatactacataattaaatatgcagaccagaaggctctatacacaagagayggccagctgctggtgggagatcctgttgcagacaactgctgtgcagagaagatctgcayacttcctaacagaggcttggmccgcaccaaggtccccattttcctggggatycagggagggagccgctgcctggcatgtgtggagacagaagaggggccttccctacagctggaggatgtgaacattgaggaactgtacaaaggtggtgaagaggccacacgcttcaccttcttccagagcagctcaggctccgccttcaggcttgaggctgctgcctggcctggctggttcctgtgtggcccggcagagccccagcagccagtacagctcaccaaggagagtgagccctcagcccgtaccaagttttactttgaacagagctggtagggagacaggaaactgcgttttagccttgtgcccccaaacyaagctcatcctgctcagggtctatggtaggcagaataatgtcccccraaatatgtccacatcctaatcccaagatctgtgcatatgttaccatacatgtccaaagaggttttgcaaatgtgattatgttaaggatcttgaaatgaggagacaatcctgggttatccttgtgggctcagtttaatcacaagaaggaggcaggaagggagagtcagagagagaatggaagataccatgcttctaattttgaagatggagtgaggggccttgagccaacaaatgcaggtgtttttagaaggtggaaaagccaagggaacggattctcctctagagtctccggaaggaacacagctcttgacacatggatttcagctcagtgacacccatttcagacttctgacctccacaactataaaataataaacttgtgttattgtaaacctct

SEQ ID NO: 191 - DNA, 3138 bp, Homo sapiens
gcagcgagcgcggctccacattgttgcggatcgccggcacccggcagagcggcggcggctgggacgcgcggcgcctccgacccgttctcctcgcgcccggccgcgcagccagagccacccgggccgccgaccgccgagccccgcgcccgccgcctgggccccgagccttctgcgccgcccgggtgcgtcccgccaccctcggaggacggccggccatggacgcctgcaagttggagccgagcgggagggtgtgagcgggccggggccaggagcccgcgccgcgcaaccgggcagccgggcgcgccgggggtgggtccctctccccagccccgctctgcgtggaagaagagggcggggaccggcgccgggaggagagcggaggaggcgaaggggcatgactcgtgcaacttgcggcgggcatctgccgagcctctgagccggcggcggcccggggcccggactgcggccgcgcggatcccacccagcccaccccgccccggccgacggctgcagctgacctggatccttcgagcgcccgccgaccgccagcgatcttccctcatcttccgggctggtttctgctgcgcgaggagcgctgccctcgccgcccctctcgccggacccccggcccccgatggctcggatggggcttgcgggcgccgctggacgctggtggggactcgctctcggcttgaccgcattcttcctcccaggcgtccactcccaggtggtccaggtgaacgactccatgtatggcttcatcggcacagacgtggttctgcactgcagctttgccaacccgcttcccagcgtgaagatcacccaggtcacatggcagaagtccaccaatggctccaagcagaacgtggccatctacaacccatccatgggcgtgtcygtgctggctccctaccgcgagcgtgtggaattcctgcggccctccttcaccgatggcactatccgcctctcccgcctggagctggaggatgagggtgtctacatctgcgagtttgctaccttccctacgggcaatcgagaaagccagctcaatctcacggtgatggccaaacccaccaattggatagagggtacccaggcwgtgcttcgagccaagaaggggcaggatgacaaggtcctggtggccacctgcacctcagccaatgggaagcctcccagtgtggtatcctrggaaactcggttaaaaggtgaggcagagtaccaggagatccggaaccccaatggcacagtgacggtcatcagccgctaccgcctggtgcccagcagggaagcccaccagcagtccttggcctgcatcgtcaactaccacatggaccgcttcaaggaaagcctcactctcaacgtgcagtatgagcctgaggtaaccattgaggggtttgatggcaactggtacctgcagcggatggacgtgaagctcacctgcaaagctgatgctaaccccccagccactgagtaccactggaccacgctaaatggctctctccccaagggtgtggaggcccagaacagaaccctcttcttcaagggacccatcaactacagcctggcagggacctacatctgtgaggccaccaaccccatcggtacacgctcaggccaggtggaggtcaatatcacagaattcccctacaccccgtctcctcccgaacatgggcggcgcgccgggccggtgcccacggccatcattgggggcgtggcggggagcatcctgctggtgttgattgtggtcggcgggatcgtggtcgccctgcgtcggcgccggcacaccttcaagggtgactacagcaccaagaagcacgtgtatggcaacggctacagcaaggcaggcatcccccagcaccacccaccaatggcacagaacctgcagtaccccgacgactcagacgacgagaagaaggccggcccactgggtggaagcagctatgaggaggaggaggaggaggaggagggcggtggagggggcgagcgcaaggtgggcggcccccaccccaaatatgacgaggacgccaagcggccctacttcaccgtggatgaggccgaggcccgtcaggacggctacggggaccggactctgggctaccagtacgaccctgagcagctggacttggctgagaacatggtttctcagaacgacgggtctttcatttccaagaaggagtggtacgtaaaagccccgcccccagaggggtctgggaagtgcagccaggctcctggcgggcaccgtggccgtgttcctcatcctagktgctgtgctcactgtcttcttcctgtacaaccggcagcagaagagcccaccggagacggatggggccgggaccgaccagcccctctcccagaagccggagycttctcccagcaggcaaagctcccttgtgcctgaggatatccaggttgtccacctggacccagggaggcagcagcagcaagaagaggaggacttgcagaagctgtccctgcagcccccctactatgatctgggggtctccccctcctaccacccctyggtaaggacaaccgaacctcgaggagagtgcccctagcccaggaccacccagcctggccatragcccagctgccttagagggaaaccasacagatgaggtggaggaggtgagggcaggggggcacagggaggcccacccaagcactgcaggcaccctgggcaaagggtgactggatgctggacagaccattctggaagactggcatttccaatgagtctggccccccagcttggtgcccacctctccctcccccaagccccacctccagctctgtaccctgcaccttagttcccagtgctgccaacggggctgccagcgggaggtgctgcctcttcctggcctcactcccagccactcagagggccagcatccacttgaatggctgccacctttgcccatatctggctcctttcagcagacttgggggcaaggggtgttacccatacagtgcagcccagagacccaggccagaccgcctggacccaaagataacacacactctcctggcactggcaggagagccaggcctttgtctccgtggtacagccatcctcactcttggcaggaagtaccaacatgaacccatctggaggtgccaaatcctgcccccagggag

SEQ ID NO: 192 - DNA, 2591 bp, Homo sapiens
gcagcgagcgcggctccacattgttgcggatcgccggcacccggcagagcggcggcggctgggacgcgcggcgcctccgacccgttctcctcgcgcccggccgcgcagccagagccacccgggccgccgaccgccgagccccgcgcccgccgcctgggccccgagccttctgcgccgcccgggtgcgtcccgccaccctcggaggacggccggccatggacgcctgcaagttggagccgagcgggagggtgtgagcgggccggggccaggagcccgcgccgcgcaaccgggcagccgggcgcgccgggggtgggtccctctccccagccccgctctgcgtggaagaagagggcggggaccggcgccgggaggagagcggaggaggcgaaggggcatgactcgtgcaacttgcggcgggcatctgccgagcctctgagccggcggcggcccggggcccggactgcggccgcgcggatcccacccagcccaccccgccccggccgacggctgcagctgacctggatccttcgagcgcccgccgaccgccagcgatcttccctcatcttccgggctggtttctgctgcgcgaggagcgctgccctcgccgcccctctcgccggacccccggcccccgatggctcggatggggcttgcgggcgccgctggacgctggtggggactcgctctcggcttgaccgcattcttcctcccaggcgtccactcccaggtggtccaggtgaacgactccatgtatggcttcatcggcacagacgtggttctgcactgcagctttgccaacccgcttcccagcgtgaagatcacccaggtcacatggcagaagtccaccaatggctccaagcagaacgtggccatctacaacccatccatgggcgtgtcygtgctggctccctaccgcgagcgtgtggaattcctgcggccctccttcaccgatggcactatccgcctctcccgcctggagctggaggatgagggtgtctacatctgcgagtttgctaccttccctacgggcaatcgagaaagccagctcaatctcacggtgatggccaaacccaccaattggatagagggtacccaggcwgtgcttcgagccaagaaggggcaggatgacaaggtcctggtggccacctgcacctcagccaatgggaagcctcccagtgtggtatcctrggaaactcggttaaaaggtgaggcagagtaccaggagatccggaaccccaatggcacagtgacggtcatcagccgctaccgcctggtgcccagcagggaagcccaccagcagtccttggcctgcatcgtcaactaccacatggaccgcttcaaggaaagcctcactctcaacgtgcagtatgagcctgaggtaaccattgaggggtttgatggcaactggtacctgcagcggatggacgtgaagctcacctgcaaagctgatgctaaccccccagccactgagtaccactggaccacgctaaatggctctctccccaagggtgtggaggcccagaacagaaccctcttcttcaagggacccatcaactacagcctggcagggacctacatctgtgaggccaccaaccccatcggtacacgctcaggccaggtggaggtcaatatcacagaaaagccccgcccccagaggggtctgggaagtgcagccaggctcctggcgggcaccgtggccgtgttcctcatcctagktgctgtgctcactgtcttcttcctgtacaaccggcagcagaagagcccaccggagacggatggggccgggaccgaccagcccctctcccagaagccggagycttctcccagcaggcaaagctcccttgtgcctgaggatatccaggttgtccacctggacccagggaggcagcagcagcaagaagaggaggacttgcagaagctgtccctgcagcccccctactatgatctgggggtctccccctcctaccacccctyggtaaggacaaccgaacctcgaggagagtgcccctagcccaggaccacccagcctggccatragcccagctgccttagagggaaaccasacagatgaggtggaggaggtgagggcaggggggcacagggaggcccacccaagcactgcaggcaccctgggcaaagggtgactggatgctggacagaccattctggaagactggcatttccaatgagtctggccccccagcttggtgcccacctctccctcccccaagccccacctccagctctgtaccctgcaccttagttcccagtgctgccaacggggctgccagcgggaggtgctgcctcttcctggcctcactcccagccactcagagggccagcatccacttgaatggctgccacctttgcccatatctggctcctttcagcagacttgggggcaaggggtgttacccatacagtgcagcccagagacccaggccagaccgcctggacccaaagataacacacactctcctggcactggcaggagagccaggcctttgtctccgtggtacagccatcctcactcttggcaggaagtaccaacatgaacccatctggaggtgccaaatcctgcccccagggag

SEQ ID NO: 193 - DNA, 2184 bp, Homo sapiens
gcagcgagcgcggctccacattgttgcggatcgccggcacccggcagagcggcggcggctgggacgcgcggcgcctccgacccgttctcctcgcgcccggccgcgcagccagagccacccgggccgccgaccgccgagccccgcgcccgccgcctgggccccgagccttctgcgccgcccgggtgcgtcccgccaccctcggaggacggccggccatggacgcctgcaagttggagccgagcgggagggtgtgagcgggccggggccaggagcccgcgccgcgcaaccgggcagccgggcgcgccgggggtgggtccctctccccagccccgctctgcgtggaagaagagggcggggaccggcgccgggaggagagcggaggaggcgaaggggcatgactcgtgcaacttgcggcgggcatctgccgagcctctgagccggcggcggcccggggcccggactgcggccgcgcggatcccacccagcccaccccgccccggccgacggctgcagctgacctggatccttcgagcgcccgccgaccgccagcgatcttccctcatcttccgggctggtttctgctgcgcgaggagcgctgccctcgccgcccctctcgccggacccccggcccccgatggctcggatggggcttgcgggcgccgctggacgctggtggggactcgctctcggcttgaccgcattcttcctcccaggcgtccactcccaggtggtccaggtgaacgactccatgtatggcttcatcggcacagacgtggttctgcactgcagctttgccaacccgcttcccagcgtgaagatcacccaggtcacatggcagaagtccaccaatggctccaagcagaacgtggccatctacaacccatccatgggcgtgtcygtgctggctccctaccgcgagcgtgtggaattcctgcggccctccttcaccgatggcactatccgcctctcccgcctggagctggaggatgagggtgtctacatctgcgagtttgctaccttccctacgggcaatcgagaaagccagctcaatctcacggtgatggccaaacccaccaattggatagagggtacccaggcwgtgcttcgagccaagaaggggcaggatgacaaggtcctggtggccacctgcacctcagccaatgggaagcctcccagtgtggtatcctrggaaactcggttaaaaggtgaggcagagtaccaggagatccggaaccccaatggcacagtgacggtcatcagccgctaccgcctggtgcccagcagggaagcccaccagcagtccttggcctgcatcgtcaactaccacatggaccgcttcaaggaaagcctcactctcaacgtgcagtatgagcctgaggtaaccattgaggggtttgatggcaactggtacctgcagcggatggacgtgaagctcacctgcaaagctgatgctaaccccccagccactgagtaccactggaccacgctaaatggctctctccccaagggtgtggaggcccagaacagaaccctcttcttcaagggacccatcaactacagcctggcagggacctacatctgtgaggccaccaaccccatcggtacacgctcaggccaggtggaggtcaatatcacagaattcccctacaccccgtctcctcccgaacatgggcggcgcgccgggccggtgcccacggccatcattgggggcgtggcggggagcatcctgctggtgttgattgtggtcggcgggatcgtggtcgccctgcgtcggcgccggcacaccttcaagggtgactacagcaccaagaagcacgtgtatggcaacggctacagcaaggcaggcatcccccagcaccacccaccaatggcacagaacctgcagtaccccgacgactcagacgacgagaagaaggccggcccactgggtggaagcagctatgaggaggaggaggaggaggaggagggcggtggagggggcgagcgcaaggtgggcggcccccaccccaaatatgacgaggacgccaagcggccctacttcaccgtggatgaggccgaggcccgtcaggacggctacggggaccggactctgggctaccagtacgaccctgagcagctggacttggctgagaacatggtttctcagaacgacgggtctttcatttccaagaaggagtggtacgt

SEQ ID NO: 194 - DNA, 1901 bp, Homo sapiens
gcagcgagcgcggctccacattgttgcggatcgccggcacccggcagagcggcggcggctgggacgcgcggcgcctccgacccgttctcctcgcgcccggccgcgcagccagagccacccgggccgccgaccgccgagccccgcgcccgccgcctgggccccgagccttctgcgccgcccgggtgcgtcccgccaccctcggaggacggccggccatggacgcctgcaagttggagccgagcgggagggtgtgagcgggccggggccaggagcccgcgccgcgcaaccgggcagccgggcgcgccgggggtgggtccctctccccagccccgctctgcgtggaagaagagggcggggaccggcgccgggaggagagcggaggaggcgaaggggcatgactcgtgcaacttgcggcgggcatctgccgagcctctgagccggcggcggcccggggcccggactgcggccgcgcggatcccacccagcccaccccgccccggccgacggctgcagctgacctggatccttcgagcgcccgccgaccgccagcgatcttccctcatcttccgggctggtttctgctgcgcgaggagcgctgccctcgccgcccctctcgccggacccccggcccccgatggctcggatggggcttgcgggcgccgctggacgctggtggggactcgctctcggcttgaccgcattcttcctcccaggcgtccactcccaggtggtccaggtgaacgactccatgtatggcttcatcggcacagacgtggttctgcactgcagctttgccaacccgcttcccagcgtgaagatcacccaggtcacatggcagaagtccaccaatggctccaagcagaacgtggccatctacaacccatccatgggcgtgtcygtgctggctccctaccgcgagcgtgtggaattcctgcggccctccttcaccgatggcactatccgcctctcccgcctggagctggaggatgagggtgtctacatctgcgagtttgctaccttccctacgggcaatcgagaaagccagctcaatctcacggtgatggccaaacccaccaattggatagagggtacccaggcwgtgcttcgagccaagaaggggcaggatgacaaggtcctggtggccacctgcacctcagccaatgggaagcctcccagtgtggtatcctrggaaactcggttaaaaggtgaggcagagtaccaggagatccggaaccccaatggcacagtgacggtcatcagccgctaccgcctggtgcccagcagggaagcccaccagcagtccttggcctgcatcgtcaactaccacatggaccgcttcaaggaaagcctcactctcaacgtgcagtatgagcctgaggtaaccattgaggggtttgatggcaactggtacctgcagcggatggacgtgaagctcacctgcaaagctgatgctaaccccccagccactgagtaccactggaccacgctaaatggctctctccccaagggtgtggaggcccagaacagaaccctcttcttcaagggacccatcaactacagcctggcagggacctacatctgtgaggccaccaaccccatcggtacacgctcaggccaggtggaggtcaatatcacagctttctgtcaacttatctatccgggcaaagggaggacaagagctaggatgttctgaggagagacttcacctgggacgtgaaaggagcatgggcttgatgtcagacagctgtgaccctggacagggccccccccaccatctgtaaaacggggacagtatgatgtaccttgaagggctgttgtcagaattctacgtgatgtaagtcaagcacctagcacagatcagtctgtcaataaatggccaatgttccgtgattattaccctg

SEQ ID NO: 195 - DNA, 262 bp, Homo sapiens
cactgggaaagcagcaacccctgcacatgtattgctggagggcagaagctgacctcactggcattaactgatgtgccctacctgttcagcccccatctgggcctcrggcttcatgttgcctcagtgaggagggcggaagtctccctgagcaagaagctggtgatggggctggagggcaggcagagctcatcaggtgaccccacctgcctttgactccaaaggcatcaaaagcacagtggggagggggcaggcggcccttttc

SEQ ID NO: 196 - DNA, 2321 bp, Homo sapiens
gtaggaatgggaacatctttattgcagagtcgttggcagcacaatgacaatatatgcagaacacttagcacagtgcctagcacgcagtagacactcaatacatggtgttacttatttttgttattttaattttctatttttccatttataaatagataaatattccacaaacaatttcttaaagaggaataattagaaatcaacttatgtgtgctgctggggtgtgtataatgcagctacaagttgggatcctctttgttctgaarttgaagtctcttgctagaagtgtccaggtacaggaagacagtagcagtgaggacccaggtcaccacacgttcttggtattattacctctcaaatctcaacagagaatgacagatgtcatattgtccttgcacttttttttacttcattgattgaatgtattaaattagrtmatcamattcataaagatgaaatcaatcatatttgttgagataactaaactattggcttcataccctggatccatttctccttttccttcctaattcttactttattcatgtttccatccctttcccactcagccaagtgccacaggtagagctgacaccttcccaagatccaggtggtctctgaggcctacaggcgattccattcctgtctgcagtgcttagctcagggtacacatgtgagccacttctggccatgggatgtgaaggcatgyttgctgggggcttttgggaaattccktttctcttaagaaaaaaatcataagaaaaggagttctcytttttatctctagatgttatccctggaatcactctagccatcttactacagcctgatgttcaatagggcattgagaattgaagtgcagagtgatgagaaaaatctaggtccttgataccaacattcaactcctgagtcaataaattctgaagcctcctttatgtctggatgacaaatttgtgagctgatacacttttttattgattaaagtagtggaggttcatttctattatctgcagctaaaagcctcctggtataagtgctttgtgttatccttccaattattctacatttcaccatcactttcaaagcagtaatattatacatttctaatttgcawaacttactacagttttcaatttttttaccctagttaacacaaagtccttgaagtgaatatcatctttatcwttattttattttagtaataagaaactggggctcaraaagtttaggtaacacagtaggaaatgatgaaactgaaacaagmaatcatgtctatttgattgcttttttcctgtaaagacagtcattaatgctcttcaccaaatgttttcatttcttcygacacatgccaagatcgcacttccccatccttttgaagttacttgcagccatgataattgccctggcccaatgcaatgtgaacaggtaaaagacatattttacttctgggccaaagcttcaagaaccagtgcatattttgttgtcttctctctctctaatgcagrtaacagaagtcccatragcctgggtcccacaaagagacatggagtgtagcatccagcaatgtcgttataaacttgtagtgggaattaacaatacacatttgttgttataaactaagatttggttataaaccactaagcataacctagccactgctgactgattaattcayaaagtggctatatcactttgtgtttttaagtggcaataatttaactcagttctctattagatacctcaattccaaatatttttttttctgagaaatgyatgtaaattttattcagaaatagtaaagttttaaaartgttatttcgatagtttctgtggaacaggtggtttttggttacatggggaagttcttcagtggtgagttctgagattttggtgcactcatcacccaagcagtgcacactgtacccaatgtgtagtctcatccttcaacccttgagtcctcaaagtccactatatcattcttatgcctttgcatcttcgcagcttagctcccacttacgagtgagaacatacaatatttggttttccattcttgagttacttcacttagaataatggtctccaactccatctaggttgctgcaaatgccattatttcattccttcttatggcttagtattccatagtgcatatatatcacattttctttatccactcatgctcccctagctgcacagctgcaagctttagcgtctggtttccwgcaggggctccctggaccgcccgcccactctcgtgtcacccccaggtgccctggctgcgccgctgctactcgcgccttcttccgttaagcgacgctggt

SEQ ID NO: 197 - DNA, 9364 bp, Homo sapiens
ccgggagcgaggagcgagctacttcaaagccaccaggcctggagcggggacagaggcggcgactaggggaaggtgaagccgtcgctgcaggaggaggagcaggaggaggtgacgcaggagaaacgcaccgcccggagcccgtctgagctcagcgagagccccaatgagcaaggtcaaggtgatgccccaccacagcttgaagatgaggaacctgcatttccacatactgacttggccaagttggatgacatgatcaacaggcctcgatgggtggttccagttttgccgaaaggggaattagaagtgcttttagaagctgctattgatcttagtaaaaaggsccttgatgttaaaagtgaagcatgtcagcgatttttccgtgatgggctaacaatatcattcactaaaattcttacagatgaagcagtgagtggctggaagtttgaaattcataggtgtattattaacaatactcatcgtctggtggagctatgtgtggccaagttgtcccaagactggtttccacttttagaacttcttgccatggccttaaatcctcattgcaaattccatatctacaatggtacacgtccatgtgaatcagtttcctcaagtgttcagttgcctgaagatgaactctttgctcgttctccagatcctcgatcaccaaagggttggctagtggatcttctcaacaaatttggcactttaaatgggttccagattttgcatgatcgttttattaatggatcagcattaaacgttcaaataattgcagcccttattaaaccatttgggcaatgctatgagtttctcactcttcatacagtgaaaaagtactttcttccaataatagaaatggttccacagtttttagaaaacttaactgatgaagaactgaaaaaagaagcaaagaatgaagccaaaaatgatgctctttcaatgattattaaatctttgaagaatttagcttcaagggttccaggacaagaagaaactgttaaaaacttagaaatatttaggttaaaaatgatacttagattattgcaaatttcttctttcaatggaaagatgaatgcactgaatgaagttaataaggtgatatctagtgtatcatactatactcatcgacatggtaatcctgaggaggaagagtggctcacagctgaacgaatggcagaatggatacagcagaacaatatcttatccatagtgttgcgagatagtcttcatcagccacagtatgtagaaaagttagagaagattcttcgttttgtcatcaaagaaaaagctctgaccttacaggatcttgataatatctgggcagcacaggcagggaaacatgaagccattgtgaagaatgtacatgatctcctggcaaaattggcatgggatttttctcctgaacaacttgatcatctttttgattgttttaaggccagtggacaaatgcgagtaaaaagcaacgtgaaaagctacttgagctgatacgtcgtcttgcagaagatgataaagatggtgtgatggcacacaragtgttgaaccttctgtggaatctggctcacagtgatgatgtgcctgtagatatcatggacctggctctcagtgcccacataaaaatactagattacagttgctcccaggaccgtgatacacaaaagatccaatggatagatcgctttatagaagaacttcgcacaaatgacaaatgggttattcccgcactgaaacaaattagagaaatttgtagtttgtttggtgaagcgcctcaaaatttgagtcaaactcagcgaagtccccatgtgttttatcgccatgacttaatcaatcaacttcaacacaatcatgccctagttactttggtagcagaaaaccttgcaacttacatggaaagcatgagactatatgctagagaccatgaagattatgacccacaaactgtgaggctgggaagtagatatagtcatgttcaagaagttcaagaacggcttaacttccttagatttttattgaaggatggtcagctgtggctatgtgctcctcaggcaaaacaaatatggaaatgcttagctgagaatgcagtttacctttgtgatcgtgaagcctgttttaagtggtattccaagttgatgggggatgaaccagacttagatcctgatattaataaggacttctttgaaagtaatgtgcttcagcttgatccttctctgttaactgaaaatggaatgaagtgttttgagcgattcttcaaagctgtgaattgtcgagaaggaaaactagtagcaaaaaggagagcctatatgatggatgacttggagttaataggattagattacctttggagggtcgtgattcagagtaatgatgatattgccagcagagctatagatctcctcaaagagatatacacgaaccttggtccaagactacaagtcaatcaggtggtgatccatgaagacttcattcagtcttgttttgatcgtctgaaggcttcctatgacacattgtgtgttttggatggtgacaaagacagtgttaattgtgcaagacaggaagctgttcgaatggttcgagtattaactgttttaagggaatatataaatgaatgtgacagtgattatcatgaggaaagaacaattctccctatgtcgagagcattccgcggtaaacacctctcttttgtagttcgatttccaaaccagggcagacaggttgatgacttggaggtatggtctcatacaaatgatacaattggttcagtacgacgatgtattctcaatcgtattaaagccaacgtagcccatacaaaaattgagctctttgtgggcggtgagctgatagatcctgcagatgatagaaagttgattggacaattaaacttaaaagataaatcgcttatyacagccaaacttacacagataagttccaatatgccttcaagccctgatagctcttctgattcctccactggatctcctggaaaccatggtaatcattacagtgatggtcccaatccagaagtggaaagctgtttgcctggagtgataatgtcactgcatcccagatacatctcttttctttggcaagttgcagacttaggtagcagcctaaatatgccaccccttagagatggagcaagagtacttatgaaacttatyccgccagatagcacaacgatagaaaaattaagagctatttgtttagaccatgccaaacttggagaaagcagccttagtccatctcttgactcacttttctttggtccttcagcctcacaagtgctatatctaacagaggtagtctatgccttgttaatgcctgctggtgcacctctggctgatgattcctctgattttcagtttcacttcttgaaaagtggtggcctaccccttgtactgagtatgctaaccagaaataacttcctaccgaatgcagatatggaaactcgaaggggtgcctacctcaatgctcttaaaatagccaagcttttgctaactgccattggctatggtcatgttcgagctgtggcagaagcttgtcagccaggtgtagaaggtgtgaatcccatgacacagatcaaccaagttacccatgatcaagcagtggtgctacaaagtgcccttcagagcattcctaatccatcatccgagtgcatgcttagaaatgtgtcagttcgtcttgctcagcagatatctgatgaggcttcaagatatatgcctgatatttgtgtaattagagctatacaaaaaattatctgggcatcaggatgtgggtcgttacagctagtatttagcccaaatgaagaaatcactaaaatttatgagaagaccaatgcaggcaatgagccagacttggaagacgaacaggtttgctgtgaagcattggaagtgatgaccttatgttttgccttgattccaacagccttagatgctcttagtaaagaaaaggcttggcagacattcatcattgacttactattgcactgtcacagcaaaactgttcgtcaggtggcacaggagcagttctttttaatgtgcaccagatgttgcatgggacaccggcctctacttttcttcattactctactctttactgttttrgggagcacagcaagagagagagctaaacactcaggcgactactttactcttttaagacaccttcttaattacgcttacaatagtaatattaatgtacccaatgctgaagttctttcaataatgaaattgattggcttaaaagaattagggatgatgttaaaagaacaggagaaacgggtattgaagagacgatcttagagggccaccttggagtgacaaaggagttactggcctttcaaacttctgagaaaaaatttcatattggttgtgaaaaaggaggtgctaatctcattaaagaattaattgatgatttcatatttcctgcatccaatgtttacctacagtatatgagaaatggagagcttccagctgaacaggctattccggtctgtggttcaccacctacaattaatgctggttttgaattacttgtagcattagctgttggctgtgtgaggaatctcaaacaaatagtagattctttgactgaaatgtattacattggcacagcaataactacttgtgaagcacttactgagtgggaatatctgccacctgttggaccccgcccacccaaaggattcgtggggctgaaaaatgccggtgctacttgttacatgaattctgtgattcagcaactctacatgattccttccattaggaacggtattcttgccattgaaggcacaggtagtgatgtagatgatgatatgtctggggatgagaarcaggacaatgagagcaatgttgatcccagggatgatgtatttggatatcctcaacaatttgaagataaaccagcattaagtaaaactgaagatagaaaagagtacaacattggtgtcctaagacaccttcaggtcatctttggtcatttagctgcttctcgactgcaatactatgtgcccagaggattttggaaacagttcaggctttggggtgagcctgttaatctgcgtgaacaacacgatgctttagaattttttaattcattggtggatagtttagatgaagctttaaaagctttaggacatccagctatgctaagtaaagtcttaggaggttcctttgctgatcagaagatctgccaaggctgcccacataggtacgaatgtgaagaatcttttacgaccctaaacgtagacattagaaatcaccaaaatcttcttgattctttggaacagtatgtcaaaggagatttactagaaggtgcaaatgcatatcattgtgaaaaatgcaataaaaaggaaaccaccttcgtgggaacaacagtaaacatcaaacaggttgataccgtaaagcgcttgctgattaaaaaattacctcctgttcttgctatacaactaaagcgatttgactatgactgggaaagagaatgtgcaatcaagttcaatgattattttgaatttcctcgagagctggacatggaaccttacacagttgcaggtgtcgcaaagctggaaggggataatgtaaacccagagagtcagttgatacaacagagtgagcagtctgaaagtgagacagcaggaagcacaaaatacagacttgtgggtgtgctcgtacacagtggtcaagcgagtggggggcattattattcttacatcatccaaaggaatggtggagatggtgagagaaatcgctggtataaatttgatgatggtgatgtaacagaatgtaaaatggatgatgacgaagaaatgaaaaaccagtgttttggtggagagtacatgggagaagtgtttgatcacatgatgaagcgtatgtcatacaggcgccagaaaaggtggtggaatgcttatatacttttttatgaacgaatggacacaatagaccaagatgatgagttgataagatatatatcagagcttgctatcaccaccagacctcatcagattattatgccatcagccattgagagaagtgtacggaaacagaacgtacaattcatgcataaccgaatgcagtacagtatggagtattttcagtttatgaaaaaactgcttacatgtaatggcgtttacttaaaccctcctcccgggcaagatcacctgttgcctgaagcagaagaaatcactatgatcagtattcaacttgctgctaggttcctctttactacaggatttcacacaaagaaagtagtccgtggctctgccagtgattggtatgatgcattgtgtattctccttcgtcacagcaagaatgtacgtttttggtttgctcataacgtcctttttaatgtttcaaatcgcttctccgaataccttctggagtgccctagtgcagaagtgaggggtgcgtttgcaaaacttatagtctttattgcacatttttccttgcaagatgggccatgtccttcaccttttgcctctcctggaccttctagtcaggcttatgacaacttaagcttgagtgatcacttactaagagcagtactaaatctcttgagaagggaagtttcagagcatgggcgtcatttacagcagtatttcaacctgtttgtaatgtatgccaatttaggtgtggcagagaagacacagcttctgaaattgagtgtacctgctacttttatgcttgtgtctttagatgaaggtccaggtcctccaatcaaataccagtatgctgaattaggcaaattatactcagtagtgtcacagctgatccgctgttgcaatgtctcttcaagaatgcagtcttcaatcaatggtaatcctcctcttcccaatccttttggtgatcctaatttatcacaacctataatgccaattcagcagaatgtggcagacattttatttgtgagaacaagttatgtgaagaaaatcattgaagactgcagtaattcagaggaaaccgtcaaattgcttcgtttttgctgctgggagaatcctcagttctcatctactgtcctcagtgaacttctctggcaggttgcatattcctatacctatgaactgcggccctatttggatctgcttttgcaaatcttactgattgaggactcctggcaaactcacagaattcataatgcactgaaaggaattccagatgaccgagatgggctgtttgacacaatccagcgctctaagaatcactatcaaaaaagagcataccagtgtataaaatgtatggtagctctatttagtaactgtcctgttgcttaccaaatcctgcagggcaatggagatcttaaaagaaagtggacctgggcagtggaatggcttggagatgaacttgaaagaagaccatatactggcaatcctcagtacacttacaacaattggtctcccccagtgcaaagcaatgaaacgtccaatggttatttcttggagagatcacatagtgctaggatgacacttgcaaaagcttgtgaactctgtccagaggaggagccagatgaccaagatgctccagatgaacatgagtcgcctccacctgaagatgccccattgtacccccattcacctggatctcagtatcaacagaataaccatgtgcatggacagccatatacaggcccagcagcacatcacatgaacaaccctcagagaactggccaacgagcacaagaaaattatgaaggcagtgaagaagtatccccacctcaaaccaaggatcaatgaaatgcacataattaactggttccatcaagactgtgcacccaggccttacagtccaacctttttctgtgtctggctaatatttaaaactagaaaaactattcctaatcaacatggagtggagagtttattcactgtcttatctgcagaaatttgctgtcaatatrtaacccgcctgcagtggaaagtgtatagtgttttgtaataaatggcctgatgctaatgtgtaaatggcaaaggtgtatatagtatattaatgttgactgttaawtcttaagcaagaaacttttttcttgatgagactcacagatctacacaaactacaaaagttaattttcttgttacacccactgcactctgcaaccagtgttgcctgcctcatggcagttggatcagctcctttacaaaaaagaaaaaaaaaaaaccaacagcaacaaaacagagcccatccatgtcagccacaccaatagtttcatgttaattctttgccactggagtcaattttgctatgagcaatgtaaggctggtaattctgatattaggttaatcactttgaagctatagttatgctgtaacatttagcatggcttcacaccaagttagtgtagccaatgaggaaaaagttaccataatgacagcagttgtccgagaagtgacagctgtattactcagagcttttacttcttacacctagaatattaaaatataaaacaaggggagaaatgtgacagtctattttcagttgcacatatgttccttatatataatgtttgacagttcaatctctgggtggaataaagaacacttacgtatcagtaatgggaatttttaaagatttaaaacaaatatgcaaaaatttgctatgccaagatgctggagcataatataagactgtatttggtgtgcttgttttgtttctttggtagagtttattaggtgaatcttctaaaactttccttctgttggatcccagtgacgtggaagtcatcagaaccccacgrtacttggagtacctctctgcaccmagatagctggctgattttctgctcagtcacaattttacttgaaagcaagaattgtcctagctccttttccattattccaaaacgtttaacgttcaaagcagggtctcattaaaaaagaaactactggttgatataattgagatattacaatttcagaataaacatttgattaaaaataaggaaatcctcagttcatactgtatttaaaagagaattggtaacttgaatgtgtgtaattttttggaacctgtctaaaaaccaaatacccctgcaaacagatacagcccaccctattctatttaaatattttgctgttttattttatagaaattattttgctgaattcacaaatagaatttgatttaagaagaactttttgtcctgtggtgtgtttttggttttttttttggttactttttttgtcctttttttttttttttaaaagaggactgcatattaaaattcattctgtgcatagcatgcctaggcatgacactgattcaggatttcagtcacatcaagtttttgtgcacagaaagatwtgacctttggccctctactgaagattttgagaaatcaggatgttgacactgtaaaagtttcctaacataatcttgtactt

SEQ ID NO: 198 - DNA, 9373 bp, Homo sapiens
ccgggagcgaggagcgagctacttcaaagccaccaggcctggagcggggacagaggcggcgactaggggaaggtgaagccgtcgctgcaggaggaggagcaggaggaggtgacgcaggagaaacgcaccgcccggagcccgtctgagctcagcgagagccccaatgagcaaggtcaaggtgatgccccaccacagcttgaagatgaggaacctgcatttccacatactgacttggccaagttggatgacatgatcaacaggcctcgatgggtggttccagttttgccgaaaggggaattagaagtgcttttagaagctgctattgatcttagtaaaaaggsccttgatgttaaaagtgaagcatgtcagcgatttttccgtgatgggctaacaatatcattcactaaaattcttacagatgaagcagtgagtggctggaagtttgaaattcataggtgtattattaacaatactcatcgtctggtggagctatgtgtggccaagttgtcccaagactggtttccacttttagaacttcttgccatggccttaaatcctcattgcaaattccatatctacaatggtacacgtccatgtgaatcagtttcctcaagtgttcagttgcctgaagatgaactctttgctcgttctccagatcctcgatcaccaaagggttggctagtggatcttctcaacaaatttggcactttaaatgggttccagattttgcatgatcgttttattaatggatcagcattaaacgttcaaataattgcagcccttattaaaccatttgggcaatgctatgagtttctcactcttcatacagtgaaaaagtactttcttccaataatagaaatggttccacagtttttagaaaacttaactgatgaagaactgaaaaaagaagcaaagaatgaagccaaaaatgatgctctttcaatgattattaaatctttgaagaatttagcttcaagggttccaggacaagaagaaactgttaaaaacttagaaatatttaggttaaaaatgatacttagattattgcaaatttcttctttcaatggaaagatgaatgcactgaatgaagttaataaggtgatatctagtgtatcatactatactcatcgacatggtaatcctgaggaggaagagtggctcacagctgaacgaatggcagaatggatacagcagaacaatatcttatccatagtgttgcgagatagtcttcatcagccacagtatgtagaaaagttagagaagattcttcgttttgtcatcaaagaaaaagctctgaccttacaggatcttgataatatctgggcagcacaggcagggaaacatgaagccattgtgaagaatgtacatgatctcctggcaaaattggcatgggatttttctcctgaacaacttgatcatctttttgattgttttaaggccagtggacaaatgcgagtaaaaagcaacgtgaaaagctacttgagctgatacgtcgtcttgcagaagatgataaagatggtgtgatggcacacaragtgttgaaccttctgtggaatctggctcacagtgatgatgtgcctgtagatatcatggacctggctctcagtgcccacataaaaatactagattacagttgctcccaggaccgtgatacacaaaagatccaatggatagatcgctttatagaagaacttcgcacaaatgacaaatgggttattcccgcactgaaacaaattagagaaatttgtagtttgtttggtgaagcgcctcaaaatttgagtcaaactcagcgaagtccccatgtgttttatcgccatgacttaatcaatcaacttcaacacaatcatgccctagttactttggtagcagaaaaccttgcaacttacatggaaagcatgagactatatgctagagaccatgaagattatgacccacaaactgtgaggctgggaagtagatatagtcatgttcaagaagttcaagaacggcttaacttccttagatttttattgaaggatggtcagctgtggctatgtgctcctcaggcaaaacaaatatggaaatgcttagctgagaatgcagtttacctttgtgatcgtgaagcctgttttaagtggtattccaagttgatgggggatgaaccagacttagatcctgatattaataaggacttctttgaaagtaatgtgcttcagcttgatccttctctgttaactgaaaatggaatgaagtgttttgagcgattcttcaaagctgtgaattgtcgagaaggaaaactagtagcaaaaaggagagcctatatgatggatgacttggagttaataggattagattacctttggagggtcgtgattcagagtaatgatgatattgccagcagagctatagatctcctcaaagagatatacacgaaccttggtccaagactacaagtcaatcaggtggtgatccatgaagacttcattcagtcttgttttgatcgtctgaaggcttcctatgacacattgtgtgttttggatggtgacaaagacagtgttaattgtgcaagacaggaagctgttcgaatggttcgagtattaactgttttaagggaatatataaatgaatgtgacagtgattatcatgaggaaagaacaattctccctatgtcgagagcattccgcggtaaacacctctcttttgtagttcgatttccaaaccagggcagacaggttgatgacttggaggtatggtctcatacaaatgatacaattggttcagtacgacgatgtattctcaatcgtattaaagccaacgtagcccatacaaaaattgagctctttgtgggcggtgagctgatagatcctgcagatgatagaaagttgattggacaattaaacttaaaagataaatcgcttatyacagccaaacttacacagataagttccaatatgccttcaagccctgatagctcttctgattcctccactggatctcctggaaaccatggtaatcattacagtgatggtcccaatccagaagtggaaagctgtttgcctggagtgataatgtcactgcatcccagatacatctcttttctttggcaagttgcagacttaggtagcagcctaaatatgccaccccttagagatggagcaagagtacttatgaaacttatyccgccagatagcacaacgatagaaaaattaagagctatttgtttagaccatgccaaacttggagaaagcagccttagtccatctcttgactcacttttctttggtccttcagcctcacaagtgctatatctaacagaggtagtctatgccttgttaatgcctgctggtgcacctctggctgatgattcctctgattttcagtttcacttcttgaaaagtggtggcctaccccttgtactgagtatgctaaccagaaataacttcctaccgaatgcagatatggaaactcgaaggggtgcctacctcaatgctcttaaaatagccaagcttttgctaactgccattggctatggtcatgttcgagctgtggcagaagcttgtcagccaggtgtagaaggtgtgaatcccatgacacagatcaaccaagttacccatgatcaagcagtggtgctacaaagtgcccttcagagcattcctaatccatcatccgagtgcatgcttagaaatgtgtcagttcgtcttgctcagcagatatctgatgaggcttcaagatatatgcctgatatttgtgtaattagagctatacaaaaaattatctgggcatcaggatgtgggtcgttacagctagtatttagcccaaatgaagaaatcactaaaatttatgagaagaccaatgcaggcaatgagccagacttggaagacgaacaggtttgctgtgaagcattggaagtgatgaccttatgttttgccttgattccaacagccttagatgctcttagtaaagaaaaggcttggcagacattcatcattgacttactattgcactgtcacagcaaaactgttcgtcaggtggcacaggagcagttctttttaatgtgcaccagatgttgcatgggacaccggcctctacttttcttcattactctactctttactgttttrgggagcacagcaagagagagagctaaacactcaggcgactactttactcttttaagacaccttcttaattacgcttacaatagtaatattaatgtacccaatgctgaagttctttcaataatgaaattgattggcttaaaagaattagggatgatgttaaaagaacaggagaaacgggtattgaagagacgatcttagagggccaccttggagtgacaaaggagttactggcctttcaaacttctgagaaaaaatttcatattggttgtgaaaaaggaggtgctaatctcattaaagaattaattgatgatttcatatttcctgcatccaatgtttacctacagtatatgagaaatggagagcttccagctgaacaggctattccggtctgtggttcaccacctacaattaatgctggttttgaattacttgtagcattagctgttggctgtgtgaggaatctcaaacaaatagtagattctttgactgaaatgtattacattggcacagcaataactacttgtgaagcacttactgagtgggaatatctgccacctgttggaccccgcccacccaaaggattcgtggggctgaaaaatgccggtgctacttgttacatgaattctgtgattcagcaactctacatgattccttccattaggaacggtattcttgccattgaaggcacaggtagtgatgtagatgatgatatgtctggggatgagaarcaggacaatgagagcaatgttgatcccagggatgatgtatttggatatcctcaacaatttgaagataaaccagcattaagtaaaactgaagatagaaaagagtacaacattggtgtcctaagacaccttcaggtcatctttggtcatttagctgcttctcgactgcaatactatgtgcccagaggattttggaaacagttcaggctttggggtgagcctgttaatctgcgtgaacaacacgatgctttagaattttttaattcattggtggatagtttagatgaagctttaaaagctttaggacatccagctatgctaagtaaagtcttaggaggttcctttgctgatcagaagatctgccaaggctgcccacataggtacgaatgtgaagaatcttttacgaccctaaacgtagacattagaaatcaccaaaatcttcttgattctttggaacagtatgtcaaaggagatttactagaaggtgcaaatgcatatcattgtgaaaaatgcaataaaaaggttgataccgtaaagcgcttgctgattaaaaaattacctcctgttcttgctatacaactaaagcgatttgactatgactgggaaagagaatgtgcaatcaagttcaatgattattttgaatttcctcgagagctggacatggaaccttacacagttgcaggtgtcgcaaagctggaaggggataatgtaaacccagagagtcagttgatacaacagagtgagcagtctgaaagtgagacagcaggaagcacaaaatacagacttgtgggtgtgctcgtacacagtggtcaagcgagtggggggcattattattcttacatcatccaaaggaatggtggagatggtgagagaaatcgctggtataaatttgatgatggtgatgtaacagaatgtaaaatggatgatgacgaagaaatgaaaaaccagtgttttggtggagagtacatgggagaagtgtttgatcacatgatgaagcgtatgtcatacaggcgccagaaaaggtggtggaatgcttatatacttttttatgaacgaatggacacaatagaccaagatgatgagttgataagatatatatcagagcttgctatcaccaccagacctcatcagattattatgccatcagccattgagagaagtgtacggaaacagaacgtacaattcatgcataaccgaatgcagtacagtatggagtattttcagtttatgaaaaaactgcttacatgtaatggcgtttacttaaaccctcctcccgggcaagatcacctgttgcctgaagcagaagaaatcactatgatcagtattcaacttgctgctaggttcctctttactacaggatttcacacaaagaaagtagtccgtggctctgccagtgattggtatgatgcattgtgtattctccttcgtcacagcaagaatgtacgtttttggtttgctcataacgtcctttttaatgtttcaaatcgcttctccgaataccttctggagtgccctagtgcagaagtgaggggtgcgtttgcaaaacttatagtctttattgcacatttttccttgcaagatgggccatgtccttcaccttttgcctctcctggaccttctagtcaggcttatgacaacttaagcttgagtgatcacttactaagagcagtactaaatctcttgagaagggaagtttcagagcatgggcgtcatttacagcagtatttcaacctgtttgtaatgtatgccaatttaggtgtggcagagaagacacagcttctgaaattgagtgtacctgctacttttatgcttgtgtctttagatgaaggtccaggtcctccaatcaaataccagtatgctgaattaggcaaattatactcagtagtgtcacagctgatccgctgttgcaatgtctcttcaagaatgcagtcttcaatcaatggtaatcctcctcttcccaatccttttggtgatcctaatttatcacaacctataatgccaattcagcagaatgtggcagacattttatttgtgagaacaagttatgtgaagaaaatcattgaagactgcagtaattcagaggaaaccgtcaaattgcttcgtttttgctgctgggagaatcctcagttctcatctactgtcctcagtgaacttctctggcaggttgcatattcctatacctatgaactgcggccctatttggatctgcttttgcaaatcttactgattgaggactcctggcaaactcacagaattcataatgcactgaaaggaattccagatgaccgagatgggctgtttgacacaatccagcgctctaagaatcactatcaaaaaagagcataccagtgtataaaatgtatggtagctctatttagtaactgtcctgttgcttaccaaatcctgcagggcaatggagatcttaaaagaaagtggacctgggcagtggaatggcttggagatgaacttgaaagaagaccatatactggcaatcctcagtacacttacaacaattggtctcccccagtgcaaagcaatgaaacgtccaatggttatttcttggagagatcacatagtgctaggatgacacttgcaaaagcttgtgaactctgtccagaggaggtaaaaaaagccaccagtgtgcagcagatagaaatggaagagagcaaagagccagatgaccaagatgctccagatgaacatgagtcgcctccacctgaagatgccccattgtacccccattcacctggatctcagtatcaacagaataaccatgtgcatggacagccatatacaggcccagcagcacatcacatgaacaaccctcagagaactggccaacgagcacaagaaaattatgaaggcagtgaagaagtatccccacctcaaaccaaggatcaatgaaatgcacataattaactggttccatcaagactgtgcacccaggccttacagtccaacctttttctgtgtctggctaatatttaaaactagaaaaactattcctaatcaacatggagtggagagtttattcactgtcttatctgcagaaatttgctgtcaatatrtaacccgcctgcagtggaaagtgtatagtgttttgtaataaatggcctgatgctaatgtgtaaatggcaaaggtgtatatagtatattaatgttgactgttaawtcttaagcaagaaacttttttcttgatgagactcacagatctacacaaactacaaaagttaattttcttgttacacccactgcactctgcaaccagtgttgcctgcctcatggcagttggatcagctcctttacaaaaaagaaaaaaaaaaaaccaacagcaacaaaacagagcccatccatgtcagccacaccaatagtttcatgttaattctttgccactggagtcaattttgctatgagcaatgtaaggctggtaattctgatattaggttaatcactttgaagctatagttatgctgtaacatttagcatggcttcacaccaagttagtgtagccaatgaggaaaaagttaccataatgacagcagttgtccgagaagtgacagctgtattactcagagcttttacttcttacacctagaatattaaaatataaaacaaggggagaaatgtgacagtctattttcagttgcacatatgttccttatatataatgtttgacagttcaatctctgggtggaataaagaacacttacgtatcagtaatgggaatttttaaagatttaaaacaaatatgcaaaaatttgctatgccaagatgctggagcataatataagactgtatttggtgtgcttgttttgtttctttggtagagtttattaggtgaatcttctaaaactttccttctgttggatcccagtgacgtggaagtcatcagaaccccacgrtacttggagtacctctctgcaccmagatagctggctgattttctgctcagtcacaattttacttgaaagcaagaattgtcctagctccttttccattattccaaaacgtttaacgttcaaagcagggtctcattaaaaaagaaactactggttgatataattgagatattacaatttcagaataaacatttgattaaaaataaggaaatcctcagttcatactgtatttaaaagagaattggtaacttgaatgtgtgtaattttttggaacctgtctaaaaaccaaatacccctgcaaacagatacagcccaccctattctatttaaatattttgctgttttattttatagaaattattttgctgaattcacaaatagaatttgatttaagaagaactttttgtcctgtggtgtgtttttggttttttttttggttactttttttgtcctttttttttttttttaaaagaggactgcatattaaaattcattctgtgcatagcatgcctaggcatgacactgattcaggatttcagtcacatcaagtttttgtgcacagaaagatwtgacctttggccctctactgaagattttgagaaatcaggatgttgacactgtaaaagtttcctaacataatcttgtactt

SEQ ID NO: 199 - DNA, 9325 bp, Homo sapiens
ccgggagcgaggagcgagctacttcaaagccaccaggcctggagcggggacagaggcggcgactaggggaaggtgaagccgtcgctgcaggaggaggagcaggaggaggtgacgcaggagaaacgcaccgcccggagcccgtctgagctcagcgagagccccaatgagcaaggtcaaggtgatgccccaccacagcttgaagatgaggaacctgcatttccacatactgacttggccaagttggatgacatgatcaacaggcctcgatgggtggttccagttttgccgaaaggggaattagaagtgcttttagaagctgctattgatcttagtaaaaaggsccttgatgttaaaagtgaagcatgtcagcgatttttccgtgatgggctaacaatatcattcactaaaattcttacagatgaagcagtgagtggctggaagtttgaaattcataggtgtattattaacaatactcatcgtctggtggagctatgtgtggccaagttgtcccaagactggtttccacttttagaacttcttgccatggccttaaatcctcattgcaaattccatatctacaatggtacacgtccatgtgaatcagtttcctcaagtgttcagttgcctgaagatgaactctttgctcgttctccagatcctcgatcaccaaagggttggctagtggatcttctcaacaaatttggcactttaaatgggttccagattttgcatgatcgttttattaatggatcagcattaaacgttcaaataattgcagcccttattaaaccatttgggcaatgctatgagtttctcactcttcatacagtgaaaaagtactttcttccaataatagaaatggttccacagtttttagaaaacttaactgatgaagaactgaaaaaagaagcaaagaatgaagccaaaaatgatgctctttcaatgattattaaatctttgaagaatttagcttcaagggttccaggacaagaagaaactgttaaaaacttagaaatatttaggttaaaaatgatacttagattattgcaaatttcttctttcaatggaaagatgaatgcactgaatgaagttaataaggtgatatctagtgtatcatactatactcatcgacatggtaatcctgaggaggaagagtggctcacagctgaacgaatggcagaatggatacagcagaacaatatcttatccatagtgttgcgagatagtcttcatcagccacagtatgtagaaaagttagagaagattcttcgttttgtcatcaaagaaaaagctctgaccttacaggatcttgataatatctgggcagcacaggcagggaaacatgaagccattgtgaagaatgtacatgatctcctggcaaaattggcatgggatttttctcctgaacaacttgatcatctttttgattgttttaaggccagtggacaaatgcgagtaaaaagcaacgtgaaaagctacttgagctgatacgtcgtcttgcagaagatgataaagatggtgtgatggcacacaragtgttgaaccttctgtggaatctggctcacagtgatgatgtgcctgtagatatcatggacctggctctcagtgcccacataaaaatactagattacagttgctcccaggaccgtgatacacaaaagatccaatggatagatcgctttatagaagaacttcgcacaaatgacaaatgggttattcccgcactgaaacaaattagagaaatttgtagtttgtttggtgaagcgcctcaaaatttgagtcaaactcagcgaagtccccatgtgttttatcgccatgacttaatcaatcaacttcaacacaatcatgccctagttactttggtagcagaaaaccttgcaacttacatggaaagcatgagactatatgctagagaccatgaagattatgacccacaaactgtgaggctgggaagtagatatagtcatgttcaagaagttcaagaacggcttaacttccttagatttttattgaaggatggtcagctgtggctatgtgctcctcaggcaaaacaaatatggaaatgcttagctgagaatgcagtttacctttgtgatcgtgaagcctgttttaagtggtattccaagttgatgggggatgaaccagacttagatcctgatattaataaggacttctttgaaagtaatgtgcttcagcttgatccttctctgttaactgaaaatggaatgaagtgttttgagcgattcttcaaagctgtgaattgtcgagaaggaaaactagtagcaaaaaggagagcctatatgatggatgacttggagttaataggattagattacctttggagggtcgtgattcagagtaatgatgatattgccagcagagctatagatctcctcaaagagatatacacgaaccttggtccaagactacaagtcaatcaggtggtgatccatgaagacttcattcagtcttgttttgatcgtctgaaggcttcctatgacacattgtgtgttttggatggtgacaaagacagtgttaattgtgcaagacaggaagctgttcgaatggttcgagtattaactgttttaagggaatatataaatgaatgtgacagtgattatcatgaggaaagaacaattctccctatgtcgagagcattccgcggtaaacacctctcttttgtagttcgatttccaaaccagggcagacaggttgatgacttggaggtatggtctcatacaaatgatacaattggttcagtacgacgatgtattctcaatcgtattaaagccaacgtagcccatacaaaaattgagctctttgtgggcggtgagctgatagatcctgcagatgatagaaagttgattggacaattaaacttaaaagataaatcgcttatyacagccaaacttacacagataagttccaatatgccttcaagccctgatagctcttctgattcctccactggatctcctggaaaccatggtaatcattacagtgatggtcccaatccagaagtggaaagctgtttgcctggagtgataatgtcactgcatcccagatacatctcttttctttggcaagttgcagacttaggtagcagcctaaatatgccaccccttagagatggagcaagagtacttatgaaacttatyccgccagatagcacaacgatagaaaaattaagagctatttgtttagaccatgccaaacttggagaaagcagccttagtccatctcttgactcacttttctttggtccttcagcctcacaagtgctatatctaacagaggtagtctatgccttgttaatgcctgctggtgcacctctggctgatgattcctctgattttcagtttcacttcttgaaaagtggtggcctaccccttgtactgagtatgctaaccagaaataacttcctaccgaatgcagatatggaaactcgaaggggtgcctacctcaatgctcttaaaatagccaagcttttgctaactgccattggctatggtcatgttcgagctgtggcagaagcttgtcagccaggtgtagaaggtgtgaatcccatgacacagatcaaccaagttacccatgatcaagcagtggtgctacaaagtgcccttcagagcattcctaatccatcatccgagtgcatgcttagaaatgtgtcagttcgtcttgctcagcagatatctgatgaggcttcaagatatatgcctgatatttgtgtaattagagctatacaaaaaattatctgggcatcaggatgtgggtcgttacagctagtatttagcccaaatgaagaaatcactaaaatttatgagaagaccaatgcaggcaatgagccagacttggaagacgaacaggtttgctgtgaagcattggaagtgatgaccttatgttttgccttgattccaacagccttagatgctcttagtaaagaaaaggcttggcagacattcatcattgacttactattgcactgtcacagcaaaactgttcgtcaggtggcacaggagcagttctttttaatgtgcaccagatgttgcatgggacaccggcctctacttttcttcattactctactctttactgttttrgggagcacagcaagagagagagctaaacactcaggcgactactttactcttttaagacaccttcttaattacgcttacaatagtaatattaatgtacccaatgctgaagttctttcaataatgaaattgattggcttaaaagaattagggatgatgttaaaagaacaggagaaacgggtattgaagagacgatcttagagggccaccttggagtgacaaaggagttactggcctttcaaacttctgagaaaaaatttcatattggttgtgaaaaaggaggtgctaatctcattaaagaattaattgatgatttcatatttcctgcatccaatgtttacctacagtatatgagaaatggagagcttccagctgaacaggctattccggtctgtggttcaccacctacaattaatgctggttttgaattacttgtagcattagctgttggctgtgtgaggaatctcaaacaaatagtagattctttgactgaaatgtattacattggcacagcaataactacttgtgaagcacttactgagtgggaatatctgccacctgttggaccccgcccacccaaaggattcgtggggctgaaaaatgccggtgctacttgttacatgaattctgtgattcagcaactctacatgattccttccattaggaacggtattcttgccattgaaggcacaggtagtgatgtagatgatgatatgtctggggatgagaarcaggacaatgagagcaatgttgatcccagggatgatgtatttggatatcctcaacaatttgaagataaaccagcattaagtaaaactgaagatagaaaagagtacaacattggtgtcctaagacaccttcaggtcatctttggtcatttagctgcttctcgactgcaatactatgtgcccagaggattttggaaacagttcaggctttggggtgagcctgttaatctgcgtgaacaacacgatgctttagaattttttaattcattggtggatagtttagatgaagctttaaaagctttaggacatccagctatgctaagtaaagtcttaggaggttcctttgctgatcagaagatctgccaaggctgcccacataggtacgaatgtgaagaatcttttacgaccctaaacgtagacattagaaatcaccaaaatcttcttgattctttggaacagtatgtcaaaggagatttactagaaggtgcaaatgcatatcattgtgaaaaatgcaataaaaaggttgataccgtaaagcgcttgctgattaaaaaattacctcctgttcttgctatacaactaaagcgatttgactatgactgggaaagagaatgtgcaatcaagttcaatgattattttgaatttcctcgagagctggacatggaaccttacacagttgcaggtgtcgcaaagctggaaggggataatgtaaacccagagagtcagttgatacaacagagtgagcagtctgaaagtgagacagcaggaagcacaaaatacagacttgtgggtgtgctcgtacacagtggtcaagcgagtggggggcattattattcttacatcatccaaaggaatggtggagatggtgagagaaatcgctggtataaatttgatgatggtgatgtaacagaatgtaaaatggatgatgacgaagaaatgaaaaaccagtgttttggtggagagtacatgggagaagtgtttgatcacatgatgaagcgtatgtcatacaggcgccagaaaaggtggtggaatgcttatatacttttttatgaacgaatggacacaatagaccaagatgatgagttgataagatatatatcagagcttgctatcaccaccagacctcatcagattattatgccatcagccattgagagaagtgtacggaaacagaacgtacaattcatgcataaccgaatgcagtacagtatggagtattttcagtttatgaaaaaactgcttacatgtaatggcgtttacttaaaccctcctcccgggcaagatcacctgttgcctgaagcagaagaaatcactatgatcagtattcaacttgctgctaggttcctctttactacaggatttcacacaaagaaagtagtccgtggctctgccagtgattggtatgatgcattgtgtattctccttcgtcacagcaagaatgtacgtttttggtttgctcataacgtcctttttaatgtttcaaatcgcttctccgaataccttctggagtgccctagtgcagaagtgaggggtgcgtttgcaaaacttatagtctttattgcacatttttccttgcaagatgggccatgtccttcaccttttgcctctcctggaccttctagtcaggcttatgacaacttaagcttgagtgatcacttactaagagcagtactaaatctcttgagaagggaagtttcagagcatgggcgtcatttacagcagtatttcaacctgtttgtaatgtatgccaatttaggtgtggcagagaagacacagcttctgaaattgagtgtacctgctacttttatgcttgtgtctttagatgaaggtccaggtcctccaatcaaataccagtatgctgaattaggcaaattatactcagtagtgtcacagctgatccgctgttgcaatgtctcttcaagaatgcagtcttcaatcaatggtaatcctcctcttcccaatccttttggtgatcctaatttatcacaacctataatgccaattcagcagaatgtggcagacattttatttgtgagaacaagttatgtgaagaaaatcattgaagactgcagtaattcagaggaaaccgtcaaattgcttcgtttttgctgctgggagaatcctcagttctcatctactgtcctcagtgaacttctctggcaggttgcatattcctatacctatgaactgcggccctatttggatctgcttttgcaaatcttactgattgaggactcctggcaaactcacagaattcataatgcactgaaaggaattccagatgaccgagatgggctgtttgacacaatccagcgctctaagaatcactatcaaaaaagagcataccagtgtataaaatgtatggtagctctatttagtaactgtcctgttgcttaccaaatcctgcagggcaatggagatcttaaaagaaagtggacctgggcagtggaatggcttggagatgaacttgaaagaagaccatatactggcaatcctcagtacacttacaacaattggtctcccccagtgcaaagcaatgaaacgtccaatggttatttcttggagagatcacatagtgctaggatgacacttgcaaaagcttgtgaactctgtccagaggaggagccagatgaccaagatgctccagatgaacatgagtcgcctccacctgaagatgccccattgtacccccattcacctggatctcagtatcaacagaataaccatgtgcatggacagccatatacaggcccagcagcacatcacatgaacaaccctcagagaactggccaacgagcacaagaaaattatgaaggcagtgaagaagtatccccacctcaaaccaaggatcaatgaaatgcacataattaactggttccatcaagactgtgcacccaggccttacagtccaacctttttctgtgtctggctaatatttaaaactagaaaaactattcctaatcaacatggagtggagagtttattcactgtcttatctgcagaaatttgctgtcaatatrtaacccgcctgcagtggaaagtgtatagtgttttgtaataaatggcctgatgctaatgtgtaaatggcaaaggtgtatatagtatattaatgttgactgttaawtcttaagcaagaaacttttttcttgatgagactcacagatctacacaaactacaaaagttaattttcttgttacacccactgcactctgcaaccagtgttgcctgcctcatggcagttggatcagctcctttacaaaaaagaaaaaaaaaaaaccaacagcaacaaaacagagcccatccatgtcagccacaccaatagtttcatgttaattctttgccactggagtcaattttgctatgagcaatgtaaggctggtaattctgatattaggttaatcactttgaagctatagttatgctgtaacatttagcatggcttcacaccaagttagtgtagccaatgaggaaaaagttaccataatgacagcagttgtccgagaagtgacagctgtattactcagagcttttacttcttacacctagaatattaaaatataaaacaaggggagaaatgtgacagtctattttcagttgcacatatgttccttatatataatgtttgacagttcaatctctgggtggaataaagaacacttacgtatcagtaatgggaatttttaaagatttaaaacaaatatgcaaaaatttgctatgccaagatgctggagcataatataagactgtatttggtgtgcttgttttgtttctttggtagagtttattaggtgaatcttctaaaactttccttctgttggatcccagtgacgtggaagtcatcagaaccccacgrtacttggagtacctctctgcaccmagatagctggctgattttctgctcagtcacaattttacttgaaagcaagaattgtcctagctccttttccattattccaaaacgtttaacgttcaaagcagggtctcattaaaaaagaaactactggttgatataattgagatattacaatttcagaataaacatttgattaaaaataaggaaatcctcagttcatactgtatttaaaagagaattggtaacttgaatgtgtgtaattttttggaacctgtctaaaaaccaaatacccctgcaaacagatacagcccaccctattctatttaaatattttgctgttttattttatagaaattattttgctgaattcacaaatagaatttgatttaagaagaactttttgtcctgtggtgtgtttttggttttttttttggttactttttttgtcctttttttttttttttaaaagaggactgcatattaaaattcattctgtgcatagcatgcctaggcatgacactgattcaggatttcagtcacatcaagtttttgtgcacagaaagatwtgacctttggccctctactgaagattttgagaaatcaggatgttgacactgtaaaagtttcctaacataatcttgtactt

SEQ ID NO: 200 - DNA, 9215 bp, Homo sapiens
sgccttgatgttaaaagtgaagcatgtcagcgatttttccgtgatgggctaacaatatcattcactaaaattcttacagatgaagcagtgagtggctggaagtttgaaattcatgtgatctggtggagctatgtgtggccaagttgtcccaagactggtttccacttttagaacttcttgccatggccttaaatcctcattgcaaattccatatctacaatggtacacgtccatgtgaatcagtttcctcaagtgttcagttgcctgaagatgaactctttgctcgttctccagatcctcgatcaccaaagggttggctagtggatcttctcaacaaatttggcactttaaatgggttccagattttgcatgatcgttttattaatggatcagcattaaacgttcaaataattgcagcccttattaaaccatttgggcaatgctatgagtttctcactcttcatacagtgaaaaagtactttcttccaataatagaaatggttccacagtttttagaaaacttaactgatgaagaactgaaaaaagaagcaaagaatgaagccaaaaatgatgctctttcaatgattattaaatctttgaagaatttagcttcaagggttccaggacaagaagaaactgttaaaaacttagaaatatttaggttaaaaatgatacttagattattgcaaatttcttctttcaatggaaagatgaatgcactgaatgaagttaataaggtgatatctagtgtatcatactatactcatcgacatggtaatcctgaggaggaagagtggctcacagctgaacgaatggcagaatggatacagcagaacaatatcttatccatagtgttgcgagatagtcttcatcagccacagtatgtagaaaagttagagaagattcttcgttttgtcatcaaagaaaaagctctgaccttacaggatcttgataatatctgggcagcacaggcagggaaacatgaagccattgtgaagaatgtacatgatctcctggcaaaattggcatgggatttttctcctgaacaacttgatcatctttttgattgttttaaggccagtggacaaatgcgagtaaaaagcaacgtgaaaagctacttgagctgatacgtcgtcttgcagaagatgataaagatggtgtgatggcacacaargtgttgaaccttctgtggaatctggctcacagtgatgatgtgcctgtagatatcatggacctggctctcagtgcccacataaaaatactagattacagttgctcccaggaccgtgatacacaaaagatccaatggatagatcgctttatagaagaacttcgcacaaatgacaaatgggttattcccgcactgaaacaaattagagaaatttgtagtttgtttggtgaagcgcctcaaaatttgagtcaaactcagcgaagtccccatgtgttttatcgccatgacttaatcaatcaacttcaacacaatcatgccctagttactttggtagcagaaaaccttgcaacttacatggaaagcatgagactatatgctagagaccatgaagattatgacccacaaactgtgaggctgggaagtagatatagtcatgttcaagaagttcaagaacggcttaacttccttagatttttattgaaggatggtcagctgtggctatgtgctcctcaggcaaaacaaatatggaaatgcttagctgagaatgcagtttacctttgtgatcgtgaagcctgttttaagtggtattccaagttgatgggggatgaaccagacttagatcctgatattaataaggacttctttgaaagtaatgtgcttcagcttgatccttctctgttaactgaaaatggaatgaagtgttttgagcgattcttcaaagctgtgaattgtcgagaaggaaaactagtagcaaaaaggagagcctatatgatggatgacttggagttaataggattagattacctttggagggtcgtgattcagagtaatgatgatattgccagcagagctatagatctcctcaaagagatatacacgaaccttggtccaagactacaagtcaatcaggtggtgatccatgaagacttcattcagtcttgttttgatcgtctgaaggcttcctatgacacattgtgtgttttggatggtgacaaagacagtgttaattgtgcaagacaggaagctgttcgaatggttcgagtattaactgttttaagggaatatataaatgaatgtgacagtgattatcatgaggaaagaacaattctccctatgtcgagagcattccgcggtaaacacctctcttttgtagttcgatttccaaaccagggcagacaggttgatgacttggaggtatggtctcatacaaatgatacaattggttcagtacgacgatgtattctcaatcgtattaaagccaacgtagcccatacaaaaattgagctctttgtgggcggtgagctgatagatcctgcagatgatagaaagttgattggacaattaaacttaaaagataaatcgcttattycagccaaacttacacagataagttccaatatgccttcaagccctgatagctcttctgattcctccactggatctcctggaaaccatggtaatcattacagtgatggtcccaatccagaagtggaaagctgtttgcctggagtgataatgtcactgcatcccagatacatctcttttctttggcaagttgcagacttaggtagcagcctaaatatgccaccccttagagatggagcaagagtacttatgaaacttatyccgccagatagcacaacgatagaaaaattaagagctatttgtttagaccatgccaaacttggagaaagcagccttagtccatctcttgactcacttttctttggtccttcagcctcacaagtgctatatctaacagaggtagtctatgccttgttaatgcctgctggtgcacctctggctgatgattcctctgattttcagtttcacttcttgaaaagtggtggcctaccccttgtactgagtatgctaaccagaaataacttcctaccgaatgcagatatggaaactcgaaggggtgcctacctcaatgctcttaaaatagccaagcttttgctaactgccattggctatggtcatgttcgagctgtggcagaagcttgtcagccaggtgtagaaggtgtgaatcccatgacacagatcaaccaagttacccatgatcaagcagtggtgctacaaagtgcccttcagagcattcctaatccatcatccgagtgcatgcttagaaatgtgtcagttcgtcttgctcagcagatatctgatgaggcttcaagatatatgcctgatatttgtgtaattagagctatacaaaaaattatctgggcatcaggatgtgggtcgttacagctagtatttagcccaaatgaagaaatcactaaaatttatgagaagaccaatgcaggcaatgagccagacttggaagacgaacaggtttgctgtgaagcattggaagtgatgaccttatgttttgccttgattccaacagccttagatgctcttagtaaagaaaaggcttggcagacattcatcattgacttactattgcactgtcacagcaaaactgttcgtcaggtggcacaggagcagttctttttaatgtgcaccagatgttgcatgggacaccggcctctacttttcttcattactctactctttactgttttgrggagcacagcaagagagagagctaaacactcaggcgactactttactcttttaagacaccttcttaattacgcttacaatagtaatattaatgtacccaatgctgaagttcttccaataatgaaattgattggcttaaaagaattagggatgatgttaaaagaacaggagaaacgggtattgaagagacgatcttagagggccaccttggagtgacaaaggagttactggcctttcaaacttctgagaaaaaatttcatattggttgtgaaaaaggaggtgctaatctcattaaagaattaattgatgatttcatatttcctgcatccaatgtttacctacagtatatgagaaatggagagcttccagctgaacaggctattccggtctgtggttcaccacctacaattaatgctggttttgaattacttgtagcattagctgttggctgtgtgaggaatctcaaacaaatagtagattctttgactgaaatgtattacattggcacagcaataactacttgtgaagcacttactgagtgggaatatctgccacctgttggaccccgcccacccaaaggattcgtggggctgaaaaatgccggtgctacttgttacatgaattctgtgattcagcaactctacatgattccttccattaggaacggtattcttgccattgaaggcacaggtagtgatgtagatgatgatatgtctggggatgagaarcaggacaatgagagcaatgttgatcccagggatgatgtatttggatatcctcaacaatttgaagataaaccagcattaagtaaaactgaagatagaaaagagtacaacattggtgtcctaagacaccttcaggtcatctttggtcatttagctgcttctcgactgcaatactatgtgcccagaggattttggaaacagttcaggctttggggtgagcctgttaatctgcgtgaacaacacgatgctttagaattttttaattcattggtggatagtttagatgaagctttaaaagctttaggacatccagctatgctaagtaaagtcttaggaggttcctttgctgatcagaagatctgccaaggctgcccacataggtacgaatgtgaagaatcttttacgaccctaaacgtagacattagaaatcaccaaaatcttcttgattctttggaacagtatgtcaaaggagatttactagaaggtgcaaatgcatatcattgtgaaaaatgcaataaaaaggttgataccgtaaagcgcttgctgattaaaaaattacctcctgttcttgctatacaactaaagcgatttgactatgactgggaaagagaatgtgcaatcaagttcaatgattattttgaatttcctcgagagctggacatggaaccttacacagttgcaggtgtcgcaaagctggaaggggataatgtaaacccagagagtcagttgatacaacagagtgagcagtctgaaagtgagacagcaggaagcacaaaatacagacttgtgggtgtgctcgtacacagtggtcaagcgagtggggggcattattattcttacatcatccaaaggaatggtggagatggtgagagaaatcgctggtataaatttgatgatggtgatgtaacagaatgtaaaatggatgatgacgaagaaatgaaaaaccagtgttttggtggagagtacatgggagaagtgtttgatcacatgatgaagcgtatgtcatacaggcgccagaaaaggtggtggaatgcttatatacttttttatgaacgaatggacacaatagaccaagatgatgagttgataagatatatatcagagcttgctatcaccaccagacctcatcagattattatgccatcagccattgagagaagtgtacggaaacagaacgtacaattcatgcataaccgaatgcagtacagtatggagtattttcagtttatgaaaaaactgcttacatgtaatggcgtttacttaaaccctcctcccgggcaagatcacctgttgcctgaagcagaagaaatcactatgatcagtattcaacttgctgctaggttcctctttactacaggatttcacacaaagaaagtagtccgtggctctgccagtgattggtatgatgcattgtgtattctccttcgtcacagcaagaatgtacgtttttggtttgctcataacgtcctttttaatgtttcaaatcgcttctccgaataccttctggagtgccctagtgcagaagtgaggggtgcgtttgcaaaacttatagtctttattgcacatttttccttgcaagatgggccatgtccttcaccttttgcctctcctggaccttctagtcaggcttatgacaacttaagcttgagtgatcacttactaagagcagtactaaatctcttgagaagggaagtttcagagcatgggcgtcatttacagcagtatttcaacctgtttgtaatgtatgccaatttaggtgtggcagagaagacacagcttctgaaattgagtgtacctgctacttttatgcttgtgtctttagatgaaggtccaggtcctccaatcaaataccagtatgctgaattaggcaaattatactcagtagtgtcacagctgatccgctgttgcaatgtctcttcaagaatgcagtcttcaatcaatggtaatcctcctcttcccaatccttttggtgatcctaatttatcacaacctataatgccaattcagcagaatgtggcagacattttatttgtgagaacaagttatgtgaagaaaatcattgaagactgcagtaattcagaggaaaccgtcaaattgcttcgtttttgctgctgggagaatcctcagttctcatctactgtcctcagtgaacttctctggcaggttgcatattcctatacctatgaactgcggccctatttggatctgcttttgcaaatcttactgattgaggactcctggcaaactcacagaattcataatgcactgaaaggaattccagatgaccgagatgggctgtttgacacaatccagcgctctaagaatcactatcaaaaaagagcataccagtgtataaaatgtatggtagctctatttagtaactgtcctgttgcttaccaaatcctgcagggcaatggagatcttaaaagaaagtggacctgggcagtggaatggcttggagatgaacttgaaagaagaccatatactggcaatcctcagtacacttacaacaattggtctcccccagtgcaaagcaatgaaacgtccaatggttatttcttggagagatcacatagtgctaggatgacacttgcaaaagcttgtgaactctgtccagaggaggagccagatgaccaagatgctccagatgaacatgagtcgcctccacctgaagatgccccattgtacccccattcacctggatctcagtatcaacagaataaccatgtgcatggacagccatatacaggcccagcagcacatcacatgaacaaccctcagagaactggccaacgagcacaagaaaattatgaaggcagtgaagaagtatccccacctcaaaccaaggatcaatgaaatgcacataattaactggttccatcaagactgtgcacccaggccttacagtccaacctttttctgtgtctggctaatatttaaaactagaaaaactattcctaatcaacatggagtggagagtttattcactgtcttatctgcagaaatttgctgtcaatatrtaacccgcctgcagtggaaagtgtatagtgttttgtaataaatggcctgatgctaatgtgtaaatggcaaaggtgtatatagtatattaatgttgactgttaawtcttaagcaagaaacttttttcttgatgagactcacagatctacacaaactacaaaagttaattttcttgttacacccactgcactctgcaaccagtgttgcctgcctcatggcagttggatcagctcctttacaaaaaagaaaaaaaaaaaaccaacagcaacaaaacagagcccatccatgtcagccacaccaatagtttcatgttaattctttgccactggagtcaattttgctatgagcaatgtaaggctggtaacctttaaattatttggttgatgtggaaaattggtgatgtaacactgtttctagatttttttcattgcctttttattctgatattaggttaatcactttgaagctatagttatgctgtaacatttagcatggcttcacaccaagttagtgtagccaatgaggaaaaagttaccataatgacagcagttgtccgagaagtgacagctgtattactcagagcttttacttcttacacctagaatattaaaatataaaacaaggggagaaatgtgacagtctattttcagttgcacatatgttccttatatataatgtttgacagttcaatctctgggtggaataaagaacacttacgtatcagtaatgggaatttttaaagatttaaaacaaatatgcaaaaatttgctatgccaagatgctggagcataatataagactgtatttggtgtgcttgttttgtttctttggtagagtttattaggtgaatcttctaaaactttccttctgttggatcccagtgacgtggaagtcatcagaaccccacggracttggagtacctctctgcaccamgatagctggctgattttctgctcagtcacaattttacttgaaagcaagaattgtcctagctccttttccattattccaaaacgtttaacgttcaaagcagggtctcattaaaaaagaaactactggttgatataattgagatattacaatttcagaataaacatttgattaaaaataaggaaatcctcagttcatactgtatttaaaagagaattggtaacttgaatgtgtgtaattttttggaacctgtctaaaaaccaaatacccctgcaaacagatacagcccaccctattctatttaaatattttgctgttttattttatagaaattattttgctgaattcacaaatagaatttgatttaagaagaactttttgtcctgtggtgtgtttttggttttttttttggttactttttttgtcctttttttttttttttaaaagaggactgcatattaaaattcattctgtgcatagcatgcctaggcatgacactgattcaggatttcagtcacatcaagtttttgtgcacagaaagawttgacctttggccctctactgaagattttgagaaatcaggatgttgacactgtaaaagtttcctaacataatcttgtactttttgtatgttttttatatacatgtatatttaatgagcacaagcttggttgtattttttacaattcagttaatagggaaatgttttgtcaaaaggctacacttggaactgaacaaagcagaaacaaaattgagcattgcattattttgtgattaaaaggggcaggtatttaagataaa

SEQ ID NO: 201 - DNA, 9263 bp, Homo sapiens
sgccttgatgttaaaagtgaagcatgtcagcgatttttccgtgatgggctaacaatatcattcactaaaattcttacagatgaagcagtgagtggctggaagtttgaaattcatgtgatctggtggagctatgtgtggccaagttgtcccaagactggtttccacttttagaacttcttgccatggccttaaatcctcattgcaaattccatatctacaatggtacacgtccatgtgaatcagtttcctcaagtgttcagttgcctgaagatgaactctttgctcgttctccagatcctcgatcaccaaagggttggctagtggatcttctcaacaaatttggcactttaaatgggttccagattttgcatgatcgttttattaatggatcagcattaaacgttcaaataattgcagcccttattaaaccatttgggcaatgctatgagtttctcactcttcatacagtgaaaaagtactttcttccaataatagaaatggttccacagtttttagaaaacttaactgatgaagaactgaaaaaagaagcaaagaatgaagccaaaaatgatgctctttcaatgattattaaatctttgaagaatttagcttcaagggttccaggacaagaagaaactgttaaaaacttagaaatatttaggttaaaaatgatacttagattattgcaaatttcttctttcaatggaaagatgaatgcactgaatgaagttaataaggtgatatctagtgtatcatactatactcatcgacatggtaatcctgaggaggaagagtggctcacagctgaacgaatggcagaatggatacagcagaacaatatcttatccatagtgttgcgagatagtcttcatcagccacagtatgtagaaaagttagagaagattcttcgttttgtcatcaaagaaaaagctctgaccttacaggatcttgataatatctgggcagcacaggcagggaaacatgaagccattgtgaagaatgtacatgatctcctggcaaaattggcatgggatttttctcctgaacaacttgatcatctttttgattgttttaaggccagtggacaaatgcgagtaaaaagcaacgtgaaaagctacttgagctgatacgtcgtcttgcagaagatgataaagatggtgtgatggcacacaargtgttgaaccttctgtggaatctggctcacagtgatgatgtgcctgtagatatcatggacctggctctcagtgcccacataaaaatactagattacagttgctcccaggaccgtgatacacaaaagatccaatggatagatcgctttatagaagaacttcgcacaaatgacaaatgggttattcccgcactgaaacaaattagagaaatttgtagtttgtttggtgaagcgcctcaaaatttgagtcaaactcagcgaagtccccatgtgttttatcgccatgacttaatcaatcaacttcaacacaatcatgccctagttactttggtagcagaaaaccttgcaacttacatggaaagcatgagactatatgctagagaccatgaagattatgacccacaaactgtgaggctgggaagtagatatagtcatgttcaagaagttcaagaacggcttaacttccttagatttttattgaaggatggtcagctgtggctatgtgctcctcaggcaaaacaaatatggaaatgcttagctgagaatgcagtttacctttgtgatcgtgaagcctgttttaagtggtattccaagttgatgggggatgaaccagacttagatcctgatattaataaggacttctttgaaagtaatgtgcttcagcttgatccttctctgttaactgaaaatggaatgaagtgttttgagcgattcttcaaagctgtgaattgtcgagaaggaaaactagtagcaaaaaggagagcctatatgatggatgacttggagttaataggattagattacctttggagggtcgtgattcagagtaatgatgatattgccagcagagctatagatctcctcaaagagatatacacgaaccttggtccaagactacaagtcaatcaggtggtgatccatgaagacttcattcagtcttgttttgatcgtctgaaggcttcctatgacacattgtgtgttttggatggtgacaaagacagtgttaattgtgcaagacaggaagctgttcgaatggttcgagtattaactgttttaagggaatatataaatgaatgtgacagtgattatcatgaggaaagaacaattctccctatgtcgagagcattccgcggtaaacacctctcttttgtagttcgatttccaaaccagggcagacaggttgatgacttggaggtatggtctcatacaaatgatacaattggttcagtacgacgatgtattctcaatcgtattaaagccaacgtagcccatacaaaaattgagctctttgtgggcggtgagctgatagatcctgcagatgatagaaagttgattggacaattaaacttaaaagataaatcgcttattycagccaaacttacacagataagttccaatatgccttcaagccctgatagctcttctgattcctccactggatctcctggaaaccatggtaatcattacagtgatggtcccaatccagaagtggaaagctgtttgcctggagtgataatgtcactgcatcccagatacatctcttttctttggcaagttgcagacttaggtagcagcctaaatatgccaccccttagagatggagcaagagtacttatgaaacttatyccgccagatagcacaacgatagaaaaattaagagctatttgtttagaccatgccaaacttggagaaagcagccttagtccatctcttgactcacttttctttggtccttcagcctcacaagtgctatatctaacagaggtagtctatgccttgttaatgcctgctggtgcacctctggctgatgattcctctgattttcagtttcacttcttgaaaagtggtggcctaccccttgtactgagtatgctaaccagaaataacttcctaccgaatgcagatatggaaactcgaaggggtgcctacctcaatgctcttaaaatagccaagcttttgctaactgccattggctatggtcatgttcgagctgtggcagaagcttgtcagccaggtgtagaaggtgtgaatcccatgacacagatcaaccaagttacccatgatcaagcagtggtgctacaaagtgcccttcagagcattcctaatccatcatccgagtgcatgcttagaaatgtgtcagttcgtcttgctcagcagatatctgatgaggcttcaagatatatgcctgatatttgtgtaattagagctatacaaaaaattatctgggcatcaggatgtgggtcgttacagctagtatttagcccaaatgaagaaatcactaaaatttatgagaagaccaatgcaggcaatgagccagacttggaagacgaacaggtttgctgtgaagcattggaagtgatgaccttatgttttgccttgattccaacagccttagatgctcttagtaaagaaaaggcttggcagacattcatcattgacttactattgcactgtcacagcaaaactgttcgtcaggtggcacaggagcagttctttttaatgtgcaccagatgttgcatgggacaccggcctctacttttcttcattactctactctttactgttttgrggagcacagcaagagagagagctaaacactcaggcgactactttactcttttaagacaccttcttaattacgcttacaatagtaatattaatgtacccaatgctgaagttcttccaataatgaaattgattggcttaaaagaattagggatgatgttaaaagaacaggagaaacgggtattgaagagacgatcttagagggccaccttggagtgacaaaggagttactggcctttcaaacttctgagaaaaaatttcatattggttgtgaaaaaggaggtgctaatctcattaaagaattaattgatgatttcatatttcctgcatccaatgtttacctacagtatatgagaaatggagagcttccagctgaacaggctattccggtctgtggttcaccacctacaattaatgctggttttgaattacttgtagcattagctgttggctgtgtgaggaatctcaaacaaatagtagattctttgactgaaatgtattacattggcacagcaataactacttgtgaagcacttactgagtgggaatatctgccacctgttggaccccgcccacccaaaggattcgtggggctgaaaaatgccggtgctacttgttacatgaattctgtgattcagcaactctacatgattccttccattaggaacggtattcttgccattgaaggcacaggtagtgatgtagatgatgatatgtctggggatgagaarcaggacaatgagagcaatgttgatcccagggatgatgtatttggatatcctcaacaatttgaagataaaccagcattaagtaaaactgaagatagaaaagagtacaacattggtgtcctaagacaccttcaggtcatctttggtcatttagctgcttctcgactgcaatactatgtgcccagaggattttggaaacagttcaggctttggggtgagcctgttaatctgcgtgaacaacacgatgctttagaattttttaattcattggtggatagtttagatgaagctttaaaagctttaggacatccagctatgctaagtaaagtcttaggaggttcctttgctgatcagaagatctgccaaggctgcccacataggtacgaatgtgaagaatcttttacgaccctaaacgtagacattagaaatcaccaaaatcttcttgattctttggaacagtatgtcaaaggagatttactagaaggtgcaaatgcatatcattgtgaaaaatgcaataaaaaggttgataccgtaaagcgcttgctgattaaaaaattacctcctgttcttgctatacaactaaagcgatttgactatgactgggaaagagaatgtgcaatcaagttcaatgattattttgaatttcctcgagagctggacatggaaccttacacagttgcaggtgtcgcaaagctggaaggggataatgtaaacccagagagtcagttgatacaacagagtgagcagtctgaaagtgagacagcaggaagcacaaaatacagacttgtgggtgtgctcgtacacagtggtcaagcgagtggggggcattattattcttacatcatccaaaggaatggtggagatggtgagagaaatcgctggtataaatttgatgatggtgatgtaacagaatgtaaaatggatgatgacgaagaaatgaaaaaccagtgttttggtggagagtacatgggagaagtgtttgatcacatgatgaagcgtatgtcatacaggcgccagaaaaggtggtggaatgcttatatacttttttatgaacgaatggacacaatagaccaagatgatgagttgataagatatatatcagagcttgctatcaccaccagacctcatcagattattatgccatcagccattgagagaagtgtacggaaacagaacgtacaattcatgcataaccgaatgcagtacagtatggagtattttcagtttatgaaaaaactgcttacatgtaatggcgtttacttaaaccctcctcccgggcaagatcacctgttgcctgaagcagaagaaatcactatgatcagtattcaacttgctgctaggttcctctttactacaggatttcacacaaagaaagtagtccgtggctctgccagtgattggtatgatgcattgtgtattctccttcgtcacagcaagaatgtacgtttttggtttgctcataacgtcctttttaatgtttcaaatcgcttctccgaataccttctggagtgccctagtgcagaagtgaggggtgcgtttgcaaaacttatagtctttattgcacatttttccttgcaagatgggccatgtccttcaccttttgcctctcctggaccttctagtcaggcttatgacaacttaagcttgagtgatcacttactaagagcagtactaaatctcttgagaagggaagtttcagagcatgggcgtcatttacagcagtatttcaacctgtttgtaatgtatgccaatttaggtgtggcagagaagacacagcttctgaaattgagtgtacctgctacttttatgcttgtgtctttagatgaaggtccaggtcctccaatcaaataccagtatgctgaattaggcaaattatactcagtagtgtcacagctgatccgctgttgcaatgtctcttcaagaatgcagtcttcaatcaatggtaatcctcctcttcccaatccttttggtgatcctaatttatcacaacctataatgccaattcagcagaatgtggcagacattttatttgtgagaacaagttatgtgaagaaaatcattgaagactgcagtaattcagaggaaaccgtcaaattgcttcgtttttgctgctgggagaatcctcagttctcatctactgtcctcagtgaacttctctggcaggttgcatattcctatacctatgaactgcggccctatttggatctgcttttgcaaatcttactgattgaggactcctggcaaactcacagaattcataatgcactgaaaggaattccagatgaccgagatgggctgtttgacacaatccagcgctctaagaatcactatcaaaaaagagcataccagtgtataaaatgtatggtagctctatttagtaactgtcctgttgcttaccaaatcctgcagggcaatggagatcttaaaagaaagtggacctgggcagtggaatggcttggagatgaacttgaaagaagaccatatactggcaatcctcagtacacttacaacaattggtctcccccagtgcaaagcaatgaaacgtccaatggttatttcttggagagatcacatagtgctaggatgacacttgcaaaagcttgtgaactctgtccagaggaggtaaaaaaagccaccagtgtgcagcagatagaaatggaagagagcaaagagccagatgaccaagatgctccagatgaacatgagtcgcctccacctgaagatgccccattgtacccccattcacctggatctcagtatcaacagaataaccatgtgcatggacagccatatacaggcccagcagcacatcacatgaacaaccctcagagaactggccaacgagcacaagaaaattatgaaggcagtgaagaagtatccccacctcaaaccaaggatcaatgaaatgcacataattaactggttccatcaagactgtgcacccaggccttacagtccaacctttttctgtgtctggctaatatttaaaactagaaaaactattcctaatcaacatggagtggagagtttattcactgtcttatctgcagaaatttgctgtcaatatrtaacccgcctgcagtggaaagtgtatagtgttttgtaataaatggcctgatgctaatgtgtaaatggcaaaggtgtatatagtatattaatgttgactgttaawtcttaagcaagaaacttttttcttgatgagactcacagatctacacaaactacaaaagttaattttcttgttacacccactgcactctgcaaccagtgttgcctgcctcatggcagttggatcagctcctttacaaaaaagaaaaaaaaaaaaccaacagcaacaaaacagagcccatccatgtcagccacaccaatagtttcatgttaattctttgccactggagtcaattttgctatgagcaatgtaaggctggtaacctttaaattatttggttgatgtggaaaattggtgatgtaacactgtttctagatttttttcattgcctttttattctgatattaggttaatcactttgaagctatagttatgctgtaacatttagcatggcttcacaccaagttagtgtagccaatgaggaaaaagttaccataatgacagcagttgtccgagaagtgacagctgtattactcagagcttttacttcttacacctagaatattaaaatataaaacaaggggagaaatgtgacagtctattttcagttgcacatatgttccttatatataatgtttgacagttcaatctctgggtggaataaagaacacttacgtatcagtaatgggaatttttaaagatttaaaacaaatatgcaaaaatttgctatgccaagatgctggagcataatataagactgtatttggtgtgcttgttttgtttctttggtagagtttattaggtgaatcttctaaaactttccttctgttggatcccagtgacgtggaagtcatcagaaccccacggracttggagtacctctctgcaccamgatagctggctgattttctgctcagtcacaattttacttgaaagcaagaattgtcctagctccttttccattattccaaaacgtttaacgttcaaagcagggtctcattaaaaaagaaactactggttgatataattgagatattacaatttcagaataaacatttgattaaaaataaggaaatcctcagttcatactgtatttaaaagagaattggtaacttgaatgtgtgtaattttttggaacctgtctaaaaaccaaatacccctgcaaacagatacagcccaccctattctatttaaatattttgctgttttattttatagaaattattttgctgaattcacaaatagaatttgatttaagaagaactttttgtcctgtggtgtgtttttggttttttttttggttactttttttgtcctttttttttttttttaaaagaggactgcatattaaaattcattctgtgcatagcatgcctaggcatgacactgattcaggatttcagtcacatcaagtttttgtgcacagaaagawttgacctttggccctctactgaagattttgagaaatcaggatgttgacactgtaaaagtttcctaacataatcttgtactttttgtatgttttttatatacatgtatatttaatgagcacaagcttggttgtattttttacaattcagttaatagggaaatgttttgtcaaaaggctacacttggaactgaacaaagcagaaacaaaattgagcattgcattattttgtgattaaaaggggcaggtatttaagataaa

SEQ ID NO: 202 - DNA, 9617 bp, Homo sapiens
cttttctcaagacaactacataagcagacaaaattgcaaagatctgmcctgtgtcgagtatgacagccacgactcgtggctctccggtcggagggaatgacaaccagggccaggctcctgatggacagtctcagccccccctccaacagaatcagacttcatcgcctgattcttccaatgaaaattccccggcaactcccccagatgagcaaggtcaaggtgatgccccaccacagcttgaagatgaggaacctgcatttccacatactgacttggccaagttggatgacatgatcaacaggcctcgatgggtggttccagttttgccgaaaggggaattagaagtgcttttagaagctgctattgatcttagtaaaaaggsccttgatgttaaaagtgaagcatgtcagcgatttttccgtgatgggctaacaatatcattcactaaaattcttacagatgaagcagtgagtggctggaagtttgaaattcataggtgtattattaacaatactcatcgtctggtggagctatgtgtggccaagttgtcccaagactggtttccacttttagaacttcttgccatggccttaaatcctcattgcaaattccatatctacaatggtacacgtccatgtgaatcagtttcctcaagtgttcagttgcctgaagatgaactctttgctcgttctccagatcctcgatcaccaaagggttggctagtggatcttctcaacaaatttggcactttaaatgggttccagattttgcatgatcgttttattaatggatcagcattaaacgttcaaataattgcagcccttattaaaccatttgggcaatgctatgagtttctcactcttcatacagtgaaaaagtactttcttccaataatagaaatggttccacagtttttagaaaacttaactgatgaagaactgaaaaaagaagcaaagaatgaagccaaaaatgatgctctttcaatgattattaaatctttgaagaatttagcttcaagggttccaggacaagaagaaactgttaaaaacttagaaatatttaggttaaaaatgatacttagattattgcaaatttcttctttcaatggaaagatgaatgcactgaatgaagttaataaggtgatatctagtgtatcatactatactcatcgacatggtaatcctgaggaggaagagtggctcacagctgaacgaatggcagaatggatacagcagaacaatatcttatccatagtgttgcgagatagtcttcatcagccacagtatgtagaaaagttagagaagattcttcgttttgtcatcaaagaaaaagctctgaccttacaggatcttgataatatctgggcagcacaggcagggaaacatgaagccattgtgaagaatgtacatgatctcctggcaaaattggcatgggatttttctcctgaacaacttgatcatctttttgattgttttaaggccagtggacaaatgcgagtaaaaagcaacgtgaaaagctacttgagctgatacgtcgtcttgcagaagatgataaagatggtgtgatggcacacaargtgttgaaccttctgtggaatctggctcacagtgatgatgtgcctgtagatatcatggacctggctctcagtgcccacataaaaatactagattacagttgctcccaggaccgtgatacacaaaagatccaatggatagatcgctttatagaagaacttcgcacaaatgacaaatgggttattcccgcactgaaacaaattagagaaatttgtagtttgtttggtgaagcgcctcaaaatttgagtcaaactcagcgaagtccccatgtgttttatcgccatgacttaatcaatcaacttcaacacaatcatgccctagttactttggtagcagaaaaccttgcaacttacatggaaagcatgagactatatgctagagaccatgaagattatgacccacaaactgtgaggctgggaagtagatatagtcatgttcaagaagttcaagaacggcttaacttccttagatttttattgaaggatggtcagctgtggctatgtgctcctcaggcaaaacaaatatggaaatgcttagctgagaatgcagtttacctttgtgatcgtgaagcctgttttaagtggtattccaagttgatgggggatgaaccagacttagatcctgatattaataaggacttctttgaaagtaatgtgcttcagcttgatccttctctgttaactgaaaatggaatgaagtgttttgagcgattcttcaaagctgtgaattgtcgagaaggaaaactagtagcaaaaaggagagcctatatgatggatgacttggagttaataggattagattacctttggagggtcgtgattcagagtaatgatgatattgccagcagagctatagatctcctcaaagagatatacacgaaccttggtccaagactacaagtcaatcaggtggtgatccatgaagacttcattcagtcttgttttgatcgtctgaaggcttcctatgacacattgtgtgttttggatggtgacaaagacagtgttaattgtgcaagacaggaagctgttcgaatggttcgagtattaactgttttaagggaatatataaatgaatgtgacagtgattatcatgaggaaagaacaattctccctatgtcgagagcattccgcggtaaacacctctcttttgtagttcgatttccaaaccagggcagacaggttgatgacttggaggtatggtctcatacaaatgatacaattggttcagtacgacgatgtattctcaatcgtattaaagccaacgtagcccatacaaaaattgagctctttgtgggcggtgagctgatagatcctgcagatgatagaaagttgattggacaattaaacttaaaagataaatcgcttattycagccaaacttacacagataagttccaatatgccttcaagccctgatagctcttctgattcctccactggatctcctggaaaccatggtaatcattacagtgatggtcccaatccagaagtggaaagctgtttgcctggagtgataatgtcactgcatcccagatacatctcttttctttggcaagttgcagacttaggtagcagcctaaatatgccaccccttagagatggagcaagagtacttatgaaacttatyccgccagatagcacaacgatagaaaaattaagagctatttgtttagaccatgccaaacttggagaaagcagccttagtccatctcttgactcacttttctttggtccttcagcctcacaagtgctatatctaacagaggtagtctatgccttgttaatgcctgctggtgcacctctggctgatgattcctctgattttcagtttcacttcttgaaaagtggtggcctaccccttgtactgagtatgctaaccagaaataacttcctaccgaatgcagatatggaaactcgaaggggtgcctacctcaatgctcttaaaatagccaagcttttgctaactgccattggctatggtcatgttcgagctgtggcagaagcttgtcagccaggtgtagaaggtgtgaatcccatgacacagatcaaccaagttacccatgatcaagcagtggtgctacaaagtgcccttcagagcattcctaatccatcatccgagtgcatgcttagaaatgtgtcagttcgtcttgctcagcagatatctgatgaggcttcaagatatatgcctgatatttgtgtaattagagctatacaaaaaattatctgggcatcaggatgtgggtcgttacagctagtatttagcccaaatgaagaaatcactaaaatttatgagaagaccaatgcaggcaatgagccagacttggaagacgaacaggtttgctgtgaagcattggaagtgatgaccttatgttttgccttgattccaacagccttagatgctcttagtaaagaaaaggcttggcagacattcatcattgacttactattgcactgtcacagcaaaactgttcgtcaggtggcacaggagcagttctttttaatgtgcaccagatgttgcatgggacaccggcctctacttttcttcattactctactctttactgttttgrggagcacagcaagagagagagctaaacactcaggcgactactttactcttttaagacaccttcttaattacgcttacaatagtaatattaatgtacccaatgctgaagttcttccaataatgaaattgattggcttaaaagaattagggatgatgttaaaagaacaggagaaacgggtattgaagagacgatcttagagggccaccttggagtgacaaaggagttactggcctttcaaacttctgagaaaaaatttcatattggttgtgaaaaaggaggtgctaatctcattaaagaattaattgatgatttcatatttcctgcatccaatgtttacctacagtatatgagaaatggagagcttccagctgaacaggctattccggtctgtggttcaccacctacaattaatgctggttttgaattacttgtagcattagctgttggctgtgtgaggaatctcaaacaaatagtagattctttgactgaaatgtattacattggcacagcaataactacttgtgaagcacttactgagtgggaatatctgccacctgttggaccccgcccacccaaaggattcgtggggctgaaaaatgccggtgctacttgttacatgaattctgtgattcagcaactctacatgattccttccattaggaacggtattcttgccattgaaggcacaggtagtgatgtagatgatgatatgtctggggatgagaarcaggacaatgagagcaatgttgatcccagggatgatgtatttggatatcctcaacaatttgaagataaaccagcattaagtaaaactgaagatagaaaagagtacaacattggtgtcctaagacaccttcaggtcatctttggtcatttagctgcttctcgactgcaatactatgtgcccagaggattttggaaacagttcaggctttggggtgagcctgttaatctgcgtgaacaacacgatgctttagaattttttaattcattggtggatagtttagatgaagctttaaaagctttaggacatccagctatgctaagtaaagtcttaggaggttcctttgctgatcagaagatctgccaaggctgcccacataggtacgaatgtgaagaatcttttacgaccctaaacgtagacattagaaatcaccaaaatcttcttgattctttggaacagtatgtcaaaggagatttactagaaggtgcaaatgcatatcattgtgaaaaatgcaataaaaaggttgataccgtaaagcgcttgctgattaaaaaattacctcctgttcttgctatacaactaaagcgatttgactatgactgggaaagagaatgtgcaatcaagttcaatgattattttgaatttcctcgagagctggacatggaaccttacacagttgcaggtgtcgcaaagctggaaggggataatgtaaacccagagagtcagttgatacaacagagtgagcagtctgaaagtgagacagcaggaagcacaaaatacagacttgtgggtgtgctcgtacacagtggtcaagcgagtggggggcattattattcttacatcatccaaaggaatggtggagatggtgagagaaatcgctggtataaatttgatgatggtgatgtaacagaatgtaaaatggatgatgacgaagaaatgaaaaaccagtgttttggtggagagtacatgggagaagtgtttgatcacatgatgaagcgtatgtcatacaggcgccagaaaaggtggtggaatgcttatatacttttttatgaacgaatggacacaatagaccaagatgatgagttgataagatatatatcagagcttgctatcaccaccagacctcatcagattattatgccatcagccattgagagaagtgtacggaaacagaacgtacaattcatgcataaccgaatgcagtacagtatggagtattttcagtttatgaaaaaactgcttacatgtaatggcgtttacttaaaccctcctcccgggcaagatcacctgttgcctgaagcagaagaaatcactatgatcagtattcaacttgctgctaggttcctctttactacaggatttcacacaaagaaagtagtccgtggctctgccagtgattggtatgatgcattgtgtattctccttcgtcacagcaagaatgtacgtttttggtttgctcataacgtcctttttaatgtttcaaatcgcttctccgaataccttctggagtgccctagtgcagaagtgaggggtgcgtttgcaaaacttatagtctttattgcacatttttccttgcaagatgggccatgtccttcaccttttgcctctcctggaccttctagtcaggcttatgacaacttaagcttgagtgatcacttactaagagcagtactaaatctcttgagaagggaagtttcagagcatgggcgtcatttacagcagtatttcaacctgtttgtaatgtatgccaatttaggtgtggcagagaagacacagcttctgaaattgagtgtacctgctacttttatgcttgtgtctttagatgaaggtccaggtcctccaatcaaataccagtatgctgaattaggcaaattatactcagtagtgtcacagctgatccgctgttgcaatgtctcttcaagaatgcagtcttcaatcaatggtaatcctcctcttcccaatccttttggtgatcctaatttatcacaacctataatgccaattcagcagaatgtggcagacattttatttgtgagaacaagttatgtgaagaaaatcattgaagactgcagtaattcagaggaaaccgtcaaattgcttcgtttttgctgctgggagaatcctcagttctcatctactgtcctcagtgaacttctctggcaggttgcatattcctatacctatgaactgcggccctatttggatctgcttttgcaaatcttactgattgaggactcctggcaaactcacagaattcataatgcactgaaaggaattccagatgaccgagatgggctgtttgacacaatccagcgctctaagaatcactatcaaaaaagagcataccagtgtataaaatgtatggtagctctatttagtaactgtcctgttgcttaccaaatcctgcagggcaatggagatcttaaaagaaagtggacctgggcagtggaatggcttggagatgaacttgaaagaagaccatatactggcaatcctcagtacacttacaacaattggtctcccccagtgcaaagcaatgaaacgtccaatggttatttcttggagagatcacatagtgctaggatgacacttgcaaaagcttgtgaactctgtccagaggaggagccagatgaccaagatgctccagatgaacatgagtcgcctccacctgaagatgccccattgtacccccattcacctggatctcagtatcaacagaataaccatgtgcatggacagccatatacaggcccagcagcacatcacatgaacaaccctcagagaactggccaacgagcacaagaaaattatgaaggcagtgaagaagtatccccacctcaaaccaaggatcaatgaaatgcacataattaactggttccatcaagactgtgcacccaggccttacagtccaacctttttctgtgtctggctaatatttaaaactagaaaaactattcctaatcaacatggagtggagagtttattcactgtcttatctgcagaaatttgctgtcaatatrtaacccgcctgcagtggaaagtgtatagtgttttgtaataaatggcctgatgctaatgtgtaaatggcaaaggtgtatatagtatattaatgttgactgttaawtcttaagcaagaaacttttttcttgatgagactcacagatctacacaaactacaaaagttaattttcttgttacacccactgcactctgcaaccagtgttgcctgcctcatggcagttggatcagctcctttacaaaaaagaaaaaaaaaaaaccaacagcaacaaaacagagcccatccatgtcagccacaccaatagtttcatgttaattctttgccactggagtcaattttgctatgagcaatgtaaggctggtaacctttaaattatttggttgatgtggaaaattggtgatgtaacactgtttctagatttttttcattgcctttttattctgatattaggttaatcactttgaagctatagttatgctgtaacatttagcatggcttcacaccaagttagtgtagccaatgaggaaaaagttaccataatgacagcagttgtccgagaagtgacagctgtattactcagagcttttacttcttacacctagaatattaaaatataaaacaaggggagaaatgtgacagtctattttcagttgcacatatgttccttatatataatgtttgacagttcaatctctgggtggaataaagaacacttacgtatcagtaatgggaatttttaaagatttaaaacaaatatgcaaaaatttgctatgccaagatgctggagcataatataagactgtatttggtgtgcttgttttgtttctttggtagagtttattaggtgaatcttctaaaactttccttctgttggatcccagtgacgtggaagtcatcagaaccccacggracttggagtacctctctgcaccamgatagctggctgattttctgctcagtcacaattttacttgaaagcaagaattgtcctagctccttttccattattccaaaacgtttaacgttcaaagcagggtctcattaaaaaagaaactactggttgatataattgagatattacaatttcagaataaacatttgattaaaaataaggaaatcctcagttcatactgtatttaaaagagaattggtaacttgaatgtgtgtaattttttggaacctgtctaaaaaccaaatacccctgcaaacagatacagcccaccctattctatttaaatattttgctgttttattttatagaaattattttgctgaattcacaaatagaatttgatttaagaagaactttttgtcctgtggtgtgtttttggttttttttttggttactttttttgtcctttttttttttttttaaaagaggactgcatattaaaattcattctgtgcatagcatgcctaggcatgacactgattcaggatttcagtcacatcaagtttttgtgcacagaaagawttgacctttggccctctactgaagattttgagaaatcaggatgttgacactgtaaaagtttcctaacataatcttgtactttttgtatgttttttatatacatgtatatttaatgagcacaagcttggttgtattttttacaattcagttaatagggaaatgttttgtcaaaaggctacacttggaactgaacaaagcagaaacaaaattgagcattgcattattttgtgattaaaaggggcaggtatttaagataaa

SEQ ID NO: 203 - DNA, 9049 bp, Homo sapiens
sgccttgatgttaaaagtgaagcatgtcagcgatttttccgtgatgggctaacaatatcattcactaaaattcttacagatgaagcagtgagtggctggaagtttgaaattcatgtgagtcttgcatttgactttaaaggatcagatttacatagtgatgcctgtgagtgggaagagaggtgtattattaacaatactcatcgtctggtggagctatgtgtggccaagttgtcccaagactggtttccacttttagaacttcttgccatggccttaaatcctcattgcaaattccatatctacaatggtacacgtccatgtgaatcagtttcctcaagtgttcagttgcctgaagatgaactctttgctcgttctccagatcctcgatcaccaaagggttggctagtggatcttctcaacaaatttggcactttaaatgggttccagattttgcatgatcgttttattaatggatcagcattaaacgttcaaataattgcagcccttattaaaccatttgggcaatgctatgagtttctcactcttcatacagtgaaaaagtactttcttccaataatagaaatggttccacagtttttagaaaacttaactgatgaagaactgaaaaaagaagcaaagaatgaagccaaaaatgatgctctttcaatgattattaaatctttgaagaatttagcttcaagggttccaggacaagaagaaactgttaaaaacttagaaatatttaggttaaaaatgatacttagattattgcaaatttcttctttcaatggaaagatgaatgcactgaatgaagttaataaggtgatatctagtgtatcatactatactcatcgacatggtaatcctgaggaggaagagtggctcacagctgaacgaatggcagaatggatacagcagaacaatatcttatccatagtgttgcgagatagtcttcatcagccacagtatgtagaaaagttagagaagattcttcgttttgtcatcaaagaaaaagctctgaccttacaggatcttgataatatctgggcagcacaggcagggaaacatgaagccattgtgaagaatgtacatgatctcctggcaaaattggcatgggatttttctcctgaacaacttgatcatctttttgattgttttaaggccagtggacaaatgcgagtaaaaagcaacgtgaaaagctacttgagctgatacgtcgtcttgcagaagatgataaagatggtgtgatggcacacaargtgttgaaccttctgtggaatctggctcacagtgatgatgtgcctgtagatatcatggacctggctctcagtgcccacataaaaatactagattacagttgctcccaggaccgtgatacacaaaagatccaatggatagatcgctttatagaagaacttcgcacaaatgacaaatgggttattcccgcactgaaacaaattagagaaatttgtagtttgtttggtgaagcgcctcaaaatttgagtcaaactcagcgaagtccccatgtgttttatcgccatgacttaatcaatcaacttcaacacaatcatgccctagttactttggtagcagaaaaccttgcaacttacatggaaagcatgagactatatgctagagaccatgaagattatgacccacaaactgtgaggctgggaagtagatatagtcatgttcaagaagttcaagaacggcttaacttccttagatttttattgaaggatggtcagctgtggctatgtgctcctcaggcaaaacaaatatggaaatgcttagctgagaatgcagtttacctttgtgatcgtgaagcctgttttaagtggtattccaagttgatgggggatgaaccagacttagatcctgatattaataaggacttctttgaaagtaatgtgcttcagcttgatccttctctgttaactgaaaatggaatgaagtgttttgagcgattcttcaaagctgtgaattgtcgagaaggaaaactagtagcaaaaaggagagcctatatgatggatgacttggagttaataggattagattacctttggagggtcgtgattcagagtaatgatgatattgccagcagagctatagatctcctcaaagagatatacacgaaccttggtccaagactacaagtcaatcaggtggtgatccatgaagacttcattcagtcttgttttgatcgtctgaaggcttcctatgacacattgtgtgttttggatggtgacaaagacagtgttaattgtgcaagacaggaagctgttcgaatggttcgagtattaactgttttaagggaatatataaatgaatgtgacagtgattatcatgaggaaagaacaattctccctatgtcgagagcattccgcggtaaacacctctcttttgtagttcgatttccaaaccagggcagacaggttgatgacttggaggtatggtctcatacaaatgatacaattggttcagtacgacgatgtattctcaatcgtattaaagccaacgtagcccatacaaaaattgagctctttgtgggcggtgagctgatagatcctgcagatgatagaaagttgattggacaattaaacttaaaagataaatcgcttattycagccaaacttacacagataagttccaatatgccttcaagccctgatagctcttctgattcctccactggatctcctggaaaccatggtaatcattacagtgatggtcccaatccagaagtggaaagctgtttgcctggagtgataatgtcactgcatcccagatacatctcttttctttggcaagttgcagacttaggtagcagcctaaatatgccaccccttagagatggagcaagagtacttatgaaacttatyccgccagatagcacaacgatagaaaaattaagagctatttgtttagaccatgccaaacttggagaaagcagccttagtccatctcttgactcacttttctttggtccttcagcctcacaagtgctatatctaacagaggtagtctatgccttgttaatgcctgctggtgcacctctggctgatgattcctctgattttcagtttcacttcttgaaaagtggtggcctaccccttgtactgagtatgctaaccagaaataacttcctaccgaatgcagatatggaaactcgaaggggtgcctacctcaatgctcttaaaatagccaagcttttgctaactgccattggctatggtcatgttcgagctgtggcagaagcttgtcagccaggtgtagaaggtgtgaatcccatgacacagatcaaccaagttacccatgatcaagcagtggtgctacaaagtgcccttcagagcattcctaatccatcatccgagtgcatgcttagaaatgtgtcagttcgtcttgctcagcagatatctgatgaggcttcaagatatatgcctgatatttgtgtaattagagctatacaaaaaattatctgggcatcaggatgtgggtcgttacagctagtatttagcccaaatgaagaaatcactaaaatttatgagaagaccaatgcaggcaatgagccagacttggaagacgaacaggtttgctgtgaagcattggaagtgatgaccttatgttttgccttgattccaacagccttagatgctcttagtaaagaaaaggcttggcagacattcatcattgacttactattgcactgtcacagcaaaactgttcgtcaggtggcacaggagcagttctttttaatgtgcaccagatgttgcatgggacaccggcctctacttttcttcattactctactctttactgttttgrggagcacagcaagagagagagctaaacactcaggcgactactttactcttttaagacaccttcttaattacgcttacaatagtaatattaatgtacccaatgctgaagttcttccaataatgaaattgattggcttaaaagaattagggatgatgttaaaagaacaggagaaacgggtattgaagagacgatcttagagggccaccttggagtgacaaaggagttactggcctttcaaacttctgagaaaaaatttcatattggttgtgaaaaaggaggtgctaatctcattaaagaattaattgatgatttcatatttcctgcatccaatgtttacctacagtatatgagaaatggagagcttccagctgaacaggctattccggtctgtggttcaccacctacaattaatgctggttttgaattacttgtagcattagctgttggctgtgtgaggaatctcaaacaaatagtagattctttgactgaaatgtattacattggcacagcaataactacttgtgaagcacttactgagtgggaatatctgccacctgttggaccccgcccacccaaaggattcgtggggctgaaaaatgccggtgctacttgttacatgaattctgtgattcagcaactctacatgattccttccattaggaacggtattcttgccattgaaggcacaggtagtgatgtagatgatgatatgtctggggatgagaarcaggacaatgagagcaatgttgatcccagggatgatgtatttggatatcctcaacaatttgaagataaaccagcattaagtaaaactgaagatagaaaagagtacaacattggtgtcctaagacaccttcaggtcatctttggtcatttagctgcttctcgactgcaatactatgtgcccagaggattttggaaacagttcaggctttggggtgagcctgttaatctgcgtgaacaacacgatgctttagaattttttaattcattggtggatagtttagatgaagctttaaaagctttaggacatccagctatgctaagtaaagtcttaggaggttcctttgctgatcagaagatctgccaaggctgcccacataggtacgaatgtgaagaatcttttacgaccctaaacgtagacattagaaatcaccaaaatcttcttgattctttggaacagtatgtcaaaggagatttactagaaggtgcaaatgcatatcattgtgaaaaatgcaataaaaaggttgataccgtaaagcgcttgctgattaaaaaattacctcctgttcttgctatacaactaaagcgatttgactatgactgggaaagagaatgtgcaatcaagttcaatgattattttgaatttcctcgagagctggacatggaaccttacacagttgcaggtgtcgcaaagctggaaggggataatgtaaacccagagagtcagttgatacaacagagtgagcagtctgaaagtgagacagcaggaagcacaaaatacagacttgtgggtgtgctcgtacacagtggtcaagcgagtggggggcattattattcttacatcatccaaaggaatggtggagatggtgagagaaatcgctggtataaatttgatgatggtgatgtaacagaatgtaaaatggatgatgacgaagaaatgaaaaaccagtgttttggtggagagtacatgggagaagtgtttgatcacatgatgaagcgtatgtcatacaggcgccagaaaaggtggtggaatgcttatatacttttttatgaacgaatggacacaatagaccaagatgatgagttgataagatatatatcagagcttgctatcaccaccagacctcatcagattattatgccatcagccattgagagaagtgtacggaaacagaacgtacaattcatgcataaccgaatgcagtacagtatggagtattttcagtttatgaaaaaactgcttacatgtaatggcgtttacttaaaccctcctcccgggcaagatcacctgttgcctgaagcagaagaaatcactatgatcagtattcaacttgctgctaggttcctctttactacaggatttcacacaaagaaagtagtccgtggctctgccagtgattggtatgatgcattgtgtattctccttcgtcacagcaagaatgtacgtttttggtttgctcataacgtcctttttaatgtttcaaatcgcttctccgaataccttctggagtgccctagtgcagaagtgaggggtgcgtttgcaaaacttatagtctttattgcacatttttccttgcaagatgggccatgtccttcaccttttgcctctcctggaccttctagtcaggcttatgacaacttaagcttgagtgatcacttactaagagcagtactaaatctcttgagaagggaagtttcagagcatgggcgtcatttacagcagtatttcaacctgtttgtaatgtatgccaatttaggtgtggcagagaagacacagcttctgaaattgagtgtacctgctacttttatgcttgtgtctttagatgaaggtccaggtcctccaatcaaataccagtatgctgaattaggcaaattatactcagtagtgtcacagctgatccgctgttgcaatgtctcttcaagaatgcagtcttcaatcaatggtaatcctcctcttcccaatccttttggtgatcctaatttatcacaacctataatgccaattcagcagaatgtggcagacattttatttgtgagaacaagttatgtgaagaaaatcattgaagactgcagtaattcagaggaaaccgtcaaattgcttcgtttttgctgctgggagaatcctcagttctcatctactgtcctcagtgaacttctctggcaggttgcatattcctatacctatgaactgcggccctatttggatctgcttttgcaaatcttactgattgaggactcctggcaaactcacagaattcataatgcactgaaaggaattccagatgaccgagatgggctgtttgacacaatccagcgctctaagaatcactatcaaaaaagagcataccagtgtataaaatgtatggtagctctatttagtaactgtcctgttgcttaccaaatcctgcagggcaatggagatcttaaaagaaagtggacctgggcagtggaatggcttggagatgaacttgaaagaagaccatatactggcaatcctcagtacacttacaacaattggtctcccccagtgcaaagcaatgaaacgtccaatggttatttcttggagagatcacatagtgctaggatgacacttgcaaaagcttgtgaactctgtccagaggaggagccagatgaccaagatgctccagatgaacatgagtcgcctccacctgaagatgccccattgtacccccattcacctggatctcagtatcaacagaataaccatgtgcatggacagccatatacaggcccagcagcacatcacatgaacaaccctcagagaactggccaacgagcacaagaaaattatgaaggcagtgaagaagtatccccacctcaaaccaaggatcaatgaaatgcacataattaactggttccatcaagactgtgcacccaggccttacagtccaacctttttctgtgtctggctaatatttaaaactagaaaaactattcctaatcaacatggagtggagagtttattcactgtcttatctgcagaaatttgctgtcaatatrtaacccgcctgcagtggaaagtgtatagtgttttgtaataaatggcctgatgctaatgtgtaaatggcaaaggtgtatatagtatattaatgttgactgttaawtcttaagcaagaaacttttttcttgatgagactcacagatctacacaaactacaaaagttaattttcttgttacacccactgcactctgcaaccagtgttgcctgcctcatggcagttggatcagctcctttacaaaaaagaaaaaaaaaaaaccaacagcaacaaaacagagcccatccatgtcagccacaccaatagtttcatgttaattctttgccactggagtcaattttgctatgagcaatgtaaggctggtaattctgatattaggttaatcactttgaagctatagttatgctgtaacatttagcatggcttcacaccaagttagtgtagccaatgaggaaaaagttaccataatgacagcagttgtccgagaagtgacagctgtattactcagagcttttacttcttacacctagaatattaaaatataaaacaaggggagaaatgtgacagtctattttcagttgcacatatgttccttatatataatgtttgacagttcaatctctgggtggaataaagaacacttacgtatcagtaatgggaatttttaaagatttaaaacaaatatgcaaaaatttgctatgccaagatgctggagcataatataagactgtatttggtgtgcttgttttgtttctttggtagagtttattaggtgaatcttctaaaactttccttctgttggatcccagtgacgtggaagtcatcagaaccccacggracttggagtacctctctgcaccamgatagctggctgattttctgctcagtcacaattttacttgaaagcaagaattgtcctagctccttttccattattccaaaacgtttaacgttcaaagcagggtctcattaaaaaagaaactactggttgatataattgagatattacaatttcagaataaacatttgattaaaaataaggaaatcctcagttcatactgtatttaaaagagaattggtaacttgaatgtgtgtaattttttggaacctgtctaaaaaccaaatacccctgcaaacagatacagcccaccctattctatttaaatattttgctgttttattttatagaaattattttgctgaattcacaaatagaatttgatttaagaagaactttttgtcctgtggtgtgtttttggttttttttttggttactttttttgtcctttttttttttttttaaaagaggactgcatattaaaattcattctgtgcatagcatgcctaggcatgacactgattcaggatttcagtcacatcaagtttttgtgcacagaaagawttgacctttggccctctactgaagattttgagaaatcaggatgttgacactgtaaaagtttcctaacataatcttgtactt

SEQ ID NO: 204 - DNA, 1464 bp, Homo sapiens
cctggggcttcctatttcgggagccgggggcgtgggccacgtctcctcatgtgatgcgagggctatttaaagcggcagcccgggcagggagccgccgtcggagcccttgcacgcctgctctcttgtagcttctctcagcctagcccagcatcrctatggtggacgctttcctgggcacctggaagctagtggacagcaagaatttcgatgactacatgaagtcactcggtgtgggttttgctaccaggcaggtggccagcatgaccaagcctaccacaatcatcgaaaagaatggggacattctcaccctaaraacacacagcaccttcaagaacacagagatcagctttaagttgggggtggagttcgatgagacaacagcagatgacaggaaggtcaagtccattgtgacactggatggagggaaacttgttcacctgcagaaatgggacgggcaagagaccacacttgtgcgggagctaattgatggaaaactcatcctgacactcacccacggcactgcagtttgcactcgcacttaygagaaagaggcatgacctgactgcactgttgctgactactactctgccaatcggctacccctcgactcagcaccacattgcctcatttcttcctctgcattttgtacaaatccacgaattcttctggggtcaggtgccactgaccgggatccagttccagttcccatggtgtatgtggtttttttttttttttttttaactgcactcatagggtgctctgaggtcaataaagcaragccaaggccacccagttgcctttttgcctttggtaacataactctgggagtcttggtttatcctgtgtgtcaragagtgggcagaaataacggcctgaaggttactgaggaagaagcactggatgggagactgaaatggacagtctcggagcctgttaatcagctgatcaccttacacatttaataataaaagagctgtacctacacgttgcctttacactgccccccctccatggtcaaatgacctagttcagtcagtgatggggcttccccaggtttggctattgaactgtcacttcaggcccatcctacactgaaagctcttgggtctggctgttctctgtgaaatgctgtagtctctccctttccagaattcaggttcagggcacagaacccaggcttgtaccatggtggtgggagaaaatgaccactggccaagaggactgctgacctgtgcaccaggctagtacttatgactacaaattcttactgcttctctaatcaactctgagggaagagggcatctgatcattacaaaagggagggcttataagtgatctcccaagaaggcagtgatctgctagtgcctttggctctgtacctctgctgggcatctctccaaggtctaaggtaacatattaaatgtttttgtcagctaatgcaggctcagtgactttaagtctrta

SEQ ID NO: 205 - DNA, 804 bp, Homo sapiens
cctggggcttcctatttcgggagccgggggcgtgggccacgtctcctcatgtgatgcgagggctatttaaagcggcagcccgggcagggagccgccgtcggagcccttgcacgcctgctctcttgtagcttctctcagcctagcccagcatcrctatggtggacgctttcctgggcacctggaagctagtggacagcaagaatttcgatgactacatgaagtcactcggtgtgggttttgctaccaggcaggtggccagcatgaccaagcctaccacaatcatcgaaaagaatggggacattctcaccctaaraacacacagcaccttcaagaacacagagatcagctttaagttgggggtggagttcgatgagacaacagcagatgacaggaaggtcaaggtaagtcagggaaacaggggtggggaatggagagtgctgagactctaaaagagaataggctggtagtcttggctccctrgtattgcaccctgaggggcagactatcatggggaatttaaatgaaacaagattcataaagcctgtgtagtgctggaatgccactgatgctaaatacatgtcagttctgtcctcttgttttcttccctcccttcttgggattcatctattgtctgcctcggaatgggcagcacagagccaggatgttcttctgacctcagtatctactccagctccagctgggtgaccctgtgcaaggtatgcagtagctctaggtttctttccccttccatagatggcagagttatgtggccatggctgtgacctgaagtgctttaggaatgat

SEQ ID NO: 206 - DNA, 812 bp, Homo sapiens
cagatatattttgctcccaaacgccgccctagaagaaggactacactgaaatgaaacggagatgattaaagtctgatttataggctgtacaagccctgaaagcaagaacggggttcacggcatcttgatacccccatgtggggacgttttggcgattttatttacaagaaagggattttacaccggagaggcttttaaatatgctaacagactggaccagctttctcatccccactggctgattaatgattcctccatgccaacccggttctcagagacaccaaggccagctctccaaagacctgggaaaaaattacttcatgtccttgtaaaaacgttttcacaaatttaagtgcaccagctttgaagcaagacagaattgggatcaagtccctgttccacccttaccagaaagtcttttcgtagctcacaaggggacatcaaagatgacaaagaggagtggaagaagacagagagaatcaatgtgaggagcctggaacagggctctgaattgtcttcccrcagtgaaatcacttgtctattgctgagccaagaatttgactctgagcatctaggatgagaaagaagaactggcacctacgccatctctgcccctcgggactgactattttggtaagttcagttcacccatggaggaagtggttctcgtactttatctgcatgtaacaacaaaattcaggttcttggggctgatgcttggagattgtgattcagatctgggatggggctcaggaacctgcattttaacaatggaggttctaatgtggtcattggcaggttgttctaatgtg

SEQ ID NO: 207 - DNA, 5260 bp, Homo sapiens
atggattatcactggcgaggagagctgrgatcctggcgactactactcttgcttctgctcctcgcagcctggaaggtggggagcggccagctccactactccgtccccgaggaggccaaacacggcaccttcgtgggccggatcgcgcaggacctggggctggagctggcggagctggtgccgcgcctgttscgggtggcgtccaaaagacaccgggaccttctggaggtaartctgcagaatggcattttgtttgtgaattctcggatcgaccgcgaggagctgtgcgggcggagcgcggagtgcagcatccacctggaggtgatcgtggacaggccgctgcaggttttccatgtggacgtggaggtgaaggatgttaatgacaacccgccagtgttccgggtaaaagaccaaaagctgtttgtttcagaatccagaatgccagactctcggtttccgctagagggcgcgtccgatgcagatgttggakctaactccgtgttaacctacaggcttagctctcatgattacttcatgctagatgtgaattcaaagaacgatgagaataaactggttgagctcktattaagaaaatccttggacagagaggacgctcctgcgcaccacttattcctgacagccacagatgggggcaaacctgagctcacaggcactgttcagctgctggtcacagtgctggatgtgaatgataatgctcccactttcgaacagtctgaatacgaagtaagaatattcgaaaacgcagacaacggaacaacagttatcaractgaatgcttctgatcsggatgaaggagccaatggggcaatttcatattcttttaatagccttgttgaaactatggttattgaccactttagcatagatcgaaatacgggagaaatagtgattcggggtaatttggattttgaacaagaaaacttatacaaaatcctcattgacgccacggacaaaggccatcctcccatggcgggtcattgcaccgttttagtgagaattttggataaaaatgataacgtccctgagatagcactgacttccttatccttgcctgtacgtgaagacgctcaatttggtactgtcatcgccctaattagcgtgaacgacctcgattcaggtgccaacgggcaggtgamctgctcsctgatgccccaygtcccyttcaagctggtgtccaccttcaagaattactactcgttggtgctggacagcgccctggaccgcgagagcgtgtcggcctatgagttggtggtaaccgcgcgggacgggggctcgccttcgctgtgggccaccgccagcttgtctgtggaggtggccgacgtgaacgacaatgctccggcgttcgcgcagcccgagtacacggtgttcgtgaaggagaacaacccgccgggctgccacatcttcacggtgtcwgcgygrgaygcggacgcgcaggagaacgcgctggtgtcctactcgctkgtggagcggcgggtgggcgagcgckcgytgtcgagctacrtktcggtgcacrcggagagcggcaaggtgtackcgctgcagccgctggaccacgaggagctrgagctgctgcagttccaggtgagcgcgcgcgacgcgggcgtgcmgcctctgggcagcaacgtgacgctgcaggtgttcgtgctggacgagaaygacaacgcgccggcactgctggagcctcgggtgggtggcaytggtggcgcagcgagcragctggtgccgcggtctgtgggcgcgggccacgtggtagcgaaggtgcgcgcagtggacgcsgactcgggctacaacgcgtggctttcgtatgagcwgcagccagctgcaagcagccctcgcatcccgttccgcgtggggctgtacacgggmgagatcagcaccactcgtgtcctggacgaagyggactctccgcgccaccgtctgctggtsctggtgaaggatcatggtgaacctgcgctgaccgccacggccacggttctggtgtcgctggtggagagcggccaggctccaaaagcgtcatcgaggcagtcggctggcgttttgggtccggaagcggcrctggtggatgtcaacgtgtacctgatcatcgccatctgcgcggtatccagcctgctggtgctcacgctgctgctgtacactgckctgcggtgctcagcactgcccactgagggcgggtgccgggcgggcaagcccactctggtgtgctccagtgcggtggggagctggtcatactcgcaacaacagccgcagagggtgtgctctggtgaggggccaccgaagacggacctcatggccttcagcccctgccttcctcctgatctgggatcagttgatgtaggcgaagagcaagatttaaatgttgatcatggcctcaaaccacgacagcccaaccctgactggcgttactctgcctccctgagagcaggcatgcacagctctgtgcacctagaggaggctggcattctacgggctggtccaggagggcctgatcagcagtggccaacagtatccagtgcaacaccagaaccagaggcaggagaagtgtcccctccagtcggtgcgggtgtcaacagcaacagctggacctttaaatacggaccaggcaaccccaaacaatccggtcccggtgagttgcccgmcaaattcattatcccaggatctcctgcaatcatctccatccggcaggagcctactaacagccaaattgacaaaagtgacttcataaccttcggcaaaaaggaggagaccaagaaaaagaagaaaaagaagaagggtaacaagacccaggagaaaaaagagaaagggaacagcacgactgacaacagtgaccagtgaggtcctcaaatggraacaagccacttagccagtttttgtaataatggcaaatctctcccatgtagcaattccctgctcctttttcctatctacatgagccctcttagagacctcagaaatctgcagaaagttccctgtgtctgtctagaacgcatttaacaggttttgtcgtaaaagctttactaagtctggtgttaactctttctctccactctggcttgttttcagaacctaaaaagcagacccaagtttcctttctcctccgccgcaaaggagaggcttcccagccccgccagtgagaggttggactctctgccctgtgctccggggatcctgtcttgatgacacttgcagggcaggctgaaaagttttgagattgagcagcttgggagtttgtggccactgggtatgtgtggctaccgcgggtatgcgagtgccagatattggctgagacgagccagcttagactaattggtacaaggaaggcaagaaaacaaagacaaataaacagcggaagttatcagtatggaggggaagtgtaaacttaaagggaccagactttctaaatcttacaactcaagaggtggcagccaccctctaggagacaaaactacccccactgacaaggctttaggagaccctaaagtctgttggctgtgacgtcattatacctaaaatctgcatcatacctgcaagccaacagttcagtgttttaacagagaaccaccctgggaaacagaagcagatctgatgtgtttcctatacatgtcctgtgctcactttattaaaaattcttttgcacacaatgtttatgaaaaggccagatccttttccaatacttatgcaaaagcaaaagaaaaccccgacacctcacctttcgctgtttgttgtttcatagatttatttaaaaaaagagaaagtctatagctataaatctttaaagagaaatatgaatacaattcccctaaactctcctcaaaagagaattcagtctacagccatttaaatgatcattgctgctacagaagtgctttaagagaattgcctgaaacatctgtattatatcggccacctgccaatcacagctttactctttcaggtcactctggggctgcctcttgcatgtattactaaataaaatgatctctctttctctctctctctctcttttctaagaaacaattatgtgcactttgatacacaaccttctctaaccaactatatatcaagacccaaaaattgaagaaaaatattgttttctcatacagtgagcagatttttcaatctactaattctgtgacttgtcttggtgtgctagcctacaccttctctttggtttagttttccttttctataacactctgaattgctaatcttactaacacctatgatgttacctkaaatcaatctcccatatgtatgctgtatgctatgctaagactcctgaaatatacttactctgtgcttgtgtatgtgaatgttaatgcaactattacctagagtgaactttaagctttattgttgaatgtaattccattatatttccttttgtacacctgtgaaaaagtggagtagtgtttttttaaccattgttaatcagcttttgtgtatgaaagacacagtaaaatttctttcttaaatcaagatactggtgattcaaggaattttatttatggtccagccaagagccatctcgtgccaagacttctgctggcaagggaatggataaagctgttttgttctagtaacaattttggaatgaatactgacaatattccatgagggtgtgcaagcacaaattttaccaatctgacctctttgaagttgcagaatgctttgaaattctaatggtatctgaaatatcagctcatagaaagtaacaaaatttgctgtcaccttaaataagacattttaattttgttataatgtacaatttagaagtttgattaattrtattatctatttaggcattaatataaaagaggtaggagtctgttatttaaaaaaagcattaaatttaaaaaaaaactgtcttgtctacttttagcttcattctcccatattttgaagggtgtgtaacttcagctctgcaggattgcatggggtaaaacttgttaccaacacatgtgaaccattgctacattgtaggttgtgatcattttgccccactgaagcccatgtatctgaccttacgtgccttttgaactaggagaatcgggctaatttattaatgatgataattataatgtatctgtacagcactttttacatttgcgaagtgctttccaatccatkttagttactagttattacagctgtaaggataaaacacgtcatgtggattcattttgaattggtgctattggtatttcctctgttattgctaataaatgaaaatggtggtatg

SEQ ID NO: 208 - DNA, 5475 bp, Homo sapiens
caatgccggcgttcgggaggcgcaacgtcggcggtcgctgagtatccagcccgcagcagtgacggccggcaggagcgtgctcttccccgcggctcgtgctctccaggagtccggagcatggtcctgggtcaccgttggtgtagcgtgttggtggaacgtggacgcctagagggaggatggtgggctgtggggtggcagttttatgtttgtgggtttcctgcggcgctgcagcgggacagctcgagtactcagtgccggaggagacggagcggggcgtagccgtaggcaatctctccgcggacttgaggmtgccagcggccgctatgtyctcgcggaactttcgcttcctttccagccaccgcgagctctacttcggggtggatctacccagcggcaatttggtggtcagagagccggcggaccgcgaacagctgtgcagggccaaagctgcctgcgtcttgacctacgacctggtgctcgaggacccgctggagctgcacaagattcggattcacgtcctggacaccaatgacaactcacctctctttcctgccggcgacgtgcagctgcacatccccgagttcctgacgcccggagcccgytttactctcccgaatgcccaagatgacgacgagggaagcaatgggatactaagctacagcctaagccccagtcagcactttcgcctggacatgggatcrcgggttgacggcagcgaatacccggagttggtgttggagaaagcactggatcgcgaacagcgcgccacccacctgctggtgcttacagctcgggacggcgggctacctgcccgctcaggagacgcacaagtcaccatcattgtggtggacacaaatgacaacgcgcctgtatttgagcgctccgtataccrcaccaaggttccagagactgcacccaatgggactgtgttattccgagttcaagccttggatccagatgaagggtccaatggggaagtccartactccctaagcaacagcacgcaagcagagctgcgacaccgctttcacgtkcaccctaaaagtggggaggtkcaagtagctgcttcactaggyccgcctgaaacgctcttggaggcatacattgaggcgagggacgaaggtgtctttggtttagctagcaccgctaaactgctggtggaggtgactgacgtgaacgatcatgcccccgaactggacttcctgactctttcgaacccagtacctgaggacgctgcccctggcacagtgattgctctctttagtgtaaaggatgaagacctcgattctaatggtagggtcatttgtggcatgtctagtgcaggcccttttcagctgacggcttcctttgacaactactacagcctgctgattgatgggcccctggaccgggagcagatcagtgaataccaagtcctgatcacggcctcagatagtggctcaccsccacttagcacccgaaggacaatcactgtgtcagttgctgatgtgaatgacaatacaccaaactttcctcaaccccrgcaggaacttttcgttgctgaaaacaatggccctggggcctctctaggccgagtgtttgcccaggaccccgacctggggaagaatggccttgtctcttatgagctgttggatgttatctctgaagggccatcagcctctarcttgstggcagtggaatcatccagtggggccatcactgccaaaacttcctttgactttgagcagctcagggggtttcatttccaagtagaaggccgggatggtggcattcctcccagaagtgcaacagtgactataaacttgtttgtggtagataggaatgacaattatccggttatcttgtttcccttgcccagaaatggttctgtcccagtggaaattgtgccccgctctgccaggactggacacttggtcacaaaagtggtagcagaggatgctgacagtggttctaatgcctggctttcctaccacatctcccgggcgtctgactctagtctctttagaatttcagccaatataggtgagctccgtactgctcgcttagttcttcccactgatgcagttaagcagagggtggtggtagtggttcgggaccatggagacccaccactttcctcctctgtcactctgggtgtgctgttgagcaactctgtccctcagttacttccagactttgaagatgtctgggaaccaggagggcagctttctgcccagaacttgtatttagtaattgccttggcttgtatttcctttttatttctggggtgcttacttttcttcgtgtgtaccaagttgcaccagagcccaggctgttgckctcagagctgctgtcgctctacagaggatctgaggtatggaagtaagatggtttcaaatcyttgcatgacatcagccaccatagatgtcactacagttgagagactttctcagacttatctctatcgggcctctctgggacttggttctgataataacagtttgctgttgcgtggggagtacaatgctgccgacctgcgaaatcttgccactggggtaggactgaatttgccaatatcctgtattcagattcggaataggaaaggggatcacgctaatgtcaatgccatgccacgacagcccaaccctgactggcgttactctgcctccctgagagcaggcatgcacagctctgtgcacctagaggaggctggcattctacgggctggtccaggagggcctgatcagcagtggccaacagtatccagtgcaacaccagaaccagaggcaggagaagtgtcccctccagtcggtgcgggtgtcaacagcaacagctggacctttaaatacggaccaggcaaccccaaacaatccggtcccggtgagttgcccgmcaaattcattatcccaggatctcctgcaatcatctccatccggcaggagcctactaacagccaaattgacaaaagtgacttcataaccttcggcaaaaaggaggagaccaagaaaaagaagaaaaagaagaagggtaacaagacccaggagaaaaaagagaaagggaacagcacgactgacaacagtgaccagtgaggtcctcaaatggraacaagccacttagccagtttttgtaataatggcaaatctctcccatgtagcaattccctgctcctttttcctatctacatgagccctcttagagacctcagaaatctgcagaaagttccctgtgtctgtctagaacgcatttaacaggttttgtcgtaaaagctttactaagtctggtgttaactctttctctccactctggcttgttttcagaacctaaaaagcagacccaagtttcctttctcctccgccgcaaaggagaggcttcccagccccgccagtgagaggttggactctctgccctgtgctccggggatcctgtcttgatgacacttgcagggcaggctgaaaagttttgagattgagcagcttgggagtttgtggccactgggtatgtgtggctaccgcgggtatgcgagtgccagatattggctgagacgagccagcttagactaattggtacaaggaaggcaagaaaacaaagacaaataaacagcggaagttatcagtatggaggggaagtgtaaacttaaagggaccagactttctaaatcttacaactcaagaggtggcagccaccctctaggagacaaaactacccccactgacaaggctttaggagaccctaaagtctgttggctgtgacgtcattatacctaaaatctgcatcatacctgcaagccaacagttcagtgttttaacagagaaccaccctgggaaacagaagcagatctgatgtgtttcctatacatgtcctgtgctcactttattaaaaattcttttgcacacaatgtttatgaaaaggccagatccttttccaatacttatgcaaaagcaaaagaaaaccccgacacctcacctttcgctgtttgttgtttcatagatttatttaaaaaaagagaaagtctatagctataaatctttaaagagaaatatgaatacaattcccctaaactctcctcaaaagagaattcagtctacagccatttaaatgatcattgctgctacagaagtgctttaagagaattgcctgaaacatctgtattatatcggccacctgccaatcacagctttactctttcaggtcactctggggctgcctcttgcatgtattactaaataaaatgatctctctttctctctctctctctcttttctaagaaacaattatgtgcactttgatacacaaccttctctaaccaactatatatcaagacccaaaaattgaagaaaaatattgttttctcatacagtgagcagatttttcaatctactaattctgtgacttgtcttggtgtgctagcctacaccttctctttggtttagttttccttttctataacactctgaattgctaatcttactaacacctatgatgttacctkaaatcaatctcccatatgtatgctgtatgctatgctaagactcctgaaatatacttactctgtgcttgtgtatgtgaatgttaatgcaactattacctagagtgaactttaagctttattgttgaatgtaattccattatatttccttttgtacacctgtgaaaaagtggagtagtgtttttttaaccattgttaatcagcttttgtgtatgaaagacacagtaaaatttctttcttaaatcaagatactggtgattcaaggaattttatttatggtccagccaagagccatctcgtgccaagacttctgctggcaagggaatggataaagctgttttgttctagtaacaattttggaatgaatactgacaatattccatgagggtgtgcaagcacaaattttaccaatctgacctctttgaagttgcagaatgctttgaaattctaatggtatctgaaatatcagctcatagaaagtaacaaaatttgctgtcaccttaaataagacattttaattttgttataatgtacaatttagaagtttgattaattrtattatctatttaggcattaatataaaagaggtaggagtctgttatttaaaaaaagcattaaatttaaaaaaaaactgtcttgtctacttttagcttcattctcccatattttgaagggtgtgtaacttcagctctgcaggattgcatggggtaaaacttgttaccaacacatgtgaaccattgctacattgtaggttgtgatcattttgccccactgaagcccatgtatctgaccttacgtgccttttgaactaggagaatcgggctaatttattaatgatgataattataatgtatctgtacagcactttttacatttgcgaagtgctttccaatccatkttagttactagttattacagctgtaaggataaaacacgtcatgtggattcattttgaattggtgctattggtatttcctctgttattgctaataaatgaaaatggtggtatg

SEQ ID NO: 209 - DNA, 2445 bp, Homo sapiens
atggattatcactggcgaggagagctgrgatcctggcgactactactcttgcttctgctcctcgcagcctggaaggtggggagcggccagctccactactccgtccccgaggaggccaaacacggcaccttcgtgggccggatcgcgcaggacctggggctggagctggcggagctggtgccgcgcctgttscgggtggcgtccaaaagacaccgggaccttctggaggtaartctgcagaatggcattttgtttgtgaattctcggatcgaccgcgaggagctgtgcgggcggagcgcggagtgcagcatccacctggaggtgatcgtggacaggccgctgcaggttttccatgtggacgtggaggtgaaggatgttaatgacaacccgccagtgttccgggtaaaagaccaaaagctgtttgtttcagaatccagaatgccagactctcggtttccgctagagggcgcgtccgatgcagatgttggakctaactccgtgttaacctacaggcttagctctcatgattacttcatgctagatgtgaattcaaagaacgatgagaataaactggttgagctcktattaagaaaatccttggacagagaggacgctcctgcgcaccacttattcctgacagccacagatgggggcaaacctgagctcacaggcactgttcagctgctggtcacagtgctggatgtgaatgataatgctcccactttcgaacagtctgaatacgaagtaagaatattcgaaaacgcagacaacggaacaacagttatcaractgaatgcttctgatcsggatgaaggagccaatggggcaatttcatattcttttaatagccttgttgaaactatggttattgaccactttagcatagatcgaaatacgggagaaatagtgattcggggtaatttggattttgaacaagaaaacttatacaaaatcctcattgacgccacggacaaaggccatcctcccatggcgggtcattgcaccgttttagtgagaattttggataaaaatgataacgtccctgagatagcactgacttccttatccttgcctgtacgtgaagacgctcaatttggtactgtcatcgccctaattagcgtgaacgacctcgattcaggtgccaacgggcaggtgamctgctcsctgatgccccaygtcccyttcaagctggtgtccaccttcaagaattactactcgttggtgctggacagcgccctggaccgcgagagcgtgtcggcctatgagttggtggtaaccgcgcgggacgggggctcgccttcgctgtgggccaccgccagcttgtctgtggaggtggccgacgtgaacgacaatgctccggcgttcgcgcagcccgagtacacggtgttcgtgaaggagaacaacccgccgggctgccacatcttcacggtgtcwgcgygrgaygcggacgcgcaggagaacgcgctggtgtcctactcgctkgtggagcggcgggtgggcgagcgckcgytgtcgagctacrtktcggtgcacrcggagagcggcaaggtgtackcgctgcagccgctggaccacgaggagctrgagctgctgcagttccaggtgagcgcgcgcgacgcgggcgtgcmgcctctgggcagcaacgtgacgctgcaggtgttcgtgctggacgagaaygacaacgcgccggcactgctggagcctcgggtgggtggcaytggtggcgcagcgagcragctggtgccgcggtctgtgggcgcgggccacgtggtagcgaaggtgcgcgcagtggacgcsgactcgggctacaacgcgtggctttcgtatgagcwgcagccagctgcaagcagccctcgcatcccgttccgcgtggggctgtacacgggmgagatcagcaccactcgtgtcctggacgaagyggactctccgcgccaccgtctgctggtsctggtgaaggatcatggtgaacctgcgctgaccgccacggccacggttctggtgtcgctggtggagagcggccaggctccaaaagcgtcatcgaggcagtcggctggcgttttgggtccggaagcggcrctggtggatgtcaacgtgtacctgatcatcgccatctgcgcggtatccagcctgctggtgctcacgctgctgctgtacactgckctgcggtgctcagcactgcccactgagggcgggtgccgggcgggcaagcccactctggtgtgctccagtgcggtggggagctggtcatactcgcaacaacagccgcagagggtgtgctctggtgaggggccaccgaagacggacctcatggccttcagcccctgccttcctcctgatctgggatcagttgatgtaggcgaagagcaagatttaaatgttgatcatggcctcaaagtaagtccatttaaatttagaactcataaattctatttgtggaaattgtag

SEQ ID NO: 210 - DNA, 5395 bp, Homo sapiens
aaaatatagcagaaagcggaatacctcttgcgaatccttccgcactaggaagccataaaaattgggccttgagagacagtttgaggtaaggcgttgtatatattgcagatagctctgaggtttttggagtgtaccatgctgtcttcctggcarggaggcccaagaccgcggcaactactgctctggcttctgatcctcgcagcctgggagacgggtagtggccagctccactactccgtccccgaggaagcaaaacacggcaccttcgtgggccgcatcgctcaggacctggggctggagctggcggagctggtgccgcgcctgttccgggtggcgtccaaaagacacggggaccttctggaggtaaatctgcagaatggcattttgtttgtgaattctcggatcgaccgcgaggagctgtgtgggcggagcgcggagtgcagcatccacctggaggtgatcgtggacaggcctctgcaggttttccatgtggaggtgaaggtgagggacattaacgacaacccgcccatattccctgaaagcaagaaacgaataatcattgcagaatctagacctccggaaactcgatttccactagatggcgcatccgatgcagatattggagtaaactcggcattgacctaccgactggatcccaacgattatttcactttggacgcacaaaacagtcttgagcaaatgtcttcattatcacttgtactgaggaaaacactggacagagaggaaattcaggaacatagtttattactgacwgccagtgatggaggtaaacccgagctgactggcacagttcagctgctcatcacgattctggacgtgaatgacaacgccccggaattttaccaatccgtttataaagtgacggtgttagagaacgccttcaatggaacattagtgatcaagctaaatgccacagatcctgatgatggtacaaatggagatatagtttactcatttagaaggcctgtatggcctgcagtggtatatgcatttaccataaatccgaacaatggagaaattaggacaaaaggcaaactagatttcgaagaaaagaaattatatgaaatatccgtggaggcagttgacaaaggaaatattccaatggcgggtcattgtacccttttggtggaagtactagatgtaaatgataacgccccagaggttaccatcacttctttgtcactccccatcagagaagacactcagcctagmgccattattgccctaatcagtgtgtccgatcgtgactctggctcaaatggacaggtcacctgcaccttgacgccgcatgtccccttcaagctggtgtccacctacaagaactactactcattagtgctggacagcgccctggaccgcgagagcgtatcagcctatgaactggtggtgaccgcgcgggacgggggctcgccttcgctgtgggccacggccagcgtgtcggtgggggtggccgacgtgaacgacaacgcgccggcgttcgcgcagcccgagtacacggtgttcgtgaaggaaaacaatccgccgggctgccacatcttcacggtgtctgckcaggacgcggacgcacaggagaacgcgctggtctcctactcgctggtggagcggcgggtgggcgagcgtgcgctgtcgagctacgtgtcggtgcacgcggagagcggcaaggtgtacgcgctgcagccgttggaccacgaggagctggagctgttgcagttccaggtgagcgcgcgcgactctggcgtgccgcctctgggcagcaacgtgacgctgcaggtgttcgtgctggacgagaacgacaacgctccggcgctgctgacgcccggggctggcagcgcgggaggcacagtgagcgagctgatgccgcggtckgtgggtgcaggccacgtggtggcgaaggtgcgcgcggtggacgccgattcgggctacaatgcgtggctttcgtatgaattgcagctggcggcggtcggcgcgcgcatcccgttccgcgtggggctgtacactggcgagatcagcacgacgcgccctctggacgaggtggacgcgccgcaccaccgccttctggtgctggtgaaggaccacggtgagcccgcgctgacggccacggcaacggtgctgttgtcgctggtggagagcggccaagcgccacaggcttcgtcgagggcgtcggcaggcgctgtgggtccagaagcggcgctggtggatgtcaatgtttacttgatcattgccatctgcgcggtgtccagcctgttggtgctcacgttgctgctgtatactgcgctgcggtgctcggcaccgcccaccgagggcgcgtgcgcgccgggcaagcccactctagtgtgctccagcgcggcaggsagttggtcgtactcgcagcagaggcggccgagggtgtgctctggggagggcccgcataagacggacctcatggccttcagtcccagccttcctccttgtctgggttctgcagagggaacaggccagagggaggaggactcagaatgcttgaaagagccacgacagcccaaccctgactggcgttactctgcctccctgagagcaggcatgcacagctctgtgcacctagaggaggctggcattctacgggctggtccaggagggcctgatcagcagtggccaacagtatccagtgcaacaccagaaccagaggcaggagaagtgtcccctccagtcggtgcgggtgtcaacagcaacagctggacctttaaatacggaccaggcaaccccaaacaatccggtcccggtgagttgcccgmcaaattcattatcccaggatctcctgcaatcatctccatccggcaggagcctactaacagccaaattgacaaaagtgacttcataaccttcggcaaaaaggaggagaccaagaaaaagaagaaaaagaagaagggtaacaagacccaggagaaaaaagagaaagggaacagcacgactgacaacagtgaccagtgaggtcctcaaatggraacaagccacttagccagtttttgtaataatggcaaatctctcccatgtagcaattccctgctcctttttcctatctacatgagccctcttagagacctcagaaatctgcagaaagttccctgtgtctgtctagaacgcatttaacaggttttgtcgtaaaagctttactaagtctggtgttaactctttctctccactctggcttgttttcagaacctaaaaagcagacccaagtttcctttctcctccgccgcaaaggagaggcttcccagccccgccagtgagaggttggactctctgccctgtgctccggggatcctgtcttgatgacacttgcagggcaggctgaaaagttttgagattgagcagcttgggagtttgtggccactgggtatgtgtggctaccgcgggtatgcgagtgccagatattggctgagacgagccagcttagactaattggtacaaggaaggcaagaaaacaaagacaaataaacagcggaagttatcagtatggaggggaagtgtaaacttaaagggaccagactttctaaatcttacaactcaagaggtggcagccaccctctaggagacaaaactacccccactgacaaggctttaggagaccctaaagtctgttggctgtgacgtcattatacctaaaatctgcatcatacctgcaagccaacagttcagtgttttaacagagaaccaccctgggaaacagaagcagatctgatgtgtttcctatacatgtcctgtgctcactttattaaaaattcttttgcacacaatgtttatgaaaaggccagatccttttccaatacttatgcaaaagcaaaagaaaaccccgacacctcacctttcgctgtttgttgtttcatagatttatttaaaaaaagagaaagtctatagctataaatctttaaagagaaatatgaatacaattcccctaaactctcctcaaaagagaattcagtctacagccatttaaatgatcattgctgctacagaagtgctttaagagaattgcctgaaacatctgtattatatcggccacctgccaatcacagctttactctttcaggtcactctggggctgcctcttgcatgtattactaaataaaatgatctctctttctctctctctctctcttttctaagaaacaattatgtgcactttgatacacaaccttctctaaccaactatatatcaagacccaaaaattgaagaaaaatattgttttctcatacagtgagcagatttttcaatctactaattctgtgacttgtcttggtgtgctagcctacaccttctctttggtttagttttccttttctataacactctgaattgctaatcttactaacacctatgatgttacctkaaatcaatctcccatatgtatgctgtatgctatgctaagactcctgaaatatacttactctgtgcttgtgtatgtgaatgttaatgcaactattacctagagtgaactttaagctttattgttgaatgtaattccattatatttccttttgtacacctgtgaaaaagtggagtagtgtttttttaaccattgttaatcagcttttgtgtatgaaagacacagtaaaatttctttcttaaatcaagatactggtgattcaaggaattttatttatggtccagccaagagccatctcgtgccaagacttctgctggcaagggaatggataaagctgttttgttctagtaacaattttggaatgaatactgacaatattccatgagggtgtgcaagcacaaattttaccaatctgacctctttgaagttgcagaatgctttgaaattctaatggtatctgaaatatcagctcatagaaagtaacaaaatttgctgtcaccttaaataagacattttaattttgttataatgtacaatttagaagtttgattaattrtattatctatttaggcattaatataaaagaggtaggagtctgttatttaaaaaaagcattaaatttaaaaaaaaactgtcttgtctacttttagcttcattctcccatattttgaagggtgtgtaacttcagctctgcaggattgcatggggtaaaacttgttaccaacacatgtgaaccattgctacattgtaggttgtgatcattttgccccactgaagcccatgtatctgaccttacgtgccttttgaactaggagaatcgggctaatttattaatgatgataattataatgtatctgtacagcactttttacatttgcgaagtgctttccaatccatkttagttactagttattacagctgtaaggataaaacacgtcatgtggattcattttgaattggtgctattggtatttcctctgttattgctaataaatgaaaatggtggtatg

SEQ ID NO: 211 - DNA, 5986 bp, Homo sapiens
cagactaatctccttaaagacccgttaagcaggggagagacggtggagactggatgaactggacagtgggggtagggagaaagggagtggccgtgttcctgcggtccgctgggatccggcaggtccagggtgaaggagatggggcwggagaggctgagcagtccgggttcgctgtccgccacttcggcgcggaatcagagcaggacttgctgagccctcctaccgctccctttccccctccccctctgtcttcccttctgtttccttttccctccccctggagctgtagcggcagcagcagcaggaagccgagccgggttgagcgactcggaggcgagcggaggagctggaatatggggagtcagcgaggacggtggggccaggagcccttgggagggcctacggagggagcggccccaggcgctttctagagcgtgagcggtgggggagcaggcgcagggtggcacgagcggaggcggggcccgggcgtggggcacggctggggaagctgccgcctccggccctgcccggctgcctccgccgcggccagtggctatggagcaggcgggcaccagacctgcggcgacagagcatccacgrctccggcggcccatgccctggctgctgctactgcctctcctgctgctgttgctgctgctgctacctggcccwgcggcctcccagctgcgatactctgtgccagaggagcaggcacccggcgcgctcgtgggcaacgtggctcgcgcgctggggcttgagctgcggcgcttggggccgggttgcttgcgcatcaaccatctgggtgcgcccagtccgcgctacctggagytggacctgacgagtggagcgctcttcgtcaacgagcgcattgatmgggaggcgctgtgtgagcagcggcctcgctgcctgctcagcytggaagtgctggcgcacaaccccgtggcggtgagcgccgttgaggtggaaatattggacatcaacgacaactcaccgcgtttcccgcggcccaactaccagcttcaggtaagcgaatcggtggcgcctggagcgcgctttcacatagagagtgcgcasgaccccgacgtgggcgccaactcagtacagacctacgagctcagccccagcgagcacttcgagctggaccttaagcccctgcaggagaacagtaaagtgcttgagstggtgctgcgtaagggcctwgaccgggagcaggcagccttgcaccacctggttctcacagccgtggatgggggcatyccagcccgctcgggtacggcacagatctctgtgcgtgtcctggacactaacgacaactctcctgcctttgaccagtccacttatcgcgtccagctacgggaggactcacccccaggcacattggtggtgaagctgaatgcctcagacccggatgagggctccaatggtgagctcaggtactccttgagcagctacacgtcggaccgggagaggcagctcttcagcatagatgccagtaccggggaagtgcgagtaattggggggctggattatgaggaagcctcctcctaccagatctatgtgcaggcgactgaccggggtccagtgcccatggcaggtcactgyaaggtgctggtggacatcgtggacgtgaatgacaatgccccagaggtggtgctcacggacctgtatagcccagtgcctgagaatgctacacccaacaccattgtggccgttctcagtgtcaatgaccaagactcaggccccaaccggaaagtgagcctgggtctggaggccacactgcctttccgactgaatggctttggaaactcctatacactggtggtgagcggcccactggaccgagagcgggtggctgtctacaacatcacggtgacagccacagatgggggaataccgcagctcacatccctgcgtacactgaaggttgagatctctgacatcaatgacaatccaccaagcttcctggaggactcctattccatctacatacaggagaacaatttgccaggtgtgttgctctgtactgtgcaagccacagacccagatgaaaaggagaatgcagaggtgacctactcycttctggagagggagattcaagggctgccagtcacctcctatgtctccattaacagtgccagtggcagcctttatgctgtcaactcctttgactatgagaagtttcgggagttctttgtgactgtggaggctcaggacaaggggagcccaccactgagcagcactgtgactgccaacgtatatgtggtggacatgaatgaccatgcccctcacattctgtaccctacctcaaccaactcgtcagcagccttcgagatggtgcctcgaactgcccctgctggctacctggtcaccaaagtcatagctatggactcagactctgggcaaaatgcttggcttttttaccatctagcccagacttctgacctggacctctttaaggtagagctgcacacaggagaaattaggactaccaggaagatgggagatgagagtggtagcactttcaacctgaccgtggtggtccgagataatggagagccatcactatcagcctctgtggccattacagtagctgtggtggatagggtttccaaaatcctccctgacactcagaggcatgttaagagccctcggacatactctgaaattaccctttatctaataatagcattaagcacagtgtcttttatatttcttttgacaatcatcattttgagcatcatcaagtgctaccgctacactgcrtatggcactgcatgctgtggaggcttctgtggagtaagggaaaggtcccctgcagaactgtacaaacaagccaacaacaatattgatgccaggataccgcatggcctcaaagtgcagcctcacttcattgaagttcgagggaatggctccctcaccaagacctactgctacaaggcctgtctgacagcaggctcagggagtgacactttcatgttttacaatacaggggcccagacaggaccagggccttcgggagcccaagcagcagtgactgacagcaggaatctcacaggccaaagtggtcagaatgctgggaacctgattattctcaaaaatgaggctgtttctcaaaatgagccacgacagcccaaccctgactggcgttactctgcctccctgagagcaggcatgcacagctctgtgcacctagaggaggctggcattctacgggctggtccaggagggcctgatcagcagtggccaacagtatccagtgcaacaccagaaccagaggcaggagaagtgtcccctccagtcggtgcgggtgtcaacagcaacagctggacctttaaatacggaccaggcaaccccaaacaatccggtcccggtgagttgcccgmcaaattcattatcccaggatctcctgcaatcatctccatccggcaggagcctactaacagccaaattgacaaaagtgacttcataaccttcggcaaaaaggaggagaccaagaaaaagaagaaaaagaagaagggtaacaagacccaggagaaaaaagagaaagggaacagcacgactgacaacagtgaccagtgaggtcctcaaatggraacaagccacttagccagtttttgtaataatggcaaatctctcccatgtagcaattccctgctcctttttcctatctacatgagccctcttagagacctcagaaatctgcagaaagttccctgtgtctgtctagaacgcatttaacaggttttgtcgtaaaagctttactaagtctggtgttaactctttctctccactctggcttgttttcagaacctaaaaagcagacccaagtttcctttctcctccgccgcaaaggagaggcttcccagccccgccagtgagaggttggactctctgccctgtgctccggggatcctgtcttgatgacacttgcagggcaggctgaaaagttttgagattgagcagcttgggagtttgtggccactgggtatgtgtggctaccgcgggtatgcgagtgccagatattggctgagacgagccagcttagactaattggtacaaggaaggcaagaaaacaaagacaaataaacagcggaagttatcagtatggaggggaagtgtaaacttaaagggaccagactttctaaatcttacaactcaagaggtggcagccaccctctaggagacaaaactacccccactgacaaggctttaggagaccctaaagtctgttggctgtgacgtcattatacctaaaatctgcatcatacctgcaagccaacagttcagtgttttaacagagaaccaccctgggaaacagaagcagatctgatgtgtttcctatacatgtcctgtgctcactttattaaaaattcttttgcacacaatgtttatgaaaaggccagatccttttccaatacttatgcaaaagcaaaagaaaaccccgacacctcacctttcgctgtttgttgtttcatagatttatttaaaaaaagagaaagtctatagctataaatctttaaagagaaatatgaatacaattcccctaaactctcctcaaaagagaattcagtctacagccatttaaatgatcattgctgctacagaagtgctttaagagaattgcctgaaacatctgtattatatcggccacctgccaatcacagctttactctttcaggtcactctggggctgcctcttgcatgtattactaaataaaatgatctctctttctctctctctctctcttttctaagaaacaattatgtgcactttgatacacaaccttctctaaccaactatatatcaagacccaaaaattgaagaaaaatattgttttctcatacagtgagcagatttttcaatctactaattctgtgacttgtcttggtgtgctagcctacaccttctctttggtttagttttccttttctataacactctgaattgctaatcttactaacacctatgatgttacctkaaatcaatctcccatatgtatgctgtatgctatgctaagactcctgaaatatacttactctgtgcttgtgtatgtgaatgttaatgcaactattacctagagtgaactttaagctttattgttgaatgtaattccattatatttccttttgtacacctgtgaaaaagtggagtagtgtttttttaaccattgttaatcagcttttgtgtatgaaagacacagtaaaatttctttcttaaatcaagatactggtgattcaaggaattttatttatggtccagccaagagccatctcgtgccaagacttctgctggcaagggaatggataaagctgttttgttctagtaacaattttggaatgaatactgacaatattccatgagggtgtgcaagcacaaattttaccaatctgacctctttgaagttgcagaatgctttgaaattctaatggtatctgaaatatcagctcatagaaagtaacaaaatttgctgtcaccttaaataagacattttaattttgttataatgtacaatttagaagtttgattaattrtattatctatttaggcattaatataaaagaggtaggagtctgttatttaaaaaaagcattaaatttaaaaaaaaactgtcttgtctacttttagcttcattctcccatattttgaagggtgtgtaacttcagctctgcaggattgcatggggtaaaacttgttaccaacacatgtgaaccattgctacattgtaggttgtgatcattttgccccactgaagcccatgtatctgaccttacgtgccttttgaactaggagaatcgggctaatttattaatgatgataattataatgtatctgtacagcactttttacatttgcgaagtgctttccaatccatkttagttactagttattacagctgtaaggataaaacacgtcatgtggattcattttgaattggtgctattggtatttcctctgttattgctaataaatgaaaatggtggtatg

SEQ ID NO: 212 - DNA, 5379 bp, Homo sapiens
tccctgactgttgaatgatggcggacgcagaagaaatggattaataaattccggaacatacagtattttatctttatgcggaagatcttctaatggaaataaaaccagaggtatttgacatggtgtttaccccggaggatagattgggaaagcaatgtctgctcctcccgcttctgctcctcgcagcctggaaggtggggagcggccagctccactactccgtacccgaggaggccaaacacggcaccttcgtgggccggatcgcgcaggacctggggctggagctggcggagctggtgccgcgcctgttcaggatggcctccaaagaccgcgaggaccttctggaggtaaatctgcagaatggcattttgtttgtgaattctcggatcgaccgcgaggagctgtgcgggcggagcgcggagtgcagcatccacctggaggtgatcgtggacaggccgctgcaggttttccatgtggacgtggaggtgagggacattaacgacaacccgcccttgttcccggtagaggaacaaagagtgctgatttacgartctaggctgccagattctgtgtttccactggagggcgcgtccgatgcagatgttggctcaaattccatcttaacctataaactcagttctagcgaatacttcgggctagatgtgaaaataaacagtgatgacaataaacaaattgggctcttattaaagaaatccttggacagagaggaagctcctgcacacaacttattcctgacagccacagatgggggcaaacctgagctcacaggcactgttcagctgctggtcacagtgctggatgtgaatgataatgctcccactttcgaacagtctgaatacgaagtaagaatattcgaaaatgcagacaacggaacaacagttatcagactgaatgcttctgatcgggatgaaggagcsaatggggcaatttcatattcttttaatagccttgttgcagccatggttattgaccactttagcatagatcgaaatacgggagaaatagtgattcggggtaatttggattttgaacaagaaaacttatacaaaatcctcattgacgccacggacaaaggccatcctcccatggcgggtcattgcaccgttttagtgagaattttggataaaaatgataacgtccctgagatagcactgacttccttatccttgcctgtacgtgaagacgctcaatttggtactgtcatcgccctaattagcgtgaacgacctcgattcaggtgccaacgggcaggtgamctgctcsctgacgcctcaygtccctttcaagctggtgtccaccttcaagaattactactcgttggtgctggacagygccctggaccgcgagagcgtgtcggcctatgagttggtggtaaccgcgcgggacgggggctcgccttcgctgtgggccaccgccagcttgtctgtggaggtggccgacatgaatgacaatgctccggcgttcgcgcagcccgagtacacagtgttcgtgaaggagaacaacccgccgggctgccacatcttcacggtgtctgcgcgagacgcggacgcgcaggagaacgcgctggtgtcctactcgctggtggagcggcgrgtgggcgagcgcgcgttgtcgagctacatttcggtgcacgcggagagcggcaaggtgtacgcgctgcagccgctggaccacgaggagctagagctgctgcagtttcaggtgagmgcgcgcgacgcgggcgtgccgcctctgggcagcaamgtgacgctgcaggtgttcgtgctggacgagaacgacaacgcgccggcgctgctggcgcctcgggtgggtggtactggtggtgcagtgagcgagctggtgccgcggtcastgggtgcaggccaagtggtggcgaaggtgcgcgcagtkgacgccgactcaggctacaacgcgtggctttcgtatgagctgcagcccccggcaagcagcgctcgcttcccgtttcgcgtggggctgtacacgggcgagatcagcaccactcgtgtcctggacgargcggactctccgcgccaccggctgctggtgctggtgaaagaccacggtgagccggcgctgacagcgacggccacggttctggtgtcgctggtggagagtggccaggctccaaaggcgtcatcacgggcgtcggtgggcgccgcgggcccagaggcggcgctggtggatgtcaacgtgtacctgatcatcgccatctgcgcggtatccagcctgctggtcctcacgctactgctgtacacagcgctgcggtgctcggcgccacccaccgagggcgcgtgcacggcggacaagcccacgctggtgtgctccagcgcagtggggagctggtcgtactcgcagcagaggcggcagagggtgtgctccggggagggcccacccaagatggatctcatggcctttagccccagcctttcaccttgtcctattatgatgggtaaggcggagaatcaggatttaaatgaagatcatgatgccaaaccacgacagcccaaccctgactggcgttactctgcctccctgagagcaggcatgcacagctctgtgcacctagaggaggctggcattctacgggctggtccaggagggcctgatcagcagtggccaacagtatccagtgcaacaccagaaccagaggcaggagaagtgtcccctccagtcggtgcgggtgtcaacagcaacagctggacctttaaatacggaccaggcaaccccaaacaatccggtcccggtgagttgcccgmcaaattcattatcccaggatctcctgcaatcatctccatccggcaggagcctactaacagccaaattgacaaaagtgacttcataaccttcggcaaaaaggaggagaccaagaaaaagaagaaaaagaagaagggtaacaagacccaggagaaaaaagagaaagggaacagcacgactgacaacagtgaccagtgaggtcctcaaatggraacaagccacttagccagtttttgtaataatggcaaatctctcccatgtagcaattccctgctcctttttcctatctacatgagccctcttagagacctcagaaatctgcagaaagttccctgtgtctgtctagaacgcatttaacaggttttgtcgtaaaagctttactaagtctggtgttaactctttctctccactctggcttgttttcagaacctaaaaagcagacccaagtttcctttctcctccgccgcaaaggagaggcttcccagccccgccagtgagaggttggactctctgccctgtgctccggggatcctgtcttgatgacacttgcagggcaggctgaaaagttttgagattgagcagcttgggagtttgtggccactgggtatgtgtggctaccgcgggtatgcgagtgccagatattggctgagacgagccagcttagactaattggtacaaggaaggcaagaaaacaaagacaaataaacagcggaagttatcagtatggaggggaagtgtaaacttaaagggaccagactttctaaatcttacaactcaagaggtggcagccaccctctaggagacaaaactacccccactgacaaggctttaggagaccctaaagtctgttggctgtgacgtcattatacctaaaatctgcatcatacctgcaagccaacagttcagtgttttaacagagaaccaccctgggaaacagaagcagatctgatgtgtttcctatacatgtcctgtgctcactttattaaaaattcttttgcacacaatgtttatgaaaaggccagatccttttccaatacttatgcaaaagcaaaagaaaaccccgacacctcacctttcgctgtttgttgtttcatagatttatttaaaaaaagagaaagtctatagctataaatctttaaagagaaatatgaatacaattcccctaaactctcctcaaaagagaattcagtctacagccatttaaatgatcattgctgctacagaagtgctttaagagaattgcctgaaacatctgtattatatcggccacctgccaatcacagctttactctttcaggtcactctggggctgcctcttgcatgtattactaaataaaatgatctctctttctctctctctctctcttttctaagaaacaattatgtgcactttgatacacaaccttctctaaccaactatatatcaagacccaaaaattgaagaaaaatattgttttctcatacagtgagcagatttttcaatctactaattctgtgacttgtcttggtgtgctagcctacaccttctctttggtttagttttccttttctataacactctgaattgctaatcttactaacacctatgatgttacctkaaatcaatctcccatatgtatgctgtatgctatgctaagactcctgaaatatacttactctgtgcttgtgtatgtgaatgttaatgcaactattacctagagtgaactttaagctttattgttgaatgtaattccattatatttccttttgtacacctgtgaaaaagtggagtagtgtttttttaaccattgttaatcagcttttgtgtatgaaagacacagtaaaatttctttcttaaatcaagatactggtgattcaaggaattttatttatggtccagccaagagccatctcgtgccaagacttctgctggcaagggaatggataaagctgttttgttctagtaacaattttggaatgaatactgacaatattccatgagggtgtgcaagcacaaattttaccaatctgacctctttgaagttgcagaatgctttgaaattctaatggtatctgaaatatcagctcatagaaagtaacaaaatttgctgtcaccttaaataagacattttaattttgttataatgtacaatttagaagtttgattaattrtattatctatttaggcattaatataaaagaggtaggagtctgttatttaaaaaaagcattaaatttaaaaaaaaactgtcttgtctacttttagcttcattctcccatattttgaagggtgtgtaacttcagctctgcaggattgcatggggtaaaacttgttaccaacacatgtgaaccattgctacattgtaggttgtgatcattttgccccactgaagcccatgtatctgaccttacgtgccttttgaactaggagaatcgggctaatttattaatgatgataattataatgtatctgtacagcactttttacatttgcgaagtgctttccaatccatkttagttactagttattacagctgtaaggataaaacacgtcatgtggattcattttgaattggtgctattggtatttcctctgttattgctaataaatgaaaatggtggtatg

SEQ ID NO: 213 - DNA, 2535 bp, Homo sapiens
atggtttccagatgtagctgcctgggggtccagtgtctgctgctctcgcttcttctcctcgcagcctgggaggtggggagcggccagctccactactcagtctacgaggaggccagacacggcaccytcgtgggccgcatcgcgcaggacctggggctggagctggcggagctggtgcagcgcctgttccgggtggcgtccaaaagacacggggaccttctggaggtaaatctgcagaatggcattttgtttgtgaattctcggattgaccgcgaggagctgtgcgggcggagcgtggagtgcagcatccacctggaggtgatcgtggacaggccgctgcaggttttccatgtggacgtggaagtgaaggacattaacgacaacccgcccaggttctccgtaacagaacaaaagctctcaatacctgaatccagactgcttgactctcgatttccactagaaggcgcatctgatgcggatgttggagagaacgcattgcttacttacaaactcagtccaaatgagtattttgttcttgatattataaacaaaaaagacaaagacaaattcccagtgcttgttctgcggaagctgctggatcgtgaagaaaatyctcagctaaagttgttgttgacagcaactgatggaggcaaacctgaatttaccggatctgtttctctgctgatcctggtgttagatgccaatgataacgcccctatctttgacagaccggtttatgaagttaagatgtatgaaaatcaagtgaaccaaacattagtaatacggctcaacgcttctgattcggatgaaggaataaacaaggaaatgatgtattcatttagctctttggtcccacccacgataagaaggaaattttggataaacgaaaggacgggagaaataaaagtaaatgatgctattgactttgaggacagtaacacttatgaaattcatgtagatgttacagataagggaaacccacctatggttggtcactgcacggtcctagtggaactactggatgaaaatgataattcacctgaggtgattgtcacttctctgtctctcccagtgaaagaagatgctcaagtgggcaccgtcattgccctaatcagcgtttctgaccatgattcaggagccaacggacaggtcacctgctctctgacgcctcacgttccgttcaagctggtgtccacctacaagaattactactcattggtgctggacagcgctctggaccgcgagagggtgtcggcctatgagctggtggtgaccgcgcgggacgggggctcgcctccgctgtgggccacggccagsgtgtctgtggaggtggccgacgtgaacgacaacgcgcctgcgttcgcgcagtccgagtacacggtgttcgtgaaggagaacaacccgccaggctgccacatcttcacggtgtctgcgtgggacgcggacgcgcaggagaacgccctggtgtcctactckctggtggagcggcggttgggcgagcgctcgctgtcgagctacgtgtcrrtgcacgcggagagcggcaaggtgtacgcgctgcagccgctggaccacgaggagctggagctgctacagttccaggtgagcgcgcgcgatgggggcgtgccgcctctgggcagcaacktgacgctgcaggtgttcgtgctggacgagaacgacaacgctcccgcgctgctggcgtctccsgctggcagcgcgggcggtgcagtcagtgagctggtgctgcggtcggtggktgcgggtcacgtggtggctaaggtgcgcgcagtggacgctgactctggatacaacgcgtggctgtcgtatgaattgcagtcggcggcggttggtgcacgcatcccgtttcgcgtggggctgtacacgggcgagatcagtacgacgcgcgctctggatgagrctgactcgccacgccagcgcctactggtgctggtgaaggaccatggcgagccgtcgctgacggccacggccactgtgcttgtgtcgcttgtggagggcagccaggcacccaaggcctcgtcgcgggcttcagtgggcgtggcgcccgaggtggccctggtggatgtcaacgtgtacctgatcatcgccatctgcgcggtgtccagcttgctggtgctcacgctgctgctgtacactgcactgaggtgctcggcggcgcccaccgagggcgcatgtggsccggtgaagcccacgctggtgtgctctagcgcggtggggagctggtcttactcgcagcagaggcggcagagggtgtgttctggggagggcctgcccaaggcggacctcatggccttcagccccagccttccaccatgcccartggtagatgtggacggggaagatcagtctattggaggggaccactctaggaaggtgggttattacgttttcattttccttttgtgcyttatgaataatattttctcttaccgcattttctcaaatatgtatcagaatatttcatttttgtctacawtccatttatgcttgaatatttctagtgatacctttgtaatataa

SEQ ID NO: 214 - DNA, 6388 bp, Homo sapiens
ctcgcttttcttgcaatattttataccttttcaattcatagaattactcaagaaaactacctcagttggttgctactttttgttgattccttttaccagacatgactaagtttctttttcatcagtagatttctgggctcctatattcactagagattgcaactcctggatttctcttacactagaatcctatttcgagccatatgggagattctgaattccagaacaaaagaattttgtaatttaaaattcgtgattgctcaatggaatcattttaattgttacttcatttctgtcgttatttaaaacttaagtggagagttttctcagggataagaaaaccacaatcaaggtcatacaaaacttttagaggcagtcagtctgctaagaaggctccagcaagagaaacgggatcttctgtttcaacaatcattacttaagaaaaaattaagaaaatgaaataagttttgcagaataactgtgaaatttttattcatgaaatatgtacttacactttggrccacgtgatgtcactctttgscgcgatgttctctctgaatccagacaaatacagcccttttcccatgggaaagaggctcaattctttttcactctstctgtgctgaacgatggckaacacagmagaatgggactgacgaaatcagatgatttcttctaatttggaggcaattttcactaattagaagaagactgagtatttgaaatgttatactcaagtcgaggagatccagagggtcagcctctactgctctcgcttctgatcctcgcaatgtgggtggtggggagmggccagctccactactcsgtcccsgaggargccraacayggcamcttcgtgggccgcatcgcgcaggacctggggctggagctggcggagctggtgccgcgcctgttscagttggattscaaakgccgyggggaycttctggaggtaaatctgcagaatggcattttgtttgtgaattctcggatcgaccgcgaggagctgtgcgggcggagcgcggagtgcagcatccacctggaggtgatcgtrgamaggccgctgcaggttttccatgtggacgtggaggtgaaggacattaacgacaaccctccrgtgttcccagcgacacaaaagaatctgttcatcgcggaatccaggccgcttgactctcggtttccactagagggcgcgtccgatgcagatatcggggagaacgccctgctcacttacagactgagccccaatgagtatttcttcctggacgtgccaaccagcaaccagcaggtaaaacctcttggacttgtattacggaaacttttagacagagaagaaactccggagcttcatttattgctcacggycaccgatggaggcaaacccgagctgactggcaccgttcaattactcatcacggtactggacaacaatgacaatgccccagtgttcgacagaaccctgtatacggtgaaattaccagaaaacgtttctatcggaacgctggtgattcaccccaatgcctcagatttagacgaaggcttgaatggggatattatttactccttctccagtgatgtttctccagatataaaatccaagttccacatggaccccttaagtggggcaatcacagtgataggacatatggattttgaagaaagtagagcacacaagatcccagtcgaggctgtcgataaaggcttcccacccctggctggtcattgtacasttcttgtggaagttgtggatgtaaatgacaatgctccacagttgactatcaaaacgctctcggttcctgtaaaagaggacgcacaactggggacagttattgccctgattagtgtgatcgacctagacgcagatgccaacgggcaggtkacctgctccctgacgccccacgtccccttcaagctggtgtccacctacaagaattactactcgttggtgctggacagagcyctggaccgcgagagtgtgtccgcctaygagctggtggttaccgcgcgggacsggggctcgccttcactgtgggccacggccagggtgtctgtggaggtggccgacgtgaacgacaacgcaccagcgttcgcgcagtccgagtacacggtgttcgtgaaggagaacaacccgccgggctgccacatcttcackgtgtctgcgcgggacgckgacgcgcaggagaacgccctggtgtcctactcgctggtggagcggcggktgggcsagcgctcgctgtcgagctacgtgtcagtgcacgcggagagcggcaaggtgtacgcgctgcagccgttggaccacgaggagctggagctgctacagttccaggtgagcgcgcgcgacgcgggcgtgccgcctctgggcagcaacgtgacgctgcaggtgttcgtgctggacgagaacgacaatgcgccggcgctgctgacacctcggatgaggggcactgacggcgcagtgagcgagatggtgctgcggtcggtgggcgccggcgtagtggtggggaaggtgcgcgcagtggacgccgactcgggctacaacgcgtggctttcatacgagctgcagccagaaacsgccagcgcgagcatcccgttccgcgtggggctgtacacgggcgagatcagcacaacgcgtgccctggacgaaacggacgcaccgcgccagcgcctactggtgctggtgaaagaccacggggagccagcgctgacggccacggccactgtgctggtgtcgctggtggagagcggccaggcgccaaagtcatcgtcgcrggcgtcagtgggtgccacgggccccgaggtgacgctggtggatgtcaaygtgtacctgatcatcgccatctgcgcggtgtctagcctgttggttctcacgctgctgctgtacactgtgctgcggtgctcggcgatgcccaccgagggcgagtgcgcgcctggcaagccgacgctggtgtgttctagcgcggtggggagttggtcgtactcgcagcagaggaggcagagggtgtgctctggcgagggtmmgcagaagaccgacctcatggccttcagcccgggcctttctccttgtgctggatctacagagcgaacgggagaaccctctgcttcctcagattcaactgggaaggtgggtttttctagcattttatttatttatataattttttttcttgaaagatattatcrattactcccaggggccgttcaaatagttttattcatttttctagaaatccagcagattttttttctgataaagtaaaccccttaacattggagccgactttgtcttgacttctagtgagaattataaactgtatattaaatagatattttttgggtgctgaatcaattttatttaaatttgtgattaaagtgacattgaatttctgatgctatgctgccataacacttgaaaaccaatttagttgttagtcattcattaaacattaacatcactatcatttatttattgctaaatgatgcatagtattttagtctacttgtattgtttataagaaacccaagcaaaaatatatagcaattgttaccttgttaagtttgtagttctctacatttctctggatggagactgtgaacatctgattgttcagcaaccttcagtatctattattttaataagaaagaaacttcccctaaactttagaaaacagttgctccactttaggaatcaaattatgtcaataaatgttataaacacagccttcatttcaacttatataaaatatgttttaaaatgcctgacaatgtagataattcaagaaatgttgactgaaattttgtctacacttagaacattttttgaaattcagtttacagaaattggagaaaatgctttttaaacaagtgtttcctttcttcaagaagayattctccttttaatygaaattttctccattcagtgataaaatgatcagccatgtgaagattcgaaacttcgagttcttttgaaattcagagtctgtaacttaaaacattacccttatgaatttagatgagaattcacttgttctgtcagtaatccataagacagaaatctgtttttttaaaaatatctttttctcctctcagctcatacataacacaaggcagaaatctggatatgagatttgcctctttaatgtcactacatgttatgtttcctgaattgtagtatgtgactttcaaaatggtggttttccacactctacctttagtgcaagctatttgtttgttttctaatttatagttttaaaaacttcgcttattgagtttttgttatgtggtttatatttttctttctctttcagctattttatttaatattgtgtcagatattttacaaggtatgacctaattaaaaactcagtagagaaagatcagaatggccttgagaatagagccacaaaaataactatgaaaatgccagtaacgtttatttaaaacaaaatattttaatttttaaattttcccttaaaacacacttttggaatatgctacaatattacatgttttttgtctttttatttttctgagacggagtcgttttctgccacccaggctggagtacagtggcatgatcttggctcactgcaacgtctgcctcctgggttcaagcaattctcctgcctcagcctcctgagtagctgggattataggcacatgccaccgcgcccagctaatttttgtatttttagtagagatggggtttcatcatgttggccaggttggtctcgaactcctgaccttgtgatgctcccacctcggcctcccaaagtgctgggattaaagctgtgagccactgtgccaaggcttttttattttttwtttttgtcattttctttcaaaacttgagtggtctctgagctcctgtcattaaacctatctatatctgtctatcagcacaactcaccttgaatatagtcttatactttcaagtatctttgtctttgcacgtttttcaagtttcatgtgccatttaaacttggacccaggtatctgattatttgatgtgaatagagggatgctacagatgtcatttgtctcccgccctaagtcctccagtctccttagagctagtacttactaagcatttactatgtcatcaataatcataaaacgtatttttttttttgagtcagagtctcgctctgttgcccaggctggagtgcagtggtgccatcttggctcactccaagctccccctcccgtgttcacgccattctcctgcctcagcctcccgagtagctgggactacaggcgcctgccaccatgcccgcctaatttttttgtatttttagtagagatggggtttcaccgtgttagtcaggatggtctcgatctcctgacctcatgatcctcccgcctcagcctcccaaaatgctgggattacaggcgtgagccaccgcgcctggcctaaaatgtgttctttattattgacggctgtattgatgggattggtaatttagtccttcatattaatctctattctctctcagagtacaagctctcatcatatgcaaattctcagaagggctgtgaacaccttagtaataaatttatcttttgaggtcattagcaaacatgaactcacagggatccasagatggtaaaattcaaaacagcctgtcaagttcaaaacagagaggtgaaagcagaagagacactttcctattttgcctaataggtctccttatatgcatctgtagttaacattcctcaattcaagttagaatcatgaaacaataatgaagctcctcctatgtctcttttcaagttgtaattactatataggaaaaactaagttgtcacccaatatcttagacactttgagagcaaagggggtgctgtaaataagtatacaagatcacagacctaaattgagcctgttccagacaaattggggcctatggtcaacctatccttagacctgctaacgcattagcattagcagcacctaagtcctcattgaatgttctggttcaaggctccacctcagaaattctgaaatgggtagtaagagcaaattttcattttaaakcacacctgagatgattctcatacaaccgaaattttagatccatagccctatttgatacttgacagtgcaagtttctgtaatttaaaaagatgtggtggcctgacacctgcaatcccaacattttgggaggccaaggtgggagggtcccttccttgagcccagcagtttgagaccaatgtagtgagactcatctctgccaaaaaaaaaaaattagccgggcatggtggcacacatctctagtcccaattactcaggaggctgaggcgagagaatcgcttgagcctgggacattgaggctgcagtgaactgtgatggcacaactgcatttcagcccgggwgacagcaagattctgtctc

SEQ ID NO: 215 - DNA, 2844 bp, Homo sapiens
caacaatggccacacatmgagattgaaatgaagggataaaaacattcctataaattcgaaggcaagttttgctgactagaaaaacaagccaataatttgaaatggtgtgcccgaatggatacgacccagggggccgacatctactgctgtttattataattctagcagcttgggaggcagggagaggccagctccactactcggtccccgaggaggctaaacatggcaacttcgtgggccgcatcgcgcaggacctggggctggagctggcggagctggtgccgcgcctgttccgggcggtgtgcaaattccgtggggatcttctggaggtaaatctgcagaatggcattttgtttgtgaattctcggatcgaccgcgaggagctgtgcgggcggagcgcggagtgcagcatccacctggaggtgatcgtggaaaggccgctgcaggttttccatgtggacgtggaggtgaaggacattaacgacaaccctccggtgttcccagcgacacaaaagaatctgttcatcgcggaatccaggccgcttgactctcggtttccactagagggcgcgtccgatgcagatatcggggagaacgccctgctcacttacagactgagccccaatgagtatttcttcctggacgtgccaaccagcaaccagcaggtaaaacctcttggacttgtattacggaaacttttagacagagaagaaactccggagcttcatttattgctcacggccaccgatggaggcaaacccgagctgactggcaccgttcaattactcatcacggtactggacaacaatgacaatgccccagtgttcgacagaaccctgtatacggtgaaattaccagaaaacgtttctatcggaacgctggtgattcaccccaatgcctcagatttagacgaaggyttgaatggggatattatttactccttctccagtgatgtttctccagatataaaatccaagttccacatggaccccttaagtggggcaatcacagtgataggacatatggattttgaagaaagtagagcacacaagatcccagtcgaggctgtcgataaaggcttcccacccctggctggtcattgtacagttcttgtggaagttgtggatrtaaatgacaatgctccacagttgactctcacttccctgtctctccctattccagaggacgcccaaccaggtaccgtcatcacattgattagcgtgtttgaccgagattttggagtcaacggacaggttacctgctccctgacgccccgcgttcccttcaagttggtgtccaccttcaagaattactattcattggtgctggacagcgctctggaccgcgagagtgtgtccgcctatgagctggtggttaccgcgcgggacgggggctcgccttctctgtgggccactgctagcgtgtccgtggaggtggccgacgtgaacgacaacgccccggcgttcgcgcagcccgagtatacggtgttcgtgaaggagaacaacccgccgggctgccacatcttcactgtgtcggcgggggacgcggacgcgcagaagaacgcgctggtgtcctactcgctggtggagctgcgggtgggcgagcgcgcgctgtcgagctacgtgtcagtgcacgcggagagcggcaaggtgtacgcgctgcagccgytggaccacgaggagctggagctgttgcagttccaggtgagcgcgcgcgatgcgggcgtgccgcctctgggcagcaacgtgacgctgcaggtgttcgtgctggacgagaacgacaacgcgccggcactgctggcgcctcgggtgggtggcactggtggcgcagtgagagagcttgtgccgcggtctgtgggcgcgggccatgtggtggcgaaggtacgtgcagttgacgctgactcaggctacaacgcgtggctttcgtatgagttgcaaccggtggcggccggtgcgagcatcccgttccgcgtggggctgtacactggtgagatcagcacgacacgagccctagatgagacggacgcaccgcgccaccgccttctggtgcttgtgaaggaccacggggagccctcgctgacagccacagscaccgtgctggtgtcgctggtggaaagcggccaggcaccaaaggcgtcgtcgcgggcatcgttgggcattgcaggcccagagaccragctggtggatgtcaacgtgtacctgatcatcgccatctgcgcggtgtccagtctgttggtgcttaccctgctgctgtacacrgcgttgcggtgctcagcgccgtcctctgagggcgcatgtagtttggtaaagcccactctggtgtgctccagcgcggtggggagctggtcattctcccagcagaggcggcagagggtgtgctctggggagggcccacccaagacagacctcatggccttcagtcccagccttcctcagggtccatcctctacagacaatgtgagtcataaataatcttgtttccaacaattttaaaacaattagttcaattggtctccttaaattttctttcataatttcttttttagttgatagctttatgtataattattattttttaatgttatgctgtatttgcactaattatttggaagtacgtttaatatacacttttgttttgggatgcgtaatactatagatcaaaatctatggtttatgttggctactctycatttttggaggaggactttgctaactggagcaatggattcacctttcttctatagtgtatttacaaaatcaaatatttacatttccatattttgataatcaatacctataaatgttatagtaaacaaatttaatatatatgttacctaatatttta

SEQ ID NO: 216 - DNA, 2531 bp, Homo sapiens
tccctgactgttgaatgatggcggacgcagaagaaatggattaataaattccggaacatacagtattttatctttatgcggaagatcttctaatggaaataaaaccagaggtatttgacatggtgtttaccccggaggatagattgggaaagcaatgtctgctcctcccgcttctgctcctcgcagcctggaaggtggggagcggccagctccactactccgtacccgaggaggccaaacacggcaccttcgtgggccggatcgcgcaggacctggggctggagctggcggagctggtgccgcgcctgttcaggatggcctccaaagaccgcgaggaccttctggaggtaaatctgcagaatggcattttgtttgtgaattctcggatcgaccgcgaggagctgtgcgggcggagcgcggagtgcagcatccacctggaggtgatcgtggacaggccgctgcaggttttccatgtggacgtggaggtgagggacattaacgacaacccgcccttgttcccggtagaggaacaaagagtgctgatttacgartctaggctgccagattctgtgtttccactggagggcgcgtccgatgcagatgttggctcaaattccatcttaacctataaactcagttctagcgaatacttcgggctagatgtgaaaataaacagtgatgacaataaacaaattgggctcttattaaagaaatccttggacagagaggaagctcctgcacacaacttattcctgacagccacagatgggggcaaacctgagctcacaggcactgttcagctgctggtcacagtgctggatgtgaatgataatgctcccactttcgaacagtctgaatacgaagtaagaatattcgaaaatgcagacaacggaacaacagttatcagactgaatgcttctgatcgggatgaaggagcsaatggggcaatttcatattcttttaatagccttgttgcagccatggttattgaccactttagcatagatcgaaatacgggagaaatagtgattcggggtaatttggattttgaacaagaaaacttatacaaaatcctcattgacgccacggacaaaggccatcctcccatggcgggtcattgcaccgttttagtgagaattttggataaaaatgataacgtccctgagatagcactgacttccttatccttgcctgtacgtgaagacgctcaatttggtactgtcatcgccctaattagcgtgaacgacctcgattcaggtgccaacgggcaggtgamctgctcsctgacgcctcaygtccctttcaagctggtgtccaccttcaagaattactactcgttggtgctggacagygccctggaccgcgagagcgtgtcggcctatgagttggtggtaaccgcgcgggacgggggctcgccttcgctgtgggccaccgccagcttgtctgtggaggtggccgacatgaatgacaatgctccggcgttcgcgcagcccgagtacacagtgttcgtgaaggagaacaacccgccgggctgccacatcttcacggtgtctgcgcgagacgcggacgcgcaggagaacgcgctggtgtcctactcgctggtggagcggcgrgtgggcgagcgcgcgttgtcgagctacatttcggtgcacgcggagagcggcaaggtgtacgcgctgcagccgctggaccacgaggagctagagctgctgcagtttcaggtgagmgcgcgcgacgcgggcgtgccgcctctgggcagcaamgtgacgctgcaggtgttcgtgctggacgagaacgacaacgcgccggcgctgctggcgcctcgggtgggtggtactggtggtgcagtgagcgagctggtgccgcggtcastgggtgcaggccaagtggtggcgaaggtgcgcgcagtkgacgccgactcaggctacaacgcgtggctttcgtatgagctgcagcccccggcaagcagcgctcgcttcccgtttcgcgtggggctgtacacgggcgagatcagcaccactcgtgtcctggacgargcggactctccgcgccaccggctgctggtgctggtgaaagaccacggtgagccggcgctgacagcgacggccacggttctggtgtcgctggtggagagtggccaggctccaaaggcgtcatcacgggcgtcggtgggcgccgcgggcccagaggcggcgctggtggatgtcaacgtgtacctgatcatcgccatctgcgcggtatccagcctgctggtcctcacgctactgctgtacacagcgctgcggtgctcggcgccacccaccgagggcgcgtgcacggcggacaagcccacgctggtgtgctccagcgcagtggggagctggtcgtactcgcagcagaggcggcagagggtgtgctccggggagggcccacccaagatggatctcatggcctttagccccagcctttcaccttgtcctattatgatgggtaaggcggagaatcaggatttaaatgaagatcatgatgccaaagtaagtgaattttcataa

SEQ ID NO: 217 - DNA, 5521 bp, Homo sapiens
attrcagacrgatatagattgcatttygaaaatcaacgaatggatctaaartttacattggccacatgatgtcgctgtacaccacaaagtcttgtcaatagaagggagctactgatcactaaaagtgaaggaggaagctccattttgtcaccgcctgagagaagacagaaacggtaaagagataaatgattggaaatattagataaaatggcatgattttgaagtaagaggagagcataagaaaggtgtagtcyttttgcaatggtgttttctaggagagggggcctgggagcccgggatctgcttctttggcttctgctcctcgcagcctgggaggtggggagcggccagctccactactcgatcccggaggaagccaaacacggcaccttcgttggccgcgttgctcaggacctgggactggagctggcggagctggtgcctcgcctgttccgggtggcgtccaaaacacacagggaccttctggaggtaaatctgcagaatggcattttgtttgtgaattctcggatcgatcgcgaggagctgtgccagtggagcgcggagtgcagcatccacctggagttgatcgccgacaggccgctgcaggttttccatgtggaggtgaaggtgaaagacattaacgataatccacccgtcttcaggggcagagaacaaataatatttattcctgaatctagactcctgaattcgcgttttccgatagaaggagctgctgatgcagacattggtgctaacgctcttctaacgtacacgctcagcccgagtgattatttctctttggatgtagaggcaagtgatgaactgagtaaatctctttggcttgaattgagaaaatatttggatagagaagaaacaccagaacttcacttattactgactgccactgatgggggcaaaccggagctgcaaggtacagttgagctgctgatcaccgtcctcgacgttaatgataacgccccactgtttgaccaggccgtatacagagtccacttgttagagactacagcaaatggaacattagtgaccacattaaatgcctctgatgctgacgaaggtgtaaatggtgaagtcgtcttttcctttgacagtggtatttctcgtgacattcaagaaaaattcaaagttgattccagctcaggagaaattaggttaattgataaactggattatgaagaaacaaaatcctacgaaattcaagtaaaggcagttgataaaggaagtcctccgatgtcaaatcactgtaaggttttggtgaaagtgctggatgtaaatgataatgctccagaactggcggtcacttcattgtatttgcctatcrgagaggacgctccactcagcaccgtcatcgccctcatcaccgtgtctgaccgtgactcaggtgccaacgggcaggtgacttgctccttaatgccccacgtccccttcaagctggtgtccaccttcaagaattactactcgttggtgttggacagcgccctggatcgcgagagcctgtcggtctatgagctggtggtgaccgcgcgggacgggggctcgcctycgctgtgggccacggccagggtgtccgtggaggtggccgacgtgmatgacaacgcgcctgcgttcgcgcagcccgagtacacagtattcgtgaaggagaacaacccgccgggctgccacatcttcacggtgtctgcgcgggacgcggacgcgcaggagaacgcsctggtgtcctattcgctggtggaacggcgggtgggcgagcgcgcgctgtcgaactacgtgtcagtgcacgcggagarcggcaaggtgtacgcactgcagcccctggaccacgaggagctggagytgctgcagttccaggtgagcgcgcgggatgcgggcgtgccgcctctgggcagcaacrtgacgctgcaggtgttcgtgctggacgagaacgacaacgcgcsggcgctgctggcgcctcgagtgggtggcactattggtgcagtcagtgagctggtgccgcgattggtgggtgcgggtcatgtggtggcgaaggtgcgcgcagtggacgccgactcgggctacaacgcgtggctgtcctatgaactgcagccggcagcaggcggcgcgcgcatcccgttccgcgtggggctgtacacgggcgagatcagcacgactcgtgtcctggacgaggctgacttgtcgcgctaccgccttctggtgctagtgaaggatcacggtgagccggcgctgacagccacggccactgtgcttgtatctctggtggagagcggccaggcgccaaaggcgtcttcgcgggcgtcggtgggtgtcgcgggcccagaggcggcgctggtggatgtcaacgtgtacctgatcatcgccatctgcgcggtgtccagcctgctggtgctcacactgctgctgtacacggcgctgcggtgctcagtgccgcccactgagggtgcrtrtgtgccgggcaagcccaytctggtgtgctccagcgcgttggggagctggtcgaactcacagcagaggcggcagagggtgtkctctagcgagggcccacccaagaccgacctcatggccttcagcccaggcctatctccaagtcttaacacgtcagaaagaaatgaacaaccagaagcaaatttggatctttctggtaatccacgacagcccaaccctgactggcgttactctgcctccctgagagcaggcatgcacagctctgtgcacctagaggaggctggcattctacgggctggtccaggagggcctgatcagcagtggccaacagtatccagtgcaacaccagaaccagaggcaggagaagtgtcccctccagtcggtgcgggtgtcaacagcaacagctggacctttaaatacggaccaggcaaccccaaacaatccggtcccggtgagttgcccgmcaaattcattatcccaggatctcctgcaatcatctccatccggcaggagcctactaacagccaaattgacaaaagtgacttcataaccttcggcaaaaaggaggagaccaagaaaaagaagaaaaagaagaagggtaacaagacccaggagaaaaaagagaaagggaacagcacgactgacaacagtgaccagtgaggtcctcaaatggraacaagccacttagccagtttttgtaataatggcaaatctctcccatgtagcaattccctgctcctttttcctatctacatgagccctcttagagacctcagaaatctgcagaaagttccctgtgtctgtctagaacgcatttaacaggttttgtcgtaaaagctttactaagtctggtgttaactctttctctccactctggcttgttttcagaacctaaaaagcagacccaagtttcctttctcctccgccgcaaaggagaggcttcccagccccgccagtgagaggttggactctctgccctgtgctccggggatcctgtcttgatgacacttgcagggcaggctgaaaagttttgagattgagcagcttgggagtttgtggccactgggtatgtgtggctaccgcgggtatgcgagtgccagatattggctgagacgagccagcttagactaattggtacaaggaaggcaagaaaacaaagacaaataaacagcggaagttatcagtatggaggggaagtgtaaacttaaagggaccagactttctaaatcttacaactcaagaggtggcagccaccctctaggagacaaaactacccccactgacaaggctttaggagaccctaaagtctgttggctgtgacgtcattatacctaaaatctgcatcatacctgcaagccaacagttcagtgttttaacagagaaccaccctgggaaacagaagcagatctgatgtgtttcctatacatgtcctgtgctcactttattaaaaattcttttgcacacaatgtttatgaaaaggccagatccttttccaatacttatgcaaaagcaaaagaaaaccccgacacctcacctttcgctgtttgttgtttcatagatttatttaaaaaaagagaaagtctatagctataaatctttaaagagaaatatgaatacaattcccctaaactctcctcaaaagagaattcagtctacagccatttaaatgatcattgctgctacagaagtgctttaagagaattgcctgaaacatctgtattatatcggccacctgccaatcacagctttactctttcaggtcactctggggctgcctcttgcatgtattactaaataaaatgatctctctttctctctctctctctcttttctaagaaacaattatgtgcactttgatacacaaccttctctaaccaactatatatcaagacccaaaaattgaagaaaaatattgttttctcatacagtgagcagatttttcaatctactaattctgtgacttgtcttggtgtgctagcctacaccttctctttggtttagttttccttttctataacactctgaattgctaatcttactaacacctatgatgttacctkaaatcaatctcccatatgtatgctgtatgctatgctaagactcctgaaatatacttactctgtgcttgtgtatgtgaatgttaatgcaactattacctagagtgaactttaagctttattgttgaatgtaattccattatatttccttttgtacacctgtgaaaaagtggagtagtgtttttttaaccattgttaatcagcttttgtgtatgaaagacacagtaaaatttctttcttaaatcaagatactggtgattcaaggaattttatttatggtccagccaagagccatctcgtgccaagacttctgctggcaagggaatggataaagctgttttgttctagtaacaattttggaatgaatactgacaatattccatgagggtgtgcaagcacaaattttaccaatctgacctctttgaagttgcagaatgctttgaaattctaatggtatctgaaatatcagctcatagaaagtaacaaaatttgctgtcaccttaaataagacattttaattttgttataatgtacaatttagaagtttgattaattrtattatctatttaggcattaatataaaagaggtaggagtctgttatttaaaaaaagcattaaatttaaaaaaaaactgtcttgtctacttttagcttcattctcccatattttgaagggtgtgtaacttcagctctgcaggattgcatggggtaaaacttgttaccaacacatgtgaaccattgctacattgtaggttgtgatcattttgccccactgaagcccatgtatctgaccttacgtgccttttgaactaggagaatcgggctaatttattaatgatgataattataatgtatctgtacagcactttttacatttgcgaagtgctttccaatccatkttagttactagttattacagctgtaaggataaaacacgtcatgtggattcattttgaattggtgctattggtatttcctctgttattgctaataaatgaaaatggtggtatg

SEQ ID NO: 218 - DNA, 2598 bp, Homo sapiens
gaaagraaaagaaccttccatttttggctgtgccaagaagctcagaaaggygataatataaaaaatatatagttaattsggaattgaatttacaaaatacattgtgtggtgatgcaatagaaagytcataattggaacgagattgagatggtatattcccggagaggaagtctgggatcccggctcctgctgctctggcttctcytygcctactggaaggcagggagcggccagctccactactcgatcccggaggaagccaaacacggaaccttcgttggccgcatcgcgcaggacctagggctggagctggcggagctggtgccgcgcctgttccgggtggcgtccaagggccgcggrgaccttctggaggtaaatctgcagaatggcattttgtttgtgaattctcggatcgaccgggaggagctgtgccggcggagggcggagtgcagcatccacctggaggtgatcgtggacaggccgctgcaggttttccatgtggaggtggcagtgaaggacatcaatgacaatccgcccaggttctccagacaagaacaaagattattcattttagagtcaagaatgccagattcgcggtttccgctagagggcgcgtcggatttggatattggagcaaatgcacaattgagatacaggttaaatccaaacgaatattttgacttagatgttaaaacaaatgaagaaraaacgaactttttagagctggttttgaggaaatccttagatagagaagaaacacaagaacaccgtttattagtgattgcaactgatggaggaaaacccgaactaacaggtacagttcagttgttgatcaatgtattggatgctaatgataacgccccagaatttgataaatccatttataatgtcagattgttggaaaatgcaccaagtgggrcattagttattaaactgaacgcctcagatgcagatgagggcatcaataaggaaatagtgtatttctttagtaatcttgttcttgacgatgtaaagtccaaatttataattaattctaatactggtgaaataaaagttaacggggaactggattatgaagactataactcatatgaaattaatattgatgccatggataaaagtacattcccattatcaggacactgtaaagtagtagtgaaactcctggatgtgaatgataataccccagagatggccataaccamccttttcctgcctgtcaaagaggacgctccactcagcacggtcattgctctgatcagcgtgtctgaccgtgactcaggtgccaacgggcaggtgacctgctccctaatgccccacgttcccttcaagctggtgtccaccttcaagaattactactcgttggtgctggacagygccctggaccgcgagagcgtgtcggtctatgagctggtggtgaccgcgcgrgacgggggctcgccttcgctgtgggccaccgccagcgtgtctgtggaagtggccgacgtgaacgacaacgctccggcgttcgcgcagccccagtataccgtgttcgtgaaggagaacaacccgccaggctgccacatcttcacggtgtctgcacgggacgcggacgcgcaggagaacgccctggtgtcctactcgctggtggagcggcgggtgggcgagcgcccgctgtcgagttacgtttcggtgcacgcggagagcggcaaggtgtacgcgctgcagccgctggaccacgaggaagtggagctgctgcagttccaggtgagcgcgcgcgacgcgggcgtgccgcctctgggcagcaacgtgacgctgcaggtgttcgtgctggacgagaacgacaacgcgccggcgctgctggtgcctcgagtgggtggcaccggcggcgcagtgagcgagctggtgccgaggtcagtgggtgcgggccacgtggtggcgaaggtrcgcgcagtggaccctgattcgggctacaacgcttggctttcgtatgagctgcagccagcgcctggcagtgcgcgcatcccgttccgcgtggggctgtacacaggcgagatcagcacaacacgctctctggatgagaccgaagcaccgcgccaccgccttctggtgctggtgaaggaccatggagagcccccgctgacagccacagccacagtgctggtgtcgctggtggaaagtggccaggcgccgaaggcctcatcgcgggcgtcggcgggcgctgtgggtcccgaggctgycctggtggatgtcaacgtgtacctgatcatcgccatctgtgcggtgtccagcctgctggtgctcacgctgctgctgtacaccgcgctgcggtgctcggcgcagcccaccgaggccgtgtgcacacggggcaagcccactctgttgtgctccagcgcggtggggagctggtcgtactcgcagcagaggagacagagggtgtgctctggggaagctccacccaaaacagacctcatggccttcagtccaagccttcctcagggtcccacctctacagacaacgtgagttttytaatattaacatccatctttccctcccaattttcaaatattaaatgtcacattcacccactttttttgtatttaaaaattatgtyttag

SEQ ID NO: 219 - DNA, 2507 bp, Homo sapiens
tttggagtctgaaatatggaggatgcagctgcacttgactgaccgattaaaagatttcccttgactttgagaaacgatatttaatcagaacaaaatactgtgcactaaagatggagttttcctggggaagcggccaggaatcccggcgtctgctgctcttacttcttctcctcgcagcctgggaggcagggaacggtcagctccactactcggtctccgaggaggccaaacacggcaccttcgtgggccgcatcgcgcaggacctgggactggakctggcggagctggtgccgcgcctgttccgggtggcgtccaaaaggcaccggggccttctggaggtaaatctgcagaatggcattttgtttgtgaattctcggatcgaccgsgaggagctgtgccggcggagcgcggagtgcagcatccacctggaggtgatcgtrgacaggccgctgcaggttttccatgtggacgtggaggtgagggacattaacgataacccgccggtgttcccagcaacacaaaagaacctgtccatcgcggaatccaggccgcttgactctcggtttccactagagggcgcctcggatgcagatatcggggagaacgccctgctcacttacagactgagcccaaatgaatacttttctctggaaaaaccayctgatgacgagctggtaaaaggtcttgggcttatattacggaaatctttagacagagaagaagctccggagatttttttagtgctcacagccactgatggaggcaaacccgagttgactggcaccgttcagttactcatcacagtactggatgccaatgacaatgccccagcttttgacagaaccatttataaggtgagattactagaaaatgttcctaatggaacattggtaattaaacttaacgcctcagatttagacgaaggattgaatggggacattgtttattcattctcaaatgatatttcgccaaatgtgaaatccaagtttcacatagatccaattactggacaaattattgtaaagggatatattgactttgaagaaagcaaatcctatgaaattattgtagagggcattgataagggacagctcccactttctggccattgtagagttattgtggaagtagaagacaacaacgataatgtcccagatttggaattcaagtctttatcacttccaattagagaggacgctccactgggtacagtcatcgccctgatcagcgtgtccgacaaagacatgggtgtcaatgggctggtcacctgctccttgacgtcccacgtccccttcaagctggtgtccaccttcaagaattactactcgttggtgctggacagtgccctggaccgcgagagygtgtcagcctatgagctggtggtgaccgcgcgagacgggggctcgccttcgctgtgggccacggccagtgtttctgtggaggtggctgatgtgaacgacaacgctccggcgttcgcgcagcccgagtacacagtgttcgtgaaggagaacaacccgccgggctgccacatcttcactgtgtctgcgtgggacgcggacgcgcaggagaacgcgctggtgtcctactcgctggtagagcggcgggtaggggagcgcgcgctgtcgagctacgtttcggtgcatgcggagagcggcaaggtgtacgcgctgcagccgctggaccacgaggagctagagctgctgcagtttcaggtgaccgckcgcgatgccggcgtgccrcctctgggcagcaacgtgacgctgcaggtgttcgtgctggacgaaaacgacaacgcgccagcactgctagcgcctygggcgggtggcactggtggcgcagtgagcgagctggtgccatggtcggtgggtgtgggccacgtggtggcaaaggtgcgcgcggtggatgctgactcsggctacaacgcgtggctttcgtacgagctgcagccggggactggtggcgcgcgcatcccgttccgcgtggggctgtacactggcgagatcagcacaacgcgtgccctggacgaaacggacgctccgcgccaccgcctactggtactggtgaaggaccacggcgagcccgcgctgacggccacggccactgtgctggtgtcacttgtggagagtggacaggcgccaaaggcctcctcacgggcgttggtgggcgctgtgggtcccgatgctgcgctggtggatgtcaacgtatacctgatcattgccatctgcgcggtgtccagccttttggtgctcacgctgctgctgtacaccgcgctgcggtgctctgcgctgcccaccgagggcgcgtgcgctccgggcaagcccacgctggtgtgctccagtgcggtggggagctggtcatactcgcagcagaggaggccgagggtgtgctctggtgagggcccacccaagaccgacctcatggccttcagccccagtttacctgactctagggacagagaagatcagctgcagacaactgaggaatcctttgcaaaggttagtgtataa

SEQ ID NO: 220 - DNA, 3291 bp, Homo sapiens
ttttcctttgtggattcttttttaaaactaccaagtttgagaatatgaatatatttgtttttcatattgttctgcaatgaatataaagtcacttataatcagaaagcaattaaatgtaaataacagtaaagaatgagaactatagaaaatagatatgaaaatgcaagcccacagagatgagaatagatcatgtggaacataaacactaaagagctgcttttataaaacttcaattttttctttgagttccctagcagccaaagtaacaagggagactgaaagtaaaacaattcaaatttgatagtatttttatatgaggaacaacactttcaggaaatgtttaaccctagtttttcatgaggccaccttaacaactgaattctctttctctctcactctgtgtataagtattttagataagtaaaagaacaatgttataatgttaagtcaaacatagacacaataatttaaatttgatgttaatcgagaaatacaatgccatttccatatatatttagtttcaatatgacttataatctgaatattccataaataagcacgttggaaatatttgggggaagaaacccaaaacacgtgaaattctgtggtggtaaatgcagtgcacagtactcacagttttaggcgcaaggtgtcgctctttacttggtggaaagttcatttaaaggttggtctgaacagtgaggcactyccatacaaaggaactccatcataccggatgccaccgtttaaggatcctttgaaacttcttaagaattcaacgagatttttaacctgaractgaagaatctggtactgtaagtgtaaagaagcttattttggaagccaatttcgtatgcgatgtttggttttcagagaaggggattgggcaccccacgactacagctctggcttctcctcctcgaattctgggaggtggggagcggccagctccactactccgtctcggaggaggcyaaacacggcaccttcgtgggccgcatcgcgcaggacctggggctggagctggcggagctggtgcagcgcctgttccgggtggcgtccaaaacacatggggaccttctggaggtaaatctgcagaatggcattttgtttgtgaattctcggatcgaccgcgaggagctgtgcgggcagagcgcggagtgcagcatccacctggaggtgatcgtggacaggccgctgcaggttttccatgtgaacgtggaggtgaaggacattaacgacaacccgccggtgttctcgctcagagaacaaaagctgctgattgcggaatctaagcaatcggactcgcgttttccactagagggagcttctgatgctgacattgaagagaatgctctattgacctacaggctaagtaaaaatgagtatttttctttagattcaccaacaaatggtaagcagattaaaagactgtcacttattttaaagaagtmtctggatagagagaaaactccggaacttaatttgctgctaacagctacagacgggggaaaaccagagcttactggcaccgttcggctgttagtccaagtcttggatgtcaacgacaatgatccagagtttgataaatcagaatataaggtgagccttatggaaaatgctgctaaagaaactcttgtgctcaaactaaacgccacagaccgagacgaaggagtcaatggagaggtaacatactccttaatgtcaattaagcccaatggaagacacttatttacactagatcaaaataatggagaagtgagggtcaatggaactttagattatgaagaaaacaagttttataaaattgaagtacaggctacagataaggggactcccccaatggcaggtcactgtacagtctgggtggaaatcttggacaccaacgataactctcctgaagtcgccgtgacttccttgtccctcccagtacgagaggacgctcagcccagcacsgtcattgccctgatcagcgtgtctgaccgtgactcaggtgtcaacggacaggtgacctgctcgctgacsccccacgttcccttcaagctggtgtccaycttcaagaattactactcgttggtgctggacagcgccctggaccgcgagaacgtgtgggcctatgaactggtggtgactgcgcgggatgggggttcgccttctctgtgggccacggccagggtatccgtggaggtggccgacgtgaacgacaatgcgcctgcgttcgcacagcccgagtacaccgtgttcgtgaaggagaacaacccaccaggctgccacatcttcacagtgtcggcgcgggacgcggacgcgcaggagaacgcgctggtgtcctactcgctggtggagcggcggttgggcgaccgcgcgctgtcgagctacgtgtcggtgcacgcggagagcggcaaggtgtacgcgctgcagccgytggaccacgaggagctggagctgctacagttccaggtgagcgcgcgcgatgcgggcgtgccgcctctgagcagcaacgtgacgctgcaggtgttcgtgctggacgagaacgacaacgcgccggcactgctggcgactcaggctggcagcgcgggaggcgcagttaacaagctagtaccgcggtcggtgggtgcgggccacgtggtggcgaaggtgcgckcagtggatgcggactcaggctacaacgcgtggctttcatatgaattgcagccggcggcgggcggctcgcgcatcccgttccgcgtggggctgtacacgggcgagataagcacaacgcgtgccctggacgaggcagactcgccgcgccaccgacttctagtactggtgaaggatcacggtgagccggcgctgacggccacggccaccgtgctggtgtcrttggtggagagcggacaggcgccaaaggcctcttcccggactttggcgggcgccgcgagcccagaggctgcgctggtggatgtcaacgtgtacctgatmatcgccatctgcgtggtgtccagcctcctggtactcacgctgctgctgtatacggcgctgtggtggtcggcaacgcccactgagggcgcgtgcgcgccggggaagcccacgctggtgtgctcccgcgcggtggggagctggtcatactcgcagcagaggcggcagagggtgtgctctgaggagggcccacctaagasggacctcatggccttcagccccagtcttcctctaggtctgaataaagaggaggaaggggaaagacaggagccagggtcaaatcaccccggacaggtgagttttctacagattccacctatcaggaagtgtatgtga

SEQ ID NO: 221 - DNA, 2618 bp, Homo sapiens
gcattacgtattcagatactgctttgcttcatcctctctaaaatttaacaccgaggagtttaagaaatgaagataaggaactcgaattatttttaaaytttggatcaatgtaaaggcaatctaatatttggaaaatacttgcaatgttgttctcctggcgagaagatcctggagcccagtgcctgctgctttctcttctgctcctcgcagcctcggaggtggggagcggccagctccactactccgtctctgaggaggccaagcatggcaccttcgtgggccgcatcgcgcaggacctggggctggagctggcggagctggtgcmgcgcctgttccgggtggcgtccaaaagacacggggaccttctggaggtaaatctgcagaatggcattttgtttgtgaattctcggatagaccgcgaggaactgtgcgggcggagcgcggagtgcagcatycacctggaggtgatcgtggacaggccgctgcaggttttccatgtggaggtggaagtgaaggacattaatgacaacgcgccagtttttccaatggctgtraagaatctgtttatttccgaatcccgacagcctggctctcggttttcgctagagggcgcatcagatgcagatatcggaacaaattsgttgttgacttacagtcttgattccactgaatattttaccttggacgttaaaagaaatgatgaggaaattaaatcccttggactcgtgttgaaaaaaaatttaaatcgagaggacactcctaagcattatttactaataacagcaattgatggtgggaaaccagagctcactggcacgactcaactaaagatcactgttttagaygtaaacgacaacgccccagcgtttgagaggacgatctataaagtcagattactcgaaaatgcaccaaatggtaccctagtggtgaccgttaacgccaccgatttggatgaaggagtaaataaggatatcgcgtattctttcaatacggacatgtcagcagataytctgtcaaaattccatttagatccagtcaatggacaaatcagtgtaaagggtaacatagatttcgaggaaagtaagtcatatgaartccaggtagaagccacggataaaggaaatcccccaatgtcagatcactgcacagttctactcgaaattgtggacatcaatgataatgtacctgagttagttattcaatcrctatctttacctgtattagaagactctccacttagcacagtcatcgcyctgatcagcgtgtccgaccgcgactcaggagtcaatggacaggtcacctgctcgctgacgccccacgtccccttcaagctggtgtccaccttcaagaattactactcattggtgctggacagccctctggaccgcgagagcgtgtcggcctatgagctggtggtgactgctcgggacgggggctcgccttcactgtgggccacggccakcgtgtccgtggaggtggccgacgtgaacgacaatgcgccggcattctcgcagtccgagtacacggtgttcgtgaaggagaacaacccgccgggctgccacatcttcacggtgtctgcgcgggacgcggacgcgcaggagaacgccctggtgtcctactcgctggtggaacggcgggtgggggagcgcgcgctgtcgagctacgtgtcggtacacgcggagagcggcaaggtgtacgcgctgcagccgctggaccacgaggagctagagctgctgcagttccaggtgagtgcgcgcgatgcgggcgtgccgcctctgggcagcaacgtgacgctgcaggtgttcgtgctggacgagaacgacaacgcgccggcactgctgatgcctcgggtgggtggcatcggtggcgcagtgagcgagctggtgccgcggtcagtgggtgcgggccacgtggtagcgaaggtgcgcgcagtggatgcagactcaggctacaacgcgtggctttcgtatgagctgcagcctgggaccggcggtgcgcgcatcccgtttcgcgtggggctgtacacgggagagatcagcacgacccgtgccctggacgaggtggacgccccgcgccatcgcctactggtgctggtgaaggaccacggtgaaccctcattgaccgccacggccactgtgctggtgtcgctggtggagagtggccaggcacccaaggcctcktcccaggcgtccgctggcgccacgggcccggaagctgcactggtggatgtcaacgtgtacttgatcgtcgccatctgcgcggtgtccagtctgttggtgctcacactgctgctatatactgctctgcggtgctccgcgccgccaaccgaaggcgactgtgggccgggcaagcccacgctggtgtgctccagcgcggtggggagctggtcatactcgcagcagaggcagcagagggtgtrctctggagaggggttgcccaagaccgacctcatggcttttagccctagccttcctccttgtccaattagccgggatagagaggagaaacaggatgtggacgttgatctctcagccaaagtgagtaatttttatttattctttccaaaatgtctttgtttttcattcctcaatgtttccactcctctggaaatacattaa

SEQ ID NO: 222 - DNA, 2506 bp, Homo sapiens
tgactgtgatgctggaaaaaatttactaaatatgtacttacagaaaagggtgaytgctcataaaatacctcaggcaagcgatcccttaaaactgattgtcccaactcagaggccctcattttctgcaatggtgattatcggaccaagaggcccgggatcccagcgtctgctgctctcgcttctgctccttgcagcctgggaggtggggagcggccagctccactactccgtctacgaggaggccaaacacggcaccttcgtgggccgcatcgctcaggacctggggctggagctggcggagctggtgccgcgcctgttccgggtggcgtccaaaagacacsgggaccttctggaggtaaatctgcagaatggcattttgtttgtgaattctcggatcgaccgcgagaagctgtgcgggcggagcgcggagtgcagtatccacctggaggtgaycgtggacaggccgctgcaggttttccatgtggacgtggaggtgaaggacattaacgacaacccgccggtgttcagagaaagggaacaaaaggtacctgtttctgaatctgcgcctctggactctcattttcctctagagggcgcttctgatgcggatatcggcgtaaactctcttttgacctatgcgttaagtctaaatgagaattttgagcttaaaataaaaacaaaaaaagataaaagtatattgcctgaattagttcttcggaagttattggacagagagcaaacgccaaaactcaatttattgctgatggtaatcgatggcggtaaaccagaactaacagggtstgtccagattcaaataaccgtcctggatgtgaatgacaatggtccggcgtttgataagccmagctataaagtagtgttgtctgaaaatgtccaaaacgacacaagagtgatccaactaaatgcttccgatccagacgaaggacttaatggagaaatttcctatgggatcaaaatgattttgccagtgagtgagaaatgtatgttttcaataaatccagacacaggtgaaattagaatttatggtgaactggattttgaagagaataatgcctatgaaattcaggttaacgccattgataaagggattccttccatggcaggtcacagcatggtcctggtggaagttctggacgtgaatgacaatgtccctgaagtaatggttacttcactgtcgctccctgtgcaagaggatgctcaggtgggtaccgtcattgccctgattagcgtgtcggatcgtgactctggagccaatggacaggtcatctgctcactgacacctcatgttcccttcaagctggtgtccacctacaagaattactactcgttggtgctggacagcgccctggaccgcgagagcgtgtcggcctatgagctggtggtgactgcgcgggatgggggytcgccttcgctgtgggccacggctagagtgtccgtggaggtggccgacgtgaacgacaatgcgcctgcgttcgcgcagcccgagtacacagtgttcgtgaaggagaacaacccgccgggctgccacatcttcacggtgtcggcatgggacgcggacgcgcagaagaacgcgctggtgtcctactcgctggtggagcggcgggtgggcgagcacgcactgtcgagctacgtgtcggtgcacgcggagagcggcaaggtgtacgcgctgcagccgctagaccacgaggagctggagctgctgcagttccaggtgagcgcgcgcgacgccggcgtgccgcctctgggcagcaacgtgacgctgcaggtgttcgtgctggacgagaacgacaacgcgccggcactgctggcgactccggctggcagcgcaggaggcgcagttagcgagttggtaccgcggtcggtgggtgcgggccacgtggtggcgaaagtgcgcgcggtggacgctgactccggctataacgcttggctgtcctacgagttgcaaccggcggcggtcggcgcgcacatcccgttccacgtggggctgtacactggcgagatcagcacgacacgcatcctggatgaggcggacgctccgcgccaccgcctgctggtgctggtgaaggaccacggtgagcccgcgctgacgtccacggccacggtgctggtgtcgctggtggagaacggccaggccccaaagacgtcgtcgcgggcctcagtgggcgctgtggatcccgaagcggctctggtggatattaacgtgtacctcatcatcgccatctgtgcggtgtccagcctgctggtgctcacgctgctgctgtacactgcgctgcgttgctcagcgccgcccaccgtgagccggtgcgcgccgggcaagcccacgctggtgtgctccagcgcygyggggagttggtcttactcgcagcagaggaggcagagggtgtgctctgcagagagcccgcccaagacggacctcatggccttcagcccaagccttcagctgtctcgagaagattgtttaaatcctcccagtgaagtaagttattaa

SEQ ID NO: 223 - DNA, 2836 bp, Homo sapiens
ccagagtaaaaaagggtaaaaaggtaatatattttagggcttaaaatagttatttttttccaagatgaaagctatgartaaacttaaaccagaaaatcgactagttttaaatctacagaataaacagtagagccttccttttagccacatgatgtcgctgtccaccatagmgtgttctctaggaaggaaaatacccagagcccctttgttacttcagagaagcggaggaataagagaagcagcaggactttaacagagactagaatatttaaatttttgcaaaacatgctcttctaatttgatcaaaacattgaggattggtaatggcgtcttctatcagaaggggccgaggggcctggacacggctgctctcgcttctgctcctcgcagcctggraggtggggagcggccagctccgctactccgtccccgaggaggccaaacacggcaccttcgtgggccgcatcgcgcaggacctggggctggagctggaggagctggtgccgcgcctgttccgggtggcgtccaaaagacacggggaccttctggaggtaaatctgcagaatggcattttgtttgtgaattctcggatcgaccgggaggagctgtgcgggcggagcgcggaatgtagcatccacstggaggtgatcgtggacaggmcgctgcaggttttccatgtggaagtggaggtgaaggacattaacgacaacccgccaatatttccaatgacagtaaagactatscggtttcccgaatcaaggctgcttgattctcggtttcctctagagggagcatctgatgcagatataggagtaaatgctcttctctcctacaagctcagctccagtgagtttttcttcctagatatacaggcaaatgatgaactaagcgaatctttgtctctcgtgctggggaaatcgctggacagagaggaaactgctgaggttaatttgttactggtggctactgatgggggcaaacctgagctcacgggcaccgttcaaatacttattaaggtattagatgtaaatgacaatgaaccaacttttgcccaatcagtttacaaagtaaaattgttagagaatacggcaaatgggaccttagtggttaagttaaacgcttctgatgcagatgaaggaccgaacagcgagattgtgtattcactcggtagtgatgtgtcctccactatacagactaagtttaccatagatcccatctcaggggaaatcagaactaagggaaaattagattatgaagaagcaaagtcctacgagattcaggtcactgcaactgacaaaggaaccccttcaatgtcaggacattgtaaaatttcattaaaacttgtggacatcaatgataacacaccagaagtctcaataacgtctctctcacttcccatctcagagaacgcttccctgggcactgtcattgctctcatcacggtgtcggatcgcgactctggtacgaatggacatgtcacctgctccctgacgccccacgtccctttcaagctggtgtccaccttcaagaattactactcgttggtgctggacagcgccctggaccgcgagagcgtgtcagcctatgagctggtggtgaccgcacgggacgggggctcgccttcactgtgggccaccaccagcgtgtccatcgaggtggccgacgtgaacgacaacgcgccggcgttcgcacagcctgagtacacrgtattcgtgaaggagaacaacccgccgggctgccacatcttcacggtgtcagcgtgggatgcggacgcgcaggagaacgcgctggtgtcctactcgctggtggagcggcgggtgggcgagcgcrcgttgtcgagctacgtttcggtgcacgcggagagcggcaaggtgtacgcgctgcagccgctggaccacgaggaagtggagctgctgcagttccaggtgagcgcgcgggatgcgggcgtgccgcctctgggcagcaacgtgacgctgcaggtgttcgtgctggacgagaacgacaacgcgccggcactgttggcgcctagggctggcaccgctgctggcgcagtgagtgagctggtgccgtggtcggtgggtgcagggcacgtggtggcgaaggtgcgcgcagtggacgctgactcaggctacaacgcgtggctttcgtacgagcttcagctgggtactggcagcgctcgcatcccgttccgcgtggggctatacacgggtgagatcagcacgacacgtgccctagacgaggctgactcccctcgacaccgcctactcgtgctggtgaaggaccacggcgaaccagcgttgacagccacggccaccgtgttagtgtcgttggtggaaagtggccaggcacccaaggcctcgtcgcgrgcgtgggtgggcgccgcgggctcagaggctacgctggtggatgtcaacgtgtacctgatcatcgccatctgcgcggtatccagcctgttggtgctcacggtgctgctgtacactgcgctgcggtgctcggtgccacccaccgagggtgcgcgcgcgccaggaaagcccacgctggtgtgctccagcgccgtggggagctggtcttactcgcagcagaggcggcagagggtgtgctctggggaggaccyccccaagacggacctcatggccttcagccctagcttatctcaaggtccagactccgcagaagagaaacagctctcagaatcagaatacgtaggaaaggtgagtcttttactttttcttgccaattctaaaattgttctttttaaaaaattctatatgatttctactagttatttagattcatagttcttcatttattttatatcatcctaccgtgcgatttt

SEQ ID NO: 224 - DNA, 2562 bp, Homo sapiens
aaaatatagcagaaagcggaatacctcttgcgaatccttccgcactaggaagccataaaaattgggccttgagagacagtttgaggtaaggcgttgtatatattgcagatagctctgaggtttttggagtgtaccatgctgtcttcctggcarggaggcccaagaccgcggcaactactgctctggcttctgatcctcgcagcctgggagacgggtagtggccagctccactactccgtccccgaggaagcaaaacacggcaccttcgtgggccgcatcgctcaggacctggggctggagctggcggagctggtgccgcgcctgttccgggtggcgtccaaaagacacggggaccttctggaggtaaatctgcagaatggcattttgtttgtgaattctcggatcgaccgcgaggagctgtgtgggcggagcgcggagtgcagcatccacctggaggtgatcgtggacaggcctctgcaggttttccatgtggaggtgaaggtgagggacattaacgacaacccgcccatattccctgaaagcaagaaacgaataatcattgcagaatctagacctccggaaactcgatttccactagatggcgcatccgatgcagatattggagtaaactcggcattgacctaccgactggatcccaacgattatttcactttggacgcacaaaacagtcttgagcaaatgtcttcattatcacttgtactgaggaaaacactggacagagaggaaattcaggaacatagtttattactgacwgccagtgatggaggtaaacccgagctgactggcacagttcagctgctcatcacgattctggacgtgaatgacaacgccccggaattttaccaatccgtttataaagtgacggtgttagagaacgccttcaatggaacattagtgatcaagctaaatgccacagatcctgatgatggtacaaatggagatatagtttactcatttagaaggcctgtatggcctgcagtggtatatgcatttaccataaatccgaacaatggagaaattaggacaaaaggcaaactagatttcgaagaaaagaaattatatgaaatatccgtggaggcagttgacaaaggaaatattccaatggcgggtcattgtacccttttggtggaagtactagatgtaaatgataacgccccagaggttaccatcacttctttgtcactccccatcagagaagacactcagcctagmgccattattgccctaatcagtgtgtccgatcgtgactctggctcaaatggacaggtcacctgcaccttgacgccgcatgtccccttcaagctggtgtccacctacaagaactactactcattagtgctggacagcgccctggaccgcgagagcgtatcagcctatgaactggtggtgaccgcgcgggacgggggctcgccttcgctgtgggccacggccagcgtgtcggtgggggtggccgacgtgaacgacaacgcgccggcgttcgcgcagcccgagtacacggtgttcgtgaaggaaaacaatccgccgggctgccacatcttcacggtgtctgckcaggacgcggacgcacaggagaacgcgctggtctcctactcgctggtggagcggcgggtgggcgagcgtgcgctgtcgagctacgtgtcggtgcacgcggagagcggcaaggtgtacgcgctgcagccgttggaccacgaggagctggagctgttgcagttccaggtgagcgcgcgcgactctggcgtgccgcctctgggcagcaacgtgacgctgcaggtgttcgtgctggacgagaacgacaacgctccggcgctgctgacgcccggggctggcagcgcgggaggcacagtgagcgagctgatgccgcggtckgtgggtgcaggccacgtggtggcgaaggtgcgcgcggtggacgccgattcgggctacaatgcgtggctttcgtatgaattgcagctggcggcggtcggcgcgcgcatcccgttccgcgtggggctgtacactggcgagatcagcacgacgcgccctctggacgaggtggacgcgccgcaccaccgccttctggtgctggtgaaggaccacggtgagcccgcgctgacggccacggcaacggtgctgttgtcgctggtggagagcggccaagcgccacaggcttcgtcgagggcgtcggcaggcgctgtgggtccagaagcggcgctggtggatgtcaatgtttacttgatcattgccatctgcgcggtgtccagcctgttggtgctcacgttgctgctgtatactgcgctgcggtgctcggcaccgcccaccgagggcgcgtgcgcgccgggcaagcccactctagtgtgctccagcgcggcaggsagttggtcgtactcgcagcagaggcggccgagggtgtgctctggggagggcccgcataagacggacctcatggccttcagtcccagccttcctccttgtctgggttctgcagagggaacaggccagagggaggaggactcagaatgcttgaaagaggtaagcttatattttaaaaaattgtcttagtaa

SEQ ID NO: 225 - DNA, 3084 bp, Homo sapiens
caatgccggcgttcgggaggcgcaacgtcggcggtcgctgagtatccagcccgcagcagtgacggccggcaggagcgtgctcttccccgcggctcgtgctctccaggagtccggagcatggtcctgggtcaccgttggtgtagcgtgttggtggaacgtggacgcctagagggaggatggtgggctgtggggtggcagttttatgtttgtgggtttcctgcggcgctgcagcgggacagctcgagtactcagtgccggaggagacggagcggggcgtagccgtaggcaatctctccgcggacttgaggmtgccagcggccgctatgtyctcgcggaactttcgcttcctttccagccaccgcgagctctacttcggggtggatctacccagcggcaatttggtggtcagagagccggcggaccgcgaacagctgtgcagggccaaagctgcctgcgtcttgacctacgacctggtgctcgaggacccgctggagctgcacaagattcggattcacgtcctggacaccaatgacaactcacctctctttcctgccggcgacgtgcagctgcacatccccgagttcctgacgcccggagcccgytttactctcccgaatgcccaagatgacgacgagggaagcaatgggatactaagctacagcctaagccccagtcagcactttcgcctggacatgggatcrcgggttgacggcagcgaatacccggagttggtgttggagaaagcactggatcgcgaacagcgcgccacccacctgctggtgcttacagctcgggacggcgggctacctgcccgctcaggagacgcacaagtcaccatcattgtggtggacacaaatgacaacgcgcctgtatttgagcgctccgtataccrcaccaaggttccagagactgcacccaatgggactgtgttattccgagttcaagccttggatccagatgaagggtccaatggggaagtccartactccctaagcaacagcacgcaagcagagctgcgacaccgctttcacgtkcaccctaaaagtggggaggtkcaagtagctgcttcactaggyccgcctgaaacgctcttggaggcatacattgaggcgagggacgaaggtgtctttggtttagctagcaccgctaaactgctggtggaggtgactgacgtgaacgatcatgcccccgaactggacttcctgactctttcgaacccagtacctgaggacgctgcccctggcacagtgattgctctctttagtgtaaaggatgaagacctcgattctaatggtagggtcatttgtggcatgtctagtgcaggcccttttcagctgacggcttcctttgacaactactacagcctgctgattgatgggcccctggaccgggagcagatcagtgaataccaagtcctgatcacggcctcagatagtggctcaccsccacttagcacccgaaggacaatcactgtgtcagttgctgatgtgaatgacaatacaccaaactttcctcaaccccrgcaggaacttttcgttgctgaaaacaatggccctggggcctctctaggccgagtgtttgcccaggaccccgacctggggaagaatggccttgtctcttatgagctgttggatgttatctctgaagggccatcagcctctarcttgstggcagtggaatcatccagtggggccatcactgccaaaacttcctttgactttgagcagctcagggggtttcatttccaagtagaaggccgggatggtggcattcctcccagaagtgcaacagtgactataaacttgtttgtggtagataggaatgacaattatccggttatcttgtttcccttgcccagaaatggttctgtcccagtggaaattgtgccccgctctgccaggactggacacttggtcacaaaagtggtagcagaggatgctgacagtggttctaatgcctggctttcctaccacatctcccgggcgtctgactctagtctctttagaatttcagccaatataggtgagctccgtactgctcgcttagttcttcccactgatgcagttaagcagagggtggtggtagtggttcgggaccatggagacccaccactttcctcctctgtcactctgggtgtgctgttgagcaactctgtccctcagttacttccagactttgaagatgtctgggaaccaggagggcagctttctgcccagaacttgtatttagtaattgccttggcttgtatttcctttttatttctggggtgcttacttttcttcgtgtgtaccaagttgcaccagagcccaggctgttgckctcagagctgctgtcgctctacagaggatctgaggtatggaagtaagatggtttcaaatcyttgcatgacatcagccaccatagatgtcactacagttgagagactttctcagacttatctctatcgggcctctctgggacttggttctgataataacagtttgctgttgcgtggggagtacaatgctgccgacctgcgaaatcttgccactggggtaggactgaatttgccaatatcctgtattcagattcggaataggaaaggggatcacgctaatgtcaatgccatggtaagcaaattttatggaatttgattcctttggcccggagatggctgctagctgtgttttgaaatatttcttagacaagcctttcacaacatttcatcaattgaaytaaacactccttcttagcacttcctgtgccaagaaatctggaagtatagaagtattagaagattgccctaggcctcaagggacttatagtttatttttgagaaacaarggcaaaaattaaaacctatttaagaacaataaaagtaatatgacataaaggtctaaaattaaaaataaaataccaaaatattttataagcaacagatgtgtaaggcactctaatatttaaagtgaagaatgaaaaatatgtaagagtctgctttatatgaatataatatggaaggtgaaacatttacttaaactattgcaatgcattattaaaagatgacgataaccacaaaagatgtaaaaataaattacaatgggggtt

SEQ ID NO: 226 - DNA, 2832 bp, Homo sapiens
attrcagacrgatatagattgcatttygaaaatcaacgaatggatctaaartttacattggccacatgatgtcgctgtacaccacaaagtcttgtcaatagaagggagctactgatcactaaaagtgaaggaggaagctccattttgtcaccgcctgagagaagacagaaacggtaaagagataaatgattggaaatattagataaaatggcatgattttgaagtaagaggagagcataagaaaggtgtagtcyttttgcaatggtgttttctaggagagggggcctgggagcccgggatctgcttctttggcttctgctcctcgcagcctgggaggtggggagcggccagctccactactcgatcccggaggaagccaaacacggcaccttcgttggccgcgttgctcaggacctgggactggagctggcggagctggtgcctcgcctgttccgggtggcgtccaaaacacacagggaccttctggaggtaaatctgcagaatggcattttgtttgtgaattctcggatcgatcgcgaggagctgtgccagtggagcgcggagtgcagcatccacctggagttgatcgccgacaggccgctgcaggttttccatgtggaggtgaaggtgaaagacattaacgataatccacccgtcttcaggggcagagaacaaataatatttattcctgaatctagactcctgaattcgcgttttccgatagaaggagctgctgatgcagacattggtgctaacgctcttctaacgtacacgctcagcccgagtgattatttctctttggatgtagaggcaagtgatgaactgagtaaatctctttggcttgaattgagaaaatatttggatagagaagaaacaccagaacttcacttattactgactgccactgatgggggcaaaccggagctgcaaggtacagttgagctgctgatcaccgtcctcgacgttaatgataacgccccactgtttgaccaggccgtatacagagtccacttgttagagactacagcaaatggaacattagtgaccacattaaatgcctctgatgctgacgaaggtgtaaatggtgaagtcgtcttttcctttgacagtggtatttctcgtgacattcaagaaaaattcaaagttgattccagctcaggagaaattaggttaattgataaactggattatgaagaaacaaaatcctacgaaattcaagtaaaggcagttgataaaggaagtcctccgatgtcaaatcactgtaaggttttggtgaaagtgctggatgtaaatgataatgctccagaactggcggtcacttcattgtatttgcctatcrgagaggacgctccactcagcaccgtcatcgccctcatcaccgtgtctgaccgtgactcaggtgccaacgggcaggtgacttgctccttaatgccccacgtccccttcaagctggtgtccaccttcaagaattactactcgttggtgttggacagcgccctggatcgcgagagcctgtcggtctatgagctggtggtgaccgcgcgggacgggggctcgcctycgctgtgggccacggccagggtgtccgtggaggtggccgacgtgmatgacaacgcgcctgcgttcgcgcagcccgagtacacagtattcgtgaaggagaacaacccgccgggctgccacatcttcacggtgtctgcgcgggacgcggacgcgcaggagaacgcsctggtgtcctattcgctggtggaacggcgggtgggcgagcgcgcgctgtcgaactacgtgtcagtgcacgcggagarcggcaaggtgtacgcactgcagcccctggaccacgaggagctggagytgctgcagttccaggtgagcgcgcgggatgcgggcgtgccgcctctgggcagcaacrtgacgctgcaggtgttcgtgctggacgagaacgacaacgcgcsggcgctgctggcgcctcgagtgggtggcactattggtgcagtcagtgagctggtgccgcgattggtgggtgcgggtcatgtggtggcgaaggtgcgcgcagtggacgccgactcgggctacaacgcgtggctgtcctatgaactgcagccggcagcaggcggcgcgcgcatcccgttccgcgtggggctgtacacgggcgagatcagcacgactcgtgtcctggacgaggctgacttgtcgcgctaccgccttctggtgctagtgaaggatcacggtgagccggcgctgacagccacggccactgtgcttgtatctctggtggagagcggccaggcgccaaaggcgtcttcgcgggcgtcggtgggtgtcgcgggcccagaggcggcgctggtggatgtcaacgtgtacctgatcatcgccatctgcgcggtgtccagcctgctggtgctcacactgctgctgtacacggcgctgcggtgctcagtgccgcccactgagggtgcrtrtgtgccgggcaagcccaytctggtgtgctccagcgcgttggggagctggtcgaactcacagcagaggcggcagagggtgtkctctagcgagggcccacccaagaccgacctcatggccttcagcccaggcctatctccaagtcttaacacgtcagaaagaaatgaacaaccagaagcaaatttggatctttctggtaatgtaagtccaactttcgagtttyggctttaaatatttttcatatttaacttgtctaatcatcttttcaaatatcactttaaaaaatgtcttcaaggtgttcactaacgttgaaataaatcataccattgaatgtagatatcctattaatggcagttttgtcttgaatggaactagaaa

SEQ ID NO: 227 - DNA, 3210 bp, Homo sapiens
cagactaatctccttaaagacccgttaagcaggggagagacggtggagactggatgaactggacagtgggggtagggagaaagggagtggccgtgttcctgcggtccgctgggatccggcaggtccagggtgaaggagatggggcwggagaggctgagcagtccgggttcgctgtccgccacttcggcgcggaatcagagcaggacttgctgagccctcctaccgctccctttccccctccccctctgtcttcccttctgtttccttttccctccccctggagctgtagcggcagcagcagcaggaagccgagccgggttgagcgactcggaggcgagcggaggagctggaatatggggagtcagcgaggacggtggggccaggagcccttgggagggcctacggagggagcggccccaggcgctttctagagcgtgagcggtgggggagcaggcgcagggtggcacgagcggaggcggggcccgggcgtggggcacggctggggaagctgccgcctccggccctgcccggctgcctccgccgcggccagtggctatggagcaggcgggcaccagacctgcggcgacagagcatccacgrctccggcggcccatgccctggctgctgctactgcctctcctgctgctgttgctgctgctgctacctggcccwgcggcctcccagctgcgatactctgtgccagaggagcaggcacccggcgcgctcgtgggcaacgtggctcgcgcgctggggcttgagctgcggcgcttggggccgggttgcttgcgcatcaaccatctgggtgcgcccagtccgcgctacctggagytggacctgacgagtggagcgctcttcgtcaacgagcgcattgatmgggaggcgctgtgtgagcagcggcctcgctgcctgctcagcytggaagtgctggcgcacaaccccgtggcggtgagcgccgttgaggtggaaatattggacatcaacgacaactcaccgcgtttcccgcggcccaactaccagcttcaggtaagcgaatcggtggcgcctggagcgcgctttcacatagagagtgcgcasgaccccgacgtgggcgccaactcagtacagacctacgagctcagccccagcgagcacttcgagctggaccttaagcccctgcaggagaacagtaaagtgcttgagstggtgctgcgtaagggcctwgaccgggagcaggcagccttgcaccacctggttctcacagccgtggatgggggcatyccagcccgctcgggtacggcacagatctctgtgcgtgtcctggacactaacgacaactctcctgcctttgaccagtccacttatcgcgtccagctacgggaggactcacccccaggcacattggtggtgaagctgaatgcctcagacccggatgagggctccaatggtgagctcaggtactccttgagcagctacacgtcggaccgggagaggcagctcttcagcatagatgccagtaccggggaagtgcgagtaattggggggctggattatgaggaagcctcctcctaccagatctatgtgcaggcgactgaccggggtccagtgcccatggcaggtcactgyaaggtgctggtggacatcgtggacgtgaatgacaatgccccagaggtggtgctcacggacctgtatagcccagtgcctgagaatgctacacccaacaccattgtggccgttctcagtgtcaatgaccaagactcaggccccaaccggaaagtgagcctgggtctggaggccacactgcctttccgactgaatggctttggaaactcctatacactggtggtgagcggcccactggaccgagagcgggtggctgtctacaacatcacggtgacagccacagatgggggaataccgcagctcacatccctgcgtacactgaaggttgagatctctgacatcaatgacaatccaccaagcttcctggaggactcctattccatctacatacaggagaacaatttgccaggtgtgttgctctgtactgtgcaagccacagacccagatgaaaaggagaatgcagaggtgacctactcycttctggagagggagattcaagggctgccagtcacctcctatgtctccattaacagtgccagtggcagcctttatgctgtcaactcctttgactatgagaagtttcgggagttctttgtgactgtggaggctcaggacaaggggagcccaccactgagcagcactgtgactgccaacgtatatgtggtggacatgaatgaccatgcccctcacattctgtaccctacctcaaccaactcgtcagcagccttcgagatggtgcctcgaactgcccctgctggctacctggtcaccaaagtcatagctatggactcagactctgggcaaaatgcttggcttttttaccatctagcccagacttctgacctggacctctttaaggtagagctgcacacaggagaaattaggactaccaggaagatgggagatgagagtggtagcactttcaacctgaccgtggtggtccgagataatggagagccatcactatcagcctctgtggccattacagtagctgtggtggatagggtttccaaaatcctccctgacactcagaggcatgttaagagccctcggacatactctgaaattaccctttatctaataatagcattaagcacagtgtcttttatatttcttttgacaatcatcattttgagcatcatcaagtgctaccgctacactgcrtatggcactgcatgctgtggaggcttctgtggagtaagggaaaggtcccctgcagaactgtacaaacaagccaacaacaatattgatgccaggataccgcatggcctcaaagtgcagcctcacttcattgaagttcgagggaatggctccctcaccaagacctactgctacaaggcctgtctgacagcaggctcagggagtgacactttcatgttttacaatacaggggcccagacaggaccagggccttcgggagcccaagcagcagtgactgacagcaggaatctcacaggccaaagtggtcagaatgctgggaacctgattattctcaaaaatgaggctgtttctcaaaatgaggtgagacagtggtcagggggtcttctacaaactcatgcatttgttacacatcccccaatatcctgtgatttggctttattgagtcattaa

SEQ ID NO: 228 - DNA, 5365 bp, Homo sapiens
gaaagraaaagaaccttccatttttggctgtgccaagaagctcagaaaggygataatataaaaaatatatagttaattsggaattgaatttacaaaatacattgtgtggtgatgcaatagaaagytcataattggaacgagattgagatggtatattcccggagaggaagtctgggatcccggctcctgctgctctggcttctcytygcctactggaaggcagggagcggccagctccactactcgatcccggaggaagccaaacacggaaccttcgttggccgcatcgcgcaggacctagggctggagctggcggagctggtgccgcgcctgttccgggtggcgtccaagggccgcggrgaccttctggaggtaaatctgcagaatggcattttgtttgtgaattctcggatcgaccgggaggagctgtgccggcggagggcggagtgcagcatccacctggaggtgatcgtggacaggccgctgcaggttttccatgtggaggtggcagtgaaggacatcaatgacaatccgcccaggttctccagacaagaacaaagattattcattttagagtcaagaatgccagattcgcggtttccgctagagggcgcgtcggatttggatattggagcaaatgcacaattgagatacaggttaaatccaaacgaatattttgacttagatgttaaaacaaatgaagaaraaacgaactttttagagctggttttgaggaaatccttagatagagaagaaacacaagaacaccgtttattagtgattgcaactgatggaggaaaacccgaactaacaggtacagttcagttgttgatcaatgtattggatgctaatgataacgccccagaatttgataaatccatttataatgtcagattgttggaaaatgcaccaagtgggrcattagttattaaactgaacgcctcagatgcagatgagggcatcaataaggaaatagtgtatttctttagtaatcttgttcttgacgatgtaaagtccaaatttataattaattctaatactggtgaaataaaagttaacggggaactggattatgaagactataactcatatgaaattaatattgatgccatggataaaagtacattcccattatcaggacactgtaaagtagtagtgaaactcctggatgtgaatgataataccccagagatggccataaccamccttttcctgcctgtcaaagaggacgctccactcagcacggtcattgctctgatcagcgtgtctgaccgtgactcaggtgccaacgggcaggtgacctgctccctaatgccccacgttcccttcaagctggtgtccaccttcaagaattactactcgttggtgctggacagygccctggaccgcgagagcgtgtcggtctatgagctggtggtgaccgcgcgrgacgggggctcgccttcgctgtgggccaccgccagcgtgtctgtggaagtggccgacgtgaacgacaacgctccggcgttcgcgcagccccagtataccgtgttcgtgaaggagaacaacccgccaggctgccacatcttcacggtgtctgcacgggacgcggacgcgcaggagaacgccctggtgtcctactcgctggtggagcggcgggtgggcgagcgcccgctgtcgagttacgtttcggtgcacgcggagagcggcaaggtgtacgcgctgcagccgctggaccacgaggaagtggagctgctgcagttccaggtgagcgcgcgcgacgcgggcgtgccgcctctgggcagcaacgtgacgctgcaggtgttcgtgctggacgagaacgacaacgcgccggcgctgctggtgcctcgagtgggtggcaccggcggcgcagtgagcgagctggtgccgaggtcagtgggtgcgggccacgtggtggcgaaggtrcgcgcagtggaccctgattcgggctacaacgcttggctttcgtatgagctgcagccagcgcctggcagtgcgcgcatcccgttccgcgtggggctgtacacaggcgagatcagcacaacacgctctctggatgagaccgaagcaccgcgccaccgccttctggtgctggtgaaggaccatggagagcccccgctgacagccacagccacagtgctggtgtcgctggtggaaagtggccaggcgccgaaggcctcatcgcgggcgtcggcgggcgctgtgggtcccgaggctgycctggtggatgtcaacgtgtacctgatcatcgccatctgtgcggtgtccagcctgctggtgctcacgctgctgctgtacaccgcgctgcggtgctcggcgcagcccaccgaggccgtgtgcacacggggcaagcccactctgttgtgctccagcgcggtggggagctggtcgtactcgcagcagaggagacagagggtgtgctctggggaagctccacccaaaacagacctcatggccttcagtccaagccttcctcagggtcccacctctacagacaacccacgacagcccaaccctgactggcgttactctgcctccctgagagcaggcatgcacagctctgtgcacctagaggaggctggcattctacgggctggtccaggagggcctgatcagcagtggccaacagtatccagtgcaacaccagaaccagaggcaggagaagtgtcccctccagtcggtgcgggtgtcaacagcaacagctggacctttaaatacggaccaggcaaccccaaacaatccggtcccggtgagttgcccgmcaaattcattatcccaggatctcctgcaatcatctccatccggcaggagcctactaacagccaaattgacaaaagtgacttcataaccttcggcaaaaaggaggagaccaagaaaaagaagaaaaagaagaagggtaacaagacccaggagaaaaaagagaaagggaacagcacgactgacaacagtgaccagtgaggtcctcaaatggraacaagccacttagccagtttttgtaataatggcaaatctctcccatgtagcaattccctgctcctttttcctatctacatgagccctcttagagacctcagaaatctgcagaaagttccctgtgtctgtctagaacgcatttaacaggttttgtcgtaaaagctttactaagtctggtgttaactctttctctccactctggcttgttttcagaacctaaaaagcagacccaagtttcctttctcctccgccgcaaaggagaggcttcccagccccgccagtgagaggttggactctctgccctgtgctccggggatcctgtcttgatgacacttgcagggcaggctgaaaagttttgagattgagcagcttgggagtttgtggccactgggtatgtgtggctaccgcgggtatgcgagtgccagatattggctgagacgagccagcttagactaattggtacaaggaaggcaagaaaacaaagacaaataaacagcggaagttatcagtatggaggggaagtgtaaacttaaagggaccagactttctaaatcttacaactcaagaggtggcagccaccctctaggagacaaaactacccccactgacaaggctttaggagaccctaaagtctgttggctgtgacgtcattatacctaaaatctgcatcatacctgcaagccaacagttcagtgttttaacagagaaccaccctgggaaacagaagcagatctgatgtgtttcctatacatgtcctgtgctcactttattaaaaattcttttgcacacaatgtttatgaaaaggccagatccttttccaatacttatgcaaaagcaaaagaaaaccccgacacctcacctttcgctgtttgttgtttcatagatttatttaaaaaaagagaaagtctatagctataaatctttaaagagaaatatgaatacaattcccctaaactctcctcaaaagagaattcagtctacagccatttaaatgatcattgctgctacagaagtgctttaagagaattgcctgaaacatctgtattatatcggccacctgccaatcacagctttactctttcaggtcactctggggctgcctcttgcatgtattactaaataaaatgatctctctttctctctctctctctcttttctaagaaacaattatgtgcactttgatacacaaccttctctaaccaactatatatcaagacccaaaaattgaagaaaaatattgttttctcatacagtgagcagatttttcaatctactaattctgtgacttgtcttggtgtgctagcctacaccttctctttggtttagttttccttttctataacactctgaattgctaatcttactaacacctatgatgttacctkaaatcaatctcccatatgtatgctgtatgctatgctaagactcctgaaatatacttactctgtgcttgtgtatgtgaatgttaatgcaactattacctagagtgaactttaagctttattgttgaatgtaattccattatatttccttttgtacacctgtgaaaaagtggagtagtgtttttttaaccattgttaatcagcttttgtgtatgaaagacacagtaaaatttctttcttaaatcaagatactggtgattcaaggaattttatttatggtccagccaagagccatctcgtgccaagacttctgctggcaagggaatggataaagctgttttgttctagtaacaattttggaatgaatactgacaatattccatgagggtgtgcaagcacaaattttaccaatctgacctctttgaagttgcagaatgctttgaaattctaatggtatctgaaatatcagctcatagaaagtaacaaaatttgctgtcaccttaaataagacattttaattttgttataatgtacaatttagaagtttgattaattrtattatctatttaggcattaatataaaagaggtaggagtctgttatttaaaaaaagcattaaatttaaaaaaaaactgtcttgtctacttttagcttcattctcccatattttgaagggtgtgtaacttcagctctgcaggattgcatggggtaaaacttgttaccaacacatgtgaaccattgctacattgtaggttgtgatcattttgccccactgaagcccatgtatctgaccttacgtgccttttgaactaggagaatcgggctaatttattaatgatgataattataatgtatctgtacagcactttttacatttgcgaagtgctttccaatccatkttagttactagttattacagctgtaaggataaaacacgtcatgtggattcattttgaattggtgctattggtatttcctctgttattgctaataaatgaaaatggtggtatg

SEQ ID NO: 229 - DNA, 5322 bp, Homo sapiens
caacaatggccacacatmgagattgaaatgaagggataaaaacattcctataaattcgaaggcaagttttgctgactagaaaaacaagccaataatttgaaatggtgtgcccgaatggatacgacccagggggccgacatctactgctgtttattataattctagcagcttgggaggcagggagaggccagctccactactcggtccccgaggaggctaaacatggcaacttcgtgggccgcatcgcgcaggacctggggctggagctggcggagctggtgccgcgcctgttccgggcggtgtgcaaattccgtggggatcttctggaggtaaatctgcagaatggcattttgtttgtgaattctcggatcgaccgcgaggagctgtgcgggcggagcgcggagtgcagcatccacctggaggtgatcgtggaaaggccgctgcaggttttccatgtggacgtggaggtgaaggacattaacgacaaccctccggtgttcccagcgacacaaaagaatctgttcatcgcggaatccaggccgcttgactctcggtttccactagagggcgcgtccgatgcagatatcggggagaacgccctgctcacttacagactgagccccaatgagtatttcttcctggacgtgccaaccagcaaccagcaggtaaaacctcttggacttgtattacggaaacttttagacagagaagaaactccggagcttcatttattgctcacggccaccgatggaggcaaacccgagctgactggcaccgttcaattactcatcacggtactggacaacaatgacaatgccccagtgttcgacagaaccctgtatacggtgaaattaccagaaaacgtttctatcggaacgctggtgattcaccccaatgcctcagatttagacgaaggyttgaatggggatattatttactccttctccagtgatgtttctccagatataaaatccaagttccacatggaccccttaagtggggcaatcacagtgataggacatatggattttgaagaaagtagagcacacaagatcccagtcgaggctgtcgataaaggcttcccacccctggctggtcattgtacagttcttgtggaagttgtggatrtaaatgacaatgctccacagttgactctcacttccctgtctctccctattccagaggacgcccaaccaggtaccgtcatcacattgattagcgtgtttgaccgagattttggagtcaacggacaggttacctgctccctgacgccccgcgttcccttcaagttggtgtccaccttcaagaattactattcattggtgctggacagcgctctggaccgcgagagtgtgtccgcctatgagctggtggttaccgcgcgggacgggggctcgccttctctgtgggccactgctagcgtgtccgtggaggtggccgacgtgaacgacaacgccccggcgttcgcgcagcccgagtatacggtgttcgtgaaggagaacaacccgccgggctgccacatcttcactgtgtcggcgggggacgcggacgcgcagaagaacgcgctggtgtcctactcgctggtggagctgcgggtgggcgagcgcgcgctgtcgagctacgtgtcagtgcacgcggagagcggcaaggtgtacgcgctgcagccgytggaccacgaggagctggagctgttgcagttccaggtgagcgcgcgcgatgcgggcgtgccgcctctgggcagcaacgtgacgctgcaggtgttcgtgctggacgagaacgacaacgcgccggcactgctggcgcctcgggtgggtggcactggtggcgcagtgagagagcttgtgccgcggtctgtgggcgcgggccatgtggtggcgaaggtacgtgcagttgacgctgactcaggctacaacgcgtggctttcgtatgagttgcaaccggtggcggccggtgcgagcatcccgttccgcgtggggctgtacactggtgagatcagcacgacacgagccctagatgagacggacgcaccgcgccaccgccttctggtgcttgtgaaggaccacggggagccctcgctgacagccacagscaccgtgctggtgtcgctggtggaaagcggccaggcaccaaaggcgtcgtcgcgggcatcgttgggcattgcaggcccagagaccragctggtggatgtcaacgtgtacctgatcatcgccatctgcgcggtgtccagtctgttggtgcttaccctgctgctgtacacrgcgttgcggtgctcagcgccgtcctctgagggcgcatgtagtttggtaaagcccactctggtgtgctccagcgcggtggggagctggtcattctcccagcagaggcggcagagggtgtgctctggggagggcccacccaagacagacctcatggccttcagtcccagccttcctcagggtccatcctctacagacaatccacgacagcccaaccctgactggcgttactctgcctccctgagagcaggcatgcacagctctgtgcacctagaggaggctggcattctacgggctggtccaggagggcctgatcagcagtggccaacagtatccagtgcaacaccagaaccagaggcaggagaagtgtcccctccagtcggtgcgggtgtcaacagcaacagctggacctttaaatacggaccaggcaaccccaaacaatccggtcccggtgagttgcccgmcaaattcattatcccaggatctcctgcaatcatctccatccggcaggagcctactaacagccaaattgacaaaagtgacttcataaccttcggcaaaaaggaggagaccaagaaaaagaagaaaaagaagaagggtaacaagacccaggagaaaaaagagaaagggaacagcacgactgacaacagtgaccagtgaggtcctcaaatggraacaagccacttagccagtttttgtaataatggcaaatctctcccatgtagcaattccctgctcctttttcctatctacatgagccctcttagagacctcagaaatctgcagaaagttccctgtgtctgtctagaacgcatttaacaggttttgtcgtaaaagctttactaagtctggtgttaactctttctctccactctggcttgttttcagaacctaaaaagcagacccaagtttcctttctcctccgccgcaaaggagaggcttcccagccccgccagtgagaggttggactctctgccctgtgctccggggatcctgtcttgatgacacttgcagggcaggctgaaaagttttgagattgagcagcttgggagtttgtggccactgggtatgtgtggctaccgcgggtatgcgagtgccagatattggctgagacgagccagcttagactaattggtacaaggaaggcaagaaaacaaagacaaataaacagcggaagttatcagtatggaggggaagtgtaaacttaaagggaccagactttctaaatcttacaactcaagaggtggcagccaccctctaggagacaaaactacccccactgacaaggctttaggagaccctaaagtctgttggctgtgacgtcattatacctaaaatctgcatcatacctgcaagccaacagttcagtgttttaacagagaaccaccctgggaaacagaagcagatctgatgtgtttcctatacatgtcctgtgctcactttattaaaaattcttttgcacacaatgtttatgaaaaggccagatccttttccaatacttatgcaaaagcaaaagaaaaccccgacacctcacctttcgctgtttgttgtttcatagatttatttaaaaaaagagaaagtctatagctataaatctttaaagagaaatatgaatacaattcccctaaactctcctcaaaagagaattcagtctacagccatttaaatgatcattgctgctacagaagtgctttaagagaattgcctgaaacatctgtattatatcggccacctgccaatcacagctttactctttcaggtcactctggggctgcctcttgcatgtattactaaataaaatgatctctctttctctctctctctctcttttctaagaaacaattatgtgcactttgatacacaaccttctctaaccaactatatatcaagacccaaaaattgaagaaaaatattgttttctcatacagtgagcagatttttcaatctactaattctgtgacttgtcttggtgtgctagcctacaccttctctttggtttagttttccttttctataacactctgaattgctaatcttactaacacctatgatgttacctkaaatcaatctcccatatgtatgctgtatgctatgctaagactcctgaaatatacttactctgtgcttgtgtatgtgaatgttaatgcaactattacctagagtgaactttaagctttattgttgaatgtaattccattatatttccttttgtacacctgtgaaaaagtggagtagtgtttttttaaccattgttaatcagcttttgtgtatgaaagacacagtaaaatttctttcttaaatcaagatactggtgattcaaggaattttatttatggtccagccaagagccatctcgtgccaagacttctgctggcaagggaatggataaagctgttttgttctagtaacaattttggaatgaatactgacaatattccatgagggtgtgcaagcacaaattttaccaatctgacctctttgaagttgcagaatgctttgaaattctaatggtatctgaaatatcagctcatagaaagtaacaaaatttgctgtcaccttaaataagacattttaattttgttataatgtacaatttagaagtttgattaattrtattatctatttaggcattaatataaaagaggtaggagtctgttatttaaaaaaagcattaaatttaaaaaaaaactgtcttgtctacttttagcttcattctcccatattttgaagggtgtgtaacttcagctctgcaggattgcatggggtaaaacttgttaccaacacatgtgaaccattgctacattgtaggttgtgatcattttgccccactgaagcccatgtatctgaccttacgtgccttttgaactaggagaatcgggctaatttattaatgatgataattataatgtatctgtacagcactttttacatttgcgaagtgctttccaatccatkttagttactagttattacagctgtaaggataaaacacgtcatgtggattcattttgaattggtgctattggtatttcctctgttattgctaataaatgaaaatggtggtatg

SEQ ID NO: 230 - DNA, 5361 bp, Homo sapiens
tttggagtctgaaatatggaggatgcagctgcacttgactgaccgattaaaagatttcccttgactttgagaaacgatatttaatcagaacaaaatactgtgcactaaagatggagttttcctggggaagcggccaggaatcccggcgtctgctgctcttacttcttctcctcgcagcctgggaggcagggaacggtcagctccactactcggtctccgaggaggccaaacacggcaccttcgtgggccgcatcgcgcaggacctgggactggakctggcggagctggtgccgcgcctgttccgggtggcgtccaaaaggcaccggggccttctggaggtaaatctgcagaatggcattttgtttgtgaattctcggatcgaccgsgaggagctgtgccggcggagcgcggagtgcagcatccacctggaggtgatcgtrgacaggccgctgcaggttttccatgtggacgtggaggtgagggacattaacgataacccgccggtgttcccagcaacacaaaagaacctgtccatcgcggaatccaggccgcttgactctcggtttccactagagggcgcctcggatgcagatatcggggagaacgccctgctcacttacagactgagcccaaatgaatacttttctctggaaaaaccayctgatgacgagctggtaaaaggtcttgggcttatattacggaaatctttagacagagaagaagctccggagatttttttagtgctcacagccactgatggaggcaaacccgagttgactggcaccgttcagttactcatcacagtactggatgccaatgacaatgccccagcttttgacagaaccatttataaggtgagattactagaaaatgttcctaatggaacattggtaattaaacttaacgcctcagatttagacgaaggattgaatggggacattgtttattcattctcaaatgatatttcgccaaatgtgaaatccaagtttcacatagatccaattactggacaaattattgtaaagggatatattgactttgaagaaagcaaatcctatgaaattattgtagagggcattgataagggacagctcccactttctggccattgtagagttattgtggaagtagaagacaacaacgataatgtcccagatttggaattcaagtctttatcacttccaattagagaggacgctccactgggtacagtcatcgccctgatcagcgtgtccgacaaagacatgggtgtcaatgggctggtcacctgctccttgacgtcccacgtccccttcaagctggtgtccaccttcaagaattactactcgttggtgctggacagtgccctggaccgcgagagygtgtcagcctatgagctggtggtgaccgcgcgagacgggggctcgccttcgctgtgggccacggccagtgtttctgtggaggtggctgatgtgaacgacaacgctccggcgttcgcgcagcccgagtacacagtgttcgtgaaggagaacaacccgccgggctgccacatcttcactgtgtctgcgtgggacgcggacgcgcaggagaacgcgctggtgtcctactcgctggtagagcggcgggtaggggagcgcgcgctgtcgagctacgtttcggtgcatgcggagagcggcaaggtgtacgcgctgcagccgctggaccacgaggagctagagctgctgcagtttcaggtgaccgckcgcgatgccggcgtgccrcctctgggcagcaacgtgacgctgcaggtgttcgtgctggacgaaaacgacaacgcgccagcactgctagcgcctygggcgggtggcactggtggcgcagtgagcgagctggtgccatggtcggtgggtgtgggccacgtggtggcaaaggtgcgcgcggtggatgctgactcsggctacaacgcgtggctttcgtacgagctgcagccggggactggtggcgcgcgcatcccgttccgcgtggggctgtacactggcgagatcagcacaacgcgtgccctggacgaaacggacgctccgcgccaccgcctactggtactggtgaaggaccacggcgagcccgcgctgacggccacggccactgtgctggtgtcacttgtggagagtggacaggcgccaaaggcctcctcacgggcgttggtgggcgctgtgggtcccgatgctgcgctggtggatgtcaacgtatacctgatcattgccatctgcgcggtgtccagccttttggtgctcacgctgctgctgtacaccgcgctgcggtgctctgcgctgcccaccgagggcgcgtgcgctccgggcaagcccacgctggtgtgctccagtgcggtggggagctggtcatactcgcagcagaggaggccgagggtgtgctctggtgagggcccacccaagaccgacctcatggccttcagccccagtttacctgactctagggacagagaagatcagctgcagacaactgaggaatcctttgcaaagccacgacagcccaaccctgactggcgttactctgcctccctgagagcaggcatgcacagctctgtgcacctagaggaggctggcattctacgggctggtccaggagggcctgatcagcagtggccaacagtatccagtgcaacaccagaaccagaggcaggagaagtgtcccctccagtcggtgcgggtgtcaacagcaacagctggacctttaaatacggaccaggcaaccccaaacaatccggtcccggtgagttgcccgmcaaattcattatcccaggatctcctgcaatcatctccatccggcaggagcctactaacagccaaattgacaaaagtgacttcataaccttcggcaaaaaggaggagaccaagaaaaagaagaaaaagaagaagggtaacaagacccaggagaaaaaagagaaagggaacagcacgactgacaacagtgaccagtgaggtcctcaaatggraacaagccacttagccagtttttgtaataatggcaaatctctcccatgtagcaattccctgctcctttttcctatctacatgagccctcttagagacctcagaaatctgcagaaagttccctgtgtctgtctagaacgcatttaacaggttttgtcgtaaaagctttactaagtctggtgttaactctttctctccactctggcttgttttcagaacctaaaaagcagacccaagtttcctttctcctccgccgcaaaggagaggcttcccagccccgccagtgagaggttggactctctgccctgtgctccggggatcctgtcttgatgacacttgcagggcaggctgaaaagttttgagattgagcagcttgggagtttgtggccactgggtatgtgtggctaccgcgggtatgcgagtgccagatattggctgagacgagccagcttagactaattggtacaaggaaggcaagaaaacaaagacaaataaacagcggaagttatcagtatggaggggaagtgtaaacttaaagggaccagactttctaaatcttacaactcaagaggtggcagccaccctctaggagacaaaactacccccactgacaaggctttaggagaccctaaagtctgttggctgtgacgtcattatacctaaaatctgcatcatacctgcaagccaacagttcagtgttttaacagagaaccaccctgggaaacagaagcagatctgatgtgtttcctatacatgtcctgtgctcactttattaaaaattcttttgcacacaatgtttatgaaaaggccagatccttttccaatacttatgcaaaagcaaaagaaaaccccgacacctcacctttcgctgtttgttgtttcatagatttatttaaaaaaagagaaagtctatagctataaatctttaaagagaaatatgaatacaattcccctaaactctcctcaaaagagaattcagtctacagccatttaaatgatcattgctgctacagaagtgctttaagagaattgcctgaaacatctgtattatatcggccacctgccaatcacagctttactctttcaggtcactctggggctgcctcttgcatgtattactaaataaaatgatctctctttctctctctctctctcttttctaagaaacaattatgtgcactttgatacacaaccttctctaaccaactatatatcaagacccaaaaattgaagaaaaatattgttttctcatacagtgagcagatttttcaatctactaattctgtgacttgtcttggtgtgctagcctacaccttctctttggtttagttttccttttctataacactctgaattgctaatcttactaacacctatgatgttacctkaaatcaatctcccatatgtatgctgtatgctatgctaagactcctgaaatatacttactctgtgcttgtgtatgtgaatgttaatgcaactattacctagagtgaactttaagctttattgttgaatgtaattccattatatttccttttgtacacctgtgaaaaagtggagtagtgtttttttaaccattgttaatcagcttttgtgtatgaaagacacagtaaaatttctttcttaaatcaagatactggtgattcaaggaattttatttatggtccagccaagagccatctcgtgccaagacttctgctggcaagggaatggataaagctgttttgttctagtaacaattttggaatgaatactgacaatattccatgagggtgtgcaagcacaaattttaccaatctgacctctttgaagttgcagaatgctttgaaattctaatggtatctgaaatatcagctcatagaaagtaacaaaatttgctgtcaccttaaataagacattttaattttgttataatgtacaatttagaagtttgattaattrtattatctatttaggcattaatataaaagaggtaggagtctgttatttaaaaaaagcattaaatttaaaaaaaaactgtcttgtctacttttagcttcattctcccatattttgaagggtgtgtaacttcagctctgcaggattgcatggggtaaaacttgttaccaacacatgtgaaccattgctacattgtaggttgtgatcattttgccccactgaagcccatgtatctgaccttacgtgccttttgaactaggagaatcgggctaatttattaatgatgataattataatgtatctgtacagcactttttacatttgcgaagtgctttccaatccatkttagttactagttattacagctgtaaggataaaacacgtcatgtggattcattttgaattggtgctattggtatttcctctgttattgctaataaatgaaaatggtggtatg

SEQ ID NO: 231 - DNA, 6115 bp, Homo sapiens
ttttcctttgtggattcttttttaaaactaccaagtttgagaatatgaatatatttgtttttcatattgttctgcaatgaatataaagtcacttataatcagaaagcaattaaatgtaaataacagtaaagaatgagaactatagaaaatagatatgaaaatgcaagcccacagagatgagaatagatcatgtggaacataaacactaaagagctgcttttataaaacttcaattttttctttgagttccctagcagccaaagtaacaagggagactgaaagtaaaacaattcaaatttgatagtatttttatatgaggaacaacactttcaggaaatgtttaaccctagtttttcatgaggccaccttaacaactgaattctctttctctctcactctgtgtataagtattttagataagtaaaagaacaatgttataatgttaagtcaaacatagacacaataatttaaatttgatgttaatcgagaaatacaatgccatttccatatatatttagtttcaatatgacttataatctgaatattccataaataagcacgttggaaatatttgggggaagaaacccaaaacacgtgaaattctgtggtggtaaatgcagtgcacagtactcacagttttaggcgcaaggtgtcgctctttacttggtggaaagttcatttaaaggttggtctgaacagtgaggcactyccatacaaaggaactccatcataccggatgccaccgtttaaggatcctttgaaacttcttaagaattcaacgagatttttaacctgaractgaagaatctggtactgtaagtgtaaagaagcttattttggaagccaatttcgtatgcgatgtttggttttcagagaaggggattgggcaccccacgactacagctctggcttctcctcctcgaattctgggaggtggggagcggccagctccactactccgtctcggaggaggcyaaacacggcaccttcgtgggccgcatcgcgcaggacctggggctggagctggcggagctggtgcagcgcctgttccgggtggcgtccaaaacacatggggaccttctggaggtaaatctgcagaatggcattttgtttgtgaattctcggatcgaccgcgaggagctgtgcgggcagagcgcggagtgcagcatccacctggaggtgatcgtggacaggccgctgcaggttttccatgtgaacgtggaggtgaaggacattaacgacaacccgccggtgttctcgctcagagaacaaaagctgctgattgcggaatctaagcaatcggactcgcgttttccactagagggagcttctgatgctgacattgaagagaatgctctattgacctacaggctaagtaaaaatgagtatttttctttagattcaccaacaaatggtaagcagattaaaagactgtcacttattttaaagaagtmtctggatagagagaaaactccggaacttaatttgctgctaacagctacagacgggggaaaaccagagcttactggcaccgttcggctgttagtccaagtcttggatgtcaacgacaatgatccagagtttgataaatcagaatataaggtgagccttatggaaaatgctgctaaagaaactcttgtgctcaaactaaacgccacagaccgagacgaaggagtcaatggagaggtaacatactccttaatgtcaattaagcccaatggaagacacttatttacactagatcaaaataatggagaagtgagggtcaatggaactttagattatgaagaaaacaagttttataaaattgaagtacaggctacagataaggggactcccccaatggcaggtcactgtacagtctgggtggaaatcttggacaccaacgataactctcctgaagtcgccgtgacttccttgtccctcccagtacgagaggacgctcagcccagcacsgtcattgccctgatcagcgtgtctgaccgtgactcaggtgtcaacggacaggtgacctgctcgctgacsccccacgttcccttcaagctggtgtccaycttcaagaattactactcgttggtgctggacagcgccctggaccgcgagaacgtgtgggcctatgaactggtggtgactgcgcgggatgggggttcgccttctctgtgggccacggccagggtatccgtggaggtggccgacgtgaacgacaatgcgcctgcgttcgcacagcccgagtacaccgtgttcgtgaaggagaacaacccaccaggctgccacatcttcacagtgtcggcgcgggacgcggacgcgcaggagaacgcgctggtgtcctactcgctggtggagcggcggttgggcgaccgcgcgctgtcgagctacgtgtcggtgcacgcggagagcggcaaggtgtacgcgctgcagccgytggaccacgaggagctggagctgctacagttccaggtgagcgcgcgcgatgcgggcgtgccgcctctgagcagcaacgtgacgctgcaggtgttcgtgctggacgagaacgacaacgcgccggcactgctggcgactcaggctggcagcgcgggaggcgcagttaacaagctagtaccgcggtcggtgggtgcgggccacgtggtggcgaaggtgcgckcagtggatgcggactcaggctacaacgcgtggctttcatatgaattgcagccggcggcgggcggctcgcgcatcccgttccgcgtggggctgtacacgggcgagataagcacaacgcgtgccctggacgaggcagactcgccgcgccaccgacttctagtactggtgaaggatcacggtgagccggcgctgacggccacggccaccgtgctggtgtcrttggtggagagcggacaggcgccaaaggcctcttcccggactttggcgggcgccgcgagcccagaggctgcgctggtggatgtcaacgtgtacctgatmatcgccatctgcgtggtgtccagcctcctggtactcacgctgctgctgtatacggcgctgtggtggtcggcaacgcccactgagggcgcgtgcgcgccggggaagcccacgctggtgtgctcccgcgcggtggggagctggtcatactcgcagcagaggcggcagagggtgtgctctgaggagggcccacctaagasggacctcatggccttcagccccagtcttcctctaggtctgaataaagaggaggaaggggaaagacaggagccagggtcaaatcaccccggacagccacgacagcccaaccctgactggcgttactctgcctccctgagagcaggcatgcacagctctgtgcacctagaggaggctggcattctacgggctggtccaggagggcctgatcagcagtggccaacagtatccagtgcaacaccagaaccagaggcaggagaagtgtcccctccagtcggtgcgggtgtcaacagcaacagctggacctttaaatacggaccaggcaaccccaaacaatccggtcccggtgagttgcccgmcaaattcattatcccaggatctcctgcaatcatctccatccggcaggagcctactaacagccaaattgacaaaagtgacttcataaccttcggcaaaaaggaggagaccaagaaaaagaagaaaaagaagaagggtaacaagacccaggagaaaaaagagaaagggaacagcacgactgacaacagtgaccagtgaggtcctcaaatggraacaagccacttagccagtttttgtaataatggcaaatctctcccatgtagcaattccctgctcctttttcctatctacatgagccctcttagagacctcagaaatctgcagaaagttccctgtgtctgtctagaacgcatttaacaggttttgtcgtaaaagctttactaagtctggtgttaactctttctctccactctggcttgttttcagaacctaaaaagcagacccaagtttcctttctcctccgccgcaaaggagaggcttcccagccccgccagtgagaggttggactctctgccctgtgctccggggatcctgtcttgatgacacttgcagggcaggctgaaaagttttgagattgagcagcttgggagtttgtggccactgggtatgtgtggctaccgcgggtatgcgagtgccagatattggctgagacgagccagcttagactaattggtacaaggaaggcaagaaaacaaagacaaataaacagcggaagttatcagtatggaggggaagtgtaaacttaaagggaccagactttctaaatcttacaactcaagaggtggcagccaccctctaggagacaaaactacccccactgacaaggctttaggagaccctaaagtctgttggctgtgacgtcattatacctaaaatctgcatcatacctgcaagccaacagttcagtgttttaacagagaaccaccctgggaaacagaagcagatctgatgtgtttcctatacatgtcctgtgctcactttattaaaaattcttttgcacacaatgtttatgaaaaggccagatccttttccaatacttatgcaaaagcaaaagaaaaccccgacacctcacctttcgctgtttgttgtttcatagatttatttaaaaaaagagaaagtctatagctataaatctttaaagagaaatatgaatacaattcccctaaactctcctcaaaagagaattcagtctacagccatttaaatgatcattgctgctacagaagtgctttaagagaattgcctgaaacatctgtattatatcggccacctgccaatcacagctttactctttcaggtcactctggggctgcctcttgcatgtattactaaataaaatgatctctctttctctctctctctctcttttctaagaaacaattatgtgcactttgatacacaaccttctctaaccaactatatatcaagacccaaaaattgaagaaaaatattgttttctcatacagtgagcagatttttcaatctactaattctgtgacttgtcttggtgtgctagcctacaccttctctttggtttagttttccttttctataacactctgaattgctaatcttactaacacctatgatgttacctkaaatcaatctcccatatgtatgctgtatgctatgctaagactcctgaaatatacttactctgtgcttgtgtatgtgaatgttaatgcaactattacctagagtgaactttaagctttattgttgaatgtaattccattatatttccttttgtacacctgtgaaaaagtggagtagtgtttttttaaccattgttaatcagcttttgtgtatgaaagacacagtaaaatttctttcttaaatcaagatactggtgattcaaggaattttatttatggtccagccaagagccatctcgtgccaagacttctgctggcaagggaatggataaagctgttttgttctagtaacaattttggaatgaatactgacaatattccatgagggtgtgcaagcacaaattttaccaatctgacctctttgaagttgcagaatgctttgaaattctaatggtatctgaaatatcagctcatagaaagtaacaaaatttgctgtcaccttaaataagacattttaattttgttataatgtacaatttagaagtttgattaattrtattatctatttaggcattaatataaaagaggtaggagtctgttatttaaaaaaagcattaaatttaaaaaaaaactgtcttgtctacttttagcttcattctcccatattttgaagggtgtgtaacttcagctctgcaggattgcatggggtaaaacttgttaccaacacatgtgaaccattgctacattgtaggttgtgatcattttgccccactgaagcccatgtatctgaccttacgtgccttttgaactaggagaatcgggctaatttattaatgatgataattataatgtatctgtacagcactttttacatttgcgaagtgctttccaatccatkttagttactagttattacagctgtaaggataaaacacgtcatgtggattcattttgaattggtgctattggtatttcctctgttattgctaataaatgaaaatggtggtatg

SEQ ID NO: 232 - DNA, 5360 bp, Homo sapiens
tgactgtgatgctggaaaaaatttactaaatatgtacttacagaaaagggtgaytgctcataaaatacctcaggcaagcgatcccttaaaactgattgtcccaactcagaggccctcattttctgcaatggtgattatcggaccaagaggcccgggatcccagcgtctgctgctctcgcttctgctccttgcagcctgggaggtggggagcggccagctccactactccgtctacgaggaggccaaacacggcaccttcgtgggccgcatcgctcaggacctggggctggagctggcggagctggtgccgcgcctgttccgggtggcgtccaaaagacacsgggaccttctggaggtaaatctgcagaatggcattttgtttgtgaattctcggatcgaccgcgagaagctgtgcgggcggagcgcggagtgcagtatccacctggaggtgaycgtggacaggccgctgcaggttttccatgtggacgtggaggtgaaggacattaacgacaacccgccggtgttcagagaaagggaacaaaaggtacctgtttctgaatctgcgcctctggactctcattttcctctagagggcgcttctgatgcggatatcggcgtaaactctcttttgacctatgcgttaagtctaaatgagaattttgagcttaaaataaaaacaaaaaaagataaaagtatattgcctgaattagttcttcggaagttattggacagagagcaaacgccaaaactcaatttattgctgatggtaatcgatggcggtaaaccagaactaacagggtstgtccagattcaaataaccgtcctggatgtgaatgacaatggtccggcgtttgataagccmagctataaagtagtgttgtctgaaaatgtccaaaacgacacaagagtgatccaactaaatgcttccgatccagacgaaggacttaatggagaaatttcctatgggatcaaaatgattttgccagtgagtgagaaatgtatgttttcaataaatccagacacaggtgaaattagaatttatggtgaactggattttgaagagaataatgcctatgaaattcaggttaacgccattgataaagggattccttccatggcaggtcacagcatggtcctggtggaagttctggacgtgaatgacaatgtccctgaagtaatggttacttcactgtcgctccctgtgcaagaggatgctcaggtgggtaccgtcattgccctgattagcgtgtcggatcgtgactctggagccaatggacaggtcatctgctcactgacacctcatgttcccttcaagctggtgtccacctacaagaattactactcgttggtgctggacagcgccctggaccgcgagagcgtgtcggcctatgagctggtggtgactgcgcgggatgggggytcgccttcgctgtgggccacggctagagtgtccgtggaggtggccgacgtgaacgacaatgcgcctgcgttcgcgcagcccgagtacacagtgttcgtgaaggagaacaacccgccgggctgccacatcttcacggtgtcggcatgggacgcggacgcgcagaagaacgcgctggtgtcctactcgctggtggagcggcgggtgggcgagcacgcactgtcgagctacgtgtcggtgcacgcggagagcggcaaggtgtacgcgctgcagccgctagaccacgaggagctggagctgctgcagttccaggtgagcgcgcgcgacgccggcgtgccgcctctgggcagcaacgtgacgctgcaggtgttcgtgctggacgagaacgacaacgcgccggcactgctggcgactccggctggcagcgcaggaggcgcagttagcgagttggtaccgcggtcggtgggtgcgggccacgtggtggcgaaagtgcgcgcggtggacgctgactccggctataacgcttggctgtcctacgagttgcaaccggcggcggtcggcgcgcacatcccgttccacgtggggctgtacactggcgagatcagcacgacacgcatcctggatgaggcggacgctccgcgccaccgcctgctggtgctggtgaaggaccacggtgagcccgcgctgacgtccacggccacggtgctggtgtcgctggtggagaacggccaggccccaaagacgtcgtcgcgggcctcagtgggcgctgtggatcccgaagcggctctggtggatattaacgtgtacctcatcatcgccatctgtgcggtgtccagcctgctggtgctcacgctgctgctgtacactgcgctgcgttgctcagcgccgcccaccgtgagccggtgcgcgccgggcaagcccacgctggtgtgctccagcgcygyggggagttggtcttactcgcagcagaggaggcagagggtgtgctctgcagagagcccgcccaagacggacctcatggccttcagcccaagccttcagctgtctcgagaagattgtttaaatcctcccagtgaaccacgacagcccaaccctgactggcgttactctgcctccctgagagcaggcatgcacagctctgtgcacctagaggaggctggcattctacgggctggtccaggagggcctgatcagcagtggccaacagtatccagtgcaacaccagaaccagaggcaggagaagtgtcccctccagtcggtgcgggtgtcaacagcaacagctggacctttaaatacggaccaggcaaccccaaacaatccggtcccggtgagttgcccgmcaaattcattatcccaggatctcctgcaatcatctccatccggcaggagcctactaacagccaaattgacaaaagtgacttcataaccttcggcaaaaaggaggagaccaagaaaaagaagaaaaagaagaagggtaacaagacccaggagaaaaaagagaaagggaacagcacgactgacaacagtgaccagtgaggtcctcaaatggraacaagccacttagccagtttttgtaataatggcaaatctctcccatgtagcaattccctgctcctttttcctatctacatgagccctcttagagacctcagaaatctgcagaaagttccctgtgtctgtctagaacgcatttaacaggttttgtcgtaaaagctttactaagtctggtgttaactctttctctccactctggcttgttttcagaacctaaaaagcagacccaagtttcctttctcctccgccgcaaaggagaggcttcccagccccgccagtgagaggttggactctctgccctgtgctccggggatcctgtcttgatgacacttgcagggcaggctgaaaagttttgagattgagcagcttgggagtttgtggccactgggtatgtgtggctaccgcgggtatgcgagtgccagatattggctgagacgagccagcttagactaattggtacaaggaaggcaagaaaacaaagacaaataaacagcggaagttatcagtatggaggggaagtgtaaacttaaagggaccagactttctaaatcttacaactcaagaggtggcagccaccctctaggagacaaaactacccccactgacaaggctttaggagaccctaaagtctgttggctgtgacgtcattatacctaaaatctgcatcatacctgcaagccaacagttcagtgttttaacagagaaccaccctgggaaacagaagcagatctgatgtgtttcctatacatgtcctgtgctcactttattaaaaattcttttgcacacaatgtttatgaaaaggccagatccttttccaatacttatgcaaaagcaaaagaaaaccccgacacctcacctttcgctgtttgttgtttcatagatttatttaaaaaaagagaaagtctatagctataaatctttaaagagaaatatgaatacaattcccctaaactctcctcaaaagagaattcagtctacagccatttaaatgatcattgctgctacagaagtgctttaagagaattgcctgaaacatctgtattatatcggccacctgccaatcacagctttactctttcaggtcactctggggctgcctcttgcatgtattactaaataaaatgatctctctttctctctctctctctcttttctaagaaacaattatgtgcactttgatacacaaccttctctaaccaactatatatcaagacccaaaaattgaagaaaaatattgttttctcatacagtgagcagatttttcaatctactaattctgtgacttgtcttggtgtgctagcctacaccttctctttggtttagttttccttttctataacactctgaattgctaatcttactaacacctatgatgttacctkaaatcaatctcccatatgtatgctgtatgctatgctaagactcctgaaatatacttactctgtgcttgtgtatgtgaatgttaatgcaactattacctagagtgaactttaagctttattgttgaatgtaattccattatatttccttttgtacacctgtgaaaaagtggagtagtgtttttttaaccattgttaatcagcttttgtgtatgaaagacacagtaaaatttctttcttaaatcaagatactggtgattcaaggaattttatttatggtccagccaagagccatctcgtgccaagacttctgctggcaagggaatggataaagctgttttgttctagtaacaattttggaatgaatactgacaatattccatgagggtgtgcaagcacaaattttaccaatctgacctctttgaagttgcagaatgctttgaaattctaatggtatctgaaatatcagctcatagaaagtaacaaaatttgctgtcaccttaaataagacattttaattttgttataatgtacaatttagaagtttgattaattrtattatctatttaggcattaatataaaagaggtaggagtctgttatttaaaaaaagcattaaatttaaaaaaaaactgtcttgtctacttttagcttcattctcccatattttgaagggtgtgtaacttcagctctgcaggattgcatggggtaaaacttgttaccaacacatgtgaaccattgctacattgtaggttgtgatcattttgccccactgaagcccatgtatctgaccttacgtgccttttgaactaggagaatcgggctaatttattaatgatgataattataatgtatctgtacagcactttttacatttgcgaagtgctttccaatccatkttagttactagttattacagctgtaaggataaaacacgtcatgtggattcattttgaattggtgctattggtatttcctctgttattgctaataaatgaaaatggtggtatg

SEQ ID NO: 233 - DNA, 5403 bp, Homo sapiens
gcattacgtattcagatactgctttgcttcatcctctctaaaatttaacaccgaggagtttaagaaatgaagataaggaactcgaattatttttaaaytttggatcaatgtaaaggcaatctaatatttggaaaatacttgcaatgttgttctcctggcgagaagatcctggagcccagtgcctgctgctttctcttctgctcctcgcagcctcggaggtggggagcggccagctccactactccgtctctgaggaggccaagcatggcaccttcgtgggccgcatcgcgcaggacctggggctggagctggcggagctggtgcmgcgcctgttccgggtggcgtccaaaagacacggggaccttctggaggtaaatctgcagaatggcattttgtttgtgaattctcggatagaccgcgaggaactgtgcgggcggagcgcggagtgcagcatycacctggaggtgatcgtggacaggccgctgcaggttttccatgtggaggtggaagtgaaggacattaatgacaacgcgccagtttttccaatggctgtraagaatctgtttatttccgaatcccgacagcctggctctcggttttcgctagagggcgcatcagatgcagatatcggaacaaattsgttgttgacttacagtcttgattccactgaatattttaccttggacgttaaaagaaatgatgaggaaattaaatcccttggactcgtgttgaaaaaaaatttaaatcgagaggacactcctaagcattatttactaataacagcaattgatggtgggaaaccagagctcactggcacgactcaactaaagatcactgttttagaygtaaacgacaacgccccagcgtttgagaggacgatctataaagtcagattactcgaaaatgcaccaaatggtaccctagtggtgaccgttaacgccaccgatttggatgaaggagtaaataaggatatcgcgtattctttcaatacggacatgtcagcagataytctgtcaaaattccatttagatccagtcaatggacaaatcagtgtaaagggtaacatagatttcgaggaaagtaagtcatatgaartccaggtagaagccacggataaaggaaatcccccaatgtcagatcactgcacagttctactcgaaattgtggacatcaatgataatgtacctgagttagttattcaatcrctatctttacctgtattagaagactctccacttagcacagtcatcgcyctgatcagcgtgtccgaccgcgactcaggagtcaatggacaggtcacctgctcgctgacgccccacgtccccttcaagctggtgtccaccttcaagaattactactcattggtgctggacagccctctggaccgcgagagcgtgtcggcctatgagctggtggtgactgctcgggacgggggctcgccttcactgtgggccacggccakcgtgtccgtggaggtggccgacgtgaacgacaatgcgccggcattctcgcagtccgagtacacggtgttcgtgaaggagaacaacccgccgggctgccacatcttcacggtgtctgcgcgggacgcggacgcgcaggagaacgccctggtgtcctactcgctggtggaacggcgggtgggggagcgcgcgctgtcgagctacgtgtcggtacacgcggagagcggcaaggtgtacgcgctgcagccgctggaccacgaggagctagagctgctgcagttccaggtgagtgcgcgcgatgcgggcgtgccgcctctgggcagcaacgtgacgctgcaggtgttcgtgctggacgagaacgacaacgcgccggcactgctgatgcctcgggtgggtggcatcggtggcgcagtgagcgagctggtgccgcggtcagtgggtgcgggccacgtggtagcgaaggtgcgcgcagtggatgcagactcaggctacaacgcgtggctttcgtatgagctgcagcctgggaccggcggtgcgcgcatcccgtttcgcgtggggctgtacacgggagagatcagcacgacccgtgccctggacgaggtggacgccccgcgccatcgcctactggtgctggtgaaggaccacggtgaaccctcattgaccgccacggccactgtgctggtgtcgctggtggagagtggccaggcacccaaggcctcktcccaggcgtccgctggcgccacgggcccggaagctgcactggtggatgtcaacgtgtacttgatcgtcgccatctgcgcggtgtccagtctgttggtgctcacactgctgctatatactgctctgcggtgctccgcgccgccaaccgaaggcgactgtgggccgggcaagcccacgctggtgtgctccagcgcggtggggagctggtcatactcgcagcagaggcagcagagggtgtrctctggagaggggttgcccaagaccgacctcatggcttttagccctagccttcctccttgtccaattagccgggatagagaggagaaacaggatgtggacgttgatctctcagccaaaccacgacagcccaaccctgactggcgttactctgcctccctgagagcaggcatgcacagctctgtgcacctagaggaggctggcattctacgggctggtccaggagggcctgatcagcagtggccaacagtatccagtgcaacaccagaaccagaggcaggagaagtgtcccctccagtcggtgcgggtgtcaacagcaacagctggacctttaaatacggaccaggcaaccccaaacaatccggtcccggtgagttgcccgmcaaattcattatcccaggatctcctgcaatcatctccatccggcaggagcctactaacagccaaattgacaaaagtgacttcataaccttcggcaaaaaggaggagaccaagaaaaagaagaaaaagaagaagggtaacaagacccaggagaaaaaagagaaagggaacagcacgactgacaacagtgaccagtgaggtcctcaaatggraacaagccacttagccagtttttgtaataatggcaaatctctcccatgtagcaattccctgctcctttttcctatctacatgagccctcttagagacctcagaaatctgcagaaagttccctgtgtctgtctagaacgcatttaacaggttttgtcgtaaaagctttactaagtctggtgttaactctttctctccactctggcttgttttcagaacctaaaaagcagacccaagtttcctttctcctccgccgcaaaggagaggcttcccagccccgccagtgagaggttggactctctgccctgtgctccggggatcctgtcttgatgacacttgcagggcaggctgaaaagttttgagattgagcagcttgggagtttgtggccactgggtatgtgtggctaccgcgggtatgcgagtgccagatattggctgagacgagccagcttagactaattggtacaaggaaggcaagaaaacaaagacaaataaacagcggaagttatcagtatggaggggaagtgtaaacttaaagggaccagactttctaaatcttacaactcaagaggtggcagccaccctctaggagacaaaactacccccactgacaaggctttaggagaccctaaagtctgttggctgtgacgtcattatacctaaaatctgcatcatacctgcaagccaacagttcagtgttttaacagagaaccaccctgggaaacagaagcagatctgatgtgtttcctatacatgtcctgtgctcactttattaaaaattcttttgcacacaatgtttatgaaaaggccagatccttttccaatacttatgcaaaagcaaaagaaaaccccgacacctcacctttcgctgtttgttgtttcatagatttatttaaaaaaagagaaagtctatagctataaatctttaaagagaaatatgaatacaattcccctaaactctcctcaaaagagaattcagtctacagccatttaaatgatcattgctgctacagaagtgctttaagagaattgcctgaaacatctgtattatatcggccacctgccaatcacagctttactctttcaggtcactctggggctgcctcttgcatgtattactaaataaaatgatctctctttctctctctctctctcttttctaagaaacaattatgtgcactttgatacacaaccttctctaaccaactatatatcaagacccaaaaattgaagaaaaatattgttttctcatacagtgagcagatttttcaatctactaattctgtgacttgtcttggtgtgctagcctacaccttctctttggtttagttttccttttctataacactctgaattgctaatcttactaacacctatgatgttacctkaaatcaatctcccatatgtatgctgtatgctatgctaagactcctgaaatatacttactctgtgcttgtgtatgtgaatgttaatgcaactattacctagagtgaactttaagctttattgttgaatgtaattccattatatttccttttgtacacctgtgaaaaagtggagtagtgtttttttaaccattgttaatcagcttttgtgtatgaaagacacagtaaaatttctttcttaaatcaagatactggtgattcaaggaattttatttatggtccagccaagagccatctcgtgccaagacttctgctggcaagggaatggataaagctgttttgttctagtaacaattttggaatgaatactgacaatattccatgagggtgtgcaagcacaaattttaccaatctgacctctttgaagttgcagaatgctttgaaattctaatggtatctgaaatatcagctcatagaaagtaacaaaatttgctgtcaccttaaataagacattttaattttgttataatgtacaatttagaagtttgattaattrtattatctatttaggcattaatataaaagaggtaggagtctgttatttaaaaaaagcattaaatttaaaaaaaaactgtcttgtctacttttagcttcattctcccatattttgaagggtgtgtaacttcagctctgcaggattgcatggggtaaaacttgttaccaacacatgtgaaccattgctacattgtaggttgtgatcattttgccccactgaagcccatgtatctgaccttacgtgccttttgaactaggagaatcgggctaatttattaatgatgataattataatgtatctgtacagcactttttacatttgcgaagtgctttccaatccatkttagttactagttattacagctgtaaggataaaacacgtcatgtggattcattttgaattggtgctattggtatttcctctgttattgctaataaatgaaaatggtggtatg

SEQ ID NO: 234 - DNA, 5577 bp, Homo sapiens
ccagagtaaaaaagggtaaaaaggtaatatattttagggcttaaaatagttatttttttccaagatgaaagctatgartaaacttaaaccagaaaatcgactagttttaaatctacagaataaacagtagagccttccttttagccacatgatgtcgctgtccaccatagmgtgttctctaggaaggaaaatacccagagcccctttgttacttcagagaagcggaggaataagagaagcagcaggactttaacagagactagaatatttaaatttttgcaaaacatgctcttctaatttgatcaaaacattgaggattggtaatggcgtcttctatcagaaggggccgaggggcctggacacggctgctctcgcttctgctcctcgcagcctggraggtggggagcggccagctccgctactccgtccccgaggaggccaaacacggcaccttcgtgggccgcatcgcgcaggacctggggctggagctggaggagctggtgccgcgcctgttccgggtggcgtccaaaagacacggggaccttctggaggtaaatctgcagaatggcattttgtttgtgaattctcggatcgaccgggaggagctgtgcgggcggagcgcggaatgtagcatccacstggaggtgatcgtggacaggmcgctgcaggttttccatgtggaagtggaggtgaaggacattaacgacaacccgccaatatttccaatgacagtaaagactatscggtttcccgaatcaaggctgcttgattctcggtttcctctagagggagcatctgatgcagatataggagtaaatgctcttctctcctacaagctcagctccagtgagtttttcttcctagatatacaggcaaatgatgaactaagcgaatctttgtctctcgtgctggggaaatcgctggacagagaggaaactgctgaggttaatttgttactggtggctactgatgggggcaaacctgagctcacgggcaccgttcaaatacttattaaggtattagatgtaaatgacaatgaaccaacttttgcccaatcagtttacaaagtaaaattgttagagaatacggcaaatgggaccttagtggttaagttaaacgcttctgatgcagatgaaggaccgaacagcgagattgtgtattcactcggtagtgatgtgtcctccactatacagactaagtttaccatagatcccatctcaggggaaatcagaactaagggaaaattagattatgaagaagcaaagtcctacgagattcaggtcactgcaactgacaaaggaaccccttcaatgtcaggacattgtaaaatttcattaaaacttgtggacatcaatgataacacaccagaagtctcaataacgtctctctcacttcccatctcagagaacgcttccctgggcactgtcattgctctcatcacggtgtcggatcgcgactctggtacgaatggacatgtcacctgctccctgacgccccacgtccctttcaagctggtgtccaccttcaagaattactactcgttggtgctggacagcgccctggaccgcgagagcgtgtcagcctatgagctggtggtgaccgcacgggacgggggctcgccttcactgtgggccaccaccagcgtgtccatcgaggtggccgacgtgaacgacaacgcgccggcgttcgcacagcctgagtacacrgtattcgtgaaggagaacaacccgccgggctgccacatcttcacggtgtcagcgtgggatgcggacgcgcaggagaacgcgctggtgtcctactcgctggtggagcggcgggtgggcgagcgcrcgttgtcgagctacgtttcggtgcacgcggagagcggcaaggtgtacgcgctgcagccgctggaccacgaggaagtggagctgctgcagttccaggtgagcgcgcgggatgcgggcgtgccgcctctgggcagcaacgtgacgctgcaggtgttcgtgctggacgagaacgacaacgcgccggcactgttggcgcctagggctggcaccgctgctggcgcagtgagtgagctggtgccgtggtcggtgggtgcagggcacgtggtggcgaaggtgcgcgcagtggacgctgactcaggctacaacgcgtggctttcgtacgagcttcagctgggtactggcagcgctcgcatcccgttccgcgtggggctatacacgggtgagatcagcacgacacgtgccctagacgaggctgactcccctcgacaccgcctactcgtgctggtgaaggaccacggcgaaccagcgttgacagccacggccaccgtgttagtgtcgttggtggaaagtggccaggcacccaaggcctcgtcgcgrgcgtgggtgggcgccgcgggctcagaggctacgctggtggatgtcaacgtgtacctgatcatcgccatctgcgcggtatccagcctgttggtgctcacggtgctgctgtacactgcgctgcggtgctcggtgccacccaccgagggtgcgcgcgcgccaggaaagcccacgctggtgtgctccagcgccgtggggagctggtcttactcgcagcagaggcggcagagggtgtgctctggggaggaccyccccaagacggacctcatggccttcagccctagcttatctcaaggtccagactccgcagaagagaaacagctctcagaatcagaatacgtaggaaagccacgacagcccaaccctgactggcgttactctgcctccctgagagcaggcatgcacagctctgtgcacctagaggaggctggcattctacgggctggtccaggagggcctgatcagcagtggccaacagtatccagtgcaacaccagaaccagaggcaggagaagtgtcccctccagtcggtgcgggtgtcaacagcaacagctggacctttaaatacggaccaggcaaccccaaacaatccggtcccggtgagttgcccgmcaaattcattatcccaggatctcctgcaatcatctccatccggcaggagcctactaacagccaaattgacaaaagtgacttcataaccttcggcaaaaaggaggagaccaagaaaaagaagaaaaagaagaagggtaacaagacccaggagaaaaaagagaaagggaacagcacgactgacaacagtgaccagtgaggtcctcaaatggraacaagccacttagccagtttttgtaataatggcaaatctctcccatgtagcaattccctgctcctttttcctatctacatgagccctcttagagacctcagaaatctgcagaaagttccctgtgtctgtctagaacgcatttaacaggttttgtcgtaaaagctttactaagtctggtgttaactctttctctccactctggcttgttttcagaacctaaaaagcagacccaagtttcctttctcctccgccgcaaaggagaggcttcccagccccgccagtgagaggttggactctctgccctgtgctccggggatcctgtcttgatgacacttgcagggcaggctgaaaagttttgagattgagcagcttgggagtttgtggccactgggtatgtgtggctaccgcgggtatgcgagtgccagatattggctgagacgagccagcttagactaattggtacaaggaaggcaagaaaacaaagacaaataaacagcggaagttatcagtatggaggggaagtgtaaacttaaagggaccagactttctaaatcttacaactcaagaggtggcagccaccctctaggagacaaaactacccccactgacaaggctttaggagaccctaaagtctgttggctgtgacgtcattatacctaaaatctgcatcatacctgcaagccaacagttcagtgttttaacagagaaccaccctgggaaacagaagcagatctgatgtgtttcctatacatgtcctgtgctcactttattaaaaattcttttgcacacaatgtttatgaaaaggccagatccttttccaatacttatgcaaaagcaaaagaaaaccccgacacctcacctttcgctgtttgttgtttcatagatttatttaaaaaaagagaaagtctatagctataaatctttaaagagaaatatgaatacaattcccctaaactctcctcaaaagagaattcagtctacagccatttaaatgatcattgctgctacagaagtgctttaagagaattgcctgaaacatctgtattatatcggccacctgccaatcacagctttactctttcaggtcactctggggctgcctcttgcatgtattactaaataaaatgatctctctttctctctctctctctcttttctaagaaacaattatgtgcactttgatacacaaccttctctaaccaactatatatcaagacccaaaaattgaagaaaaatattgttttctcatacagtgagcagatttttcaatctactaattctgtgacttgtcttggtgtgctagcctacaccttctctttggtttagttttccttttctataacactctgaattgctaatcttactaacacctatgatgttacctkaaatcaatctcccatatgtatgctgtatgctatgctaagactcctgaaatatacttactctgtgcttgtgtatgtgaatgttaatgcaactattacctagagtgaactttaagctttattgttgaatgtaattccattatatttccttttgtacacctgtgaaaaagtggagtagtgtttttttaaccattgttaatcagcttttgtgtatgaaagacacagtaaaatttctttcttaaatcaagatactggtgattcaaggaattttatttatggtccagccaagagccatctcgtgccaagacttctgctggcaagggaatggataaagctgttttgttctagtaacaattttggaatgaatactgacaatattccatgagggtgtgcaagcacaaattttaccaatctgacctctttgaagttgcagaatgctttgaaattctaatggtatctgaaatatcagctcatagaaagtaacaaaatttgctgtcaccttaaataagacattttaattttgttataatgtacaatttagaagtttgattaattrtattatctatttaggcattaatataaaagaggtaggagtctgttatttaaaaaaagcattaaatttaaaaaaaaactgtcttgtctacttttagcttcattctcccatattttgaagggtgtgtaacttcagctctgcaggattgcatggggtaaaacttgttaccaacacatgtgaaccattgctacattgtaggttgtgatcattttgccccactgaagcccatgtatctgaccttacgtgccttttgaactaggagaatcgggctaatttattaatgatgataattataatgtatctgtacagcactttttacatttgcgaagtgctttccaatccatkttagttactagttattacagctgtaaggataaaacacgtcatgtggattcattttgaattggtgctattggtatttcctctgttattgctaataaatgaaaatggtggtatg

SEQ ID NO: 235 - DNA, 5254 bp, Homo sapiens
atggtttccagatgtagctgcctgggggtccagtgtctgctgctctcgcttcttctcctcgcagcctgggaggtggggagcggccagctccactactcagtctacgaggaggccagacacggcaccytcgtgggccgcatcgcgcaggacctggggctggagctggcggagctggtgcagcgcctgttccgggtggcgtccaaaagacacggggaccttctggaggtaaatctgcagaatggcattttgtttgtgaattctcggattgaccgcgaggagctgtgcgggcggagcgtggagtgcagcatccacctggaggtgatcgtggacaggccgctgcaggttttccatgtggacgtggaagtgaaggacattaacgacaacccgcccaggttctccgtaacagaacaaaagctctcaatacctgaatccagactgcttgactctcgatttccactagaaggcgcatctgatgcggatgttggagagaacgcattgcttacttacaaactcagtccaaatgagtattttgttcttgatattataaacaaaaaagacaaagacaaattcccagtgcttgttctgcggaagctgctggatcgtgaagaaaatyctcagctaaagttgttgttgacagcaactgatggaggcaaacctgaatttaccggatctgtttctctgctgatcctggtgttagatgccaatgataacgcccctatctttgacagaccggtttatgaagttaagatgtatgaaaatcaagtgaaccaaacattagtaatacggctcaacgcttctgattcggatgaaggaataaacaaggaaatgatgtattcatttagctctttggtcccacccacgataagaaggaaattttggataaacgaaaggacgggagaaataaaagtaaatgatgctattgactttgaggacagtaacacttatgaaattcatgtagatgttacagataagggaaacccacctatggttggtcactgcacggtcctagtggaactactggatgaaaatgataattcacctgaggtgattgtcacttctctgtctctcccagtgaaagaagatgctcaagtgggcaccgtcattgccctaatcagcgtttctgaccatgattcaggagccaacggacaggtcacctgctctctgacgcctcacgttccgttcaagctggtgtccacctacaagaattactactcattggtgctggacagcgctctggaccgcgagagggtgtcggcctatgagctggtggtgaccgcgcgggacgggggctcgcctccgctgtgggccacggccagsgtgtctgtggaggtggccgacgtgaacgacaacgcgcctgcgttcgcgcagtccgagtacacggtgttcgtgaaggagaacaacccgccaggctgccacatcttcacggtgtctgcgtgggacgcggacgcgcaggagaacgccctggtgtcctactckctggtggagcggcggttgggcgagcgctcgctgtcgagctacgtgtcrrtgcacgcggagagcggcaaggtgtacgcgctgcagccgctggaccacgaggagctggagctgctacagttccaggtgagcgcgcgcgatgggggcgtgccgcctctgggcagcaacktgacgctgcaggtgttcgtgctggacgagaacgacaacgctcccgcgctgctggcgtctccsgctggcagcgcgggcggtgcagtcagtgagctggtgctgcggtcggtggktgcgggtcacgtggtggctaaggtgcgcgcagtggacgctgactctggatacaacgcgtggctgtcgtatgaattgcagtcggcggcggttggtgcacgcatcccgtttcgcgtggggctgtacacgggcgagatcagtacgacgcgcgctctggatgagrctgactcgccacgccagcgcctactggtgctggtgaaggaccatggcgagccgtcgctgacggccacggccactgtgcttgtgtcgcttgtggagggcagccaggcacccaaggcctcgtcgcgggcttcagtgggcgtggcgcccgaggtggccctggtggatgtcaacgtgtacctgatcatcgccatctgcgcggtgtccagcttgctggtgctcacgctgctgctgtacactgcactgaggtgctcggcggcgcccaccgagggcgcatgtggsccggtgaagcccacgctggtgtgctctagcgcggtggggagctggtcttactcgcagcagaggcggcagagggtgtgttctggggagggcctgcccaaggcggacctcatggccttcagccccagccttccaccatgcccartggtagatgtggacggggaagatcagtctattggaggggaccactctaggaagccacgacagcccaaccctgactggcgttactctgcctccctgagagcaggcatgcacagctctgtgcacctagaggaggctggcattctacgggctggtccaggagggcctgatcagcagtggccaacagtatccagtgcaacaccagaaccagaggcaggagaagtgtcccctccagtcggtgcgggtgtcaacagcaacagctggacctttaaatacggaccaggcaaccccaaacaatccggtcccggtgagttgcccgmcaaattcattatcccaggatctcctgcaatcatctccatccggcaggagcctactaacagccaaattgacaaaagtgacttcataaccttcggcaaaaaggaggagaccaagaaaaagaagaaaaagaagaagggtaacaagacccaggagaaaaaagagaaagggaacagcacgactgacaacagtgaccagtgaggtcctcaaatggraacaagccacttagccagtttttgtaataatggcaaatctctcccatgtagcaattccctgctcctttttcctatctacatgagccctcttagagacctcagaaatctgcagaaagttccctgtgtctgtctagaacgcatttaacaggttttgtcgtaaaagctttactaagtctggtgttaactctttctctccactctggcttgttttcagaacctaaaaagcagacccaagtttcctttctcctccgccgcaaaggagaggcttcccagccccgccagtgagaggttggactctctgccctgtgctccggggatcctgtcttgatgacacttgcagggcaggctgaaaagttttgagattgagcagcttgggagtttgtggccactgggtatgtgtggctaccgcgggtatgcgagtgccagatattggctgagacgagccagcttagactaattggtacaaggaaggcaagaaaacaaagacaaataaacagcggaagttatcagtatggaggggaagtgtaaacttaaagggaccagactttctaaatcttacaactcaagaggtggcagccaccctctaggagacaaaactacccccactgacaaggctttaggagaccctaaagtctgttggctgtgacgtcattatacctaaaatctgcatcatacctgcaagccaacagttcagtgttttaacagagaaccaccctgggaaacagaagcagatctgatgtgtttcctatacatgtcctgtgctcactttattaaaaattcttttgcacacaatgtttatgaaaaggccagatccttttccaatacttatgcaaaagcaaaagaaaaccccgacacctcacctttcgctgtttgttgtttcatagatttatttaaaaaaagagaaagtctatagctataaatctttaaagagaaatatgaatacaattcccctaaactctcctcaaaagagaattcagtctacagccatttaaatgatcattgctgctacagaagtgctttaagagaattgcctgaaacatctgtattatatcggccacctgccaatcacagctttactctttcaggtcactctggggctgcctcttgcatgtattactaaataaaatgatctctctttctctctctctctctcttttctaagaaacaattatgtgcactttgatacacaaccttctctaaccaactatatatcaagacccaaaaattgaagaaaaatattgttttctcatacagtgagcagatttttcaatctactaattctgtgacttgtcttggtgtgctagcctacaccttctctttggtttagttttccttttctataacactctgaattgctaatcttactaacacctatgatgttacctkaaatcaatctcccatatgtatgctgtatgctatgctaagactcctgaaatatacttactctgtgcttgtgtatgtgaatgttaatgcaactattacctagagtgaactttaagctttattgttgaatgtaattccattatatttccttttgtacacctgtgaaaaagtggagtagtgtttttttaaccattgttaatcagcttttgtgtatgaaagacacagtaaaatttctttcttaaatcaagatactggtgattcaaggaattttatttatggtccagccaagagccatctcgtgccaagacttctgctggcaagggaatggataaagctgttttgttctagtaacaattttggaatgaatactgacaatattccatgagggtgtgcaagcacaaattttaccaatctgacctctttgaagttgcagaatgctttgaaattctaatggtatctgaaatatcagctcatagaaagtaacaaaatttgctgtcaccttaaataagacattttaattttgttataatgtacaatttagaagtttgattaattrtattatctatttaggcattaatataaaagaggtaggagtctgttatttaaaaaaagcattaaatttaaaaaaaaactgtcttgtctacttttagcttcattctcccatattttgaagggtgtgtaacttcagctctgcaggattgcatggggtaaaacttgttaccaacacatgtgaaccattgctacattgtaggttgtgatcattttgccccactgaagcccatgtatctgaccttacgtgccttttgaactaggagaatcgggctaatttattaatgatgataattataatgtatctgtacagcactttttacatttgcgaagtgctttccaatccatkttagttactagttattacagctgtaaggataaaacacgtcatgtggattcattttgaattggtgctattggtatttcctctgttattgctaataaatgaaaatggtggtatg

SEQ ID NO: 236 - DNA, 5984 bp, Homo sapiens
ctcgcttttcttgcaatattttataccttttcaattcatagaattactcaagaaaactacctcagttggttgctactttttgttgattccttttaccagacatgactaagtttctttttcatcagtagatttctgggctcctatattcactagagattgcaactcctggatttctcttacactagaatcctatttcgagccatatgggagattctgaattccagaacaaaagaattttgtaatttaaaattcgtgattgctcaatggaatcattttaattgttacttcatttctgtcgttatttaaaacttaagtggagagttttctcagggataagaaaaccacaatcaaggtcatacaaaacttttagaggcagtcagtctgctaagaaggctccagcaagagaaacgggatcttctgtttcaacaatcattacttaagaaaaaattaagaaaatgaaataagttttgcagaataactgtgaaatttttattcatgaaatatgtacttacactttggrccacgtgatgtcactctttgscgcgatgttctctctgaatccagacaaatacagcccttttcccatgggaaagaggctcaattctttttcactctstctgtgctgaacgatggckaacacagmagaatgggactgacgaaatcagatgatttcttctaatttggaggcaattttcactaattagaagaagactgagtatttgaaatgttatactcaagtcgaggagatccagagggtcagcctctactgctctcgcttctgatcctcgcaatgtgggtggtggggagmggccagctccactactcsgtcccsgaggargccraacayggcamcttcgtgggccgcatcgcgcaggacctggggctggagctggcggagctggtgccgcgcctgttscagttggattscaaakgccgyggggaycttctggaggtaaatctgcagaatggcattttgtttgtgaattctcggatcgaccgcgaggagctgtgcgggcggagcgcggagtgcagcatccacctggaggtgatcgtrgamaggccgctgcaggttttccatgtggacgtggaggtgaaggacattaacgacaaccctccrgtgttcccagcgacacaaaagaatctgttcatcgcggaatccaggccgcttgactctcggtttccactagagggcgcgtccgatgcagatatcggggagaacgccctgctcacttacagactgagccccaatgagtatttcttcctggacgtgccaaccagcaaccagcaggtaaaacctcttggacttgtattacggaaacttttagacagagaagaaactccggagcttcatttattgctcacggycaccgatggaggcaaacccgagctgactggcaccgttcaattactcatcacggtactggacaacaatgacaatgccccagtgttcgacagaaccctgtatacggtgaaattaccagaaaacgtttctatcggaacgctggtgattcaccccaatgcctcagatttagacgaaggcttgaatggggatattatttactccttctccagtgatgtttctccagatataaaatccaagttccacatggaccccttaagtggggcaatcacagtgataggacatatggattttgaagaaagtagagcacacaagatcccagtcgaggctgtcgataaaggcttcccacccctggctggtcattgtacasttcttgtggaagttgtggatgtaaatgacaatgctccacagttgactatcaaaacgctctcggttcctgtaaaagaggacgcacaactggggacagttattgccctgattagtgtgatcgacctagacgcagatgccaacgggcaggtkacctgctccctgacgccccacgtccccttcaagctggtgtccacctacaagaattactactcgttggtgctggacagagcyctggaccgcgagagtgtgtccgcctaygagctggtggttaccgcgcgggacsggggctcgccttcactgtgggccacggccagggtgtctgtggaggtggccgacgtgaacgacaacgcaccagcgttcgcgcagtccgagtacacggtgttcgtgaaggagaacaacccgccgggctgccacatcttcackgtgtctgcgcgggacgckgacgcgcaggagaacgccctggtgtcctactcgctggtggagcggcggktgggcsagcgctcgctgtcgagctacgtgtcagtgcacgcggagagcggcaaggtgtacgcgctgcagccgttggaccacgaggagctggagctgctacagttccaggtgagcgcgcgcgacgcgggcgtgccgcctctgggcagcaacgtgacgctgcaggtgttcgtgctggacgagaacgacaatgcgccggcgctgctgacacctcggatgaggggcactgacggcgcagtgagcgagatggtgctgcggtcggtgggcgccggcgtagtggtggggaaggtgcgcgcagtggacgccgactcgggctacaacgcgtggctttcatacgagctgcagccagaaacsgccagcgcgagcatcccgttccgcgtggggctgtacacgggcgagatcagcacaacgcgtgccctggacgaaacggacgcaccgcgccagcgcctactggtgctggtgaaagaccacggggagccagcgctgacggccacggccactgtgctggtgtcgctggtggagagcggccaggcgccaaagtcatcgtcgcrggcgtcagtgggtgccacgggccccgaggtgacgctggtggatgtcaaygtgtacctgatcatcgccatctgcgcggtgtctagcctgttggttctcacgctgctgctgtacactgtgctgcggtgctcggcgatgcccaccgagggcgagtgcgcgcctggcaagccgacgctggtgtgttctagcgcggtggggagttggtcgtactcgcagcagaggaggcagagggtgtgctctggcgagggtmmgcagaagaccgacctcatggccttcagcccgggcctttctccttgtgctggatctacagagcgaacgggagaaccctctgcttcctcagattcaactgggaagccacgacagcccaaccctgactggcgttactctgcctccctgagagcaggcatgcacagctctgtgcacctagaggaggctggcattctacgggctggtccaggagggcctgatcagcagtggccaacagtatccagtgcaacaccagaaccagaggcaggagaagtgtcccctccagtcggtgcgggtgtcaacagcaacagctggacctttaaatacggaccaggcaaccccaaacaatccggtcccggtgagttgcccgmcaaattcattatcccaggatctcctgcaatcatctccatccggcaggagcctactaacagccaaattgacaaaagtgacttcataaccttcggcaaaaaggaggagaccaagaaaaagaagaaaaagaagaagggtaacaagacccaggagaaaaaagagaaagggaacagcacgactgacaacagtgaccagtgaggtcctcaaatggraacaagccacttagccagtttttgtaataatggcaaatctctcccatgtagcaattccctgctcctttttcctatctacatgagccctcttagagacctcagaaatctgcagaaagttccctgtgtctgtctagaacgcatttaacaggttttgtcgtaaaagctttactaagtctggtgttaactctttctctccactctggcttgttttcagaacctaaaaagcagacccaagtttcctttctcctccgccgcaaaggagaggcttcccagccccgccagtgagaggttggactctctgccctgtgctccggggatcctgtcttgatgacacttgcagggcaggctgaaaagttttgagattgagcagcttgggagtttgtggccactgggtatgtgtggctaccgcgggtatgcgagtgccagatattggctgagacgagccagcttagactaattggtacaaggaaggcaagaaaacaaagacaaataaacagcggaagttatcagtatggaggggaagtgtaaacttaaagggaccagactttctaaatcttacaactcaagaggtggcagccaccctctaggagacaaaactacccccactgacaaggctttaggagaccctaaagtctgttggctgtgacgtcattatacctaaaatctgcatcatacctgcaagccaacagttcagtgttttaacagagaaccaccctgggaaacagaagcagatctgatgtgtttcctatacatgtcctgtgctcactttattaaaaattcttttgcacacaatgtttatgaaaaggccagatccttttccaatacttatgcaaaagcaaaagaaaaccccgacacctcacctttcgctgtttgttgtttcatagatttatttaaaaaaagagaaagtctatagctataaatctttaaagagaaatatgaatacaattcccctaaactctcctcaaaagagaattcagtctacagccatttaaatgatcattgctgctacagaagtgctttaagagaattgcctgaaacatctgtattatatcggccacctgccaatcacagctttactctttcaggtcactctggggctgcctcttgcatgtattactaaataaaatgatctctctttctctctctctctctcttttctaagaaacaattatgtgcactttgatacacaaccttctctaaccaactatatatcaagacccaaaaattgaagaaaaatattgttttctcatacagtgagcagatttttcaatctactaattctgtgacttgtcttggtgtgctagcctacaccttctctttggtttagttttccttttctataacactctgaattgctaatcttactaacacctatgatgttacctkaaatcaatctcccatatgtatgctgtatgctatgctaagactcctgaaatatacttactctgtgcttgtgtatgtgaatgttaatgcaactattacctagagtgaactttaagctttattgttgaatgtaattccattatatttccttttgtacacctgtgaaaaagtggagtagtgtttttttaaccattgttaatcagcttttgtgtatgaaagacacagtaaaatttctttcttaaatcaagatactggtgattcaaggaattttatttatggtccagccaagagccatctcgtgccaagacttctgctggcaagggaatggataaagctgttttgttctagtaacaattttggaatgaatactgacaatattccatgagggtgtgcaagcacaaattttaccaatctgacctctttgaagttgcagaatgctttgaaattctaatggtatctgaaatatcagctcatagaaagtaacaaaatttgctgtcaccttaaataagacattttaattttgttataatgtacaatttagaagtttgattaattrtattatctatttaggcattaatataaaagaggtaggagtctgttatttaaaaaaagcattaaatttaaaaaaaaactgtcttgtctacttttagcttcattctcccatattttgaagggtgtgtaacttcagctctgcaggattgcatggggtaaaacttgttaccaacacatgtgaaccattgctacattgtaggttgtgatcattttgccccactgaagcccatgtatctgaccttacgtgccttttgaactaggagaatcgggctaatttattaatgatgataattataatgtatctgtacagcactttttacatttgcgaagtgctttccaatccatkttagttactagttattacagctgtaaggataaaacacgtcatgtggattcattttgaattggtgctattggtatttcctctgttattgctaataaatgaaaatggtggtatg

SEQ ID NO: 237 - DNA, 655 bp, Homo sapiens
tttgagctgactctgcaggccagtgaccagggttcaacttgctcagtgtcatcctgaacctgcatgtgatggtggatgaccattgcaamaatgcaaggacactatgccaggagttgcagccaagtggggccctctttgatgctgcaccactcacaatgcaacccagctatcccatcaccaaagtggacaccagctggggcataaaggctgactgtcctatcatgtgcttcaggccagctaatgtggctcttcaaactagggatgtgcacragctagatgcgtgccgtgtcactgtgggtaacagagatgcaacctgccaaggtttgttggtcaccgtggtcaatggtgaatcatcacgctgaaacatcacctggttgctgctcatagtttgcaggagttgctaccagacctcagcaatcgcccagcacccaacagcaggcagcagacagcacccaacagctggcgatggccgttgccttgatctccatgctgtttctcctcagtgtgactctggccatctctctgaacctgcaatgccccctatagctccattgcctggggctgttttcagctggatctctggtccaagcccggatatggagttgtctccaacttaaagaaaggaaatttgccctgttcctacaacgtatgtgtg

SEQ ID NO: 238 - DNA, 4671 bp, Homo sapiens
aagcccgttcggagatccaaaaatctacaatacagaggttatttgtaacctggcgtctccaggctggtgagcaagctgaggagagcaagagggatggggagcggcgccggggagctgggccgggctgagaggctgccagtgctctttctcttcctgctgtctttgttctgcccggcgctctgtgagcagatccgctacaggattcccgaggaaatgcccaagggctccgtagtggggaacctcgccacggacctggggttcagcgtccaggagttaccgactcgaaaactgcgcgtcagttcggagaagccttacttcaccgtgagcgcagagagcggggagttgcttgtgagcagcaggctagacagggaggagatatgcgggaagaagccagcttgtgctctggaatttgaggctgttgctgaaaatccactgaacttttatcacgtgaatgtggagatcgaggacattaatgaccacacgccaaaattcmcgcaaaattcctttgagctgcaaataagtgagtctgcacagcctggcacaagatttatactagaagtagcagaagatgcagatattggcttaaactctctgcagaagtataaactctctcttaacccaagtttctcattaataattaaggagaaacaggatrgtagtaaatacccggaactggcactggagaaaaccttagaccgggaacaacagagttaccatcgtttagtcctgactgccttggacggtggacatccacccctaagcggcaccactgagctccggatccaggtaaccgacgccaatgataatcccccggtattcaaccgagacgtgtacagagtcagccttcgggaaaacgtgccaccaggcaccactgtgttgcaagtgtcagccactgaccaagacgagggcatcaactcagaaattacttattccttctacagaaccgggcaaatctttagtctgaattcaaagagcggagaaattaccactcaaaagaaactggattttgaagagaccaaggaatattcaatggttgtagaagggagggatggtggtggactggttgcacaatgtacagttgaaattaatattcaagatgaaaatgacaatagcccagaagttacattccattctctacttgaaatgattctggaaaacgcggtgcctggaacactaattgctttgatcaaaatacatgaccaagattctggggaaaatggggaggttaattgtcaattacaaggcgaagtcccttttaagattatctcttcatccaamaattcgtataagttggtaacagatggaaccctagaccgagagcaaaccccggagtacaatgtcaccatcacagccacagacaggggcaagccgcccctctcctccagcataagcgtcatcctacatatcagagacgtcaacgataacgctccggttttccaccaggcgtcctacttagtcagtgtacccgaaaacaaccctcctggggcctccatcgcgcaagtctgcgcctcggacctggacttggggttgaacggccaagtctcctactctatcatggccagcgacctagagcctctggcactggcctcttacgtgtccatgagcgcgcaaagtggggtggtgttcgcgcagcgcgcctttgactacgagcagctgcgcaccttcgaactcacactacaggcccgcgaccagggctcgcctgcgctcagcgcaaacgtgagcctgcgcgtgttggtgggcgaccgaaacgacaacgcaccgygggtgctgtaccccgcgctgggtcccgacggctctgcgctcttcgatatggtgccgcgcgctgcagagcccggctacctggtgaccaaggtagtggccgtggacgcagactyaggacacaacgcctggctgtcctaccacgtgctgcaggctagcgagcccgggctcttcagcctggggctgcgcacaggagaggtgcgcacagcgcgtgccttgggcgacagggacgcggcccgccagcgcctgctggttgctgtgcgtgatggtggacagccgccactctccgccaccgccacgctrcacttggtctttgctgacagcttgcaggaggtgctgccggatatcactgaccgccctgtaccctctgacccccaggctgagctgcagttttacctagtggtggccttggccttgatctcagtgctcttcctcctggccgtgattctggccgttgccttgcgcctgcgacgctcctccagccctgccgcctggagctgcttccaacctggtctctgtgtcaagtctggacctgtggttccccccaactacagtcaggggactttgccttattcctacaacctatgtgttgcacatacaggaaagacggagtttaatttcctaaaatgtagtgagcaattgagttcaggacaagacatactttgtggtgattcatytggggccttatttccactttgtaattccagcgagtcgacttcccatcctgagttgcaagccccgcccaacacggactggcgtttctctcaggcccagagacccggcaccagcggctcccaaaatggcgatgacaccggcacctggcccaacaaccagtttgacacagagatgctgcaagccatgatcttggcgtccgccagtgaagctgctgatgggagctccaccctgggagggggtgccggcaccatgggattgagcgcccgctacggrccccagttcaccctgcagcacgtgcccgactaccrccagaatgtctacatcccaggcagcaatgccacactgaccaacgcagctggcaagcgggatggcaaggccccagcaggtggcaatggcaacaagaagaagtcgggcaagaaggagaagaagtaacatggaggccaggccaagagccacagggyrgcctctccccaaccagcccagcttctccttacctgcacccaggcctcagagtttcagggctaacccccagaatactggtaggggccaaggccatgctccccttgggaaacagaaacaagtgcccagtcagcacctaccccttcccccccagggggttgaatatgcaaaagcagttccgctgggaacccccatccaatcaactgctgtacccatgggggtagtggggttactgtagacaccaagaaccatttgccacaccccgtttagttacagctgaactcctccatcttccaaatcaatcaggcccatccatcccatgcctccctcctccccaccccactccaacagttcctctttcccgagtaaggtggttggggtgttgaagtaccaagtaacctacaagcctcctagttctgaaaagttgsaagggcatcatgacctcttggcctctcctttgattctcaatcttcccccaaagcatggtttggtgccagccccttcacctccttccagagcccaagatcaatgctcaagttttggaggacatgatcaccatccccatggtactgatgcttgctggatttagggagggcattttgctaccaagcctcttcccaacgccctggggaccagtcttctgttttgtttttcattgtttgacgtttccactgcatgccttgacttcccccacctcctcctcaaacaagagactccactgcatgttccaagacagtatggggtggtaagataaggaagggaagtgtgtggatgtggatggtgggggcatggacaaagcttgacacatcaagttatcaaggccttggaggaggctctgtatgtcctcaggggactgacaacatcctccagattccagccataaaccaataactaggctggacccttcccactacataatagggctcagcccaggcagccagctttgggctgagctaacaggaccaatggattaaactggcatttcagtccaaggaagctcgaagcaggtttaggaccaggtccccttgagaggtcagaggggcctctgtgggtgctgggtactccagaggtgccactggtggaagggtcagcggagccccagcaggaagggtgggccagccaggccattcttagtccctgggttggggaggcagggagctagggcagggaccaaatgaacagaaagtctcagcccaggatggggcttcttcaacagggcccctgccctcctgaagcctcagtccttcaccttgccaggtgccgtttctcttccgtgaaggccactgcccaggtccccagtgcgccccctagtggccatagcctggttaaagttccccagtgcctccttgtgcatagaccttcttctcccacccccttctgcccctgggtccccggccatccagcggggctgccagagaaccccagacctgcccttacagtagtgtagcgccccctccctctttcggctggtgtagaatagccagtagtgtagtgcggtgtgcttttacgtgatggcgggtgggcagcgggcggcgggctccgcgcagccgtctgtccttgatctgcccgcggcggcccgtgttgtgttttgtgctgtgtccacgcgctaaggcgaccccctcccccgtactgacttctcctataagcgcttctcttcgcatagtcacgtagctcccaccccaccctcttcctgtgtctcacgcaagttttatactctaatatttatatggctttttttcttcgacaaaaaaataataaaacgtttcttctgaaaagctg

SEQ ID NO: 239 - DNA, 4748 bp, Homo sapiens
cacaaacctgctcccaggctgcagcaaaactcagcctctttcttctaaggaaaagatcaccatactttgcagggyggaagaaagaacctgatgaagcagcgcgcacagagatccttttgagaaaattccaaagcgaggcagcaatggcagctccaaccaaatgccagctccgcggaagattagtcctgctatgctcgctcctggggatgctatgggaggccagggccagtcagattcgctactcagtgcctgaagagacagaaaagggctatattgtgggcaacatctccaaggacctggctctggagccccgggagctggcggagcgccgagtccgcatcgtctctagaggtargacgcagcttttctctctgaacccgcgcagcggcaccttggtcaccgcgggtaggatagmccgggaggagctctgtgctcagagcccgcggtgtctggtgaactttaaagtcctggttgaagacagagtgaaactgtacggaatagaaatagaagtaactgatattaacgacagcgccccaaagttccaggccgaaagtctggaagtaaaaattaacgaaatcgcggttcctggagcacgttatccacttccagaagctattgatccggatgttggcgtgaactccctccagagctaccagctcagccccaatcaccacttctccctgaacgtgcagactggagacaatggagccataaacccagagctggtgctggagcgcgccctggacagggaggaggcaactgcycaccacctggtcctcacggcctcggatggcggcgagccgcgtcgctccagcacagtgcgcatccatgtgacagtgttggatacaaatgataatgccccggtttttgctcaacggatttaccgagttaaagtccttgagaacgtgcccccaggcacctggctgcttactgcaacagccagcgacctggatgagggaatcaacggaaaagtggcatacaaattctggaaaattaatgaaaaacaatctctgctattccagcttaatgaaaatactggggaaatatcaacagcaaaaagtctagattatgaagaatgttcattttatgaaatggaaatacaagctgaagatggtgggggattgaaagggtggacaaaagtgctcatttcggtggaagatgtaaatgacaatagacctgaagtgaccattacatctctgtttagcccagtgagagaagahgcmcctcagggaacagtaattcttcttttcaatgctcatgaccgagactccgggaagaatggtcaagttgtctgttctatccaggagaatctatcttttacattagaaaattcagaagaagattattacagattgttgacsgcccaaattcttgaccgagaaaaagcctcagaatataatatcacggtgactgcaacagacagaggaactccgcccctgtccacagaaattcacatcaccctgcaagtgactgacatcaatgataatccacctgctttctctcaagcctcctactcagtctrcctcccggaaaacaacgccagaggtacttccatcttctccgtgattgcctatgaccctgatagcaatgagaattctagagttatttactccttggcagaggataccatccaagggtctcctctctccacctatgtctctattaactcagacactggygtgctgtatgctctgtgctcctttgactatgagcagtttagagatttgcaaatgcaggtgacggcaagtgacagtggaagcccaccacttagcagcaatgtgtcattgagactgtttgttttggaccagaatgacaatgccccagaaatcctgtaccctgccctccccactgatggttctactggtgtggagctggcaccccgctctgcagagcctggctacctggtgaccaaggtggtggcagtggacagagactcaggccagaatgcttggctctcctaccgcctattcaaggccagtgagccagggctcttctcggtggggctgcacacaggtgaagtgcgcacagctcgggccctgctagatagagaygcgctcaaacagagccttgtggtggctgtacaggaccatggccagccccctctctcggccactgtcacgctcacagtagccatagctgacagcatcccagacatcctggctgacctgggcagtcttcagatccctgcagacctggaggcctcagaccttaccctctacctcgttgtggctgtggcagtcgtctcctgtgtcttcctcaccttcgttatcaygctgctggccctcaggctgaggcactggcactcctcgcatctgctgcgggctaccagtgatgggttggctggtgtgcccacctcacactttgtgggtgtagatggggttcgagctttcctacagacctattctcaggagttctccctcaccgctgactcaaggaagagtcayctgatcttcccccagcccaactatgcagacacactcatcagccagcagagctgtgagaaaaatgascctttstgygtctctgttgattccaagtttcctatagaagacacccctttggttccgcaagccccgcccaacacggactggcgtttctctcaggcccagagacccggcaccagcggctcccaaaatggcgatgacaccggcacctggcccaacaaccagtttgacacagagatgctgcaagccatgatcttggcgtccgccagtgaagctgctgatgggagctccaccctgggagggggtgccggcaccatgggattgagcgcccgctacggrccccagttcaccctgcagcacgtgcccgactaccrccagaatgtctacatcccaggcagcaatgccacactgaccaacgcagctggcaagcgggatggcaaggccccagcaggtggcaatggcaacaagaagaagtcgggcaagaaggagaagaagtaacatggaggccaggccaagagccacagggyrgcctctccccaaccagcccagcttctccttacctgcacccaggcctcagagtttcagggctaacccccagaatactggtaggggccaaggccatgctccccttgggaaacagaaacaagtgcccagtcagcacctaccccttcccccccagggggttgaatatgcaaaagcagttccgctgggaacccccatccaatcaactgctgtacccatgggggtagtggggttactgtagacaccaagaaccatttgccacaccccgtttagttacagctgaactcctccatcttccaaatcaatcaggcccatccatcccatgcctccctcctccccaccccactccaacagttcctctttcccgagtaaggtggttggggtgttgaagtaccaagtaacctacaagcctcctagttctgaaaagttgsaagggcatcatgacctcttggcctctcctttgattctcaatcttcccccaaagcatggtttggtgccagccccttcacctccttccagagcccaagatcaatgctcaagttttggaggacatgatcaccatccccatggtactgatgcttgctggatttagggagggcattttgctaccaagcctcttcccaacgccctggggaccagtcttctgttttgtttttcattgtttgacgtttccactgcatgccttgacttcccccacctcctcctcaaacaagagactccactgcatgttccaagacagtatggggtggtaagataaggaagggaagtgtgtggatgtggatggtgggggcatggacaaagcttgacacatcaagttatcaaggccttggaggaggctctgtatgtcctcaggggactgacaacatcctccagattccagccataaaccaataactaggctggacccttcccactacataatagggctcagcccaggcagccagctttgggctgagctaacaggaccaatggattaaactggcatttcagtccaaggaagctcgaagcaggtttaggaccaggtccccttgagaggtcagaggggcctctgtgggtgctgggtactccagaggtgccactggtggaagggtcagcggagccccagcaggaagggtgggccagccaggccattcttagtccctgggttggggaggcagggagctagggcagggaccaaatgaacagaaagtctcagcccaggatggggcttcttcaacagggcccctgccctcctgaagcctcagtccttcaccttgccaggtgccgtttctcttccgtgaaggccactgcccaggtccccagtgcgccccctagtggccatagcctggttaaagttccccagtgcctccttgtgcatagaccttcttctcccacccccttctgcccctgggtccccggccatccagcggggctgccagagaaccccagacctgcccttacagtagtgtagcgccccctccctctttcggctggtgtagaatagccagtagtgtagtgcggtgtgcttttacgtgatggcgggtgggcagcgggcggcgggctccgcgcagccgtctgtccttgatctgcccgcggcggcccgtgttgtgttttgtgctgtgtccacgcgctaaggcgaccccctcccccgtactgacttctcctataagcgcttctcttcgcatagtcacgtagctcccaccccaccctcttcctgtgtctcacgcaagttttatactctaatatttatatggctttttttcttcgacaaaaaaataataaaacgtttcttctgaaaagctg

SEQ ID NO: 240 - DNA, 4599 bp, Homo sapiens
atgggagggagctgcgcgcagaggcgccgggccggcccgcggcaggtgctatttcctttgctgctgcctttgttctaccccaccctgagtgagccgatccgctactcgattccggaggagctggccaagggctcggtggtggggaacctcgctaaggatctagggctcagtgtcctggatgtgtcggctcgcaagctgcgagtgagcgcggagaagctgcacttcagcgtagacgcggagagcggggacttacttgtgaagaaccgaatagaccgtgagcaaatatgcaaagagagaagaagatgtgagttgcaattggaagctgtggtggaaaatcctttaaatatttttcatgtcattgtggtgattgaggatgttaatgaccacgcccctcaatttgataaaaaggaaatacatttagaaattttcgaatctgcatccgctggtacacgactatcgcttgaccctgccacggatcctgatataaacataaaytcaattaaagattataagataaactctaatccttatttttcattaatggttagagttaattccgatggtggcaaatacccagagttatctctggagaaactcctagaccgggaagaacagagatctcatagcttgatattgactgccttggacggaggggacccaccaagaagtgccaccgctcacatagaaatttctgtcaaggataccaatgataaccccccggttttcagcagagacgaatatagaattagtcttagtgaaaatctgccccctgggtcccctgtgttgcaagtgacagccactgaccaggatgagggggtcaatgctgagataaactactacttccgaagcactgcccagagcacaaaacatatgttctcattggatgagaaaacaggtatgattaagaataaccagtcatttgattttgaagatgtagaaaggtacaccatggaagtggaagygaaggacggaggtggtctctctacccagtgtaaagtaatcatagaaatccttgatgaaaacgacaacagcccagaaataatcatcacttctctctctgatcagattttggagaattcacctccaggaatggttgttgccctcttcaaaacacgggatctggatttcggaggaaatggagaagtcaggtgtaatatagaaacagacattccattcaagatttattcttcttccaataactactacaaactggtgacagatggagccctggaccgagagcagacaccagaatacaatgtcaccatcgtagccactgacaggggcaagccgcctctttcttccagtagaagcatcaccttgtatgtcgctgacatcaacgacaacgccccagttttcgaccagacgtcctacgtggtccacgtggscgagaacaacccgccaggagcctccattgcgcaagtgagcgcctctgacccggatttggggctcaatggscacatctcctactctatagtggcgagtgacctagagcccctggcggtgtcgtcatacgtgtcagtgagcgsgsagagcggggtggtgttcgcgcagcgcgcctttgatcacgagcagctgcgcgccttcgcgctcacgctgcaggcccgcgaccacggctcgcccacgctcagcgccaacgtgagcctgcgcgtgttggtgggagaccgcaatgacaacgcaccgcgggtgctgtacccagctctgggtcctgacggctccgcgttcttcgatatggtacctcgctctgcagagcccggctacctagtgactaaggtggtagcggtggacgccgactcgggacacaacgcctggctgtcctaccacgtgctgcaggccagtgagcccggactcttcagcctggggctgcgcactggggaggtgcgcacggctcgagccttaggcgacagggacgcagcccgccagcgcctgctggtcgctgtgcgtgacggtggacagccgccactctctgccaccgccacgcttcatctggtcttcgcagacaacttgcaagagatactgccagacctcagcgaccgccctgtactctctgacycccaggctgaactgcagttttacctggtggtggccttggccttaatctcagtgctcttcctcctcgccgtgattctggccattgccttgcgcctgcgacgctctctcagccctrctacttgggactgcttccatcctggtctctgtgtcaartctggacctgtagttccccccaactacagtgaggggactttgccttattcttataatctgtgcattgcacatacgggtacaaaagagtttaatttcctaaaatgcagtgtgcccctacatkccaatgaagacatggtttgcagtgtttctcctggagccttaattccacctcatggtggggaggatttgacttcacatcctgagactctgacttcgcaagccccgcccaacacggactggcgtttctctcaggcccagagacccggcaccagcggctcccaaaatggcgatgacaccggcacctggcccaacaaccagtttgacacagagatgctgcaagccatgatcttggcgtccgccagtgaagctgctgatgggagctccaccctgggagggggtgccggcaccatgggattgagcgcccgctacggrccccagttcaccctgcagcacgtgcccgactaccrccagaatgtctacatcccaggcagcaatgccacactgaccaacgcagctggcaagcgggatggcaaggccccagcaggtggcaatggcaacaagaagaagtcgggcaagaaggagaagaagtaacatggaggccaggccaagagccacagggyrgcctctccccaaccagcccagcttctccttacctgcacccaggcctcagagtttcagggctaacccccagaatactggtaggggccaaggccatgctccccttgggaaacagaaacaagtgcccagtcagcacctaccccttcccccccagggggttgaatatgcaaaagcagttccgctgggaacccccatccaatcaactgctgtacccatgggggtagtggggttactgtagacaccaagaaccatttgccacaccccgtttagttacagctgaactcctccatcttccaaatcaatcaggcccatccatcccatgcctccctcctccccaccccactccaacagttcctctttcccgagtaaggtggttggggtgttgaagtaccaagtaacctacaagcctcctagttctgaaaagttgsaagggcatcatgacctcttggcctctcctttgattctcaatcttcccccaaagcatggtttggtgccagccccttcacctccttccagagcccaagatcaatgctcaagttttggaggacatgatcaccatccccatggtactgatgcttgctggatttagggagggcattttgctaccaagcctcttcccaacgccctggggaccagtcttctgttttgtttttcattgtttgacgtttccactgcatgccttgacttcccccacctcctcctcaaacaagagactccactgcatgttccaagacagtatggggtggtaagataaggaagggaagtgtgtggatgtggatggtgggggcatggacaaagcttgacacatcaagttatcaaggccttggaggaggctctgtatgtcctcaggggactgacaacatcctccagattccagccataaaccaataactaggctggacccttcccactacataatagggctcagcccaggcagccagctttgggctgagctaacaggaccaatggattaaactggcatttcagtccaaggaagctcgaagcaggtttaggaccaggtccccttgagaggtcagaggggcctctgtgggtgctgggtactccagaggtgccactggtggaagggtcagcggagccccagcaggaagggtgggccagccaggccattcttagtccctgggttggggaggcagggagctagggcagggaccaaatgaacagaaagtctcagcccaggatggggcttcttcaacagggcccctgccctcctgaagcctcagtccttcaccttgccaggtgccgtttctcttccgtgaaggccactgcccaggtccccagtgcgccccctagtggccatagcctggttaaagttccccagtgcctccttgtgcatagaccttcttctcccacccccttctgcccctgggtccccggccatccagcggggctgccagagaaccccagacctgcccttacagtagtgtagcgccccctccctctttcggctggtgtagaatagccagtagtgtagtgcggtgtgcttttacgtgatggcgggtgggcagcgggcggcgggctccgcgcagccgtctgtccttgatctgcccgcggcggcccgtgttgtgttttgtgctgtgtccacgcgctaaggcgaccccctcccccgtactgacttctcctataagcgcttctcttcgcatagtcacgtagctcccaccccaccctcttcctgtgtctcacgcaagttttatactctaatatttatatggctttttttcttcgacaaaaaaataataaaacgtttcttctgaaaagctg

SEQ ID NO: 241 - DNA, 4763 bp, Homo sapiens
agcacaaagcactggctctggagctttatgaaagcttcaagcggaagccctgagagctctggctgtgaatgcactttattttggacccagaagatcctggggctcctcaggcctcgacagagggaaaaccgaagcacaggcgactccgcggcggggttgtaatggcggcgcctcctgctcgcccagaccacacccggctgctccagatctgccttctcctgggggttctggtggaaatcagggccgaacagattctctactcggtgtttgaggagcaggaagaaggctcagtggtgggcaacatcgccaaggacctggggttggcgccccgggagctggcggagcgcggagtccgcatcgtctccagaggtaggacgcagcttttcgccctgaacccgcgcagcggcaccttggtcaccgcgggtaggatagacagggaggagctctgcgacagatctccaaactgtgtgacaaacctggagattcttctagaagatacagtgaagattttgcgggtagaggtggaaataatcgatgttaatgataacccacccagttttgggacagaacagagggaaataaaagttgctgaaaatgaaaatcctgggrcaagatttcctcttcctgaagcttttgatccggatgtaggtgtaaactccctgcagggttaccagctcaactcaaacggttacttttccctggacgtgcaaagtggggccgatgggattamgtacccagagctggtgctggaacgcgctctagatcgcgaggaagaggcggttcaccacctcgttctcacggccttcgatggaggtgacccggttcgctctggcactgccaggattctcataatacttgtggataccaacgataatgctcccgtgttcactcakcccgagtaccacgtaagtgttcgtgagaacgttcctgtaggcactcggctactcaccgtaaaagccactgatccagatgaaggagccaatggagacgtgacgtattctttccggaaagtaagagacaaaatatcacagctatttcagttgaattctctgagtggggatataacaatattggggggtctagattatgaggactctggattctatgacatagatgtagaagcccatgatgggcctggtctccgagctagaagcaaggtactggtgacagttctggatgaaaatgacaacgcaccagaagtcacagttacatctctcaccagctcagtccaggaatcttcttccccgggtacagtaattgcacttttcaacgtgcatgacagtgactcaggaggaaatggcctagtcacatgttctattccagataatctgccattcacacttgaaaagacctatggaaattattatcggttgttgacacacagaacactggacagggaagaagtctcagaatataacatcactgtaactgccactgaccagggaactcctccactgtctacagaaactcatatttcactgcaagtgatggacatcaatgacaacccacccactttccctcatgcttcctactctgcttrcattcstgaaaacaaccccagaggagcctccatcttatctatgactgctcaagaccctgacagtggtgacaatgcccgaatcacttactccctggccgaagacaccttccagggtgcacctctgtcctcctatgtctccatcaactccaatacagggatcctatatgctctttgctccttcgactatgagcagtttagagacctgcagctgctgatgacagccagtgacagtggagaccctccactcagcagcaatgtgtcactgagcctctttgtgctggaccagaacgacaatgtccctgagatcctgtaccccaccttccctackgatggctccactggtgtggagctggcaccccgctccgcagattccggctacctggtgaccaaagtggtggcagtggacagagactcaggtcagaatgcctggctgtcctacagcctactcaagtccagcgagccgggactatttgcagtggggctgcacacaggcgaggtgcgcaccgcacgggccctgctggacagagacgcgctcaagcagargcttgtagtggtcgtccaggaccatggccagccccctctctcggccaccgtcacactcactgtggctgtggccgacagcatcccagatgtcctggctgacttgggcagcctcaagccttcagcasacccagacgactcgggcctcacactctatctcgtggtggcagtggccgctgtctcctgcgtcttcctggcttttgtcacggtgctgctagcactcaagctgagacgctggcacaagtcacgcctgcttcacgctgaaggcagcaggttggcaggtgtgccygcctcgcactttgtgggcgtggacggggttcgggctttcctgcagacctattcccacgaggtctccctcaccgcrgactcgcggaagagtcacctgatcttctcccaacccagctatgcagacacgctcatcagccgsgagagttgtgagaaaagcgagcctcttctgataactcaggatttacttgaaacaaaaggagaccctaatcttcagcaagccccgcccaacacggactggcgtttctctcaggcccagagacccggcaccagcggctcccaaaatggcgatgacaccggcacctggcccaacaaccagtttgacacagagatgctgcaagccatgatcttggcgtccgccagtgaagctgctgatgggagctccaccctgggagggggtgccggcaccatgggattgagcgcccgctacggrccccagttcaccctgcagcacgtgcccgactaccrccagaatgtctacatcccaggcagcaatgccacactgaccaacgcagctggcaagcgggatggcaaggccccagcaggtggcaatggcaacaagaagaagtcgggcaagaaggagaagaagtaacatggaggccaggccaagagccacagggyrgcctctccccaaccagcccagcttctccttacctgcacccaggcctcagagtttcagggctaacccccagaatactggtaggggccaaggccatgctccccttgggaaacagaaacaagtgcccagtcagcacctaccccttcccccccagggggttgaatatgcaaaagcagttccgctgggaacccccatccaatcaactgctgtacccatgggggtagtggggttactgtagacaccaagaaccatttgccacaccccgtttagttacagctgaactcctccatcttccaaatcaatcaggcccatccatcccatgcctccctcctccccaccccactccaacagttcctctttcccgagtaaggtggttggggtgttgaagtaccaagtaacctacaagcctcctagttctgaaaagttgsaagggcatcatgacctcttggcctctcctttgattctcaatcttcccccaaagcatggtttggtgccagccccttcacctccttccagagcccaagatcaatgctcaagttttggaggacatgatcaccatccccatggtactgatgcttgctggatttagggagggcattttgctaccaagcctcttcccaacgccctggggaccagtcttctgttttgtttttcattgtttgacgtttccactgcatgccttgacttcccccacctcctcctcaaacaagagactccactgcatgttccaagacagtatggggtggtaagataaggaagggaagtgtgtggatgtggatggtgggggcatggacaaagcttgacacatcaagttatcaaggccttggaggaggctctgtatgtcctcaggggactgacaacatcctccagattccagccataaaccaataactaggctggacccttcccactacataatagggctcagcccaggcagccagctttgggctgagctaacaggaccaatggattaaactggcatttcagtccaaggaagctcgaagcaggtttaggaccaggtccccttgagaggtcagaggggcctctgtgggtgctgggtactccagaggtgccactggtggaagggtcagcggagccccagcaggaagggtgggccagccaggccattcttagtccctgggttggggaggcagggagctagggcagggaccaaatgaacagaaagtctcagcccaggatggggcttcttcaacagggcccctgccctcctgaagcctcagtccttcaccttgccaggtgccgtttctcttccgtgaaggccactgcccaggtccccagtgcgccccctagtggccatagcctggttaaagttccccagtgcctccttgtgcatagaccttcttctcccacccccttctgcccctgggtccccggccatccagcggggctgccagagaaccccagacctgcccttacagtagtgtagcgccccctccctctttcggctggtgtagaatagccagtagtgtagtgcggtgtgcttttacgtgatggcgggtgggcagcgggcggcgggctccgcgcagccgtctgtccttgatctgcccgcggcggcccgtgttgtgttttgtgctgtgtccacgcgctaaggcgaccccctcccccgtactgacttctcctataagcgcttctcttcgcatagtcacgtagctcccaccccaccctcttcctgtgtctcacgcaagttttatactctaatatttatatggctttttttcttcgacaaaaaaataataaaacgtttcttctgaaaagctg

SEQ ID NO: 242 - DNA, 4752 bp, Homo sapiens
cgccggccgaaccgcgccagagctggcgcggggaaagggagataggtgtctccagctgctgtggctgtttggggcgggtcggcttcatccgcgtctcaggagcaagtagagaattagcgggcggcagcaatgctccgcaaggtgagaagctggacagaaatctggcggtgggctacccttttgttcctcttttaccacctgggttacgtttgtgggcagatccgctacccggtcccagaggagtcacaggaagggacttttgtagggaatgtcgctcaagatttcctgctggatacggacagtctgtcagctcgcaggctgcaggtcgctggagaggtgaaccaaagacacttccgtgtggatttggacagcggagccctgctcatcaagaacccaatcgaccgagaggcactgtgtgggctcagtgccagctgcatcgtgcccctggagtttgtcaccgaaggtcctttggaaatgtaccgagcagaggtagagatcgtagatgtgaatgatcacgccccccgttttccgcggcagcagctggacttggaaattggggaggcagctcctccaggacagcgtttcccgttggaaaaggctcaggatgcagatgtggggagcaattcgattagcagctataggctgagctccartgaacactttgcactggatgtgaagaagcgcagcgacggcagcctggtcccagagctgctcctggagaagcctttggatcgagagaagcaatcggactaccgcctggtgctgactgctgtcgatggagggaacccgccgagatctggcaccgcagagctccgggtatccgtgctggacgtaaacgacaacgccccagccttccagcaatccagctacaggattagtgtgttggagagcgcaccagcgggcatggtgctcatccagctcaatgcctcagacccggacctgggtcccagtggtaacgtcaccttttatttcagyggtcatacccctgatcgtgtaagaaacctctttagcctgcaccccactactggaaagcttactcttttggggcccctagactttgagagtgagaattactatgaatttgatgtgcgggctcgcgatgggggttctccagccatggagcaacattgcagccttcgagtggatctgctggacgtaaatgacaatgccccttacatcacagtgacctcagagcttggaaccctccccgagagtgcagaacctggcactgtggtggcacttatcagtgtgcaggatccagactcagggtcaaacggagatgtgagcctccgcattcctgaccacttgccatttgccctcaagtctgccttcaggaaccagttctccctggtgactgctggacccttggatcgagaggccaaatctagctatgacatcatggtcactgcttctgatgctgggaaccctcctctcagtacccacagaactattttcctcaatatttcagatgtgaatgataatccaccctctttctttcagaggtcacatgaggtgtttgttcctgagaacaatcgcccaggggacctgctttgctcccttgcagcctctgacccagactctggcttgaatgcgcttatctcctactcactcctggagcccaggaatcgagatgtatcagcttcctctttcatctctctgaacccccagacaggagctgttcatgctactcgatcctttgactatgagcaaacccagacactgcagtttgaggtgcaggcccgggatcggggcaacccaccccttagcagcactgtaacagttcgtctatttgtgctggacctcaatgacaatgctccagctgtgctccgtcctcgggcccggcctggttccttatgtccccaagcactgcctccatcagttggtgctggccacctaatcacaaaggtgactgctgtggacttggattcaggttacaatgcttgggtttcctatcagctcctggaggccccagatcccagcctgtttgcagtctctcgatatgctggggaggtgcggacggctgttcctatcccagctgacctcccaccacagaagctggtcattgtggtaaaggatagtggtagtccaccactctctacctctgttactctcttagtgtccttagaggaagacactcatccagttgtcccagatcttcgagaatcttcagctccaagggaaggagaatctcgtctaaccctctacttggctgtgtccctagtggcaatttgctttgtctcctttggctcattcgtggcactactctctaagtgtcttcgtggggcagcctgtggagtcacatgctttcctgctggcacctgtgcctgtctcaccagatctcgaaggagggaggggcttcccccttccaatgggatcctccgaatccagctagggtcagatgaccctatcaagtttgttgatgtgggaggccactctcatggctgtacacccttggcttctgcacccactcggagtgatagcttcatgatggtgaagtcacccagtgcacctatggcaggggagcctgttcgcccaagctgcccaccctctgatcttctctatgggctagagcaagccccgcccaacacggactggcgtttctctcaggcccagagacccggcaccagcggctcccaaaatggcgatgacaccggcacctggcccaacaaccagtttgacacagagatgctgcaagccatgatcttggcgtccgccagtgaagctgctgatgggagctccaccctgggagggggtgccggcaccatgggattgagcgcccgctacggrccccagttcaccctgcagcacgtgcccgactaccrccagaatgtctacatcccaggcagcaatgccacactgaccaacgcagctggcaagcgggatggcaaggccccagcaggtggcaatggcaacaagaagaagtcgggcaagaaggagaagaagtaacatggaggccaggccaagagccacagggyrgcctctccccaaccagcccagcttctccttacctgcacccaggcctcagagtttcagggctaacccccagaatactggtaggggccaaggccatgctccccttgggaaacagaaacaagtgcccagtcagcacctaccccttcccccccagggggttgaatatgcaaaagcagttccgctgggaacccccatccaatcaactgctgtacccatgggggtagtggggttactgtagacaccaagaaccatttgccacaccccgtttagttacagctgaactcctccatcttccaaatcaatcaggcccatccatcccatgcctccctcctccccaccccactccaacagttcctctttcccgagtaaggtggttggggtgttgaagtaccaagtaacctacaagcctcctagttctgaaaagttgsaagggcatcatgacctcttggcctctcctttgattctcaatcttcccccaaagcatggtttggtgccagccccttcacctccttccagagcccaagatcaatgctcaagttttggaggacatgatcaccatccccatggtactgatgcttgctggatttagggagggcattttgctaccaagcctcttcccaacgccctggggaccagtcttctgttttgtttttcattgtttgacgtttccactgcatgccttgacttcccccacctcctcctcaaacaagagactccactgcatgttccaagacagtatggggtggtaagataaggaagggaagtgtgtggatgtggatggtgggggcatggacaaagcttgacacatcaagttatcaaggccttggaggaggctctgtatgtcctcaggggactgacaacatcctccagattccagccataaaccaataactaggctggacccttcccactacataatagggctcagcccaggcagccagctttgggctgagctaacaggaccaatggattaaactggcatttcagtccaaggaagctcgaagcaggtttaggaccaggtccccttgagaggtcagaggggcctctgtgggtgctgggtactccagaggtgccactggtggaagggtcagcggagccccagcaggaagggtgggccagccaggccattcttagtccctgggttggggaggcagggagctagggcagggaccaaatgaacagaaagtctcagcccaggatggggcttcttcaacagggcccctgccctcctgaagcctcagtccttcaccttgccaggtgccgtttctcttccgtgaaggccactgcccaggtccccagtgcgccccctagtggccatagcctggttaaagttccccagtgcctccttgtgcatagaccttcttctcccacccccttctgcccctgggtccccggccatccagcggggctgccagagaaccccagacctgcccttacagtagtgtagcgccccctccctctttcggctggtgtagaatagccagtagtgtagtgcggtgtgcttttacgtgatggcgggtgggcagcgggcggcgggctccgcgcagccgtctgtccttgatctgcccgcggcggcccgtgttgtgttttgtgctgtgtccacgcgctaaggcgaccccctcccccgtactgacttctcctataagcgcttctcttcgcatagtcacgtagctcccaccccaccctcttcctgtgtctcacgcaagttttatactctaatatttatatggctttttttcttcgacaaaaaaataataaaacgtttcttctgaaaagctg

SEQ ID NO: 243 - DNA, 2734 bp, Homo sapiens
gagacataagagacttcagctgctgcattccaagccctgggtctaccttggagacaggacagcacagacttactctccacaaagggacttctgggtcatggggcccaagacactcccacagctcgctgggaaatggcaagtgctgtgcatgttgtccttgtgctgctggggctgggtgtctgggcagcttcgttactcagtggtggaggagtctgagccggggacgctggtggggaatgttgctcaggatctgggcttaaagatgacagatctgttgagccggcggctgcaaytgggctctgaggagaatgggcgctatttttccctgagcttgatgagtggtgccctggcagtgaatcaaaagattgaccgagaaagcctatgtggagccagcaccagctgcctgctgccagtgcaggtggtgactgaacaccccctggagctaatccgtgtagaggtagagatcctggatctcaatgacaactctcctagctttgccacccctgagcgagagatgcrcatctcagaatcagcagcatctggggcacgattcccactggacagtgcccaggatccggatgtgggcaccaatactgtgagcttttacactctaagccccaacagccacttctctctgaatgtgaagaccctaaaagatgggaagccattcccagagctggtgctagagcagcagctggatcgtgaagcccaggcaagacatcagctggtgcttactgctgtggatggggggaccccagcccgctcagggaccacccttatctctgtcatcgtgctggacatcaatgataatgctccaaccttccaatcctcagttctacgtgtgggaatcccagagaatgcacccattggtactctgctgctccgcctyaatgccactgatccagacgagggcaccaacrgccaactagactattcttttggagaccacacatctgaggcagtgcggaacctctttggcctagaccctagcagtggggcaatccatgtgttgggtcccatagactttgaggagtcacgtttctatgaaattcatgcaagagcccgtgaccagggacagcctgccatggagggccactgtgtgattcaagtggatgtgggggatgtcaatgacaatgccccagaggtgctattggcctctttggccaaccctgtmctagagagcacaccagtgggcacagtagtggggttgtttaatgtgcgagaccgggactcaggtagaaatggtgaagtgagccttgatatctctcmrgacctgccatttcagattaagccttctgagaaccactactcgctgctaaccagccagcctttggaccgggaggccacatcccactatatcatcgagctgctggccagcgatgctggttcaccttccctacacaaacatctcaccatcaggctcaacatttcagatgtcaatgacaatgcaccccgcttcaaccagcagctttacactgcttacatcctagaaaaccggcctccrggctcccttctttgcactgtggctgcctcagatccagacactggggataatgcccgcctcacctactccattgtaggaaatcaggttcagggagccccagcctcctcctttgtgtatgtcaacccagaggatggacggatctttgyccagcgtacctttgactatgaattgctgcagatgctgcagattgtggtgggggttcgagactccggctctcccccattgcatgccaacacatctctgcatgtgtttgtcctagacgagaatgataatgccccagctgtgctgcacccacggccagrctgggaacactcagccccccagcgtctccctcgctctgctcctcctggctccttggtcaccaaggtgacagccgtggatgctgatgcaggccacaatgcgtggctctcctactcactgttgccacagtccacagccccaggactgttcctcgtgtctacacacactggtgaggtgcgcacagcccgggccttactggaggatgactctgacacccagcaggtggtggtcctggtgagggacaatggtgacccttcrctctcctccacagccacagtgctgctggttctggaggatgaggacccygaggaaatgcccaaatccagtgacttcctcatacaccctcctgagcgttcagaccttaccctttacctcattgtggctctagcgaccgtcagtctcttatccctagtmaccttcacctttctgtcagckaagtgccttcagggaaacgcagacggggacgggggtggagggcagtgctgcaggcgccaggactcaccctccccggacttctataagcagtccagccccaacctgcaggtgagctcggacggcacgctcaagtacatggaggtgacgctgcggcccacagactcgcagagccactgctacaggacgtgcttttcaccggcctcggacggcagtgacttcacttttctaagacccctcagcgttcagcagcccacagctctggcgctggagcctgacgccatccggtcccgctctaatackctgcgggagcggagccaggtgaggggctcggcgccgccccgggcgacccctgggggcggcactggagaagccgcccgtcctcataagggattgaacttgcatccactcctctccggccggcttggtcgctggctgcgctccacccgattctcgggatcattggaccgtttgcgcgaaaccagagtggccgattaa

SEQ ID NO: 244 - DNA, 3117 bp, Homo sapiens
agaatgggctctaggcgccgctgctcaccaatcagggaatgggaagctgcgcgccattgagtccctccctcccccgcctctaccacacaaagcggaatgagatggataytcacagatcctgacactggagacttagaagtattttccttcgctttctgatatattttggatrtagtcggcctaggacttcatagatacataagccgattcacaaccaaccagctcgagaaaccgcggaatatcggcttagagcctgccatggcgaatcggctacagcgcggggaccgcagtcggctgctgctgctgctgtgcattttcctggggacgctgcgggggttccgggccaggcagatccgatattcggtgccagaagagaccgaaaagggctccttcgtgggcaatatctccaaggacctggggctggagccccgggagctggcgaagcgcggagtccgcatcgtctccagagggaagacacagcttttcgctgtgaatccgcgaagcggcagcttgatcacggcaggcaggatagaccgggaggagctctgtgagacggtgtcctcctgtyttttaaatatggaacttctcgtggaagacaccttgaagatttacggagtggaggtggaaataatagatattaatgataacgcccccagcttccaggaggacgaagtggagataaaagtcagtgagcacgcaattcctggggcgcgatttgctcttcctaatgctagggatccagatgtgggcgtgaactccctmcagagctaccagctcagccctaataattacttttccttgcaactgcggggcagaacggatggggccaagaatccagagctagtactggagggaagcctggaccgagagaaagaggctgctcacctgctcctcctcacagctttagatggaggcgatcccatccgaaagggcgcagttcccattcgtgtggtggtcctcgatgtaaatgatcacatcccaatgtttacacagtccgtatatcgcgtgagtgttccagaaaacatcagctccggaactcgggtgctgatggttaatgcaacggatccagacgagggaatcaacggggaagtaatgtattcatttcggaacatggaaagcaaggcttctgaaatattccaattggattcacaaactggagaagttcaagtacgggggtctctggattttgaaaaatatagattctatgagatggaaattcaaggccaagatggtggaggtctctttaccaccacgacgatgttgatcactgttgtggatgtgaatgataacgctccagaaataactatcacctcttctattaattcaattctggaaaactctcctccaggtacagtgattgctcttctaaatgtgcaagatcaagattctggagaaaatggtcaagtctcctgttttattcctaaccacctgccttttaaattagaaaagacttatggaaattattacaaattgataacaagcagagtgctggacagggagttggtccagagctacaatataacgttgacagccacagaccagggaagcccgcctttgtctgcagaaactcatgtctggctgaatgtggcagatgacaacgataaccctcccgtttttcctcactcctcttactctgcctacattcccgaaaacaaccccaggggtgcctccatcttctcagtgaccgccctcgacccggacagcaaacagaatgccctggtcacttactctctgacggatgacactgtccagggggtgcctctgtcctcctatgtctctattaactccaacactggtgttctctatgccctacaatccttcgactatgagcagtttcgagacttagaactgagagtgatagcrcgtgacagcggggacccgcccctcagcagcaacgtgtcgctgagcctgttcgtgctrgaccagaacgacaatgcgcccgagatcctgkaccctgccctycccacagacggstycactggcgtggagctggcgccccgctctgcggaacctggctacctggtgacyaaggkggttgcggtggacaaagattcaggccagaacgcctggctgtcctatcgcctgcttaaggccagcgagccgggactcttcgcggtgggggagcacacgggcgaggtgcrtacagcgcgggcactgctggacagagacgcgctcaagcagagcctygtggtggccgtccaggaccacggccagccccctctctcggccaccgtcacgctcaccgtggctgtggccgacagcatccccgaagtcctggcggacctcggcagcctcgagtctctggctaactctgaaacctcagacctctcgctgtacttggtggtggcggtggccgcagtctcctgcatcttcctggtctttgtcatcgtgctgctggcactcaggctgtggcgctggcataagtcacgcctgctgcaggcttctgaaggcgggttggcaggtatgcccacgtcacattttgtaggcgtggacggggtacaggctttcctgcaaacctattcccacgaggtctctctcattgcggactcgcagaagagtcacctgattttcccccagcccaactatggggacacgctcatcagccaggagagctgtgagaaaagcgagccactcttgatagctgaagactcagctatcattttaggcaaatgtgacccgacaagtaatcaggtgagatttatttctctgcctcctaattgttggtgtcttggcacaagtcttttaaggagatgttttttgagcctgttatgaaaactgtttggggggggggtggggcggcatatatttagttcatatatatttagagcaatacatgtgagttttactttgcctttcatgagattacgataatctttcagaacgtttttgtgaaagtcatttttcaatcttggcatattttcttttgatttcaaaggggccattcaactatgctggtttggtttgaagtaagttgaattttagtattatttttctattatcagtgtatgaggctctcaatttattatatatagatacaaattaatgattcacaaacactttttatttccatttcaattttgctgtgccttcactgatttgtagttatattccaccatt

SEQ ID NO: 245 - DNA, 2442 bp, Homo sapiens
atggcgagtccacctaggggctggggctgcggagagctgctgctgcccttcatgctcctggggacgctgtgcgagccaggatccgggcagatccgctactcgatgccggaggagctggacaaaggctccttcgtcggcaacatagccaaggaccttgggctggagccccaggagctggcggagcgcggagtccgcatcgtctccagaggtaggacscagctttttgccctgaacccgcgaagcggcagcttggtcaccgcgggcaggatagaccgggaggagctctgcgctcagagcccactgtgtgtggtgaactttaacatcttggttgagaacaaaatgaaaatttatggagtagaagtagaaataatcgatattaatgataacttcccgcgtttccgggatgaagagttaaaagtaaaagttaatgaaaatgcggctgcagggacacggttagtgcttcccttcgcgcgggatgcggatgtgggtgtgaactcyctccggagttaccagctcagctccaatctgcacttctctctggatgtggtaagcggaactgatggacaaaagtatccggagctggtgttggaacagcccctagaccgcgagaaagagactgttcacgacctcctcctcacagctttagatggcggagacccggtactctccggcaccacgcacatccgtgttacggtcctcgacgcaaacgacaatgcgcccctgttcaccccatccgagtacagcgtgagtgttccagagaacatacctgtgggcactcggctgctcatgctaaccgccacggatccagatgagggaataaacgggaaattgacctactcttttcgcaatgaagaagaaaaaatttcggagactttccaayttgattccaacctgggggaaatctcaactctacaatcactggactatgaagaatccagattctacctcatggaagtggtagctcaggatggaggcgctcttgttgccagcgctaaggtggtggtcacagtacaggacgtgaatgacaatgcccccgaagtgatcctcacctctctgaccagttcgatctctgaagactgtcttcccggaactgtaatcgcgctgtttagcgtacatgatggtgattctggagaaaatggtgagattgcatgctctattcctaggaatttgccttttaaattggagaagtcagttgataattactaycacctattaacaactagggacctggacagagaagagacttcagattataatatcactttaaccgtcatggaccatggaaccccgcccctctctacagaaagccacatccccttgaaagtagcagacgttaatgacaacccacccaatttccctcaagcctcctactccacctctgtcacagaaaacaatcccagaggtgtctctatcttctctgtgacagcccatgaccycgacagcggcgacaacgctcgagtcacctactccctggctgaagacacatttcagggggcgcccttgtcctcctatgtatccattaactctgacaccggtgtcctgtatgctctgagatccttcgactatgagcagttgagagacctacagttgtgggtgacagccagcgacagtgggaaccctccacttagcagcaacgtgtcgctgagcctgtttgtgctggaccagaacgacaatacgcctgagatcctgtaccccgccctccccacagacggttccacgggcgtggagctggcgccycgctccgcagaacctggctacctggtgaccaaggtggtagcggtggacaaagattcaggccagaacgcctggctgtcctaccgcctgcttaaggccagcgagccaggactctttgcggttgggctgcacacgggcgaggtgcgcacagcgcgagccctgctggacagagacgcgctcaagcagagcctcgtggtggccgtcgaagaccatggccagccccctctgtcagccaccttcacggtcaccgttgccgtggccgacaggatccctgacatcctggctgacctaggcagtatcaagacccccattgaccctgaggatctggacctcacactctatcttgtggtggcagtggctgcagtctcctgcgtcttcctggccttcgtcatcgtgctgctggtgctcagactgaggcgctggcacaagtcacgcctgcttcaggctgaaggcagcaggttggcgggtgtgcccgcctcgcactttgtgggcgtggatggggttcgggctttcctgcagacctattcccacgaggtctccctcaccgcggactcgaggaagagtcacctgatctttccccagcccaactacgcagacacgctccttagtgaagagagctgtgagaaaagcgagcctcttctgatgtctgataaggtagatgcaaacaaagaagaacggcgagttcaggttagttttctctttcggtaa

SEQ ID NO: 246 - DNA, 4774 bp, Homo sapiens
acgcgcctgaagcacaaagcagatagctaggaatgaaccatccctgggagtatgtggaaacaacggaggagctctgacttcccaactgycccattctatgggcgaaggaactgctcctgacttcagtggttaagggcagaattgaaaataattctggaggaagataagaatgattcctgcgcgactgcaccgggactacaaagggcttgtcctgctgggaatcctcctggggactctgtgggagaccggatgcacccagatacgctattcagttccggaagagctggagaaaggctctagggtgggcgacatctccagggacctggggctggagccccgggagctcgcggagcgcggagtccgcatcatccccagaggtaggaygcagcttttcgccctgaatccgcgcagcggcagcttggtcacggcgggcaggatagaccgggaggagctctgtatgggggccatcaagtgtcaattaaatctagacattctgatggaggataaagtgaaaatatatggagtagaagtagaagtaagggacattaacgacaatgcgccttactttcgtgaaagtgaattagaaataaaaattagtgaaaatgcagccactgaratgcggttccctctaccccacgcctgggatccggatatcgggaagaactctctgcagagctacgagctcagcccgaacactcacttctccctcatcgtgcaaaatggagccgackgtagtaagtaccccgaattggtgctgaaacgcgccctggaccgcgaagaaaaggctgctcaccacctggtccttacggcctccgacgggggcgacccggtgcgcacaggcaccgcgcgcatccgcgtgatggttctggatgcgaacgacaacgcaccagcgtttgctcagcccgagtaccgcgcgagcgttccggagaatctggccttgggcacgcagctgcttgtagtcaacgctaccgaccctgacgaaggagtcaatgcggaagtgaggtattccttccggtatgtggacgacaaggcggcccaagttttcaaactagattgtaattcagggacaatatcaacaataggggagttggaccacgaggagtcaggattctaccagatggaagtgcaagcaatggataatgcaggatattctgcgcgagccaaagtcctgatcactgttctggacgtgaacgacaatgccccagaagtggtcctcacctctctcgccagctcggttcccgaaaactctcccagagggacattaattgcccttttaaatgtaaatgaccaagattctgaggaaaacggacaggtgatctgtttcatccaaggaaatctgccctttaaattagaaaaatcttacggaaattactatagtttagtcacagacatagtcttggatagggaacaggttcytagctacaacatcacagtgaccgccactgaccggggaaccccgcccctatccacggaaactcatatctcgctgaacgtggcagacaccaacgacaacccgccggtcttccctcaggcctcctattccgcttatatcccagagaacaatcccagaggagtttccctcgtctctgtgaccgcccacgaccccgactgtgaagagaacgcccagatcacttattccctggctgagaacaccatccaaggggcaagcctatcgtcctacgtgtccatcaactccgacactggggtactgtatgcgctgagctccttcgactacgagcagttccgagacttgcaagtgaaagtgatggcgcgggacaacgggcacccgcccctcagcagcaacgtgtcgttgagcctgttcgtgctggaccagaacgacaatgmgcccgagatcctgtaccccgccctccccacggacggttccactggcgtggagctggctccycgctccgcagagcccggctacctggtgaccaaggtggtggcggtggacagagactcsggccagaacgcctggctgtcctaccgtctgctcaaggccagcgagccgggactcttctcggtgggtctgcacacgggcgaggtgcgcacggcgcgagccctgctggacagagacgcgctcaagcagagcctcgtagtggccgtccaggaccacggccagccccctctctccgccactgtcacgctcaccgtggccgtggccgacagsatcccccaagtcctggcggacctcggcagcctcgagtctccagctaactctgaaacctcagacctcactctgtacctggtggtagcggtggccgcggtctcctgcgtcttcctggccttcgtcatcttgctgctggcgctcaggctgcggcgctggcacaagtcacgcctgctgcaggcttcaggaggcggcttgacaggagcgccggcgtcgcactttgtgggcgtggacggggtgcaggctttcctgcagacctattcccacgaggtttccctcaccacggactcgcggaagagtcacctgatcttcccccagcccaactatgcagacatgctcgtcagccaggagagctttgaaaaaagcgagccccttttgctgtcaggtgattcggtattttctaaagacagtcatgggttaattgagcaagccccgcccaacacggactggcgtttctctcaggcccagagacccggcaccagcggctcccaaaatggcgatgacaccggcacctggcccaacaaccagtttgacacagagatgctgcaagccatgatcttggcgtccgccagtgaagctgctgatgggagctccaccctgggagggggtgccggcaccatgggattgagcgcccgctacggrccccagttcaccctgcagcacgtgcccgactaccrccagaatgtctacatcccaggcagcaatgccacactgaccaacgcagctggcaagcgggatggcaaggccccagcaggtggcaatggcaacaagaagaagtcgggcaagaaggagaagaagtaacatggaggccaggccaagagccacagggyrgcctctccccaaccagcccagcttctccttacctgcacccaggcctcagagtttcagggctaacccccagaatactggtaggggccaaggccatgctccccttgggaaacagaaacaagtgcccagtcagcacctaccccttcccccccagggggttgaatatgcaaaagcagttccgctgggaacccccatccaatcaactgctgtacccatgggggtagtggggttactgtagacaccaagaaccatttgccacaccccgtttagttacagctgaactcctccatcttccaaatcaatcaggcccatccatcccatgcctccctcctccccaccccactccaacagttcctctttcccgagtaaggtggttggggtgttgaagtaccaagtaacctacaagcctcctagttctgaaaagttgsaagggcatcatgacctcttggcctctcctttgattctcaatcttcccccaaagcatggtttggtgccagccccttcacctccttccagagcccaagatcaatgctcaagttttggaggacatgatcaccatccccatggtactgatgcttgctggatttagggagggcattttgctaccaagcctcttcccaacgccctggggaccagtcttctgttttgtttttcattgtttgacgtttccactgcatgccttgacttcccccacctcctcctcaaacaagagactccactgcatgttccaagacagtatggggtggtaagataaggaagggaagtgtgtggatgtggatggtgggggcatggacaaagcttgacacatcaagttatcaaggccttggaggaggctctgtatgtcctcaggggactgacaacatcctccagattccagccataaaccaataactaggctggacccttcccactacataatagggctcagcccaggcagccagctttgggctgagctaacaggaccaatggattaaactggcatttcagtccaaggaagctcgaagcaggtttaggaccaggtccccttgagaggtcagaggggcctctgtgggtgctgggtactccagaggtgccactggtggaagggtcagcggagccccagcaggaagggtgggccagccaggccattcttagtccctgggttggggaggcagggagctagggcagggaccaaatgaacagaaagtctcagcccaggatggggcttcttcaacagggcccctgccctcctgaagcctcagtccttcaccttgccaggtgccgtttctcttccgtgaaggccactgcccaggtccccagtgcgccccctagtggccatagcctggttaaagttccccagtgcctccttgtgcatagaccttcttctcccacccccttctgcccctgggtccccggccatccagcggggctgccagagaaccccagacctgcccttacagtagtgtagcgccccctccctctttcggctggtgtagaatagccagtagtgtagtgcggtgtgcttttacgtgatggcgggtgggcagcgggcggcgggctccgcgcagccgtctgtccttgatctgcccgcggcggcccgtgttgtgttttgtgctgtgtccacgcgctaaggcgaccccctcccccgtactgacttctcctataagcgcttctcttcgcatagtcacgtagctcccaccccaccctcttcctgtgtctcacgcaagttttatactctaatatttatatggctttttttcttcgacaaaaaaataataaaacgtttcttctgaaaagctg

SEQ ID NO: 247 - DNA, 2632 bp, Homo sapiens
acgcgcctgaagcacaaagcagatagctaggaatgaaccatccctgggagtatgtggaaacaacggaggagctctgacttcccaactgycccattctatgggcgaaggaactgctcctgacttcagtggttaagggcagaattgaaaataattctggaggaagataagaatgattcctgcgcgactgcaccgggactacaaagggcttgtcctgctgggaatcctcctggggactctgtgggagaccggatgcacccagatacgctattcagttccggaagagctggagaaaggctctagggtgggcgacatctccagggacctggggctggagccccgggagctcgcggagcgcggagtccgcatcatccccagaggtaggaygcagcttttcgccctgaatccgcgcagcggcagcttggtcacggcgggcaggatagaccgggaggagctctgtatgggggccatcaagtgtcaattaaatctagacattctgatggaggataaagtgaaaatatatggagtagaagtagaagtaagggacattaacgacaatgcgccttactttcgtgaaagtgaattagaaataaaaattagtgaaaatgcagccactgaratgcggttccctctaccccacgcctgggatccggatatcgggaagaactctctgcagagctacgagctcagcccgaacactcacttctccctcatcgtgcaaaatggagccgackgtagtaagtaccccgaattggtgctgaaacgcgccctggaccgcgaagaaaaggctgctcaccacctggtccttacggcctccgacgggggcgacccggtgcgcacaggcaccgcgcgcatccgcgtgatggttctggatgcgaacgacaacgcaccagcgtttgctcagcccgagtaccgcgcgagcgttccggagaatctggccttgggcacgcagctgcttgtagtcaacgctaccgaccctgacgaaggagtcaatgcggaagtgaggtattccttccggtatgtggacgacaaggcggcccaagttttcaaactagattgtaattcagggacaatatcaacaataggggagttggaccacgaggagtcaggattctaccagatggaagtgcaagcaatggataatgcaggatattctgcgcgagccaaagtcctgatcactgttctggacgtgaacgacaatgccccagaagtggtcctcacctctctcgccagctcggttcccgaaaactctcccagagggacattaattgcccttttaaatgtaaatgaccaagattctgaggaaaacggacaggtgatctgtttcatccaaggaaatctgccctttaaattagaaaaatcttacggaaattactatagtttagtcacagacatagtcttggatagggaacaggttcytagctacaacatcacagtgaccgccactgaccggggaaccccgcccctatccacggaaactcatatctcgctgaacgtggcagacaccaacgacaacccgccggtcttccctcaggcctcctattccgcttatatcccagagaacaatcccagaggagtttccctcgtctctgtgaccgcccacgaccccgactgtgaagagaacgcccagatcacttattccctggctgagaacaccatccaaggggcaagcctatcgtcctacgtgtccatcaactccgacactggggtactgtatgcgctgagctccttcgactacgagcagttccgagacttgcaagtgaaagtgatggcgcgggacaacgggcacccgcccctcagcagcaacgtgtcgttgagcctgttcgtgctggaccagaacgacaatgmgcccgagatcctgtaccccgccctccccacggacggttccactggcgtggagctggctccycgctccgcagagcccggctacctggtgaccaaggtggtggcggtggacagagactcsggccagaacgcctggctgtcctaccgtctgctcaaggccagcgagccgggactcttctcggtgggtctgcacacgggcgaggtgcgcacggcgcgagccctgctggacagagacgcgctcaagcagagcctcgtagtggccgtccaggaccacggccagccccctctctccgccactgtcacgctcaccgtggccgtggccgacagsatcccccaagtcctggcggacctcggcagcctcgagtctccagctaactctgaaacctcagacctcactctgtacctggtggtagcggtggccgcggtctcctgcgtcttcctggccttcgtcatcttgctgctggcgctcaggctgcggcgctggcacaagtcacgcctgctgcaggcttcaggaggcggcttgacaggagcgccggcgtcgcactttgtgggcgtggacggggtgcaggctttcctgcagacctattcccacgaggtttccctcaccacggactcgcggaagagtcacctgatcttcccccagcccaactatgcagacatgctcgtcagccaggagagctttgaaaaaagcgagccccttttgctgtcaggtgattcggtattttctaaagacagtcatgggttaattgaggtgagtttatatcaaatcttctttcttttttttttttaa

SEQ ID NO: 248 - DNA, 2445 bp, Homo sapiens
atgggaaatagctccggatggargggcccagcagggcagaggcgaatgctatttctctwcctgctctctttgttagaccaggytctctccgaaccgatccgctacgctattcccgaggagctggacaggggctcgctggtagggaacctcgccaaggacctggggtttggcgtgggggatttacctactaggaacctgcgggttattgcagagaagaaattctttaccgtgagccccgaaaatgggaacttacttgtgagcgaccgtatagaccgagaggagatttgtggcaagaagtcgacgtgtgttctggaatttgaaatggttgctgaaawgcctttaaacttttttcatgtaactgtgctgatccaggatattaacgacaacccaccgacctttagccaaaatatcactgagctggaaatcagcgaactggctctcactggagccacatttgccctggaatctgcgcaagatcctgatgtaggtgtcaattcgstgcagcagtactacctcagccctgatccgcacttctctttgattcagaaggagaacytggatggcagtaggtacccagagctagtactgaaagcacccctggacagggaagagcagccacatcaccacctggtcctyacagctgtggatgggggcgagccctccagaagctgtaccacccagatcagggtaattgtcgcagatgcaaatgataaccccccagtatttactcaggacatgtacagggtcaatgttgcagagaacctgcccgctggctcctccgtattaaaagtgatggccattgacatggatgagggcatcaatgccgaaatcatctatgccttcatcaatattggcaaggaagtgagacaactgttcaagctggacagtaaaacgggggaactcaccactattggagaactggactttgaagagagagatagctacacaattggggtggaagcaaaggatggtggacatcacactgcatattgtaaagtacagatagatatttcagatgaaaatgacaatgccccggagataaccctggcttctgaatcccaacatatacaagaagatgctgagctggggactgccgttgccctgatcaaaacacatgatctagattctggatttaatggagaaatcctatgccaactaaaaggaaasttcccctttaaaatcgttcaagataccaaaaacacatacaggttggtgacagatggagccctggaccgggagcagatcccagaatacaatgtgacgatcacagctaccgacaaaggcaatccaccgctctcctccagcaagaccatcactctgcacatccttgatgtcaacgacaacgttcccgttttccaccaggcctcctacaccgtgcatgtagctgagaacaatcckcctggagcctccattgcgcatgtcagagcytcggatcccgacttgggacctaatggccttgtctcctactacatcgtggccagtgacctggagccgcgggagctgtcgtcctacgtgtccgtgagcgcgcggagcggggtggtgttcgcgcagcgagccttcgaccacgagcagctgcgtgccttcgagctcactctgcaggcccgcgaccagggctcgcctacgctcagcgccaacgtgagcctgcgcgtgttggtggacgaccgcaacgacaatgcaccgctggtgctgtacccagctctggggcccgaaggctctgcgctcttcgatatggtgmcgcgctctgcagagcctggctacctggtgaccaaggtggtggcggtggacgcagactcgggatacaacgcctggctgtcctaccacattgtgcaggccagcgagcccgggctgttcagcctgggcctgcgcacgggtgaggtgcgcacggcgcgtaycttgggcgacagkgaggccgcccgccagcgcctgctggtcactgtgcgtgatggaggacagcagcctctttcagccaccgtcatgctgcacctaatcttcgcagatagcttgcaagagatacaacctgaccttagcgaccgccccactccctctgaccctcaggcggagctacagtttcacctagtagtggcgttggccttgatctcagtgctcttcctcctcgcggtgattctggcaatctccctgcgcctgcgatgctcctccagacccgccactgagggctactttcagcctggtgtctgcttcaagactgtacctggagttctccccacctacagcgaaaggactttgccttattcctacaatccgtgtgctgcctcacattcctcaaacaccgagtttaaatttctcaatataaaggctgaaaatgctgcaccacaagatcttctatgtgatgaagcctcttggtttgaaagtaatgacaatccagaaatgccttctaattcaggcaatttgcaaaaggtgagtttcttcaaacctttccttccataa

SEQ ID NO: 249 - DNA, 2834 bp, Homo sapiens
aggcagagactgaacagccggcgagcaaatcaacggcatccagaaagccatgtcggactcggcgcccagcgcccaagcgctaacccgctgaaagtttctcagcgaaatctcagggacgatctggaccccgctgagaggaactgcttttgagtgagatggtcccagaggcctggaggagcggactggtaagcaccgggagggtagtgggagttttgcttctgcttggtgccttgaacaaggcttccacggtcattcactatgagatcccggaggaaagagagaagggtttcgctgtgggcaacgtggtcgcgaaccttggtttggatctcggtagcctctcagcccgcaggttccgggtggtgtctggagctagccgaagattctttgaggtgaaccgggagaccggagagatgtttgtgaacgaccgtctggatcgagaggagctgtgtgggacactgccctcttgcactgtaactctggagttggtagtggagaacccgctggagctgttcagcgtggaagtggtgatccaggacatcaacgacaacaatcctgctttccctacccaggaaatgaaattggagattagcgaggccgtggctccggggacgcgctttccgctcgagagcgcgcacgatcccgatgtgggaagcaactctttacaaacctatgagctgagccgaaatgaatactttgcgcttcgcgtgcagacgcgggaggacagcaccaagtacgcsgagctggtgttggagcgcgccctggaccgagaacgggagcctagtctccagttagtgctgacggcgttggacggagggaccccagctctctccgccagcctgcctattcacatcaaggtgctggacgcgaatgacaatgcgcctgtcttcaaccagtccttgtaccgggcgcgcgtcctggaggatgcaccctccggcacgcgcgtggtacaagtccttgcaacggatctggatgaaggccccaacggtgaaattatttactccttcggcagccacaaycgcgccggcgtgcggcaactattcgccttagaccttgtaaccgggatgctgacaatcaagggtcggctggacttcgaggacaccaaactccatgagatttacatccaggccaaagacaagggcgccaatcccgaaggagcacattgcaaagtgttggtggaggttgtggatgtgaatgacaacgccccggagatcacagtcacctccgtgtacagcccagtacccgaggatgcccctctggggactgtcatcgctttgctcagtgtgactgacctggatgctggcgagaacgggctggtgacctgcgaagttccaccgggtctccctttcagccttacttcttccctcaagaattacttcactttgaaaaccagtgcagacctggatcgggagactgtgccagaatacaacctcagcatcaccgcccgagacgccggaaccccttccctctcagcccttacaatagtgcgtgttcaagtgtccgacatcaatgacaaccctccacaatcttctcaatcttcctacgacgtttacattgaagaaaacaacctccccggggctccaatactaaacctaagtgtctgggaccccgacgccccgcagaatgctcggctttctttctttctcttggagcaaggagctgaaaccgggctagtgggtcgctatttcacaataaatcgtgacaatggcatagtgtcatccttagtgcccctagactatgaggatcggcgggaatttgaattaacagctcatatcagcgatgggggcaccccggtcctagccaccaacatcagcgtgaacatatttgtcactgatcgcaatgacaatgccccccaggtcctatatcctcggccaggtgggagctcggtggagatgctgcctcgaggtacctcagctggccacctagtgtcacgggtggtaggctgggacgcggatgcagggcacaatgcctggctctcctacagtctcttgggatcccctaaccagagcctttttgccatagggctgcacactggtcaaatcagtactgcccgtccagtccaagacacagattcacccaggcagactctcacggtcttgatcaaagacaatggggagccttcgctctccaccactgctaccctcactgtgtcagtaaccgaggactctcctgaagcccgagccgagttcccctctggctctgccccccgggagcagaaaaaaaatctcaccttttatctacttctttcyctaatcctggtttctgtggggttygtggtcacagtgttcggagtaatcatattcaaagtttacaagtggaagcagtctagagacctataccgagccccggtgagctcactgtaccgaacaccagggccctccttgcacgcggacgccgtgcggggaggcctgatgtcgccgcacctttaccatcaggtgtatctcaccacggactcccgccscrgcgacccgctgctgaagaaacctggtgcagccagtccactggccagccgccagaacacgctgcggagctgtgatccggtgttctataggcaggtgttgggtgcagagagcgcccctcccggacaggtaaggtttagcaagtcatgcttgaccctgttagtgcttttttattcctacatcatattgaggaaggaatggagctgtttttttagtgatgaagatgttttcctggtgatgcattcacactttcaactggcycttcctagatcaaagttagtgcctttgtgagatggtggcctgccagagtgtggtttgtggtcccatttcagggggaagatacttgactcatctgtggacctaattcacatcctcagc

SEQ ID NO: 250 - DNA, 2436 bp, Homo sapiens
atgaaagcgagctcagggaggtgcgggctggtgcggtggctgcaggtactgttgcccttcctgttgtctttgttccscggggctctcccagtccagatccgctattcaattccagaggagctggccaaaaactcggtcgtaggaaacctcgccaaggatctggggctcagcrtccgggacttgccagcccggaagctgcgggttagcgcggagaaggaatatttcacagtaaacccagaaagcggagacttacttgtgagtgacagaatagaccgagaacagatatgcgggaagcagcctctgtgtgttctggatttcgatactgtcgctgaaaatccactaaatattttctacatarcagtaattgtgcaggatataaatgataataccccgctattcaaacagactaagattaatttaaaaattggcgaatccactaagccaggtacaacatttccacttgacccagccctggattcagatgttggtcctaactcactacaaagataccaccttaatgacaacgagtactttgatctcgctgagaaacagactccagatggtcgtaaatatcctgagttgattctaaaacactctctggacagagaagagcacagtttacatcaattggtcctcacagctgtggatggcggagacccacctcaaagtggcacgacccaaatccgaatcaaagtcacggatgccaacgataaccctccagtgttcagccaggacgtgtacagggtcaccctgagggaggacgtgccgccgggcttctttgtgcttcaagtgacagccaccgaccgggatgaaggcataaacgcagagatcacctactcctttcataatgtggacgaacaagtgaaacactttttcaacttaaatgaaaaaacaggagaaatcacgacaaaggatgatttggattttgagattgcaagtagttacactctgagtatcgaagcaaaagatcctggagatctagcagcccactgcagtatccaagttgaaattcttgatgacaacgattgtgcacctgaagttattgtgacttcagtatctactcccctaccggaggattcgccaccaggaacagtgatcgccttgataaaaacgagagacagagactctggagaaaatggagaagtttactgccaagtgttgggaaatgccaagtttattttgaaatcttcctcaaagaactattacaaactagtgwcagacggcgctctggaccgggaggagatcccagaatacaatctcaccatcacagccaccgacgggggcaagccgcccctctcctccagcataattgtcaccctgcacatctccgacgtcaacgataatgccccagttttccaacagacttcctacatggttcacgtggcagagaacaatcctcctggcgcctctatcgctcaaatcagtgcctctgaccctgacttgggccccagtggccaagtttcctactccatcgtagcgagcgacctgaagccgcgggagattttatcctacgtgtccgtgagcgcgcaragcggggtggtgttcgcgcagcgcgccttcgatcatgagcagctgcgcgccttcgagctcacactgcaggcycgcgaccagggctcgcccgcgctcagcgccaacgtgagcctgcgcgtgttagtgggcgacctcaatgacaatgcgccacgggtgctgtaccccgcgctggggcctgatggctccgccctcttcgatatggtgccacgcgccgcagagcccggctacctggtgaccaaggtggtggcggtggacgcagactcaggacacaacgcttggctgtcctaccacgtgctgcaggccagcgagcccgggctcttcagcctggggttgcgcacgggtgaggtgcgcacagcgcgtgccttgggcgacagggacgcggcccgccagcgcctgctggtcgctgtgcgtgatggaggacagccgccactctccgctacggccacgctgcacctaatcttcgcggatagcctgcaagaggtattgccagacctcagcgaccgccsggagccctctgacccccaggcaraactgcagttttacctggttgtggccttggccttgatctcagtgctcttcttcctcgcggtgattctggcaatctccctgcgcctgcgactctcttccaggtcagatgcttgggactgttttcagcctggtctcagctccaagcctggacctggggttctccccaattacagtgagggtacattgccctattcctacaacctgtgtgttgcctcacaatcagccaagacagagttcaattttctgaacataaccccggaattggttcccgcgcaagatctcgtctgtgacaatgcctcttgggaacaaaatacaaatcatggagccgctggggtcccttttgcctcagatactattttgaaggtgagctttaattaa

SEQ ID NO: 251 - DNA, 2745 bp, Homo sapiens
cgccggccgaaccgcgccagagctggcgcggggaaagggagataggtgtctccagctgctgtggctgtttggggcgggtcggcttcatccgcgtctcaggagcaagtagagaattagcgggcggcagcaatgctccgcaaggtgagaagctggacagaaatctggcggtgggctacccttttgttcctcttttaccacctgggttacgtttgtgggcagatccgctacccggtcccagaggagtcacaggaagggacttttgtagggaatgtcgctcaagatttcctgctggatacggacagtctgtcagctcgcaggctgcaggtcgctggagaggtgaaccaaagacacttccgtgtggatttggacagcggagccctgctcatcaagaacccaatcgaccgagaggcactgtgtgggctcagtgccagctgcatcgtgcccctggagtttgtcaccgaaggtcctttggaaatgtaccgagcagaggtagagatcgtagatgtgaatgatcacgccccccgttttccgcggcagcagctggacttggaaattggggaggcagctcctccaggacagcgtttcccgttggaaaaggctcaggatgcagatgtggggagcaattcgattagcagctataggctgagctccartgaacactttgcactggatgtgaagaagcgcagcgacggcagcctggtcccagagctgctcctggagaagcctttggatcgagagaagcaatcggactaccgcctggtgctgactgctgtcgatggagggaacccgccgagatctggcaccgcagagctccgggtatccgtgctggacgtaaacgacaacgccccagccttccagcaatccagctacaggattagtgtgttggagagcgcaccagcgggcatggtgctcatccagctcaatgcctcagacccggacctgggtcccagtggtaacgtcaccttttatttcagyggtcatacccctgatcgtgtaagaaacctctttagcctgcaccccactactggaaagcttactcttttggggcccctagactttgagagtgagaattactatgaatttgatgtgcgggctcgcgatgggggttctccagccatggagcaacattgcagccttcgagtggatctgctggacgtaaatgacaatgccccttacatcacagtgacctcagagcttggaaccctccccgagagtgcagaacctggcactgtggtggcacttatcagtgtgcaggatccagactcagggtcaaacggagatgtgagcctccgcattcctgaccacttgccatttgccctcaagtctgccttcaggaaccagttctccctggtgactgctggacccttggatcgagaggccaaatctagctatgacatcatggtcactgcttctgatgctgggaaccctcctctcagtacccacagaactattttcctcaatatttcagatgtgaatgataatccaccctctttctttcagaggtcacatgaggtgtttgttcctgagaacaatcgcccaggggacctgctttgctcccttgcagcctctgacccagactctggcttgaatgcgcttatctcctactcactcctggagcccaggaatcgagatgtatcagcttcctctttcatctctctgaacccccagacaggagctgttcatgctactcgatcctttgactatgagcaaacccagacactgcagtttgaggtgcaggcccgggatcggggcaacccaccccttagcagcactgtaacagttcgtctatttgtgctggacctcaatgacaatgctccagctgtgctccgtcctcgggcccggcctggttccttatgtccccaagcactgcctccatcagttggtgctggccacctaatcacaaaggtgactgctgtggacttggattcaggttacaatgcttgggtttcctatcagctcctggaggccccagatcccagcctgtttgcagtctctcgatatgctggggaggtgcggacggctgttcctatcccagctgacctcccaccacagaagctggtcattgtggtaaaggatagtggtagtccaccactctctacctctgttactctcttagtgtccttagaggaagacactcatccagttgtcccagatcttcgagaatcttcagctccaagggaaggagaatctcgtctaaccctctacttggctgtgtccctagtggcaatttgctttgtctcctttggctcattcgtggcactactctctaagtgtcttcgtggggcagcctgtggagtcacatgctttcctgctggcacctgtgcctgtctcaccagatctcgaaggagggaggggcttcccccttccaatgggatcctccgaatccagctagggtcagatgaccctatcaagtttgttgatgtgggaggccactctcatggctgtacacccttggcttctgcacccactcggagtgatagcttcatgatggtgaagtcacccagtgcacctatggcaggggagcctgttcgcccaagctgcccaccctctgatcttctctatgggctagaggtgagacctttgcaggctcaacaaatgcttgagggttattctgatccaggcatatggctaggccatgtcctagagagtactggcctctcagtaagtgcccatagtgatgtcaccatttttgtaagaggtaactatgtggtagacgctgtgctttgtaactgtttygtgaattaa

SEQ ID NO: 252 - DNA, 4816 bp, Homo sapiens
agcacaaagcactggctctggagctttatgaaagcttcaagcggaagccctgagagctctggctgtgaatgcactttattttggacccagaagatcctggggctcctcaggcctcgacagagggaaaaccgaagcacaggcgactccgcggcggggttgtaatggcggcgcctcctgctcgcccagaccacacccggctgctccagatctgccttctcctgggggttctggtggaaatcagggccgaacagattctctactcggtgtttgaggagcaggaagaaggctcagtggtgggcaacatcgccaaggacctggggttggcgccccgggagctggcggagcgcggagtccgcatcgtctccagaggtaggacgcagcttttcgccctgaacccgcgcagcggcaccttggtcaccgcgggtaggatagacagggaggagctctgcgacagatctccaaactgtgtgacaaacctggagattcttctagaagatacagtgaagattttgcgggtagaggtggaaataatcgatgttaatgataacccacccagttttgggacagaacagagggaaataaaagttgctgaaaatgaaaatcctgggrcaagatttcctcttcctgaagcttttgatccggatgtaggtgtaaactccctgcagggttaccagctcaactcaaacggttacttttccctggacgtgcaaagtggggccgatgggattamgtacccagagctggtgctggaacgcgctctagatcgcgaggaagaggcggttcaccacctcgttctcacggccttcgatggaggtgacccggttcgctctggcactgccaggattctcataatacttgtggataccaacgataatgctcccgtgttcactcakcccgagtaccacgtaagtgttcgtgagaacgttcctgtaggcactcggctactcaccgtaaaagccactgatccagatgaaggagccaatggagacgtgacgtattctttccggaaagtaagagacaaaatatcacagctatttcagttgaattctctgagtggggatataacaatattggggggtctagattatgaggactctggattctatgacatagatgtagaagcccatgatgggcctggtctccgagctagaagcaaggtactggtgacagttctggatgaaaatgacaacgcaccagaagtcacagttacatctctcaccagctcagtccaggaatcttcttccccgggtacagtaattgcacttttcaacgtgcatgacagtgactcaggaggaaatggcctagtcacatgttctattccagataatctgccattcacacttgaaaagacctatggaaattattatcggttgttgacacacagaacactggacagggaagaagtctcagaatataacatcactgtaactgccactgaccagggaactcctccactgtctacagaaactcatatttcactgcaagtgatggacatcaatgacaacccacccactttccctcatgcttcctactctgcttrcattcstgaaaacaaccccagaggagcctccatcttatctatgactgctcaagaccctgacagtggtgacaatgcccgaatcacttactccctggccgaagacaccttccagggtgcacctctgtcctcctatgtctccatcaactccaatacagggatcctatatgctctttgctccttcgactatgagcagtttagagacctgcagctgctgatgacagccagtgacagtggagaccctccactcagcagcaatgtgtcactgagcctctttgtgctggaccagaacgacaatgtccctgagatcctgtaccccaccttccctackgatggctccactggtgtggagctggcaccccgctccgcagattccggctacctggtgaccaaagtggtggcagtggacagagactcaggtcagaatgcctggctgtcctacagcctactcaagtccagcgagccgggactatttgcagtggggctgcacacaggcgaggtgcgcaccgcacgggccctgctggacagagacgcgctcaagcagargcttgtagtggtcgtccaggaccatggccagccccctctctcggccaccgtcacactcactgtggctgtggccgacagcatcccagatgtcctggctgacttgggcagcctcaagccttcagcasacccagacgactcgggcctcacactctatctcgtggtggcagtggccgctgtctcctgcgtcttcctggcttttgtcacggtgctgctagcactcaagctgagacgctggcacaagtcacgcctgcttcacgctgaaggcagcaggttggcaggtgtgccygcctcgcactttgtgggcgtggacggggttcgggctttcctgcagacctattcccacgaggtctccctcaccgcrgactcgcggaagagtcacctgatcttctcccaacccagctatgcagacacgctcatcagccgsgagagttgtgagaaaagcgagcctcttctgataactcaggatttacttgaaacaaaaggagaccctaatcttcaggtgagtcaatcttataatagatcataccacactgaaatatagacaaagagttgtgtaaatgtctctcattttatatgtaatatatcaaataaagttgcctcttttaatattttattgctttaaagaaaactggtggatgaccttccaataatgatcaacagtatttaccacacaaaaatgttgtttattacttatcctttttggtcttcattcagttgtagtttcagccagaattttctaattttacaactctgagccacctcatttccttaaatttccttttctgtgctgggtgtggtggctcacacctgtaatcctaacactttgggagtgtgaggaggayggattgcctgagctcaggagttcgagaccagtctgggcaacatggtgaaacccagtctctactaaaatacaaaaagttagctaggcgtggtggtgtgtgcccgtagtcccagctaccctggaggctgaggcatgagaattgcttgaacctgggaggcagaggttgcaatgagctgagatcatgacactgtactccagcctgggcaacagagcaagcctctgtctccaaaaagtaaaataaaataaagtaaaataaagaataaatttccttttctcttaggtgttcctgaaaagatacaagagacctgtaaaatagaaggcaattgtgtaaattcacatttacaatattctttctcatgaagctattgttggatctggactgagggttttttaatttcctattttcacactctaccatgctttgcttgaagtttacttttccttccttgaaagggtattttccattataacaggcaacgtcaatttaagaatactggcaatttgtgagtttaacttttagatataactttaacaggatattttctcaatgaactggtatatttcaaatattttcttgttgctgttctgagatgcaccagaagtgactatgtgtgattcctctggtgcactcctgtgattatgagaaatatttccaagctaatttcagtcatatataagtagattctaggagtaactttaataatttttaaattgcttatcatgacatcactattgagactttcttgatttccaaggaaaatataagtttttggagtcttttctcttgtcatcatgtgagcctctttcaaaggttgagttamttgggttctggactgatatgatttacgctgcttagtaaggtggcctcatccctattgctacaaattgctttcagatatttctgtcatcatgtggctctgggwttattttatatgagggaaaatattttgtgtgtaggggatatacaacacttttgttctttgtgctttcatttaggttctgtgagaattcaaaattcatgaatgcatatgcttacacaaattagtgtaatttgataactggaagttgtagtgatagactgtggaatatgcctcaatttgacttacaaaggagagttttagtttctacatggttttgtattcatagaaagttgtggtgcaatacatagagtaagctggaatatgatatgatgcagttacctggcttggggagcagaaagcagaaataacaagtgaatgttgagagacaacttacatctgaggagagattgtttaaagtaattaagccataaaatataatttggaaatgctcaattggtctgaaactgtgtcaagcatattcaggtgttggcattaggaatatattccagaatgagagtgccacatgttttaaaggcctaggaaagcagtagataatttataacctaaaatcaaattttttaaaaaatgtgtttttgttagaatgggcagtgggtttcttttagcaaataacaattttgattaaacaaattgttgtatattcatattacggactactagataactatattatgggccactagataactataagaaataaataggaaagctctctatgtactgatatgatctttaagatataacaactaaaaaagcaatgtgcagaatatggtatgttgtatgcttacatttgtgtaaagaaggagacagaatatttataaaaatccgttgccctatacaagacatatctccrgaaggatacctaagaaactttaacactcatttcccctgtgaaagcatttctcctcatctaaagcagagatgaaaggaagaacctatgctgaatgcatcttttgaatttggaactatatgaatatttcacatattttaaaacaaatgaagactttataaatt

SEQ ID NO: 253 - DNA, 2433 bp, Homo sapiens
atgcagagagccagagaagccgaaatgatgaaaagtcaggtactgtttcccttcctgctgtctttgttctgcggggccatctcccagcagatccgatacacgattccagaggagctagccaacggctcacgggtggggaaacttgccaaggatctggggctcagtgtccgggagttgccaactcgaaaactgcgggttagtgcagaggattatttcaacgttagtttggagagcggggatttgttagtgaacggtaggatagatcgagagaagatttgcggaaggaaacttgagtgtgcactagaattcgaaacggtcgctgaaaacccaatgaatgttttccacgtggttgttgtaatccaagatattaatgacaatgcaccacgtttcgttgcaaaaggcattgacttagaaatttgtgagtcagccttacccggggtaaaattctctctggattctgctcaagatgcagatgtggaaggcaattcactgaagttatacaccatcaaccccaatcaatacttctctctgtcaacgaaggaaagtcctgatggaaktaaatatccggtattactgctggaaaaacctctagacagggaacatcagagctctcatcgcttaatcctgactgccatggatggcggggacccgcctctaagcggcaccacccatatctggatccgagttacggatgccaatgataatgctcccgtgtttagccaggaggtatacagggttagcctccaagaaaacgtaccgtggggaacctccgtgctgcgggtgatggccacagaccaggatgagggcattaatgcagagatcacctatgccttcctcaattccccaataagtaccagcctcttcaatctcaatccaaatactggcgacatcacaaccaatggcacattggattttgaagagacaagtagatatgtgttgagtgtggaagctaaggatggaggagtacacacagctcactgtaatgttcaaatagaaattgttgacgagaatgacaatgccccagaggtgacattcatgtccttctctaaccagattccagaggattcagaccttggaactgtaatagccctcataaaagtgcgagacaaggattctgggcaaaatggcatggtgacatgctatactcaggaagaagttcctttcaaattagaatccacctcgaagaattattacragctggtgattgctggagccctaaacmgggagcagamagcagactacaacgtcacaatcatagccaccgacaagggcaaaccagccctttcctccaggacaagcatcaccctgcacatctccgacatcaacgacaaygcacctgttttccatcaggcctcctatgtggtccacgtgtctgagaacaacccacctggcgcctccattgcacaagtaagcgcctccgacccggatttgggacccaacggcagagtctcctactctattctggccagtgacctggagccgcgggagctgttgtcctacgtgtccgtgagcccgcagagcggggtggtkttcgcgcagcgcgccttcgaccacgagcagctgcgcgccttcgagctcayrctgcaggccagggaccagggctcccccgcgctcagcgccaacgtgagcctgcgcgtgttggtgggcgacctcaatgacaatgcgccacgggtgctgtaccccgcgctggggcctgatggctccgccctcttcgatatggtgccacgcgccgcagagcccggctacctggtgaccaaggtggtggcggtggacgcagactcaggacacaacgcttggctgtcctaccacgtgctgcaggccagcgagcccgggctcttcagcctggggttgcgcacgggtgaggtgcgcacagcgcgtgccttgggcgacagggacgcggcccgccagcgcctgctggtcgctgtgcgtgatggaggacagccgccactctccgccaccgccacgctgcacctaatcttcgcggatagcctgcaagaggtattgccagacctcagcgaccgccctgagccctctgacccccagacrgaactgcagttttacctggttgtggccttggccttgatctcagtgctctttctcctcgcggtgattctagcgatcgccctgcgcctgcgacgttcctccagcctcgacactgagggctgctttcaaaccggtctctgctccaagtctgggcccggggttcctcccaaccacagcgaggggactttgccctattcctacaatctatgtattgcctctcattctgcaaagacagagtttaattctctcaacctgacaccggaaatggctccccctcaggatctgctgtgtgatgatccttctatggttgtatgtgccagtaatgaagatcacaaaatcgcttatgacccttctttgtcttcgcacgtgagtttctgcaaatctagttaa

SEQ ID NO: 254 - DNA, 2490 bp, Homo sapiens
atgaccaattgcctgagtttccgaaatggcagaggactggccctgctgtgcgcgctcctggggacgctgtgcgaaacaggatccggtcagatccgctactcggtgtctgaggagctagataaaggttccttcgtgggcaacatcgctaacgacctggggctagagccccgggagctggcggagcgcggagtccgcatcgtctccagaggtaggacgcagcttttctctctgaatycgcaaagcggcagcttggtcaccgcggagaggatagaccgggaggagctctgcgctcagatcccgctgtgtctggtaaaaattaacattctggttgaggataaattgaaaatttttgaagtagaaatagaaattaaagatattaatgataatgctcctaatttcccaacagaggaattggaaataaaaattggtgaactaacggttcctggaacccgatttccamttaaaactgcttttgacccagatgtaggcattaactccctgcagaactacaagcttagccccaatgactacttytctctggctgtgaatagcgtctctgagggrgccaagtatccagagctggtgctggagcgggccctggaccgtgagaaaaaagaaattcaccagcttgtcctggttgcctctgatggtggcgaccstgtccactctggcaacttgcacatccaagtgatagtcctggatgcaaatgacaacccaccaatgtttactcagcctgagtaccgtgtgagtgtttgggagaacgtgcctgtgggtacccggctgctcacggtgaatgccactgaccctgacgagggattcaatgctcaagtgtcttatattctagataaaatgcctgggaaaatcgctgagattttccatcttaactcagtgagtggagaagtatcaatattaaaaagtctagattatgaggatgccatgttctatgaaattaaaattgaagcacaggatggaccaggtcttctttcaagagccaagattctagtcacggttctggatgtgaatgacaatgctccagaaattacaatcacgtctctcacaagctcagtcccagaagagggcaccgttggaagagaaattgctcttatcgacgtgcatgaccgagattctgggcagaatgggcaggttgaagtttttgtcctgggaaatctgccatttaagttagaaaaatcaatagatcaatattaccgcttagtgacggccacatccctggaccgcgaacaaatatcagaatataacattagtctgagagcctcagatgggggaagcccgccactstccacagaaactcacatcaccctgcatgtgattgacatcaatgacaacccacccaccttccctcatttatcctactccgcctacattccagaaaacaaccccagaggagcctccatcttctcagtgacagcccaggacccagatagcaacaacaacgcccgcatcacttatgcattgaccgaggacactctccagggggcgcccctgtcctccttcgtctctatcaactccaacactggcgtcctatacgcgctgagatccttcgactacgagcaatttagagacttaaagctactggtgacagccagygacagcgggaaccctccactcagcagcaacgtgtckctgaacctrttcstgctggaccagaacgacaacgcgcccgagatcctgtaccccgccctccccacagacggttccactggcgtggagctggcgccycgctccgcagagcccggctacctggtgaccaaggtggtggcggtggacagagactcgggccagaacgcctggctgtcctaccgcctgctcaaggccagcgagccgggactcttctcggtgggtctgcacacgggcgaggtgcgcacggcgcgagccctgctggacagagacgcgctcaagcagagcctcgtggtggccgtccaggaccacggccagccccctctctccgccactgtcacgctcaccgtggccgtggccgacaggatccccgacatcctggccgacctgggcagcctcgagccctccgccaaacccaacgattcggacctcactctgtacctggtggtggcggtggccgcggtctcctgcgtcttcctggccttcgtcwtcgtgctgctggcgctcaggctgcggcgctggcacaagtcacgcctgctgcaggcttcgggaggcggcttggcgagtacgcccggctcgcactttgtgggcgyggacggggttcgggctttcctgcagacctrttcccacgaggtctccctcactgcggactcgcggaagagccacctgattttcccccagcccaacyatgcggacacgctcatcagccaggagagctgtgagaaaagcgagcctcttctgataactcaggatttacttgaaatgaaaggagattccaacctacttcaggtgagtttatttatttctttgattattaagaacaaatatgagaatgtggttattataaagctttaa

SEQ ID NO: 255 - DNA, 4766 bp, Homo sapiens
aggcagagactgaacagccggcgagcaaatcaacggcatccagaaagccatgtcggactcggcgcccagcgcccaagcgctaacccgctgaaagtttctcagcgaaatctcagggacgatctggaccccgctgagaggaactgcttttgagtgagatggtcccagaggcctggaggagcggactggtaagcaccgggagggtagtgggagttttgcttctgcttggtgccttgaacaaggcttccacggtcattcactatgagatcccggaggaaagagagaagggtttcgctgtgggcaacgtggtcgcgaaccttggtttggatctcggtagcctctcagcccgcaggttccgggtggtgtctggagctagccgaagattctttgaggtgaaccgggagaccggagagatgtttgtgaacgaccgtctggatcgagaggagctgtgtgggacactgccctcttgcactgtaactctggagttggtagtggagaacccgctggagctgttcagcgtggaagtggtgatccaggacatcaacgacaacaatcctgctttccctacccaggaaatgaaattggagattagcgaggccgtggctccggggacgcgctttccgctcgagagcgcgcacgatcccgatgtgggaagcaactctttacaaacctatgagctgagccgaaatgaatactttgcgcttcgcgtgcagacgcgggaggacagcaccaagtacgcsgagctggtgttggagcgcgccctggaccgagaacgggagcctagtctccagttagtgctgacggcgttggacggagggaccccagctctctccgccagcctgcctattcacatcaaggtgctggacgcgaatgacaatgcgcctgtcttcaaccagtccttgtaccgggcgcgcgtcctggaggatgcaccctccggcacgcgcgtggtacaagtccttgcaacggatctggatgaaggccccaacggtgaaattatttactccttcggcagccacaaycgcgccggcgtgcggcaactattcgccttagaccttgtaaccgggatgctgacaatcaagggtcggctggacttcgaggacaccaaactccatgagatttacatccaggccaaagacaagggcgccaatcccgaaggagcacattgcaaagtgttggtggaggttgtggatgtgaatgacaacgccccggagatcacagtcacctccgtgtacagcccagtacccgaggatgcccctctggggactgtcatcgctttgctcagtgtgactgacctggatgctggcgagaacgggctggtgacctgcgaagttccaccgggtctccctttcagccttacttcttccctcaagaattacttcactttgaaaaccagtgcagacctggatcgggagactgtgccagaatacaacctcagcatcaccgcccgagacgccggaaccccttccctctcagcccttacaatagtgcgtgttcaagtgtccgacatcaatgacaaccctccacaatcttctcaatcttcctacgacgtttacattgaagaaaacaacctccccggggctccaatactaaacctaagtgtctgggaccccgacgccccgcagaatgctcggctttctttctttctcttggagcaaggagctgaaaccgggctagtgggtcgctatttcacaataaatcgtgacaatggcatagtgtcatccttagtgcccctagactatgaggatcggcgggaatttgaattaacagctcatatcagcgatgggggcaccccggtcctagccaccaacatcagcgtgaacatatttgtcactgatcgcaatgacaatgccccccaggtcctatatcctcggccaggtgggagctcggtggagatgctgcctcgaggtacctcagctggccacctagtgtcacgggtggtaggctgggacgcggatgcagggcacaatgcctggctctcctacagtctcttgggatcccctaaccagagcctttttgccatagggctgcacactggtcaaatcagtactgcccgtccagtccaagacacagattcacccaggcagactctcacggtcttgatcaaagacaatggggagccttcgctctccaccactgctaccctcactgtgtcagtaaccgaggactctcctgaagcccgagccgagttcccctctggctctgccccccgggagcagaaaaaaaatctcaccttttatctacttctttcyctaatcctggtttctgtggggttygtggtcacagtgttcggagtaatcatattcaaagtttacaagtggaagcagtctagagacctataccgagccccggtgagctcactgtaccgaacaccagggccctccttgcacgcggacgccgtgcggggaggcctgatgtcgccgcacctttaccatcaggtgtatctcaccacggactcccgccscrgcgacccgctgctgaagaaacctggtgcagccagtccactggccagccgccagaacacgctgcggagctgtgatccggtgttctataggcaggtgttgggtgcagagagcgcccctcccggacagcaagccccgcccaacacggactggcgtttctctcaggcccagagacccggcaccagcggctcccaaaatggcgatgacaccggcacctggcccaacaaccagtttgacacagagatgctgcaagccatgatcttggcgtccgccagtgaagctgctgatgggagctccaccctgggagggggtgccggcaccatgggattgagcgcccgctacggrccccagttcaccctgcagcacgtgcccgactaccrccagaatgtctacatcccaggcagcaatgccacactgaccaacgcagctggcaagcgggatggcaaggccccagcaggtggcaatggcaacaagaagaagtcgggcaagaaggagaagaagtaacatggaggccaggccaagagccacagggyrgcctctccccaaccagcccagcttctccttacctgcacccaggcctcagagtttcagggctaacccccagaatactggtaggggccaaggccatgctccccttgggaaacagaaacaagtgcccagtcagcacctaccccttcccccccagggggttgaatatgcaaaagcagttccgctgggaacccccatccaatcaactgctgtacccatgggggtagtggggttactgtagacaccaagaaccatttgccacaccccgtttagttacagctgaactcctccatcttccaaatcaatcaggcccatccatcccatgcctccctcctccccaccccactccaacagttcctctttcccgagtaaggtggttggggtgttgaagtaccaagtaacctacaagcctcctagttctgaaaagttgsaagggcatcatgacctcttggcctctcctttgattctcaatcttcccccaaagcatggtttggtgccagccccttcacctccttccagagcccaagatcaatgctcaagttttggaggacatgatcaccatccccatggtactgatgcttgctggatttagggagggcattttgctaccaagcctcttcccaacgccctggggaccagtcttctgttttgtttttcattgtttgacgtttccactgcatgccttgacttcccccacctcctcctcaaacaagagactccactgcatgttccaagacagtatggggtggtaagataaggaagggaagtgtgtggatgtggatggtgggggcatggacaaagcttgacacatcaagttatcaaggccttggaggaggctctgtatgtcctcaggggactgacaacatcctccagattccagccataaaccaataactaggctggacccttcccactacataatagggctcagcccaggcagccagctttgggctgagctaacaggaccaatggattaaactggcatttcagtccaaggaagctcgaagcaggtttaggaccaggtccccttgagaggtcagaggggcctctgtgggtgctgggtactccagaggtgccactggtggaagggtcagcggagccccagcaggaagggtgggccagccaggccattcttagtccctgggttggggaggcagggagctagggcagggaccaaatgaacagaaagtctcagcccaggatggggcttcttcaacagggcccctgccctcctgaagcctcagtccttcaccttgccaggtgccgtttctcttccgtgaaggccactgcccaggtccccagtgcgccccctagtggccatagcctggttaaagttccccagtgcctccttgtgcatagaccttcttctcccacccccttctgcccctgggtccccggccatccagcggggctgccagagaaccccagacctgcccttacagtagtgtagcgccccctccctctttcggctggtgtagaatagccagtagtgtagtgcggtgtgcttttacgtgatggcgggtgggcagcgggcggcgggctccgcgcagccgtctgtccttgatctgcccgcggcggcccgtgttgtgttttgtgctgtgtccacgcgctaaggcgaccccctcccccgtactgacttctcctataagcgcttctcttcgcatagtcacgtagctcccaccccaccctcttcctgtgtctcacgcaagttttatactctaatatttatatggctttttttcttcgacaaaaaaataataaaacgtttcttctgaaaagctg

SEQ ID NO: 256 - DNA, 4872 bp, Homo sapiens
agaatgggctctaggcgccgctgctcaccaatcagggaatgggaagctgcgcgccattgagtccctccctcccccgcctctaccacacaaagcggaatgagatggataytcacagatcctgacactggagacttagaagtattttccttcgctttctgatatattttggatrtagtcggcctaggacttcatagatacataagccgattcacaaccaaccagctcgagaaaccgcggaatatcggcttagagcctgccatggcgaatcggctacagcgcggggaccgcagtcggctgctgctgctgctgtgcattttcctggggacgctgcgggggttccgggccaggcagatccgatattcggtgccagaagagaccgaaaagggctccttcgtgggcaatatctccaaggacctggggctggagccccgggagctggcgaagcgcggagtccgcatcgtctccagagggaagacacagcttttcgctgtgaatccgcgaagcggcagcttgatcacggcaggcaggatagaccgggaggagctctgtgagacggtgtcctcctgtyttttaaatatggaacttctcgtggaagacaccttgaagatttacggagtggaggtggaaataatagatattaatgataacgcccccagcttccaggaggacgaagtggagataaaagtcagtgagcacgcaattcctggggcgcgatttgctcttcctaatgctagggatccagatgtgggcgtgaactccctmcagagctaccagctcagccctaataattacttttccttgcaactgcggggcagaacggatggggccaagaatccagagctagtactggagggaagcctggaccgagagaaagaggctgctcacctgctcctcctcacagctttagatggaggcgatcccatccgaaagggcgcagttcccattcgtgtggtggtcctcgatgtaaatgatcacatcccaatgtttacacagtccgtatatcgcgtgagtgttccagaaaacatcagctccggaactcgggtgctgatggttaatgcaacggatccagacgagggaatcaacggggaagtaatgtattcatttcggaacatggaaagcaaggcttctgaaatattccaattggattcacaaactggagaagttcaagtacgggggtctctggattttgaaaaatatagattctatgagatggaaattcaaggccaagatggtggaggtctctttaccaccacgacgatgttgatcactgttgtggatgtgaatgataacgctccagaaataactatcacctcttctattaattcaattctggaaaactctcctccaggtacagtgattgctcttctaaatgtgcaagatcaagattctggagaaaatggtcaagtctcctgttttattcctaaccacctgccttttaaattagaaaagacttatggaaattattacaaattgataacaagcagagtgctggacagggagttggtccagagctacaatataacgttgacagccacagaccagggaagcccgcctttgtctgcagaaactcatgtctggctgaatgtggcagatgacaacgataaccctcccgtttttcctcactcctcttactctgcctacattcccgaaaacaaccccaggggtgcctccatcttctcagtgaccgccctcgacccggacagcaaacagaatgccctggtcacttactctctgacggatgacactgtccagggggtgcctctgtcctcctatgtctctattaactccaacactggtgttctctatgccctacaatccttcgactatgagcagtttcgagacttagaactgagagtgatagcrcgtgacagcggggacccgcccctcagcagcaacgtgtcgctgagcctgttcgtgctrgaccagaacgacaatgcgcccgagatcctgkaccctgccctycccacagacggstycactggcgtggagctggcgccccgctctgcggaacctggctacctggtgacyaaggkggttgcggtggacaaagattcaggccagaacgcctggctgtcctatcgcctgcttaaggccagcgagccgggactcttcgcggtgggggagcacacgggcgaggtgcrtacagcgcgggcactgctggacagagacgcgctcaagcagagcctygtggtggccgtccaggaccacggccagccccctctctcggccaccgtcacgctcaccgtggctgtggccgacagcatccccgaagtcctggcggacctcggcagcctcgagtctctggctaactctgaaacctcagacctctcgctgtacttggtggtggcggtggccgcagtctcctgcatcttcctggtctttgtcatcgtgctgctggcactcaggctgtggcgctggcataagtcacgcctgctgcaggcttctgaaggcgggttggcaggtatgcccacgtcacattttgtaggcgtggacggggtacaggctttcctgcaaacctattcccacgaggtctctctcattgcggactcgcagaagagtcacctgattttcccccagcccaactatggggacacgctcatcagccaggagagctgtgagaaaagcgagccactcttgatagctgaagactcagctatcattttaggcaaatgtgacccgacaagtaatcagcaagccccgcccaacacggactggcgtttctctcaggcccagagacccggcaccagcggctcccaaaatggcgatgacaccggcacctggcccaacaaccagtttgacacagagatgctgcaagccatgatcttggcgtccgccagtgaagctgctgatgggagctccaccctgggagggggtgccggcaccatgggattgagcgcccgctacggrccccagttcaccctgcagcacgtgcccgactaccrccagaatgtctacatcccaggcagcaatgccacactgaccaacgcagctggcaagcgggatggcaaggccccagcaggtggcaatggcaacaagaagaagtcgggcaagaaggagaagaagtaacatggaggccaggccaagagccacagggyrgcctctccccaaccagcccagcttctccttacctgcacccaggcctcagagtttcagggctaacccccagaatactggtaggggccaaggccatgctccccttgggaaacagaaacaagtgcccagtcagcacctaccccttcccccccagggggttgaatatgcaaaagcagttccgctgggaacccccatccaatcaactgctgtacccatgggggtagtggggttactgtagacaccaagaaccatttgccacaccccgtttagttacagctgaactcctccatcttccaaatcaatcaggcccatccatcccatgcctccctcctccccaccccactccaacagttcctctttcccgagtaaggtggttggggtgttgaagtaccaagtaacctacaagcctcctagttctgaaaagttgsaagggcatcatgacctcttggcctctcctttgattctcaatcttcccccaaagcatggtttggtgccagccccttcacctccttccagagcccaagatcaatgctcaagttttggaggacatgatcaccatccccatggtactgatgcttgctggatttagggagggcattttgctaccaagcctcttcccaacgccctggggaccagtcttctgttttgtttttcattgtttgacgtttccactgcatgccttgacttcccccacctcctcctcaaacaagagactccactgcatgttccaagacagtatggggtggtaagataaggaagggaagtgtgtggatgtggatggtgggggcatggacaaagcttgacacatcaagttatcaaggccttggaggaggctctgtatgtcctcaggggactgacaacatcctccagattccagccataaaccaataactaggctggacccttcccactacataatagggctcagcccaggcagccagctttgggctgagctaacaggaccaatggattaaactggcatttcagtccaaggaagctcgaagcaggtttaggaccaggtccccttgagaggtcagaggggcctctgtgggtgctgggtactccagaggtgccactggtggaagggtcagcggagccccagcaggaagggtgggccagccaggccattcttagtccctgggttggggaggcagggagctagggcagggaccaaatgaacagaaagtctcagcccaggatggggcttcttcaacagggcccctgccctcctgaagcctcagtccttcaccttgccaggtgccgtttctcttccgtgaaggccactgcccaggtccccagtgcgccccctagtggccatagcctggttaaagttccccagtgcctccttgtgcatagaccttcttctcccacccccttctgcccctgggtccccggccatccagcggggctgccagagaaccccagacctgcccttacagtagtgtagcgccccctccctctttcggctggtgtagaatagccagtagtgtagtgcggtgtgcttttacgtgatggcgggtgggcagcgggcggcgggctccgcgcagccgtctgtccttgatctgcccgcggcggcccgtgttgtgttttgtgctgtgtccacgcgctaaggcgaccccctcccccgtactgacttctcctataagcgcttctcttcgcatagtcacgtagctcccaccccaccctcttcctgtgtctcacgcaagttttatactctaatatttatatggctttttttcttcgacaaaaaaataataaaacgtttcttctgaaaagctg

SEQ ID NO: 257 - DNA, 4596 bp, Homo sapiens
atgggaaatagctccggatggargggcccagcagggcagaggcgaatgctatttctctwcctgctctctttgttagaccaggytctctccgaaccgatccgctacgctattcccgaggagctggacaggggctcgctggtagggaacctcgccaaggacctggggtttggcgtgggggatttacctactaggaacctgcgggttattgcagagaagaaattctttaccgtgagccccgaaaatgggaacttacttgtgagcgaccgtatagaccgagaggagatttgtggcaagaagtcgacgtgtgttctggaatttgaaatggttgctgaaawgcctttaaacttttttcatgtaactgtgctgatccaggatattaacgacaacccaccgacctttagccaaaatatcactgagctggaaatcagcgaactggctctcactggagccacatttgccctggaatctgcgcaagatcctgatgtaggtgtcaattcgstgcagcagtactacctcagccctgatccgcacttctctttgattcagaaggagaacytggatggcagtaggtacccagagctagtactgaaagcacccctggacagggaagagcagccacatcaccacctggtcctyacagctgtggatgggggcgagccctccagaagctgtaccacccagatcagggtaattgtcgcagatgcaaatgataaccccccagtatttactcaggacatgtacagggtcaatgttgcagagaacctgcccgctggctcctccgtattaaaagtgatggccattgacatggatgagggcatcaatgccgaaatcatctatgccttcatcaatattggcaaggaagtgagacaactgttcaagctggacagtaaaacgggggaactcaccactattggagaactggactttgaagagagagatagctacacaattggggtggaagcaaaggatggtggacatcacactgcatattgtaaagtacagatagatatttcagatgaaaatgacaatgccccggagataaccctggcttctgaatcccaacatatacaagaagatgctgagctggggactgccgttgccctgatcaaaacacatgatctagattctggatttaatggagaaatcctatgccaactaaaaggaaasttcccctttaaaatcgttcaagataccaaaaacacatacaggttggtgacagatggagccctggaccgggagcagatcccagaatacaatgtgacgatcacagctaccgacaaaggcaatccaccgctctcctccagcaagaccatcactctgcacatccttgatgtcaacgacaacgttcccgttttccaccaggcctcctacaccgtgcatgtagctgagaacaatcckcctggagcctccattgcgcatgtcagagcytcggatcccgacttgggacctaatggccttgtctcctactacatcgtggccagtgacctggagccgcgggagctgtcgtcctacgtgtccgtgagcgcgcggagcggggtggtgttcgcgcagcgagccttcgaccacgagcagctgcgtgccttcgagctcactctgcaggcccgcgaccagggctcgcctacgctcagcgccaacgtgagcctgcgcgtgttggtggacgaccgcaacgacaatgcaccgctggtgctgtacccagctctggggcccgaaggctctgcgctcttcgatatggtgmcgcgctctgcagagcctggctacctggtgaccaaggtggtggcggtggacgcagactcgggatacaacgcctggctgtcctaccacattgtgcaggccagcgagcccgggctgttcagcctgggcctgcgcacgggtgaggtgcgcacggcgcgtaycttgggcgacagkgaggccgcccgccagcgcctgctggtcactgtgcgtgatggaggacagcagcctctttcagccaccgtcatgctgcacctaatcttcgcagatagcttgcaagagatacaacctgaccttagcgaccgccccactccctctgaccctcaggcggagctacagtttcacctagtagtggcgttggccttgatctcagtgctcttcctcctcgcggtgattctggcaatctccctgcgcctgcgatgctcctccagacccgccactgagggctactttcagcctggtgtctgcttcaagactgtacctggagttctccccacctacagcgaaaggactttgccttattcctacaatccgtgtgctgcctcacattcctcaaacaccgagtttaaatttctcaatataaaggctgaaaatgctgcaccacaagatcttctatgtgatgaagcctcttggtttgaaagtaatgacaatccagaaatgccttctaattcaggcaatttgcaaaagcaagccccgcccaacacggactggcgtttctctcaggcccagagacccggcaccagcggctcccaaaatggcgatgacaccggcacctggcccaacaaccagtttgacacagagatgctgcaagccatgatcttggcgtccgccagtgaagctgctgatgggagctccaccctgggagggggtgccggcaccatgggattgagcgcccgctacggrccccagttcaccctgcagcacgtgcccgactaccrccagaatgtctacatcccaggcagcaatgccacactgaccaacgcagctggcaagcgggatggcaaggccccagcaggtggcaatggcaacaagaagaagtcgggcaagaaggagaagaagtaacatggaggccaggccaagagccacagggyrgcctctccccaaccagcccagcttctccttacctgcacccaggcctcagagtttcagggctaacccccagaatactggtaggggccaaggccatgctccccttgggaaacagaaacaagtgcccagtcagcacctaccccttcccccccagggggttgaatatgcaaaagcagttccgctgggaacccccatccaatcaactgctgtacccatgggggtagtggggttactgtagacaccaagaaccatttgccacaccccgtttagttacagctgaactcctccatcttccaaatcaatcaggcccatccatcccatgcctccctcctccccaccccactccaacagttcctctttcccgagtaaggtggttggggtgttgaagtaccaagtaacctacaagcctcctagttctgaaaagttgsaagggcatcatgacctcttggcctctcctttgattctcaatcttcccccaaagcatggtttggtgccagccccttcacctccttccagagcccaagatcaatgctcaagttttggaggacatgatcaccatccccatggtactgatgcttgctggatttagggagggcattttgctaccaagcctcttcccaacgccctggggaccagtcttctgttttgtttttcattgtttgacgtttccactgcatgccttgacttcccccacctcctcctcaaacaagagactccactgcatgttccaagacagtatggggtggtaagataaggaagggaagtgtgtggatgtggatggtgggggcatggacaaagcttgacacatcaagttatcaaggccttggaggaggctctgtatgtcctcaggggactgacaacatcctccagattccagccataaaccaataactaggctggacccttcccactacataatagggctcagcccaggcagccagctttgggctgagctaacaggaccaatggattaaactggcatttcagtccaaggaagctcgaagcaggtttaggaccaggtccccttgagaggtcagaggggcctctgtgggtgctgggtactccagaggtgccactggtggaagggtcagcggagccccagcaggaagggtgggccagccaggccattcttagtccctgggttggggaggcagggagctagggcagggaccaaatgaacagaaagtctcagcccaggatggggcttcttcaacagggcccctgccctcctgaagcctcagtccttcaccttgccaggtgccgtttctcttccgtgaaggccactgcccaggtccccagtgcgccccctagtggccatagcctggttaaagttccccagtgcctccttgtgcatagaccttcttctcccacccccttctgcccctgggtccccggccatccagcggggctgccagagaaccccagacctgcccttacagtagtgtagcgccccctccctctttcggctggtgtagaatagccagtagtgtagtgcggtgtgcttttacgtgatggcgggtgggcagcgggcggcgggctccgcgcagccgtctgtccttgatctgcccgcggcggcccgtgttgtgttttgtgctgtgtccacgcgctaaggcgaccccctcccccgtactgacttctcctataagcgcttctcttcgcatagtcacgtagctcccaccccaccctcttcctgtgtctcacgcaagttttatactctaatatttatatggctttttttcttcgacaaaaaaataataaaacgtttcttctgaaaagctg

SEQ ID NO: 258 - DNA, 2585 bp, Homo sapiens
acctgaaacgcttcgcatccggtctctgcttgttgaaggaccttcaccgctatttctgagaagagcaaaagtgatgcagatctgttcttcctcttcttaatcccagagaagttcctaataagccagtaatggcgcctccgcagaggcatccgcagcgcagcgagcaggtcctgctcctcacgctcctggggacgctgtggggggccgcggcagcgcagatccgctactctattcccgaggagctggagaaaggctccttcgtaggcaacatcgtcaaggatctgggactggagccccaggagttggcggagcacggagtmcgcatcgtctccagaggtaggatgcagcttttctctctgaatccgcgaaacggcagcttggtcaccgcgggtaggatagaccgcgaggagctctgtgctcagagcccgcggtgtctggtgagttttaacatccttgtcgaggataaactgaatctttatcccgtggaagtggaaatagtggacattaatgacaatacaccccgattcttaaaggaagaattggaagtgaaaattctcgaaaacgcagctccatcctctcgttttccactaatggaggtctatgaccctgatgtgggaatgaactcccttcagggatttaagctcagtggtaatagtcacttctcagtggacgtgcaaagcgaagcccatgggcccaagtacccggagctggtgctggagggcacactggaccgggaaggagaagccgtttaccgcctggtccttactgccatggatggcggcgaccctgtccgctcaagcgtcgcccaaattctggtaacagttctagatgtgaatgacaacactccaatgtttactcagcctgtctacmgtgtaagtgttcctgaaaacctgccagtaggcacaccagtgttggcagtgactgccaccgaccaggatgaaggagtccacggggaagtaacttattcctttgtgaagattacagaaaagatctcacaaattttctgtttgaatgttttgactggagaaatttcaacttctgcaaatctagactatgaggactcgagtttttatgagctgggtgttgaagcccgggatgggccaggtcttcgagacagagcgaaagtcttaataactatcttggatgtcaatgataatgtaccagaagtggttgttacatctggaagcagaacaattgctgaaagtgcacctccaggaacagtaatcgccctttttcaagtgttcgatcgagactctggcctgaatggcctggtaacctgttccatcccgagaagtctcccatttgaattggaaaaatcagttggcaattattatcgattagtgacaaatgcagctctagaccgggaagaggtattcttgtacaacatcactgtgacagccacggacaaaggaacaccacctctgtctacagaaacaatcatctctctaaatgtggyagacaccaacgacaacccgcccaccttcccccattcatcctactcagtctatgtccttgaaaacaaccccaggggtgcctccatcttctctgtgaatgcactggaccctgacgtggaccagaacgcccaagtctcctactcactggcagaagacaccctccagggggcgcccctgtcctcctacgtgtccatcaactccgacactgggattctgtacgccctgcgctccttcgactatgagcagttgagagacctacagctgtgggtgacagccagcgacasckgggacccgcctcttagcagcaacgtgtcactgagcctgtttgtgctggaccagaatgacaatgcgcccgagatcctgtaccccgccctccccacagacggttccactggcgtggagctggcgccycgctccgcagagcccggctacctggtgaccaaggtggtggcggtggacagagactcgggccagaacgcctggctgtcctaccgcctgctcaaggccagcgagccaggrcttttctcagtgggcctgcacacgggcgaggtgcgcacggcgcgcgccctgctggacagagacgcgctcaagcagagcctagtggtggccgtccaggaccacggccagccccctctctccgccactgtcacgctcaccgtggccgtggccgacaggatccccgacatcctggccgacctgggcagcctcgagccctccgccaaacccaacgattcggacctcactctgtacctggtggtggcggtggccgcggtctcctgcgtcttcctggccttcgtcatygtgctgctggcgctcagactgcrgcgctggcacaagtcacgcctgctgcaggcttcgggaggtggmttagcgagcatgcccggctcgcactttgtgggcgtggaaggggttcgggctttcctgmagacctattcccacgaggtctcactcactgcagactcgcgtaagagtcatctgattttcccccagcccaactatgccgacacgcttatcaaccaggagagctatgagaaaagcgagcctcttctgataactcaggatttacttgaaacgaaaggagaacccaggcaacttcaggtgagtttctttccgcctaagcgggaagagtaa

SEQ ID NO: 259 - DNA, 4602 bp, Homo sapiens
atggcgagtccacctaggggctggggctgcggagagctgctgctgcccttcatgctcctggggacgctgtgcgagccaggatccgggcagatccgctactcgatgccggaggagctggacaaaggctccttcgtcggcaacatagccaaggaccttgggctggagccccaggagctggcggagcgcggagtccgcatcgtctccagaggtaggacscagctttttgccctgaacccgcgaagcggcagcttggtcaccgcgggcaggatagaccgggaggagctctgcgctcagagcccactgtgtgtggtgaactttaacatcttggttgagaacaaaatgaaaatttatggagtagaagtagaaataatcgatattaatgataacttcccgcgtttccgggatgaagagttaaaagtaaaagttaatgaaaatgcggctgcagggacacggttagtgcttcccttcgcgcgggatgcggatgtgggtgtgaactcyctccggagttaccagctcagctccaatctgcacttctctctggatgtggtaagcggaactgatggacaaaagtatccggagctggtgttggaacagcccctagaccgcgagaaagagactgttcacgacctcctcctcacagctttagatggcggagacccggtactctccggcaccacgcacatccgtgttacggtcctcgacgcaaacgacaatgcgcccctgttcaccccatccgagtacagcgtgagtgttccagagaacatacctgtgggcactcggctgctcatgctaaccgccacggatccagatgagggaataaacgggaaattgacctactcttttcgcaatgaagaagaaaaaatttcggagactttccaayttgattccaacctgggggaaatctcaactctacaatcactggactatgaagaatccagattctacctcatggaagtggtagctcaggatggaggcgctcttgttgccagcgctaaggtggtggtcacagtacaggacgtgaatgacaatgcccccgaagtgatcctcacctctctgaccagttcgatctctgaagactgtcttcccggaactgtaatcgcgctgtttagcgtacatgatggtgattctggagaaaatggtgagattgcatgctctattcctaggaatttgccttttaaattggagaagtcagttgataattactaycacctattaacaactagggacctggacagagaagagacttcagattataatatcactttaaccgtcatggaccatggaaccccgcccctctctacagaaagccacatccccttgaaagtagcagacgttaatgacaacccacccaatttccctcaagcctcctactccacctctgtcacagaaaacaatcccagaggtgtctctatcttctctgtgacagcccatgaccycgacagcggcgacaacgctcgagtcacctactccctggctgaagacacatttcagggggcgcccttgtcctcctatgtatccattaactctgacaccggtgtcctgtatgctctgagatccttcgactatgagcagttgagagacctacagttgtgggtgacagccagcgacagtgggaaccctccacttagcagcaacgtgtcgctgagcctgtttgtgctggaccagaacgacaatacgcctgagatcctgtaccccgccctccccacagacggttccacgggcgtggagctggcgccycgctccgcagaacctggctacctggtgaccaaggtggtagcggtggacaaagattcaggccagaacgcctggctgtcctaccgcctgcttaaggccagcgagccaggactctttgcggttgggctgcacacgggcgaggtgcgcacagcgcgagccctgctggacagagacgcgctcaagcagagcctcgtggtggccgtcgaagaccatggccagccccctctgtcagccaccttcacggtcaccgttgccgtggccgacaggatccctgacatcctggctgacctaggcagtatcaagacccccattgaccctgaggatctggacctcacactctatcttgtggtggcagtggctgcagtctcctgcgtcttcctggccttcgtcatcgtgctgctggtgctcagactgaggcgctggcacaagtcacgcctgcttcaggctgaaggcagcaggttggcgggtgtgcccgcctcgcactttgtgggcgtggatggggttcgggctttcctgcagacctattcccacgaggtctccctcaccgcggactcgaggaagagtcacctgatctttccccagcccaactacgcagacacgctccttagtgaagagagctgtgagaaaagcgagcctcttctgatgtctgataaggtagatgcaaacaaagaagaacggcgagttcagcaagccccgcccaacacggactggcgtttctctcaggcccagagacccggcaccagcggctcccaaaatggcgatgacaccggcacctggcccaacaaccagtttgacacagagatgctgcaagccatgatcttggcgtccgccagtgaagctgctgatgggagctccaccctgggagggggtgccggcaccatgggattgagcgcccgctacggrccccagttcaccctgcagcacgtgcccgactaccrccagaatgtctacatcccaggcagcaatgccacactgaccaacgcagctggcaagcgggatggcaaggccccagcaggtggcaatggcaacaagaagaagtcgggcaagaaggagaagaagtaacatggaggccaggccaagagccacagggyrgcctctccccaaccagcccagcttctccttacctgcacccaggcctcagagtttcagggctaacccccagaatactggtaggggccaaggccatgctccccttgggaaacagaaacaagtgcccagtcagcacctaccccttcccccccagggggttgaatatgcaaaagcagttccgctgggaacccccatccaatcaactgctgtacccatgggggtagtggggttactgtagacaccaagaaccatttgccacaccccgtttagttacagctgaactcctccatcttccaaatcaatcaggcccatccatcccatgcctccctcctccccaccccactccaacagttcctctttcccgagtaaggtggttggggtgttgaagtaccaagtaacctacaagcctcctagttctgaaaagttgsaagggcatcatgacctcttggcctctcctttgattctcaatcttcccccaaagcatggtttggtgccagccccttcacctccttccagagcccaagatcaatgctcaagttttggaggacatgatcaccatccccatggtactgatgcttgctggatttagggagggcattttgctaccaagcctcttcccaacgccctggggaccagtcttctgttttgtttttcattgtttgacgtttccactgcatgccttgacttcccccacctcctcctcaaacaagagactccactgcatgttccaagacagtatggggtggtaagataaggaagggaagtgtgtggatgtggatggtgggggcatggacaaagcttgacacatcaagttatcaaggccttggaggaggctctgtatgtcctcaggggactgacaacatcctccagattccagccataaaccaataactaggctggacccttcccactacataatagggctcagcccaggcagccagctttgggctgagctaacaggaccaatggattaaactggcatttcagtccaaggaagctcgaagcaggtttaggaccaggtccccttgagaggtcagaggggcctctgtgggtgctgggtactccagaggtgccactggtggaagggtcagcggagccccagcaggaagggtgggccagccaggccattcttagtccctgggttggggaggcagggagctagggcagggaccaaatgaacagaaagtctcagcccaggatggggcttcttcaacagggcccctgccctcctgaagcctcagtccttcaccttgccaggtgccgtttctcttccgtgaaggccactgcccaggtccccagtgcgccccctagtggccatagcctggttaaagttccccagtgcctccttgtgcatagaccttcttctcccacccccttctgcccctgggtccccggccatccagcggggctgccagagaaccccagacctgcccttacagtagtgtagcgccccctccctctttcggctggtgtagaatagccagtagtgtagtgcggtgtgcttttacgtgatggcgggtgggcagcgggcggcgggctccgcgcagccgtctgtccttgatctgcccgcggcggcccgtgttgtgttttgtgctgtgtccacgcgctaaggcgaccccctcccccgtactgacttctcctataagcgcttctcttcgcatagtcacgtagctcccaccccaccctcttcctgtgtctcacgcaagttttatactctaatatttatatggctttttttcttcgacaaaaaaataataaaacgtttcttctgaaaagctg

SEQ ID NO: 260 - DNA, 4727 bp, Homo sapiens
aaagtgcccaggctacagagacaccctgaagccacagaaagacaaaggaaccggttgaaacacacaacgtgtccagtgaggactttgcagaattctgtaaccagactacaatggccgctcaaaggaatcgctcaaaggaatcaaaggattgcagcgggctggtcctgctctgccttttcttcgggattccatgggaggctggagcccggcagatctcctactcaattcctgaggaattagagaaaggctctttcgtgggcaacatctccaaggacttgggtctggcgccccgggagctggcggagcgcggagtccgcatagtctccagaggtaggacgcagcttttctctctgaacccgcgcagcggcagcttgrtcaccgcgggcaggatagaccgggaggagctctgcgctcagagcgcgcggtgcgtggtgagttttaatatccttgtggaagacagggtgaaactttttgggatagaaatagaagtaactgatatcaatgacaatgctccaaaattccaagcagaaaatctagacgtaaaaattaatgaaaatgtcgctgcgggaatgcgttttcctctcccggaagctattgatccggatgtgggcgtgaactccctgcagagctatcagctcagccccaataagcacttctccctaagagttcagagccgtgccaatggcgtcaagtacccggagctggtactggagcactccctagatcgcgaggaagaggccattcaccacctggtcctcacygcctccgacgggggtgaccctctccgatctggcactgtccttgtcagtgtgactgtcttcgatgcaaatgacaacgcgccggtcttcaccttgccagaataccgagtgagtgttcctgagaatttgcctgtgggcactcagctgctgacagtcacagccaccgacagggacgaaggtgccaatggagaagtgacatattcattccgaaaattacctgacacgcaattgttgaagttccaactaaacaaatatactggagaaataaaaatatcagaaaatctagattatgaagaaaccggtttctatgaaatagaaatacaagcagaagatggaggagcatatcttgcaactgcaaaagtgttgattacagtagaagatgtaaatgacaacagtccagagctgaccatcacgtctctatttagtccagtgactgaagattcacctctgggaacagtcgtagcccttttaaatgtgcatgatttagactctgagcagaatggacaggtaacctgttccattttggcgtatctaccatttaaattagaaaagtccattgacagttattacagattggtgatacacagagcccttgacagggaacaggtatcctcttacaatatcacagtgacagccacagatgggggaagtcctcctctatcaacggaagctcactttatgctacaagtggcagatatcaatgacaacccacctaccttctctcaagtctcctactttacctatatcccagagaacaacgccaggggtgcctccatcttctcagtgacagcgctggacccggacagcaaagagaatgcccagattatttactccctggctgaagacaccatccagggggtacctctgtcctcatacatatccatcaactcagacactggcgtcctgtatgcactcagatccttcgactaygagcagtttcatgagctacagatgcaggtgacagccagcgacagcggggatcctccactcagcagcaacgtgtcgttgagcctgtttgtgctggaycagaacgacaatgcgcccgagatcctgtaccccgccctccccacagacggttccacaggcgtggagctggcgccccgctccgcagagcccggctacctggtgaccaaggtggtggcggtggacagagactccggccagaacgcctggctgtcctaccgtytgctcaaggccagcgagccgggactcttcgcggtgggggagcacacgggcgaggtgcgcacggcgcgagccctgctggacagagacgcgctcaagcaaagcctcgtagtggccgtccaggaccacggccagccccctctctccgccactgtcacgctcaccgtggccgtggccgacagcatcccccaagtcctggcggacctcggcagcttcgagtctccagctaactctgaaacctcagacctcactctgtacctggtggtagcggtggccgcggtctcctgcgtcttcctggccttcgtcatcgtgctgctggcgcacaggctgcggcgctggcacaagtcacgcctgctgcaggcttcaggaggcggcttgacaggtgtgtccrgctcgcactttgtgggcgtggacggggttcgggctttcctgcagacctattcccacgaggtctctctcaccgcggactcgcgaaagagtcacctgatcttcccccagcccaattatgcggacacgctcatcagccaggagagctgtgagaaaaacgatcctttgyrtttgttagatgattcgaagtttcctatagaggataccccattggttccacaagccccgcccaacacggactggcgtttctctcaggcccagagacccggcaccagcggctcccaaaatggcgatgacaccggcacctggcccaacaaccagtttgacacagagatgctgcaagccatgatcttggcgtccgccagtgaagctgctgatgggagctccaccctgggagggggtgccggcaccatgggattgagcgcccgctacggrccccagttcaccctgcagcacgtgcccgactaccrccagaatgtctacatcccaggcagcaatgccacactgaccaacgcagctggcaagcgggatggcaaggccccagcaggtggcaatggcaacaagaagaagtcgggcaagaaggagaagaagtaacatggaggccaggccaagagccacagggyrgcctctccccaaccagcccagcttctccttacctgcacccaggcctcagagtttcagggctaacccccagaatactggtaggggccaaggccatgctccccttgggaaacagaaacaagtgcccagtcagcacctaccccttcccccccagggggttgaatatgcaaaagcagttccgctgggaacccccatccaatcaactgctgtacccatgggggtagtggggttactgtagacaccaagaaccatttgccacaccccgtttagttacagctgaactcctccatcttccaaatcaatcaggcccatccatcccatgcctccctcctccccaccccactccaacagttcctctttcccgagtaaggtggttggggtgttgaagtaccaagtaacctacaagcctcctagttctgaaaagttgsaagggcatcatgacctcttggcctctcctttgattctcaatcttcccccaaagcatggtttggtgccagccccttcacctccttccagagcccaagatcaatgctcaagttttggaggacatgatcaccatccccatggtactgatgcttgctggatttagggagggcattttgctaccaagcctcttcccaacgccctggggaccagtcttctgttttgtttttcattgtttgacgtttccactgcatgccttgacttcccccacctcctcctcaaacaagagactccactgcatgttccaagacagtatggggtggtaagataaggaagggaagtgtgtggatgtggatggtgggggcatggacaaagcttgacacatcaagttatcaaggccttggaggaggctctgtatgtcctcaggggactgacaacatcctccagattccagccataaaccaataactaggctggacccttcccactacataatagggctcagcccaggcagccagctttgggctgagctaacaggaccaatggattaaactggcatttcagtccaaggaagctcgaagcaggtttaggaccaggtccccttgagaggtcagaggggcctctgtgggtgctgggtactccagaggtgccactggtggaagggtcagcggagccccagcaggaagggtgggccagccaggccattcttagtccctgggttggggaggcagggagctagggcagggaccaaatgaacagaaagtctcagcccaggatggggcttcttcaacagggcccctgccctcctgaagcctcagtccttcaccttgccaggtgccgtttctcttccgtgaaggccactgcccaggtccccagtgcgccccctagtggccatagcctggttaaagttccccagtgcctccttgtgcatagaccttcttctcccacccccttctgcccctgggtccccggccatccagcggggctgccagagaaccccagacctgcccttacagtagtgtagcgccccctccctctttcggctggtgtagaatagccagtagtgtagtgcggtgtgcttttacgtgatggcgggtgggcagcgggcggcgggctccgcgcagccgtctgtccttgatctgcccgcggcggcccgtgttgtgttttgtgctgtgtccacgcgctaaggcgaccccctcccccgtactgacttctcctataagcgcttctcttcgcatagtcacgtagctcccaccccaccctcttcctgtgtctcacgcaagttttatactctaatatttatatggctttttttcttcgacaaaaaaataataaaacgtttcttctgaaaagctg

SEQ ID NO: 261 - DNA, 4605 bp, Homo sapiens
atggcggctcagccgaggggcggggactacagaggattcttcctgctctccatcctcctgsggaccmcctgggaagcctgggcaggacgtattctctactccgtgtcggaggagacggacaaagggtcctttgtgggagacatcgccaaggacctggggctggagccccgggagctggcggagcgcggagtccgcatcatctccagaggtaggacgcagcttttcgccctgaaccagcgcagcggcagcttggtcactgcgggcaggatagaccgggaagagatctgcgctcagagygcgcggtgtctggtaaactttaacatcctgatggaagataaaatgaatctttaccctatagacgtggaaataatagatattaatgacaacgttccaagattcttgacggaagaaataaatgtaaaaataatggagaatacagctcctggggttcggtttccgttaagcgaggctggggatccagatgtgggcacgaactccctccagagttaccagctcagccccaatcrccacttctccctggctgtgcaaagtggagacgatgraactaagtacccggaactggtgctggagcgggtgctggaccgggaggaagagcgggttcaccacctggtcytcacagcctctgatggcggcgacccgccccgatccagcaccgcccacatccaggtgacagtggtggatgtgaatgaccacaygcctgtcttctctctgcctcagtaccaagtaactgtccccgagaatgtgccagtgggtacaagactgctcacggtacatgctatcgacctggacgagggagtcaatggggaagtgacatattcttttcggaaaawaactcytaaacttccaaagatgtttcatctgaactcgcttacaggagaaatatcaactttagaaggattagattatgaagaaactgccttctatgaaatggaggttcaggctcaagatggtcctggtagtctgacaaaggcaaaagtactgatcacagttttagatgtaaatgataatgctccagaagtgactatgacgtctttaagtagctcaatccctgaagacacacctcttgggacagtcattgctcttttctacctacaagacagagattctggaaagaatggtgaggtgacctgcaccattccagaaaacctaccttttaaattagaaaaatcaatagataattattatagattggtcacaaccaaaaacttggaccgggaaacactctctttgtataacatcacactgaaagccacagatggtggaactcctcccttgtccagggaaactcacatattcatgcaggtggcagacaccaacgataacccacccaccttcccccactcatcctactcagtctacatcgctgagaacaaccccagaggggcctccattttcttagtractgcacaggaccacgacagtgaggataatgcccagatcacttattccttggccgaagacaccatccagggggctccagtgtcctcctatgtctccataaactctgacactggagtcctgtacgcgctgcaatcctttgattatgagcagttgagagaactacaactaagagtgactgcacatgacagcggggacccgcctctcagcagcaacatgtcactgagcctgttcgtgctggaccagaatgacaacccgcccgagatcctgtacccggccctccccacagatggttctactggcatggagctggcaccccgctccgcagagcccggctacctggtgaccaaggtggtggcggtggacaaagattcaggccagaaygcctggctgtcatacctcctgcttaaggccagcgagccaggactctttgcsgttgggctgtacacgggcgaggtgcgcacggctcgggccctgctggacagagatgccctcaagcagagcctcgtggtggccgtccaggaccacggtcagcctcctctgtcagccaccgtcacactcaccgtggctgtggctgacagcatccccgaagtcttggccgacctgggcagccttgagccctccgacggtccttacaactatgacctcacgttgtacctggtggtggcggtggccacagtctcctgcgtcttcctagccttcgtcctcgtactgctggcgctcaggctgcggcgctggcacaagtcacgcctgctgcaggcttcagaaggtggcttggcgaacgtgcccacctcgcactttgtgggcatggacggggtgcaggctttcctgcagacctattcccatgaggtctccctcaccgcggactctcggaagagtcacctgatcttcccccagcccaactatgtagacatgctcatcagccaggagagctgtgagaaaaatgattctttgctracatccgtagattttcaggaatgtaaagaaaacctgccaagtattcagcaagccccgcccaacacggactggcgtttctctcaggcccagagacccggcaccagcggctcccaaaatggcgatgacaccggcacctggcccaacaaccagtttgacacagagatgctgcaagccatgatcttggcgtccgccagtgaagctgctgatgggagctccaccctgggagggggtgccggcaccatgggattgagcgcccgctacggrccccagttcaccctgcagcacgtgcccgactaccrccagaatgtctacatcccaggcagcaatgccacactgaccaacgcagctggcaagcgggatggcaaggccccagcaggtggcaatggcaacaagaagaagtcgggcaagaaggagaagaagtaacatggaggccaggccaagagccacagggyrgcctctccccaaccagcccagcttctccttacctgcacccaggcctcagagtttcagggctaacccccagaatactggtaggggccaaggccatgctccccttgggaaacagaaacaagtgcccagtcagcacctaccccttcccccccagggggttgaatatgcaaaagcagttccgctgggaacccccatccaatcaactgctgtacccatgggggtagtggggttactgtagacaccaagaaccatttgccacaccccgtttagttacagctgaactcctccatcttccaaatcaatcaggcccatccatcccatgcctccctcctccccaccccactccaacagttcctctttcccgagtaaggtggttggggtgttgaagtaccaagtaacctacaagcctcctagttctgaaaagttgsaagggcatcatgacctcttggcctctcctttgattctcaatcttcccccaaagcatggtttggtgccagccccttcacctccttccagagcccaagatcaatgctcaagttttggaggacatgatcaccatccccatggtactgatgcttgctggatttagggagggcattttgctaccaagcctcttcccaacgccctggggaccagtcttctgttttgtttttcattgtttgacgtttccactgcatgccttgacttcccccacctcctcctcaaacaagagactccactgcatgttccaagacagtatggggtggtaagataaggaagggaagtgtgtggatgtggatggtgggggcatggacaaagcttgacacatcaagttatcaaggccttggaggaggctctgtatgtcctcaggggactgacaacatcctccagattccagccataaaccaataactaggctggacccttcccactacataatagggctcagcccaggcagccagctttgggctgagctaacaggaccaatggattaaactggcatttcagtccaaggaagctcgaagcaggtttaggaccaggtccccttgagaggtcagaggggcctctgtgggtgctgggtactccagaggtgccactggtggaagggtcagcggagccccagcaggaagggtgggccagccaggccattcttagtccctgggttggggaggcagggagctagggcagggaccaaatgaacagaaagtctcagcccaggatggggcttcttcaacagggcccctgccctcctgaagcctcagtccttcaccttgccaggtgccgtttctcttccgtgaaggccactgcccaggtccccagtgcgccccctagtggccatagcctggttaaagttccccagtgcctccttgtgcatagaccttcttctcccacccccttctgcccctgggtccccggccatccagcggggctgccagagaaccccagacctgcccttacagtagtgtagcgccccctccctctttcggctggtgtagaatagccagtagtgtagtgcggtgtgcttttacgtgatggcgggtgggcagcgggcggcgggctccgcgcagccgtctgtccttgatctgcccgcggcggcccgtgttgtgttttgtgctgtgtccacgcgctaaggcgaccccctcccccgtactgacttctcctataagcgcttctcttcgcatagtcacgtagctcccaccccaccctcttcctgtgtctcacgcaagttttatactctaatatttatatggctttttttcttcgacaaaaaaataataaaacgtttcttctgaaaagctg

SEQ ID NO: 262 - DNA, 4605 bp, Homo sapiens
atgaccaattgcctgagtttccgaaatggcagaggactggccctgctgtgcgcgctcctggggacgctgtgcgaaacaggatccggtcagatccgctactcggtgtctgaggagctagataaaggttccttcgtgggcaacatcgctaacgacctggggctagagccccgggagctggcggagcgcggagtccgcatcgtctccagaggtaggacgcagcttttctctctgaatycgcaaagcggcagcttggtcaccgcggagaggatagaccgggaggagctctgcgctcagatcccgctgtgtctggtaaaaattaacattctggttgaggataaattgaaaatttttgaagtagaaatagaaattaaagatattaatgataatgctcctaatttcccaacagaggaattggaaataaaaattggtgaactaacggttcctggaacccgatttccamttaaaactgcttttgacccagatgtaggcattaactccctgcagaactacaagcttagccccaatgactacttytctctggctgtgaatagcgtctctgagggrgccaagtatccagagctggtgctggagcgggccctggaccgtgagaaaaaagaaattcaccagcttgtcctggttgcctctgatggtggcgaccstgtccactctggcaacttgcacatccaagtgatagtcctggatgcaaatgacaacccaccaatgtttactcagcctgagtaccgtgtgagtgtttgggagaacgtgcctgtgggtacccggctgctcacggtgaatgccactgaccctgacgagggattcaatgctcaagtgtcttatattctagataaaatgcctgggaaaatcgctgagattttccatcttaactcagtgagtggagaagtatcaatattaaaaagtctagattatgaggatgccatgttctatgaaattaaaattgaagcacaggatggaccaggtcttctttcaagagccaagattctagtcacggttctggatgtgaatgacaatgctccagaaattacaatcacgtctctcacaagctcagtcccagaagagggcaccgttggaagagaaattgctcttatcgacgtgcatgaccgagattctgggcagaatgggcaggttgaagtttttgtcctgggaaatctgccatttaagttagaaaaatcaatagatcaatattaccgcttagtgacggccacatccctggaccgcgaacaaatatcagaatataacattagtctgagagcctcagatgggggaagcccgccactstccacagaaactcacatcaccctgcatgtgattgacatcaatgacaacccacccaccttccctcatttatcctactccgcctacattccagaaaacaaccccagaggagcctccatcttctcagtgacagcccaggacccagatagcaacaacaacgcccgcatcacttatgcattgaccgaggacactctccagggggcgcccctgtcctccttcgtctctatcaactccaacactggcgtcctatacgcgctgagatccttcgactacgagcaatttagagacttaaagctactggtgacagccagygacagcgggaaccctccactcagcagcaacgtgtckctgaacctrttcstgctggaccagaacgacaacgcgcccgagatcctgtaccccgccctccccacagacggttccactggcgtggagctggcgccycgctccgcagagcccggctacctggtgaccaaggtggtggcggtggacagagactcgggccagaacgcctggctgtcctaccgcctgctcaaggccagcgagccgggactcttctcggtgggtctgcacacgggcgaggtgcgcacggcgcgagccctgctggacagagacgcgctcaagcagagcctcgtggtggccgtccaggaccacggccagccccctctctccgccactgtcacgctcaccgtggccgtggccgacaggatccccgacatcctggccgacctgggcagcctcgagccctccgccaaacccaacgattcggacctcactctgtacctggtggtggcggtggccgcggtctcctgcgtcttcctggccttcgtcwtcgtgctgctggcgctcaggctgcggcgctggcacaagtcacgcctgctgcaggcttcgggaggcggcttggcgagtacgcccggctcgcactttgtgggcgyggacggggttcgggctttcctgcagacctrttcccacgaggtctccctcactgcggactcgcggaagagccacctgattttcccccagcccaacyatgcggacacgctcatcagccaggagagctgtgagaaaagcgagcctcttctgataactcaggatttacttgaaatgaaaggagattccaacctacttcagcaagccccgcccaacacggactggcgtttctctcaggcccagagacccggcaccagcggctcccaaaatggcgatgacaccggcacctggcccaacaaccagtttgacacagagatgctgcaagccatgatcttggcgtccgccagtgaagctgctgatgggagctccaccctgggagggggtgccggcaccatgggattgagcgcccgctacggrccccagttcaccctgcagcacgtgcccgactaccrccagaatgtctacatcccaggcagcaatgccacactgaccaacgcagctggcaagcgggatggcaaggccccagcaggtggcaatggcaacaagaagaagtcgggcaagaaggagaagaagtaacatggaggccaggccaagagccacagggyrgcctctccccaaccagcccagcttctccttacctgcacccaggcctcagagtttcagggctaacccccagaatactggtaggggccaaggccatgctccccttgggaaacagaaacaagtgcccagtcagcacctaccccttcccccccagggggttgaatatgcaaaagcagttccgctgggaacccccatccaatcaactgctgtacccatgggggtagtggggttactgtagacaccaagaaccatttgccacaccccgtttagttacagctgaactcctccatcttccaaatcaatcaggcccatccatcccatgcctccctcctccccaccccactccaacagttcctctttcccgagtaaggtggttggggtgttgaagtaccaagtaacctacaagcctcctagttctgaaaagttgsaagggcatcatgacctcttggcctctcctttgattctcaatcttcccccaaagcatggtttggtgccagccccttcacctccttccagagcccaagatcaatgctcaagttttggaggacatgatcaccatccccatggtactgatgcttgctggatttagggagggcattttgctaccaagcctcttcccaacgccctggggaccagtcttctgttttgtttttcattgtttgacgtttccactgcatgccttgacttcccccacctcctcctcaaacaagagactccactgcatgttccaagacagtatggggtggtaagataaggaagggaagtgtgtggatgtggatggtgggggcatggacaaagcttgacacatcaagttatcaaggccttggaggaggctctgtatgtcctcaggggactgacaacatcctccagattccagccataaaccaataactaggctggacccttcccactacataatagggctcagcccaggcagccagctttgggctgagctaacaggaccaatggattaaactggcatttcagtccaaggaagctcgaagcaggtttaggaccaggtccccttgagaggtcagaggggcctctgtgggtgctgggtactccagaggtgccactggtggaagggtcagcggagccccagcaggaagggtgggccagccaggccattcttagtccctgggttggggaggcagggagctagggcagggaccaaatgaacagaaagtctcagcccaggatggggcttcttcaacagggcccctgccctcctgaagcctcagtccttcaccttgccaggtgccgtttctcttccgtgaaggccactgcccaggtccccagtgcgccccctagtggccatagcctggttaaagttccccagtgcctccttgtgcatagaccttcttctcccacccccttctgcccctgggtccccggccatccagcggggctgccagagaaccccagacctgcccttacagtagtgtagcgccccctccctctttcggctggtgtagaatagccagtagtgtagtgcggtgtgcttttacgtgatggcgggtgggcagcgggcggcgggctccgcgcagccgtctgtccttgatctgcccgcggcggcccgtgttgtgttttgtgctgtgtccacgcgctaaggcgaccccctcccccgtactgacttctcctataagcgcttctcttcgcatagtcacgtagctcccaccccaccctcttcctgtgtctcacgcaagttttatactctaatatttatatggctttttttcttcgacaaaaaaataataaaacgtttcttctgaaaagctg

SEQ ID NO: 263 - DNA, 4766 bp, Homo sapiens
cagggcagccccagctcagactccccagcgccagcctttacaccgcttcctcctcggaaaaagaagaattttttcttgaactggaactgcaactaaagtccgttcggagatccaaaaatctgcaatacagaggttatttgtaacccggcgtctccaggctggtgagcaagctgaggagagcaagagggatggggagcggcgccggggagctgggccgggctgagaggctgccagtgctctttctcttcctgctgtctttgttctgcccggcgctctgtgagcagatccgctacaggattcccgaggaaatgcccaagggctccgtagtggggaacctcgccacggacctggggttcagcgtccaggagttaccgactcgaaaactgcgcgtcagttcggagaagccttacttcaccgtgagcgcagagagcggggagttgcttgtgagcagcaggctagacagggaggagatatgcgggaagaagccagcttgtgctctggaatttgaggctgttgctgaaaatccactgaacttttatcacgtgaatgtggagatcgaggacattaatgaccacacgccaaaattcacgcaaaattcctttgagctgcaaataagtgagtctgcacagcctggcacamgatttatattaggatctgcccatgatgcggatattggtagcaacacactgcagaattaccaactcagtcccagtgatcatttctcaytrataaataaagagaaatcagatggcagtaaataccctgagatggtattgaagacacctttggacagagaaaagcagaaatcctaccacttgactttgactgccttggactttggagctccacccctaagcagcactgcacagatacacgttctagtgactgatgccaatgataatgctccagtgttcagtcaagacgtatacagggtgagcctttcagaaaacgtgtacccggggaccacggtgctacaggtgactgccacggaccaggatgagggtgkcaatgccgagattactttctctttcagtgaagctagccagatcacccaatttgacctgaactctaacaccggggaaattactgttttaaatacattagattttgaagaagtcaaagaatattccatagttttggaagcaagggacggtggaggaatgattgcgcaatgcacagtggaggtagaagtcatagatgaaaatgacaacgccccagaagtgatattccagtctctacccaacctaattatggaggacgccgagctgggaacacatattgctttgctcaaagtccgtgacaaggattccagacacaatggagaagtgacttgtaaattggaaggtgatgttccatttaaaatattaacttcttcaagaaacacgtataaattagtgacagatgctgttctagaccgcgagcagaatccagagtacaatataaccgttacggcaacagatcggggcaagcctcccctctcctccagttccagcatcaccctgcacattggtgatgtaaatgacaacgctccggttttctcacagtcttcctatatagtccacgtggccgagaacaacccgcctggagcctctatttcacaagtcagggcttctgatccggacttggggcccaacggccaagtctcttactgcatcatggccagtgacctggagcagcgggagctgtcatcctacgtgtccataagcgcggagagcggggtggtgttcgcgcagcgcgccttcgaccacgagcagctgcgcgccttcgaactcacactgcaggcccgcgaccagggctcgccagcgctcagcgcgaacgtgagcctgcgcgtgttagtggacgaccgcaacgacaatgcgccacgggtgctgtaccccgcgctgggtcccgacggctctgcgctcttcgatatggtgccgcacgctgcagagcctggctacttggtgaccaaggtagtggcggtggacgcagactcaggacacaacgcctggctgtcctaccacgtgctgcaggctagcgagcccgggctcttcagcctggggctgcgcacgggcgaagtgcgcacagcgcgtgccttaggcgacagggacgccgtccgccagcgccttctggtcgccgtgcgtgacggtggacagccaccactctcsgccactgccacgttgcacctggtcttcgccgacagcttgcaggaggtgctgccggatatcactgaccgccccgacccctctgacctccaggctgagctgcagttttacctagtggtggccttggccttgatctcagtgctcttcctcgtggccatgattctggccattgccttgcgcctgcgacgctcctccagccccgcctcctggagctgcttccagcctggtctctgtgttaaatccgaatccgtggttccccccaactacagcgaggggactttgccttattcctacaatctatgtgttgcacatacaggaaagacggagtttaatttcctaaaatgtagtgagcagttgagttcaggacaagacatactttgcggtgattcatctggggccttatttccactttgtaattccagtgaattgacttcccatcagcaagccccgcccaacacggactggcgtttctctcaggcccagagacccggcaccagcggctcccaaaatggcgatgacaccggcacctggcccaacaaccagtttgacacagagatgctgcaagccatgatcttggcgtccgccagtgaagctgctgatgggagctccaccctgggagggggtgccggcaccatgggattgagcgcccgctacggrccccagttcaccctgcagcacgtgcccgactaccrccagaatgtctacatcccaggcagcaatgccacactgaccaacgcagctggcaagcgggatggcaaggccccagcaggtggcaatggcaacaagaagaagtcgggcaagaaggagaagaagtaacatggaggccaggccaagagccacagggyrgcctctccccaaccagcccagcttctccttacctgcacccaggcctcagagtttcagggctaacccccagaatactggtaggggccaaggccatgctccccttgggaaacagaaacaagtgcccagtcagcacctaccccttcccccccagggggttgaatatgcaaaagcagttccgctgggaacccccatccaatcaactgctgtacccatgggggtagtggggttactgtagacaccaagaaccatttgccacaccccgtttagttacagctgaactcctccatcttccaaatcaatcaggcccatccatcccatgcctccctcctccccaccccactccaacagttcctctttcccgagtaaggtggttggggtgttgaagtaccaagtaacctacaagcctcctagttctgaaaagttgsaagggcatcatgacctcttggcctctcctttgattctcaatcttcccccaaagcatggtttggtgccagccccttcacctccttccagagcccaagatcaatgctcaagttttggaggacatgatcaccatccccatggtactgatgcttgctggatttagggagggcattttgctaccaagcctcttcccaacgccctggggaccagtcttctgttttgtttttcattgtttgacgtttccactgcatgccttgacttcccccacctcctcctcaaacaagagactccactgcatgttccaagacagtatggggtggtaagataaggaagggaagtgtgtggatgtggatggtgggggcatggacaaagcttgacacatcaagttatcaaggccttggaggaggctctgtatgtcctcaggggactgacaacatcctccagattccagccataaaccaataactaggctggacccttcccactacataatagggctcagcccaggcagccagctttgggctgagctaacaggaccaatggattaaactggcatttcagtccaaggaagctcgaagcaggtttaggaccaggtccccttgagaggtcagaggggcctctgtgggtgctgggtactccagaggtgccactggtggaagggtcagcggagccccagcaggaagggtgggccagccaggccattcttagtccctgggttggggaggcagggagctagggcagggaccaaatgaacagaaagtctcagcccaggatggggcttcttcaacagggcccctgccctcctgaagcctcagtccttcaccttgccaggtgccgtttctcttccgtgaaggccactgcccaggtccccagtgcgccccctagtggccatagcctggttaaagttccccagtgcctccttgtgcatagaccttcttctcccacccccttctgcccctgggtccccggccatccagcggggctgccagagaaccccagacctgcccttacagtagtgtagcgccccctccctctttcggctggtgtagaatagccagtagtgtagtgcggtgtgcttttacgtgatggcgggtgggcagcgggcggcgggctccgcgcagccgtctgtccttgatctgcccgcggcggcccgtgttgtgttttgtgctgtgtccacgcgctaaggcgaccccctcccccgtactgacttctcctataagcgcttctcttcgcatagtcacgtagctcccaccccaccctcttcctgtgtctcacgcaagttttatactctaatatttatatggctttttttcttcgacaaaaaaataataaaacgtttcttctgaaaagctg

SEQ ID NO: 264 - DNA, 4765 bp, Homo sapiens
ccagctcccacacagaggctcccggctgcgcagaccttgcccagcacaccagattgccagctccgagacccgggactcctcmtgtcctgggccgaatgctcttttagcgcggtagagtgcactttctccaactggaaaagcggggacccagcgagaacccgagcgaacgatgggagggagctgcgcgcagaggcgccgggccggcccgcggcaggtactatttcctttgctgctgcctttgttctaccccacgctgtgtgagccgatccgctactcgattccggaggagctggccaagggctcggtggtggggaacctcgctaaggatctagggcttagtgtcctggatgtgtcggctcgcgagctgcgagtkagcgcggagaagctgcacttcagcgtagacgcgcagagcggggacttacttgtgaaggaccgaatagaccgtgagcaaatatgcaaagagagaagaagatgtgagttgcaattggaagctgtggtggaaaatcctttaaatatttttcatgtcattgtggtgattgaggatgttaatgaccacgcccctcaattccggaaagatgaaataaacttagaaatcagtgaatccgtcagcctggggatgggaacaattcttgagtctgcagaagatcctgatattagtatgaattcgctgagcaaataccaactaagtcctaacgagtatttctcattggtggagaaagacaatcctgatggtggcaaatatccagaattagtattgcagaagactctggaccgagaaacgcagagcgctcaccacttggtactgaccgccttagatggtggggaccctccccgaagcggtactgctcagataagaatcctggtaatagatgccaatgacaaccccccagtgttcagccaggacgtgtacagggttagccttcgggaagacgtgcctccaggcacctccatcctgagagtgaaggccactgaccaggacgagggcatcaactcagagatcacttattccttctttggtgtggctgacaaagctcagcacgtgttctctctggattacactacaggaaacattctaactcagcagcctttggattttgaagaagtagaaagatatacgataaacatagaagcaaaagaccgaggatctctctcaacacggtgtaaagtaattgtagaagttgtagacgaaaacgacaacagcccagaaataatcatcacgtcactctctgatcagattatggaggattcccctccaggagtggttgttgccctcttcaaaacacgggaccaagactcaggggaaaatggggaagtcaggtgtagcttaagtagaggtgttccatttaagattcattcttcttctaataattactacaagctastaacagatgaggccctggatcgggagcagaccccagagtacaacgtcaccatcgcagccacagacaggggcaagcctccgttatcctccagcaaaaccataaccctgcacattactgacgtcaatgacaacgcgccggttttcggacagtcagcctacctggtccacgtgccagaaaacaaccagccgggtgcctccatagcgcaagtcagtgcctctgacccagacttcgggctcaacsgccgtgtctcctactctctcattgccagcgacctggagtcacgaacgctgtcgtcctacgtgtccgtgagcgcgcagagcggggtggtgttcgcgcagcgcgccttcgaccacgagcagctgcgcaccttcgagctcacgctgcaggcccgcgaccagggctcgcccgcgctcagcgccaatgtgagcctgcgcgtgttggtgggcgaccgtaacgacaacgcaccgcgggtgctgtaccctgcgctgggtcccgacggctccgcgctcttcgacacagtgccgcgggccgcgcagccaggctacctggtgaccaaggtggtggccgtggacgcggactcggggcacaatgcctggctgtcctaccacgtggtgcaggccagtgagcccrggctcttcagcctggggctgcgaacaggcgaggtgcgcatggtgcgtgctttgggtgacaaggactcggtccgccagcgcctgctagtcgctgtaagagatggaggacagccacccctttcagccactgccacgctgcacctggtgttcgcagatagcttgcaagaggtactgccggatttcagcgaccatcccacaccctctgactcccaggctgagatgcagttttacctggtggtggccttggccttgatttctgtgctctttctcctcgcggtgattctagctattgctctacgcctgcgacagtctttcagccctactgcaggagactgctttgagtcagttctctgctccaagtccggacctgtgggtccccccaactacagtgagggaacgttgccctatgcctataatttttgtgtgcctggggatcaaatgaatccagaatttaattttttcacatctgttgatcattgtccagccacacaagataacctcaacaaagatagcatgctactggctagcattttaactcccagcrttgaagcagataagaagattcttaaacagcaagccccgcccaacacggactggcgtttctctcaggcccagagacccggcaccagcggctcccaaaatggcgatgacaccggcacctggcccaacaaccagtttgacacagagatgctgcaagccatgatcttggcgtccgccagtgaagctgctgatgggagctccaccctgggagggggtgccggcaccatgggattgagcgcccgctacggrccccagttcaccctgcagcacgtgcccgactaccrccagaatgtctacatcccaggcagcaatgccacactgaccaacgcagctggcaagcgggatggcaaggccccagcaggtggcaatggcaacaagaagaagtcgggcaagaaggagaagaagtaacatggaggccaggccaagagccacagggyrgcctctccccaaccagcccagcttctccttacctgcacccaggcctcagagtttcagggctaacccccagaatactggtaggggccaaggccatgctccccttgggaaacagaaacaagtgcccagtcagcacctaccccttcccccccagggggttgaatatgcaaaagcagttccgctgggaacccccatccaatcaactgctgtacccatgggggtagtggggttactgtagacaccaagaaccatttgccacaccccgtttagttacagctgaactcctccatcttccaaatcaatcaggcccatccatcccatgcctccctcctccccaccccactccaacagttcctctttcccgagtaaggtggttggggtgttgaagtaccaagtaacctacaagcctcctagttctgaaaagttgsaagggcatcatgacctcttggcctctcctttgattctcaatcttcccccaaagcatggtttggtgccagccccttcacctccttccagagcccaagatcaatgctcaagttttggaggacatgatcaccatccccatggtactgatgcttgctggatttagggagggcattttgctaccaagcctcttcccaacgccctggggaccagtcttctgttttgtttttcattgtttgacgtttccactgcatgccttgacttcccccacctcctcctcaaacaagagactccactgcatgttccaagacagtatggggtggtaagataaggaagggaagtgtgtggatgtggatggtgggggcatggacaaagcttgacacatcaagttatcaaggccttggaggaggctctgtatgtcctcaggggactgacaacatcctccagattccagccataaaccaataactaggctggacccttcccactacataatagggctcagcccaggcagccagctttgggctgagctaacaggaccaatggattaaactggcatttcagtccaaggaagctcgaagcaggtttaggaccaggtccccttgagaggtcagaggggcctctgtgggtgctgggtactccagaggtgccactggtggaagggtcagcggagccccagcaggaagggtgggccagccaggccattcttagtccctgggttggggaggcagggagctagggcagggaccaaatgaacagaaagtctcagcccaggatggggcttcttcaacagggcccctgccctcctgaagcctcagtccttcaccttgccaggtgccgtttctcttccgtgaaggccactgcccaggtccccagtgcgccccctagtggccatagcctggttaaagttccccagtgcctccttgtgcatagaccttcttctcccacccccttctgcccctgggtccccggccatccagcggggctgccagagaaccccagacctgcccttacagtagtgtagcgccccctccctctttcggctggtgtagaatagccagtagtgtagtgcggtgtgcttttacgtgatggcgggtgggcagcgggcggcgggctccgcgcagccgtctgtccttgatctgcccgcggcggcccgtgttgtgttttgtgctgtgtccacgcgctaaggcgaccccctcccccgtactgacttctcctataagcgcttctcttcgcatagtcacgtagctcccaccccaccctcttcctgtgtctcacgcaagttttatactctaatatttatatggctttttttcttcgacaaaaaaataataaaacgtttcttctgaaaagctg

SEQ ID NO: 265 - DNA, 2657 bp, Homo sapiens
argggggtggaggtttggccctaaagcttcaggacaccaaagaaattcagtcgaacagcccaccagttctctccatagggacctgggtcccgtgaatgctggttatctcacaccctgaggaataaagattggaatccgcactggatgctggaagttgactcggagaaaattgcgacaggagggaaatggcggctctgcraaagttgccacactgcagaaagctggtcctgctgtgcttccttttggcgaccctgtgggaggccagggccgggcagattcgctattctgtgcgggaagagatcgacagaggctccttcgtaggcaacatcgccaaggacttgggtttggagcccctggcactggcagagcagggagtccgcatcgtctccagaggtakgtcccagctctttgctctgaacccgcgaagcggcagcttggtcactgcgaacaggatagaccgggaggagctctgcgctcagagcgcaccctgtctgttgaattttaacattctgctggaggataaattgactatttattcagtagaggtggaaataacagatattaacgataatgcccctcgctttggagtagaggaactggagctaaaaatcagtgaaaccactacgccaggattccggattcctcttaagaatgcgcatgatgcagacgtaggtgagaacgcccttcagaartacgcactcaacccaaatgaccacttctccctggacgtgcgaagrggagctgatgggaacaagtacccagaactggtgctggagcgctctctggaccgcgaggaagaggctgttcaccacctcgttctcgtggcttctgatgggggtgacccagtgctatctggcacctcccgcatctrcgtgaaggtcctggatgcgaacgacaatgcgcctgtttttacacagcccgagtaccgcataagcattccggagaatacgctcgtgggcacccggatactcacggtgaccgccactgacgcagatgagggctactacgctcaagtggtatattttctagagaaaagccctggagaaacctcagaggtatttgagcttaagtcaacatctggagaactgacaatcataaaagatctagattatgaggatgctacattccatgaaattgatattgaagctcaggatggtccgggccttctaaccagagcgaaggttatcgtcacggttctggatgtgaatgacaatgccccagaattttacatgacatctgctactagctcagtttctgaagactctcttccaggaaccataattgggctttttaatgtacatgatagagactctgggcagaacgcattcaccacctgttcactccccgaggatcttccttttaagttagaaaagtcagtagacaattactaccgactggttacaaccagagcccttgacagggaacagttttccttttacaacatcactctaaccgctaaagatggagggaacccctccctgtccacggatgctcacattttgctccaggtggcagacatcaacgacaacgyacccgccttctcccgcacatcctactccacctacattcccgaaaacaaccccagaggagcctctgtcttctcagtgacggcccatgaccccgacagcaacgacaatgctcatgtaacttactctttcgcggaggacactgttcagggggcacccttatcctcttacatctctatcaactccgacactggagtactctatgcactgcgctcctttgattatgagcagttgcgagacttgcaagtgtgggtgatagcgcgggacagcgggaaccctccactcagtagcaatgtatcattaagcctgttcgtgctggaccagaacgacaacgcgcccgagatcctgtaccctgccttccccacagacggttccacyggcgtggagctggcgccccgctccgcagagcccggctacctggtgaccaaggtggtggcggtgracagagactcgggccagaacgcctggctgtcttaccacctgctcaaggccagcgagccgggactcttctcggtgggtctgcacacgggcgaggtgcgcacggcgcgagccctgctggacagagacgcgctcaagcagagcctcgtggtggccatccaggaccacggccagccccctctctccgccactgtcacgstcaccgtggccgtggccgacaggatccccgacatcctggccgacctgggcagcctcgagccctccgccatacccaacgattcggacctcactctgtacctggtggtggcggtggccgcggtctcctgcgtcttcctggccttcgtcatcgtgttgctggcgcacaggctgcggcgctggcacaagtcacgcctgctgcaggcttcaggaggcagcttgacaggcatgcagagctcgcactttgtgggcgtggacggggttcgggctttcctgcagacctattcccacgaggtctccctcactgcggactcgcggaagagccacctgattttcccccagcccaactatgcggacacgctcatcagccaggagagctgtgagaaaaaggattttttatcagcgcctcaatctctactcgaagaagaaagagaagaaacgytttctcaggtaatctatcttttcacaacatacgtactagctagtttgctgaagtaa

SEQ ID NO: 266 - DNA, 4738 bp, Homo sapiens
gagacataagagacttcagctgctgcattccaagccctgggtctaccttggagacaggacagcacagacttactctccacaaagggacttctgggtcatggggcccaagacactcccacagctcgctgggaaatggcaagtgctgtgcatgttgtccttgtgctgctggggctgggtgtctgggcagcttcgttactcagtggtggaggagtctgagccggggacgctggtggggaatgttgctcaggatctgggcttaaagatgacagatctgttgagccggcggctgcaaytgggctctgaggagaatgggcgctatttttccctgagcttgatgagtggtgccctggcagtgaatcaaaagattgaccgagaaagcctatgtggagccagcaccagctgcctgctgccagtgcaggtggtgactgaacaccccctggagctaatccgtgtagaggtagagatcctggatctcaatgacaactctcctagctttgccacccctgagcgagagatgcrcatctcagaatcagcagcatctggggcacgattcccactggacagtgcccaggatccggatgtgggcaccaatactgtgagcttttacactctaagccccaacagccacttctctctgaatgtgaagaccctaaaagatgggaagccattcccagagctggtgctagagcagcagctggatcgtgaagcccaggcaagacatcagctggtgcttactgctgtggatggggggaccccagcccgctcagggaccacccttatctctgtcatcgtgctggacatcaatgataatgctccaaccttccaatcctcagttctacgtgtgggaatcccagagaatgcacccattggtactctgctgctccgcctyaatgccactgatccagacgagggcaccaacrgccaactagactattcttttggagaccacacatctgaggcagtgcggaacctctttggcctagaccctagcagtggggcaatccatgtgttgggtcccatagactttgaggagtcacgtttctatgaaattcatgcaagagcccgtgaccagggacagcctgccatggagggccactgtgtgattcaagtggatgtgggggatgtcaatgacaatgccccagaggtgctattggcctctttggccaaccctgtmctagagagcacaccagtgggcacagtagtggggttgtttaatgtgcgagaccgggactcaggtagaaatggtgaagtgagccttgatatctctcmrgacctgccatttcagattaagccttctgagaaccactactcgctgctaaccagccagcctttggaccgggaggccacatcccactatatcatcgagctgctggccagcgatgctggttcaccttccctacacaaacatctcaccatcaggctcaacatttcagatgtcaatgacaatgcaccccgcttcaaccagcagctttacactgcttacatcctagaaaaccggcctccrggctcccttctttgcactgtggctgcctcagatccagacactggggataatgcccgcctcacctactccattgtaggaaatcaggttcagggagccccagcctcctcctttgtgtatgtcaacccagaggatggacggatctttgyccagcgtacctttgactatgaattgctgcagatgctgcagattgtggtgggggttcgagactccggctctcccccattgcatgccaacacatctctgcatgtgtttgtcctagacgagaatgataatgccccagctgtgctgcacccacggccagrctgggaacactcagccccccagcgtctccctcgctctgctcctcctggctccttggtcaccaaggtgacagccgtggatgctgatgcaggccacaatgcgtggctctcctactcactgttgccacagtccacagccccaggactgttcctcgtgtctacacacactggtgaggtgcgcacagcccgggccttactggaggatgactctgacacccagcaggtggtggtcctggtgagggacaatggtgacccttcrctctcctccacagccacagtgctgctggttctggaggatgaggacccygaggaaatgcccaaatccagtgacttcctcatacaccctcctgagcgttcagaccttaccctttacctcattgtggctctagcgaccgtcagtctcttatccctagtmaccttcacctttctgtcagckaagtgccttcagggaaacgcagacggggacgggggtggagggcagtgctgcaggcgccaggactcaccctccccggacttctataagcagtccagccccaacctgcaggtgagctcggacggcacgctcaagtacatggaggtgacgctgcggcccacagactcgcagagccactgctacaggacgtgcttttcaccggcctcggacggcagtgacttcacttttctaagacccctcagcgttcagcagcccacagctctggcgctggagcctgacgccatccggtcccgctctaatackctgcgggagcggagccagcaagccccgcccaacacggactggcgtttctctcaggcccagagacccggcaccagcggctcccaaaatggcgatgacaccggcacctggcccaacaaccagtttgacacagagatgctgcaagccatgatcttggcgtccgccagtgaagctgctgatgggagctccaccctgggagggggtgccggcaccatgggattgagcgcccgctacggrccccagttcaccctgcagcacgtgcccgactaccrccagaatgtctacatcccaggcagcaatgccacactgaccaacgcagctggcaagcgggatggcaaggccccagcaggtggcaatggcaacaagaagaagtcgggcaagaaggagaagaagtaacatggaggccaggccaagagccacagggyrgcctctccccaaccagcccagcttctccttacctgcacccaggcctcagagtttcagggctaacccccagaatactggtaggggccaaggccatgctccccttgggaaacagaaacaagtgcccagtcagcacctaccccttcccccccagggggttgaatatgcaaaagcagttccgctgggaacccccatccaatcaactgctgtacccatgggggtagtggggttactgtagacaccaagaaccatttgccacaccccgtttagttacagctgaactcctccatcttccaaatcaatcaggcccatccatcccatgcctccctcctccccaccccactccaacagttcctctttcccgagtaaggtggttggggtgttgaagtaccaagtaacctacaagcctcctagttctgaaaagttgsaagggcatcatgacctcttggcctctcctttgattctcaatcttcccccaaagcatggtttggtgccagccccttcacctccttccagagcccaagatcaatgctcaagttttggaggacatgatcaccatccccatggtactgatgcttgctggatttagggagggcattttgctaccaagcctcttcccaacgccctggggaccagtcttctgttttgtttttcattgtttgacgtttccactgcatgccttgacttcccccacctcctcctcaaacaagagactccactgcatgttccaagacagtatggggtggtaagataaggaagggaagtgtgtggatgtggatggtgggggcatggacaaagcttgacacatcaagttatcaaggccttggaggaggctctgtatgtcctcaggggactgacaacatcctccagattccagccataaaccaataactaggctggacccttcccactacataatagggctcagcccaggcagccagctttgggctgagctaacaggaccaatggattaaactggcatttcagtccaaggaagctcgaagcaggtttaggaccaggtccccttgagaggtcagaggggcctctgtgggtgctgggtactccagaggtgccactggtggaagggtcagcggagccccagcaggaagggtgggccagccaggccattcttagtccctgggttggggaggcagggagctagggcagggaccaaatgaacagaaagtctcagcccaggatggggcttcttcaacagggcccctgccctcctgaagcctcagtccttcaccttgccaggtgccgtttctcttccgtgaaggccactgcccaggtccccagtgcgccccctagtggccatagcctggttaaagttccccagtgcctccttgtgcatagaccttcttctcccacccccttctgcccctgggtccccggccatccagcggggctgccagagaaccccagacctgcccttacagtagtgtagcgccccctccctctttcggctggtgtagaatagccagtagtgtagtgcggtgtgcttttacgtgatggcgggtgggcagcgggcggcgggctccgcgcagccgtctgtccttgatctgcccgcggcggcccgtgttgtgttttgtgctgtgtccacgcgctaaggcgaccccctcccccgtactgacttctcctataagcgcttctcttcgcatagtcacgtagctcccaccccaccctcttcctgtgtctcacgcaagttttatactctaatatttatatggctttttttcttcgacaaaaaaataataaaacgtttcttctgaaaagctg

SEQ ID NO: 267 - DNA, 2716 bp, Homo sapiens
tacaggcagtacacacaggtcaggaggaggaaaaaaaaaaaaaagaaaaagaaaaaagctctcgtgcctcttagaacctccataaccgccagattgaaaactgactgtccaagactgcctaaatcctacttctggatgactctccagtcagaattctcctgaaaattgggttaatttcagctcagaaaagcagaaacgatacccttggtactggactggaagaaaactacgaagtgagagagccatgaagattcagaaaaagctgactggctgcagcaggctgatgcttctgtgtctttctctggagctgctgttggaagctggggctgggaatattcactactcagtgccggaagagacagacaaaggttccttcgtaggcaacatcgccaaggacctagggctgcaaccccaggagctggcagatggcggagtccgcatcgtctccagaggtaggatgccgcttttcgctctgaatcctagaagtggcagcttgatcaccgcgcgcaggatagaccgggaggagctctgcgctcagagcatgccgtgtctcgtgagttttaatatccttgttgaggataaaatgaagctttttcctgttgaagtagaaataattgatattaatgacaacactccccaattccagttagaggaactggagtttaaaatgaatgaaataacgactccaggtaccagartctcattgccttttgggcaagaccttgatgtgggtatgaactcactccagagctaccaactcagctctaaccctcatttctccctggatgtgcaacagggagccgatgggcctcaacatccagagatggtgctgcagagtcccttagacagagaagaagaagctgtccaccacctcatcctcacagcttctgatgggggtgaaccagtccgttcagggaccctcagaatttacattcaggtggtggatgcaaatgacaatcctccagcatttactcaggcacaataccatataaatgtccccgaaaacgtgccgctgggtactcagctgctcatggtaaatgccactgaccctgatgagggagccaatggggaagtaacgtactcctttcacaatgtagaccacagagtggcccaaatatttcgtttagattcttacacaggagaaatatcaaataaagaaccactagatttcgaagaatacaaaatgtattcaatggaagttcaagcccaggatggtgcggggctcatggctaaagttaaggtactgatcaaagttttggatgtaaatgataatgccccagaagtgaccatcacctctgtcaccactgcagttccagaaaactttcctcctgggaccataattgctcttatcagtgtgcatgaccaggactcaggagacaatggctacaccacatgtttcattcctggaaatttaccctttaaattggaaaagttagttgataattattaccrtttagtgactgaaagaacactggacagagaacttatctctgggtacaacatcacaataacagcaatagaccaaggaactccagctctatctactgaaactcacatttcactactagtgacagatatcaatgacaactccccagtcttccatcaggactcctactctgcctacattcccgaaaacaaccccagaggagcctccatcttctctgtgagggcccacgacttggacagcaatgagaatgcacaaatcacttactccctaatagaggacactatccagggggcacccctatctgcctacctctccatcaactccgacactggggtcctgtatgcgctgcgatccttcgactatgagcagttccgggacatgcaactgaaagtgatggcgcgggacagtggggatccgcccctcagcagcaacgtgtctctcagcctattcctgctggaccagaacgacaacgcgcccgagatcctgtaccccgccctccccacagatggttctaccggcgtggagctggcgcccctctccgcagagcccggctacctggtgaccaaggtggtggcggtggacagagactcgggccagaacgcctggctgtcctaccgcctgctcaaggccagcgagccgggactcttctcggtgggtctgcacacgggcgaggtgcgcacggcgcgagccctgctggacagagacgcgctcaagcagagtctcgtggtggccgtccaggaccacggccagcccccgctctccgccactgtcacgctcaccgtggccgtggccgacaggatctccgacatcctggccgacctgggcagcctcgagccctccgccaaacccaacgattcggacctcactctgtacctggtggtggcggcggccgcggtctcctgcgtcttcctggccttcgtcatcgtgctgctggcgcacaggctgcggcgctggcacaagtcacgtctgctacaggcttcgggaggcggcttagcgagcatgcccggttcgcactttgtgggcgtggacggggttcgggctttcctgcagacctattcccacgaggtctccctcactgcggactcgcggaagagccacctgattttcccccagcccaactatgcggacacactcatcagccaggagagctgtgagaaaaagggttttctatcagcaccccagtctttacttgaagacaaaaaggaaccattttctcaggtaaacttttgtgatgaatgtatcagctatctagagaaaaataattcttga

SEQ ID NO: 268 - DNA, 3488 bp, Homo sapiens
ttcatctgtacctttcaagtattcaaatagaaaaatayaaacaatgtaaataaaatagcaaaacaatgtaatatctcataaaactgcaatggtaaaagcatttatcctattgaaattccacaatttttatttgaaaatattatcgacatgtaattcaagtggcatttagaagaataatttaaaagcaacaactctatagaaagcttgtaaaatgattaagtagtttaaaccaaataaaacaatttctgagtcagtcatctccagtaggtctattttagtctcaagataaattcatttctggtgacaactgaagttcttagttatttgttagtatatattggagacatttacaataaagcttagagcacaatgggaaatgaaagtatcatgttttttttaagaccaaatgtattgcagaaatgtgagtaatttaatccgatgctacaatctgatcattctgatctaatctgatcatttaataacactaaataaaaccttcatctcacattctttggctgtttcttttaaaatatgggtttacggataaatcaaataaattcaaaacaaagtaataagcaaatgatttttttttctcagtaatctagtagagtattacatttagaagtaatctgtatctcagtgcagtaactatttaggactgtaagcgccgctgttcacctactggaagacaaatgcaaccgaaaacactcasatctcacacctcacgaagacccgcagatgccacaaactaactgctggactgcagcgaaacccgacccctgtttggaggcactccaggtttccggaggattgtcatctccatagctgcggcaagaaactaaataagacccatttatgcacagtgaagattctgagaggattctgcagcaaaacaacaatggccgctccacagagtcgccccagacgcggcgagctgatcctgckgtgcgcgctgctgggaacgctgtgggaaatcgggaggggacagattcgctactctgtgccagaagagacggacaaaggctccttcgtgggtaatatctccaaggacctggggctggacccccggaagctggcgaagcacggagtccgtatcgtctccagaggtaggacgcagctctttgctctgaacccgcgcagcggcagcttgatcaccgcgggcaggatagatcgggaggagctctgcgctcagagcccgcggtgtctgataaatattaacaccctggttgaggataaaggaaaactctttggggtagaaatagaaataattgatattaacgataataacccaaaattccaggtcgaagatctagaagtaaaaattaacgaaatcgcggttcctggagcacgttatccactcccagaagctgttgacccggatgtgggcgtgaactccctccagagctaccagctcagccccaatcaccacttctccctgracgtgcagactggagacaatggagccataaacccagagctggtgctggagcgcgccctggacagggaggaagaggctgctcaccacctggtcctcacggcctcggatggcggcaagccgcctcgctctagcacagtgcgcatccaygtgacagtgttgratacaaatgacaatgccccggtttttcctcacccgatttaccgagtgaaagtccttgagaacatgcccccaggcacgcggctgcttactgtaacagccagcgacccggatgagggaatcaacggaaaagtggcatacaaattccggaaaattaatgaaaaacaaactccgttattccagcttaatgaaaatactggggaaatatcaatagcaaaaagtctagattatgaagaatgttcattttatgaaatggaaatacaagccgaagatgtgggggcacttctggggaggaccaaattgctcatttckgtggaagatgtaaatgacaatagaccagaagtgatcattacgtctttgtttagcccagtgttagaaaattctcttcccgggacagtaattgccttcttgagtgtgcatgaccaagactctggaaagaatggtcaagttgtctgttacacacgtgataatttaccttttaaattagaaaagtcaataggtaattattatagattagtgacaaggaaatatttggaccgagaaaatgtctctatctacaatatcacagtgatggcctcagatctaggaacaccacctctgtccactgaaactcaaatcgctctgcacgtggcagacattaacgacaaccctcctactttccctcatgcctcctactcagcgtatatcctagagaacaacctgagaggagcctccatcttttccttgactgcacacgaccccgacagccaggagaatgcccaggtcacttactctgtgaccgaggacacgctgcagggggcgcccctgtcctsgtatatctccatcaactctgacaccggtgtcctgtatgcgctgcaatctttcgactatgagcagatccgagacctgcagctactggtaacagccagcgacagcggggacccgcccctcagcagcaacatgtcactgagcctgttcgtgctggaccagaatgacaacgcgcccgagatcctgtaccccgccctccccacagacggttccactggcgtggagctggcgccccgctccgcagagcgtggctacctggtgaccaaggtggtggcggtggacagagactcgggccagaacgcctggctgtcctaccgcctgctcaaggccagcgagccgggactcttctcggtgggtctgcacacgggcgaggtgcgcacggcgcgagccctgctggacagagaygcgctcaagcagagcctcgtggtggccgtccaggaccatggccagccccctctctccgccactgtcacgctcaccgtagccgtggctgacagcatccccgaagtcctgaccgagktgggcagtctgaagccttcggtcgacccgaacgattcgagccttacactctatctcgtggtggcagtggctgccatctcctgtgtcttcctcgcctttgtcgctgtgcttctggggctcaggctgaggcgctggcacaagtcacgcctgctccaggattccggtggcagattggtaggcgtgcctgcctcacattttgtgggtgttgaggaggtacaggctttcctgcagacctattcccaggaagtctccctcaccgccgactcgcggaagagtcacctgatctttccccagcccaactacgcagacatgctcatcagtcaggagggctgtgagaaaaatgattctttgttaacatccgtagattttcatgaatataagaatgaagctgatcatggtcaggtgagtttagttctttgcttgcttttaatttccagatgaattttatttggcataaattatgttttgaaaaacattgtgaagatagttgaaaataatttttaaggtgtatcacagagttttgggtttattttggtggtgttactataaaattgaactctaatagtca

SEQ ID NO: 269 - DNA, 2721 bp, Homo sapiens
atggcggctcagccgaggggcggggactacagaggattcttcctgctctccatcctcctgsggaccmcctgggaagcctgggcaggacgtattctctactccgtgtcggaggagacggacaaagggtcctttgtgggagacatcgccaaggacctggggctggagccccgggagctggcggagcgcggagtccgcatcatctccagaggtaggacgcagcttttcgccctgaaccagcgcagcggcagcttggtcactgcgggcaggatagaccgggaagagatctgcgctcagagygcgcggtgtctggtaaactttaacatcctgatggaagataaaatgaatctttaccctatagacgtggaaataatagatattaatgacaacgttccaagattcttgacggaagaaataaatgtaaaaataatggagaatacagctcctggggttcggtttccgttaagcgaggctggggatccagatgtgggcacgaactccctccagagttaccagctcagccccaatcrccacttctccctggctgtgcaaagtggagacgatgraactaagtacccggaactggtgctggagcgggtgctggaccgggaggaagagcgggttcaccacctggtcytcacagcctctgatggcggcgacccgccccgatccagcaccgcccacatccaggtgacagtggtggatgtgaatgaccacaygcctgtcttctctctgcctcagtaccaagtaactgtccccgagaatgtgccagtgggtacaagactgctcacggtacatgctatcgacctggacgagggagtcaatggggaagtgacatattcttttcggaaaawaactcytaaacttccaaagatgtttcatctgaactcgcttacaggagaaatatcaactttagaaggattagattatgaagaaactgccttctatgaaatggaggttcaggctcaagatggtcctggtagtctgacaaaggcaaaagtactgatcacagttttagatgtaaatgataatgctccagaagtgactatgacgtctttaagtagctcaatccctgaagacacacctcttgggacagtcattgctcttttctacctacaagacagagattctggaaagaatggtgaggtgacctgcaccattccagaaaacctaccttttaaattagaaaaatcaatagataattattatagattggtcacaaccaaaaacttggaccgggaaacactctctttgtataacatcacactgaaagccacagatggtggaactcctcccttgtccagggaaactcacatattcatgcaggtggcagacaccaacgataacccacccaccttcccccactcatcctactcagtctacatcgctgagaacaaccccagaggggcctccattttcttagtractgcacaggaccacgacagtgaggataatgcccagatcacttattccttggccgaagacaccatccagggggctccagtgtcctcctatgtctccataaactctgacactggagtcctgtacgcgctgcaatcctttgattatgagcagttgagagaactacaactaagagtgactgcacatgacagcggggacccgcctctcagcagcaacatgtcactgagcctgttcgtgctggaccagaatgacaacccgcccgagatcctgtacccggccctccccacagatggttctactggcatggagctggcaccccgctccgcagagcccggctacctggtgaccaaggtggtggcggtggacaaagattcaggccagaaygcctggctgtcatacctcctgcttaaggccagcgagccaggactctttgcsgttgggctgtacacgggcgaggtgcgcacggctcgggccctgctggacagagatgccctcaagcagagcctcgtggtggccgtccaggaccacggtcagcctcctctgtcagccaccgtcacactcaccgtggctgtggctgacagcatccccgaagtcttggccgacctgggcagccttgagccctccgacggtccttacaactatgacctcacgttgtacctggtggtggcggtggccacagtctcctgcgtcttcctagccttcgtcctcgtactgctggcgctcaggctgcggcgctggcacaagtcacgcctgctgcaggcttcagaaggtggcttggcgaacgtgcccacctcgcactttgtgggcatggacggggtgcaggctttcctgcagacctattcccatgaggtctccctcaccgcggactctcggaagagtcacctgatcttcccccagcccaactatgtagacatgctcatcagccaggagagctgtgagaaaaatgattctttgctracatccgtagattttcaggaatgtaaagaaaacctgccaagtattcaggtgagcccagcccttcctttatttccatgaggaatttatttgcatgatatttctctattattttgcaaaacaaatgttttgaaaatagggatttaaaaaactttatagargtaaaaatgagtttaccagtttccttcagtggtgacactttaatatagaacacataggatatagtatttctttagtgaaagcctatggacaagattatgaatatgtggwctatcacattttataatttccacctactttccaatctatgttccaacctactttcttaactcatatattttatacatt

SEQ ID NO: 270 - DNA, 2998 bp, Homo sapiens
cagggcagccccagctcagactccccagcgccagcctttacaccgcttcctcctcggaaaaagaagaattttttcttgaactggaactgcaactaaagtccgttcggagatccaaaaatctgcaatacagaggttatttgtaacccggcgtctccaggctggtgagcaagctgaggagagcaagagggatggggagcggcgccggggagctgggccgggctgagaggctgccagtgctctttctcttcctgctgtctttgttctgcccggcgctctgtgagcagatccgctacaggattcccgaggaaatgcccaagggctccgtagtggggaacctcgccacggacctggggttcagcgtccaggagttaccgactcgaaaactgcgcgtcagttcggagaagccttacttcaccgtgagcgcagagagcggggagttgcttgtgagcagcaggctagacagggaggagatatgcgggaagaagccagcttgtgctctggaatttgaggctgttgctgaaaatccactgaacttttatcacgtgaatgtggagatcgaggacattaatgaccacacgccaaaattcacgcaaaattcctttgagctgcaaataagtgagtctgcacagcctggcacamgatttatattaggatctgcccatgatgcggatattggtagcaacacactgcagaattaccaactcagtcccagtgatcatttctcaytrataaataaagagaaatcagatggcagtaaataccctgagatggtattgaagacacctttggacagagaaaagcagaaatcctaccacttgactttgactgccttggactttggagctccacccctaagcagcactgcacagatacacgttctagtgactgatgccaatgataatgctccagtgttcagtcaagacgtatacagggtgagcctttcagaaaacgtgtacccggggaccacggtgctacaggtgactgccacggaccaggatgagggtgkcaatgccgagattactttctctttcagtgaagctagccagatcacccaatttgacctgaactctaacaccggggaaattactgttttaaatacattagattttgaagaagtcaaagaatattccatagttttggaagcaagggacggtggaggaatgattgcgcaatgcacagtggaggtagaagtcatagatgaaaatgacaacgccccagaagtgatattccagtctctacccaacctaattatggaggacgccgagctgggaacacatattgctttgctcaaagtccgtgacaaggattccagacacaatggagaagtgacttgtaaattggaaggtgatgttccatttaaaatattaacttcttcaagaaacacgtataaattagtgacagatgctgttctagaccgcgagcagaatccagagtacaatataaccgttacggcaacagatcggggcaagcctcccctctcctccagttccagcatcaccctgcacattggtgatgtaaatgacaacgctccggttttctcacagtcttcctatatagtccacgtggccgagaacaacccgcctggagcctctatttcacaagtcagggcttctgatccggacttggggcccaacggccaagtctcttactgcatcatggccagtgacctggagcagcgggagctgtcatcctacgtgtccataagcgcggagagcggggtggtgttcgcgcagcgcgccttcgaccacgagcagctgcgcgccttcgaactcacactgcaggcccgcgaccagggctcgccagcgctcagcgcgaacgtgagcctgcgcgtgttagtggacgaccgcaacgacaatgcgccacgggtgctgtaccccgcgctgggtcccgacggctctgcgctcttcgatatggtgccgcacgctgcagagcctggctacttggtgaccaaggtagtggcggtggacgcagactcaggacacaacgcctggctgtcctaccacgtgctgcaggctagcgagcccgggctcttcagcctggggctgcgcacgggcgaagtgcgcacagcgcgtgccttaggcgacagggacgccgtccgccagcgccttctggtcgccgtgcgtgacggtggacagccaccactctcsgccactgccacgttgcacctggtcttcgccgacagcttgcaggaggtgctgccggatatcactgaccgccccgacccctctgacctccaggctgagctgcagttttacctagtggtggccttggccttgatctcagtgctcttcctcgtggccatgattctggccattgccttgcgcctgcgacgctcctccagccccgcctcctggagctgcttccagcctggtctctgtgttaaatccgaatccgtggttccccccaactacagcgaggggactttgccttattcctacaatctatgtgttgcacatacaggaaagacggagtttaatttcctaaaatgtagtgagcagttgagttcaggacaagacatactttgcggtgattcatctggggccttatttccactttgtaattccagtgaattgacttcccatcaggtgagtttcctttaagtataatttaatgctcattgcctacccatttctccatattcacaagaaaatatacatatttgcaggaaaatatataatttttagatgtcatggatcattttaggaaagttgtagtcagttaaaaagctgtcatatcattctacaaaggaggagtaaagtaggagcaattgtgtggcccaacatttgtttgttttttagccaagcttagatttataaagcaatgagggtgtggttttaaccacaaagtgaaagtgttagacagttgttggctctctcctaaaaagtgaatgagatttttcctatacattttccttcttgttgactaatatatgatgaatacttttttcagcttggatataccataaatataaaaataataaagccaaagaatttaagct

SEQ ID NO: 271 - DNA, 2550 bp, Homo sapiens
aagcccgttcggagatccaaaaatctacaatacagaggttatttgtaacctggcgtctccaggctggtgagcaagctgaggagagcaagagggatggggagcggcgccggggagctgggccgggctgagaggctgccagtgctctttctcttcctgctgtctttgttctgcccggcgctctgtgagcagatccgctacaggattcccgaggaaatgcccaagggctccgtagtggggaacctcgccacggacctggggttcagcgtccaggagttaccgactcgaaaactgcgcgtcagttcggagaagccttacttcaccgtgagcgcagagagcggggagttgcttgtgagcagcaggctagacagggaggagatatgcgggaagaagccagcttgtgctctggaatttgaggctgttgctgaaaatccactgaacttttatcacgtgaatgtggagatcgaggacattaatgaccacacgccaaaattcmcgcaaaattcctttgagctgcaaataagtgagtctgcacagcctggcacaagatttatactagaagtagcagaagatgcagatattggcttaaactctctgcagaagtataaactctctcttaacccaagtttctcattaataattaaggagaaacaggatrgtagtaaatacccggaactggcactggagaaaaccttagaccgggaacaacagagttaccatcgtttagtcctgactgccttggacggtggacatccacccctaagcggcaccactgagctccggatccaggtaaccgacgccaatgataatcccccggtattcaaccgagacgtgtacagagtcagccttcgggaaaacgtgccaccaggcaccactgtgttgcaagtgtcagccactgaccaagacgagggcatcaactcagaaattacttattccttctacagaaccgggcaaatctttagtctgaattcaaagagcggagaaattaccactcaaaagaaactggattttgaagagaccaaggaatattcaatggttgtagaagggagggatggtggtggactggttgcacaatgtacagttgaaattaatattcaagatgaaaatgacaatagcccagaagttacattccattctctacttgaaatgattctggaaaacgcggtgcctggaacactaattgctttgatcaaaatacatgaccaagattctggggaaaatggggaggttaattgtcaattacaaggcgaagtcccttttaagattatctcttcatccaamaattcgtataagttggtaacagatggaaccctagaccgagagcaaaccccggagtacaatgtcaccatcacagccacagacaggggcaagccgcccctctcctccagcataagcgtcatcctacatatcagagacgtcaacgataacgctccggttttccaccaggcgtcctacttagtcagtgtacccgaaaacaaccctcctggggcctccatcgcgcaagtctgcgcctcggacctggacttggggttgaacggccaagtctcctactctatcatggccagcgacctagagcctctggcactggcctcttacgtgtccatgagcgcgcaaagtggggtggtgttcgcgcagcgcgcctttgactacgagcagctgcgcaccttcgaactcacactacaggcccgcgaccagggctcgcctgcgctcagcgcaaacgtgagcctgcgcgtgttggtgggcgaccgaaacgacaacgcaccgygggtgctgtaccccgcgctgggtcccgacggctctgcgctcttcgatatggtgccgcgcgctgcagagcccggctacctggtgaccaaggtagtggccgtggacgcagactyaggacacaacgcctggctgtcctaccacgtgctgcaggctagcgagcccgggctcttcagcctggggctgcgcacaggagaggtgcgcacagcgcgtgccttgggcgacagggacgcggcccgccagcgcctgctggttgctgtgcgtgatggtggacagccgccactctccgccaccgccacgctrcacttggtctttgctgacagcttgcaggaggtgctgccggatatcactgaccgccctgtaccctctgacccccaggctgagctgcagttttacctagtggtggccttggccttgatctcagtgctcttcctcctggccgtgattctggccgttgccttgcgcctgcgacgctcctccagccctgccgcctggagctgcttccaacctggtctctgtgtcaagtctggacctgtggttccccccaactacagtcaggggactttgccttattcctacaacctatgtgttgcacatacaggaaagacggagtttaatttcctaaaatgtagtgagcaattgagttcaggacaagacatactttgtggtgattcatytggggccttatttccactttgtaattccagcgagtcgacttcccatcctgagttggtgagtttcatttatgtctattctttttcattacccacccaattttctgtatttacatga

SEQ ID NO: 272 - DNA, 2630 bp, Homo sapiens
cacaaacctgctcccaggctgcagcaaaactcagcctctttcttctaaggaaaagatcaccatactttgcagggyggaagaaagaacctgatgaagcagcgcgcacagagatccttttgagaaaattccaaagcgaggcagcaatggcagctccaaccaaatgccagctccgcggaagattagtcctgctatgctcgctcctggggatgctatgggaggccagggccagtcagattcgctactcagtgcctgaagagacagaaaagggctatattgtgggcaacatctccaaggacctggctctggagccccgggagctggcggagcgccgagtccgcatcgtctctagaggtargacgcagcttttctctctgaacccgcgcagcggcaccttggtcaccgcgggtaggatagmccgggaggagctctgtgctcagagcccgcggtgtctggtgaactttaaagtcctggttgaagacagagtgaaactgtacggaatagaaatagaagtaactgatattaacgacagcgccccaaagttccaggccgaaagtctggaagtaaaaattaacgaaatcgcggttcctggagcacgttatccacttccagaagctattgatccggatgttggcgtgaactccctccagagctaccagctcagccccaatcaccacttctccctgaacgtgcagactggagacaatggagccataaacccagagctggtgctggagcgcgccctggacagggaggaggcaactgcycaccacctggtcctcacggcctcggatggcggcgagccgcgtcgctccagcacagtgcgcatccatgtgacagtgttggatacaaatgataatgccccggtttttgctcaacggatttaccgagttaaagtccttgagaacgtgcccccaggcacctggctgcttactgcaacagccagcgacctggatgagggaatcaacggaaaagtggcatacaaattctggaaaattaatgaaaaacaatctctgctattccagcttaatgaaaatactggggaaatatcaacagcaaaaagtctagattatgaagaatgttcattttatgaaatggaaatacaagctgaagatggtgggggattgaaagggtggacaaaagtgctcatttcggtggaagatgtaaatgacaatagacctgaagtgaccattacatctctgtttagcccagtgagagaagahgcmcctcagggaacagtaattcttcttttcaatgctcatgaccgagactccgggaagaatggtcaagttgtctgttctatccaggagaatctatcttttacattagaaaattcagaagaagattattacagattgttgacsgcccaaattcttgaccgagaaaaagcctcagaatataatatcacggtgactgcaacagacagaggaactccgcccctgtccacagaaattcacatcaccctgcaagtgactgacatcaatgataatccacctgctttctctcaagcctcctactcagtctrcctcccggaaaacaacgccagaggtacttccatcttctccgtgattgcctatgaccctgatagcaatgagaattctagagttatttactccttggcagaggataccatccaagggtctcctctctccacctatgtctctattaactcagacactggygtgctgtatgctctgtgctcctttgactatgagcagtttagagatttgcaaatgcaggtgacggcaagtgacagtggaagcccaccacttagcagcaatgtgtcattgagactgtttgttttggaccagaatgacaatgccccagaaatcctgtaccctgccctccccactgatggttctactggtgtggagctggcaccccgctctgcagagcctggctacctggtgaccaaggtggtggcagtggacagagactcaggccagaatgcttggctctcctaccgcctattcaaggccagtgagccagggctcttctcggtggggctgcacacaggtgaagtgcgcacagctcgggccctgctagatagagaygcgctcaaacagagccttgtggtggctgtacaggaccatggccagccccctctctcggccactgtcacgctcacagtagccatagctgacagcatcccagacatcctggctgacctgggcagtcttcagatccctgcagacctggaggcctcagaccttaccctctacctcgttgtggctgtggcagtcgtctcctgtgtcttcctcaccttcgttatcaygctgctggccctcaggctgaggcactggcactcctcgcatctgctgcgggctaccagtgatgggttggctggtgtgcccacctcacactttgtgggtgtagatggggttcgagctttcctacagacctattctcaggagttctccctcaccgctgactcaaggaagagtcayctgatcttcccccagcccaactatgcagacacactcatcagccagcagagctgtgagaaaaatgascctttstgygtctctgttgattccaagtttcctatagaagacacccctttggttccggtgagttcattttttttctttctttcttttctttttttgttttttgttttgttttgtttttga

SEQ ID NO: 273 - DNA, 2463 bp, Homo sapiens
atgggagggagctgcgcgcagaggcgccgggccggcccgcggcaggtgctatttcctttgctgctgcctttgttctaccccaccctgagtgagccgatccgctactcgattccggaggagctggccaagggctcggtggtggggaacctcgctaaggatctagggctcagtgtcctggatgtgtcggctcgcaagctgcgagtgagcgcggagaagctgcacttcagcgtagacgcggagagcggggacttacttgtgaagaaccgaatagaccgtgagcaaatatgcaaagagagaagaagatgtgagttgcaattggaagctgtggtggaaaatcctttaaatatttttcatgtcattgtggtgattgaggatgttaatgaccacgcccctcaatttgataaaaaggaaatacatttagaaattttcgaatctgcatccgctggtacacgactatcgcttgaccctgccacggatcctgatataaacataaaytcaattaaagattataagataaactctaatccttatttttcattaatggttagagttaattccgatggtggcaaatacccagagttatctctggagaaactcctagaccgggaagaacagagatctcatagcttgatattgactgccttggacggaggggacccaccaagaagtgccaccgctcacatagaaatttctgtcaaggataccaatgataaccccccggttttcagcagagacgaatatagaattagtcttagtgaaaatctgccccctgggtcccctgtgttgcaagtgacagccactgaccaggatgagggggtcaatgctgagataaactactacttccgaagcactgcccagagcacaaaacatatgttctcattggatgagaaaacaggtatgattaagaataaccagtcatttgattttgaagatgtagaaaggtacaccatggaagtggaagygaaggacggaggtggtctctctacccagtgtaaagtaatcatagaaatccttgatgaaaacgacaacagcccagaaataatcatcacttctctctctgatcagattttggagaattcacctccaggaatggttgttgccctcttcaaaacacgggatctggatttcggaggaaatggagaagtcaggtgtaatatagaaacagacattccattcaagatttattcttcttccaataactactacaaactggtgacagatggagccctggaccgagagcagacaccagaatacaatgtcaccatcgtagccactgacaggggcaagccgcctctttcttccagtagaagcatcaccttgtatgtcgctgacatcaacgacaacgccccagttttcgaccagacgtcctacgtggtccacgtggscgagaacaacccgccaggagcctccattgcgcaagtgagcgcctctgacccggatttggggctcaatggscacatctcctactctatagtggcgagtgacctagagcccctggcggtgtcgtcatacgtgtcagtgagcgsgsagagcggggtggtgttcgcgcagcgcgcctttgatcacgagcagctgcgcgccttcgcgctcacgctgcaggcccgcgaccacggctcgcccacgctcagcgccaacgtgagcctgcgcgtgttggtgggagaccgcaatgacaacgcaccgcgggtgctgtacccagctctgggtcctgacggctccgcgttcttcgatatggtacctcgctctgcagagcccggctacctagtgactaaggtggtagcggtggacgccgactcgggacacaacgcctggctgtcctaccacgtgctgcaggccagtgagcccggactcttcagcctggggctgcgcactggggaggtgcgcacggctcgagccttaggcgacagggacgcagcccgccagcgcctgctggtcgctgtgcgtgacggtggacagccgccactctctgccaccgccacgcttcatctggtcttcgcagacaacttgcaagagatactgccagacctcagcgaccgccctgtactctctgacycccaggctgaactgcagttttacctggtggtggccttggccttaatctcagtgctcttcctcctcgccgtgattctggccattgccttgcgcctgcgacgctctctcagccctrctacttgggactgcttccatcctggtctctgtgtcaartctggacctgtagttccccccaactacagtgaggggactttgccttattcttataatctgtgcattgcacatacgggtacaaaagagtttaatttcctaaaatgcagtgtgcccctacatkccaatgaagacatggtttgcagtgtttctcctggagccttaattccacctcatggtggggaggatttgacttcacatcctgagactctgacttcggtgagtttctcttttttgtgtgtgatttatctaatagtctactag

SEQ ID NO: 274 - DNA, 2714 bp, Homo sapiens
aaagtgcccaggctacagagacaccctgaagccacagaaagacaaaggaaccggttgaaacacacaacgtgtccagtgaggactttgcagaattctgtaaccagactacaatggccgctcaaaggaatcgctcaaaggaatcaaaggattgcagcgggctggtcctgctctgccttttcttcgggattccatgggaggctggagcccggcagatctcctactcaattcctgaggaattagagaaaggctctttcgtgggcaacatctccaaggacttgggtctggcgccccgggagctggcggagcgcggagtccgcatagtctccagaggtaggacgcagcttttctctctgaacccgcgcagcggcagcttgrtcaccgcgggcaggatagaccgggaggagctctgcgctcagagcgcgcggtgcgtggtgagttttaatatccttgtggaagacagggtgaaactttttgggatagaaatagaagtaactgatatcaatgacaatgctccaaaattccaagcagaaaatctagacgtaaaaattaatgaaaatgtcgctgcgggaatgcgttttcctctcccggaagctattgatccggatgtgggcgtgaactccctgcagagctatcagctcagccccaataagcacttctccctaagagttcagagccgtgccaatggcgtcaagtacccggagctggtactggagcactccctagatcgcgaggaagaggccattcaccacctggtcctcacygcctccgacgggggtgaccctctccgatctggcactgtccttgtcagtgtgactgtcttcgatgcaaatgacaacgcgccggtcttcaccttgccagaataccgagtgagtgttcctgagaatttgcctgtgggcactcagctgctgacagtcacagccaccgacagggacgaaggtgccaatggagaagtgacatattcattccgaaaattacctgacacgcaattgttgaagttccaactaaacaaatatactggagaaataaaaatatcagaaaatctagattatgaagaaaccggtttctatgaaatagaaatacaagcagaagatggaggagcatatcttgcaactgcaaaagtgttgattacagtagaagatgtaaatgacaacagtccagagctgaccatcacgtctctatttagtccagtgactgaagattcacctctgggaacagtcgtagcccttttaaatgtgcatgatttagactctgagcagaatggacaggtaacctgttccattttggcgtatctaccatttaaattagaaaagtccattgacagttattacagattggtgatacacagagcccttgacagggaacaggtatcctcttacaatatcacagtgacagccacagatgggggaagtcctcctctatcaacggaagctcactttatgctacaagtggcagatatcaatgacaacccacctaccttctctcaagtctcctactttacctatatcccagagaacaacgccaggggtgcctccatcttctcagtgacagcgctggacccggacagcaaagagaatgcccagattatttactccctggctgaagacaccatccagggggtacctctgtcctcatacatatccatcaactcagacactggcgtcctgtatgcactcagatccttcgactaygagcagtttcatgagctacagatgcaggtgacagccagcgacagcggggatcctccactcagcagcaacgtgtcgttgagcctgtttgtgctggaycagaacgacaatgcgcccgagatcctgtaccccgccctccccacagacggttccacaggcgtggagctggcgccccgctccgcagagcccggctacctggtgaccaaggtggtggcggtggacagagactccggccagaacgcctggctgtcctaccgtytgctcaaggccagcgagccgggactcttcgcggtgggggagcacacgggcgaggtgcgcacggcgcgagccctgctggacagagacgcgctcaagcaaagcctcgtagtggccgtccaggaccacggccagccccctctctccgccactgtcacgctcaccgtggccgtggccgacagcatcccccaagtcctggcggacctcggcagcttcgagtctccagctaactctgaaacctcagacctcactctgtacctggtggtagcggtggccgcggtctcctgcgtcttcctggccttcgtcatcgtgctgctggcgcacaggctgcggcgctggcacaagtcacgcctgctgcaggcttcaggaggcggcttgacaggtgtgtccrgctcgcactttgtgggcgtggacggggttcgggctttcctgcagacctattcccacgaggtctctctcaccgcggactcgcgaaagagtcacctgatcttcccccagcccaattatgcggacacgctcatcagccaggagagctgtgagaaaaacgatcctttgyrtttgttagatgattcgaagtttcctatagaggataccccattggttccagtgagttttattttcatttttacttttgttaaaaaaaaaaagattggtttttactttgaagtttgcggcatgatggtggaaagtgtaaatgctaaaacactgatgagtagaatttgatgtttattaaggttttktttttktttttttttttttttttttttactttct

SEQ ID NO: 275 - DNA, 2739 bp, Homo sapiens
ccagctcccacacagaggctcccggctgcgcagaccttgcccagcacaccagattgccagctccgagacccgggactcctcmtgtcctgggccgaatgctcttttagcgcggtagagtgcactttctccaactggaaaagcggggacccagcgagaacccgagcgaacgatgggagggagctgcgcgcagaggcgccgggccggcccgcggcaggtactatttcctttgctgctgcctttgttctaccccacgctgtgtgagccgatccgctactcgattccggaggagctggccaagggctcggtggtggggaacctcgctaaggatctagggcttagtgtcctggatgtgtcggctcgcgagctgcgagtkagcgcggagaagctgcacttcagcgtagacgcgcagagcggggacttacttgtgaaggaccgaatagaccgtgagcaaatatgcaaagagagaagaagatgtgagttgcaattggaagctgtggtggaaaatcctttaaatatttttcatgtcattgtggtgattgaggatgttaatgaccacgcccctcaattccggaaagatgaaataaacttagaaatcagtgaatccgtcagcctggggatgggaacaattcttgagtctgcagaagatcctgatattagtatgaattcgctgagcaaataccaactaagtcctaacgagtatttctcattggtggagaaagacaatcctgatggtggcaaatatccagaattagtattgcagaagactctggaccgagaaacgcagagcgctcaccacttggtactgaccgccttagatggtggggaccctccccgaagcggtactgctcagataagaatcctggtaatagatgccaatgacaaccccccagtgttcagccaggacgtgtacagggttagccttcgggaagacgtgcctccaggcacctccatcctgagagtgaaggccactgaccaggacgagggcatcaactcagagatcacttattccttctttggtgtggctgacaaagctcagcacgtgttctctctggattacactacaggaaacattctaactcagcagcctttggattttgaagaagtagaaagatatacgataaacatagaagcaaaagaccgaggatctctctcaacacggtgtaaagtaattgtagaagttgtagacgaaaacgacaacagcccagaaataatcatcacgtcactctctgatcagattatggaggattcccctccaggagtggttgttgccctcttcaaaacacgggaccaagactcaggggaaaatggggaagtcaggtgtagcttaagtagaggtgttccatttaagattcattcttcttctaataattactacaagctastaacagatgaggccctggatcgggagcagaccccagagtacaacgtcaccatcgcagccacagacaggggcaagcctccgttatcctccagcaaaaccataaccctgcacattactgacgtcaatgacaacgcgccggttttcggacagtcagcctacctggtccacgtgccagaaaacaaccagccgggtgcctccatagcgcaagtcagtgcctctgacccagacttcgggctcaacsgccgtgtctcctactctctcattgccagcgacctggagtcacgaacgctgtcgtcctacgtgtccgtgagcgcgcagagcggggtggtgttcgcgcagcgcgccttcgaccacgagcagctgcgcaccttcgagctcacgctgcaggcccgcgaccagggctcgcccgcgctcagcgccaatgtgagcctgcgcgtgttggtgggcgaccgtaacgacaacgcaccgcgggtgctgtaccctgcgctgggtcccgacggctccgcgctcttcgacacagtgccgcgggccgcgcagccaggctacctggtgaccaaggtggtggccgtggacgcggactcggggcacaatgcctggctgtcctaccacgtggtgcaggccagtgagcccrggctcttcagcctggggctgcgaacaggcgaggtgcgcatggtgcgtgctttgggtgacaaggactcggtccgccagcgcctgctagtcgctgtaagagatggaggacagccacccctttcagccactgccacgctgcacctggtgttcgcagatagcttgcaagaggtactgccggatttcagcgaccatcccacaccctctgactcccaggctgagatgcagttttacctggtggtggccttggccttgatttctgtgctctttctcctcgcggtgattctagctattgctctacgcctgcgacagtctttcagccctactgcaggagactgctttgagtcagttctctgctccaagtccggacctgtgggtccccccaactacagtgagggaacgttgccctatgcctataatttttgtgtgcctggggatcaaatgaatccagaatttaattttttcacatctgttgatcattgtccagccacacaagataacctcaacaaagatagcatgctactggctagcattttaactcccagcrttgaagcagataagaagattcttaaacaggtaagtatttaaaaatgtatttaatcctttttatattacaatatgccaatatattccaatatagtggtattattttaagattctagataacttcttcatagagttcgcaaaatataggtcaaatttatggttatcattattaaaacaaaagttta

SEQ ID NO: 276 - DNA, 4846 bp, Homo sapiens
tacaggcagtacacacaggtcaggaggaggaaaaaaaaaaaaaagaaaaagaaaaaagctctcgtgcctcttagaacctccataaccgccagattgaaaactgactgtccaagactgcctaaatcctacttctggatgactctccagtcagaattctcctgaaaattgggttaatttcagctcagaaaagcagaaacgatacccttggtactggactggaagaaaactacgaagtgagagagccatgaagattcagaaaaagctgactggctgcagcaggctgatgcttctgtgtctttctctggagctgctgttggaagctggggctgggaatattcactactcagtgccggaagagacagacaaaggttccttcgtaggcaacatcgccaaggacctagggctgcaaccccaggagctggcagatggcggagtccgcatcgtctccagaggtaggatgccgcttttcgctctgaatcctagaagtggcagcttgatcaccgcgcgcaggatagaccgggaggagctctgcgctcagagcatgccgtgtctcgtgagttttaatatccttgttgaggataaaatgaagctttttcctgttgaagtagaaataattgatattaatgacaacactccccaattccagttagaggaactggagtttaaaatgaatgaaataacgactccaggtaccagartctcattgccttttgggcaagaccttgatgtgggtatgaactcactccagagctaccaactcagctctaaccctcatttctccctggatgtgcaacagggagccgatgggcctcaacatccagagatggtgctgcagagtcccttagacagagaagaagaagctgtccaccacctcatcctcacagcttctgatgggggtgaaccagtccgttcagggaccctcagaatttacattcaggtggtggatgcaaatgacaatcctccagcatttactcaggcacaataccatataaatgtccccgaaaacgtgccgctgggtactcagctgctcatggtaaatgccactgaccctgatgagggagccaatggggaagtaacgtactcctttcacaatgtagaccacagagtggcccaaatatttcgtttagattcttacacaggagaaatatcaaataaagaaccactagatttcgaagaatacaaaatgtattcaatggaagttcaagcccaggatggtgcggggctcatggctaaagttaaggtactgatcaaagttttggatgtaaatgataatgccccagaagtgaccatcacctctgtcaccactgcagttccagaaaactttcctcctgggaccataattgctcttatcagtgtgcatgaccaggactcaggagacaatggctacaccacatgtttcattcctggaaatttaccctttaaattggaaaagttagttgataattattaccrtttagtgactgaaagaacactggacagagaacttatctctgggtacaacatcacaataacagcaatagaccaaggaactccagctctatctactgaaactcacatttcactactagtgacagatatcaatgacaactccccagtcttccatcaggactcctactctgcctacattcccgaaaacaaccccagaggagcctccatcttctctgtgagggcccacgacttggacagcaatgagaatgcacaaatcacttactccctaatagaggacactatccagggggcacccctatctgcctacctctccatcaactccgacactggggtcctgtatgcgctgcgatccttcgactatgagcagttccgggacatgcaactgaaagtgatggcgcgggacagtggggatccgcccctcagcagcaacgtgtctctcagcctattcctgctggaccagaacgacaacgcgcccgagatcctgtaccccgccctccccacagatggttctaccggcgtggagctggcgcccctctccgcagagcccggctacctggtgaccaaggtggtggcggtggacagagactcgggccagaacgcctggctgtcctaccgcctgctcaaggccagcgagccgggactcttctcggtgggtctgcacacgggcgaggtgcgcacggcgcgagccctgctggacagagacgcgctcaagcagagtctcgtggtggccgtccaggaccacggccagcccccgctctccgccactgtcacgctcaccgtggccgtggccgacaggatctccgacatcctggccgacctgggcagcctcgagccctccgccaaacccaacgattcggacctcactctgtacctggtggtggcggcggccgcggtctcctgcgtcttcctggccttcgtcatcgtgctgctggcgcacaggctgcggcgctggcacaagtcacgtctgctacaggcttcgggaggcggcttagcgagcatgcccggttcgcactttgtgggcgtggacggggttcgggctttcctgcagacctattcccacgaggtctccctcactgcggactcgcggaagagccacctgattttcccccagcccaactatgcggacacactcatcagccaggagagctgtgagaaaaagggttttctatcagcaccccagtctttacttgaagacaaaaaggaaccattttctcagcaagccccgcccaacacggactggcgtttctctcaggcccagagacccggcaccagcggctcccaaaatggcgatgacaccggcacctggcccaacaaccagtttgacacagagatgctgcaagccatgatcttggcgtccgccagtgaagctgctgatgggagctccaccctgggagggggtgccggcaccatgggattgagcgcccgctacggrccccagttcaccctgcagcacgtgcccgactaccrccagaatgtctacatcccaggcagcaatgccacactgaccaacgcagctggcaagcgggatggcaaggccccagcaggtggcaatggcaacaagaagaagtcgggcaagaaggagaagaagtaacatggaggccaggccaagagccacagggyrgcctctccccaaccagcccagcttctccttacctgcacccaggcctcagagtttcagggctaacccccagaatactggtaggggccaaggccatgctccccttgggaaacagaaacaagtgcccagtcagcacctaccccttcccccccagggggttgaatatgcaaaagcagttccgctgggaacccccatccaatcaactgctgtacccatgggggtagtggggttactgtagacaccaagaaccatttgccacaccccgtttagttacagctgaactcctccatcttccaaatcaatcaggcccatccatcccatgcctccctcctccccaccccactccaacagttcctctttcccgagtaaggtggttggggtgttgaagtaccaagtaacctacaagcctcctagttctgaaaagttgsaagggcatcatgacctcttggcctctcctttgattctcaatcttcccccaaagcatggtttggtgccagccccttcacctccttccagagcccaagatcaatgctcaagttttggaggacatgatcaccatccccatggtactgatgcttgctggatttagggagggcattttgctaccaagcctcttcccaacgccctggggaccagtcttctgttttgtttttcattgtttgacgtttccactgcatgccttgacttcccccacctcctcctcaaacaagagactccactgcatgttccaagacagtatggggtggtaagataaggaagggaagtgtgtggatgtggatggtgggggcatggacaaagcttgacacatcaagttatcaaggccttggaggaggctctgtatgtcctcaggggactgacaacatcctccagattccagccataaaccaataactaggctggacccttcccactacataatagggctcagcccaggcagccagctttgggctgagctaacaggaccaatggattaaactggcatttcagtccaaggaagctcgaagcaggtttaggaccaggtccccttgagaggtcagaggggcctctgtgggtgctgggtactccagaggtgccactggtggaagggtcagcggagccccagcaggaagggtgggccagccaggccattcttagtccctgggttggggaggcagggagctagggcagggaccaaatgaacagaaagtctcagcccaggatggggcttcttcaacagggcccctgccctcctgaagcctcagtccttcaccttgccaggtgccgtttctcttccgtgaaggccactgcccaggtccccagtgcgccccctagtggccatagcctggttaaagttccccagtgcctccttgtgcatagaccttcttctcccacccccttctgcccctgggtccccggccatccagcggggctgccagagaaccccagacctgcccttacagtagtgtagcgccccctccctctttcggctggtgtagaatagccagtagtgtagtgcggtgtgcttttacgtgatggcgggtgggcagcgggcggcgggctccgcgcagccgtctgtccttgatctgcccgcggcggcccgtgttgtgttttgtgctgtgtccacgcgctaaggcgaccccctcccccgtactgacttctcctataagcgcttctcttcgcatagtcacgtagctcccaccccaccctcttcctgtgtctcacgcaagttttatactctaatatttatatggctttttttcttcgacaaaaaaataataaaacgtttcttctgaaaagctg

SEQ ID NO: 277 - DNA, 4790 bp, Homo sapiens
argggggtggaggtttggccctaaagcttcaggacaccaaagaaattcagtcgaacagcccaccagttctctccatagggacctgggtcccgtgaatgctggttatctcacaccctgaggaataaagattggaatccgcactggatgctggaagttgactcggagaaaattgcgacaggagggaaatggcggctctgcraaagttgccacactgcagaaagctggtcctgctgtgcttccttttggcgaccctgtgggaggccagggccgggcagattcgctattctgtgcgggaagagatcgacagaggctccttcgtaggcaacatcgccaaggacttgggtttggagcccctggcactggcagagcagggagtccgcatcgtctccagaggtakgtcccagctctttgctctgaacccgcgaagcggcagcttggtcactgcgaacaggatagaccgggaggagctctgcgctcagagcgcaccctgtctgttgaattttaacattctgctggaggataaattgactatttattcagtagaggtggaaataacagatattaacgataatgcccctcgctttggagtagaggaactggagctaaaaatcagtgaaaccactacgccaggattccggattcctcttaagaatgcgcatgatgcagacgtaggtgagaacgcccttcagaartacgcactcaacccaaatgaccacttctccctggacgtgcgaagrggagctgatgggaacaagtacccagaactggtgctggagcgctctctggaccgcgaggaagaggctgttcaccacctcgttctcgtggcttctgatgggggtgacccagtgctatctggcacctcccgcatctrcgtgaaggtcctggatgcgaacgacaatgcgcctgtttttacacagcccgagtaccgcataagcattccggagaatacgctcgtgggcacccggatactcacggtgaccgccactgacgcagatgagggctactacgctcaagtggtatattttctagagaaaagccctggagaaacctcagaggtatttgagcttaagtcaacatctggagaactgacaatcataaaagatctagattatgaggatgctacattccatgaaattgatattgaagctcaggatggtccgggccttctaaccagagcgaaggttatcgtcacggttctggatgtgaatgacaatgccccagaattttacatgacatctgctactagctcagtttctgaagactctcttccaggaaccataattgggctttttaatgtacatgatagagactctgggcagaacgcattcaccacctgttcactccccgaggatcttccttttaagttagaaaagtcagtagacaattactaccgactggttacaaccagagcccttgacagggaacagttttccttttacaacatcactctaaccgctaaagatggagggaacccctccctgtccacggatgctcacattttgctccaggtggcagacatcaacgacaacgyacccgccttctcccgcacatcctactccacctacattcccgaaaacaaccccagaggagcctctgtcttctcagtgacggcccatgaccccgacagcaacgacaatgctcatgtaacttactctttcgcggaggacactgttcagggggcacccttatcctcttacatctctatcaactccgacactggagtactctatgcactgcgctcctttgattatgagcagttgcgagacttgcaagtgtgggtgatagcgcgggacagcgggaaccctccactcagtagcaatgtatcattaagcctgttcgtgctggaccagaacgacaacgcgcccgagatcctgtaccctgccttccccacagacggttccacyggcgtggagctggcgccccgctccgcagagcccggctacctggtgaccaaggtggtggcggtgracagagactcgggccagaacgcctggctgtcttaccacctgctcaaggccagcgagccgggactcttctcggtgggtctgcacacgggcgaggtgcgcacggcgcgagccctgctggacagagacgcgctcaagcagagcctcgtggtggccatccaggaccacggccagccccctctctccgccactgtcacgstcaccgtggccgtggccgacaggatccccgacatcctggccgacctgggcagcctcgagccctccgccatacccaacgattcggacctcactctgtacctggtggtggcggtggccgcggtctcctgcgtcttcctggccttcgtcatcgtgttgctggcgcacaggctgcggcgctggcacaagtcacgcctgctgcaggcttcaggaggcagcttgacaggcatgcagagctcgcactttgtgggcgtggacggggttcgggctttcctgcagacctattcccacgaggtctccctcactgcggactcgcggaagagccacctgattttcccccagcccaactatgcggacacgctcatcagccaggagagctgtgagaaaaaggattttttatcagcgcctcaatctctactcgaagaagaaagagaagaaacgytttctcagcaagccccgcccaacacggactggcgtttctctcaggcccagagacccggcaccagcggctcccaaaatggcgatgacaccggcacctggcccaacaaccagtttgacacagagatgctgcaagccatgatcttggcgtccgccagtgaagctgctgatgggagctccaccctgggagggggtgccggcaccatgggattgagcgcccgctacggrccccagttcaccctgcagcacgtgcccgactaccrccagaatgtctacatcccaggcagcaatgccacactgaccaacgcagctggcaagcgggatggcaaggccccagcaggtggcaatggcaacaagaagaagtcgggcaagaaggagaagaagtaacatggaggccaggccaagagccacagggyrgcctctccccaaccagcccagcttctccttacctgcacccaggcctcagagtttcagggctaacccccagaatactggtaggggccaaggccatgctccccttgggaaacagaaacaagtgcccagtcagcacctaccccttcccccccagggggttgaatatgcaaaagcagttccgctgggaacccccatccaatcaactgctgtacccatgggggtagtggggttactgtagacaccaagaaccatttgccacaccccgtttagttacagctgaactcctccatcttccaaatcaatcaggcccatccatcccatgcctccctcctccccaccccactccaacagttcctctttcccgagtaaggtggttggggtgttgaagtaccaagtaacctacaagcctcctagttctgaaaagttgsaagggcatcatgacctcttggcctctcctttgattctcaatcttcccccaaagcatggtttggtgccagccccttcacctccttccagagcccaagatcaatgctcaagttttggaggacatgatcaccatccccatggtactgatgcttgctggatttagggagggcattttgctaccaagcctcttcccaacgccctggggaccagtcttctgttttgtttttcattgtttgacgtttccactgcatgccttgacttcccccacctcctcctcaaacaagagactccactgcatgttccaagacagtatggggtggtaagataaggaagggaagtgtgtggatgtggatggtgggggcatggacaaagcttgacacatcaagttatcaaggccttggaggaggctctgtatgtcctcaggggactgacaacatcctccagattccagccataaaccaataactaggctggacccttcccactacataatagggctcagcccaggcagccagctttgggctgagctaacaggaccaatggattaaactggcatttcagtccaaggaagctcgaagcaggtttaggaccaggtccccttgagaggtcagaggggcctctgtgggtgctgggtactccagaggtgccactggtggaagggtcagcggagccccagcaggaagggtgggccagccaggccattcttagtccctgggttggggaggcagggagctagggcagggaccaaatgaacagaaagtctcagcccaggatggggcttcttcaacagggcccctgccctcctgaagcctcagtccttcaccttgccaggtgccgtttctcttccgtgaaggccactgcccaggtccccagtgcgccccctagtggccatagcctggttaaagttccccagtgcctccttgtgcatagaccttcttctcccacccccttctgcccctgggtccccggccatccagcggggctgccagagaaccccagacctgcccttacagtagtgtagcgccccctccctctttcggctggtgtagaatagccagtagtgtagtgcggtgtgcttttacgtgatggcgggtgggcagcgggcggcgggctccgcgcagccgtctgtccttgatctgcccgcggcggcccgtgttgtgttttgtgctgtgtccacgcgctaaggcgaccccctcccccgtactgacttctcctataagcgcttctcttcgcatagtcacgtagctcccaccccaccctcttcctgtgtctcacgcaagttttatactctaatatttatatggctttttttcttcgacaaaaaaataataaaacgtttcttctgaaaagctg

SEQ ID NO: 278 - DNA, 4602 bp, Homo sapiens
atgaaagcgagctcagggaggtgcgggctggtgcggtggctgcaggtactgttgcccttcctgttgtctttgttccscggggctctcccagtccagatccgctattcaattccagaggagctggccaaaaactcggtcgtaggaaacctcgccaaggatctggggctcagcrtccgggacttgccagcccggaagctgcgggttagcgcggagaaggaatatttcacagtaaacccagaaagcggagacttacttgtgagtgacagaatagaccgagaacagatatgcgggaagcagcctctgtgtgttctggatttcgatactgtcgctgaaaatccactaaatattttctacatarcagtaattgtgcaggatataaatgataataccccgctattcaaacagactaagattaatttaaaaattggcgaatccactaagccaggtacaacatttccacttgacccagccctggattcagatgttggtcctaactcactacaaagataccaccttaatgacaacgagtactttgatctcgctgagaaacagactccagatggtcgtaaatatcctgagttgattctaaaacactctctggacagagaagagcacagtttacatcaattggtcctcacagctgtggatggcggagacccacctcaaagtggcacgacccaaatccgaatcaaagtcacggatgccaacgataaccctccagtgttcagccaggacgtgtacagggtcaccctgagggaggacgtgccgccgggcttctttgtgcttcaagtgacagccaccgaccgggatgaaggcataaacgcagagatcacctactcctttcataatgtggacgaacaagtgaaacactttttcaacttaaatgaaaaaacaggagaaatcacgacaaaggatgatttggattttgagattgcaagtagttacactctgagtatcgaagcaaaagatcctggagatctagcagcccactgcagtatccaagttgaaattcttgatgacaacgattgtgcacctgaagttattgtgacttcagtatctactcccctaccggaggattcgccaccaggaacagtgatcgccttgataaaaacgagagacagagactctggagaaaatggagaagtttactgccaagtgttgggaaatgccaagtttattttgaaatcttcctcaaagaactattacaaactagtgwcagacggcgctctggaccgggaggagatcccagaatacaatctcaccatcacagccaccgacgggggcaagccgcccctctcctccagcataattgtcaccctgcacatctccgacgtcaacgataatgccccagttttccaacagacttcctacatggttcacgtggcagagaacaatcctcctggcgcctctatcgctcaaatcagtgcctctgaccctgacttgggccccagtggccaagtttcctactccatcgtagcgagcgacctgaagccgcgggagattttatcctacgtgtccgtgagcgcgcaragcggggtggtgttcgcgcagcgcgccttcgatcatgagcagctgcgcgccttcgagctcacactgcaggcycgcgaccagggctcgcccgcgctcagcgccaacgtgagcctgcgcgtgttagtgggcgacctcaatgacaatgcgccacgggtgctgtaccccgcgctggggcctgatggctccgccctcttcgatatggtgccacgcgccgcagagcccggctacctggtgaccaaggtggtggcggtggacgcagactcaggacacaacgcttggctgtcctaccacgtgctgcaggccagcgagcccgggctcttcagcctggggttgcgcacgggtgaggtgcgcacagcgcgtgccttgggcgacagggacgcggcccgccagcgcctgctggtcgctgtgcgtgatggaggacagccgccactctccgctacggccacgctgcacctaatcttcgcggatagcctgcaagaggtattgccagacctcagcgaccgccsggagccctctgacccccaggcaraactgcagttttacctggttgtggccttggccttgatctcagtgctcttcttcctcgcggtgattctggcaatctccctgcgcctgcgactctcttccaggtcagatgcttgggactgttttcagcctggtctcagctccaagcctggacctggggttctccccaattacagtgagggtacattgccctattcctacaacctgtgtgttgcctcacaatcagccaagacagagttcaattttctgaacataaccccggaattggttcccgcgcaagatctcgtctgtgacaatgcctcttgggaacaaaatacaaatcatggagccgctggggtcccttttgcctcagatactattttgaagcaagccccgcccaacacggactggcgtttctctcaggcccagagacccggcaccagcggctcccaaaatggcgatgacaccggcacctggcccaacaaccagtttgacacagagatgctgcaagccatgatcttggcgtccgccagtgaagctgctgatgggagctccaccctgggagggggtgccggcaccatgggattgagcgcccgctacggrccccagttcaccctgcagcacgtgcccgactaccrccagaatgtctacatcccaggcagcaatgccacactgaccaacgcagctggcaagcgggatggcaaggccccagcaggtggcaatggcaacaagaagaagtcgggcaagaaggagaagaagtaacatggaggccaggccaagagccacagggyrgcctctccccaaccagcccagcttctccttacctgcacccaggcctcagagtttcagggctaacccccagaatactggtaggggccaaggccatgctccccttgggaaacagaaacaagtgcccagtcagcacctaccccttcccccccagggggttgaatatgcaaaagcagttccgctgggaacccccatccaatcaactgctgtacccatgggggtagtggggttactgtagacaccaagaaccatttgccacaccccgtttagttacagctgaactcctccatcttccaaatcaatcaggcccatccatcccatgcctccctcctccccaccccactccaacagttcctctttcccgagtaaggtggttggggtgttgaagtaccaagtaacctacaagcctcctagttctgaaaagttgsaagggcatcatgacctcttggcctctcctttgattctcaatcttcccccaaagcatggtttggtgccagccccttcacctccttccagagcccaagatcaatgctcaagttttggaggacatgatcaccatccccatggtactgatgcttgctggatttagggagggcattttgctaccaagcctcttcccaacgccctggggaccagtcttctgttttgtttttcattgtttgacgtttccactgcatgccttgacttcccccacctcctcctcaaacaagagactccactgcatgttccaagacagtatggggtggtaagataaggaagggaagtgtgtggatgtggatggtgggggcatggacaaagcttgacacatcaagttatcaaggccttggaggaggctctgtatgtcctcaggggactgacaacatcctccagattccagccataaaccaataactaggctggacccttcccactacataatagggctcagcccaggcagccagctttgggctgagctaacaggaccaatggattaaactggcatttcagtccaaggaagctcgaagcaggtttaggaccaggtccccttgagaggtcagaggggcctctgtgggtgctgggtactccagaggtgccactggtggaagggtcagcggagccccagcaggaagggtgggccagccaggccattcttagtccctgggttggggaggcagggagctagggcagggaccaaatgaacagaaagtctcagcccaggatggggcttcttcaacagggcccctgccctcctgaagcctcagtccttcaccttgccaggtgccgtttctcttccgtgaaggccactgcccaggtccccagtgcgccccctagtggccatagcctggttaaagttccccagtgcctccttgtgcatagaccttcttctcccacccccttctgcccctgggtccccggccatccagcggggctgccagagaaccccagacctgcccttacagtagtgtagcgccccctccctctttcggctggtgtagaatagccagtagtgtagtgcggtgtgcttttacgtgatggcgggtgggcagcgggcggcgggctccgcgcagccgtctgtccttgatctgcccgcggcggcccgtgttgtgttttgtgctgtgtccacgcgctaaggcgaccccctcccccgtactgacttctcctataagcgcttctcttcgcatagtcacgtagctcccaccccaccctcttcctgtgtctcacgcaagttttatactctaatatttatatggctttttttcttcgacaaaaaaataataaaacgtttcttctgaaaagctg

SEQ ID NO: 279 - DNA, 4733 bp, Homo sapiens
acctgaaacgcttcgcatccggtctctgcttgttgaaggaccttcaccgctatttctgagaagagcaaaagtgatgcagatctgttcttcctcttcttaatcccagagaagttcctaataagccagtaatggcgcctccgcagaggcatccgcagcgcagcgagcaggtcctgctcctcacgctcctggggacgctgtggggggccgcggcagcgcagatccgctactctattcccgaggagctggagaaaggctccttcgtaggcaacatcgtcaaggatctgggactggagccccaggagttggcggagcacggagtmcgcatcgtctccagaggtaggatgcagcttttctctctgaatccgcgaaacggcagcttggtcaccgcgggtaggatagaccgcgaggagctctgtgctcagagcccgcggtgtctggtgagttttaacatccttgtcgaggataaactgaatctttatcccgtggaagtggaaatagtggacattaatgacaatacaccccgattcttaaaggaagaattggaagtgaaaattctcgaaaacgcagctccatcctctcgttttccactaatggaggtctatgaccctgatgtgggaatgaactcccttcagggatttaagctcagtggtaatagtcacttctcagtggacgtgcaaagcgaagcccatgggcccaagtacccggagctggtgctggagggcacactggaccgggaaggagaagccgtttaccgcctggtccttactgccatggatggcggcgaccctgtccgctcaagcgtcgcccaaattctggtaacagttctagatgtgaatgacaacactccaatgtttactcagcctgtctacmgtgtaagtgttcctgaaaacctgccagtaggcacaccagtgttggcagtgactgccaccgaccaggatgaaggagtccacggggaagtaacttattcctttgtgaagattacagaaaagatctcacaaattttctgtttgaatgttttgactggagaaatttcaacttctgcaaatctagactatgaggactcgagtttttatgagctgggtgttgaagcccgggatgggccaggtcttcgagacagagcgaaagtcttaataactatcttggatgtcaatgataatgtaccagaagtggttgttacatctggaagcagaacaattgctgaaagtgcacctccaggaacagtaatcgccctttttcaagtgttcgatcgagactctggcctgaatggcctggtaacctgttccatcccgagaagtctcccatttgaattggaaaaatcagttggcaattattatcgattagtgacaaatgcagctctagaccgggaagaggtattcttgtacaacatcactgtgacagccacggacaaaggaacaccacctctgtctacagaaacaatcatctctctaaatgtggyagacaccaacgacaacccgcccaccttcccccattcatcctactcagtctatgtccttgaaaacaaccccaggggtgcctccatcttctctgtgaatgcactggaccctgacgtggaccagaacgcccaagtctcctactcactggcagaagacaccctccagggggcgcccctgtcctcctacgtgtccatcaactccgacactgggattctgtacgccctgcgctccttcgactatgagcagttgagagacctacagctgtgggtgacagccagcgacasckgggacccgcctcttagcagcaacgtgtcactgagcctgtttgtgctggaccagaatgacaatgcgcccgagatcctgtaccccgccctccccacagacggttccactggcgtggagctggcgccycgctccgcagagcccggctacctggtgaccaaggtggtggcggtggacagagactcgggccagaacgcctggctgtcctaccgcctgctcaaggccagcgagccaggrcttttctcagtgggcctgcacacgggcgaggtgcgcacggcgcgcgccctgctggacagagacgcgctcaagcagagcctagtggtggccgtccaggaccacggccagccccctctctccgccactgtcacgctcaccgtggccgtggccgacaggatccccgacatcctggccgacctgggcagcctcgagccctccgccaaacccaacgattcggacctcactctgtacctggtggtggcggtggccgcggtctcctgcgtcttcctggccttcgtcatygtgctgctggcgctcagactgcrgcgctggcacaagtcacgcctgctgcaggcttcgggaggtggmttagcgagcatgcccggctcgcactttgtgggcgtggaaggggttcgggctttcctgmagacctattcccacgaggtctcactcactgcagactcgcgtaagagtcatctgattttcccccagcccaactatgccgacacgcttatcaaccaggagagctatgagaaaagcgagcctcttctgataactcaggatttacttgaaacgaaaggagaacccaggcaacttcagcaagccccgcccaacacggactggcgtttctctcaggcccagagacccggcaccagcggctcccaaaatggcgatgacaccggcacctggcccaacaaccagtttgacacagagatgctgcaagccatgatcttggcgtccgccagtgaagctgctgatgggagctccaccctgggagggggtgccggcaccatgggattgagcgcccgctacggrccccagttcaccctgcagcacgtgcccgactaccrccagaatgtctacatcccaggcagcaatgccacactgaccaacgcagctggcaagcgggatggcaaggccccagcaggtggcaatggcaacaagaagaagtcgggcaagaaggagaagaagtaacatggaggccaggccaagagccacagggyrgcctctccccaaccagcccagcttctccttacctgcacccaggcctcagagtttcagggctaacccccagaatactggtaggggccaaggccatgctccccttgggaaacagaaacaagtgcccagtcagcacctaccccttcccccccagggggttgaatatgcaaaagcagttccgctgggaacccccatccaatcaactgctgtacccatgggggtagtggggttactgtagacaccaagaaccatttgccacaccccgtttagttacagctgaactcctccatcttccaaatcaatcaggcccatccatcccatgcctccctcctccccaccccactccaacagttcctctttcccgagtaaggtggttggggtgttgaagtaccaagtaacctacaagcctcctagttctgaaaagttgsaagggcatcatgacctcttggcctctcctttgattctcaatcttcccccaaagcatggtttggtgccagccccttcacctccttccagagcccaagatcaatgctcaagttttggaggacatgatcaccatccccatggtactgatgcttgctggatttagggagggcattttgctaccaagcctcttcccaacgccctggggaccagtcttctgttttgtttttcattgtttgacgtttccactgcatgccttgacttcccccacctcctcctcaaacaagagactccactgcatgttccaagacagtatggggtggtaagataaggaagggaagtgtgtggatgtggatggtgggggcatggacaaagcttgacacatcaagttatcaaggccttggaggaggctctgtatgtcctcaggggactgacaacatcctccagattccagccataaaccaataactaggctggacccttcccactacataatagggctcagcccaggcagccagctttgggctgagctaacaggaccaatggattaaactggcatttcagtccaaggaagctcgaagcaggtttaggaccaggtccccttgagaggtcagaggggcctctgtgggtgctgggtactccagaggtgccactggtggaagggtcagcggagccccagcaggaagggtgggccagccaggccattcttagtccctgggttggggaggcagggagctagggcagggaccaaatgaacagaaagtctcagcccaggatggggcttcttcaacagggcccctgccctcctgaagcctcagtccttcaccttgccaggtgccgtttctcttccgtgaaggccactgcccaggtccccagtgcgccccctagtggccatagcctggttaaagttccccagtgcctccttgtgcatagaccttcttctcccacccccttctgcccctgggtccccggccatccagcggggctgccagagaaccccagacctgcccttacagtagtgtagcgccccctccctctttcggctggtgtagaatagccagtagtgtagtgcggtgtgcttttacgtgatggcgggtgggcagcgggcggcgggctccgcgcagccgtctgtccttgatctgcccgcggcggcccgtgttgtgttttgtgctgtgtccacgcgctaaggcgaccccctcccccgtactgacttctcctataagcgcttctcttcgcatagtcacgtagctcccaccccaccctcttcctgtgtctcacgcaagttttatactctaatatttatatggctttttttcttcgacaaaaaaataataaaacgtttcttctgaaaagctg

SEQ ID NO: 280 - DNA, 4590 bp, Homo sapiens
atgcagagagccagagaagccgaaatgatgaaaagtcaggtactgtttcccttcctgctgtctttgttctgcggggccatctcccagcagatccgatacacgattccagaggagctagccaacggctcacgggtggggaaacttgccaaggatctggggctcagtgtccgggagttgccaactcgaaaactgcgggttagtgcagaggattatttcaacgttagtttggagagcggggatttgttagtgaacggtaggatagatcgagagaagatttgcggaaggaaacttgagtgtgcactagaattcgaaacggtcgctgaaaacccaatgaatgttttccacgtggttgttgtaatccaagatattaatgacaatgcaccacgtttcgttgcaaaaggcattgacttagaaatttgtgagtcagccttacccggggtaaaattctctctggattctgctcaagatgcagatgtggaaggcaattcactgaagttatacaccatcaaccccaatcaatacttctctctgtcaacgaaggaaagtcctgatggaaktaaatatccggtattactgctggaaaaacctctagacagggaacatcagagctctcatcgcttaatcctgactgccatggatggcggggacccgcctctaagcggcaccacccatatctggatccgagttacggatgccaatgataatgctcccgtgtttagccaggaggtatacagggttagcctccaagaaaacgtaccgtggggaacctccgtgctgcgggtgatggccacagaccaggatgagggcattaatgcagagatcacctatgccttcctcaattccccaataagtaccagcctcttcaatctcaatccaaatactggcgacatcacaaccaatggcacattggattttgaagagacaagtagatatgtgttgagtgtggaagctaaggatggaggagtacacacagctcactgtaatgttcaaatagaaattgttgacgagaatgacaatgccccagaggtgacattcatgtccttctctaaccagattccagaggattcagaccttggaactgtaatagccctcataaaagtgcgagacaaggattctgggcaaaatggcatggtgacatgctatactcaggaagaagttcctttcaaattagaatccacctcgaagaattattacragctggtgattgctggagccctaaacmgggagcagamagcagactacaacgtcacaatcatagccaccgacaagggcaaaccagccctttcctccaggacaagcatcaccctgcacatctccgacatcaacgacaaygcacctgttttccatcaggcctcctatgtggtccacgtgtctgagaacaacccacctggcgcctccattgcacaagtaagcgcctccgacccggatttgggacccaacggcagagtctcctactctattctggccagtgacctggagccgcgggagctgttgtcctacgtgtccgtgagcccgcagagcggggtggtkttcgcgcagcgcgccttcgaccacgagcagctgcgcgccttcgagctcayrctgcaggccagggaccagggctcccccgcgctcagcgccaacgtgagcctgcgcgtgttggtgggcgacctcaatgacaatgcgccacgggtgctgtaccccgcgctggggcctgatggctccgccctcttcgatatggtgccacgcgccgcagagcccggctacctggtgaccaaggtggtggcggtggacgcagactcaggacacaacgcttggctgtcctaccacgtgctgcaggccagcgagcccgggctcttcagcctggggttgcgcacgggtgaggtgcgcacagcgcgtgccttgggcgacagggacgcggcccgccagcgcctgctggtcgctgtgcgtgatggaggacagccgccactctccgccaccgccacgctgcacctaatcttcgcggatagcctgcaagaggtattgccagacctcagcgaccgccctgagccctctgacccccagacrgaactgcagttttacctggttgtggccttggccttgatctcagtgctctttctcctcgcggtgattctagcgatcgccctgcgcctgcgacgttcctccagcctcgacactgagggctgctttcaaaccggtctctgctccaagtctgggcccggggttcctcccaaccacagcgaggggactttgccctattcctacaatctatgtattgcctctcattctgcaaagacagagtttaattctctcaacctgacaccggaaatggctccccctcaggatctgctgtgtgatgatccttctatggttgtatgtgccagtaatgaagatcacaaaatcgcttatgacccttctttgtcttcgcaccaagccccgcccaacacggactggcgtttctctcaggcccagagacccggcaccagcggctcccaaaatggcgatgacaccggcacctggcccaacaaccagtttgacacagagatgctgcaagccatgatcttggcgtccgccagtgaagctgctgatgggagctccaccctgggagggggtgccggcaccatgggattgagcgcccgctacggrccccagttcaccctgcagcacgtgcccgactaccrccagaatgtctacatcccaggcagcaatgccacactgaccaacgcagctggcaagcgggatggcaaggccccagcaggtggcaatggcaacaagaagaagtcgggcaagaaggagaagaagtaacatggaggccaggccaagagccacagggyrgcctctccccaaccagcccagcttctccttacctgcacccaggcctcagagtttcagggctaacccccagaatactggtaggggccaaggccatgctccccttgggaaacagaaacaagtgcccagtcagcacctaccccttcccccccagggggttgaatatgcaaaagcagttccgctgggaacccccatccaatcaactgctgtacccatgggggtagtggggttactgtagacaccaagaaccatttgccacaccccgtttagttacagctgaactcctccatcttccaaatcaatcaggcccatccatcccatgcctccctcctccccaccccactccaacagttcctctttcccgagtaaggtggttggggtgttgaagtaccaagtaacctacaagcctcctagttctgaaaagttgsaagggcatcatgacctcttggcctctcctttgattctcaatcttcccccaaagcatggtttggtgccagccccttcacctccttccagagcccaagatcaatgctcaagttttggaggacatgatcaccatccccatggtactgatgcttgctggatttagggagggcattttgctaccaagcctcttcccaacgccctggggaccagtcttctgttttgtttttcattgtttgacgtttccactgcatgccttgacttcccccacctcctcctcaaacaagagactccactgcatgttccaagacagtatggggtggtaagataaggaagggaagtgtgtggatgtggatggtgggggcatggacaaagcttgacacatcaagttatcaaggccttggaggaggctctgtatgtcctcaggggactgacaacatcctccagattccagccataaaccaataactaggctggacccttcccactacataatagggctcagcccaggcagccagctttgggctgagctaacaggaccaatggattaaactggcatttcagtccaaggaagctcgaagcaggtttaggaccaggtccccttgagaggtcagaggggcctctgtgggtgctgggtactccagaggtgccactggtggaagggtcagcggagccccagcaggaagggtgggccagccaggccattcttagtccctgggttggggaggcagggagctagggcagggaccaaatgaacagaaagtctcagcccaggatggggcttcttcaacagggcccctgccctcctgaagcctcagtccttcaccttgccaggtgccgtttctcttccgtgaaggccactgcccaggtccccagtgcgccccctagtggccatagcctggttaaagttccccagtgcctccttgtgcatagaccttcttctcccacccccttctgcccctgggtccccggccatccagcggggctgccagagaaccccagacctgcccttacagtagtgtagcgccccctccctctttcggctggtgtagaatagccagtagtgtagtgcggtgtgcttttacgtgatggcgggtgggcagcgggcggcgggctccgcgcagccgtctgtccttgatctgcccgcggcggcccgtgttgtgttttgtgctgtgtccacgcgctaaggcgaccccctcccccgtactgacttctcctataagcgcttctcttcgcatagtcacgtagctcccaccccaccctcttcctgtgtctcacgcaagttttatactctaatatttatatggctttttttcttcgacaaaaaaataataaaacgtttcttctgaaaagctg

SEQ ID NO: 281 - DNA, 5503 bp, Homo sapiens
ttcatctgtacctttcaagtattcaaatagaaaaatayaaacaatgtaaataaaatagcaaaacaatgtaatatctcataaaactgcaatggtaaaagcatttatcctattgaaattccacaatttttatttgaaaatattatcgacatgtaattcaagtggcatttagaagaataatttaaaagcaacaactctatagaaagcttgtaaaatgattaagtagtttaaaccaaataaaacaatttctgagtcagtcatctccagtaggtctattttagtctcaagataaattcatttctggtgacaactgaagttcttagttatttgttagtatatattggagacatttacaataaagcttagagcacaatgggaaatgaaagtatcatgttttttttaagaccaaatgtattgcagaaatgtgagtaatttaatccgatgctacaatctgatcattctgatctaatctgatcatttaataacactaaataaaaccttcatctcacattctttggctgtttcttttaaaatatgggtttacggataaatcaaataaattcaaaacaaagtaataagcaaatgatttttttttctcagtaatctagtagagtattacatttagaagtaatctgtatctcagtgcagtaactatttaggactgtaagcgccgctgttcacctactggaagacaaatgcaaccgaaaacactcasatctcacacctcacgaagacccgcagatgccacaaactaactgctggactgcagcgaaacccgacccctgtttggaggcactccaggtttccggaggattgtcatctccatagctgcggcaagaaactaaataagacccatttatgcacagtgaagattctgagaggattctgcagcaaaacaacaatggccgctccacagagtcgccccagacgcggcgagctgatcctgckgtgcgcgctgctgggaacgctgtgggaaatcgggaggggacagattcgctactctgtgccagaagagacggacaaaggctccttcgtgggtaatatctccaaggacctggggctggacccccggaagctggcgaagcacggagtccgtatcgtctccagaggtaggacgcagctctttgctctgaacccgcgcagcggcagcttgatcaccgcgggcaggatagatcgggaggagctctgcgctcagagcccgcggtgtctgataaatattaacaccctggttgaggataaaggaaaactctttggggtagaaatagaaataattgatattaacgataataacccaaaattccaggtcgaagatctagaagtaaaaattaacgaaatcgcggttcctggagcacgttatccactcccagaagctgttgacccggatgtgggcgtgaactccctccagagctaccagctcagccccaatcaccacttctccctgracgtgcagactggagacaatggagccataaacccagagctggtgctggagcgcgccctggacagggaggaagaggctgctcaccacctggtcctcacggcctcggatggcggcaagccgcctcgctctagcacagtgcgcatccaygtgacagtgttgratacaaatgacaatgccccggtttttcctcacccgatttaccgagtgaaagtccttgagaacatgcccccaggcacgcggctgcttactgtaacagccagcgacccggatgagggaatcaacggaaaagtggcatacaaattccggaaaattaatgaaaaacaaactccgttattccagcttaatgaaaatactggggaaatatcaatagcaaaaagtctagattatgaagaatgttcattttatgaaatggaaatacaagccgaagatgtgggggcacttctggggaggaccaaattgctcatttckgtggaagatgtaaatgacaatagaccagaagtgatcattacgtctttgtttagcccagtgttagaaaattctcttcccgggacagtaattgccttcttgagtgtgcatgaccaagactctggaaagaatggtcaagttgtctgttacacacgtgataatttaccttttaaattagaaaagtcaataggtaattattatagattagtgacaaggaaatatttggaccgagaaaatgtctctatctacaatatcacagtgatggcctcagatctaggaacaccacctctgtccactgaaactcaaatcgctctgcacgtggcagacattaacgacaaccctcctactttccctcatgcctcctactcagcgtatatcctagagaacaacctgagaggagcctccatcttttccttgactgcacacgaccccgacagccaggagaatgcccaggtcacttactctgtgaccgaggacacgctgcagggggcgcccctgtcctsgtatatctccatcaactctgacaccggtgtcctgtatgcgctgcaatctttcgactatgagcagatccgagacctgcagctactggtaacagccagcgacagcggggacccgcccctcagcagcaacatgtcactgagcctgttcgtgctggaccagaatgacaacgcgcccgagatcctgtaccccgccctccccacagacggttccactggcgtggagctggcgccccgctccgcagagcgtggctacctggtgaccaaggtggtggcggtggacagagactcgggccagaacgcctggctgtcctaccgcctgctcaaggccagcgagccgggactcttctcggtgggtctgcacacgggcgaggtgcgcacggcgcgagccctgctggacagagaygcgctcaagcagagcctcgtggtggccgtccaggaccatggccagccccctctctccgccactgtcacgctcaccgtagccgtggctgacagcatccccgaagtcctgaccgagktgggcagtctgaagccttcggtcgacccgaacgattcgagccttacactctatctcgtggtggcagtggctgccatctcctgtgtcttcctcgcctttgtcgctgtgcttctggggctcaggctgaggcgctggcacaagtcacgcctgctccaggattccggtggcagattggtaggcgtgcctgcctcacattttgtgggtgttgaggaggtacaggctttcctgcagacctattcccaggaagtctccctcaccgccgactcgcggaagagtcacctgatctttccccagcccaactacgcagacatgctcatcagtcaggagggctgtgagaaaaatgattctttgttaacatccgtagattttcatgaatataagaatgaagctgatcatggtcagcaagccccgcccaacacggactggcgtttctctcaggcccagagacccggcaccagcggctcccaaaatggcgatgacaccggcacctggcccaacaaccagtttgacacagagatgctgcaagccatgatcttggcgtccgccagtgaagctgctgatgggagctccaccctgggagggggtgccggcaccatgggattgagcgcccgctacggrccccagttcaccctgcagcacgtgcccgactaccrccagaatgtctacatcccaggcagcaatgccacactgaccaacgcagctggcaagcgggatggcaaggccccagcaggtggcaatggcaacaagaagaagtcgggcaagaaggagaagaagtaacatggaggccaggccaagagccacagggyrgcctctccccaaccagcccagcttctccttacctgcacccaggcctcagagtttcagggctaacccccagaatactggtaggggccaaggccatgctccccttgggaaacagaaacaagtgcccagtcagcacctaccccttcccccccagggggttgaatatgcaaaagcagttccgctgggaacccccatccaatcaactgctgtacccatgggggtagtggggttactgtagacaccaagaaccatttgccacaccccgtttagttacagctgaactcctccatcttccaaatcaatcaggcccatccatcccatgcctccctcctccccaccccactccaacagttcctctttcccgagtaaggtggttggggtgttgaagtaccaagtaacctacaagcctcctagttctgaaaagttgsaagggcatcatgacctcttggcctctcctttgattctcaatcttcccccaaagcatggtttggtgccagccccttcacctccttccagagcccaagatcaatgctcaagttttggaggacatgatcaccatccccatggtactgatgcttgctggatttagggagggcattttgctaccaagcctcttcccaacgccctggggaccagtcttctgttttgtttttcattgtttgacgtttccactgcatgccttgacttcccccacctcctcctcaaacaagagactccactgcatgttccaagacagtatggggtggtaagataaggaagggaagtgtgtggatgtggatggtgggggcatggacaaagcttgacacatcaagttatcaaggccttggaggaggctctgtatgtcctcaggggactgacaacatcctccagattccagccataaaccaataactaggctggacccttcccactacataatagggctcagcccaggcagccagctttgggctgagctaacaggaccaatggattaaactggcatttcagtccaaggaagctcgaagcaggtttaggaccaggtccccttgagaggtcagaggggcctctgtgggtgctgggtactccagaggtgccactggtggaagggtcagcggagccccagcaggaagggtgggccagccaggccattcttagtccctgggttggggaggcagggagctagggcagggaccaaatgaacagaaagtctcagcccaggatggggcttcttcaacagggcccctgccctcctgaagcctcagtccttcaccttgccaggtgccgtttctcttccgtgaaggccactgcccaggtccccagtgcgccccctagtggccatagcctggttaaagttccccagtgcctccttgtgcatagaccttcttctcccacccccttctgcccctgggtccccggccatccagcggggctgccagagaaccccagacctgcccttacagtagtgtagcgccccctccctctttcggctggtgtagaatagccagtagtgtagtgcggtgtgcttttacgtgatggcgggtgggcagcgggcggcgggctccgcgcagccgtctgtccttgatctgcccgcggcggcccgtgttgtgttttgtgctgtgtccacgcgctaaggcgaccccctcccccgtactgacttctcctataagcgcttctcttcgcatagtcacgtagctcccaccccaccctcttcctgtgtctcacgcaagttttatactctaatatttatatggctttttttcttcgacaaaaaaataataaaacgtttcttctgaaaagctg

SEQ ID NO: 282 - DNA, 2621 bp, Homo sapiens
gggtgggaagaaggtgggcctcgagcaaagccgctagaggtggggtgcgggtggtcggmctcaggcgagccccggggcacagcccggggcgggaggcggagcttggcggccgagatctccscgctgcagttagccccgccgagcgccaggagctgcgggtaggaggggcgagagaaaggatgggggtacagaaccggaagaaacgaagggctcgtccgcttcggcttgtcctaatttggtgcccaatctgaagctgggctgtaccattgcatacctgggggaggctgtggcaaaggtgacaagaagrccgaaggcacaaagggaagctrcacccattcctggaggagcttaaatagtgactcgagtgcaagaatttaaaaataccgagacagccctaggtggaaaacttccggaaggcccaagcgttcgtaagggctctctaccccgctcggagcatagatggtaccgtccggaagtccgggcggagaccgtagctgcgcttctcgcgaaagggcaggcatcgcggggctggccacttccrtacttccgctttccggcccagccagcgcccgcgatgactgccactctccgcccctacctgagtgccgtgcgggccacattgcaggctgccctctgcctggagaacttctcctcccaggttgtggaacgacacaacaagccggaagtggaagtcaggagtagcaaagagctcctgttacaacctgtgaccatcagcaggaatgagaaggaaaaggttctgattgagggctccatcaactctgtccgggtcagcattgctgtgaaacaggctgatgagatcgagaagattttgtgccacaagttcatgcgcttcatgatgatgcgagcagagaacttctttatccttcgaaggaagcctgtggagcagaagaagatctttacaatccaaggctgctacccggtgatccggtgtctcttgcgccggaggggctgggtggagaagaagatggtccatcgctcaggccccaccctgctgccaccccagaaggatctggatagctcagcgatgggtgacagtgacaccactgaggatgaggatgaagatgaggacgaggagttccagccatcacagctgttcgacttcgatgatttactgaaatttgatgacctagatggaacacatgctctgatggtgggtctatgtctcaatctccggaatttgccgtggtttgatgaggttgatgccaactccttcttcccacgctgctactgcctgggggctgaggatgacaaaaaagccttcataggagacaagcagcccaagaaacaggagaaaaacccagtgttggtgtccccagagtttgtggatsaagctctgtgtgcgtgcgaggagtaccttagcaacttggcccacatggacatcracaaggacctggaggccccgctgtacctcacccccgagggctggtccctcttcctccagcgctactaccaagtggtccacgaaggggcagaactcaggcacctcgacactcaggtccagcgctgtgaggacatcctgcagcagctgcaggccgtggtaccccagatagacatggaaggggatcgcaacatctggatcgtgaagccaggagccaagtcccgyggacgaggcatcatgtgcatggaccacctggaggagatgctgaagctggtgaacggcaaccccgtggtgatgaaggacggcaagtgggtggtgcagaagtatattgagcggcccctcctcatctttggcaccaagtttgacctcagacagtggttcctggtaactgactggaacccacttaccgtgtggttctaccrcgacagctatatccgcttttccacgcagcccttctccctgaagaacctggacaactcagtgcacctgtgcaacaactccatccagaagcacctggagaactcatgccatcggcatccactgcttccgccagacaacatgtkgtctagccagaggttccaggcccacctgcaggagatgggtgccccamatgcttggtccaccatcatcgtgcctggcatgaaggatgctgtgatccacgcacttcagacctcccaggacaccgtgcartgtcrgaaggccagctttgagctctatggcgctgacttcgtgttcggggaggacttccagccctggctgattgagatcaacgccagccccacgatggcaccctccacagcagtcactgcccggctctgtgctggcgtgcaagctgacaccctgcgcgtggtcattgaccggakgctggaccgcaactgtgacacaggagcctttgagctcatctataagcaggctcctgctctcctgtgcctccgaggcccccagctggaagtgccttgttgcctctgccctttgaagtcggaacaattcctagcacctgtcggaaggtcaaggccaaaggcaaattcaaggccagactgtgacaaacccaggrctgaggcctgccccatgaagaggctgagccccctgaaacccctgccccttgttggtacattccagagrcgcaggggcctgggggatatgaagctagggaagcccctgcttcgattccccactgcccttgtcctggatccaacaccaaataaaaagaaacaagtgaagt

SEQ ID NO: 283 - DNA, 2798 bp, Homo sapiens
gaggagttcaggtctctgaggaggaggaagcagtgaaactgggctttacacatggcctgagaacagcttaggcctgaacataaggaacagcttggagtggaggggacacagaggaaccctcactatcatgcatgccaacccaaccactgcctgccctttcccttctggatttagctcgtgtctccaggctcctagtcctgtaatccagggacccatcagcgagggattcagggaagcagaggcagctctccaggaaggaggaaaatccctgcctcttccagagagactcccccattgctgtctcttgtgtgtgtcatgcacaaggaaggcttggttgtgtgccaggataaggggcacaagggcctcgggtgtggccagagaccccatgcttaagcttttatggtataggtcaggctgcaggggtttgagggcctcagttgtatatcagaatcttcagagcactgcgatgttcaggggtgagtcaggtctgtagatgtgcacggggtcttctgaagggtcagtttctgtaatcactttcaggtgtgtcagggccttgtgcagtaacagtgcacacagaagttagtgtttctgtgggctaagggttgtagctctgtatcaggattctgggagtgggtctggatttctggtgtgtggacttaagaagctgtgtcagacttgggggaggggcgttcatgtataactgggttcacataggccaagactcccaggtgcattttaggcagagcctcaggtgtgttagaggtcccaggggcagagaggctataggtgctgtcagaggccttggggacatttagggcagagcctcgagtgacaggtcctgggacagtgggagccaagggcaagtgctagagttgcagtgaatttagagcaaagcctcagctaagtgacacatcccagggcagtaggggatctatctaggttcgtgctgggcctcaggtaagtgacaggccttaggacaatgggggctgtggcatgcgtcaggttacctgccttgatatgggatcgtgacaggcccctccctatgtgcaggagacaagcagcccaagaaacaggagaaaaacccagtgttggtgtccccagagtttgtggatsaagctctgtgtgcgtgcgaggagtaccttagcaacttggcccacatggacatcracaaggacctggaggccccgctgtacctcacccccgagggctggtccctcttcctccagcgctactaccaagtggtccacgaaggggcagaactcaggcacctcgacactcaggtccagcgctgtgaggacatcctgcagcagctgcaggccgtggtaccccagatagacatggaaggggatcgcaacatctggatcgtgaagccaggagccaagtcccgyggacgaggcatcatgtgcatggaccacctggaggagatgctgaagctggtgaacggcaaccccgtggtgatgaaggacggcaagtgggtggtgcagaagtatattgagcggcccctcctcatctttggcaccaagtttgacctcagacagtggttcctggtaactgactggaacccacttaccgtgtggttctaccrcgacagctatatccgcttttccacgcagcccttctccctgaagaacctggacaactcagtgcacctgtgcaacaactccatccagaagcacctggagaactcatgccatcggcatccactgcttccgccagacaacatgtkgtctagccagaggttccaggcccacctgcaggagatgggtgccccamatgcttggtccaccatcatcgtgcctggcatgaaggatgctgtgatccacgcacttcagacctcccaggacaccgtgcartgtcrgaaggccagctttgagctctatggcgctgacttcgtgttcggggaggacttccagccctggctgattgagatcaacgccagccccacgatggcaccctccacagcagtcactgcccggctctgtgctggcgtgcaagctgacaccctgcgcgtggtcattgaccggakgctggaccgcaactgtgacacaggagcctttgagctcatctataagcagcccgtcaccacttccccagcctccacaccaaggcccagctgccttctccccatgtactccgacaccagggccaggtcctcagacgacagcacagcaagctggtgggcactaaggccctgtcgaccacaggcaaggccttgaggactctacccacggctaaggtcttcatttccctcccaccgaaccttgatttcarggtggcacccagcatcctgaagccaagaaaggtgggcctcgacctgtgactcacacccagtggacagtgctgagcacggggtcagggctggagggcacaggcagagggcagctcccaggctggctggcaccccaagggaagagctggtctccctcagaagccccttcctccacagacttctgatcatctccctcttctcccctcctttcacaccgaggctcctgctctcctgtgcctccgaggcccccagctggaagtgccttgttgcctctgccctttgaagtcggaacaattcctagcacctgtcggaaggtcaaggccaaaggcaaattcaaggccagactgtgacaaacccaggrctgaggcctgccccatgaagaggctgagccccctgaaacccctgccccttgttggtacattccagagrcgcaggggcctgggggatatgaagctagggaagcccctgcttcgattccccactgcccttgtcctggatccaacaccaaataaaaagaaacaagtgaagt

SEQ ID NO: 284 - DNA, 4736 bp, Homo sapiens
gggtgggaagaaggtgggcctcgagcaaagccgctagaggtggggtgcgggtggtcggmctcaggcgagccccggggcacagcccggggcgggaggcggagcttggcggccgagatctccscgctgcagttagccccgccgagcgccaggagctgcgggtaggaggggcgagagaaaggatgggggtacagaaccggaagaaacgaagggctcgtccgcttcggcttgtcctaatttggtgcccaatctgaagctgggctgtaccattgcatacctgggggaggctgtggcaaaggtgacaagaagrccgaaggcacaaagggaagctrcacccattcctggaggagcttaaatagtgactcgagtgcaagaatttaaaaataccgagacagccctaggtggaaaacttccggaaggcccaagcgttcgtaagggctctctaccccgctcggagcatagatggtaccgtccggaagtccgggcggagaccgtagctgcgcttctcgcgaaagggcaggcatcgcggggctggccacttccrtacttccgctttccggcccagccagcgcccgcgatgactgccactctccgcccctacctgagtgccgtgcgggccacattgcaggctgccctctgcctggagaacttctcctcccaggttgtggaacgacacaacaagccggaagtggaagtcaggagtagcaaagagctcctgttacaacctgtgaccatcagcaggaatgagaaggaaaaggttctgattgagggctccatcaactctgtccgggtcagcattgctgtgaaacaggctgatgagatcgagaagattttgtgccacaagttcatgcgcttcatgatgatgcgagcagagaacttctttatccttcgaaggaagcctgtggaggggtatgatatcagctttctgatcaccaacttccacacagagcagatgtacaaacacaagttggtggactttgtgatccacttcatggaggagattgacaaggagatcagtgagatgaagctgtcagtcaatgcccgtgcccgcattgtggctgaagagttccttaagaatgagggcggcgcggtgtgcaactggctgcggaagccgcagccgctcgagccacgcaccagtttcccctcggcgcgccgctccgagttccgtccacccaggaggctgccatgggccggccctgcctccgcccagtccgaggagggtcacgcaggcggcagatgccaggcgggcagccccgcccctgcgcgccgcctcagcggcgccttcaagacgctggtcccaggcacccacgcccagggcgcctcggatacccaccccctcggccccccgcacaccccggtcctcgacccctctccgcaggatggtttcccggtcctctggcgaggatcctccaaggcgtctcacatgaaccggctcagaaacgccaaaatctacgtggagagagctgtcaagcagaagaagatctttacaatccaaggctgctacccggtgatccggtgtctcttgcgccggaggggctgggtggagaagaagatggtccatcgctcaggccccaccctgctgccaccccagaaggatctggatagctcagcgatgggtgacagtgacaccactgaggatgaggatgaagatgaggacgaggagttccagccatcacagctgttcgacttcgatgatttactgaaatttgatgacctagatggaacacatgctctgatggtgggtctatgtctcaatctccggaatttgccgtggtttgatgaggttgatgccaactccttcttcccacgctgctactgcctgggggctgaggatgacaaaaaagccttcatagaggacttctggctgactgctgcccgcaacgttctcaagctggtggtgaagtctgagtggaagtcataccctattcaggcagtagaggaaraggcctcaggagacaagcagcccaagaaacaggagaaaaacccagtgttggtgtccccagagtttgtggatsaagctctgtgtgcgtgcgaggagtaccttagcaacttggcccacatggacatcracaaggacctggaggccccgctgtacctcacccccgagggctggtccctcttcctccagcgctactaccaagtggtccacgaaggggcagaactcaggcacctcgacactcaggtccagcgctgtgaggacatcctgcagcagctgcaggccgtggtaccccagatagacatggaaggggatcgcaacatctggatcgtgaagccaggagccaagtcccgyggacgaggcatcatgtgcatggaccacctggaggagatgctgaagctggtgaacggcaaccccgtggtgatgaaggacggcaagtgggtggtgcagaagtatattgagcggcccctcctcatctttggcaccaagtttgacctcagacagtggttcctggtaactgactggaacccacttaccgtgtggttctaccrcgacagctatatccgcttttccacgcagcccttctccctgaagaacctggacaactcagtgcacctgtgcaacaactccatccagaagcacctggagaactcatgccatcggcatccactgcttccgccagacaacatgtkgtctagccagaggttccaggcccacctgcaggagatgggtgccccamatgcttggtccaccatcatcgtgcctggcatgaaggatgctgtgatccacgcacttcagacctcccaggacaccgtgcartgtcrgaaggccagctttgagctctatggcgctgacttcgtgttcggggaggacttccagccctggctgattgagatcaacgccagccccacgatggcaccctccacagcagtcactgcccggctctgtgctggcgtgcaagctgacaccctgcgcgtggtcattgaccggakgctggaccgcaactgtgacacaggagcctttgagctcatctataagcagmctgctgtggaggtgcctcaatatgtgggcatccggctcctggtagagggcttcaccatcaagaagcccatggcgatgtgtcatcggcggatgggggtccgcccagcagtccctctgctgacycagcgaggctctggggaagcccgtcaccacttccccagcctccacaccaaggcccagctgccttctccccatgtactccgacaccagggccaggtcctcagacgacagcacagcaagctggtgggcactaaggccctgtcgaccacaggcaaggccttgaggactctacccacggctaaggtcttcatttccctcccaccgaaccttgatttcarggtggcacccagcatcctgaagccaagaaaggtgggcctcgacctgtgactcacacccagtggacagtgctgagcacggggtcagggctggagggcacaggcagagggcagctcccaggctggctggcaccccaagggaagagctggtctccctcagaagccccttcctccacagacttctgatcatctccctcttctcccctcctttcacaccgaggctcctgctctcctgtgcctccgaggcccccagctggaagtgccttgttgcctctgccctttgaagtcggaacaattcctagcacctgtcggaaggtcaaggccaaaggcaaattcaaggccagactgtgacaaacccaggrctgaggcctgccccatgaagaggctgagccccctgaaacccctgccccttgttggtacattccagagrcgcaggggcctgggggatatgaagctagggaagcccctgcttcgattccccactgcccttgtcctggatccaacaccaaataaaaagaaacaagtgaagtatttggggcttgactccattgctgttggagggtcaagagtggatggggcgaggccgtgtaccccagggtccacagcaagagcctgaggccatcagcagctcctccgtgcagcgaggcccagaattccsacctaaggacagacatggggcttcctatttagggactcccccagcatctccgatccaggggtggggagcgtgagccttcactttacagatgaagaaactgagtctgaaagaggaggcatggcttacccaagatcacgtggcagtgagtcgacgcagggacatattgccagaactgccgagcactgggagccccccaaccccagagaacaagccaagctagcagaatgacacctaccrggcataggaacgttaatgccatgagacargggaaggaattggccttgcctaaacctcagcccttctgcagagggcatgggtctatcccttcttcagcaaggggccaaggtcacctaaaaatgaaacatccaataagccacacccacctgaagaaaagtgtggcactgcttagttgtagtgggttgaactgtggtcccctgaaaagagatgtctacttggaccctgtgaatgtgaccttatgtgggaaaagagtctttgtagctgggtatggtggctcacacctgttatccyagcactttgagaggccaaggcaggagatcgcttgagcccrcaagttcaagaccagtctgggcaacatggtgaaaccgtttctacagaaaattagctgggtgtggtggcacacacctgtrgtcctagctactcgggaggcctaggtgggaggattacctgagcctgggaagatcaaaactrtggtgagctgtgatcacgccactgcgctctgagcctgggagacagagtgaaaccctaaatc

SEQ ID NO: 285 - DNA, 4162 bp, Homo sapiens
gaggatgaagatgaggacgaggagttccagccatcacagctgttcgacttcgatgatttactgaaatttgatgacctagatggaacacatgctctgatggtgggtctatgtctcaatctccggaatttgccgtggtttgatgaggttgatgccaactccttcttcccacgctgctactgcctgggggctgaggatgacaaaaaagccttcataggtaaggagacccscagycctatgcctgaacctcaggctgacagagcagggctgaagctctggctcatattggagagaaacaggcctctcttcatgccctcatctgcctgccccagcagatttccctttccaccctcaatccttatccttccctaatgtgccctcccttaataagcctcttagcttggtcaactctgacctccagaaaagcttgggtagcttggcttatattctagagcaggttctaaaagttggtcagtcccttgagtttggaatccagaacagattccaggcttatatcaagttccatttgttgaattgggttccaaaaaagkctgcaggctttggatttctaaggcagactaggttccgattccacaatatgttctaaattcaggttagaatttggatccagattctatgctasatttaaattacattcagaatctgaactaggacacagtctggttctcaggacagaataagtatcaaaagtaggtgatgaacagaagaaacaaatcagacaatgggtccaagccagattctgaaggcagaatatgatccaagtcaggtcagatttggggtctggttacacaactgaaacaggagcaagttcttttttttttttgagayggagtctcgctctgtcacccaggctggrgtgcagtggcrcgatcttggctcactgcaasctccgcctcccaggttcccgccattctcctgcctcagcctcccgagtagctgggactacaggcgcccgccatcacgcctggctaattttttgtatttttagtagagacggggtttcactgtgttagccaggatggtctcgatctcctgacctcatgatccatccacctcagcctcccaaagtgctgggattacaggcgtcagccaccgtgaccagcctgaaacaggagcaagttctaaactcaggctctagagtcagaaaaggtagagtcaggttctggatccaaaatggggcaagtcatgatcaggttctggaaccagaacaggcctcaagcctaggggctgagcagggtatcccctggcctgggagcagaggacttctggctgactgctgcccgcaacgttctcaagctggtggtgaagtctgagtggaagtcataccctattcaggcagtagaggaaraggcctcaggagacaagcagcccaagaaacaggagaaaaacccagtgttggtgtccccagagtttgtggatsaagctctgtgtgcgtgcgaggagtaccttagcaacttggcccacatggacatcracaaggacctggaggccccgctgtacctcacccccgagggctggtccctcttcctccagcgctactaccaagtggtccacgaaggggcagaactcaggcacctcgacactcaggtccagcgctgtgaggacatcctgcagcagctgcaggccgtggtaccccagatagacatggaaggggatcgcaacatctggatcgtgaagccaggagccaagtcccgyggacgaggcatcatgtgcatggaccacctggaggagatgctgaagctggtgaacggcaaccccgtggtgatgaaggacggcaagtgggtggtgcagaagtatattgagcggcccctcctcatctttggcaccaagtttgacctcagacagtggttcctggtaactgactggaacccacttaccgtgtggttctaccrcgacagctatatccgcttttccacgcagcccttctccctgaagaacctggacaactcagtgcacctgtgcaacaactccatccagaagcacctggagaactcatgccatcggcatccactgcttccgccagacaacatgtkgtctagccagaggttccaggcccacctgcaggagatgggtgccccamatgcttggtccaccatcatcgtgcctggcatgaaggatgctgtgatccacgcacttcagacctcccaggacaccgtgcartgtcrgaaggccagctttgagctctatggcgctgacttcgtgttcggggaggacttccagccctggctgattgagatcaacgccagccccacgatggcaccctccacagcagtcactgcccggctctgtgctggcgtgcaagctgacaccctgcgcgtggtcattgaccggakgctggaccgcaactgtgacacaggagcctttgagctcatctataagcagmctgctgtggaggtgcctcaatatgtgggcatccggctcctggtagagggcttcaccatcaagaagcccatggcgatgtgtcatcggcggatgggggtccgcccagcagtccctctgctgacycagcgaggctctggggaagcccgtcaccacttccccagcctccacaccaaggcccagctgccttctccccatgtactccgacaccagggccaggtcctcagacgacagcacagcaagctggtgggcactaaggccctgtcgaccacaggcaaggccttgaggactctacccacggctaaggtcttcatttccctcccaccgaaccttgatttcarggtggcacccagcatcctgaagccaagaaaggtgggcctcgacctgtgactcacacccagtggacagtgctgagcacggggtcagggctggagggcacaggcagagggcagctcccaggctggctggcaccccaagggaagagctggtctccctcagaagccccttcctccacagacttctgatcatctccctcttctcccctcctttcacaccgaggctcctgctctcctgtgcctccgaggcccccagctggaagtgccttgttgcctctgccctttgaagtcggaacaattcctagcacctgtcggaaggtcaaggccaaaggcaaattcaaggccagactgtgacaaacccaggrctgaggcctgccccatgaagaggctgagccccctgaaacccctgccccttgttggtacattccagagrcgcaggggcctgggggatatgaagctagggaagcccctgcttcgattccccactgcccttgtcctggatccaacaccaaataaaaagaaacaagtgaagtatttggggcttgactccattgctgttggagggtcaagagtggatggggcgaggccgtgtaccccagggtccacagcaagagcctgaggccatcagcagctcctccgtgcagcgaggcccagaattccsacctaaggacagacatggggcttcctatttagggactcccccagcatctccgatccaggggtggggagcgtgagccttcactttacagatgaagaaactgagtctgaaagaggaggcatggcttacccaagatcacgtggcagtgagtcgacgcagggacatattgccagaactgccgagcactgggagccccccaaccccagagaacaagccaagctagcagaatgacacctaccrggcataggaacgttaatgccatgagacargggaaggaattggccttgcctaaacctcagcccttctgcagagggcatgggtctatcccttcttcagcaaggggccaaggtcacctaaaaatgaaacatccaataagccacacccacctgaagaaaagtgtggcactgcttagttgtagtgggttgaactgtggtcccctgaaaagagatgtctacttggaccctgtgaatgtgaccttatgtgggaaaagagtctttgtagctgggtatggtggctcacacctgttatccyagcactttgagaggccaaggcaggagatcgcttgagcccrcaagttcaagaccagtctgggcaacatggtgaaaccgtttctacagaaaattagctgggtgtggtggcacacacctgtrgtcctagctactcgggaggcctaggtgggaggattacctgagcctgggaagatcaaaactrtggtgagctgtgatcacgccactgcgctctgagcctgggagacagagtgaaaccctaaatc

SEQ ID NO: 286 - DNA, 2375 bp, Homo sapiens
gggtgggaagaaggtgggcctcgagcaaagccgctagaggtggggtgcgggtggtcggmctcaggcgagccccggggcacagcccggggcgggaggcggagcttggcggccgagatctccscgctgcagttagccccgccgagcgccaggagctgcgggtaggaggggcgagagaaaggatgggggtacagaaccggaagaaacgaagggctcgtccgcttcggcttgtcctaatttggtgcccaatctgaagctgggctgtaccattgcatacctgggggaggctgtggcaaaggtgacaagaagrccgaaggcacaaagggaagctrcacccattcctggaggagcttaaatagtgactcgagtgcaagaatttaaaaataccgagacagccctaggtggaaaacttccggaaggcccaagcgttcgtaagggctctctaccccgctcggagcatagatggtaccgtccggaagtccgggcggagaccgtagctgcgcttctcgcgaaagggcaggcatcgcggggctggccacttccrtacttccgctttccggcccagccagcgcccgcgatgactgccactctccgcccctacctgagtgccgtgcgggccacattgcaggctgccctctgcctggagaacttctcctcccaggttgtggaacgacacaacaagccggaagtggaagtcaggagtagcaaagagctcctgttacaacctgtgaccatcagcaggaatgagaaggaaaaggttctgattgagggctccatcaactctgtccgggtcagcattgctgtgaaacaggctgatgagatcgagaagattttgtgccacaagttcatgcgcttcatgatgatgcgagcagagaacttctttatccttcgaaggaagcctgtggaggggtatgatatcagctttctgatcaccaacttccacacagagcagatgtacaaacacaagttggtggactttgtgatccacttcatggaggagattgacaaggagatcagtgagatgaagctgtcagtcaatgcccgtgcccgcattgtggctgaagagttccttaagaatttttaaaccatctggctggatctcgtggccttccccctcagactacccatgtctccacgaaggcgtcctggagtcactccccgagcagcgcggcggcggcagggagttgggttggggtgggcatttgatgcgggaggtgggtggtgtgcttgctagctgggcaagaaagcagcagtggacctgccccaaggccacacgtgcctggtcaggctggcttctgatgttcagtcccctgggccgggacagattttttttaacgtcttgaaacttaaactctgtgcttgtaggatactgtaacctttttgtctttttttttttttttttttttaaacctccacctccagtggctgtgactggtcccagtgattatacgttattggttgctgtgggtctgggcgggcctggagccagaaggcgacttattttttctcycctatgccaccccaggtggggagggagggaggtttcagactccagtttctcccttgcccttttattcccaagcctccttggccccagtataagtgttgggaactctctgccagcttcctgagttctgcctaaagatggccccccagcactggttggggacaagggccaaattggtgaccaccagtcatgcctaggacctggggcccaaaarccgggcaacctytggctacaggggccattgggtgccctcccagttgagaggggccgctgtttcgccttgtccgtcagtgccagtgcctgtgccaraggtggcgaggtgagtcctccagagcttyctggccgggccctcctcctgcctgttytggstcctytgctcccacgctagctgtcccttttytgattytggtggatcctccctcccctaattaaagtctctttttgcccctttggggctgcatgaggtctatgctgtgtgtgtgtgtgaaaggaggggaggtggggcttcttttccctgagaccagatggctggtaattgtgcctggagctccccactgggtgcagtctcatgattggtcctgccattattcctgccaggggtcccaacccagagactccattcattgcagtccaggcaccattaatttctgaaactgctctgtctgcctatacagagctttggtgcttttcacataaggaacttacttgggctaaaaagtaacctcagagaaacagtgctcccatttggtggataaggaaactgaggttccaaacatgagatgtaatagcttgccccaaatctagccagtgagcaagagagtagacttttgcctgtgccaaaacagtaatcaccatccacaagtggctattt

SEQ ID NO: 287 - DNA, 2848 bp, Homo sapiens
attctcccatctactacctatctgttcttcaggccatccactcatccattcttctgtcccaggtacytagacacttgtcttcccatccgtttgttagttgatccactcctcattcagccctcccatgggcctggcatgtagccgagcaccctggagagggcagactaagaagacatggtccgtccctgcctgtgaggagttcaggtctctgaggaggaggaagcagtgaaactgggctttacacatggcctgagaacagcttaggcctgaacataaggaacagcttggagtggaggggacacagaggaaccctcactatcatgcatgccaacccaaccactgcctgccctttcccttctggatttagctcgtgtctccaggctcctagtcctgtaatccagggacccatcagcgagggattcagggaagcagaggcagctctccaggaaggaggaaaatccctgcctcttccagagagactcccccattgctgtctcttgtgtgtgtcatgcacaaggaaggcttggttgtgtgccaggataaggggcacaagggcctcgggtgtggccagagaccccatgcttaagcttttatggtataggtcaggctgcaggggtttgagggcctcagttgtatatcagaatcttcagagcactgcgatgttcaggggtgagtcaggtctgtagatgtgcacggggtcttctgaagggtcagtttctgtaatcactttcaggtgtgtcagggccttgtgcagtaacagtgcacacagaagttagtgtttctgtgggctaagggttgtagctctgtatcaggattctgggagtgggtctggatttctggtgtgtggacttaagaagctgtgtcagacttgggggaggggcgttcatgtataactgggttcacataggccaagactcccaggtgcattttaggcagagcctcaggtgtgttagaggtcccaggggcagagaggctataggtgctgtcagaggccttggggacatttagggcagagcctcgagtgacaggtcctgggacagtgggagccaagggcaagtgctagagttgcagtgaatttagagcaaagcctcagctaagtgacacatcccagggcagtaggggatctatctaggttcgtgctgggcctcaggtaagtgacaggccttaggacaatgggggctgtggcatgcgtcaggttacctgccttgatatgggatcgtgacaggcccctccctatgtgcaggagacaagcagcccaagaaacaggagaaaaacccagtgttggtgtccccagagtttgtggatsaagctctgtgtgcgtgcgaggagtaccttagcaacttggcccacatggacatcracaaggacctggaggccccgctgtacctcacccccgagggctggtccctcttcctccagcgctactaccaagtggtccacgaaggggcagaactcaggcacctcgacactcaggtccagcgctgtgaggacatcctgcagcagctgcaggccgtggtaccccagatagacatggaaggggatcgcaacatctggatcgtgaagccaggagccaagtcccgyggacgaggcatcatgtgcatggaccacctggaggagatgctgaagctggtgaacggcaaccccgtggtgatgaaggacggcaagtgggtggtgcagaagtatattgagcggcccctcctcatctttggcaccaagtttgacctcagacagtggttcctggtaactgactggaacccacttaccgtgtggttctaccrcgacagctatatccgcttttccacgcagcccttctccctgaagaacctggacaactcagtgcacctgtgcaacaactccatccagaagcacctggagaactcatgccatcggcatccactgcttccgccagacaacatgtkgtctagccagaggttccaggcccacctgcaggagatgggtgccccamatgcttggtccaccatcatcgtgcctggcatgaaggatgctgtgatccacgcacttcagacctcccaggacaccgtgcartgtcrgaaggccagctttgagctctatggcgctgacttcgtgttcggggaggacttccagccctggctgattgagatcaacgccagccccacgatggcaccctccacagcagtcactgcccggctctgtgctggcgtgcaagctgacaccctgcgcgtggtcattgaccggakgctggaccgcaactgtgacacaggagcctttgagctcatctataagcagggcccagctcctaacawgcaggtgtcaccagagagaaatgcaccactgtgcccagcaccatagctctggctcagagagtttgcctgagaaagcagcagacagaaaacaraaggtgcgwgttgctcccgaaggaactgacttcatgtgcaacagagctcggagaagtccaaggctaagcacactctccagaacagtggaggttgtgctgaaaggcaactgggaggcgacggagagcctgggaggtgcgggctacactggaggccagcaagtctgccagagagaaacagaaaaaaagacaggtgggaagagctctcctggggtcagaacaaagcttaatatcttctttgacaaagaacgtaacatcaaaatagccaactatgggtttagttcaacatttgcaaagagagacaacactgaaaagggaacgtttgatgggactctcccttatgcaggcccagaactcttcttgggccatgggtaccaatgccctgccatcaacgtttggagccttggcatcatcgtatgcaaaatggtggctggggccctgccattttatgagcagaactgtaaggatatactg

SEQ ID NO: 288 - DNA, 2279 bp, Homo sapiens
gggtgggaagaaggtgggcctcgagcaaagccgctagaggtggggtgcgggtggtcggmctcaggcgagccccggggcacagcccggggcgggaggcggagcttggcggccgagatctccscgctgcagttagccccgccgagcgccaggagctgcgggtaggaggggcgagagaaaggatgggggtacagaaccggaagaaacgaagggctcgtccgcttcggcttgtcctaatttggtgcccaatctgaagctgggctgtaccattgcatacctgggggaggctgtggcaaaggtgacaagaagrccgaaggcacaaagggaagctrcacccattcctggaggagcttaaatagtgactcgagtgcaagaatttaaaaataccgagacagccctaggtggaaaacttccggaaggcccaagcgttcgtaagggctctctaccccgctcggagcatagatggtaccgtccggaagtccgggcggagaccgtagctgcgcttctcgcgaaagggcaggcatcgcggggctggccacttccrtacttccgctttccggcccagccagcgcccgcgatgactgccactctccgcccctacctgagtgccgtgcgggccacattgcaggctgccctctgcctggagaacttctcctcccaggttgtggaacgacacaacaagccggaagtggaagtcaggagtagcaaagagctcctgttacaacctgtgaccatcagcaggaatgagaaggaaaaggttctgattgagggctccatcaactctgtccgggtcagcattgctgtgaaacaggggtatgatatcagctttctgatcaccaacttccacacagagcagatgtacaaacacaagttggtggactttgtgatccacttcatggaggagattgacaaggagatcagtgagatgaagctgtcagtcaatgcccgtgcccgcattgtggctgaagagttccttaagaatttttaaaccatctggctggatctcgtggccttccccctcagactacccatgtctccacgaaggcgtcctggagtcactccccgagcagcgcggcggcggcagggagttgggttggggtgggcatttgatgcgggaggtgggtggtgtgcttgctagctgggcaagaaagcagcagtggacctgccccaaggccacacgtgcctggtcaggctggcttctgatgttcagtcccctgggccgggacagattttttttaacgtcttgaaacttaaactctgtgcttgtaggatactgtaacctttttgtctttttttttttttttttttttaaacctccacctccagtggctgtgactggtcccagtgattatacgttattggttgctgtgggtctgggcgggcctggagccagaaggcgacttattttttctcycctatgccaccccaggtggggagggagggaggtttcagactccagtttctcccttgcccttttattcccaagcctccttggccccagtataagtgttgggaactctctgccagcttcctgagttctgcctaaagatggccccccagcactggttggggacaagggccaaattggtgaccaccagtcatgcctaggacctggggcccaaaarccgggcaacctytggctacaggggccattgggtgccctcccagttgagaggggccgctgtttcgccttgtccgtcagtgccagtgcctgtgccaraggtggcgaggtgagtcctccagagcttyctggccgggccctcctcctgcctgttytggstcctytgctcccacgctagctgtcccttttytgattytggtggatcctccctcccctaattaaagtctctttttgcccctttggggctgcatgaggtctatgctgtgtgtgtgtgtgaaaggaggggaggtggggcttcttttccctgagaccagatggctggtaattgtgcctggagctccccactgggtgcagtctcatgattggtcctgccattattcctgccaggggtcccaacccagagactccattcattgcagtccaggcaccattaatttctgaaactgctctgtctgcctatacagagctttggtgcttttcacataaggaacttacttgggctaaaaagtaacctcagagaaacagtgctcccatttggtggataaggaaactgaggttccaaacatgagatgtaatagcttgccccaaatctagccagtgagcaagagagtagacttttgcctgtgccaaaacagtaatcaccatccacaagtggctattt

SEQ ID NO: 289 - DNA, 1957 bp, Homo sapiens
aaggtgggcctcgagcaaagccgctagaggtggggtgcgggtggtcggmctcaggcgagccccggggcacagcccggggcgggaggcggagcttggcggccgagatctccscgctgcagttagccccgccgagcgccaggagctgcgggtaggaggggcgagagaaaggatgggggtacagaaccggaagaaacgaagggctcgtccgcttcggcttgtcctaatttggtgcccaatctgaagctgggctgtaccattgcatacctgggggaggctgtggcaaaggtgacaagaagrccgaaggcacaaagggaagctrcacccattcctggaggagcttaaatagtgactcgagtgcaagaatttaaaaataccgagacagccctaggtggaaaacttccggaaggcccaagcgttcgtaagggctctctaccccgctcggagcatagatggtaccgtccggaagtccgggcggagaccgtagctgcgcttctcgcgaaagggcaggcatcgcggggctggccacttccrtacttccgctttccggcccagccagcgcccgcgatgactgccactctccgcccctacctgagtgccgtgcgggccacattgcaggctgccctctgcctggagaacttctcctcccaggttgtggaacgacacaacaagccggaagtggaagtcaggagtagcaaagagctcctgttacaacctgtgaccatcagcaggaatgagaaggaaaaggttctgattgagggctccatcaactctgtccgggtcagcattgctgtgaaacaggctgatgagatcgagaagattttgtgccacaattgaatagtgcagggtggcccagggctgcttccaggacttgcctgtcctccctgagtttggatgggagagacacaagggcctggacctcagtyttctgttctctgccccagctcagtgcacctgtgcaacaactccatccagaagcacctggagaactcatgccatcggcatccactgcttccgccagacaacatgtkgtctagccagaggttccaggcccacctgcaggagatgggtgccccamatgcttggtccaccatcatcgtgcctggcatgaaggatgctgtgatccacgcacttcagacctcccaggacaccgtgcartgtcrgaaggccagctttgagctctatggcgctgacttcgtgttcggggaggacttccagccctggctgattgagatcaacgccagccccacgatggcaccctccacagcagtcactgcccggctctgtgctggcgtgcaagctgacaccctgcgcgtggtcattgaccggakgctggaccgcaactgtgacacaggagcctttgagctcatctataagcagggcccagctcctaacawgcaggtgtcaccagagagaaatgcaccactgtgcccagcaccatagctctggctcagagagtttgcctgagaaagcagcagacagaaaacaraaggtgcgwgttgctcccgaaggaactgacttcatgtgcaacagagctcggagaagtccaaggctaagcacactctccagaacagtggaggttgtgctgaaaggcaactgggaggcgacggagagcctgggaggtgcgggctacactggaggccagcaagtctgccagagagaaacagaaaaaaagacaggtgggaagagctctcctggggtcagaacaaagcttaatatcttctttgacaaagaacgtaacatcaaaatagccaactatgggtttagttcaacatttgcaaagagagacaacactgaaaagggaacgtttgatgggactctcccttatgcaggcccagaactcttcttgggccatgggtaccaatgccctgccatcaacgtttggagccttggcatcatcgtatgcaaaatggtggctggggccctgccattttatgagcagaactgtaaggatatactg

SEQ ID NO: 290 - DNA, 2421 bp, Homo sapiens
accagcgtcgcttaacggaagaaggcgcgagtagcagcggcgcagccagggcacctgggggtgacacgagagtgggcgggcggtccagggagcccctgcwggaaaccagacgctaaagcttgcagctgtgcagctaggggagcatctgttttccacttgagagcaacccgggcacgcgagaacagcccgatttcggtgcaggggtgcgtcccgaaggaacgggggactgttactgcgcggacaggcggacccggcaggggaaaccgaggccacgctaggtccgcagccccgaggtgtccacaagagctccgctcgcgcaagggcgcggagcgaggctgcccgcgggaccggcctgcggagcgagcggccaacgagtggataaagaaaatgtgatatatatgcactatggaatactaagccataagaaggaatgaaataatggcatttgcagcaacctagatggagttggagaccattattctaagtgaagtaactcaagaatggaaaaccaaatattgtatgttctcactcgtaagtgggagctaagctgcgaagatgcaaaggcataagaatgatatagtggactttgaggactcaagggttgaaggatgagactacacattgggtacagtgtgcactgcttgggtgatgagtgcaccaaaatctcagaactcaccactgaagaacttccccatgtaaccaaaaaccacctgttccacagaaactatcgaaataacayttttaaaactttactatttctgaataaaatttacatrcatttctcagaaaaaaaaatatttggaattgaggtatctaatagagaactgagttaaattattgccacttaaaaacacaaagtgatatagccactttrtgaattaatcagtcagcagtggctaggttatgcttagtggtttataaccaaatcttagtttataacaacaaatgtgtattgttaattcccactacaagtttataacgacattgctggatgctacactccatgtctctttgtgggacccaggctyatgggacttctgttayctgcattagagagagagaagacaacaaaatatgcactggttcttgaagctttggcccagaagtaaaatatgtcttttacctgttcacattgcattgggccagggcaattatcatggctgcaagtaacttcaaaaggatggggaagtgcgatcttggcatgtgtcrgaagaaatgaaaacatttggtgaagagcattaatgactgtctttacaggaaaaaagcaatcaaatagacatgattkcttgtttcagtttcatcatttcctactgtgttacctaaactttytgagccccagtttcttattactaaaataaaataawgataaagatgatattcacttcaaggactttgtgttaactagggtaaaaaaattgaaaactgtagtaagttwtgcaaattagaaatgtataatattactgctttgaaagtgatggtgaaatgtagaataattggaaggataacacaaagcacttataccaggaggcttttagctgcagataatagaaatgaacctccactactttaatcaataaaaaagtgtatcagctcacaaatttgtcatccagacataaaggaggcttcagaatttattgactcaggagttgaatgttggtatcaaggacctagatttttctcatcactctgcacttcaattctcaatgccctattgaacatcaggctgtagtaagatggctagagtgattccagggataacatctagagataaaaargagaactccttttcttatgatttttttcttaagagaaamggaatttcccaaaagcccccagcaarcatgccttcacatcccatggccagaagtggctcacatgtgtaccctgagctaagcactgcagacaggaatggaatcgcctgtaggcctcagagaccacctggatcttgggaaggtgtcagctctacctgtggcacttggctgagtgggaaagggatggaaacatgaataaagtaagaattaggaaggaaaaggagaaatggatccagggtatgaagccaatagtttagttatctcaacaaatatgattgatttcatctttatgaatktgatkayctaatttaatacattcaatcaatgaagtaaaaaaaagtgcaaggacaatatgacatctgtcattctctgttgagatttgagaggtaataataccaagaacgtgtggtgacctgggtcctcactgctactgtcttcctgtacctggacacttctagcaagagacttcaayttcagaacaaagaggatcccaacttgtagctgcattatacacaccccagcagcacacataagttgatttctaattattcctctttaagaaattgtttgtggaatatttatctatttataaatggaaaaatagaaaatt

SEQ ID NO: 291 - DNA, 674 bp, Homo sapiens
taactctcactttgtagtgktwtatttaggatttgatgtgacacagttatttattgctgagtgagcaaacccctagcccccaagtggggactacaggcttcagtgcttcccccacactgcctgagctaccagcccttctgcactggccctcctgccaatactgcctgcactgtccccactccctctggctcccatgatcaccagatccgccctgcaggctccctgtcacctgtggggccctatccagaccccctaatccacttgcctagcagccccactcttccctcgatggctcagatcctgagatccaaggaacaccctgggtttcccaaccactctcttactgcagaggtcctaggtgctcctggatcgtgtagtctttaactgctgcccyaagggacctcaaggaataggaattctctttgttaggaggtggaatgaaagtgtccagcaaactccagccagcagcgttcgtcccttgatttagagggctatgatttctacaaagtggcccgactggcccgcgaacacgcagcagagacgcggcctccacaaggtcagaactaagatgtcctcagagatccccagttacgaagcaaagcgcgggcctacttcgggacctacgcgtccgggcgctgtgcgcggggaccgctcccgggcccagcgtcggggcc

SEQ ID NO: 292 - DNA, 1482 bp, Homo sapiens
ggcgcgctgggtcttgtgggtggaaacrcgctggctgactggggtcggcgtttagttcagcgcagcgactcggggacctggagctgacgcctagacacttgtattagctttaatagaagagaaatggaggagccatagaatattaaggatgaattcaggaaggcctgagaccatggaaaacttgcctgctctctacactattttccaaggagaggttgctatggtgacagactatggggcctttatcaaaatcccaggctgtcggaagcaaggtctggtccatcgaactcatatgtcatcctgtcgggtggataagccctctgagatagtagatgttggagataaagtgtgggtgaagcttattggccgagagatgaaaaatgatagaataaaagtatccctctccatgaaggttgtcaatcaagggactgggaaagaccttgatcccaacaatgttatcattgagcaagaagagaggcggaggcgatccttccaggattacactgggcagaagatcacccttgaggctgtcttgaacactacctgcaagaagtgtggctgtaaaggccactttgcaaaagattgtttcatgcaaccaggtgggactaaatactctctgatacctgatgaggaagaggaaaaggaagaggcaaagtcagcagagtttgagaagcctgaccctacaaggaatccttctagaaaaagaaagaaggagaagaagaaaaagaaacatagagataggaagtcatctgactctgacagctcagactctgagagtgatacaggcaagagggcaaggcacacatcaaaagacagcaaggcagcaaagaagaagaaaaagaagaagaagcmcaagaagaagcacaaggagtgagagtataaagagtgtagggggtggttgagagtaagaaaccaggagcctygtgccttgagactcctggaaagactcaatagtgagaatatagcctcccaccccattaacttcgctcccatgggagatggcttccsctcatgcaacaggcaggtttgkgagttagaggtcaaaagcagctgcctgaatgagttgttgtttccttatcactcctggtccctttgcaagtgaaccctgcagctcacccattcattcacccaacttccttcattcagcaggaggycctattaccctctccagctgccactgccagagctggattcctgtaaaggagtccaggctagagccacagagactgttgtggaggtgagttcggctgtagttagagtgattggacccttcctattggtctgtcctgggccaactggtgggtgatctctgctgcatccaacatgggagcagagactggcagcaggaggggggaacatggtgagaagtggtgctcacttttcccattcctcctaacatagttctactatgctagaagtggcatccagcggcaggtccttgcttaaattcctgtcactaaatggaaatgtgtttggttttaa

SEQ ID NO: 293 - DNA, 2173 bp, Homo sapiens
ggcgcgctgggtcttgtgggtggaaacrcgctggctgactggggtcggcgtttagttcagcgcagcgactcggggacctggagctgacgcctagacacttgtattagctttaatagaagagaaatggaggagccatagaatattaaggatgaattcaggaaggcctgagaccatggaaaacttgcctgctctctacactattttccaaggagaggttgctatggtgacagactatggggcctttatcaaaatcccaggctgtcggaagcaaggtctggtccatcgaactcatatgtcatcctgtcgggtggataagccctctgagatagtagatgttggagataaagtgtgggtgaagcttattggccgagagatgaaaaatgatagaataaaagtatccctctccatgaaggttgtcaatcaagggactgggaaagaccttgatcccaacaatgttatcattgagcaagaagagaggcggaggcgatccttccaggattacactgggcagaagatcacccttgaggctgtcttgaacactacctgcaagaagtgtggctgtaaaggccactttgcaaaagattgtttcatgcaaccaggtgggactaaatactctctgatacctgatgaggaagaggaaaaggaagaggcaaagtcagcagagtttgagaagcctgaccctacaaggaatccttctagaaaaagaaagaaggagaagaagaaaaagaaacatagagataggaagtcatctgactctgacagctcagactctgagagtgatacaggcaagagggcaaggcacacatcaaaagacagcaaggcagcaaagaagaagaaaaagaagaagaagcmcaagaagaagcacaaggagtgagagtataaagagtgtagggggtggttgagagtaagaaaccaggagcctygtgccttgagactcctggaaagactcaatagtgagaatatagcctcccaccccattaacttcgctcccatgggagatggcttccsctcatgcaacaggcaggtttgkgagttagaggtcaaaagcagctgcctgaatgagttgttgtttccttatcactcctggtccctttgcaagtgaaccctgcagctcacccattcattcacccaacttccttcattcagcaggaggycctattaccctctccagctgccactgccagagctggattcctgtaaaggagtccaggctagagccacagagactgttgtggaggtgagttcggctgtagttagagtgattggacccttcctattggtctgtcctgggccaactggtgggtgatctctgctgcatccaacatgggagcagagactggcagcaggaggggggaacatggtgagaagtggtgctcacttttcccattcctcctaacatagttctactatgctagaagtggcatccagcggccacagctagaaaacagtctgcagtgtgacttaacttgtgtattgcattccagcagaccactgaaccagacagcgaagccaagatcattgttctactttgtatttactactgtgtgaatcagttgattctacttcaggtccttgcttaaattcctgtcactaaatggaaatgtgtttggttttaaacttactgagttatttttcctataatccttcttcctgggtaacttayagacttaaagtcactgagcctgcattagctgacaaaaacatttaatatgttaccttagaccttggagagatgcccagcagaggtacagagccaaaggcactagcagatcactgccttcttgggagatcacttataagccctcccttttgtaatgatcagatgccctcttccctcagagttgattagagaagcagtaagaatttgtagtcataagtactagcctggtgcacaggtcagcagtcctcttggccagtggtcattttctcccaccaccatggtacaagcctgggttctgtgccctgaacctgaattctggaaagggagagactacagcatttcacagagaacagccagacccaagagctttcagtgtaggatgggcctgaagtgacagttcaatagccaaacctggggaagccccatcactgactgaactaggtcatttgaccatggagggggggcagtgtaaaggcaacgtgtaggtacagctcttttattattaaatgtgta

SEQ ID NO: 294 - DNA, 1552 bp, Homo sapiens
ggcgcgctgggtcttgtgggtggaaacrcgctggctgactggggtcggcgtttagttcagcgcagcgactcggggacctggagctgacgcctagacacttgtattagctttaatagaagagaaatggaggagccatagaatattaaggatgaattcaggaaggcctgagaccatggaaaacttgcctgctctctacactattttccaaggagagttatggtgaagctgaaacagtgctcaagatgaagcagctaattgaagacactgaaaagaataaagtttatgttgctatggtgacagactatggggcctttatcaaaatcccaggctgtcggaagcaaggtctggtccatcgaactcatatgtcatcctgtcgggtggataagccctctgagatagtagatgttggagataaagtgtgggtgaagcttattggccgagagatgaaaaatgatagaataaaagtatccctctccatgaaggttgtcaatcaagggactgggaaagaccttgatcccaacaatgttatcattgagcaagaagagaggcggaggcgatccttccaggattacactgggcagaagatcacccttgaggctgtcttgaacactacctgcaagaagtgtggctgtaaaggccactttgcaaaagattgtttcatgcaaccaggtgggactaaatactctctgatacctgatgaggaagaggaaaaggaagaggcaaagtcagcagagtttgagaagcctgaccctacaaggaatccttctagaaaaagaaagaaggagaagaagaaaaagaaacatagagataggaagtcatctgactctgacagctcagactctgagagtgatacaggcaagagggcaaggcacacatcaaaagacagcaaggcagcaaagaagaagaaaaagaagaagaagcmcaagaagaagcacaaggagtgagagtataaagagtgtagggggtggttgagagtaagaaaccaggagcctygtgccttgagactcctggaaagactcaatagtgagaatatagcctcccaccccattaacttcgctcccatgggagatggcttccsctcatgcaacaggcaggtttgkgagttagaggtcaaaagcagctgcctgaatgagttgttgtttccttatcactcctggtccctttgcaagtgaaccctgcagctcacccattcattcacccaacttccttcattcagcaggaggycctattaccctctccagctgccactgccagagctggattcctgtaaaggagtccaggctagagccacagagactgttgtggaggtgagttcggctgtagttagagtgattggacccttcctattggtctgtcctgggccaactggtgggtgatctctgctgcatccaacatgggagcagagactggcagcaggaggggggaacatggtgagaagtggtgctcacttttcccattcctcctaacatagttctactatgctagaagtggcatccagcggcaggtccttgcttaaattcctgtcactaaatggaaatgtgtttggttttaa

SEQ ID NO: 295 - DNA, 2243 bp, Homo sapiens
ggcgcgctgggtcttgtgggtggaaacrcgctggctgactggggtcggcgtttagttcagcgcagcgactcggggacctggagctgacgcctagacacttgtattagctttaatagaagagaaatggaggagccatagaatattaaggatgaattcaggaaggcctgagaccatggaaaacttgcctgctctctacactattttccaaggagagttatggtgaagctgaaacagtgctcaagatgaagcagctaattgaagacactgaaaagaataaagtttatgttgctatggtgacagactatggggcctttatcaaaatcccaggctgtcggaagcaaggtctggtccatcgaactcatatgtcatcctgtcgggtggataagccctctgagatagtagatgttggagataaagtgtgggtgaagcttattggccgagagatgaaaaatgatagaataaaagtatccctctccatgaaggttgtcaatcaagggactgggaaagaccttgatcccaacaatgttatcattgagcaagaagagaggcggaggcgatccttccaggattacactgggcagaagatcacccttgaggctgtcttgaacactacctgcaagaagtgtggctgtaaaggccactttgcaaaagattgtttcatgcaaccaggtgggactaaatactctctgatacctgatgaggaagaggaaaaggaagaggcaaagtcagcagagtttgagaagcctgaccctacaaggaatccttctagaaaaagaaagaaggagaagaagaaaaagaaacatagagataggaagtcatctgactctgacagctcagactctgagagtgatacaggcaagagggcaaggcacacatcaaaagacagcaaggcagcaaagaagaagaaaaagaagaagaagcmcaagaagaagcacaaggagtgagagtataaagagtgtagggggtggttgagagtaagaaaccaggagcctygtgccttgagactcctggaaagactcaatagtgagaatatagcctcccaccccattaacttcgctcccatgggagatggcttccsctcatgcaacaggcaggtttgkgagttagaggtcaaaagcagctgcctgaatgagttgttgtttccttatcactcctggtccctttgcaagtgaaccctgcagctcacccattcattcacccaacttccttcattcagcaggaggycctattaccctctccagctgccactgccagagctggattcctgtaaaggagtccaggctagagccacagagactgttgtggaggtgagttcggctgtagttagagtgattggacccttcctattggtctgtcctgggccaactggtgggtgatctctgctgcatccaacatgggagcagagactggcagcaggaggggggaacatggtgagaagtggtgctcacttttcccattcctcctaacatagttctactatgctagaagtggcatccagcggccacagctagaaaacagtctgcagtgtgacttaacttgtgtattgcattccagcagaccactgaaccagacagcgaagccaagatcattgttctactttgtatttactactgtgtgaatcagttgattctacttcaggtccttgcttaaattcctgtcactaaatggaaatgtgtttggttttaaacttactgagttatttttcctataatccttcttcctgggtaacttayagacttaaagtcactgagcctgcattagctgacaaaaacatttaatatgttaccttagaccttggagagatgcccagcagaggtacagagccaaaggcactagcagatcactgccttcttgggagatcacttataagccctcccttttgtaatgatcagatgccctcttccctcagagttgattagagaagcagtaagaatttgtagtcataagtactagcctggtgcacaggtcagcagtcctcttggccagtggtcattttctcccaccaccatggtacaagcctgggttctgtgccctgaacctgaattctggaaagggagagactacagcatttcacagagaacagccagacccaagagctttcagtgtaggatgggcctgaagtgacagttcaatagccaaacctggggaagccccatcactgactgaactaggtcatttgaccatggagggggggcagtgtaaaggcaacgtgtaggtacagctcttttattattaaatgtgta

SEQ ID NO: 296 - DNA, 3644 bp, Homo sapiens
gtcgggggcggagccgcggggtggtgkgtgkgkgtgtgtgtgtgtgtgtgtgtgtgtgtgtgtgtgtgtttggctgtgggttagttgtgccgttctgctggaacaccgtgggaaggcagtagacgcgggcagtcagctagcagagacctgtcggccatggagcctaatgatagtaccagtaccgctgtggaggagcctgacagcttggaggtgttggtgaagaccttggactctcaaactcgtacctttattgtgggggcccagatgaatgtaaaagagtttaaggagcacattgctgcctctgtcagcatcccatctgaaaaacaacggctcatttaccagggacgagttctgcaagatgataagaagcttcaggaatacaatgttgggggaaaggttatccacctggtggaacgggctcctcctcagactcacctcccttctggggcatcttctgggacggggtctgcctcagccactcatggtgggggatccccccctggtactcgggggcctggggcctctgttcatgaccggaatgccaacagctatgtcatggttggaaccttcaatcttcctagtgacggctctgctgtggatgttcacatcaacatggaacaggccccgattcagagtgagccccgggtacggctggtgatggctcagcacatgatcagggatatacagaccttactatcccggatggagtgtcgaggagggccccaaccgcagcacagtcagccgcccccgcagccaccggctgtgaccccggagccagtagccttgagctctcaaacrtcagaaccagttgaaagtgaagcacctccccgggagcccatggaggcagaagaagtggaggagcgtgccccagcccagaacccggagctcactcmtggcccagccccagcgggcccaacacctgccccggaaacaaatgcacccaaccatccttcccctgcggagtatgtcgaggtgctccaggagctacagcggctggagagtcgcctccagcccttcttgcagcgctactacgaggttctgggtgctgctgccaccacggactacaataacaatcacgagggccgggaggaggatcagcggttgatcaacttggtaggggagagcctgcgactgctgggcaacacctttgttgcactgtctgacctgcgctgcaatctggcctgcacgcccccacgacacctgcatgtggtccggcctatgtctcactacaccacccccatggtgctccagcaggcagccattcccatacagatcaatgtgggaaccactgtgaccatgacaggaaatgggactcggccccccccaactcccaatgcagaggcacctccccctggtcctgggcaggcctcatccgtggctccgtcttctaccaatgtcgagtcctcagctgagggggctcccccgccaggtccagctcccccgccagccaccagccacccragggtcatccggatttcccaccagagtgtggaacccgtggtcatgatgcacatgaacattcaagattctggcacacagcctggtggtgttccgagtgctcccactggccccctgggaccccctggtcatggccaaaccctgggacagcaggtgccaggcttcccaacagctccaacccgggtggtgattgcccggcccactcctccacaggctcggccttcccatcctggagggcccccagtctctgggacactgcagggcgcyggtctgggtaccaatgcctcgttggcccagatggtgagcggccttgtggggcagcttcttatgcagccagtccttgtggctcaggggaccccaggtatggctccaccgccagcccctgccactgcttctgccagtgctggcaccaccaacacagctaccacagctggccccgctcctggggggcctgcccagcctccacccacccctcaaccctccatggctgatcttcagttctctcagcttctggggaacctgctagggcctgcagggccaggggctggagggyctggtgtggcttctcccaccatcactgtggcgatgcctggtgtccctgcctttctccaaggcatgactgacttcttgcaggcaacacagacagcccctccaccacccccacctcctccacccccaccacctgccccagagcagcagaccatgcccccaccaggctccccttctggtggcgcagggagtcctggaggcctgggtcttgagagcctgtcaccggagttttttacctcagtggtgcagggtgtgctcagctccctgctgggctccctgggggctcgggctggcagcagtgaaagtattgctgccttcatacaacgcctcagtggatccagcaacatctttgagcctggagctgatggggcccttggattctttggggccttgctttctcttctgtgccagaacttctctatggtggacgtagtgatgcttctccatgggcatttccagccactacaacggctccagccccagctgcgatccttcttccaccagcactacctgggtggtcaggagcccacacccagtaacatccggatggcaacccacacattgatcacggggctagaagagtatgtgcgggagagtttttccttggtgcaggttcagccaggtgtggacatcatccggacaaacctggaatttctccaagagcagtttaatagcattgctgcgcatgtgctgcattgcacagatagtggatttggggcccggttgctggagttgtgtaaccaaggcctgtttgaatgcctggccctaaacctgcactgcttggggggacagcagatggagcttgctgctgttatcaatggccgaattcgtcgtatgtctcgtggggtgaatccctccttggtgagctggctgaccactatgatgggactgaggcttcaggtggtactggagcacatgcctgtaggccctgatgccattctcagatacgttcgcagggttggtgatcccccccagccrcttcctgaggagccaatggaagttcagggagcagaaagagcttcccctgagcctcagcgggagaatgcttccccagcccctggaacaacagcagaagaggccatgtcccgaggtccacctcctgctcctgaggggggctcccgggatgaacaggatggagcttcagctgagacagaaccttgggcagctgcagtccccccagaatgggtccctattatccagcaggacattcagagccagcggaaggtgaaaccgcagccccctctgagtgatgcctacctcagtggtatgcctgccaagagacgcaagacgatgcagggtgagggcccccagctgcttctctcagaggctgtgagccgggcagctaaggcagccggagctcggcccctgacgagccccgagagcctgagccgggacctggaggcaccagaggttcaggagagctacaggcagcagctccggtctgatatacaaaaacgactrcaggaagaccccaactacagtccccagcgcttccccaatgsccagcgggcctttgctgatgatccttagctctttgctctatggcccttcctcatcaggggaccgtttcccccctcttccttcacagtatttaagaaataaaagtcggatttttctggctgctttctctctacatt

SEQ ID NO: 297 - DNA, 3790 bp, Homo sapiens
tagtgcgacgcacgcaggcgtagtacggtcccccgggcgacagcggtggcggctcctcggggtgctcggctccctcccacctaggccggccccggcccgactcgccctcagaaactcactgtttggggctgcggactttctcgtcgtgccccacaaaagtaaagcttggggacctggggggagccggaagtatcgcttcgagatccccaaatactatcggggaaacggaagtggccgtcggtggcaggtttgggggagaccggaagtgacgagacctgtcggccatggagcctaatgatagtaccagtaccgctgtggaggagcctgacagcttggaggtgttggtgaagaccttggactctcaaactcgtacctttattgtgggggcccagatgaatgtaaaagagtttaaggagcacattgctgcctctgtcagcatcccatctgaaaaacaacggctcatttaccagggacgagttctgcaagatgataagaagcttcaggaatacaatgttgggggaaaggttatccacctggtggaacgggctcctcctcagactcacctcccttctggggcatcttctgggacggggtctgcctcagccactcatggtgggggatccccccctggtactcgggggcctggggcctctgttcatgaccggaatgccaacagctatgtcatggttggaacctrcaatcttcctagtgacggctctgctgtggatgttcacatcaacatggaacaggccccgattcagagtgagccccgggtacggctggtgatggctmagcacatgatcagggatatacagaccttactatcccggatggagactctcccctaccttcagtgtcgaggagggccccaaccgcagcacagtcagccgcccccgcagccaccggctgtgaccccggagccagtagccttgagctctcaaacatcagaaccagttgaaagtgaagcacctccccgggagcccatggaggcagaagaagtggaggagcgtgccccagcccagaacccggagctcactcctggcccagccccagcgggcccaacacctgccccggaaacaaatgcacccaaccatccttcccctgcggagtatgtcgaggtgctccaggagctacagcggctggagagtcgcctccagcccttcttgcagcgctactacgaggttctgggtgctgctgccaccacggactacaataacaatcacgagggccgggaggaggatcagcggttgatcaacttggtaggggagagcctgcgactgctgggcaacacctttgttgcactgtctgacctgcgctgcaatctggcctgcacgcccccacgacacctgcatgtggtccrgcctatgtctcactacaccacccccatggtgctccagcaggcagccattcccatacagatcaatgtgggaaccactgtgaccatgacaggaaatgggactcggccccccccaactcccaatgcagaggcacctccccctggtcctgggcaggcctcatccgtggctccgtcttctaccaatgtcgagtcctcagctgagggggctcccccgccaggtccagctcccccgccagccaccagccacccgagggtcatccggatttyccaccagagtgtggaacccgtggtcatgatgcacatgaacattcaagattctggcacacagcctggtggtgttccgagtgctcccactggccccctgggaccccctggtcatggccaaaccctgggacagcaggtgccaggcttcccaacagctccaacccgggtggtgattgcccggcccactcctccacaggctcggccttcccatcctggagggcccccagtctctgggacactgcagggcgccggtctgggtaccaatgcctcgttggcccagatggtgagyggccttgtggggcagcttcttatgcagccagtccttgtggctcaggggaccccaggtatggctccaccgccagcccctgccactgcttctgccagtgctggcaccaccaacacagctaccacagctggccccgctcctggggggcctgcccagcctccacccacccctcaaccctccatggctgatcttcagttctctcagcttctggggaacctgctagggcctgcagggccaggggctggagggcctggtgtggcttctcccaccatcactgtggcgatgcctggtgtccctgcctttctccaaggcatgactgacttcttgcaggcaacacagacagcccctccaccacccccacctcctccacccccaccacctgccccagagcagcagaccatgcccccaccaggctccccttctggtggcgcagggagtcctggaggcctgggtcttgagagcctgtcaccggagttttttacctcagtggtgcagggtgtgctcagctccctgctgggctccctgggggctcgggctggcagcagtgaaagtattgctgccttcatacaacgcctcagtggatccagcaacatctttgagcctggagctgatggggcccttggattctttggggccttgctttctcttctgtgccagaacttctctatggtggacgtagtgatgcttctccatgggcatttccagccactacaacggctccagccccagctgcgatccttcttccaccagcactacctgggtggtcaggagcccacacccagtaacatccggatggcaacccacacattgatcacggggctagaagagtatgtgcgggagagtttttccttggtgcaggttcagccaggtgtggacatcatccggacaaacctggaatttctccaagagcagtttaatagcattgctgcgcatgtgctgcattgcacagatagtggatttggggcccggttgctggrgttgtgtaaccaaggcctgtttgaatgcctggccctaaacctgcactgcttggggggacagcagatggagcttgctgctgttatcaatggccgaattcgtcgtatgtctcgtggggtgaatccctccttggtgagctggctgaccactatgatgggactgaggcttcaggtggtactggagcacatgcctgtaggccctgatgccattctcagatacgttcgcagggttggtgatcccccccagccacttcctgaggagccaatggaagttcagggagcagaaagagcttcccctgagcctcagcgggagaatgcttccccagcccctggaacaacagcagaagaggccatgtcccgaggtccacctcctgctcctgaggggggctcccgggatgaacaggatggagcttcagctgagacagaaccttgggcagctgcagtccccccagaatgggtccctattatccagcaggacattcagarccagcggaaggtgaaaccgcagccccctctgagtgatgccsacctcagtggtatgcctgccaagagacgcaagacgatgcagggtgagggcccccagctgcttctctcagaggctgtgagccgggcagctaaggcagccggagctcggcccctgacgagccccgagagcctgagccgggacctggaggcaccagaggttcaggagagctacaggcagcagctccggtctgatatacaaaaacgactgcaggaagaccccaactacagtccccagcgcttccccaatgcccagcgggcctttgctgatgatccttagctctttgctctatggcccttcctcatcaggggaccgtttcccccctcttccttcacagtatttaagaaataaaagtcggatttttctggctgctttctctctacatt

SEQ ID NO: 298 - DNA, 3797 bp, Homo sapiens
atgcttaagtgtccacgcatccgtagtgcgacgcacgcaggcgtagtacggtcccccgggcgacagcggtggcggctcctcggggtgctcggctccctcccacctaggccggccccggcccgactcgccctcagaaactcactgtttggggctgcggactttctcgtcgtgccccacaaaagtaaagcttggggacctggggggagccggaagtatcgcttcgagatccccaaatactatcggggaaacggaagtggccgtcggtggcaggtttgggggagaccggaagtgacggtccacctgtcggccatggagcctaatgatagtaccagtaccgctgtggaggagcctgacagcttggaggtgttggtgaagaccttggactctcaaactcgtacctttattgtgggggcccagatgaatgtaaaagagtttaaggagcacattgctgcctctgtcagcatcccatctgaaaaacaacggctcatttaccagggacgagttctgcaagatgataagaagcttcaggaatacaatgttgggggaaaggttatccacctggtggaacmggctcctcctcagactcacctcccttctggggcatrttctgggacggggtctgcctcagccactcatggtgggggatccccccctggtactcgggggcctggggcctctgttcatgaccggaatgccaacagctatgtcatggttggaacctmcaatcttcctagtgacggctctgctgtggatgttcacatcaacatggaacaggccccgattcagagtgagccccgggtacggctggtgatggctcagcacatgatcagggatatacagaccttactatcccggatggagtgtcgaggagggccccaaccgcagcacagtcagccgcccccgcagccaccggctgtgaccccggagccagtagccttgagctctcaaacatcagaaccagttgaaagtgaagcacctccccgggagcccatggaggcagaagaagtggaggagcgtgccccagcccagaacccggagctcactcctggcccagccccagcgggcccaacacctgccccggaaacaaatgcacccaaccatccttcccctgcggagtatgtcgaggtgctccaggagctacagcggctggagagtcgcctccagcccttcttgcagcgctactacgaggttctgggtgctgctgccaccacggactacaataacaatcacgagggccgggaggaggatcagcggttgatcaacttggtaggggagagcctgcgactgctgggcaacacctttgttgcactgtctgacctgcgctgcaatctggcctgcacgcccccacgacacctgcatgtggtccggcctatgtctcactacaccacccccatggtgctccagcaggcagccattcccatacagatcaatgtgggaaccactgtgaccatgacaggaaatgggactcggccccccccaactcccaatgcagaggcacctccccctggtcctgggcaggcctcatccgtggctccgtcttctaccaatgtcgagtcctcagctgagggrgctcccccgccaggtccagctcccccgccagccaccagccacccgagggtcatccggatttcccaccagagtgtggaacccgtggtcatgatgcmcatgaacattcaagattctggcacacagcctggtggtgttccgagtgctcccactggccccctgggaccccctggtcatggccaaaccctgggacagcaggtgccaggcttcccaacagctccaacccgggtggtgattgcccggcccactcctccacaggctcggccttcccatcctggagggcccccagtctctgggacactgcagggcgccggtctgggtaccaatgcctcgttggcccagatggtgagcggccttgtggggcagcttcttatgcagccagtccttgtggctcaggggaccccaggtatggctccaccgccagcccctgccactgcttctgccagtgctggcaccaccaacacagctaccacagctggccccgctcctggggggcctgcccagcctccacccacccctcaaccctccatggctgatcttcagttctctcagcttctggggaacctgctagggcctgcagggccaggggctggagggcctggtgtggcttctcccaccatcactgtggcgatgcctggtgtccctgcctttctccaaggcatgacrgacttcttgcaggcaacacagacagcccctccaccacccccacctcctccacccccaccacctgccccagagcagcagaccatgcccccaccaggctccccttctggtggcgcagggagtcctggaggcctgggtcttgagagcctgtcaccggagttttttacctcagtggtgcagggtgtgctcagctccctgctgggctccctgggggctcgggctggcagcagtgaaagtattgctgccttcatacaacgcctcagtggytccagcaacatctttgagcctggagctgatggggcccttggattctttggggccttgctttctcttctgtgccagaacttctctatggtggacgtagtgatgcttctccatgggcatttccagccactacaacggctccagccccagctgcgatccttcttccaccagcactacctgggtggtcaggagcccacacccagtaacatccggatggcaacccacacattgatcacggggctagaagagtatgtgcgggagagtttttccttggtgcaggttcagccaygtgtggacatcatccggacaaacctggaatttctccaagagcagtttaatagcattgctgcgcatgtgctgcattgcacagatagtggatttggggcccggttgctggagttgtgtaaccaaggcctgtttgaatgcctggccctaaacctgcactgcttggggggacagcagatggagcttgctgctgttatcaatggccgaattcgtcgtatgtctcgtggggtgaatccctccttggtgagctggctgaccactatgatgggactgaggcttcaggtggtactggagcacatgcctgtaggccctgatgccattctcagatacgttcgcagggttggtgatcccccccagccacttcctgaggagccaatggaagttcagggagcagaaagagcttcccctgagcctcagcgggagaatgcttccccagcccctggaacaacagcagaagaggccatgtcccgaggtccacctcctgctcctgaggggggctcccgggatgaacaggatggagcttcagctgagacagaaccttgggcagctgcagtccccccagaatgggtccctattatccagcaggacattcagagccagcggaaggtgaaaccgcagccccctctgagtgatgcctacctcagtggtatgcctgccaagagacgcaagacgatgcagggtgagggcccccagctgcttctctcagaggctgtgagccgggcagctaaggcagccggagctcggcccctgacgagccccgagagcctgagccgggacctggaggcaccagaggttcaggagagctacaggcagcagctccggtctgatatacaaaaacgactgcaggaagaccccaactacagtccccagcgcttccccaatgcccagcgggcctttgctgatgatccttagctctttgctctatggcccttcctcatcaggggaccgtttcccccctcttccttcacagtatttaaraaataaaagtcggatttttctggctgctttctctctacatt

SEQ ID NO: 299 - DNA, 3580 bp, Homo sapiens
cgcagagtgtggggcgaccaccgctttcgcgttgtcccaggattttccgacctctggggcgcttgtcctgccgtgaccgagacctgtcggccatggagcctaatgatagtaccagtaccgctgtggaggagcctgacagcttggaggtgttggtgaagaccttggactctcaaactcgtacctttattgtgggggcccagatgaatgtaaaagagtttaaggagcacattgctgcctctgtcagcatcccatctgaaaaacaacggctcatttaccagggacgagttctgcaagatgataagaagcttcaggaatacaatgttgggggaaaggttatccacctggtggaacgggctcctcctcagactcacctcccttctggggcatcttctgggacggggtctgcctcagccactcatggtgggggatccccccctggtactcgggggcctggggcctctgttcatgaccggaatgccaacagctatgtcatggttggaaccttcaatcttcctagtgacggctctgctgtggatgttcacatcaacatggaacaggccccgattcagagtgagccccgggtacggctggtgatggctcagcacatgatcagggatatacagaccttactatcccggatggagtgtcgaggagggccccaaccgcagcacagtcagccgcccccgcagccaccggctgtgaccccggagccagtagccttgagctctcaaacrtcagaaccagttgaaagtgaagcacctccccgggagcccatggaggcagaagaagtggaggagcgtgccccagcccagaacccggagctcactcmtggcccagccccagcgggcccaacacctgccccggaaacaaatgcacccaaccatccttcccctgcggagtatgtcgaggtgctccaggagctacagcggctggagagtcgcctccagcccttcttgcagcgctactacgaggttctgggtgctgctgccaccacggactacaataacaatcacgagggccgggaggaggatcagcggttgatcaacttggtaggggagagcctgcgactgctgggcaacacctttgttgcactgtctgacctgcgctgcaatctggcctgcacgcccccacgacacctgcatgtggtccggcctatgtctcactacaccacccccatggtgctccagcaggcagccattcccatacagatcaatgtgggaaccactgtgaccatgacaggaaatgggactcggccccccccaactcccaatgcagaggcacctccccctggtcctgggcaggcctcatccgtggctccgtcttctaccaatgtcgagtcctcagctgagggggctcccccgccaggtccagctcccccgccagccaccagccacccragggtcatccggatttcccaccagagtgtggaacccgtggtcatgatgcacatgaacattcaagattctggcacacagcctggtggtgttccgagtgctcccactggccccctgggaccccctggtcatggccaaaccctgggacagcaggtgccaggcttcccaacagctccaacccgggtggtgattgcccggcccactcctccacaggctcggccttcccatcctggagggcccccagtctctgggacactgcagggcgcyggtctgggtaccaatgcctcgttggcccagatggtgagcggccttgtggggcagcttcttatgcagccagtccttgtggctcaggggaccccaggtatggctccaccgccagcccctgccactgcttctgccagtgctggcaccaccaacacagctaccacagctggccccgctcctggggggcctgcccagcctccacccacccctcaaccctccatggctgatcttcagttctctcagcttctggggaacctgctagggcctgcagggccaggggctggagggyctggtgtggcttctcccaccatcactgtggcgatgcctggtgtccctgcctttctccaaggcatgactgacttcttgcaggcaacacagacagcccctccaccacccccacctcctccacccccaccacctgccccagagcagcagaccatgcccccaccaggctccccttctggtggcgcagggagtcctggaggcctgggtcttgagagcctgtcaccggagttttttacctcagtggtgcagggtgtgctcagctccctgctgggctccctgggggctcgggctggcagcagtgaaagtattgctgccttcatacaacgcctcagtggatccagcaacatctttgagcctggagctgatggggcccttggattctttggggccttgctttctcttctgtgccagaacttctctatggtggacgtagtgatgcttctccatgggcatttccagccactacaacggctccagccccagctgcgatccttcttccaccagcactacctgggtggtcaggagcccacacccagtaacatccggatggcaacccacacattgatcacggggctagaagagtatgtgcgggagagtttttccttggtgcaggttcagccaggtgtggacatcatccggacaaacctggaatttctccaagagcagtttaatagcattgctgcgcatgtgctgcattgcacagatagtggatttggggcccggttgctggagttgtgtaaccaaggcctgtttgaatgcctggccctaaacctgcactgcttggggggacagcagatggagcttgctgctgttatcaatggccgaattcgtcgtatgtctcgtggggtgaatccctccttggtgagctggctgaccactatgatgggactgaggcttcaggtggtactggagcacatgcctgtaggccctgatgccattctcagatacgttcgcagggttggtgatcccccccagccrcttcctgaggagccaatggaagttcagggagcagaaagagcttcccctgagcctcagcgggagaatgcttccccagcccctggaacaacagcagaagaggccatgtcccgaggtccacctcctgctcctgaggggggctcccgggatgaacaggatggagcttcagctgagacagaaccttgggcagctgcagtccccccagaatgggtccctattatccagcaggacattcagagccagcggaaggtgaaaccgcagccccctctgagtgatgcctacctcagtggtatgcctgccaagagacgcaagacgatgcagggtgagggcccccagctgcttctctcagaggctgtgagccgggcagctaaggcagccggagctcggcccctgacgagccccgagagcctgagccgggacctggaggcaccagaggttcaggagagctacaggcagcagctccggtctgatatacaaaaacgactrcaggaagaccccaactacagtccccagcgcttccccaatgsccagcgggcctttgctgatgatccttagctctttgctctatggcccttcctcatcaggggaccgtttcccccctcttccttcacagtatttaagaaataaaagtcggatttttctggctgctttctctctacatt

SEQ ID NO: 300 - DNA, 3880 bp, Homo sapiens
tagtgcgacgcacgcaggcgtagtacggtcccccgggcgacagcggtggcggctcctcggggtgctcggctccctcccacctaggccggccccggcccgactcgccctcagaaactcactgtttggggctgcggactttctcgtcgtgccccacaaaagtaaagcttggggacctggggggagccggaagtatcgcttcgagatccccaaatactatcggggaaacggaagtggccgtcggtggcaggtttgggggagaccggaagtgacgagacctgtcggccatggagcctaatgatagtaccagtaccgctgtggaggagcctgacagcttggaggtgttggtgaagaccttggactctcaaactcgtacctttattgtgggggcccagatgaatgtaaaagagtttaaggagcacattgctgcctctgtcagcatcccatctgaaaaacaacggctcatttaccagggacgagttctgcaagatgataagaagcttcaggaatacaatgttgggggaaaggttatccacctggtggaacgggctcctcctcagactcacctcccmtctggggcatcttctgggacggggtctgcctcagcractcatggtgggggatccccccctggtactcgggggcctggggcctctgttcatgaccggaatgccaacagctatgtcatggttggaaccttcaatcttcctagtgacggctctgcmgtggatgttcacatcaacatggaacaggccccgattcagagtgagccccgggtacggctggtgatggctcagcacatgatcagggatatacagaccttactatcccggatggagtgtcgaggagggccccaaccgcagcacagtcagccgcccccgcagccaccggctgtgaccccggagccagtagccttgagctctcaaacatcagaaccagttgaaagtgaagcacctccccgggagcccatggaggcagaagaagtggaggagcgtgccccagcccagaacccggagctcactcctggcccagccccagcgggcccaacacctgccccggaaacaaatgcacccaaccatccttcccctgcggagtatgtcgaggtgctccaggagctacagcggctggagagtcgcctccagcccttcttgcagcgctactacgaggttctgggtgctgctgccaccacggactacaataacaatcacgagggccgggaggaggatcagcggttgatcaacttggtaggggagagcctgcgactgctgggcaacacctttgttgcactgtctgacctgcgctgcaatctggcctgcacgcccccacgacacctgcatgtggtccggcctatgtctcactacaccacccccatggtgctccagcaggcagccattcccatacagatcaatgtgggaaccactgtgaccatgacaggaaatgggactcggccccccccaactcccaatgcagaggcacctccccctggtcctgggcaggcctcatccgtggctccgtcttctaccaatgtcgagtcctcagctgagggggctcccccgccaggtccagctcrcccgccagccaccagccacccgagggtcatccggatttcccaccagagtgtggaacccgtggtcatgatgcacatgaacattcaagattctggcmcacagcctggtggtgttccgagtgctcccactggccccctgggaccccctggtcatggccaaaccctgggctccaccctcatccagctgccctccctgccccctgagttcatgcacgccgtcgcccaccagatcactcatcaggccatggtggcagctgttgcctccgcggccgcaggacagcaggtgccaggcttcccaacagctccaacccgggtggtgattgcccggcccactcctccacaggctcggccttcccatcctggagggcccccagtctctgggacactgcagggcgccggtctgggtaccaatgcctcgttggcccagatggtgagcggccttgtggggcagcttcttatgcagccagtccttgtggctcaggggaccccaggtatggctccaccgccagcccctgccactgcttctgccagtgctggcaccaccaacacagctaccacagctggccccgctcctggggggcctgcccagcctccacccacccctcaaccctccatggctgatcttcagttctctcagcttctggggaacctgctagggcctgcagrgccaggggctggagggcctggtgtggcttctcccaccatcactgtggcgatgcctggtgtccctgcctttctccaaggcatgactgacttcttgcaggcaacacagacagcccctccaccacccccacctcctccacccccaccacctgccccagagcagcagaccatgcccccaccaggctccccttctggtggcgcagggagtcctggaggcctgggtcttgagagcctgtcaccggagttttttacctcagtggtgcagggtgtgctcagctccctgctgggctccctgggggctcgggctggcagcagtgaaagtattgctgccttcatacaacgcctcagtggatccagcaacatctttgagcctgyagctgatggggcccttggattctttggggccttgctttctcttctgtgccagaacttctctatggtggacgtagtgatgcttctccatgggcatttccagccactacaacggctccagccccagctgcgatccttcttccaccagcactacctgggtggtcaggagcccacacccagtaacatccggatggcaacccacacattgatcacggggctagaagagtatgtgcgggagagtttttccttggtgcaggttcagccaggtgtggacatcatccggacaaayctggaatttctccaagagcagtttaatagcattgctgcgcatgtgctgcattgcacagatagtggatttggggcccggttgctggagttgtgtaaccaaggcctgtttgaatgcctggccctaaacctgcactgcttggggggacagcagatggagcttgctgctgttatcaatggccgaattcgtcgtatgtctcgtggggtgaatccctccttggtgagctggctgaccactatgatgggactgaggcttcaggtggtactggagcacatgcctgtaggccctgatgccattctcagatacgttcgcagggttggtgatcccccccagccacttcctgaggagccaatggaagttcagggagcagaaagagcttcccctgagcctcagcgggagaatgcttccccagcccctggaacaacagcagaagaggccatgtcccgaggtccacctcctgctcctgaggggggctcccgggatgaacaggatggagcttcagctgagacagaaccttgggcagctgcagtccccccagaatgggtccctattatccagcaggacattcagagccagcggaaggtgaaaccgcagccccctctgagtgatgcctacctcagtggtatgcctgccaagagacgcaagacgatgcagggtgagggcccccagctgcttctctcagaggctgtgagccgggcagctaaggcagccggagctcggcccctgacgagccccgagagcctgagccgggacctggaggcaccagaggttcaggagagctacaggcagcagctccggtctgatatacaaaaacgactgcaggaagaccccaactacagtccccagcgcttccccaatgcccagcgggcctttgctgatgatccttagctctttgctctatggcccttcctcatcaggggaccgtttcccccctcttccttcacagtatttaagaaataaaagtcggatttttctgrctgctttctctctacatt

SEQ ID NO: 301 - DNA, 3841 bp, Homo sapiens
acctcaatcttctagcgctcaagcgcgcgcacagacgtgaacgccgccagaggggggagggggtggggcgatgcttaagtgtccacgcatccgtagtgcgacgcacgcaggcgtagtacggtcccccgggcgacagcggtggcggctcctcggggtgctcggctccctcccacctaggccggccccggcccgactcgccctcagaaactcactgtttggggctgcggactttctcgtcgtgccccacaaaagtaaagcttggggacctggggggagccggaagtatcgcttcgagatccccaaatactatcggggaaacggaagtggccgtcggtggcagagacctgtcggccatggagcctaatgatagtaccagtaccgctgtggaggagcctgacagcttggaggtgttggtgaagaccttggactctcaaactcgtacctttattgtgggggcccagatgaatgtaaaagagtttaaggagcacattgctgcctctgtcagcatcccatctgaaaaacaacggctcatttaccagggacgagttctgcaagatgataagaagctmcaggaatacaatgttgggggaaaggttatccacctrgtggaacgggctcctcctcagactcacctcccttctggggcatcttctgggacggggtctgcctcagccactcatggtgggggatccccccctggtactcgggggcctggggcctcmgttcatgaccggaatgccaacagctatgtcatggttggaaccttcaatcttcctagtgacggctctgctgtggatgttcacatcaacatggaacaggccccgattcagagtgagccccgggtacggctggtgatggctcagcacatgatcagggatatacagaccttactatcccggatggagtgtcgaggagggccccaaccgcagcacagtcagccgcccccgcagccaccggctgtgaccccggagccagtagccttgagctctcaaacatcagaaccagttgaaagtgaagcacctccccgggagcccatggaggcagaagaagtggaggagcgtgccccagcccagaacccggagctcactcctggcccagccccagcgggcccaacacctgccccggaaacaaatgcacccaaccatccttcccctgcggagtatgtcgaggtgctccaggagctacagcggctggagagtcgcctccagcccttcttgcagcgctactacgaggttctgggtgctgctgccaccacggactacaataacaatcacgagggccgggaggaggatcagcggttgatcaacttggtaggggagagcctgcgactgctgggcaacacctttgttgcactgtctgacctgcgctgcaatctggcctgcacgcccccacgacacctgcatgtggtccggcctatgtctcactacaccacccccatggtgctccagcaggcagccattcccatacagatcaatgtgggaaccactgtgaccatgacaggaaatgggactcggccccccccaactcccaatgcagaggcacrtccccctggtcctgggcaggcctcatccgtggctccgtcttctaccaatgtcgagtcctcagctgagggggctcccccgccaggtccagctcccmcgccagccaccagccacccgagggtcatccggatttcccaccagagtgtggaacccgtggtcatgatgcacatgaacattcaagattctggcacacagcctggtggtgttccgagtgctcccactggccccctgggaccccctggtcatggccaaaccctgggacagcaggtgccaggcttcccaacagctccaacccgggtggtgattgcccggcccactcctccacaggctcggccttcccatcctggagggcccccagtctctgggacactgcagggcgccggtctgggtaccaatgcctcgttggcccagatggtgagcggccttgtggggcagcttcttatgcagccagtccttgtggctcaggggaccccaggtatggctccaccgccagcccctgccactgcttctgccagtgctggcaccaccaacacagctaccacagctggccccgctcctggggggcctgcccagcctccacccacccctcaaccctccatggctgatcttcagttctctcagcttctggggaacctgctagggcctgcagggccaggggctggagrgcctggtgtggcttctcccaccatcactgtggcgatgcctggtgtccctgcctttctccaaggcatgactgacttcttgcaggcaacacagacagcccctccaccacccccacctcctccacccccaccacctgccccagagcagcagaccatgcccccaccaggctccccttctggtggcgcagggagtcctggaggcctgggtcttgagagcctgtcaccggagttttttacctcagtggtgcagggtgtgctcagctcccygctgggctccctgggggctcgggctggcagcagtgaaagtattgctgccttcatacaacgcctcagtggatccagcaacatctttgagcctggagctgatggggcccttggattctttggggccttgctttctcttctgtgccagaacttctctatggtggacgtagtgatgcttctccatgggcatttccagccactacaacggctccagccccagctgcgatccttcttccaccagcactacctgggtggtcaggagcccacacccagtaacatccggatggcyacccacacattgatcacggggctagaagagtatgtgcgggagagtttttccttggtgcaggttcagccaggtgtggacatcatccggacaaacctggaatttctccaagagcagtttaatagcattgctgcgcatgtgctgcattgcacagatagtggatttggggcccggttgctggagttgtgtaaccaaggcctgtttgaatgcctggccctaaacctgcactgcttggggggacagcagatggagcttgctgctgttatcaatggccgaattcgtcgtatgtctcgtggggtgaatccctccttggtgagctggctgaccactatgatgggactgaggcttcaggtggtactggagcacatgcctgtaggccctgatgccattctcagatacgttcgcagggttggtgatcccccccagccacttcctgaggagccaatggaagttcagggagcagaaagagcttcccctgagcctcagcgggagaatgcttccccagcccctggaacaacagcagaagaggccatgtcccgaggtccacctcctgctcctgaggggggctcccgggatgaacaggatggagcttcagctgagacagaaccttgggcagctgcagtccccccagaatgggtccctattatccagcaggacattcagagccagcggaaggtgaaaccgcagccccctctgagtgatgcctacctcagtggtatgcctgccaagagacgcaagacgatgcagggtgagggcccccagctgcttctctcagaggctgtgagccgggcagctaaggcagccggagctcggcccctgacgagccccgagagcctgagccgggacctggaggcaccagaggttcaggagagctacaggcagcagctccggtctgatatacaaaaacgactgcaggaagaccccaactacagtccccagcgcttccccaatgcccagcgggcctttgctgatgatcrttagctctttgctctatggcccttcctcatcaggggaccgtttcccccctcttccttcacagtatttaagaaataaaagtcggatttttctggctgctttctctctacatt

SEQ ID NO: 302 - DNA, 3772 bp, Homo sapiens
  misc_feature (74)..(74): n is a, c, g, or t
tagtgcgacgcacgcaggcgtagtacggtcccccgggcgacagcggtggcggctcctcggggtgctcggctccntcccacctaggccggccccggcccgactcgccctcagaaactcactgtttggggctgcggactttctcgtcgtgccccacaaaagtaaagcttggggacctggggggagccggaagtatcgcttcgagatccccaaatactatcggggaaacggaagtggccgtcggtggcaggtttgggggagaccggaagtgacgagacctgtcggccatggagcctaatgatagtaccagtaccgctgtggaggagcctgacagcttggaggtgttggtgaagaccttggactctcaaactcgtacctttattgtgggggcccagatgaatgtaaaagagtttaaggagcacattgctgcctctgtcagcatccwatctgaaaaacaacggctcatttaccagggacgagttctgcaagatgataagaagcttcaggaatacaatgttggyggaaaggttatccacctggtggaacgggctcctcctcagactcacctcccttctggggcatcttctgggacggggtctgcctcagccactcatggtgggggatccccccctggtactcgggggcctggggcctctgttcatgaccggaatgccaacagctatgtcatggttggaaccttcaatcttcctagtgacggctctgctgtggatgttcacatcaacatggaacaggccccgattcagagtgagccccgggtacggctggtgatggctcagcacatgatcagggatatacagaccttactatcccggatggagtgtcgaggagggccccaaccgcagcacagtcagccgcccccgcagccaccggctgtgaccccggagccagtagccttgagctctcaaacatcagaaccagttgaaagtgaagcacctccccgggagcccatggaggcagaagaagtggaggagcgtgccccagcccagaacccggagctcactcctggcccagccccagcgggcccaacacctgccccggaaacaaatgcacccaaccatccttcccctgcggagtatgtcgaggtgctccaggagctacagcggctggagagtcgcctccagcccttcttgcagcgctactacgaggttctgggtgctgctgccaccacggactacartaacaatcacgagggccgggaggaggatcagcggttgatcaacttggtaggggagagcctgcgactgctgggcaacacctttgttgcactgtctmacctgcgctgcaatctggcctgcacgcccccacgacacctgcatgtggtccggcctatgtctcactacaccacccccatggtgctccagcaggcagccattcccatacagatcaatgtgggaaccactgtgaccatgacaggaaatgggactcggccccccccaactcccaatgcagaggcacctccccctggtcctgggcaggcctcatccgtggctccgtcttctaccaatgtcgagtcctcagctgagggggctcccccgccaggtccagctcccccgccagccaccagccacccgagggtcatccggatttcccaccagagtgtggaacccgtggtcatgatgcacatgaacattcaagattctggcacacagcctggtggtgttccgagtgctcccactggccccctgggaccccctggtcatggccaaaccctgggacagcaggtgccaggcttcccaacagctccaacccgggtggtgattgcccggcccactcctccacaggctcggccttcccatcctggagggcccccagtctctgggacactgcagggcgccggtcrgggtaccaatgcctcgttggcccagatggtgagcggccttgtggggcagcttcttatgcagccagtccttgtggctcaggggaccccaggtatggctccaccgccagcccctgccactgcttctgccagtgctggcaccaccaacacagctaccacagctggccccgctcctggggggcctgcccagcctccacccacccctcaaccctccatggctgatcttcagttctctcagcttctggggaacctgctagggcctgcagygccaggggctggagggcctggtgtggcttctcccaccatcactgtggcgatgcctggtgtccctgcctttctccaaggcatgactgacttcttgcaggcaacacagacagcccctccaccacccccacctcctccacccccaccacctgccccagagcagcagaccatgcccccaccaggctccccttctggtggcgcagggagtcctggaggcctgggtcttgagagcctgtcaccggagttttttacctcagtggtgcagggtgtgctcagctccctgctgggytccctgggggctcgggctggcagcagtgaaagtattgctgccttcatacaacgcctcagtggatccagcaacatctttgagcctggagctgatggggcccttggattctttggggccttgctttctcttctgtgccagaacttctctatggtggacgtagtgatgcttctccatgggcatttccagccactacaacggctccagccccagctgcgatccttcttccaccagcactacctgggtggtcaggagcccacacccagtaacatccggatggcaacccacacattgatcacggggctagaagagtatgtgcgggagagtttttccttggtgcaggttcagccaggtgtggacatcatccggacaaacctggaatttctccaagagcagtttaatagcattgctgcgcatgtgctgcattgcacagatagtggatttggggcccggttgctggagttgtgtaaccaaggcctgtttgaatgcctggccctaaacctgcactgcttggggggacagcagatggagcttgctgctgttatcaatggccgaattcgtcgtatgtctcgtggggtgaatccctccttggtgagctggctgaccactatgatgggactgaggcttcaggtggtactggagcacatgcctgtaggccctgatgccattctcagatacgttcgcagggttggtgatcccccccagccacttcctgaggagccaatggaagttcagggagcagaaagagcttcccctgagcctcagcgggagaatgcttccccagcccctggaacaacagcagaagaggccatgtcccgaggtccacctcctgctcctgaggggggctcccgggatgaacaggatggagcttcagctgagacagaaccttgggcagctgcagtccccccagaatgggtccctattatccagcaggacattcagagccagcggaaggtgaaaccgcagccccctctgartgatgcctacctcagtggtatgcctgccaagagacgcaagacgatgcagggtgagggcccccagctgcttctctcagaggctgtgagccgggcagctaaggcagccggagctcggcccctgacgagccccgagagcctgagccgggacctggaggcaccagaggttcaggagagctacaggcagcagctccggtctgatatacaaaaacgactgcaggaagaccccaactacagtccccagcgcttccccaatgcccagcgggcctttgctgatgatccttagctctttgctctatggcccttcctcatcaggggaccgtttcccccctcttccttcacagtatttaagaaataaaagtcggatttttctggctgctttctctctacatt

SEQ ID NO: 303 - DNA, 935 bp, Homo sapiens
tgtgggatgtctctctcccccactctctgtttccctttctttttttgtcccctctctccrgggctcctgatttctcttcagcctgacgctcttttcagttaacggcaaggcggtgcacccaagtccggtggtgtcctacctggtgacctcctacytgtgctgggacgccagcgacttgatgctgcactccggagccgtgtcctacctaagcccagtgggcatgtgaagcagagggcagcccttgaatgcgcggcggctgagctaccgcgggtgggccgtgcagcagggcgcagcgaggcggacatccaaacagcggaactcagacrctgactccgagcgcaccccgggccttcccatttcatacacccwcgaggatgagacccaagcacctccaaggaatagcacccgaggtcttcaggacaccgaccggtagccatggccagatgcccggccaaccccttcagcgtggccacgccctggatattcgacctcccctgaggccccaccccctgatrtcaggccacgccctccgaggggaccggtggcaaactccagccctcgctctagggcccgccctttgcggctttgtccctgcccactgggtcctcacagtrcctccaccccagaggcccagcatcccctcccgttctgcagacacttgtccagcgtcccgctgagctcggcagtgtggctagtttgtgtggccctgcccctggtgcccaccagggtgctccgatgtccacccttgtcccggagttccggcctcagctccgatgtccacccttgtccccaggtggacacagcaccgcccagcatttggtgcaactccacccttctgcagaacgggcccctccctgggaaggcatggcttgcaataacatccctctgtaccttttctggcttccccgccacaataaaacctctcagcctcagac

SEQ ID NO: 304 - DNA, 1481 bp, Homo sapiens
aacggaccctgggagtcggccatcatgctggccccggaggccgttakcttagtcatggctctaaatatgtacctgcaatcggatgttgaggatcaccgagcccgcgacgtagaagtacgggaagttcatgcgcagctgccaggccagctcgaagaaggcgagcagggtgcgggagagccccttgcagaagacgccgtacgagtttctccagcatttggctctaggtgccaagggcacatgtgacaagaaggtgccagctttataaaccttgkaacttcttctgtgtcagttctgagacatacartttactaaaacacatcatgaaggcctgttttgaagagaaggggaataagactgcatctgttcatatgaggttctccagcatttggctcaaggcyccaagggcacatgtgacaagaaggcgccrgctttttaaacattggaagttcttctgtgtcagttctgtgacagaacatttacttaacacatcatgaaggctagtttggatgtggaggggaatagactccatctatccatatgagctgctgcagaagaatattttgcctgctggaacctgctgtatctactcaagagtggaagttttcacagggagctgacacgtttctcccagcacaaagttgggagtgacaccagagcctcctgcaagatgcttctgattctgctgtcagtggccctgctggccttcagctcagctcaggatttaaatgaagatgtcagccaggaagatgttcccctcgtaatatcagatggaggagactctgagcagttcatagatgaggagcgtcagggaccacctttgggaggacagcaatctcaaccctctgctggtgatgggaaccaggatgatggccctcagcagggaccaccccaacaaggaggccagcagcaacaaggtccaccacctcctcagggaaagccacaaggaccaccccaacagggaggccatccccctcctcctcaaggaaggccacaaggaccaccccaacagggaggccatccccgtcctcctcgaggaaggccacaaggaccaccccaacagggaggccatcagcaaggtcctcccccacctcctcctggaaagccccagggaccacctccccaagggggccgcccacaaggacctccacaggggcagtctcctcagtaatctaggattcaatgacaggaagtgaataagaagataacagtgtttcaaatgccktgaaacatggcatcatgctctaacttcartataccaataaaayaatcagcttgcaatttctgctggtggtgtctctttctgagtgtttgggactctagaatctgagacccatgttcacattgtaagaatatccaggaccccttctccttgatgtttccagcaagcttctctcctccttatccttattaagtcatccacctggggaaggagttccactgtttctttccttctctgtcttctatagctcgaatttaagttg

SEQ ID NO: 305 - DNA, 1310 bp, Homo sapiens
aacggaccctgggagtcggccatcatgctggccccggaggccgttakcttagtcatggctctaaatatgtacctgcaatcggatgttgaggatcaccgagcccgcgacgtagaagtacgggaagttcatgcgcagctgccaggccagctcgaagaaggcgagcagggtgcgggagagccccttgcagaagacgccgtacgaggttctccagcatttggctcaaggcyccaagggcacatgtgacaagaaggcgccrgctttttaaacattggaagttcttctgtgtcagttctgtgacagaacatttacttaacacatcatgaaggctagtttggatgtggaggggaatagactccatctatccatatgagctgctgcagaagaatattttgcctgctggaacctgctgtatctactcaagagtggaagttttcacagggagctgacacgtttctcccagcacaaagttgggagtgacaccagagcctcctgcaagatgcttctgattctgctgtcagtggccctgctggccttcagctcagctcaggatttaaatgaagatgtcagccaggaagatgttcccctcgtaatatcagatggaggagactctgagcagttcatagatgaggagcgtcagggaccacctttgggaggacagcaatctcaaccctctgctggtgatgggaaccaggatgatggccctcagcagggaccaccccaacaaggaggccagcagcaacaaggtccaccacctcctcagggaaagccacaaggaccaccccaacagggaggccatccccctcctcctcaaggaaggccacaaggaccaccccaacagggaggccatccccgtcctcctcgaggaaggccacaaggaccaccccaacagggaggccatcagcaaggtcctcccccacctcctcctggaaagccccagggaccacctccccaagggggccgcccacaaggacctccacaggggcagtctcctcagtaatctaggattcaatgacaggaagtgaataagaagataacagtgtttcaaatgccktgaaacatggcatcatgctctaacttcartataccaataaaayaatcagcttgcaatttctgctggtggtgtctctttctgagtgtttgggactctagaatctgagacccatgttcacattgtaagaatatccaggaccccttctccttgatgtttccagcaagcttctctcctccttatccttattaagtcatccacctggggaaggagttccactgtttctttccttctctgtcttctatagctcgaatttaagttg

SEQ ID NO: 306 - DNA, 1585 bp, Homo sapiens
aacggaccctgggagtcggccatcatgctggccccggaggccgttakcttagtcatggctctaaatatgtacctgcaatcggatgttgaggatcaccgagcccgcgacgtagaagtacgggaagttcatgcgcagctgccaggccagctcgaagaaggcgagcagggtgcgggagagccccttgcagaagacgccgtacgagtttctccagcatttggctctaggtgccaagggcacatgtgacaagaaggtgccagctttataaaccttgkaacttcttctgtgtcagttctgagacatacartttactaaaacacatcatgaaggcctgttttgaagagaaggggaataagactgcatctgttcatatgaggttctccagcatttggctcaaggcyccaagggcacatgtgacaagaaggcgccrgctttttaaacattggaagttcttctgtgtcagttctgtgacagaacatttacttaacacatcatgaaggctagtttggatgtggaggggaatagactccatctatccatatgagagttggagtctcactctgttatccaggctggagttcagtggtaggatcatggcttactgcagtctggaactcctgggctcaaaccatcctcccacctcagccttctgctgcagaagaatattttgcctgctggaacctgctgtatctactcaagagtggaagttttcacagggagctgacacgtttctcccagcacaaagttgggagtgacaccagagcctcctgcaagatgcttctgattctgctgtcagtggccctgctggccttcagctcagctcaggatttaaatgaagatgtcagccaggaagatgttcccctcgtaatatcagatggaggagactctgagcagttcatagatgaggagcgtcagggaccacctttgggaggacagcaatctcaaccctctgctggtgatgggaaccaggatgatggccctcagcagggaccaccccaacaaggaggccagcagcaacaaggtccaccacctcctcagggaaagccacaaggaccaccccaacagggaggccatccccctcctcctcaaggaaggccacaaggaccaccccaacagggaggccatccccgtcctcctcgaggaaggccacaaggaccaccccaacagggaggccatcagcaaggtcctcccccacctcctcctggaaagccccagggaccacctccccaagggggccgcccacaaggacctccacaggggcagtctcctcagtaatctaggattcaatgacaggaagtgaataagaagataacagtgtttcaaatgccktgaaacatggcatcatgctctaacttcartataccaataaaayaatcagcttgcaatttctgctggtggtgtctctttctgagtgtttgggactctagaatctgagacccatgttcacattgtaagaatatccaggaccccttctccttgatgtttccagcaagcttctctcctccttatccttattaagtcatccacctggggaaggagttccactgtttctttccttctctgtcttctatagctcgaatttaagttg

SEQ ID NO: 307 - DNA, 1414 bp, Homo sapiens
aacggaccctgggagtcggccatcatgctggccccggaggccgttakcttagtcatggctctaaatatgtacctgcaatcggatgttgaggatcaccgagcccgcgacgtagaagtacgggaagttcatgcgcagctgccaggccagctcgaagaaggcgagcagggtgcgggagagccccttgcagaagacgccgtacgaggttctccagcatttggctcaaggcyccaagggcacatgtgacaagaaggcgccrgctttttaaacattggaagttcttctgtgtcagttctgtgacagaacatttacttaacacatcatgaaggctagtttggatgtggaggggaatagactccatctatccatatgagagttggagtctcactctgttatccaggctggagttcagtggtaggatcatggcttactgcagtctggaactcctgggctcaaaccatcctcccacctcagccttctgctgcagaagaatattttgcctgctggaacctgctgtatctactcaagagtggaagttttcacagggagctgacacgtttctcccagcacaaagttgggagtgacaccagagcctcctgcaagatgcttctgattctgctgtcagtggccctgctggccttcagctcagctcaggatttaaatgaagatgtcagccaggaagatgttcccctcgtaatatcagatggaggagactctgagcagttcatagatgaggagcgtcagggaccacctttgggaggacagcaatctcaaccctctgctggtgatgggaaccaggatgatggccctcagcagggaccaccccaacaaggaggccagcagcaacaaggtccaccacctcctcagggaaagccacaaggaccaccccaacagggaggccatccccctcctcctcaaggaaggccacaaggaccaccccaacagggaggccatccccgtcctcctcgaggaaggccacaaggaccaccccaacagggaggccatcagcaaggtcctcccccacctcctcctggaaagccccagggaccacctccccaagggggccgcccacaaggacctccacaggggcagtctcctcagtaatctaggattcaatgacaggaagtgaataagaagataacagtgtttcaaatgccktgaaacatggcatcatgctctaacttcartataccaataaaayaatcagcttgcaatttctgctggtggtgtctctttctgagtgtttgggactctagaatctgagacccatgttcacattgtaagaatatccaggaccccttctccttgatgtttccagcaagcttctctcctccttatccttattaagtcatccacctggggaaggagttccactgtttctttccttctctgtcttctatagctcgaatttaagttg

SEQ ID NO: 308 - DNA, 900 bp, Homo sapiens
atgataacttttctgcccatcatattttccattctagtagtggttacatttgttattggaaattttgctaatggcttcatagcgttggtaaattccaccgagtgggtgaagagacaaaagatctcctttgctgaccaaattgtcactgctctggcggtctccagagttggtttgctctgggtgttattattaaattggtattcaactgtgttgaatccagctttttrtagtgtagaattaagaactactgcttataatatctgggcagtaaccggccatttcagcaactggcctgctactagcctcagcatattttatttgctcaagattgccaatttctccaaccttatttttcttcgcttaaagaggagagttaagagtgtcattctggtgrtgctgttggggcctttgctatttttggcttgtcatctttttgtggtaaacatgaatcagattgtatggacaaaagaatatgaaggaaacatgacttggaagatcaaattgaggcgtgcaatgtacctttcagatacgactgtaaccatgctagcaaacttagtaccctttactgtaaccctgatatcttttctgctgttagtctgttctctgtgtaaacatctcaagaagatgcagctccatggcaaaggatctcaagatcccagtaccaaggtccacataaaagttttgcaaactgtgatctccttcytcttgttaygtgccatttactttgtgtctgtaataatatcagtttggagttttaagaatctggaaaacaaacctgtcttcatgttctgccaagctattggattcagctgttcttcagcccacccgttcatcctgatttggggaaacaagaagctaaagcagacttatctttcagttttgtggcaaatgasgtactgr

SEQ ID NO: 309 - DNA, 1363 bp, Homo sapiens
ctaaattggcatggtattggattgctgactagaaatacttctatctcaaccttataaccaactggctgttttaccttggtttctgatgaagaattgaaaagaagagtagctgaggagctggcattggagcaagccaagaaagaatccgaagatcagaaacgactaaagcaagccaaagagctggaccgagagagggctgctgccaatgagcagttaaccagagccatccttcgggagaggatatgtagcgaggaggaacgcgctaaggcaaagcacctggctaggcagctggaagagaaagaccgagtgctaaagaagcaggatgcattctacaaagaacagctggctagactggaggagaggagctcagagttctacagagtcaccactgaacaatatcagaaagctgctgaagaggtggaagcaaagttcaagcgatatgagtctcatccagtctgtgctgatctgcaggccaaaattcttcagtgttaccgtgagaacacccaccagaccctcaaatgctcygctctggccacccagtatatgcactgtgtcaatcatgccaaacagagcatgcttgagaagggaggataaaaactttcagaatgagcaaaacaccatcaacgttaattccagagatggaacattttttttcctagtgagaaaacaacccatttgaagagaagaccactaatgagaagaccactaaagagagacatcaagaatggattcagcagaatcatttcacgttttgaacagcagcagtttgaagggccaaagccttgatcagggatcagtcattaaaggacactcttgagtattagtaaaccctcttatgatgattaaaagagaagggcagccctctccaccttttggtactttctattcaacttgcactgaccataaaatgtttctcttctgaacaagccccatcatttggtgaacctccaccctaacaaagtaggatggggttgggggctaaattaattggagtggggcgaggagagagccagaaaacatagatccgagggcagcagtgctgggtggagagagccagaaaacagatctggaggcagcagtgctggatggaattgtctaggctgtggcatgttggttttgtctttcttttctcctttgattatgtaagagctatttcattataacttattatggtgattatacaggcaagaagacaaaaaggagagaaaatgtacctcttctactggaataatgtttatgattacaagtgagataaggtatttttatcaatatgaaggcaaccttggctgataaaacctctatagtgaatactcacatctttacttcactcactatcaataataaatatattttctgacaaaga

SEQ ID NO: 310 - DNA, 1740 bp, Homo sapiens
accacctgttgccatagcatccgggtcgggtgaaccaatccgggcgccctcgccgaacagaggcgggcagttcgcatcgccgaccaacctgaggcgtttttgttgtggcgcgtgaccggargaggcgggagctcaggaccggcgccttctccttgcttctgggggtcgtggccttgctcccgctgtgcgggaaaagaatccaggcccttccacgcgcgtgtgggtgcgggggccccgaagtgctcgtggttccccgctaggtctccgctggggcaggaaccggaatcatgggtgggaccaccagcacccgccgggtcaccttcgaggcggacgagaatgagaacatcaccgtggtgaagggcatccggctttcggaaaatgtgattgatcgaatgaaggaatcctctccatctggttcgaagtctcagcggtattctggtgcttatggtgcctcagtttctgatgaagaattgaaaagaagagtagctgaggagctggcattggagcaagccaagaaagaatccgaagatcagaaacgactaaagcaagccaaagagctggaccgagagagggctgctgccaatgagcagttaaccagagccatccttcgggagaggatatgtagcgaggaggaacgcgctaaggcaaagcacctggctaggcagctggaagagaaagaccgagtgctaaagaagcaggatgcattctacaaagaacagctggctagactggaggagaggagctcagagttctacagagtcaccactgaacaatatcagaaagctgctgaagaggtggaagcaaagttcaagcgatatgagtctcatccagtctgtgctgatctgcaggccaaaattcttcagtgttaccgtgagaacacccaccagaccctcaaatgctcygctctggccacccagtatatgcactgtgtcaatcatgccaaacagagcatgcttgagaagggaggataaaaactttcagaatgagcaaaacaccatcaacgttaattccagagatggaacattttttttcctagtgagaaaacaacccatttgaagagaagaccactaatgagaagaccactaaagagagacatcaagaatggattcagcagaatcatttcacgttttgaacagcagcagtttgaagggccaaagccttgatcagggatcagtcattaaaggacactcttgagtattagtaaaccctcttatgatgattaaaagagaagggcagccctctccaccttttggtactttctattcaacttgcactgaccataaaatgtttctcttctgaacaagccccatcatttggtgaacctccaccctaacaaagtaggatggggttgggggctaaattaattggagtggggcgaggagagagccagaaaacatagatccgagggcagcagtgctgggtggagagagccagaaaacagatctggaggcagcagtgctggatggaattgtctaggctgtggcatgttggttttgtctttcttttctcctttgattatgtaagagctatttcattataacttattatggtgattatacaggcaagaagacaaaaaggagagaaaatgtacctcttctactggaataatgtttatgattacaagtgagataaggtatttttatcaatatgaaggcaaccttggctgataaaacctctatagtgaatactcacatctttacttcactcactatcaataataaatatattttctgacaaaga

SEQ ID NO: 311 - DNA, 968 bp, Homo sapiens
aaaggagtacatgattaggaagtgcatttggtgcattcgagccactgggctgcttctaaagtggttgctctggggaccagagagacttgttatgcctcatttgggtatcacatgaatcagcacacctcaaaaattattccacagtttggatgttagtattaggtattatataagaatttcccataatcaaataatattgagaaatgctgatttttgggaaggcacaacttttcccaaacttctactgtgctcctgtgcactgtgaatctgcagaattggcccttcccaaaccctttcaaccacagcatcctcctttggaggccagcatcttgcaagactacttattccttgaaatacactgtggaaaaaacactgatgtcaggggatattgaaataaactcactgcatgcggcatacccttcaaagacatttttcctccctttggaacagttgaaattcaaatgacatatcctagcatgatttgccacatgggttgtgttttgaaacccaaatctaacacaacaaatttcagatagagctttgtttagcccccaggccagtttttggtcccgtggataagggttggtatccagacctcttagagcttttctgcatcagctttccagggcttattcaaaccctccatgtgctgkaagtccctcaccctttatgaggcacaggaggcgatacgcttgcatctcgatctctcagcctcggctcatgctgttctctcctttctcatcctgtgttccagccataggaattctgttcattgtgtggaaggctacgcacccccacatccccaaccttttgtacatgtgtttcctctatcgagaatattctctcctccaccttttactctcaacctgatgaccccatacttaatctttcaggacttggctccagggccacgtgcttccacagtattttctcacttgyttgctttatgcagtttatttattgagaca

SEQ ID NO: 312 - DNA, 270 bp, Homo sapiens
atggtttggcatttcagaatccagttccacagaataaagaagaatctccactctggcagtggggaggaggaaggaagtggaggtttgttggctttactttgccatccatccctttctctatgtggtagagaaggactgaraggagtgatcccacaggacacaggttcccccgtgtctgtcaccttcaagggggctcaggctcccagggggaaggcacaggggaatcacggagttcagttccaggctccaggactttccagaagggacccc

SEQ ID NO: 313 - DNA, 500 bp, Homo sapiens
ctagcatggaatgtggacttggtccctaaacttaagtctagaaaataccaccctgtctattacatggagcagctgtgagaatagaataaagaaaattgtttccttttttcttttttctgagacaakcagtagtgcaatcaaggctcactgcagcctcagcctcctgggctcaagcagtcctcccatctcagcctccrgagtagctgggactacagacacacactactgtgcctggctaatttttgtattttttgtagagacaaggtttgccatattccccaggctggtctctaactccagggctcaagygactctcccacctcagcatcccaaagtgttgmgattacaggcatgagccactgtgaccggccaagaaaattctttaccgataaaaaccttatttctatttacttggtcatccatttcaaccagacaagcttgaccaaagttgtggcctttttcyggaacattgcaaaaagtttctgaatgcttttgacttc

SEQ ID NO: 314 - DNA, 8503 bp, Homo sapiens
taaatttaaaggcggggcggcctgtgagccctgaagtgccggccgcggagggtcctggccattttcctgggaccagttcagcctgataggatggcggaggaaggagccgtggccgtctgcgtgcgagtgcggccgctgaacagcagagaagaatcacttggagaaactgcccaagtttactggamaactgacaataatgtcatttatcaagttgatggaagtaaatccttcaattttgatcgtgtctttcatggtaatgaaactaccaaaaatgtgtatgaagaaatagcagcaccaatcatcgattctgccatacaaggctacaatggtacyatatttgcctatggacagactgcttcaggaaaaacatataccatgatgggttcagaagatcatttgggagttatacccagggcaattcatgacattttccaaaaaattaagaagtttcctgatagggaatttctcttacgtgtatcttacatggaaatatacaatgaaaccattacagatttactctgtggcactcaaaaaatgaaacctttaattattcgagaagatgtcaataggaatgtgtatgttgctgatctcacagaagaagttgtatatacatcagaaatggctttgaaatggattacaaagggagaaaagagcaggcattatggagaaacaaaaatgaatcaaagaagcagtcgttctcataccatctttaggatgattttggaaagcagagagaagggtgaaccttctaattgtgaaggatctgttaaggtatcccatttgaatttggttgatcttgcaggcagtgaaagagctgctcaaacaggcgctgcaggtgtgcggctcaaggaaggctgtaatataaatcgaagcttatttattttgggacaagtgatcaagaaacttagtgatggacaagttggtggtttcataaattatcgagatagcaagttaacacgaattctycagaattccttgggaggaaatgcaaagacacgtattatctgcacaattactccagtatcttttgatgaaacacttactgctctccagtttgccagtactgctaaatatatgaagaatactccttatgttaatgaggtrtcaactgatgaagctctcctgaaaaggtatagaaaagaaataatggatcttaaaaaacaattagaggaggtttctttagagacgcgggctcaggcaatggaaaaagaccaattggcccaacttttggaagaaaaagatttgcttcagaaagtacagaatgagaaaattgaaaacttaacacggatgctggtgacctcttcttccctcacgttgcaacaggaattaaaggctaaaagaaaacgaagagttacttggtgccttggcaaaattaacaaaatgaagaactcaaactatgcagatcaatttaatataccaacaaatataacaacaaaaacacataagctttctataaatttattacgagaaattgatgaatctgtctgttcagagtctgatgttttcagtaacactcttgatacattaagtgagatagaatggaatccagcaacaaagctactaaatcaggagaatatagaaagtgagttgaactcacttcgtgctgactatgataatctggtattagactatgaacaactacgaacagaaaaagaagaaatggaattgaaattaaaagaaaagaatgatttggatgaatttgaggctctagaaagaaaaactaaaaaagatcaagagatgcaactaattcatgaaatttcgaacttaaagaatttagttaagcatgcagaagtatataatcaagatcttgagaatgaactcagttcaaaagtagagctgcttagagaaaaggaagaccagattaagaagctacaggaatacatagactctcaaaagctagaaaatataaaaatggacttgtcatactcattggaaagcattgaagacccaaaacaaatgaagcagactctgtttgatgctgaaactgtagcccttgatgccaagagagaatcagcctttcttagaagtgaaaatctggagctgaaggagaaaatgaaagaacttgcaactacatacaagcaaatggaaaatgatattcagtwatatcaaagccarttggaggcaaaaaagaaaatgcaagttgatctggagaaagaattacaatctgcttttaatgagataacaaaactcacctcccttatagatggcaaagttccaaaagatttgctctgtaatttrgaattggaaggaaagattactgatcttcagaaagaactaaataaagaagttgaagaaaatgaagctttgcgggaagaagtcattttgctttcagaattgaaatctttaccttctgaagtagaaaggctgaggaaagagatacaagacaaatctgaagagctccatataataacatcagaaaaagataaattgttttctgaagtagttcataaggagagtagagttcaaggtttacttgaagaaattgggaaaacaaaagatgacctagcaactacacagtcgaattataaaagcactgatcaagaattccaaaatttcaaaacccttcatatggactttgagcaaaagtataagatggtccttgaggagaatgagagaatgaatcaggaaatagttaatctctctaaagaagcccaaaaatttgattcgagtttgggtgctttgaagaccgagctttcttacaagacccaagaacttcaggagaaaacacgtgaggttcaagaaagactaaatgagatggaacagctgaaggaacaattagaaaatagagattctacgctgcaaactgtagaaagggagaaaacactgattactgagaaactgcagcaaactttagaagaagtaaaaactttaactcaagaaaaagatgatctaaaacaactccaagaaagcttgcaaattgagagggaccaactcaaaagtgatattcacgatactgttaacatgaatatagatactcaagaacaattacgaaatgctcttgagtctctgaaacaacatcaagaaacaattaatacactaaaatcgaaaatttctgaggaagtttccaggaatttgcatatggaggaaaatacaggagaaactaaagatgaatttcagcaaaagatggttggcatagataaaaaacaggatttggaagctaaaaatacccaaacactaactgcagatgttaaggataatgagataattgagcaacaaaggaagatattttctttaatacaggagaaaaatgaactccaacaaatgttagagagtgttatagcagaaaaggaacaattgaagactgacctaaaggaaaatattgaaatgaccattgaaaaccaggaagaattaagacttcttggggatgaacttaaaaagcaacaagagatagttgcacaagaaaagaaccatgccataaagaaagaaggagagctttctaggacctgtgacagactggcagaagttgaagaaaaactaaaggaaaagagccagcaactccaagaaaaacagcaacaacttcttaatgtacaagaagagatgagtgagatgcagaaaaagattaatgaaatagagaatttaaagaatgaattaaagaacaaagaattgacattggaacatwtggaaacagagaggcttgagttggctcagaaacttaatgaaaattatgaggaagtgaaatctataaccaaagaaagaaaagttctaaaggaattacagaagtcatttgaaacagagagagaccaccttagaggatatataagagaaattgaagctacaggcctacaaaccaaagaagaactaaaaattgctcatattcacctaaaagaacaccaagaaactattgatgaactaagaagaagcgtatctgagaagacagctcaaataataaatactcaggacttagaaaaatcccataccaaattacaagaagagatcccagtgcttcatgaggaacaagagttactgcctaatgtgaaagaagtcagtgagactcaggaaacaatgaatgaactggagttattaacagaacagtccacaaccaaggactcaacaacactggcaagaatagaaatggaaaggctcaggttgaatgaaaaatttcaagaaagtcaggaagagataaaatctctaaccaaggaaagagacaaccttaaaacgataaaagaagcccttgaagttaaacwtgaccagctgaaagaacatattagagaaactttggctaaaatccaggagtctcaaagcaaacaagaacagtccttaaatatgaaagaaaaagacaatgaaactaccaaartcgtgagtgagatggagcaattcaaacccaaagattcagcactactaaggatagaaatagaaatgctyggattgtccaaaagacttcaagaaagtcatgatgaaatgaaatctgtagctaaggagaaagatgacctacagaggctgcaagaagttcttcaatctgaaagtgaccagctcaaagaaaacataaaagaaattgtagctaaacacctggaaactgaagaggaacttaaagttgctcattgttgcctgaaagaacaagaggaaactattaatgagttaagagtgaatctttcagagaaggaaactgaaatatcaaccattcaaaagcagttagaagcaatcaatgataaattacagaacaagatccaagagatttatgagaaagaggaacaayttaatataaaacaaattagtgaggttcaggaaaaagtgaatgaactgaaacaattcaaggagcatcgcaaagccaaggattcagcactacaaagtatagaaagtaagatgctygagttgaccaacagacttcaagaamgtcaagaagaaatacaaattatgattaaggaaaaagaggaaatgaaaagagtacaggaggcccttcagatagagagagaccaactgaaagaaaacactaaagaaattgtagctaaaatgaaagaatctcaagaaaaagaatatcagtttcttaagatgacagctgtcaatgagactcaggagaaaatgtgtgaaatagaacacttgaaggagcaatttgagacccagaagttaaacctggaaaacatagaaacggagaatataaggttgactcagatactacatgaaaaccttgaagaaatgagatctgtaacaaaagaaagagatgaccttaggagtgtggaggagactctcaaagtagagagagaccagctcaaggaaaaccttagagaaactataactagagacctagaaaaacaagaggagctaaaaattgttcacatgcatctgaaggagcaccaagaaactattgataaactaagagggattgtttcagagaaaacaaatgaaatatcaaatatgcaaaaggacttagaacactcaaatgatgccttaaaagcacaggatctgaaaatacaagaggaactaagaattgctcacatgcatctgaaagagcagcaggaaactattgacaaactcagaggaattgtttctgagaagacagataaactatcaaatatgcaaaaagatttagaaaattcaaatgctaaattacaagaaaagattcaagaacttaaggcaaatgaacatcaacttattacrttaaaaaaagatgtcaatgagacacagaaaaaagtgtctgaaatggagcaactaaagaaacaaataaaagaccaaagcttaactctgagtaaattagaaatagagaatttaaatttggctcagaaacttcatgaaaaccttgaagaaatgaaatctgtaatgaaagaaagagataatctaagaagagtagaggagacactcaaactggagagagaccaactcaaggaaascctgcaagaaaccaaagctagagatctggaaatacaacaggamctaaaaactgctcgtatgctatcaaaagaacacaaagaaactgttgataaacttagagaaaaaatttcagaaaagacaattcaaatttcagacattcaraaggatttagataaatcaaaagatgaattacagaaaaagatccaagaacttcagaaaaaagaacttcaactgcttagagtgaaagaagatgtcaatatgagtcataaaaaaattaatgaaatggaacagttgaagaagcaatttgaggcccaaaacttatctatgcaaagtgtgagaatggataacttccagttgactaagaaacttcatgaaagccttgaagaaataagaattgtagctaaagaaagagatgagctaaggaggataaaagaatctctcaaaatggaaagggaccaattcatagcaaccttaagggaaatgatagctagagaccgacagaaccaccaagtaaaacctgaaaaaaggttactaagtgatggacaacagcaccttayggaaagcctgagagaaaagtgctctagaataaaagagcttttgaagagatactcagagatggatgatcattatgagtgcttgaatagattgtctcttgacttggagaaggaaattgaattccacagaatcatgaagaaactgaagtatgtgttaagctatgttacaaaaataaaagaagarcaacatgaatscatcaataaatttgaaatggattttattgatgaagtggaaaagcaaaaggaattgctaattaaaatacagcaccttcaacaagattgtgatgtaccatccagagaattaagggatctcaaattgaaccagaatatggatctacatattgaggaaattctcaaagatttctcagaaagtgagttccctagcataaagactgaatttcaacaagtactaagtaataggaaagaaatgacacagtttttggaagagtggttaaatactcgttttgatatagaaaagcttaaaaatggcatccagaaagaaaatgataggatttgtcaagtgaataacttctttaataacagaataattgccataatgaatgaatcaacagagtttgaggaaagaagtgctaccatatccaaagagtgggaacaggacctgaaatcactgaaagagaaaaatgaaaaactatttaaaaactaccaaacattgaagacttccttggcatctggtgcccaggttaatcctaccacacaagacaataagaatcctcatgttacatcaagagctacacagttaaccacagagaaaattcgagagctggaaaattcactgcatgaagctaaagaaagtgctatgcataaggaaagcaagattataaagatgcagaaagaacttgaggtgactaatgacataatagcaaaacttcaagccaaagttcatgaatcaaataaatgccttgaaaaaacaaaagagacaattcaagtacttcaggacaaagttgctttaggagctaagccatataaagaagaaattgaagatctcaaaatgaagcttgtgaaaatagacctagagaaaatgaaaaatgccaaagaatttgaaaaggaaatcagtgctacaaaagccactgtagaatatcaaaaggaagttataaggctattgagagaaaatctcagaagaagtcaacaggcccaagatacctcagtgatatcagaacatactgatcctcagccttcaaataaacccttaacttgtggaggtggcagcggcattgtacaaaacacaaaagctcttattttgaaaagtgaacatataaggctagaaaaagaaatttctaagttaaagcagcaaaatgaacagctaataaaacaaaagaatgaattgttaagcaataatcagcatctttccaatgaggtcaaaacttggaaggaaagaacccttaaaagagaggctcacaaacaagtaacttgtgagaattctccaaagtctcctaaagtgactggaacagcttctaaaaagaaacaaattacaccctctcaatgcaaggaacggaatttacaagatcctgtgccaaaggaatcaccaaaatcttgtttttttgatagccgatcaaagtctttaccatcacctcatccagttcgctattttgataactcaagtttaggcctttgtccagaggtgcaaaatgcaggagcagagagtgtggattctcagccaggtccttggcacgcctcctcaggcaaggatgtgcctgagtgcaaaactcagtagactcctctttgtcacttctctggagatccagcattccttatttggaaatgactttgtttatgtgtctatccctggtaatgatgttgtagtgcagcttaatttcaattcagtctttactttgccactagagttgaaagataagggaacaggaaatgaatgcattgtggtaatttagaatggtgatagcaataccttcttcttgcatatggtaatacttttaaaagttgaattgttttatttatttgtatattttgtaaagaataaagttattgaaagaaatgtaaagttatctacatgacttagcatattccaaagcataatacatacattaatataaaacatcattttattaacaaaattgtaaatgtttttaataccttacacattcaataaatgtttagtagttctgaatcac

SEQ ID NO: 315 - DNA, 8611 bp, Homo sapiens
taaatttaaaggcggggcggcctgtgagccctgaagtgccggccgcggagggtcctggccattttcctgggaccagttcagcctgataggatggcggaggaaggagccgtggccgtctgcgtgcgagtgcggccgctgaacagcagagaagaatcacttggagaaactgcccaagtttactggamaactgacaataatgtcatttatcaagttgatggaagtaaatccttcaattttgatcgtgtctttcatggtaatgaaactaccaaaaatgtgtatgaagaaatagcagcaccaatcatcgattctgccatacaaggctacaatggtacyatatttgcctatggacagactgcttcaggaaaaacatataccatgatgggttcagaagatcatttgggagttatacccagggcaattcatgacattttccaaaaaattaagaagtttcctgatagggaatttctcttacgtgtatcttacatggaaatatacaatgaaaccattacagatttactctgtggcactcaaaaaatgaaacctttaattattcgagaagatgtcaataggaatgtgtatgttgctgatctcacagaagaagttgtatatacatcagaaatggctttgaaatggattacaaagggagaaaagagcaggcattatggagaaacaaaaatgaatcaaagaagcagtcgttctcataccatctttaggatgattttggaaagcagagagaagggtgaaccttctaattgtgaaggatctgttaaggtatcccatttgaatttggttgatcttgcaggcagtgaaagagctgctcaaacaggcgctgcaggtgtgcggctcaaggaaggctgtaatataaatcgaagcttatttattttgggacaagtgatcaagaaacttagtgatggacaagttggtggtttcataaattatcgagatagcaagttaacacgaattctycagaattccttgggaggaaatgcaaagacacgtattatctgcacaattactccagtatcttttgatgaaacacttactgctctccagtttgccagtactgctaaatatatgaagaatactccttatgttaatgaggtrtcaactgatgaagctctcctgaaaaggtatagaaaagaaataatggatcttaaaaaacaattagaggaggtttctttagagacgcgggctcaggcaatggaaaaagaccaattggcccaacttttggaagaaaaagatttgcttcagaaagtacagaatgagaaaattgaaaacttaacacggatgctggtgacctcttcttccctcacgttgcaacaggaattaaaggctaaaagaaaacgaagagttacttggtgccttggcaaaattaacaaaatgaagaactcaaactatgcagatcaatttaatataccaacaaatataacaacaaaaacacataagctttctataaatttattacgagaaattgatgaatctgtctgttcagagtctgatgttttcagtaacactcttgatacattaagtgagatagaatggaatccagcaacaaagctactaaatcaggagaatatagaaagtgagttgaactcacttcgtgctgactatgataatctggtattagactatgaacaactacgaacagaaaaagaagaaatggaattgaaattaaaagaaaagaatgatttggatgaatttgaggctctagaaagaaaaactaaaaaagatcaagagatgcaactaattcatgaaatttcgaacttaaagaatttagttaagcatgcagaagtatataatcaagatcttgagaatgaactcagttcaaaagtagagctgcttagagaaaaggaagaccagattaagaagctacaggaatacatagactctcaaaagctagaaaatataaaaatggacttgtcatactcattggaaagcattgaagacccaaaacaaatgaagcagactctgtttgatgctgaaactgtagcccttgatgccaagagagaatcagcctttcttagaagtgaaaatctggagctgaaggagaaaatgaaagaacttgcaactacatacaagcaaatggaaaatgatattcagtwatatcaaagccarttggaggcaaaaaagaaaatgcaagttgatctggagaaagaattacaatctgcttttaatgagataacaaaactcacctcccttatagatggcaaagttccaaaagatttgctctgtaatttrgaattggaaggaaagattactgatcttcagaaagaactaaataaagaagttgaagaaaatgaagctttgcgggaagaagtcattttgctttcagaattgaaatctttaccttctgaagtagaaaggctgaggaaagagatacaagacaaatctgaagagctccatataataacatcagaaaaagataaattgttttctgaagtagttcataaggagagtagagttcaaggtttacttgaagaaattgggaaaacaaaagatgacctagcaactacacagtcgaattataaaagcactgatcaagaattccaaaatttcaaaacccttcatatggactttgagcaaaagtataagatggtccttgaggagaatgagagaatgaatcaggaaatagttaatctctctaaagaagcccaaaaatttgattcgagtttgggtgctttgaagaccgagctttcttacaagacccaagaacttcaggagaaaacacgtgaggttcaagaaagactaaatgagatggaacagctgaaggaacaattagaaaatagagattctacgctgcaaactgtagaaagggagaaaacactgattactgagaaactgcagcaaactttagaagaagtaaaaactttaactcaagaaaaagatgatctaaaacaactccaagaaagcttgcaaattgagagggaccaactcaaaagtgatattcacgatactgttaacatgaatatagatactcaagaacaattacgaaatgctcttgagtctctgaaacaacatcaagaaacaattaatacactaaaatcgaaaatttctgaggaagtttccaggaatttgcatatggaggaaaatacaggagaaactaaagatgaatttcagcaaaagatggttggcatagataaaaaacaggatttggaagctaaaaatacccaaacactaactgcagatgttaaggataatgagataattgagcaacaaaggaagatattttctttaatacaggagaaaaatgaactccaacaaatgttagagagtgttatagcagaaaaggaacaattgaagactgacctaaaggaaaatattgaaatgaccattgaaaaccaggaagaattaagacttcttggggatgaacttaaaaagcaacaagagatagttgcacaagaaaagaaccatgccataaagaaagaaggagagctttctaggacctgtgacagactggcagaagttgaagaaaaactaaaggaaaagagccagcaactccaagaaaaacagcaacaacttcttaatgtacaagaagagatgagtgagatgcagaaaaagattaatgaaatagagaatttaaagaatgaattaaagaacaaagaattgacattggaacatwtggaaacagagaggcttgagttggctcagaaacttaatgaaaattatgaggaagtgaaatctataaccaaagaaagaaaagttctaaaggaattacagaagtcatttgaaacagagagagaccaccttagaggatatataagagaaattgaagctacaggcctacaaaccaaagaagaactaaaaattgctcatattcacctaaaagaacaccaagaaactattgatgaactaagaagaagcgtatctgagaagacagctcaaataataaatactcaggacttagaaaaatcccataccaaattacaagaagagatcccagtgcttcatgaggaacaagagttactgcctaatgtgaaagaagtcagtgagactcaggaaacaatgaatgaactggagttattaacagaacagtccacaaccaaggactcaacaacactggcaagaatagaaatggaaaggctcaggttgaatgaaaaatttcaagaaagtcaggaagagataaaatctctaaccaaggaaagagacaaccttaaaacgataaaagaagcccttgaagttaaacwtgaccagctgaaagaacatattagagaaactttggctaaaatccaggagtctcaaagcaaacaagaacagtccttaaatatgaaagaaaaagacaatgaaactaccaaartcgtgagtgagatggagcaattcaaacccaaagattcagcactactaaggatagaaatagaaatgctyggattgtccaaaagacttcaagaaagtcatgatgaaatgaaatctgtagctaaggagaaagatgacctacagaggctgcaagaagttcttcaatctgaaagtgaccagctcaaagaaaacataaaagaaattgtagctaaacacctggaaactgaagaggaacttaaagttgctcattgttgcctgaaagaacaagaggaaactattaatgagttaagagtgaatctttcagagaaggaaactgaaatatcaaccattcaaaagcagttagaagcaatcaatgataaattacagaacaagatccaagagatttatgagaaagaggaacaayttaatataaaacaaattagtgaggttcaggaaaaagtgaatgaactgaaacaattcaaggagcatcgcaaagccaaggattcagcactacaaagtatagaaagtaagatgctygagttgaccaacagacttcaagaamgtcaagaagaaatacaaattatgattaaggaaaaagaggaaatgaaaagagtacaggaggcccttcagatagagagagaccaactgaaagaaaacactaaagaaattgtagctaaaatgaaagaatctcaagaaaaagaatatcagtttcttaagatgacagctgtcaatgagactcaggagaaaatgtgtgaaatagaacacttgaaggagcaatttgagacccagaagttaaacctggaaaacatagaaacggagaatataaggttgactcagatactacatgaaaaccttgaagaaatgagatctgtaacaaaagaaagagatgaccttaggagtgtggaggagactctcaaagtagagagagaccagctcaaggaaaaccttagagaaactataactagagacctagaaaaacaagaggagctaaaaattgttcacatgcatctgaaggagcaccaagaaactattgataaactaagagggattgtttcagagaaaacaaatgaaatatcaaatatgcaaaaggacttagaacactcaaatgatgccttaaaagcacaggatctgaaaatacaagaggaactaagaattgctcacatgcatctgaaagagcagcaggaaactattgacaaactcagaggaattgtttctgagaagacagataaactatcaaatatgcaaaaagatttagaaaattcaaatgctaaattacaagaaaagattcaagaacttaaggcaaatgaacatcaacttattacgttaaaaaaagargtcaatgagacacagaaaaaagtgtctgaaatggagcaactaaagaaacaaataaaagaccaaagcttaactctgagtaaattagaaatagagaatttaaatttggctcagaaacttcatgaaaaccttgaagaaatgaaatctgtaatgaaagaaagagataatctaagaagagtagaggagacactcaaactggagagagaccaactcaaggaaagcctgcaagaaascaaagctagagatctggaaatacaacaggaactaaaaactgcmcgtatgctatcaaaagaacacaaagaaactgttgataaacttagagaaaaaatttcagaaaagacaattcaaatttcagacattcaaaaggatttagaraaatcaaaagatgaattacagaaaaagatccaagaacttcagaaaaaagaacttcaactgcttagagtgaaagaagatgtcaatatgagtcataaaaaaattaatgaaatggaacagttgaagaagcaatttgaggcccaaaacttatctatgcaaagtgtgagaatggataacttccagttgactaagaaacttcatgaaagccttgaagaaataagaattgtagctaaagaaagagatgagctaaggaggataaaagaatctctcaaaatggaaagggaccaattcatagcaaccttaagggaaatgatagctagagaccgacagaaccaccaagtaaaacctgaaaaaaggttactaagtgatggacaacagcaccttacggaaagcctgayagaaaagtgctctagaataaaagagcttttgaagagatactcagagatggatgatcattatgagtgcttgaatagattgtctcttgacttggagaaggaaattgaattccaaaaagagctttcaatgagagttaaagcaaacctctcacttccctatttacaaaccaaacacattgaraaactttttastgcaaaccagagatgctccatggaattccacagaatcatgaagaaactgaagtatgtgttaagctatgttacaaaaataaaagaagaacaacatgaatccatcaataaatttgaaatggattttattgatgaagtggaaaagcaaaaggaattgctaattaaaatacagcaccttcaacaagattgtgatgtaccatccagagaattaagggatctcaaattgaaccagaatatggatctacatattgaggaaattctcaaagatttctcagaaagtgagttccctagcataaagactgaatttcaacaagtactaagtaataggaaagaaatgacacagtttttggaagagtggttaaatactcgttttgatatagaaaagcttaaaaatggcatccagaaagaaaatgataggatttgtcaagtgaataacttctttaataacagaataattgccataatgaatgaatcaacagagtttgaggaaagaagtgctaccatatccaaagagtgggaacaggacctgaaatcactgaaagagaaaaatgaaaaactatttaaaaactaccaaacattgaagacttccttggcatctggtgcccaggttaatcctaccacacaagacaataagaatcctcatgttacatcaagagctacacagttaaccacagagaaaattcgagagctggaaaattcactgcatgaagctaaagaaagtgctatgcataaggaaagcaagattataaagatgcagaaagaacttgaggtgactaatgacataatagcaaaacttcaagccaaagttcatgaatcaaataaatgccttgaaaaaacaaaagagacaattcaagtacttcaggacaaagttgctttaggagctaagccatataaagaagaaattgaagatctcaaaatgaagcttgtgaaaatagacctagagaaaatgaaaaatgccaaagaatttgaaaaggaaatcagtgctacaaaagccactgtagaatatcaaaaggaagttataaggctattgagagaaaatctcagaagaagtcaacaggcccaagatacctcagtgatatcagaacatactgatcctcagccttcaaataaacccttaacttgtggaggtggcagcggcattgtacaaaacacaaaagctcttattttgaaaagtgaacatataaggctagaaaaagaaatttctaagttaaagcagcaaaatgaacagctaataaaacaaaagaatgaattgttaagcaataatcagcatctttccaatgaggtcaaaacttggaaggaaagaacccttaaaagagaggctcacaaacaagtaacttgtgagaattctccaaagtctcctaaagtgactggaacagcttctaaaaagaaacaaattacaccctctcaatgcaaggaacggaatttacaagatcctgtgccaaaggaatcaccaaaatcttgtttttttgatagccgatcaaagtctttaccatcacctcatccagttcgctattttgataactcaagtttaggcctttgtccagaggtgcaaaatgcaggagcagagagtgtggattctcagccaggtccttggcacgcctcctcaggcaaggatgtgcctgagtgcaaaactcagtagactcctctttgtcacttctctggagatccagcattccttatttggaaatgactttgtttatgtgtctatccctggtaatgatgttgtagtgcagcttaatttcaattcagtctttactttgccactagagttgaaagataagggaacaggaaatgaatgcattgtggtaatttagaatggtgatagcaataccttcttcttgcatatggtaatacttttaaaagttgaattgttttatttatttgtatattttgtaaagaataaagttattgaaagaaatgtaaagttatctacatgacttagcatattccaaagcataatacatacattaatataaaacatcattttattaacaaaattgtaaatgtttttaataccttacacattcaataaatgtttagtagttctgaatcac

SEQ ID NO: 316 - DNA, 915 bp, Homo sapiens
cgccgggccgtgctcttgctcccgccgcctggcagcctcacgctcggctccagcggccaagagccggagaaagtcctgctggtgggcggccgcggggctgagggcgtccggcatcccggggccgctccggcccgggcggcgagagtgcccggcggtccatgcatccgccgccgcccgccgccgcgatggatttcagtcagaacagcctgttcggttacatggaggacctgcaggagctcaccatcatcgagaggccggtccgccggagcctcaagacaccggaagaaatagaaagattgacrgtcgatgaagacctcagtgatattgaaagggctgtttatctgctcagtkctggtcaagatgtccaaggaacaagtgtgattgcaaatctcccatttttgatgcgacagaatcccactgagacgcttcggagagtgttgccaaaagtcagagtccatgaggatgcacacttatttatccagagagtatggatctcacatatgtttgtccagagggtgtgactctgtggaggagaacacttactgtggacagtcccagatgttgaagtcagcacaacaagagaaaaacccaaatcctgataagacttgaggatttttcgaaaattaaatgcaaaatagttggggcaaatgttgctgcgggagtcaagactaagtaatacagtaagaagatatgaagttggagagcttctcatgttcttcctttgtataaagtttgcatacgtacaaaacccaggactttaatgactttaagagggggcagaattgcatctyttggaagttaacagactcatgtgaactggaatgtacgttgtggccctcacaattgattttaatatttatttgcaaagtcctttctgtttctaaataaaagctgtgccttctgaaacctgtaagt

SEQ ID NO: 317 - DNA, 3711 bp, Homo sapiens
cgccgggccgtgctcttgctcccgccgcctggcagcctcacgctcggctccagcggccaagagccggagaaagtcctgctggtgggcggccgcggggctgagggcgtccggcatcccggggccgctccggcccgggcggcgagagtgcccggcggtccatgcatccgccgccgcccgccgccgcgatggatttcagtcagaacagcctgttcggttacatggaggacctgcaggagctcaccatcatcgagaggccggtccgccggagcctcaagacaccggaagaaatagaaagattgacrgtcgatgaagacctcagtgatattgaaagggctgtttatctgctcagtkctggtcaagatgtccaaggaacaagtgtgattgcaaatctcccatttttgatgcgacagaatcccactgagacgcttcggagagtgttgccaaaatggaaatgcagttaacggctgcgatgtcatttctgaccattctgcaggacgaatcagtgtcaattcatgcatatacccactcattcctccaagtcattctcctgcatctggagcacagggacacaggtgtcagcaatgcatggctggaaactcttctgtctgttatagaagtattgccaaaagaaaccctacggcatgagattttgaatccacttgtttccaaggcacaactttcccaaacagtccagtctcgtttagttagttgtaaaattttaggaaaattgaccaacaaatttgatgcccacaccattaagcgagaaatacttcctctggtaaaatcactctgtcaagatgtagaatatgaagttcgatcttgtatgtgtcggcaattagaaaatatagcccagggcattgggacagaacttacaaaaagtgtggtgctccctgaattaatagaactttctagggatgaaggcagcagtgtacgacttgcagcttttgaaactttggttaatctgcttgatatatttgatacagatgacagaagtcaaactatacttcccttagtgaaatcattttgtgaaaaatctttcaaagcagatgaatcaattcttatttctttatctttccatttaggaaaactatgtcatggactatatggaattttcactccagatcagcacttgagatttttggaattttataagaaactttgtacattgggtttgcaacaagaaaatggacacaatgaaaaccagattccaccccaaatcctagagcaggagaagaaatatatttcagtacggaagaactgtgcttataactttccggccatgattgtttttgttgatcctaaaaacttccacatggaactctattctacattcttctgcctttgccatgaccctgaagtaccagtcagatacactattgctatttgcttttatgaagtatctaagcttctgaattctggagtatatttaatacataaagaactaataacattattacaagatgaatcactggaggtactagatgctcttatagatcatcttccagaaatcttggaacttatgtctactggtggagaaagcagtgttcaagaaaataagttatcttctctgcctgacttgattccagcactcacagctgctgaacagcgagctgcagcctctttaaaatggagaactcatgagaagctacttcagaaatatgcctgcctgccacatgtcatatcaagcgatcagatttattaccgtttcttacaaagaatgttcacaatcatgatgacaaataatgttttacctgtccaaaaggcggcttcacgaactctatgcatttttctgcgttataatcgtaaacaagaacagagacatgaggtcattcaaaaattaattgaacaattgggccaaggaaaaagttactggaatagacttcgatttttggatacctgtgaatttattatagagatattttcaaaatcatttttctgtaaatatttctttctacctgctattgaactgacacatgatccagtagcaaatgtgagaatgaaactttgctacctgttgcccaaagtgaaatctactctgaagattcctgctgataagcatctacttcagcagttagaaatgtgtgtgaggaaactcctgtgtcaagaaaaagataaagatgttctggctattgtaaaaagaactgtattagagttggacagaatggaaatgtctatggatgcttttcagaaaaagttttatgagaaagatttgttggatcaagagaaagaaagagaagaactacttcttttgsaaatggaacaattagagaaagaaaagcaacagaatgatggaaggcccatgagtgataaaatgtttgaaaagaaacgtagagacactaagacaccaacgcaaagtctgcccaagaacatccccatttctgttcctggaccctcttctgtcaccccatcgacaagtaaagaaatcaagaaatccaaactgattcgaagccagtcttttaataatcaagcttttcatgcaaaatatggcaacttagagaaatgtgctagtaaaagttctacaacaggatatacaacttctgtctcagggttaggaaagacttctgtgctttcactagctgatgattcattccggactcgtaatgccagtagcgttccatcttccttttctcctaatactcccttaccgagtacttcccgtgggacaggtaactcagttgaccccaagagcagtggaagtaaagatacacaaccacggaaggctaccttgtaaaaaatccagaaaatccaatccttaaatcaactgcttgatgaaggaggcaaaacaaaggcagcaggagataatgtgattggtacacaaaagctaaagcagtggctggggctttgtttttaaattttgggtttttttttttgttgttgttaatgagcagaaagagagacataatgacagctgatgttaaacttttcatatttcaaattagattccctaggaggtataatatatatttcttgagtaataatgtggttacggaattccaatgttatagtgaagtgtaatgaaaaacatctctaggaatgtgctttaaccactgctgcaaaagagacaagtctgcatttatttgtgcaggaaaccagccatttaattgttctagagttttagcatttaaaaatcgtatgaaagtctacatcagctgaattgtcctagcttgataagcacttggagggggacttggaaggtgagaaagatactgcattttctcatgagtctccaagcccacttgaaaagtcacactgaaaggatgcaaatagccgtctgcgattttggcggccctccggattgtggtgacaatatgttgtacccggacattcccaaatttaaatttggcartgaaaattccacaaagatttctggtaactttgagctataaataccttaaaaataatagattgatgattttctttatttcctagagaatttattttataaatactttgtttacattttagattgtacttgtctttatttaaaatgatgaatctagtctgaatcagctgttattccaagctatcatgcttaagctatgtcaacagcatttatttgtactaatgctaatatttccatcaaaatttgcctgtggaatatatacagttcttaattttaaactgtcagttcttgagatataccgtgtgaagctattgtcagcttctctatttcaaaatgcaatcagcatataactatattgatattagaag

SEQ ID NO: 318 - DNA, 3872 bp, Homo sapiens
cgccgggccgtgctcttgctcccgccgcctggcagcctcacgctcggctccagcggccaagagccggagaaagtcctgctggtgggcggccgcggggctgagggcgtccggcatcccggggccgctccggcccgggcggcgagagtgcccggcggtccatgcatccgccgccgcccgccgccgcgatggatttcagtcagaacagcctgttcggttacatggaggacctgcaggagctcaccatcatcgagaggccggtccgccggagcctcaagacaccggaagaaatagaaagattgacrgtcgatgaagacctcagtgatattgaaagggctgtttatctgctcagtkctggtcaagatgtccaaggaacaagtgtgattgcaaatctcccatttttgatgcgacagaatcccactgagacgcttcggagagtgttgccaaaagtcagagaagccctgcatgttgcaggagtggaaatgcagttaacggctgcgatgtcatttctgaccattctgcaggacgaatcagtgtcaattcatgcatatacccactcattcctccaagtcattctcctgcatctggagcacagggacacaggtgtcagcaatgcatggctggaaactcttctgtctgttatagaagtattgccaaaagaaaccctacggcatgagattttgaatccacttgtttccaaggcacaactttcccaaacagtccagtctcgtttagttagttgtaaaattttaggaaaattgaccaacaaatttgatgcccacaccattaagcgagaaatacttcctctggtaaaatcactctgtcaagatgtagaatatgaagttcgatcttgtatgtgtcggcaattagaaaatatagcccagggcattgggacagaacttacaaaaagtgtggtgctccctgaattaatagaactttctagggatgaaggcagcagtgtacgacttgcagcttttgaaactttggttaatctgcttgatatatttgatacagatgacagaagtcaaactatacttcccttagtgaaatcattttgtgaaaaatctttcaaagcagatgaatcaattcttatttctttatctttccatttaggaaaactatgtcatggactatatggaattttcactccagatcagcacttgagatttttggaattttataagaaactttgtacattgggtttgcaacaagaaaatggacacaatgaaaaccagattccaccccaaatcctagagcaggagaagaaatatatttcagtacggaagaactgtgcttataactttccggccatgattgtttttgttgatcctaaaaacttccacatggaactctattctacattcttctgcctttgccatgaccctgaagtaccagtcagatacactattgctatttgcttttatgaagtatctaagcttctgaattctggagtatatttaatacataaagaactaataacattattacaagatgaatcactggaggtactagatgctcttatagatcatcttccagaaatcttggaacttatgtctactggtggagaaagcagtgttcaagaaaataagttatcttctctgcctgacttgattccagcactcacagctgctgaacagcgagctgcagcctctttaaaatggagaactcatgagaagctacttcagaaatatgcctgcctgccacatgtcatatcaagcgatcagatttattaccgtttcttacaaagaatgttcacaatcatgatgacaaataatgttttacctgtccaaaaggcggcttcacgaactctatgcatttttctgcgttataatcgtaaacaagaacagagacatgaggtcattcaaaaattaattgaacaattgggccaaggaaaaagttactggaatagacttcgatttttggatacctgtgaatttattatagagatattttcaaaatcatttttctgtaaatatttctttctacctgctattgaactgacacatgatccagtagcaaatgtgagaatgaaactttgctacctgttgcccaaagtgaaatctactctgaagattcctgctgataagcatctacttcagcagttagaaatgtgtgtgaggaaactcctgtgtcaagaaaaagataaagatgttctggctattgtaaaaagaactgtattagagttggacagaatggaaatgtctatggatgcttttcagaaaaagttttatgagaaagatttgttggatcaagagaaagaaagagaagaactacttcttttgsaaatggaacaattagagaaagaaaagcaacagaatgatggaaggcccatgagtgataaaatgtttgaaaagaaacgtagagacactaagacaccaacgcaaagtctgcccaagaacatccccatttctgttcctggaccctcttctgtcaccccatcgacaagtaaagaaatcaagaaatccaaactgattcgaagccagtcttttaataatcaagcttttcatgcaaaatatggcaacttagagaaatgtgctagtaaaagttctacaacaggatatacaacttctgtctcagggttaggaaagacttctgtgctttcactagctgatgattcattccggactcgtaatgccagtagcgttccatcttccttttctcctaatactcccttaccgagtacttcccgtgggacaggtaactcagttgaccccaagagcagtggaagtaaagatacacaaccacggaaggctaccttaaaatccagaaaatccaatccttaaatcaactgcttgatgaaggaggcaaaacaaaggcagcaggagataatgtgattggtacacaaaagctaaagcagtggctggggctttgtttttaaattttgggtttttttttttgttgttgttaatgagcagaaagagagacataatgacagctgatgttaaacttttcatatttcaaattagattccctaggaggtataatatatatttcttgagtaataatgtggttacggaattccaatgttatagtgaagtgtaatgaaaaacatctctaggaatgtgctttaaccactgctgcaaaagagacaagtctgcatttatttgtgcaggaaaccagccatttaattgttctagagttttagcatttaaaaatcgtatgaaagtctacatcagctgaattgtcctagcttgataagcacttggagggggacttggaaggtgagaaagatactgcattttctcatgagtctccaagcccacttgaaaagtcacactgaaaggatgcaaatagccgtctgcgattttggcggccctccggattgtggtgacaatatgttgtacccggacattcccaaatttaaatttggcartgaaaattccacaaagatttctggtaactttgagctataaataccttaaaaataatagattgatgattttctttatttcctagagaatttattttataaatactttgtttacattttagattgtacttgtctttatttaaaatgatgaatctagtctgaatcagctgttattccaagctatcatgcttaagctatgtcaacagcatttatttgtactaatgctaatatttccatcaaaatttgcctgtggaatatatacagttcttaattttaaactgtcagttcttgagatataccgtgtgaagctattgtcagcttctctatttcaaaatgcaatcagcatataactatattgatattagaagatatttgttttttaaaatatattgatgtatgataaagatgatctaatttgtgaatgcatatgtatgtgtggttactttttataatgtgaaataatgaataatgaatttactcaaaataaaacataggttaatgagat

SEQ ID NO: 319 - DNA, 3418 bp, Homo sapiens
aaagggagagggtgacttgtcccgggtcacagagctgaaagggcaggtacaacaggtgacatgccgggctgtctgagtttatgagggcccagtcttgtgtctgccgggcaatgagcaaggctccttcctgtccaagctccccgcccctccccagcctactgcctccacccgaagtctacttcctgggtgggcaggaactgggcactstgcccagggcatgcactgcctccacgcagcaaccctcagagtcctgagctgaaccaagaaggaggagggggtcgggcctccgaggaaggcctagcygctgctgctgccaggaattccaggttggaggggcggcaacctcctgccagccttcaggccactctcctgtgcctgccagaagagacagagcttgaggagagcttgaggagagcaggaaagggcggcagtaagtcttcagcatcaggcattttggggtgactcagtaaatggtagatcttgctaccagtggaacagccactaaggattctgcagtgagagcagagggccagctaagtggtactctcccagagactgtstgactcacgccaccccctccaccttggacacaggacgctgtggtttctgagccagcagcctcccccgttgcccctctggatccactgcttaaatacggacgaggacagggccctgtctcctcagcttcaggcaccaccactgacctgggacagtgaatcgacaatgccgtcttctgtctygtggggcatcctcctgctggcaggcctgtgctgcctggtccctgtctccctggctgaggatccccagggagatgctgcccagaagacagatacatccmaccatgatcaggatcacccaaccttcaacaagatcacccccaacctggctgagttcgccttcagcctatacygccagcyggcacaccagtccaacagcaccaatatcttcttctycccagtgagcatcgctacagcctttgcaatgctctccctggrgaycaaggctgacactcacgatgaaatcctggagggcctgaatttcaacctcayggagattccggaggctcagawccatgaaggcttccaggaactcctccrtaccctcaaccagccagacagccagctccagctgaccaccrgcaatggcytgttcctcagcgagggcctgaagctagtggataagtttttggaggatgttaaaaagttgtaccactcagaagccttcactgtcaacttcrgggacaccgaagaggccaagaaacagatcaacgattasgtggagaagggtactcaagggaaaattgtggatttggtcaaggagcttgacagagacacagtttttgctctggtgaattacatcttctttaaaggcaaatggagagaccctttgaagtcaaggacaccgaggaagaggacttccacgtggaccaggcyaccaccgtgawggtgcctatgatgaagygtttaggcatgtttaacatccagcactgtkagaagrtgtccagctgggtgctgctgatgaaatacctgggcaatgccacygccatcttcttcctgcctgawgaggggaaactacagcacctggawaatgaactcacccacgatatcatcaccaagttcctggaaaataagacagaaggtctgccagcttacatttacccaaactgtccattactggaacctatgatctgaagagwgtcctgggtcaactgggcatcactaaggtcttcagcaatggggctgacctctccggggtcacagaggaggcacccctgaagctctccaaggccgtgsataaggrtgtgctkaccstcgacgagaaarggactgaagctgctkgggccatgtttttagaggccatacccatktctatccccyccgaggtcaagttcaacaaaccyyttgtcttctyaatgattgamcaaaataccaagtctcccctcttcatgggaaaagtggtgaatcccmcmcaaaaataactkcctctygctcctcaacccctcccctccatccctggccccctccctggatgacattaaagaagggttgagctggtccctycctgcatgtgactgtaaatccctcccatgttttctctgagtctccctttgcctgctgaggctgtatgtgggctccaggtaacagtgctgtcttcgggccccctgaactgtgttcatggagcatctggctgggtaggcacatgcrgggcttgaatccaggggggactgaatcctcagcttacggacctgggcccatctgtttctggagggctccagtcttccttgtcctgtcttggkgtccccaagaaggaatcacaggggaggaaccagataccagccatgaccccaggctccaccaagcatcttcatgtccccctgctcatcccccactcccccccacccagagttgctcatcctgccagggctggctgtgcccaccccaaggctgccctcctgggggrcccagaactgcctgatcgtgccgtggcccagttttgtggcatctgcagcaacacaagagagaggacaatgtcctcctcttgacccgctgtcacctaaccagactcgggccctgcacctctcaggcacttctggaaaatgactgaggcagattcttcctgaagcccattctccatggggcaacaaggacacctattctgtccttgtccttccatcgctgccccagaaagcctcacatatctccgtttagaatcaggtcccttctccccagatgaagaggagggtctctgctttgttttctctatctcctcctcagacttgaccaggcccagcaggccccagaagaccattaccctatatcccttctcctccccygtcacatggccataggcctgctgatggctcaggaaggccattgcaaggactcctcagctatgggagaggaagcacatcacccattgacccccgcaacccctccctttcctcctytgagtcccgactggggccacatgcagcctgacttctttgtgcctgttgctgtccctgcagtcttcagagggccaccgcagctccagtgccacggcagraggctgttcctgaatagcccctgtggtaagggccaggagagtccttccatcctccaaggccctgctaaaggacacagcagccaggaagtcccctgggcccctagctgaaggacagcctgctccctccgtctctaccaggaatggccttgtcctarggaaggcactgccccatcccaaactaatctaggaatcactgtctaaccactcactgtcatgaatgtrtacttaaaggatgaggttgagtcataccaaatagtgatttcgasagttcaaaatggtgaaattagcaattctacatgattcagtctaatcaatggataccgactgtttcccacacaagtctcctgttctcttaagcttactcactgacagc

SEQ ID NO: 320 - DNA, 3122 bp, Homo sapiens
aaagggagagggtgacttgtcccgggtcacagagctgaaagggcaggtacaacaggtgacatgccgggctgtctgagtttatgagggcccagtcttgtgtctgccgggcaatgagcaaggctccttcctgtccaagctccccgcccctccccagcctactgcctccacccgaagtctacttcctgggtgggcaggaactgggcactstgcccagggcatgcactgcctccacgcagcaaccctcagagtcctgagctgaaccaagaaggaggagggggtcgggcctccgaggaaggcctagcygctgctgctgccaggaattccaggttggaggggcggcaacctcctgccagccttcaggccactctcctgtgcctgccagaagagacagagcttgaggagagcttgaggagagcaggaaaggacaatgccgtcttctgtctygtggggcatcctcctgctggcaggcctgtgctgcctggtccctgtctccctggctgaggatccccagggagatgctgcccagaagacagatacatccmaccatgatcaggatcacccaaccttcaacaagatcacccccaacctggctgagttcgccttcagcctatacygccagcyggcacaccagtccaacagcaccaatatcttcttctycccagtgagcatcgctacagcctttgcaatgctctccctggrgaycaaggctgacactcacgatgaaatcctggagggcctgaatttcaacctcayggagattccggaggctcagawccatgaaggcttccaggaactcctccrtaccctcaaccagccagacagccagctccagctgaccaccrgcaatggcytgttcctcagcgagggcctgaagctagtggataagtttttggaggatgttaaaaagttgtaccactcagaagccttcactgtcaacttcrgggacaccgaagaggccaagaaacagatcaacgattasgtggagaagggtactcaagggaaaattgtggatttggtcaaggagcttgacagagacacagtttttgctctggtgaattacatcttctttaaaggcaaatggagagaccctttgaagtcaaggacaccgaggaagaggacttccacgtggaccaggcyaccaccgtgawggtgcctatgatgaagygtttaggcatgtttaacatccagcactgtkagaagrtgtccagctgggtgctgctgatgaaatacctgggcaatgccacygccatcttcttcctgcctgawgaggggaaactacagcacctggawaatgaactcacccacgatatcatcaccaagttcctggaaaataagacagaaggtctgccagcttacatttacccaaactgtccattactggaacctatgatctgaagagwgtcctgggtcaactgggcatcactaaggtcttcagcaatggggctgacctctccggggtcacagaggaggcacccctgaagctctccaaggccgtgsataaggrtgtgctkaccstcgacgagaaarggactgaagctgctkgggccatgtttttagaggccatacccatktctatccccyccgaggtcaagttcaacaaaccyyttgtcttctyaatgattgamcaaaataccaagtctcccctcttcatgggaaaagtggtgaatcccmcmcaaaaataactkcctctygctcctcaacccctcccctccatccctggccccctccctggatgacattaaagaagggttgagctggtccctycctgcatgtgactgtaaatccctcccatgttttctctgagtctccctttgcctgctgaggctgtatgtgggctccaggtaacagtgctgtcttcgggccccctgaactgtgttcatggagcatctggctgggtaggcacatgcrgggcttgaatccaggggggactgaatcctcagcttacggacctgggcccatctgtttctggagggctccagtcttccttgtcctgtcttggkgtccccaagaaggaatcacaggggaggaaccagataccagccatgaccccaggctccaccaagcatcttcatgtccccctgctcatcccccactcccccccacccagagttgctcatcctgccagggctggctgtgcccaccccaaggctgccctcctgggggrcccagaactgcctgatcgtgccgtggcccagttttgtggcatctgcagcaacacaagagagaggacaatgtcctcctcttgacccgctgtcacctaaccagactcgggccctgcacctctcaggcacttctggaaaatgactgaggcagattcttcctgaagcccattctccatggggcaacaaggacacctattctgtccttgtccttccatcgctgccccagaaagcctcacatatctccgtttagaatcaggtcccttctccccagatgaagaggagggtctctgctttgttttctctatctcctcctcagacttgaccaggcccagcaggccccagaagaccattaccctatatcccttctcctccccygtcacatggccataggcctgctgatggctcaggaaggccattgcaaggactcctcagctatgggagaggaagcacatcacccattgacccccgcaacccctccctttcctcctytgagtcccgactggggccacatgcagcctgacttctttgtgcctgttgctgtccctgcagtcttcagagggccaccgcagctccagtgccacggcagraggctgttcctgaatagcccctgtggtaagggccaggagagtccttccatcctccaaggccctgctaaaggacacagcagccaggaagtcccctgggcccctagctgaaggacagcctgctccctccgtctctaccaggaatggccttgtcctarggaaggcactgccccatcccaaactaatctaggaatcactgtctaaccactcactgtcatgaatgtrtacttaaaggatgaggttgagtcataccaaatagtgatttcgasagttcaaaatggtgaaattagcaattctacatgattcagtctaatcaatggataccgactgtttcccacacaagtctcctgttctcttaagcttactcactgacagc

SEQ ID NO: 321 - DNA, 3077 bp, Homo sapiens
taagtgcagtggaagctgtacactgcccaggcaaagcgtccgggcagcgtaggcgggcgactcagatcccagccagtggacttagcccctgtttgctcctccgataactggggtgaccttggttaatattcaccagcagcctcccccgttgcccctctggatccactgcttaaatacggacgaggacagggccctgtctcctcagcttcaggcaccaccactgacctgggacagtgaatctgttactgatgtcggcaagtacttggcacaggctggtttaataatccctaggcayttycacgtggtgtcaatccctgatcactgggagtcatcatgtgccttgactcggggcctggcccccccatctctgtcttgcaggacaatgccgtcttctgtctygtggggcatcctcctgctggcaggcctgtgctgcctggtccctgtctccctggctgaggatccccagggagatgctgcccagaagacagatacatccmaccatgatcaggatcacccaaccttcaacaagatcacccccaacctggctgagttcgccttcagcctatacygccagcyggcacaccagtccaacagcaccaatatcttcttctycccagtgagcatcgctacagcctttgcaatgctctccctggrgaycaaggctgacactcacgatgaaatcctggagggcctgaatttcaacctcayggagattccggaggctcagawccatgaaggcttccaggaactcctccrtaccctcaaccagccagacagccagctccagctgaccaccrgcaatggcytgttcctcagcgagggcctgaagctagtggataagtttttggaggatgttaaaaagttgtaccactcagaagccttcactgtcaacttcrgggacaccgaagaggccaagaaacagatcaacgattasgtggagaagggtactcaagggaaaattgtggatttggtcaaggagcttgacagagacacagtttttgctctggtgaattacatcttctttaaaggcaaatggagagaccctttgaagtcaaggacaccgaggaagaggacttccacgtggaccaggcyaccaccgtgawggtgcctatgatgaagygtttaggcatgtttaacatccagcactgtkagaagrtgtccagctgggtgctgctgatgaaatacctgggcaatgccacygccatcttcttcctgcctgawgaggggaaactacagcacctggawaatgaactcacccacgatatcatcaccaagttcctggaaaataagacagaaggtctgccagcttacatttacccaaactgtccattactggaacctatgatctgaagagwgtcctgggtcaactgggcatcactaaggtcttcagcaatggggctgacctctccggggtcacagaggaggcacccctgaagctctccaaggccgtgsataaggrtgtgctkaccstcgacgagaaarggactgaagctgctkgggccatgtttttagaggccatacccatktctatccccyccgaggtcaagttcaacaaaccyyttgtcttctyaatgattgamcaaaataccaagtctcccctcttcatgggaaaagtggtgaatcccmcmcaaaaataactkcctctygctcctcaacccctcccctccatccctggccccctccctggatgacattaaagaagggttgagctggtccctycctgcatgtgactgtaaatccctcccatgttttctctgagtctccctttgcctgctgaggctgtatgtgggctccaggtaacagtgctgtcttcgggccccctgaactgtgttcatggagcatctggctgggtaggcacatgcrgggcttgaatccaggggggactgaatcctcagcttacggacctgggcccatctgtttctggagggctccagtcttccttgtcctgtcttggkgtccccaagaaggaatcacaggggaggaaccagataccagccatgaccccaggctccaccaagcatcttcatgtccccctgctcatcccccactcccccccacccagagttgctcatcctgccagggctggctgtgcccaccccaaggctgccctcctgggggrcccagaactgcctgatcgtgccgtggcccagttttgtggcatctgcagcaacacaagagagaggacaatgtcctcctcttgacccgctgtcacctaaccagactcgggccctgcacctctcaggcacttctggaaaatgactgaggcagattcttcctgaagcccattctccatggggcaacaaggacacctattctgtccttgtccttccatcgctgccccagaaagcctcacatatctccgtttagaatcaggtcccttctccccagatgaagaggagggtctctgctttgttttctctatctcctcctcagacttgaccaggcccagcaggccccagaagaccattaccctatatcccttctcctccccygtcacatggccataggcctgctgatggctcaggaaggccattgcaaggactcctcagctatgggagaggaagcacatcacccattgacccccgcaacccctccctttcctcctytgagtcccgactggggccacatgcagcctgacttctttgtgcctgttgctgtccctgcagtcttcagagggccaccgcagctccagtgccacggcagraggctgttcctgaatagcccctgtggtaagggccaggagagtccttccatcctccaaggccctgctaaaggacacagcagccaggaagtcccctgggcccctagctgaaggacagcctgctccctccgtctctaccaggaatggccttgtcctarggaaggcactgccccatcccaaactaatctaggaatcactgtctaaccactcactgtcatgaatgtrtacttaaaggatgaggttgagtcataccaaatagtgatttcgasagttcaaaatggtgaaattagcaattctacatgattcagtctaatcaatggataccgactgtttcccacacaagtctcctgttctcttaagcttactcactgacagc

SEQ ID NO: 322 - DNA, 3033 bp, Homo sapiens
taagtgcagtggaagctgtacactgcccaggcaaagcgtccgggcagcgtaggcgggcgactcagatcccagccagtggacttagcccctgtttgctcctccgataactggggtgaccttggttaatattcaccagcagcctcccccgttgcccctctggatccactgcttaaatacggacgaggacagggccctgtctcctcagcttcaggcaccaccactgacctgggacagtgaatccacaaacccctgctttcaaggagagatgagcgtctctaaagcccctgacagcaagagcccagaactgggacaccattagtgacccagacggcaggacaatgccgtcttctgtctygtggggcatcctcctgctggcaggcctgtgctgcctggtccctgtctccctggctgaggatccccagggagatgctgcccagaagacagatacatccmaccatgatcaggatcacccaaccttcaacaagatcacccccaacctggctgagttcgccttcagcctatacygccagcyggcacaccagtccaacagcaccaatatcttcttctycccagtgagcatcgctacagcctttgcaatgctctccctggrgaycaaggctgacactcacgatgaaatcctggagggcctgaatttcaacctcayggagattccggaggctcagawccatgaaggcttccaggaactcctccrtaccctcaaccagccagacagccagctccagctgaccaccrgcaatggcytgttcctcagcgagggcctgaagctagtggataagtttttggaggatgttaaaaagttgtaccactcagaagccttcactgtcaacttcrgggacaccgaagaggccaagaaacagatcaacgattasgtggagaagggtactcaagggaaaattgtggatttggtcaaggagcttgacagagacacagtttttgctctggtgaattacatcttctttaaaggcaaatggagagaccctttgaagtcaaggacaccgaggaagaggacttccacgtggaccaggcyaccaccgtgawggtgcctatgatgaagygtttaggcatgtttaacatccagcactgtkagaagrtgtccagctgggtgctgctgatgaaatacctgggcaatgccacygccatcttcttcctgcctgawgaggggaaactacagcacctggawaatgaactcacccacgatatcatcaccaagttcctggaaaataagacagaaggtctgccagcttacatttacccaaactgtccattactggaacctatgatctgaagagwgtcctgggtcaactgggcatcactaaggtcttcagcaatggggctgacctctccggggtcacagaggaggcacccctgaagctctccaaggccgtgsataaggrtgtgctkaccstcgacgagaaarggactgaagctgctkgggccatgtttttagaggccatacccatktctatccccyccgaggtcaagttcaacaaaccyyttgtcttctyaatgattgamcaaaataccaagtctcccctcttcatgggaaaagtggtgaatcccmcmcaaaaataactkcctctygctcctcaacccctcccctccatccctggccccctccctggatgacattaaagaagggttgagctggtccctycctgcatgtgactgtaaatccctcccatgttttctctgagtctccctttgcctgctgaggctgtatgtgggctccaggtaacagtgctgtcttcgggccccctgaactgtgttcatggagcatctggctgggtaggcacatgcrgggcttgaatccaggggggactgaatcctcagcttacggacctgggcccatctgtttctggagggctccagtcttccttgtcctgtcttggkgtccccaagaaggaatcacaggggaggaaccagataccagccatgaccccaggctccaccaagcatcttcatgtccccctgctcatcccccactcccccccacccagagttgctcatcctgccagggctggctgtgcccaccccaaggctgccctcctgggggrcccagaactgcctgatcgtgccgtggcccagttttgtggcatctgcagcaacacaagagagaggacaatgtcctcctcttgacccgctgtcacctaaccagactcgggccctgcacctctcaggcacttctggaaaatgactgaggcagattcttcctgaagcccattctccatggggcaacaaggacacctattctgtccttgtccttccatcgctgccccagaaagcctcacatatctccgtttagaatcaggtcccttctccccagatgaagaggagggtctctgctttgttttctctatctcctcctcagacttgaccaggcccagcaggccccagaagaccattaccctatatcccttctcctccccygtcacatggccataggcctgctgatggctcaggaaggccattgcaaggactcctcagctatgggagaggaagcacatcacccattgacccccgcaacccctccctttcctcctytgagtcccgactggggccacatgcagcctgacttctttgtgcctgttgctgtccctgcagtcttcagagggccaccgcagctccagtgccacggcagraggctgttcctgaatagcccctgtggtaagggccaggagagtccttccatcctccaaggccctgctaaaggacacagcagccaggaagtcccctgggcccctagctgaaggacagcctgctccctccgtctctaccaggaatggccttgtcctarggaaggcactgccccatcccaaactaatctaggaatcactgtctaaccactcactgtcatgaatgtrtacttaaaggatgaggttgagtcataccaaatagtgatttcgasagttcaaaatggtgaaattagcaattctacatgattcagtctaatcaatggataccgactgtttcccacacaagtctcctgttctcttaagcttactcactgacagc

SEQ ID NO: 323 - DNA, 2939 bp, Homo sapiens
taagtgcagtggaagctgtacactgcccaggcaaagcgtccgggcagcgtaggcgggcgactcagatcccagccagtggacttagcccctgtttgctcctccgataactggggtgaccttggttaatattcaccagcagcctcccccgttgcccctctggatccactgcttaaatacggacgaggacagggccctgtctcctcagcttcaggcaccaccactgacctgggacagtgaatcgacaatgccgtcttctgtctygtggggcatcctcctgctggcaggcctgtgctgcctggtccctgtctccctggctgaggatccccagggagatgctgcccagaagacagatacatccmaccatgatcaggatcacccaaccttcaacaagatcacccccaacctggctgagttcgccttcagcctatacygccagcyggcacaccagtccaacagcaccaatatcttcttctycccagtgagcatcgctacagcctttgcaatgctctccctggrgaycaaggctgacactcacgatgaaatcctggagggcctgaatttcaacctcayggagattccggaggctcagawccatgaaggcttccaggaactcctccrtaccctcaaccagccagacagccagctccagctgaccaccrgcaatggcytgttcctcagcgagggcctgaagctagtggataagtttttggaggatgttaaaaagttgtaccactcagaagccttcactgtcaacttcrgggacaccgaagaggccaagaaacagatcaacgattasgtggagaagggtactcaagggaaaattgtggatttggtcaaggagcttgacagagacacagtttttgctctggtgaattacatcttctttaaaggcaaatggagagaccctttgaagtcaaggacaccgaggaagaggacttccacgtggaccaggcyaccaccgtgawggtgcctatgatgaagygtttaggcatgtttaacatccagcactgtkagaagrtgtccagctgggtgctgctgatgaaatacctgggcaatgccacygccatcttcttcctgcctgawgaggggaaactacagcacctggawaatgaactcacccacgatatcatcaccaagttcctggaaaataagacagaaggtctgccagcttacatttacccaaactgtccattactggaacctatgatctgaagagwgtcctgggtcaactgggcatcactaaggtcttcagcaatggggctgacctctccggggtcacagaggaggcacccctgaagctctccaaggccgtgsataaggrtgtgctkaccstcgacgagaaarggactgaagctgctkgggccatgtttttagaggccatacccatktctatccccyccgaggtcaagttcaacaaaccyyttgtcttctyaatgattgamcaaaataccaagtctcccctcttcatgggaaaagtggtgaatcccmcmcaaaaataactkcctctygctcctcaacccctcccctccatccctggccccctccctggatgacattaaagaagggttgagctggtccctycctgcatgtgactgtaaatccctcccatgttttctctgagtctccctttgcctgctgaggctgtatgtgggctccaggtaacagtgctgtcttcgggccccctgaactgtgttcatggagcatctggctgggtaggcacatgcrgggcttgaatccaggggggactgaatcctcagcttacggacctgggcccatctgtttctggagggctccagtcttccttgtcctgtcttggkgtccccaagaaggaatcacaggggaggaaccagataccagccatgaccccaggctccaccaagcatcttcatgtccccctgctcatcccccactcccccccacccagagttgctcatcctgccagggctggctgtgcccaccccaaggctgccctcctgggggrcccagaactgcctgatcgtgccgtggcccagttttgtggcatctgcagcaacacaagagagaggacaatgtcctcctcttgacccgctgtcacctaaccagactcgggccctgcacctctcaggcacttctggaaaatgactgaggcagattcttcctgaagcccattctccatggggcaacaaggacacctattctgtccttgtccttccatcgctgccccagaaagcctcacatatctccgtttagaatcaggtcccttctccccagatgaagaggagggtctctgctttgttttctctatctcctcctcagacttgaccaggcccagcaggccccagaagaccattaccctatatcccttctcctccccygtcacatggccataggcctgctgatggctcaggaaggccattgcaaggactcctcagctatgggagaggaagcacatcacccattgacccccgcaacccctccctttcctcctytgagtcccgactggggccacatgcagcctgacttctttgtgcctgttgctgtccctgcagtcttcagagggccaccgcagctccagtgccacggcagraggctgttcctgaatagcccctgtggtaagggccaggagagtccttccatcctccaaggccctgctaaaggacacagcagccaggaagtcccctgggcccctagctgaaggacagcctgctccctccgtctctaccaggaatggccttgtcctarggaaggcactgccccatcccaaactaatctaggaatcactgtctaaccactcactgtcatgaatgtrtacttaaaggatgaggttgagtcataccaaatagtgatttcgasagttcaaaatggtgaaattagcaattctacatgattcagtctaatcaatggataccgactgtttcccacacaagtctcctgttctcttaagcttactcactgacagc

SEQ ID NO: 324 - DNA, 3436 bp, Homo sapiens
aaagggagagggtgacttgtcccgggtcacagagctgaaagggcaggtacaacaggtgacatgccgggctgtctgagtttatgagggcccagtcttgtgtctgccgggcaatgagcaaggctccttcctgtccaagctccccgcccctccccagcctactgcctccacccgaagtctacttcctgggtgggcaggaactgggcactstgcccagggcatgcactgcctccacgcagcaaccctcagagtcctgagctgaaccaagaaggaggagggggtcgggcctccgaggaaggcctagcygctgctgctgccaggaattccaggttggaggggcggcaacctcctgccagccttcaggccactctcctgtgcctgccagaagagacagagcttgaggagagcttgaggagagcaggaaagggcggcagtaagtcttcagcatcaggcattttggggtgactcagtaaatggtagatcttgctaccagtggaacagccactaaggattctgcagtgagagcagagggccagctaagtggtactctcccagagactgtstgactcacgccaccccctccaccttggacacaggacgctgtggtttctgagccaggtacaatgactcctttcgcagcctcccccgttgcccctctggatccactgcttaaatacggacgaggacagggccctgtctcctcagcttcaggcaccaccactgacctgggacagtgaatcgacaatgccgtcttctgtctygtggggcatcctcctgctggcaggcctgtgctgcctggtccctgtctccctggctgaggatccccagggagatgctgcccagaagacagatacatccmaccatgatcaggatcacccaaccttcaacaagatcacccccaacctggctgagttcgccttcagcctatacygccagcyggcacaccagtccaacagcaccaatatcttcttctycccagtgagcatcgctacagcctttgcaatgctctccctggrgaycaaggctgacactcacgatgaaatcctggagggcctgaatttcaacctcayggagattccggaggctcagawccatgaaggcttccaggaactcctccrtaccctcaaccagccagacagccagctccagctgaccaccrgcaatggcytgttcctcagcgagggcctgaagctagtggataagtttttggaggatgttaaaaagttgtaccactcagaagccttcactgtcaacttcrgggacaccgaagaggccaagaaacagatcaacgattasgtggagaagggtactcaagggaaaattgtggatttggtcaaggagcttgacagagacacagtttttgctctggtgaattacatcttctttaaaggcaaatggagagaccctttgaagtcaaggacaccgaggaagaggacttccacgtggaccaggcyaccaccgtgawggtgcctatgatgaagygtttaggcatgtttaacatccagcactgtkagaagrtgtccagctgggtgctgctgatgaaatacctgggcaatgccacygccatcttcttcctgcctgawgaggggaaactacagcacctggawaatgaactcacccacgatatcatcaccaagttcctggaaaataagacagaaggtctgccagcttacatttacccaaactgtccattactggaacctatgatctgaagagwgtcctgggtcaactgggcatcactaaggtcttcagcaatggggctgacctctccggggtcacagaggaggcacccctgaagctctccaaggccgtgsataaggrtgtgctkaccstcgacgagaaarggactgaagctgctkgggccatgtttttagaggccatacccatktctatccccyccgaggtcaagttcaacaaaccyyttgtcttctyaatgattgamcaaaataccaagtctcccctcttcatgggaaaagtggtgaatcccmcmcaaaaataactkcctctygctcctcaacccctcccctccatccctggccccctccctggatgacattaaagaagggttgagctggtccctycctgcatgtgactgtaaatccctcccatgttttctctgagtctccctttgcctgctgaggctgtatgtgggctccaggtaacagtgctgtcttcgggccccctgaactgtgttcatggagcatctggctgggtaggcacatgcrgggcttgaatccaggggggactgaatcctcagcttacggacctgggcccatctgtttctggagggctccagtcttccttgtcctgtcttggkgtccccaagaaggaatcacaggggaggaaccagataccagccatgaccccaggctccaccaagcatcttcatgtccccctgctcatcccccactcccccccacccagagttgctcatcctgccagggctggctgtgcccaccccaaggctgccctcctgggggrcccagaactgcctgatcgtgccgtggcccagttttgtggcatctgcagcaacacaagagagaggacaatgtcctcctcttgacccgctgtcacctaaccagactcgggccctgcacctctcaggcacttctggaaaatgactgaggcagattcttcctgaagcccattctccatggggcaacaaggacacctattctgtccttgtccttccatcgctgccccagaaagcctcacatatctccgtttagaatcaggtcccttctccccagatgaagaggagggtctctgctttgttttctctatctcctcctcagacttgaccaggcccagcaggccccagaagaccattaccctatatcccttctcctccccygtcacatggccataggcctgctgatggctcaggaaggccattgcaaggactcctcagctatgggagaggaagcacatcacccattgacccccgcaacccctccctttcctcctytgagtcccgactggggccacatgcagcctgacttctttgtgcctgttgctgtccctgcagtcttcagagggccaccgcagctccagtgccacggcagraggctgttcctgaatagcccctgtggtaagggccaggagagtccttccatcctccaaggccctgctaaaggacacagcagccaggaagtcccctgggcccctagctgaaggacagcctgctccctccgtctctaccaggaatggccttgtcctarggaaggcactgccccatcccaaactaatctaggaatcactgtctaaccactcactgtcatgaatgtrtacttaaaggatgaggttgagtcataccaaatagtgatttcgasagttcaaaatggtgaaattagcaattctacatgattcagtctaatcaatggataccgactgtttcccacacaagtctcctgttctcttaagcttactcactgacagc

SEQ ID NO: 325 - DNA, 3226 bp, Homo sapiens
aaagggagagggtgacttgtcccgggtcacagagctgaaagggcaggtacaacaggtgacatgccgggctgtctgagtttatgagggcccagtcttgtgtctgccgggcaatgagcaaggctccttcctgtccaagctccccgcccctccccagcctactgcctccacccgaagtctacttcctgggtgggcaggaactgggcactstgcccagggcatgcactgcctccacgcagcaaccctcagagtcctgagctgaaccaagaaggaggagggggtcgggcctccgaggaaggcctagcygctgctgctgccaggaattccaggttggaggggcggcaacctcctgccagccttcaggccactctcctgtgcctgccagaagagacagagcttgaggagagcttgaggagagcaggaaagcagcctcccccgttgcccctctggatccactgcttaaatacggacgaggacagggccctgtctcctcagcttcaggcaccaccactgacctgggacagtgaatcgacaatgccgtcttctgtctygtggggcatcctcctgctggcaggcctgtgctgcctggtccctgtctccctggctgaggatccccagggagatgctgcccagaagacagatacatccmaccatgatcaggatcacccaaccttcaacaagatcacccccaacctggctgagttcgccttcagcctatacygccagcyggcacaccagtccaacagcaccaatatcttcttctycccagtgagcatcgctacagcctttgcaatgctctccctggrgaycaaggctgacactcacgatgaaatcctggagggcctgaatttcaacctcayggagattccggaggctcagawccatgaaggcttccaggaactcctccrtaccctcaaccagccagacagccagctccagctgaccaccrgcaatggcytgttcctcagcgagggcctgaagctagtggataagtttttggaggatgttaaaaagttgtaccactcagaagccttcactgtcaacttcrgggacaccgaagaggccaagaaacagatcaacgattasgtggagaagggtactcaagggaaaattgtggatttggtcaaggagcttgacagagacacagtttttgctctggtgaattacatcttctttaaaggcaaatggagagaccctttgaagtcaaggacaccgaggaagaggacttccacgtggaccaggcyaccaccgtgawggtgcctatgatgaagygtttaggcatgtttaacatccagcactgtkagaagrtgtccagctgggtgctgctgatgaaatacctgggcaatgccacygccatcttcttcctgcctgawgaggggaaactacagcacctggawaatgaactcacccacgatatcatcaccaagttcctggaaaataagacagaaggtctgccagcttacatttacccaaactgtccattactggaacctatgatctgaagagwgtcctgggtcaactgggcatcactaaggtcttcagcaatggggctgacctctccggggtcacagaggaggcacccctgaagctctccaaggccgtgsataaggrtgtgctkaccstcgacgagaaarggactgaagctgctkgggccatgtttttagaggccatacccatktctatccccyccgaggtcaagttcaacaaaccyyttgtcttctyaatgattgamcaaaataccaagtctcccctcttcatgggaaaagtggtgaatcccmcmcaaaaataactkcctctygctcctcaacccctcccctccatccctggccccctccctggatgacattaaagaagggttgagctggtccctycctgcatgtgactgtaaatccctcccatgttttctctgagtctccctttgcctgctgaggctgtatgtgggctccaggtaacagtgctgtcttcgggccccctgaactgtgttcatggagcatctggctgggtaggcacatgcrgggcttgaatccaggggggactgaatcctcagcttacggacctgggcccatctgtttctggagggctccagtcttccttgtcctgtcttggkgtccccaagaaggaatcacaggggaggaaccagataccagccatgaccccaggctccaccaagcatcttcatgtccccctgctcatcccccactcccccccacccagagttgctcatcctgccagggctggctgtgcccaccccaaggctgccctcctgggggrcccagaactgcctgatcgtgccgtggcccagttttgtggcatctgcagcaacacaagagagaggacaatgtcctcctcttgacccgctgtcacctaaccagactcgggccctgcacctctcaggcacttctggaaaatgactgaggcagattcttcctgaagcccattctccatggggcaacaaggacacctattctgtccttgtccttccatcgctgccccagaaagcctcacatatctccgtttagaatcaggtcccttctccccagatgaagaggagggtctctgctttgttttctctatctcctcctcagacttgaccaggcccagcaggccccagaagaccattaccctatatcccttctcctccccygtcacatggccataggcctgctgatggctcaggaaggccattgcaaggactcctcagctatgggagaggaagcacatcacccattgacccccgcaacccctccctttcctcctytgagtcccgactggggccacatgcagcctgacttctttgtgcctgttgctgtccctgcagtcttcagagggccaccgcagctccagtgccacggcagraggctgttcctgaatagcccctgtggtaagggccaggagagtccttccatcctccaaggccctgctaaaggacacagcagccaggaagtcccctgggcccctagctgaaggacagcctgctccctccgtctctaccaggaatggccttgtcctarggaaggcactgccccatcccaaactaatctaggaatcactgtctaaccactcactgtcatgaatgtrtacttaaaggatgaggttgagtcataccaaatagtgatttcgasagttcaaaatggtgaaattagcaattctacatgattcagtctaatcaatggataccgactgtttcccacacaagtctcctgttctcttaagcttactcactgacagc

SEQ ID NO: 326 - DNA, 2379 bp, Homo sapiens
cgccctccccgcctgttcccgccctgtgctgaggctgcgcagtcggtgccatcttctacgcccctgggagcrttgtggctgctgtttccttcggctttcctcctcctgctccaccatgtggagccgacggcagggccgcctcaggcccacggtctgcggggtggaggagctacggcgccgccggcgggagcgggagcactgcggaaggcgcggagggagcagcagctggtcagcaagaggctgctgagaaacgacgccccagaggaagctggagagggatgtgtggctgcgatcctcggggaaaccgaggtgcagcagttcctgcggcaagcccagcgggggacagaggaaaaggagagagagggggctctggtcagccttcgtsgaggcttgcagcaccctgaaacacagcaaaccttsatccggctggagggcagcatgcggaccctggtygggctcctgaccagcaaccaggccctgctgcagcttgaggcggctcggtgcctgcatgagctctctcactccgagcagtccactgttgctgaggcctgcctgccagccacttcttacctcctcacctacctctccagtcacagctcagacttcatagagctgtgtctgtatacactgggtaacctgatcgtggagagtgaggctgtgagaaggcagctcctgccacagggcattgttccagccttggctgcctgcatccagtccccccatgtggctgtgctggaagctctcggatatgccttgtcccagcttctacaggctgaggaagctccagagaagatcattccctccatcttggcctccactctccctcagcacatgctacaaatgttgcaacctggcccaaagctcaaccctggggtcgctgtggagtttgcctggtgccttcattacatcatctgcagccaggtcagcaatcctctgctcattrgccatggggctctgtctactctggggttgctgctgttggacttggctggggctgtccagaaaascgaggatgcaggactggagctgctggcatgccccgtgcttcgatgtctaagcaacctgctaactgaggcagcagtggagactgtgggagggcaaatgcagctcagagatgagcgtgttgtggcagccttatttatccttctgcagttctttttccagaaacagcccagtctgctccctgagggcctttggctcctcaacaacctcactgcaaacagtcctagtttctgtacctccttgctctccctggatctgattgagcctctcttacagctgttgccagtatctaacgtggtgagcgtaatggtgctcacagttctgtgcaatgttgcagaaaagggtcctgcttactgccagcggctrtggccagggcccctgcttcccgccttgctgcacacactagccttttctgacactraagtagtaggccagagtttggagctgctgcatctgctgttcctgtatcagccagaggctgttcaggtcttcctgcagcagtcagggctgcaagccctggaaaggcatcaggaagaggcccagctccaggatcgtgtgtatgctctccagcagacagctcttcaagggtgatcttgtttctcaatgtcactcattcccctctctcttaacatcaagcttgtttgtccagtagagcctttggagatttaggaccataatgaggtctcatgttctctgctcccacacctaagccaagacctttgggtcccagctcctccccttccactcagcactatccaggcaggaggaccaaaagggactcagtgtggtctacttactctggggccctagaatccctgmccccccgccacccttcatgtttgcttcagcagctggtagcttttgatgagacagaataaagttttatttttatattaagctactttgcctcagtggttgcacagtaaggggtagagggtagatgaggacaagaacaccctgagaaagtattttacagcacaagctttatgaggaataggagaacacatttttttcacattatactaagtccagcagagcccaggctctggggctgttgctcttaatcctcagtggaggcttcaggctttaccacttagaacgttctccagggctctggttacctgatcagcactgaagttgttcaaagggacattcgtctcttggccaaatgctgaagagagagagggaggtgtctttaactattctgcaccctggaggctaccaaagtaaaataaaagatctttgtctttatcttagtcttgttaagacaggaagagtattaaagagatatgatcaaaatacatttggtatgcctagaattaatacaataggtctcaaacacatctaggaagcccaagtccaaatagaattttggct

SEQ ID NO: 327 - DNA, 2381 bp, Homo sapiens
tgctgaggctgcgcagtcggtgccatcttctacgcccctgggagcrttgtggctgctgtttccttcggctttcctcctcctgctccaccatgtggagccgacggcagggccgcctcaggcccacggtctgcggggtggaggagctacggcgccgccggcgggagcgggaggcagcactgcggaaggcgcggagggagcagcagctggtcagcaagaggctgctgagaaacgacgccccagaggaagctggagagggatgtgtggctgcgatcctcggggaaaccgaggtgcagcagttcctgcggcaagcccagcgggggacagaggaaaaggagagagagggggctctggtcagccttcgtsgaggcttgcagcaccctgaaacacagcaaaccttsatccggctggagggcagcatgcggaccctggtygggctcctgaccagcaaccaggccctgctgcagcttgaggcggctcggtgcctgcatgagctctctcactccgagcagtccactgttgctgaggcctgcctgccagccacttcttacctcctcacctacctctccagtcacagctcagacttcatacctggcwtgaaacaggccaagcccagtgcttttgttgcctgttctcaggagctgtgtctgtatacactgggtaacctgatcgtggagagtgaggctgtgagaaggcagctcctgccacagggcattgttccagccttggctgcctgcatccagggtttggyaagaaccactggcatcttcgtggttcctacttacagccctgcttctgccagcagctccatcttggcctccactctccctcagcacatgctacaaatgttgcaacctggcccaaagctcaaccctggggtcgctgtggagtttgcctggtgccttcattacatcatctgcagccaggtcagcaatcctctgctcattrgccatggggctctgtctactctggggttgctgctgttggacttggctggggctgtccagaaaascgaggatgcaggactggagctgctggcatgccccgtgcttcgatgtctaagcaacctgctaactgaggcagcagtggagactgtgggagggcaaatgcagctcagagatgagcgtgttgtggcagccttatttatccttctgcagttctttttccagaaacagcccagtctgctccctgagggcctttggctcctcaacaacctcactgcaaacagtcctagtttctgtacctccttgctctccctggatctgattgagcctctcttacagctgttgccagtatctaacgtggtgagcgtaatggtgctcacagttctgtgcaatgttgcagaaaagggtcctgcttactgccagcggctrtggccagggcccctgcttcccgccttgctgcacacactagccttttctgacactraagtagtaggccagagtttggagctgctgcatctgctgttcctgtatcagccagaggctgttcaggtcttcctgcagcagtcagggctgcaagccctggaaaggcatcaggaagaggcccagctccaggatcgtgtgtatgctctccagcagacagctcttcaagggtgatcttgtttctcaatgtcactcattcccctctctcttaacatcaagcttgtttgtccagtagagcctttggagatttaggaccataatgaggtctcatgttctctgctcccacacctaagccaagacctttgggtcccagctcctccccttccactcagcactatccaggcaggaggaccaaaagggactcagtgtggtctacttactctggggccctagaatccctgmccccccgccacccttcatgtttgcttcagcagctggtagcttttgatgagacagaataaagttttatttttatattaagctactttgcctcagtggttgcacagtaaggggtagagggtagatgaggacaagaacaccctgagaaagtattttacagcacaagctttatgaggaataggagaacacatttttttcacattatactaagtccagcagagcccaggctctggggctgttgctcttaatcctcagtggaggcttcaggctttaccacttagaacgttctccagggctctggttacctgatcagcactgaagttgttcaaagggacattcgtctcttggccaaatgctgaagagagagagggaggtgtctttaactattctgcaccctggaggctaccaaagtaaaataaaagatctttgtctttatcttagtcttgttaagacaggaagagtattaaagagatatgatcaaaatacatttggtatgcctagaattaatacaataggtctcaaacacatctaggaagcccaagtccaaatagaattttggct

SEQ ID NO: 328 - DNA, 1819 bp, Homo sapiens
ttcctttgctcctccccacatgctccatctactttggttaggtagctccagcctctgccctgtgccaaggggctgaaagtctctgaagacctgatgacccagcttccagtcagatccttaccctgtctacttccagtccccccatgtggctgtgctggaagctctcggatatgccttgtcccagcttctacaggctgaggaagctccagagaagatcattccccctgcttctgccagcagctccatcttggcctccactctccctcagcacatgctacaaatgttgcaacctggcccaaagctcaaccctggggtcgctgtggagtttgcctggtgccttcattacatcatctgcagccaggtcagcaatcctctgctcattrgccatggggctctgtctactctggggttgctgctgttggacttggctggggctgtccagaaaascgaggatgcaggactggagctgctggcatgccccgtgcttcgatgtctaagcaacctgctaactgaggcagcagtggagactgtgggagggcaaatgcagctcagagatgagcgtgttgtggcagccttatttatccttctgcagttctttttccagaaacagcccagtctgctccctgagggcctttggctcctcaacaacctcactgcaaacagtcctagtttctgtacctccttgctctccctggatctgattgagcctctcttacagctgttgccagtatctaacgtggtgagcgtaatggtgctcacagttctgtgcaatgttgcagaaaagggtcctgcttactgccagcggctrtggccagggcccctgcttcccgccttgctgcacacactagccttttctgacactraagtagtaggccagagtttggagctgctgcatctgctgttcctgtatcagccagaggctgttcaggtcttcctgcagcagtcagggctgcaagccctggaaaggcatcaggaagaggcccagctccaggatcgtgtgtatgctctccagcagacagctcttcaagggtgatcttgtttctcaatgtcactcattcccctctctcttaacatcaagcttgtttgtccagtagagcctttggagatttaggaccataatgaggtctcatgttctctgctcccacacctaagccaagacctttgggtcccagctcctccccttccactcagcactatccaggcaggaggaccaaaagggactcagtgtggtctacttactctggggccctagaatccctgmccccccgccacccttcatgtttgcttcagcagctggtagcttttgatgagacagaataaagttttatttttatattaagctactttgcctcagtggttgcacagtaaggggtagagggtagatgaggacaagaacaccctgagaaagtattttacagcacaagctttatgaggaataggagaacacatttttttcacattatactaagtccagcagagcccaggctctggggctgttgctcttaatcctcagtggaggcttcaggctttaccacttagaacgttctccagggctctggttacctgatcagcactgaagttgttcaaagggacattcgtctcttggccaaatgctgaagagagagagggaggtgtctttaactattctgcaccctggaggctaccaaagtaaaataaaagatctttgtctttatcttagtcttgttaagacaggaagagtattaaagagatatgatcaaaatacatttggtatgcctagaattaatacaataggtctcaaacacatctaggaagcccaagtccaaatagaattttggct

SEQ ID NO: 329 - DNA, 634 bp, Homo sapiens
gcgcgctgaggctccggcggacctctggtggayatggctgcttcccgcttacccccagcgacgctaacgttaaagcagttcgtaagaaggcaacaagttcttctcctctacagaaggattttgcaaacaattcggcaagttccaaatgattctgatcgcaaatacctgraagattgggcaagagaagaattcagaagaaacaaaagtgccmccgaagaggcttcgcccacgactgaagcgcaagacctgaaggaggcaaacggcattgttacaaccactggtgtgcgcagcatctgtgtgagagaattctccttggacctggggctctgacctaatggaatttacagcttagagggtgagagcaggtgttcacatcaagcaagcacctctggaccacctaccatcctcctaggtcttgtcctgggcaccacggggactcggagacagggcacacccttcgtggatgagcgccgcgatgatctccgtgttccccaccactgtggcccggtgcaaggcggtctggtccccctgcaaagtgacacaaaggcaggaacagcagtcagctcccctgcaccccctgcttgcactactcacttgacacttggacacaaggacccctcccgtccccacacag

SEQ ID NO: 330 - DNA, 2373 bp, Homo sapiens
gcgcgctgaggctccggcggacctctggtggayatggctgcttcccgcttacccccagcgacgctaacgttaaagcagttcgtaagaaggcaacaagttcttctcctctacagaaggattttgcaaacaattcggcaagttccaaatgattctgatcgcaaatacctgraagattgggcaagagaagaattcagaagaaacaaaagtgccmccgaagaggatacaatccggatgatgattactcaaggcaatatgcagctcaaggagttagaaaaaacacttgctttagcaaaatcttaactatagcattattctgaagrattttcaaagtctccatgtgttttgttgcatttaggattaacaatggacaacacaaagcccagtcttactatttatatgtacagtatttggtgatagagagcaaaggaaaaacacatcagaacagttgccttaacactgaaaaacataccctgcattttgaaaatgtttatggatgtctcagcagttcttaaaagaagaaaaaaaccactaacaaatggccagtagatgctggacacaatcattagggaagtgtaaatcaaaactactatgaggtcgggtgtagtggctcatgcttgtaatcccagtactttaggaggctgctagtctcraactcctgggctcaagcratccacctgcctcggtggccagagtgctaggattacaggtgtgagttktttttttttttaaagagacagtcttacctcattctgtcacccagaatggaatgactttctaaaattgcagaaagcagaacatattccttgctgtttataatattatagtcgtatcaaagggaaagagtatttctccttaaataaaattacaaataagaaatgtatgttttactcttactcataaaaggtattgtagaatacaaaaggtttttcaaactggttttgtctttgattggcttttataatccacacttcaaagaagaaatgcatttaacttttaataacttagtcaaaaagtataatgttgccttgccttgcataacctttaactattgcaaatgatgttttgtccttcccctttgtccagtattttccaaatggtcaacagtttaaacatttaagcttgcactgagaaaccttgccacatttcagcagttttgttttgcttttggtggagagcacctgatckcgactttacagccaatgtatttactctaaattacacttttatagatacaaggtaaagtgtagctgggtgaaggcactcaggagccataaaatgtggtcaaccacaataaattaaaatgtaagctaaacaaagtattcacacttgcatttttttaataaggaatttaagatccatagtatctttaatgcttggaagagacacaaattcaaggtgataaaaatattaattagaagacacataacatgcctcaagtatatcaacacttgactccacaaacaaggcataaccatgaaaacaacactccctttattttgggctcccaaaatcaaaagttagaactaatttatttaatcacagatatttagtatactcaataatgcactaacaatttctttaaaaaaacactaatactgtacagtatttctgtgttttagtttttcccacagctgttgaaaatttcagccttgatttgaaacatgacctgcatgacaggctataagttgtcaatagttctttttctttggaaaagtacagttgtggcatttactcactttagcagatagctaaaagggaaaaataaggaaaaatatacactggacctgcagttaagtttttgacaatgccaaggatcaaaaacagatgaaacaacatttgctgaagatgaaaaggtattgcattggtcttaatagatgttgccatctctgggtgaggatgctgactgagcctgttctgtgtcttcatcacctctatttgtttcttcttctacgacagacctccaagagacaagatccatgtagtaagccacactaggtccttttgacccttctcattcttctgtagtctcttccctgtgacttttgacaaaaatactcagttcacaatattagctgcctgcttctgatgggtaggaggtaatcaaaatactcccaccaaagcactctatggtctagacttgatacttaaaatttagttttcagcattcctcaacaaggataccttgaggtaataggagatattttggtaagtgaaaataattcctgcttggaacacagcctactgaactcaggatttaatttcttgagtattaggcagttctcaataaattgatgtatactgaggaatgattctaaagaggttagtgatatcctgtttgagaatagatttagaaaactgaaggtactctccagc

SEQ ID NO: 331 - DNA, 933 bp, Homo sapiens
gcgcgctgaggctccggcggacctctggtggayatggctgcttcccgcttacccccagcgacgctaacgttaaagcagttcgtaagaaggcaacaagttcttctcctctacagaaggattttgcaaacaattcggcaagttccaaatgattctgatcgcaaatacctgraagattgggcaagagaagaattcagaagaaacaaaagtgccmccgaagaggatacaatccggatgatgattactcaaggcaatatgcagctcaaggagttagaaaaaacacttgctttagcaaaatcttaactatagcattattctgaagrattttcaaagtctccatgtgttttgttgcatttaggattaacaatggacaacacaaagcccagtcttactatttatatgtacagtatttggtgatagagagcaaaggaaaaacacatcagaacagttgccttaacactgaaaaacataccctgcattttgaaaatgtttatggatgtctcagcagttcttaaaagaagaaaaaaaccactaacaaatggccagtagatgctggacacaatcattagggaagtgtaaatcaaaactactatgaggtcgggtgtagtggctcatgcttgtaatcccagtactttaggaggctgtggtaggtggatcacttgaggtcaggagttcaagaccagcctggccarcatggtgaaacctcatctctactaaaaatacaaaaattagcttggtgtggtggtgcattgcctgtagtcccagctacttgggaggctgaggcaggagaatcacttgaacccaggaagtggaggttgcagtgagctgaggtcgtgccactgcacttcagcctgggtgacagagtgagacagtctctaaaaaaaaaaaaaaaaaacaaccctgagattcacattcactagaatggctgtaattaaa

SEQ ID NO: 332 - DNA, 18413 bp, Homo sapiens
cgcctttcctgcgggcgtagttgctggctgctcgggcactgggacctcggcggcttggggacgctggccgcgaagtagggagcgcaggtggccgctcggggtgagggccctgggtcatggagcacttcttgctggaggtggcagccgcgccgctgcggttaatcgcagccaagaacgagaagagccgcagtgagttgggcaggttcttggccaagcaggtgtggacacctcaagatcgccagtgtgtcctgagtaccttagcacagttgcttttggataaggactgtactgtgctggttggtcgccagcttcgccctctccttttggatttgctggaaaggaatgccgaagccattaaagctggaggccaaatcaaccatgatctgcatgaacggctatgtgtgtcgatgagcaaactcattggtaaccatcctgatgtcctcccgtttgccctgagatatttcaaggacacatccccagtctttcaaagacttttcctagagagttcagatgctaatccagtacgctatggacgtaggaggatgaagctccgggacctaatggaagcagccttcaagtttctgcagcaggagcagtctgtgttccgggagctctgggactggagtgtgtgtgtccctctcctcagaagccatgacaccttggttcgctggtatacagccaattgtcttgctttggttacctgtatgaatgaagagcacaagttatcatttcttaagaagatatttaatagtgatgaattgatccatttcaggttgaggttattagaagaggcccagttgcaggacttggagaaggccttggttttggccaatccagaagtctccctttggcgtaagcagaaggagctgcagtacttacagggacatcttgtttcgtctgacctctcccctagggtgacagctgtttgtggtgtggtgctgcctgggcagctgccagcccctggagagctgggtrgtaataggagttcttcacgtgaacaggagctggcccttaggtcttatgtgctggttgagtctgtctgcaaaagtcttcagaccctggctatggcggttgcttctcagaatgctgtgttgttggaaggaccaataggatgtggcaaaacttccttagttgaatatttagctgcagtgacaggtagaacaaagcctcctcagcttctcaaagtccagcttggagatcagactgacagtaagatgcttttggggatgtatcgctgcacagatgttcctggagagtttgtgtggcagcctggcaccctgacacaggcagccacaatgggccactggatccttctggaggatattgactatgcccccttagaygtggtttctgtgctgatccctctcttggagaatggagagctcttgattcctggccgaggtgactgtctgaaagtggcacctggatttcagktttttgcaaccaggagactcttgagctgtggaggaaattggtatcgaccgctaaacagtcatgctactttgctagacaaatattggaccaaaattcacctggataacctggataagagagaactgaatgaggttcttcagagcagatatcctagcctattggcagtggttgatcacctgcttgacatttatatccaacttactggagagaaacatcactcttggagtgatagttctgttggatgtgaacaggcacctgaagaagtttcagaagccagaagagaaaacaaaagaccaacccttgagggaagagaattatctctaagggatctgctgaattggtgtaataggattgcccatagctttgacagttcatctttatcagcatcattaaatatttttcaagaggctctagactgtttcacagcaatgctttctgagcatacaagcaaactgaaaatggcagaagttattggaagcaaattgaacatttctagaaaaaaggctgaattcttttgtcaactttataaaccagaaattgtgatcaatgagctagatttgcaagtgggtcgagtgcggcttctacggaaacaaagtgaggctgttcacctacagagggagaagttcactttcgctgctacacggccgtcctctgttctcrtcgagcagcttgcagtgtgtgtcagcaaaggggagcctgtgttgctggtgggagagaccgggactggcaaaacctctaccatccaatacttggctcacattacaggccaccgtttgagggttgtcaatatgaatcaacaaagtgatactgcagacttgcttggaggttataaaccggtggaccataagcttatttggctacccttacgggaggcatttgaggaactctttgctcagacattttccaagaaacaaaactttacgttcttggggcacattcagacctgttacagacagaaacggtggcatgatctcctgagactaatgcagcatgtacacaagtctgctgttaacaaggatggaaaagacagtgaaactgggttactcataaaagagaaatgggaagcatttggtcttagactcaaccatgcccaacaacagatgaaaatgactgaaaataccttattgttcgcatttgtagagggtacattagctcaggctgtaaagaaaggagagtggatcttgttggatgagattaacttggctgctccagaaatactagaatgtctgagtggtttgcttgaaggatcttctggatccctggtgttgctggatcgaggagacacagagccactggttcggcatcctgacttccgtttatttgcctgtatgaatccagcaactgatgtaggcaaaagaaatctcccaccaggaataagaaacaggttcacagaactttatgtagaagaattagaaagcaaagaagacttacaggttcttattgtagattatctgaaaggattgagtgtgaacaagaatacagtgcaaggaatcataaacttctacacagctttgcggaaagagtctgggaccaaactggtggatggcactggccatagacctcactacagccttcggactctgtgccgggccctgcgatttgcagcctccaatccatgtggcaacattcagcgctcactctatgagggtttttgtttgggtttcttaacacagcttgacagggcatcacacccaatagttcagaagctcatctgtcaacacattgtccctggcaatgtcaagagtctgctgaagcagcctattccagagccaaaaggaggtcggcttatccaggttgaaggctactggattgyggtgggagacaaggagcctacaatagatgagacgtacattctgacatcttctgtgaagctgaacctgagagatatagtccgagttgtctctgcaggaacctatccagtgctgattcagggagagacatcagttggtaaaacaagcctgatccagtggctggctgcagctactggcaaccactgtgtgcgtattaataatcacgaacacacggatattcaggagtacattggttgttacacgtctgactcctcagggaagcttgtctttaaggaaggtgttcttattgatgcyatgagaaaaggctattggattattttagatgaattaaatttggcccctactgatgtgttagaggcgctgaataggctgttggatgataaccgtgaattgctagtaacagaaacacaggaagttgttaaagcacaccctcggtttatgctttttgccacccaaaatcccccaggactttatggaggcagaaaggtcctttctagagccttcaggaatcggtttgtggaattgcactttgatgagttacctagctccgagttggaaacaatcttgcacaagcggtgtagtttgccaccctcctattgcagcaagttggttaaagtcatgctggatcttcagtcctatcgcagaagttcttcagtgtttgctggaaagcagggcttcatcacccttcgtgatctgttccgatgggctgaaagatacagattggctgagccgaccgagaaggagtatgactggctacagcatttagccaatgatggttatatgcttctggcaggtcgagtcaggaagcaggaggaaattgatgtgattcaagaagtccttgagaaacatttcaagaaaaaattgtgtcctcaatctcttttctccaaagaaaatgttctaaaattgctgggtaaattgtctactcagatatccacattggagtgtaactttggccayatcgtgtggactgagggcatgcggagactcgcgatgctagtgggaagggcattggaatttggtgaacctgtgctgctggttggagacactgggtgtgggaaaactactatctgtcaggtatttgcagccttggcaaatcagaaattatactctgtcagctgccacttacacatggagacatcagacttcctgggtggcctgcggccagtgagacaaaagccaaacgacaaggaagaaattgacacatcaagactctttgagtggcatgatgggcctctggttcaggccatgaaggaggacggctttttcctcttggatgagatctcattggccgatgactctgtcttggaaagactcaacagtgtccttgaagtagaaaagtctctggtattagctgaaaaaggcagtccagaggacaaggatagtgaaatagagctgttgactgctgggaaaaaatttcgtattctagcaaccatgaaccctgggggtgactttggaaaaaaggagctgtctcctgccttaagaaaccggtttacagaaatatggtgccctcaaagcacaagccgtgaagatttaattcagatcatcartcataatcttcgtccaggattgtgtctgggcagaatagatcctaaagggtctgacatacctgaagtgatgctggatttcattgactggctgacccaccaagagtttggcagaaagtgtgtggtcagtatcagagatatcctgtcctgggttaacttcatgaacaaaatgggggaggaagctgctttgaaaaggccagagatcatctccactgtgacatcttttgtccatgctgcatgcctggtgtacatagatggaataggttcaggggtaacttcctctgggtttggtacagcccttttggcacgaaaagaatgtctgaaatttctaatcaagaggcttgccaagatagtacgacttacagaatatcagaaaaatgagttgaagatttatgacagaatgaaggccaaagaattcactggaatagataacctttggggaattcatccattttttataccaaggggacctgtcctacacaggaataatattgcagactatgcactcagtgcagggaccactgctatgaatgcacagaggctcttaagagctaccaaactgaagaagcccattctcctggagggttcccctggtgttggcaagacaagtttggtgggagcattagcaaaggcttcaggaaatacccttgttagaatcaacttatcagagcaaacggacatcacagacctgtttggagcagatctacctgttgaaggtggcaagggaggagagtttgcctggcgtgatggccccttactggcagctttgaaggcaggccattgggtggtgttggatgagcttaacctggcttctcagtctgtattggaaggactcaatgcttgttttgaccaccgaggagaaatctatgtgcctgagttaggaatgagctttcaagtgcagcatgaaaagacgaagatttttgggtgtcagaatccctttagacaaggaggtgggaggaaaggcttgcccaggtctttccttaacagattcactcaggtcttcgttgatccccttacagtaattgacatggagttcattgccagtactttgtttccagccattgagaaaaatattgttaagaaaatggttgctttcaataaccaaattgatcatgaagtgactgttgagaagaaatgggggcaaaaaggaggaccctgggaattcaacctccgggaccttttccgctggtgtcagttgatgctggttgaccagtcccctgggtgttatgatcctggtcagcatgtgtttttggtctatggtgaaagaatgagaaccgaagaggacaaaaaaaaggtcattgctgtattcaaggatgtgtttggttcaaattccaacccatacatgggaaccagactatttcgtatcactccctatgatgttcagttgggctactcagtcctttcccgtgggagctgtgttcctcacccgtcccgccatcccctgttgctcctgcaccagtcattccaacccctggagtcaatcatgaagtgtgtgcagatgagctggatggtcatcctggtcgggccagcctctgtgggcaagaccagcctggtccagcttctggcacaccttactggccacacattaaagatcatggctatgaacagtgcaatggatactactgagctgctgggtggatttgagcaggttgatcttatacgaccttggaggaggctgctagagaaggtggagggaactgtaagggcactgttaagggatagcctccttatcagtgctgatgatgcagaagtagtgctgcgagcctggagtcattttcttctgacatataagcctaagtgtcttggagaaggtggtaaagctatcacgatggagattgtcaacaaactagaagcagtgttattgcttatgcagcgactcaacaataaaatcaactcmtactgcaaggcagagtttgccaaacttgttgaagagttccgaagctttggtgtgaagcttacgcagttggccagtggccatagccatggcacatttgaatgggttgacagcatgttggttcaggccctgaagtctggagactggcttctgatggacaatgttaacttctgcaacccatcagtgttggatcgtttgaatgctttgcttgaacccggaggtgtcctcactattagtgagagaggaatgatagatggatccactcccacgataacaccaaatcccaatttcagacttttcctctcgatggatcctgttcatggagatatatcccgagctatgaggaatcgtggacttgaaatctacatttcaggggaaggggatgcaagcaccccagacaacctggatttgaaagttctgctgcacagccttggattggtggggaacagtgtatgtgacatcctcttggctttacacacagagacccggagcactgttgtaggttctccaacatcttctgtatcaactctaatccagacagccatactaattgtccagtacctgcagcgagggctgagtttagacagagccttttctgaagcatgctgggaagtatatgtctgttcccagcattcaccagcaaaccggaagcttgtacaggctttactggagaaacatgtttcttctttgcgagcacatgaaacctggggagactccattcttggcatgggactgtggccagattctgtgccctcagctctctttgctactgaagattcacacctgtctacagtccgaagagatggacagatcttagtatattgtctcaacaggatgagcatgaaaaccagcagctggacaaggagtcagccttttaccttgcaagacttagagaaaattatgcagtcccccagccctgagaacctgaaattcaatgcagtcgaagtgaatacttactggatcgatgaaccagatgttttggtcatggctgttaaattgctcatagaaagagcaaccaatcaggattggatgctcagagttaaatggctttatcatttagccaagaatataccgcaggggcttgagtccatacaaattcatttggaagccagtgctgcatctctcaggaatttttactcacattccctctcaggtgcagtcagtaatgttttcaaaatattacaaccaaatacaacagatgaatttgtgatccctctggatccccgatggaatatgcaggctctggacatgattagaaatttgatggactttgacccacaaacrgaccagcctgaccagctctttgcccttttagaatcagctgcaaacaagacaatcatatatcttgaccgggaaaaacgggtttttactgaagcaaatttggtttctgttggtagcaaaaagctaagagagagtgttttgagaatgtcctttgaattccatcaagatccagaaagctatcacactctgccccatgaaattgtggtcaatcttgctgctttttttgaactttgtgatgcactagtcctgctctgggtacagtcctcccagggaatggtgtctgatgccagtgccaatgagatcktaggttctctgcggtggcgggaccggttctggactgtggccgacacagtaaaagtagatgccccaggtctggcccttcttgccctccattggcactgggttttaaaacatctggtccaccagatcccccgacttctgatgaattatgaagacaaatattacaaagaagttcagactgtctcagaacatattcagaattgtctggggagccagactggtggcttcgctggtataaagaagttgcagaagttcctgggacgaccgtttccttttaaggacaagctggtggtggagtgtttttcacaactgaaggtccttaacaaagtccttgccatcagggagcagatgtctgcccttggggagagtggatggcaggaagacattaaccgtctccaagtggttgcttctcagtggacattaaagaaaagtctcctgcaagcctggggactgatcctcagagcaaatattttggaagatgtcagcctagatgaattgaagaattttgtgcatgctcagtgtttagaactgaaagccaaaggactctcacttggttttctggagaaaaagcatgatgaagcttcctccctgtcccatccagacttgacctccgtaatccacctcaccaggagtgttcagttgtggcctgcaatggagtacctggctatgctttggcggtacaaagtgacagctgattttatggcacaagcttgtctcagaagatgcagcaaaaatcaacaaccccagataaatgaggagataagtcmcctcatctcattttgtctttatcacacacctgttacacctcaagagcttcragatctgtggtccttgctgcatcatcagaaggtgtctcctgaaraaattacatctttgtggtccgagttatttaattccatgtttatgtctttctggagcagtactgtgaccacaaatccagagtactggctaatgtggaaccctttgcctggtatgcagcagagggaggcacccaagtctgttttggactccacaytgaagggccccggcaatctcaatagacccatattctctaagtgctgctttgaagtcttaaccagcagctggagagcaagtccctgggatgtgagtggcctccccattctttcctcctctcacgtgaccctaggagagtgggttgagagaactcagcagctccaggacatcagttcgatgctttggactaacatggctatctcttcagtagcagaattcagacgcacggattcccaactccaggggcaggtgctgttccggcacctggcaggcctagcagagctgctcccagagtcccggcggcaggagtacatgcagaactgtgagcagctgctgcttgggagcagccaggccttccagcatgtgggccagacacttggggacatggctggtcaggaggtgctgcccaaggaactgctctgccagttgctcacctccctgcaccactttgttggtgaaggggagagtaagaggagcctgcctgagccagcccagcgtgggagcctctgggtgagcctcggcttgctccagattcagacatggcttccccaggcacgctttgaccctgcggtgaagagggagtacaagctcaattacgtcaaggaagagttacaccaactgcagtgtgaatggaagacccggaacctgtcatcccagctgcagactggaagagacctggaagatgaagtcgttgtcagctactctcatcctcacgtcaggctgcttcgccaaaggatggatcggctsgataatttaacctgtcacctgttgaagaaacaggcctttagaccccagctgcctgcctacgagtccctggttcaggagatccaccactacgtcaccagcatcgccaaggcccctgctgttcaggatctgctcacacggcttctgcaggccctccacatagatgggccacggtctgcccaagtagcccagagccttctaaaggaggaggcctcttggcagcagtcacaccaccagttccggaagcggctgtcagaggagtacaccttctatccagatgccgtgagcccactgcaggcatccatattgcagttacaacatggcatgaggctggtggcctctgagctccacacctcactcyacagcagtatggttggtgcagacaggctggggaccctggccacagccttgctggctttcccatcggtgggccccaccttcccgacttactatgctcatgcagacactttgtgctcggtgaagtctgaggaggttctacgaggccttgggaagctaatcctcaagcgctcaggaggaaaggagctggaaggcaagggccagaaagcctgtcccactcgggagcagctgctgatgaatgctctcctttacctgcgctcccacgtgttatgcaagggagagttggaccagagggccctgcagctcttcagacatgtgtgtcaggaaatcatcagtgagtgggatgagcaggaasgcatagcccaagagaaggctgagcaggaaagcggcctgtatagatacaggagcaggaactctaggacagccctgagtgaagaggaggaggaagaacgggagttcagaaaacagttccccctgcatgaaaaggactttgcagatattttggtgcagccaacgttggaggagaacaaaggaacttcagatgggcaagaagaggaagcaggcacaaacccagctctcctctcccagaattcaatgcaggcagtaatgctgatacaccagcaattgtgtctcaactttgctcgatccctctggtatcaacagactctgccgccacatgaagcaaagcattacctcagcctgtttctgtcttgctatcagactggggcatcgcttgtgacacacttctaccccctgatgggagttgaactgaatgaccgactcttgggcagccaacttttggcctgtaccctctcccataacactctttttggggaggcaccctcagacctgatggtgaaacctgatgggccctatgacttctaccagcatcccaatgttccagaagcacggcagtgtcaacctgtgcttcaaggtttctcagaggctgtcagtcacttgctacaggactggccagaacacccagcgcttgaacagctcctggttgtaatggacagaattcgtagtttcccactttccagtcccatctcaaagttcctgaatggcttagagatccttctggcaaaggcacaggattgggaggaaaatgcaagtcgagstttgtctttgcggaaacatcttgatttgatcagtcagatgatcattcggtggcgtaaactggagctgaactgctggtccatgagtttggataatactatgaagcgccacaccgagaaatccaccaagcactggttctccatctatcagatgcttgagaagcacatgcaggaacaaacagaagaacaggaagatgacaaacagatgaccttgatgttgctggtcagcacattacaagcatttattgaaggatcctcgctgggagagttccatgtgcgacttcagatgttactggttttccattgtcatgtcttgctgatgccacaggttgaaggaaaggattcactttgcagtgttctatggaatttgtaccattattacaagcaattctttgaccgggtccaggccaaaattgtggaacttcgttcccccctagaaaaagaacttaaagaatttgttaagatttccaagtggaatgatgtcagcttctggtccattaagcaatctgtagaaaagacacacaggacactctttaaattcatgaagaaatttgaagcagtcctgagtgaaccctgccggtcatccctggtggagagtgacaaggaagaacagcctgactttttgcccaggccaacagatggagctgcaagtgaactgtcttccattcagaatctgaacagggcactgagggagaccctgttagcccaaccagcagctgggcaggccacaattccagagtggtgtcagggckctgctccttccggcttggaaggggagcttctgcgtcgcttgccaaagctcaggaaacgcatgaggaagatgtgcctgacgttcatgaaggagagccccctgcctcgccttgtggagggccttgatcagttcacaggtgaagtgatttcctctgtgagtgagctgcagagcttaaaggtggaaccctctgcagagaaggagaagcagcggtcagaagccaagcacattctcatgcaaaaacagcgagctttgtcagacctctttaaacaccttgcaaaaattggtttgtcgtatcgcaaaggtcttgcttgggcccgttcaaaaaaccctcaagagatgcttcatcttcacccattagatctccagagcrcattgtccatcgtcagcagcactcaggaggctgattctaggctgcttacagaaatctcgtcttcatgggatggatgccagaagtatttttatcgctctcttgcacggcatgccaggcttaacgcagcactagcaactcctgccaaggaaatgggcatgggcaacgtggagaggtgcagagggttctcagcacatttgatgaagatgctcgtccgacagcggcgctccctgaccacgctcagtgagcagtggatcatcctcaggaacctcctcagctgtgtgcaagagattcacagcrggctgatggggccccaggcctaccccgtggccttcccccctcaggrtggcgtgcagcagtggacagagcgcctgcagcacctggccatgcagtgccagatcctgcttgagcagctctcctggctcctccagtgctgccccagtgtagggccagctccaggccatggcaatgtccaggtactggggcagcctcctggcccctgcctggaaggaccagaacttagcaagggacaactttgtggagtagtgctggacctaattccttccaatctgagctacccatctccaatacctggaagtcagctgccctctggttgccggatgcggaaacaggatcacctttggcaacagtcaactacgagattaacagagatgctaaaaaccattaaaacagtgaaagctgacgtcgacaaaattagacagcagtcttgtgagactctctttcattcttggaaagattttgaagtttgctcttctgcgctgagttgcttgtcccargtgtcagttcatttgcagggcctagagtccttgttcattcttccagggatggaggttgagcaaagagactcacaaatggcactagttgaaagtctggaatatgtaagaggagaaattagtaaagccatggctgactttactacctggaagacccatctgcttacttcagatagccaaggaggaaatcaaatgttggaygaaggatttgtggaagatttttcagagcaaatggaaattgccatccgagccatcctctgtgccatccagaacttagaagaaagaaagaatgaaaaagcagaggagaacactgaccaagcaagcccacaagaagattatgcaggctttgagagactgcaatcaggacatctaacaaaactcttagaggatgacttctgggccgatgtgagcactttgcacgtgcagaaaataatttctgccatctccgagctgttggagaggctgaaatcgtacggtgaggatggcacagcagcaaagcacctgttcttcagccaatcctgttccttgctggtgcgcctggtgccggtcctctccagctactcagacctcgtcctcttcttcctgaccatgtctttagcaactcaccgtagtactgcaaagctgctctctgtgcttgcccaggtctttacagagcttgcccagaagggattttgcttgcccaaagaatttayggaagattcagctggagagggagcaactgagttccatgactatgagggaggtggaattggagaaggcgagggcatgaaggatgtgagtgaccagatcggaaatgaagaacaggtggaagatacatttcagaagggtcaagaaaaagacaaagaggatcctgattcaaaatctgataytaagggcgaggataatgccattgagatgtcggaagattttgatgggaaaatgcatgatggggagcttgaagaacaagaagaggatgatgagaaatcagatagtgagggcggagacctggataaacacatgggcgatctcaatggtgaggaagctgacaaactagatgagaggctttggggtgatgatgakgaggaggaagatgaggaggaagaagacaataaaactgaagaaacaggaccaggaatggatgaggaagattctgaacttgttgctaaagatgacaacttggatagtggcaattcaaacaaagataaaagccagcaagataagaaggaagaaaaggaagaagcagaagctgatgatggtggacaaggtgaagacaaaattaatgaacaaatagatgagagggactatgatgaaaatgaggtggacccttaccatggcaatcaggaaaaggtgccagaacccgaggctttggaccttccagatgacttgaacctygacagtgaagacaagaatggtggtgaggacaccgacaatgaagaaggagaagaagagaatcctttggagataaaagaaaaaccagaagaagcaggtcatgaagctgaggaaagaggagagaccgagaccgaccagaacgaaagtcagagtccacaggagcctgaggaaggccccagtgaagatgacaaggcagaaggggaagaggaaatggacacaggagctgatgaccaagatggagatgctgctcagcatcctgaagaacactctgaggagcagcagcagtctgtggaggaaaaagacaaggaagcygatgaagaaggtggagagaatggccctgctgaccaaggtttccagccccaggaggaagaagaacgggaggactctgatacagaggagcaggtgccagaggctttggagaggaaggagcatgcctcctgtgggcagactggtgtggagaacatgcagaacacacaggccatggagctggctggggccgcacctgagaaggagcaggggaaagaggaacacggaagtggagctgcagatgcaaaccaggcagaaggccatgaatcgaatttcattgcccagttggcctcccagaagcacaccaggaaaaacacacagagttttaagaggaaacctgggcaggctgacaatgaacgttccatgggtgatcacaatgagcgtgtgcacaagaggctgaggactgtggatacggacagccatgccgagcaggggccagctcagcagccccaggcccaggtggaggatgcagatgcattcgagcacattaaacaaggcagtgacgcatacgatgcacagacctatgatgtggccagcaaagaacagcaacagtctgcaaaagactctggcaaagatcaggaagaggaggagatagaggacacccttatggacacagaggagcaggaggagttcaaagcagcagacgtggagcagctgaagccagaggaaatcaagtcgggcaccacagcacccttgggctttgatgagatggaagtggagatccaaactgttaaaacagaggaagaccaagaccccagaacagacaaagcccataaggagacagaaaakgagaaaccagaaagaagccgagagtctaccattcatacagctcatcaattcctcatggacacgatcttccagccctttttaaaagatgtcaatgagctaagacaggagctggagagacagctggaaatgtggcagccacgtgaatctggaaacccagaggaggagaaggttgcagctgaratgtggcagagttacctgatcttaacagcgcctctttcacaacggttatgtgaagagcttcgtctcatattagagcctacccaggcagccaagctgaaaggagactatcgaactgggaaacgactaaacatacggaaagtcattccatacattgctagtcaatttcggaaagacaagatttggcttcgaaggaccaagcccagtaaacgccagtatcagatttgtttggctatcgatgactcttctagtatggtagacaatcataccaagcagcttgcatttgaatctttggctgtgattggaaatgctctaaccctcctggaagtgggtcagattgcagtgtgtagttttggagaatctgtaaagctgttacacccatttcatgagcagttcagtgattaytctgggtcccagattctacgtctctgcaaattccaacaaaagaaaaccaagattgctcagtttctagagtctgttgccaacatgtttgcagctgctcagcagctctcgcagaacatcagttcagaaactgcacaactcctcctggtagtctctgatgggcgaggccttttccttgagggcaaagaaagagtcctggcagcagttcaggctgyccggaatgcaaatatctttgtcatctttgttgtattggacaatcccagttcacgggattctatcttggacattaaagtaccgatatttaaaggacctggagagatgcctgaaatccgatcctacatggaagagttcccattcccatactatatcattcttcgagatgtaaacgcacttcctgagacactcagcgatgccctcagacagtggtttgagttggtgacagcctctgaccacccatagaacagaaagaagagtccaaagtgagacttaactgtggtcagaaggtcacattgcttacccaggtgctcccttttggacaactacaaaaaattttattgtaatatttttattttacaacgtgatcttacagcctacagaatgctctctggctcccggctttgcctgggctgaggtttttataccaaacctggaagcagcagcaggtgcctgaactcgtaactagagaagagttatccttcttccctgccttggaagccctggcctgggaggaggtcataccccaccgttggagcccagctgcctgttttcttttgcaggggatctgggcacctgtgccttgaggagatgctgccaggagcatgggactctgacagtcctttgtataaaggactaaagggagctgcccttttgaccctgttctaagctctgccttgccaagcccatagtgtgtgcccaaaagctgtcaagtggccaagacagctcgtttctggagagtatgagggtgtgttttcttattgtgaaaggaactaccttctcttagagggtaggaagaatgtggtgtgtgtgtgttctcataaagcaactggacattataggtgcccaggtcatctataaaaacgatccttgggctgtgtaaaaatgaagtggcttttcagtatcctctttcacacttgctgcttcgggagactatgcaatgatgggaaggtgattgcccctttatttcattcagtgccatggtccctgttgttgtagtaatttatttgtttagttcatttttttttttcttaacagtcaaggggaagagtgattcctcacactgctttcaagctggactgagccagtctcattctgggaaagaaaygctgtgtccagaactcagcagctccatctatttwttccagtcgaaagaaactgatctttaggcagtttttacttggccagaaagcagtgctgaatacttgaaactgtgtgctctgttctacttaatgttctgtcagaatgttcttttgtaggcagtatgtcatgatgtaatcatctatctccttgtctgtttccaagttacactgtgaagtctgcgacccttttgaggtggtcatcaaagacacagattccttgtttaaccaagtgtcccaaagcatgtacctgaagttatatcattttttattctaaaaagctatgcagcttatattctgaaaactattaaaacatataccactgttgttgatgtaatttgtgactcttcttaatggaagatgacaggattgtaaaaggtatgctaggggactgatcttctctgctggatcagtcagtcagctgttactagttgatgctgtgctaacatgatcccctcctacttccatgttgctcttactacaaaggttatcatttgcatttatgtccatggtaggctgagctataatatgctggctttgcagcagaatgaaaaggatgagttggtgtagccttataaggaggcttataaaaatwaattatcctccataaatg

SEQ ID NO: 333 - DNA, 3827 bp, Homo sapiens
cgcctttcctgcgggcgtagttgctggctgctcgggcactgggacctcggcggcttggggacgctggccgcgaagtagggagcgcaggtggccgctcggggtgagggccctgggtcatggagcacttcttgctggaggtggcagccgcgccgctgcggttaatcgcagccaagaacgagaagagccgcagtgagttgggcaggttcttggccaagcaggtgtggacacctcaagatcgccagtgtgtcctgagtaccttagcacagttgcttttggataaggactgtactgtgctggttggtcgccagcttcgccctctccttttggatttgctggaaaggaatgccgaagccattaaagctggaggccaaatcaaccatgatctgcatgaacggctatgtgtgtcgatgagcaaactcattggtaaccatcctgatgtcctcccgtttgccctgagatatttcaaggacacatccccagtctttcaaagacttttcctagagagttcagatgctaatccagtacgctatggacgtaggaggatgaagctccgggacctaatggaagcagccttcaagtttctgcagcaggagcagtctgtgttccgggagctctgggactggagtgtgtgtgtccctctcctcagaagccatgacaccttggttcgctggtatacagccaattgtcttgctttggttacctgtatgaatgaagagcacaagttatcatttcttaagaagatatttaatagtgatgaattgatccatttcaggttgaggttattagaagaggcccagttgcaggacttggagaaggccttggttttggccaatccagaagtctccctttggcgtaagcagaaggagctgcagtacttacagggacatcttgtttcgtctgacctctcccctagggtgacagctgtttgtggtgtggtgctgcctgggcagctgccagcccctggagagctgggtrgtaataggagttcttcacgtgaacaggagctggcccttaggtcttatgtgctggttgagtctgtctgcaaaagtcttcagaccctggctatggcggttgcttctcagaatgctgtgttgttggaaggaccaataggatgtggcaaaacttccttagttgaatatttagctgcagtgacaggtagaacaaagcctcctcagcttctcaaagtccagcttggagatcagactgacagtaagatgcttttggggatgtatcgctgcacagatgttcctggagagtttgtgtggcagcctggcaccctgacacaggcagccacaatgggccactggatccttctggaggatattgactatgcccccttagaygtggtttctgtgctgatccctctcttggagaatggagagctcttgattcctggccgaggtgactgtctgaaagtggcacctggatttcagktttttgcaaccaggagactcttgagctgtggaggaaattggtatcgaccgctaaacagtcatgctactttgctagacaaatattggaccaaaattcacctggataacctggataagagagaactgaatgaggttcttcagagcagatatcctagcctattggcagtggttgatcacctgcttgacatttatatccaacttactggagagaaacatcactcttggagtgatagttctgttggatgtgaacaggcacctgaagaagtttcagaagccagaagagaaaacaaaagaccaacccttgagggaagagaattatctctaagggatctgctgaattggtgtaataggattgcccatagctttgacagttcatctttatcagcatcattaaatatttttcaagaggctctagactgtttcacagcaatgctttctgagcatacaagcaaactgaaaatggcagaagttattggaagcaaattgaacatttctagaaaaaaggctgaattcttttgtcaactttataaaccagaaattgtgatcaatgagctagatttgcaagtgggtcgagtgcggcttctacggaaacaaagtgaggctgttcacctacagagggagaagttcactttcgctgctacacggccgtcctctgttctcrtcgagcagcttgcagtgtgtgtcagcaaaggggagcctgtgttgctggtgggagagaccgggactggcaaaacctctaccatccaatacttggctcacattacaggccaccgtttgagggttgtcaatatgaatcaacaaagtgatactgcagacttgcttggaggttataaaccggtggaccataagcttatttggctacccttacgggaggcatttgaggaactctttgctcagacattttccaagaaacaaaactttacgttcttggggcacattcagacctgttacagacagaaacggtggcatgatctcctgagactaatgcagcatgtacacaagtctgctgttaacaaggatggaaaagacagtgaaactgggttactcataaaagagaaatgggaagcatttggtcttagactcaaccatgcccaacaacagatgaaaatgactgaaaataccttattgttcgcatttgtagagggtacattagctcaggctgtaaagaaaggagagtggatcttgttggatgagattaacttggctgctccagaaatactagaatgtctgagtggtttgcttgaaggatcttctggatccctggtgttgctggatcgaggagacacaggtaagccactggttcggcatcctgacttccgtttatttgcctgtatgaatccagcaactgatgtaggcaaaagaaatctcccaccaggaataagaaacaggttcacagaactttatgtagaagaattagaaagcaaagaagacttacaggttcttattgtagattatctgaaaggattgagtgtgaacaagaatacagtgcaaggaatcataaacttctacacagctttgcggaaagagtctgggaccaaactggtggatggcactggccatagacctcactacagccttcggactctgtgccgggccctgcgatttgcagcctccaatccatgtggcaacattcagcgctcactctatgagggtttttgtttgggtttcttaacacagcttgacagggcatcacacccaatagttcagaagctcatctgtcaacacattgtccctggcaatgtcaagagtctgctgaagcagcctattccagagccaaaaggaggtcggcttatccaggttgaaggctactggattgyggtgggagacaaggagcctacaatagatgagacgtacattctgacatcttctgtgaagctgaacctgagagatatagtccgagttgtctctgcagggtgtgtgggcttttttctcgctgcccygaacttgatacaggcataggcattgatgacattttggtctaacttccttaactttcaaagagctttattcttattcattggccaactgaacaattacttacaaaagtcagtactataactttttcctggtagaaaactttgtttctagttgtgcaactttggagggagcactatggatgcagatgattttatctatctttaaagttatcttttkttwttttgctgataaataccacagattattcagtaaatggctaaaagttctacttacagtttcttacaaatgttgccagcatagttggaattgctttccttagtattttttgaggaataatgtttacaaagatacttctcagtgtataggaataaaaatgttcttctgcttcttgcattttccagaaatgtaaaaaggggaaaaaaaaggaaaaaaaaatgctcttttaatgatgctgtt

SEQ ID NO: 334 - DNA, 2625 bp, Homo sapiens
atgaccaggacccagaagggaaagacctttctcccccattgcttctatcagtcactgcccccacgactgggatggggcatgattttaaactactcaaaattgaaaggcaaggaggagtgtgcctctgtctccagtgtgcctatggtcttcttcagctcacagtaccgtctacaccgcaagagccaatatttgaaaatggctgctgcaaaccttaccttctctcaggaggtggtgtggcagcgaggcctgcccagcattccttatagccagtacagctttgaccacctctacaataccaatgacatcatccatactccccagatcaggaaggcccggcctcagaaacctgttagcttcaagttcctgggttcctcaagtcccttaacaggagacacctccctggctgtgaagacagaaagctctgccaatcccgaaaagaagctgaagaaatcaaagccagccagcaccgtccgggaagcaccccgccctctcatccatcatccctgcatgcatccagatatgctgggtcggccaccttctctagatgtgaacctggaggaaagagaagcctggcttctgcctcctgagaaggaggccagagcgtgggaggccactgtgctggaaaagctgaacgagcgcacagcccgatggatccagagcaagcgtcctcgaaggcctggggcatcccccaacaagtggcagagcttcctgcgccagcagtacgactggagtcacattcgggatgagcttacctctgccagtgacctggagctcctgaaacagctggaggcagaagagacagcagagtttgaggatcaaagtgtcatcctgcccccacaggaaaagaagaagccagaactgctgcttcccgtttactacagattgcccagttacttccaacaagcagagacagttgagatcatgcctggcaacaagagcactgaggatatccatgaaaagacgagcctctcccagccccaaacccagagctactttcgccaggtgactccccgagctggaaagtttgcctactccacagacaacacctttgaacaggagatttactttgatgaagtccagatcatccaccagattggtgcaaagagagaccagattgtcctggaaaacctaaatcggtacaacaagcagctatctaaggtcttccctgaaactccagaaaagtggagtgcccaggcaattcctgaagcatcttacagacctgtgcaaggagccctgcgctggactgctttgcccacccccgccaaggatatgctgctgcaggtgggtgagaaggatgtgcctattaagaccaggagattgaagaagcaggcaaaatcactgcaggaggatgtgacctgggaactggtggtcctgcggaggatgctgaaggaatggaagactgcctgggctctgatcatagagtggcaccatgagacagtagagaacctgcttcagagcttgggagacctgcatgatgacgttcggatcaaagctatcaccacatgtgccacagctgctttggaacggccccggattgccaccagccagagagactcagacaagaccatccaggacttgccggaggttctactgcctgccctagaggctgctctttgtgacaagaatgcccatgtgcggatggcagcagcaatatgccaatatgccatacagtcacataatccccttgcccggaacatcatgcagactgcccttctgaagggtaacagtgtggatagctgggctgcagctcagtgcttggctctggaaggtactgctacttaccctgtgattaagaggatcctccaccagctgtttacaaagaagaatgaggacactgaggaacagtcttatatcctcctgagctatctgagtgagaagacaaccctgatacacaccatgcwtgctgtggagctgaacagctgtcaakggaagaaccggattgtggcctgccaggctttctcccggatcagtggaaatgyctgcttggatatgaaacataagttgatccagctgatgtggaatgactggaataaggaagtgaggagagcagctgcacaggcgcttgggcaaatgagcctcgggaaagaggtgcaygacataatcagggtcaagctaggtcaaggaaattcccaggagcgtgtggaagctctctacctgataggtgagctcaagcttatgaccgccaagcttctcccaagcttcctgcactgcttctctgatgacttcacagcagttcggcgggcagcctgtttggcagctggtgccctgcagatccgcgacaagatggtgcttgaatgcctcctgaacctgatgcagagagatccttactggaaaatcaaggcctttgccattcgagctttgggacagattgggcaagtaagtcccgagctgacggatcttctgctctgggctatccactatgaagagtcaccaggtgtacggctggaagcttgccgtagcatcctagccctgaaacttcaaggggaccgggtcagggacaccttcctagacgtgctgctcctggagaaccacgatgctgttctaaargaaatgtaccagacaatgaagatactcaacttaggaaatgaaggaaaccaagaaatgcttcaggagatcaagaacagg

SEQ ID NO: 335 - DNA, 2517 bp, Homo sapiens
atgaccaggacccagaagggaaagacctttctcccccattgcttctatcagtcactgcccccacgactgggatggggcatgattttaaactactcaaaattgaaaggcaaggaggagtgtgcctctgtctccagtgtgcctatggtcttcttcagctcacagtaccgtctacaccgcaagagccaatatttgaaaatggctgctgcaaaccttaccttctctcaggaggtggtgtggcagcgaggcctgcccagcattccttatagccagtacagctttgaccacctctacaataccaatgacatcatccatactccccagatcaggaaggcccggcctcagaaacctgttagcttcaagttcctgggttcctcaagtcccttaacaggagacacctccctggctgtgaagacagaaagctctgccaatcccgaaaagaagctgaagaaatcaaagccagccagcaccgtccgggaagcaccccgccctctcatccatcatccctgcatgcatccagatatgctgggtcggccaccttctctagatgtgaacctggaggaaagagaagcctggcttctgcctcctgagaaggaggccagagcgtgggaggccactgtgctggaaaagctgaacgagcgcacagcccgatggatccagagcaagcgtcctcgaaggcctggggcatcccccaacaagtggcagagcttcctgcgccagcagtacgactggagtcacattcgggatgagcttacctctgccagtgacctggagctcctgaaacagctggaggcagaagagacagcagagtttgaggatcaaagtgtcatcctgcccccacaggaaaagaagaagccagaactgctgcttcccgtttactacagattgcccagttacttccaacaagcagagacagttgagatcatgcctggcaacaagagcactgaggatatccatgaaaagacgagcctctcccagccccaaacccagagctactttcgccaggtgactccccgagctggaaagtttgcctactccacagacaacacctttgaacaggagatttactttgatgaagtccagatcatccaccagattggtgcaaagagagaccagattgtcctggaaaacctaaatcggtacaacaagcagctatctaaggtcttccctgaaactccagaaaagtggagtgcccaggcaattcctgaagcatcttacagacctgtgcaaggagccctgcgctggactgctttgcccacccccgccaaggatatgctgctgcaggtgggtgagaaggatgtgcctattaagaccaggagattgaagaagcaggcaaaatcactgcaggaggatgtgacctgggaactggtggtcctgcggaggatgctgaaggaatggaagactgcctgggctctgatcatagagtggcaccatgagacagtagagaacctgcttcagagcttgggagacctgcatgatgacgttcggatcaaagctatcaccacatgtgccacagctgctttggaacggccccggattgccaccagccagagagactcagacaagaccatccaggacttgccggaggttctactgcctgccctagaggctgctctttgtgacaagaatgcccatgtgcggatggcagcagcaatatgccaatatgccatacagtcacataatccccttgcccggaacatcatgcagactgcccttctgaagggtaacagtgtggatagctgggctgcagctcagtgcttggctctggaaggtactgctacttaccctgtgattaagaggatcctccaccagctgtttacaaagaagaatgaggacactgaggaacagtcttatatcctcctgagctatctgagtgagaagacagatatgaaacataagttgatccagctgatgtggaatgactggaataaggaagtgaggagagcagctgcacaggcgcttgggcaaatgagcctcgggaaagaggtgcaygacataatcagggtcaagctaggtcaaggaaattcccaggagcgtgtggaagctctctacctgataggtgagctcaagcttatgaccgccaagcttctcccaagcttcctgcactgcttctctgatgacttcacagcagttcggcgggcagcctgtttggcagctggtgccctgcagatccgcgacaagatggtgcttgaatgcctcctgaacctgatgcagagagatccttactggaaaatcaaggcctttgccattcgagctttgggacagattgggcaagtaagtcccgagctgacggatcttctgctctgggctatccactatgaagagtcaccaggtgtacggctggaagcttgccgtagcatcctagccctgaaacttcaaggggaccgggtcagggacaccttcctagacgtgctgctcctggagaaccacgatgctgttctaaagctacctaatggcagtaaaagcactggttcacctgcacattcaccactcacccaagtaggcatagagaaggaataa

SEQ ID NO: 336 - DNA, 1026 bp, Homo sapiens
actgtataccaggaacacaaattcattaaatcctcacaactttgagacaggcacaaatattatctgtttactagtgaggaattacctacggtttactagtaaggaacactgagacccacaggttgtgacttgctcaaggtcaagctggtggagccaagacaaggtgcaggcagtgagtcctgccctagagtctgacccgaaccacatttaacgtctatgtggtgtgtaggttattgccatgagtaagaatcagaattgttaacgcgcattccaggaaggcagggacaccactgagtgttactgctgtactttaggggccagagcagggcaggctggatgcgcggaggaaactcatagttaggtcaraagcctggcaagacaagggaattttctggtcgtcgtccacctctccaacctcacatcctactagtcttccaagaggattctaactgcacatgactccctagtttccggcttctcttcctaaggagggtctgcggcccgyctgcaccaccctctccccacagtcccgttttcctgtccatgcttggatggatccrgccgagccgtcagccgcagctgcgcgctgctcccccgactcgcaccccctcggcgaagcgctgcattttatgtaattttctgccgggctgctggcttgtgggggatgtggctgggtctcggcagccttcagcgccgcagacgctccggcaacgccagcatacgaggcccccgccccaggagcgcgggtccgggcggcgttcccctctgcgggaggcgcggcgagccaatcctcactttaaaagctttcstgtcctcgaagcgaggggtcttccgtgcggggcaagacgcactggccccagacgaccggtccgtgaaatgacccttccgagcgacccggagcgggcgaccttgcccaacccgcgactcggggcccctgcggtcccgcgtagaggacccaggtcccacggggggcggcggtgaatcgccccctcttgtggccgcgcttccgcccccggcacccgcccg

SEQ ID NO: 337 - DNA, 1061 bp, Homo sapiens
gctgtggctcattccttttttttttttaatctccatcacttgttagtgcttgctgaattaacagatgtaaggagttaacttamtgttgcactagctcaaacatatttagattgttacctcacaaatagctttttttttttggagacggagtctcgccttgtcgcccaggctggagtgcactggtggagccaagacaaggtgcaggcagtgagtcctgccctagagtctgacccgaaccacatttaacgtctatgtggtgtgtaggttattgccatgagtaagaatcagaattgttaacgcgcattccaggaaggcagggacaccactgagtgttactgctgtactttaggggccagagcagggcaggctggatgcgcggaggaaactcatagttaggtcaraagcctggcaagacaagggaattttctggtcgtcgtccacctctccaacctcacatcctactagtcttccaagaggattctaactgcacatgactccctagtttccggcttctcttcctaaggagggtctgcggcccgyctgcaccaccctctccccacagtcccgttttcctgtccatgcttggatggatccrgccgagccgtcagccgcagctgcgcgctgctcccccgactcgcaccccctcggcgaagcgctgcattttatgtaattttctgccgggctgctggcttgtgggggatgtggctgggtctcggcagccttcagcgccgcagacgctccggcaacgccagcatacgaggcccccgccccaggagcgcgggtccgggcggcgttcccctctgcgggaggcgcggcgagccaatcctcactttaaaagctttcstgtcctcgaagcgaggggtcttccgtgcggggcaagacgcactggccccagacgaccggtccgtgaaatgacccttccgagcgacccggagcgggcgaccttgcccaacccgcgactcggggcccctgcggtcccgcgtagaggacccaggtcccacggggggcggcggtgaatcgccccctcttgtggccgcgcttccgcccccggcacccgcccg

SEQ ID NO: 338 - DNA, 8297 bp, Homo sapiens
gactgcttgcattaaaggacttcctcatcctttttttcatgaaactgagcttgcttaatcagagatggagcaaactgactgcaaaccctaccagcctctaccaaaagtcaagcatgaaatggatctagcttacaccagttcttctgatgagagtgaagatggaagaaaaccaagacagtcayacaactccagggagaccctgcacgagtataaccaggagctgaggatgaattacaatagccagagtagaaagaggaaagaagtagaaaaatctactcaagagatggaattctgtgaaacctctcacactctgtgctctggctaccaaacagacatgcacagygtttctcggcatggctaccagctagagatgggatctgatgtggacacrgagacagaaggtgctgcctcacctgaccatgcactaagaatgtggataaggggaatgaaatcagagcatagttcctgtttgtccagccgggccaactctgcattatccttgactgacactgaccatgaaaggaagtctgatggggaaaatggtttcaaattctctcctgtttgttgtgacatggaggctcaagctgggtctactcaagatgtgcagagcagcccacacaaccagttcaccttcagacccctcccaccgccacctccgcctcctcatgcctgcacctgtgccaggaagccaccccctgcagcggactctcttcagaggagatcaatgactacccgcagccagcccagcccagctgctccagctcccccaaccagcacgcaggattcagtccatctgcataacagctgggtcctgaacagcaacataccattggagaccaggcatttcctgttcaaacatggatctggttcctctgcgatcttcagtgcagccagtcagaactaccctctgacatccaataccgtgtactcgccccctcccaggcctcttcctcgaagcaccttttcccgacctgcctttacctttaacaaaccttacaggtgctgcaactggaagtgcacagcattgagcgccactgcaatcacagtgactttggccttrttactagcctatgtgattgcagtgcatttgttcggcctgacttggcagttgcaaccagttgaaggagagctgtatgcaaatggagttagcaaagggaacagggggaccgagtccayggacactacttactctccaattggaggaaaagtttctgataaatcagagaaaaaagtgtttcagaagggacgggcgatagacactggagaagttgacattggtgcacaggtcatgcagaccattccacctggtttattctggcgtttccagattactatccaccatccaatatatctgaagttcaatatttctttagccaaggactctctgctgggaatttatggcagaagaaacattccacctacacatactcagtttgattttgtaaaactaatggatggcaaacagctggtcaagcaggactccaagggctctgatgatacacagcactcccctcggaacctgatcttaacttcgcttcaggagacaggtttcatagagtatatggatcaaggaccttggtatctggcgttttacaatgatggaaaaaagatggagcaagtattcgtgttaactacagcaattgaaataatggatgactgttcaaccaattgcaatggaaatggagagtgtatctctggccattgtcattgtttcccaggattccttggacctgactgtgctagagrttcctgccctgtgctgtgtggtgggaatggagaatacgagaaaggacactgtgtctgccggcatggctggaaggggccagagtgtgacgttccggaagaacaatgcattgatccaacatgctttggccacggcacctgcatcatgggagtctgcatctgtgtgccaggatacaaaggagaaatatgcgaggaagaggactgcctagacccartgtgttccaaccatggcatctgtgtaraaggagaatgtcactgttctactggctggggaggagttaactgtgaaacaccacttcctgtatgtcaagagcagtgctcaggacacggaacttttcttctggacgctggagtatgcagctgtgatcccaagtggacaggatctgactgctcaacagagctgtgtaccatggagtgtggtagccatggagtctgctcaagaggaatttgccagtgtgaagaaggctgggtaggaccaacatgtgaggaacgctcctgtcattctcattgtactgagcatggccaatgcaaagatggaaaatgtgagtgtagccctggatgggagggcgaccactgcacaattgctcactacttagatgctgtccgagatggctgcccagggctctgctttggaaatggacgatgtaccctggatcaaaatggttggcactgtgtgtgtcaggtgggttggagtgggacaggctgcaatgttgtcatggaaatgctttgtggagataacttggacaatgatggagatggtttaaccgactgtgtggatcctgactgttgtcaacaaagcaactgttatataagtcctctctgccagggctcaccagatcctcttgacctcattcagcaaagccaaactctcttctctcagcayacttcaagacttttttatgatcgaatcaaattcctcattggcaaggacagtactcatgtcattcctcctgaggtgtcatttgacagcaggcgtgcctgtgtgattcgaggccaagtggtggccatagatggaactcctctagtgggagtgaatgtcagtttcttgcaccacagtgattatgggtttaccatcagccggcaagatggaagctttgacctcgtggccatcggtggcatctctgtcatcttaatcttcgaccgatcccctttcctgcctgagaagagaacactctggttgccttggaatcagtttattgtggtagagaaagtcaccatgcagagagttgtatcagacccgccatcctgcgatatctccaactttatcagcccaaaccctattgtgcttccttcaccgctcacatcatttggagggtcctgtccagagaggggaactattgttcctgagctgcaggttgtacaggaggaaattcccattccctccagctttgtgaggctgagttacctgagcagccgcacccctgggtataaaaccctgctacggatccttctgacacattcaacgattcctgtaggcatgataaaagtacacctcacagtagctgtggaagggcgactcacacagaagtggtttcccgccgcaattaatcttgtctacacatttgcttggaacaagaccgacatctatggacagaaggtttggggcctggcagaggctttggtatctgtgggatatgaatatgaaacgtgccctgactttattctctgggagcaaaggacagtcgttttacaaggttttgagatggatgcttctaacctaggaggctggtctttgaataagcatcacattttgaatcctcaaagtggaatcatacataaagggaatggagaaaatatgttcatttcccagcagcccccagtcatatcaaccataatgggtaatggacaccaaaggagtgtagcctgcaccaactgcaatggcccagcccacaacaacaaactctttgctcctgtcgccttagcttctggccctgatggcagtgtgtatgttggcgacttcaattttrtaaggagaatatttccctcgggaaactccgttagtattttggaattaagcacaagtcctgctcacaaatactatctggctatggaccctgtgtctgaatcactctatctatcagacaccaatactcgcaaagtctacaagttgaaatctcttgtggagacgaaagatctgtccaagaattttgaagtggtggcaggaactggtgatcagtgccttccctttgaccagagtcattgtggagatggtgggagagcatcggaagcttcactgaatagccctcgaggcatcacagttgataggcatggatttatttactttgtggatgggactatgattcgcaaaattgatgagaatgctgtgatcacaactgtaatcggctcaaatggtctgacttccacacaaccactgagctgtgactcaggaatggacatcactcaggtgcgattagagtggccaacagaccttgcagtaaatcctatggacaattcattgtatgtcttggataacaacattgtgctgcaaatttctgagaacaggcgtgttcggatcatcgcaggacgccccattcactgccaggtgccaggcatcgatcatttcctggtcagcaaggtagcaattcactccactctagagtcagcgagggccatcagtgtctcccacagcgggctgctcttcatagctgaaacagacgagaggaaagtaaaccgcattcagcaagtaaccaccaatggggagatctacatcatcgctggtgcccccactgactgtgactgcaaaattgatccaaactgtgactgtttttcaggtgatggtggctatgccaaagatgcraagatgaaagccccttcctccttagcagtgtcgcctgatggaaccctctatgtggcagacctcggaaatgttcgaattcgtaccatcagcaggaaccaagcccacctgaatgacatgaacatttatgagattgcttcacccgctgatcaggaactgtaccagttcactgtaaatggaacccacctacacaccctgaacttgataacaagggactatgtttataacttcacctacaattctgaaggtgacttgggcgcgattaccagcagcaatggcaattcagtgcacattcgccgtgatgcaggcggaatgccgctatggcttgtggtgcctggcggacaagtatactggctgactataagcagcaatggagtcctgaaaagagtgtcagcccaaggctataatctggccttaatgacctatccaggaaacacagggcttctggctaccaaaagtaaygaaaatggatggacaaccgtttatgagtatgaccccgagggacacctgacmaatgcaacgtttcccactggagaggtcagcagcttccacagtgacctggagaagctgacaaaagtggagctagatacttccaaccgtgaaaatgtcctcatgtcaaccaacttgacggcaactagtaccatatatattttaaaacaagaaaatactcaaagtacctatcgggtgaatccagatggttccctgcgtgtcacttttgccagcgggatggagatcggcctcagctcagagccccacatcctggcaggggcagtcaaccctaccctgggcaaatgcaacatctcattgcccggagagcacaatgcaaacctcatcgagtggcggcagaggaaggagcaaaacaaaggcaatgtttcggcttttgaaaggaggctgagggcccacaacagaaacctactctccatagattttgatcatataacccgcacaggaaagatctatgatgaccatcgaaaattcacccttcgaattctttatgaccagactgggcgacccattctgtggtctcctgtaagcagatataatgaagtgaacatcacatattcrccttcgggattggtgacgtttattcaaagaggaacgtggaatgaaaaaatggaatatgaccagagtgggaaaattatttcaagaacttgggctgatgggaaaatttggagctatacctacttagaaaaatctgtgatgcttctcctacacagccagcggcgttacatctttgagtatgaccaaccagattgtctgctctcagtcaccatgcctagcatggtgcgtcacagcttacaaaccatgctttcagtgggctactaccggaacatctacaccccaccggacagtagcacttcttttatccaagactatagtcgagatggccgattgctacagaccctgcatctggggacagggcgcagagtcttatacaagtacaccaagcaagcaaggctttctgaggttctctatgataccactcaggtcacattaacatatgaagagtcttctggagtgattaagacaatacacctgatgcatgacggattcatctgcacaatcagatacaggcaaacaggacctcttattggacgccagattttcagattcagtgaagaaggccttgtgaatgcacggttcgactacagctacaacaatttccgagtcacaagcatgcaagctgtaatcaatgaaacccctttgcctatagatctttaccgatatgttgatgtctctggcagaacagagcagtttggaaaattcagtgtaattaattacgatttaaatcaggtcataactactacagtgatgaaacacaccaaaatcttcagtgccaatggacaagtcattgaagtccaatatgaaatcctaaaggcaattgcctactggatgaccattcaatatgataatgtgggccgcatggtaatatgtgacataagggtaggagtagatgccaatataacaaggtacttctatgaatacgatgctgatgggcaacttcagactgtttctgtaaatgacaaaacccagtggcgttatagttacgatctgaatggaaacatcaacctcttaagccatgggaagagtgctcgtcttactcctctccgatatgacctccgagaccgcatcaccagattaggagaaattcagtataaaatggatgaagatggctttctgaggcagaggggaaatgatatttttgaatataattctaatggcctgctgcagaaagcctacaataaggcttctggctggactgtgcagtattactatgatgggcttgggcgacgtgtcgcgagtaagtccagcctagggcagcaccttcagttcttttatgcagaccttaccaaccccataagagttactcatttgtacaaccacacaagctcggagattacatctctgtattatgatctccaaggtcaccttattgccatggagttaagcagtggtgaagaatattatgtagcctgtgataatacaggtaccccactagctgtgttcagcagccgaggtcaggtcataaaggagatactatacacaccttatggcgatatctatcatgacacttaccctgactttcaggtcattattggttttcatggaggactctatgatttccttactaaattagtgcacctggggcaaagggattatgatgttgttgctggcagatggacaacgcctaatcatcacatatggaaacagttgaacctccttcctaaaccattcaacctctactcctttgaaaataactacccagttggcaaaattcaagatgttgcaaagtataccacagacatcagaagttggttggagctatttggtttccaattacacaatgtactacctggatttcccaaacctgaattagaaaatttagaattaacttacgagcttctacggcttcagacaaaaactcaagagtgggatcctggaaagactatcctgggcattcagtgtgaactccagaaacagctcaggaatttcatttccttggaccaactacctatgactccccgatacaatgatggacggtgccttgaaggagggaagcaaccaaggtttgctgctgtcccttctgtttttgggaaaggtataaaatttgccatcaaggatggcatagtaacagctgatattataggagtagccaatgaagatagcaggcggcttgctgccattctcaataatgcccattacctggaaaacctacattttaccatagaggggagggacactcactacttcattaagcttgggtctctggaggaagacctggtgctcatcggtaacactggggggaggcggattctggagaatggtgtcaatgtcactgtgtcccagatgacttctgtgttgaatgggaggactagacggtttgcagatattcagctccagcatggagccctgtgcttcaacatccggtatgggacaactgtcgaagaggaaaagaatcacgtgttggagattgccagacagcgcgcagtggcccaggcctggactaaggaacaaagaaggctgcaagagggggaagaggggattagggcatggacagaaggggaaaagcagcagcttttgagcactgggcgggtacaaggttacgatgggtattttgttttgtctgttgagcagtatttagaactttctgacagtgccartaatattcactttatgagacagagcgaaataggcaggaggtaacaaaaatatctctgcctttgcgtcaccaaagactgcctgtttttaaaacataaaa

SEQ ID NO: 339 - DNA, 989 bp, Homo sapiens
gggattcccacccacccacagcccgccatggcgtctcagctccagaaccgactccgctccgcactggccttggtcacaggtgcggggagcggcatcggccgagcggtcagtgtacgcctggccggagagggggccaccgtagctgcctgcgacctggaccgggcagcggcacaggagacggtgcggctgctgggcgggccagggagcaaggaggggccgccccgagggaaccatgctgccttccaggctgacgtgtctgaggccagggccgccaggtgcctgctggaacaagtgcaggcctgcttttctcgcccaccatctgtcgttgtgtcctgtgcgggcatcacccaggatgagtttctgctgcacatgtctgaggatgactgggacaaagtcatagctgtcaacctcaagggcaccttcctagtcactcaggctgcagcacaagccctggtgtccaatggttgtcgtggttccatcatcaacatcagtagcatcgtaggaaaggtggggaacgtggggcagacaaactatgcagcatccaaggctggagtgattgggctgacccagaccgcagcccgggagcttggacgacrtgggatccgctgtaactctgtcctcccagggttcattgcaacacccatgacacagaaagtgccacagaaagtggtggacaagattactgaaatgatcccgatgggacacttgggggaccctgaggatgtggcagatgtggtcgcattcttggcatctgaagatagtggatacatcacagggacctcagtggaagtcactggaggtcttttcatgtaactgcctcaaggaccctggactctgctcacccccccaccactctgcctggcctcctgctgatgaggactctaagttcccaggatacaaaaggggtggcagtgtatggttcaggaatgctgaatatgggaagcaggggtgcttgtgaccctaataaattccaagtcctcttccctgcc

SEQ ID NO: 340 - DNA, 2107 bp, Homo sapiens
ctactccagcctccgccgcctcagcttcccgagcgagccctgcggccgccggagcagctcccgcggcggagcaggagccggatggtcagaggagcccggcagccccagcagccgcggagtcgcctggcccccagactgactggcacagtggagaaaccgcctcgaaaacggagaagcagtatcagaggttctggtgatagcagtcattcacaatctcaaggggaaagatatcaacatttcactgaaaagactgaatttrctcttaaagaaatcatgtcctctggaggtgctgaagatgatatcccacagggagagaggaaaacagttacagatttttgttatcttctggataaatctaagcaactgttcaatgggttaagagatttgccacaatatggacagaagcagtggcagtcctattttggaagaacttttgatgtttacaccaaactctggaagttccagcagcagcatcgacaagtcttggataatcggtatggcttgaagcgctggcaaataggagaaattgcttccaagattgggcagctatactatcattattacttacgcacatcggaaaccagctatctgaatgaggctttttccttctattctgcaatcagacagagatcatattattctcaagtcaataaagaggacagacctgaattggtagttaagaagttacgatattatgcaagatttatagtagtttgtcttcttctcaacaaaatggatgttgtaaaggatctggtaaaggaattgtcagatgaaattgaagattatactcaccgatttaatactgaagatcaagtggaatggaacttggtgcttcaagaagtagcagctttcattgaggcggatcctgtaatggtattaaatgatgataataccattgttatcacatcgaatcgccttgctgaaacaggagccccattgctggaacagggcatgattgtgggacagttgtctctggctgacgcactcattattggtaattgtaataatcaggttaagttcagtgaactaactgttgacatgttccggatgttacaagctctggaaagggagccaatgaatttagcttcccagatgaataaaccaggaatgcaggaatcagctgacaagcctactagacgagaaaacccccacaagtatctgctctacaaaccaaccttcagccagctatataccttcttagcagcgtcttttaaggagctgcctgccaatagygtgcttctgatttacctgtcggccactggcgttttccccacaggtcgttctgatagtgaaggtccttatgattttggaggtgtacttactaatagtaaccgggatattattaatggagatgccatccacaaacgaaatcagtcccacaaggaaatgcactgccttcatcccggggatctctatcctttcaccaggaagccactgttcatcattgtggattcgtctaatagtgttgcgtataagaatttcacaaacttgtttggacagccactagtctgcttgctttctcctacagcatatccaaaagctttacaagatcaatctcagcgaggtagcctcttcactctctttttgaacaatcctctaatggccttcctatttgtctctggattgtcaagcatgcgcagaggcctatgggaaaagtgtcaagaatatcttcgaaaaatcaaccgtgatattgcccagctactgactcattcacgttcaatagatcaggcatttctccagttttttggagatgaatttcttcgcttgctcctcacaagatttatcttttgttcagccaccatgaggatgcacaagatttttcgggaaacacgaaattatccagaatcatatccacaactgccaagggatgaaacagtggagaatcctcatctccagaagcacattttggaattagcatccattctggatgttcgaaacgtgttctttgagaataccattgatgactattaaaacaaaaaccctgttgtcgaaacaagttttcattttccacaaattttaaatggtgcagttttctaacgtgataagacacatagtggtgttacttagtttttattttttaatttagggccaccattttaaaaacaaa

SEQ ID NO: 341 - DNA, 2038 bp, Homo sapiens
ctactccagcctccgccgcctcagcttcccgagcgagccctgcggccgccggagcagctcccgcggcggagcaggagccggatggtcagaggagcccggcagccccagcagccgcggagtcgcctggcccccagactgactggcacagtggagaaaccgcctcgaaaacggagaagcaggactgaatttrctcttaaagaaatcatgtcctctggaggtgctgaagatgatatcccacagggagagaggaaaacagttacagatttttgttatcttctggataaatctaagcaactgttcaatgggttaagagatttgccacaatatggacagaagcagtggcagtcctattttggaagaacttttgatgtttacaccaaactctggaagttccagcagcagcatcgacaagtcttggataatcggtatggcttgaagcgctggcaaataggagaaattgcttccaagattgggcagctatactatcattattacttacgcacatcggaaaccagctatctgaatgaggctttttccttctattctgcaatcagacagagatcatattattctcaagtcaataaagaggacagacctgaattggtagttaagaagttacgatattatgcaagatttatagtagtttgtcttcttctcaacaaaatggatgttgtaaaggatctggtaaaggaattgtcagatgaaattgaagattatactcaccgatttaatactgaagatcaagtggaatggaacttggtgcttcaagaagtagcagctttcattgaggcggatcctgtaatggtattaaatgatgataataccattgttatcacatcgaatcgccttgctgaaacaggagccccattgctggaacagggcatgattgtgggacagttgtctctggctgacgcactcattattggtaattgtaataatcaggttaagttcagtgaactaactgttgacatgttccggatgttacaagctctggaaagggagccaatgaatttagcttcccagatgaataaaccaggaatgcaggaatcagctgacaagcctactagacgagaaaacccccacaagtatctgctctacaaaccaaccttcagccagctatataccttcttagcagcgtcttttaaggagctgcctgccaatagygtgcttctgatttacctgtcggccactggcgttttccccacaggtcgttctgatagtgaaggtccttatgattttggaggtgtacttactaatagtaaccgggatattattaatggagatgccatccacaaacgaaatcagtcccacaaggaaatgcactgccttcatcccggggatctctatcctttcaccaggaagccactgttcatcattgtggattcgtctaatagtgttgcgtataagaatttcacaaacttgtttggacagccactagtctgcttgctttctcctacagcatatccaaaagctttacaagatcaatctcagcgaggtagcctcttcactctctttttgaacaatcctctaatggccttcctatttgtctctggattgtcaagcatgcgcagaggcctatgggaaaagtgtcaagaatatcttcgaaaaatcaaccgtgatattgcccagctactgactcattcacgttcaatagatcaggcatttctccagttttttggagatgaatttcttcgcttgctcctcacaagatttatcttttgttcagccaccatgaggatgcacaagatttttcgggaaacacgaaattatccagaatcatatccacaactgccaagggatgaaacagtggagaatcctcatctccagaagcacattttggaattagcatccattctggatgttcgaaacgtgttctttgagaataccattgatgactattaaaacaaaaaccctgttgtcgaaacaagttttcattttccacaaattttaaatggtgcagttttctaacgtgataagacacatagtggtgttacttagtttttattttttaatttagggccaccattttaaaaacaaa

SEQ ID NO: 342 - DNA, 2237 bp, Homo sapiens
ccttcctccctccygcatctgagctttgtctccaccagcaacatgagccgccaattcacctgcaagtcgggagctgccrccaaggggggcttcagtggctgctcagctgtgctctcagggggcagctcatcctccttccgggcagggagcaaagggctcagtgggggctttggcagccggagcctctacagcctggggggtgtccggagcctcaatgtggccagtggcagcgggaagagtggaggctatggatttggccggggccgggccagtggctttgctggaagcatgtttggcagtgtggccctgrggcctgtgtgcccaactgtatgcccacctggaggcatccaccaggttaccrtcaatgagagcctcctggcccccctcaacgtgragctggaccccragatccagaaagtgcgtgcccaggagcgagagcagatcaaggctctgaacaacaagttcgcctccttcatcgayaaggtgcggttcctggagcagcagaaccaggtactggagaccaagtgggagctgctgcagcagctggacctgaacaactgcaagaacaacctggagcccatcctcgagggctacatcagcaacctgcggaagcagctggagacgctgtctggggacagggtgaggctggactcggagctgaggaatgtgcgggacgtagtggaggactacaagaagaggtatgaggaggaaatcaacaagcggacagcagcagagaacgagtttgtgctgctcaagaaggatgtggatgctgcttacgccaataaggtggaactgcaggccaaggtggaatccatggaccaggagatcaagttcttcaggtgtctctttgaagccgagatcactcagatccagtcccacatcagtgacatgtctgtcatcctgtccatggacaacaaccggaacctagacctggacagcatcattgacgaagtcygcacccagtatgaggagattgccttgaagagtaaggccgaggctgaggccctgtaccagaccaagttccaagagcttcagctggcagctggcaggcatggggacgacctcaaaaacaccaagaatgaaatctcggagctcactcggctcwtccagagaatccgctcagagatcgagaacgtgaagaagcaggcttccaacctggagacagccatcgctgatgctgagcagcggggagacaacgccctgaaggatgcccgggccaagctggacgagctggagggcgccctgcaccaggccaaggaggagctggcrcggatgctgcgcgagtaccaggagctcatgagcctgaagctggccctggacatggagatcgccacctatcgcaagctactggagagcgaggagtgcaggatgtcaggagaatttccctcccctgtcagcatctccatcatcagcagcaccagtggcggcagtgkctatggcttccggcccagcatggtcagcggtggctatgtggccaacagcagcaactgcatctctggagtgtgcagcgtgagaggcggggagggcaggagccggggcagtgccaacgattacaaagacaccctrgggaagggttccagcctgagtgcaccctccaagaaaaccagtcrgtagagaagactgccccgggccccgcctcattccatgacccggctctggatcccacactgtacttcccacagcccactctcagctccatctccaccctgctggtcctgctcccatacacctggcactggccttggccacccacttctcccagcctgtgtcttcctgatcctgggaaggcctggatgacmaagcttggtgaaattcctccctgtacacaccctattaactccttggctgtggtcccccagctacaccaccagcccaggtcctggctgccagctttcctcctctgcccggcctctagcgcagtcgctaactactctgctgggctccctgggtctctgcccaaggccccgcacacactgggrcctagcatagttcctgcctatgccaggagctggctctgtgtttaagaaaaggaggactgaaggacaaacaaccaagagtggcccagtccccacccccacatctagctcagtctcaaatctgagtgggaccaagtgcaattcagggcctttttctccactcacctgcacccagaagcagagaaaagcaggcactgttcacttttcctttattcttaatggccttcctctgttgcaacctcaataaacagcacaatctca

SEQ ID NO: 343 - DNA, 2304 bp, Homo sapiens
atggatcaggagcagatacgccccccaattatagcttgggccataacgctttgaaatagttgaaggccaggcatggtggctcacacctgtaatcccagcactttgggaggccgaggcgagcagattacgaggtcaggagttcgagaccagcctgaccaacatagtgaaaccctgtctctactaaaaatacaaaaattactgggcatggtggtgcaggcctataatcctagctactcggggggccgaggcaggagaatcgcttgaacccgagaggcaatcgcaccactgcactccagcctgggtgacagagcaaggcgccatctcaaaaaaaatgaacaaacrgtagttgaaaattctttaaatgtttttcacattaatatggagattcaggatatgaagaatcatgcaccacggttcagcaggaatgttattaagttacgtatctctgagtttacccagctggaacaagatttgcaacagaacctgcagaagatcctgatgttgagagaaattccttacaaaattatcaccttagcagcaactctatatttctctttgaagtaaaagtgaccaacagtggaaagacatatgttgatcctgtgttagagaagctgcttgactaggaaaagcagagctcccatcccttagtgctagcagccttagacggccccccaacaaagcagcatcactcaactcctgatcctattggttgaagccaatgacaaccctgtgttcatctaggatgtgtacagcgtcggccttcaggaagatgtgcatccgggcactcctgtgctgagagtgagggccaccaaccaggactagagtgtcaaggcagagatcacatatggcttcacaacccagagtacccatatctagtttggccttgatcaaatagtggagaaatgaaaactttaagtacattggacttttaaagatttttaatttccatggttttggtagcaagtgacagagagggactcattgtccagtgtacagttgagaccgaatttctagaagataatgacaatatcctagaggcgatttttacttctaattccacaatgattcccaaagattctgcaccttggacagtaatcactgtccaggatttaaatcacaagatctttaaatcacaagatctggattcgggagaaaaygaggtcacatgtctgatataagaaaatgcrccttgagaaaaatcttcctccaataattaactacatgcttgtaacaaatggggccgtggaccaggaacagacccaaggtataacatcagcatcactgccactgacagaggcaaaccaaccctctcgtccagcccaagcatcaccctactcattggcgatgccaacgacaatgctctggttttctaccaggcctcctacgtcgtccacgtggccaagaacaatcttcccaaagcctccatagtgtkcaagtagacacctccaacctagacttgggacccaacagccaagttccctattccatcgtggccagtgacctggagccacaggcgctgtgattctaggtgtccttgagcgcacagtgcgccttcgaccaagagcagccgcgagccttcaagctcacgctgcaggcccgcgaccaggactagctcgcgctcggcgtcaacgtgagcctgygcgtgttggtggacgacctgaatgacaacgcaccgcgggtgctgtaccccagctctggagcgcaatggcttcgcgctcttggatatggtgctgcacgcygcggagcctggctacctggtcaccaaggtggtggctgtagacgcagatgtgagacacaatgcgtggctgtcctaccacgtgctgcaggccagcaagcccaggctcttcagcctggaatgcgcaccgacgaggtgctgacagctcgcacgatgggccacaggaaagcgactcgccagcgcctactggtcgcggtgcactgcggtggacagccgctcctctcgctaccgccacgtcaccaccactaccgcccctcgtcgccgacagcctgcaggagactctgccagacctcagcgatcactctgcaaagctacagcctgaatccaaaattaatttatatctggtgattgccttagctttaatttcctttttattcttcctgattgcattgtttgtgctggttttaaagtgccgaagaccccaaaatgatcctgtctgagtctttcccacggatgtctatcccgcgctaagccccaggtttctgggtaactgtagctctatgatgccatattcctaccaggtgtgtgcttctcctacgaatccagggctgagtgaacttcttttttga

SEQ ID NO: 344 - DNA, 579 bp, Homo sapiens
atgtcatcattggtaaaggaggacttggagaagaaactgtttaagccactctcgcagaatctgtacgagtttattgaaatagagttctccgtccaggacaggtattacctctgtgtgtcagtgaccaaaaaggaagaagtaaaaatagtcatggtgaaacactacagaataggtttagatgaaaaatatgaagtaacaaaaaagtggtctttgaacgawctgcagatgattgatggaaaagaagcagatactgacaatccattttttgatctgcacttcaagaaagtgtacagtttggaagcatatagctgtgcttctaaatatgcctttgctcgaactgtaaataagctgaatcatgcatatcttaaaaaggacttacagatcgtgaactttgattctacatacattaacgatgattccatttggtcctccaacaataaggattgtttggtccttatgagaatatgcttttacgctttcaatcttgtgtgcttgtccctatgtcccttgccactctgaagctgtgtaccacattccttcatcagtgacctatgaaaatggtttcccaagtaaatatts

SEQ ID NO: 345 - DNA, 469 bp, Homo sapiens
gsgacttggatcctcgaatctgcctaggtgcctgtaaaccctagggctctggcatcatcggagcccccagccccaaacagctgcaggggcactgctgactggctctctgcctgtagccagagacccagtggatgcasccggagagggcctgcatacagtgaagttgttctctgaagttcctcatstgccttaagtmtggacccaccaaagaagaaaacaatgaccrctggtcccttcccggagttttctctgactgaactgctgtcacaggaagaaagactgaagcctgctcacatacctggacagattttgcaaaccgttgtctgctctgtgagcccaacagactttgtcccaggccactgtatgttcttcaagcccactgaattcccctgaaaatcatttactagccccctgaaattacccacacttccccattgctcatctgtaccccatttcgtggtggggcagt

SEQ ID NO: 346 - DNA, 591 bp, Homo sapiens
atgaatgatcgtgaatyggggagccctcagaatcacagcagtttcagagatactccaggggtgccttgtgatcagaacgaatttatagacaaaaaaggttctacccrtcacctacagataatggtgagtaaatacaagaacaatgttctgctgaaaggattagaarccatcaatgactatcacttcagcataattaattccttactgatcaatgatttaaaacttaattcaacaaggagagacgaatatgacaaaattcagattgccgacttgatggaagaaaagttcccaggtgatgctggtttkggcaaactgagaactcttcaaagaaataccaacactgggagaggagaccttgctgaaactcttagaaaagtcaaaagatcatctgctctgggtttagatgtcctccttttttctttattggttgtgaataaaattaaatccattccagcaaaaggaaaaacctcatcaaagaagaggaagcagagaaaagtaggtccaactacacctttagcaaccacagacaagaagttcacagctgaagraggagaggagactcctatagctcagcgttttcacacaccatag

SEQ ID NO: 347 - DNA, 479 bp, Homo sapiens
cagtttgttgaacrtcatttagcattttcttgataattcaatgttaattttattaaaagtaattattgtagtaggttgtagcggattcagtaaatatatccagttcctattctatattctttctaggtgttaggaatgctcccaggaggtacaaaagctatcagtcgctgcaccgaaggactctaggatgctatgacttagttttggaccatggagattgcccarcargccgagaatattccagccctccaacattgttgttaaaaagtccactgctgtatgttaggtgacttcccaaagctgctcactwcttcttmttattctgttttctcaaccccacaaaaatccaatcactgaaatcctgaactcttttgatagtggcatgagtgttaagtaaattgcacacctcttgtggaattcattttcacttaatcatgctaattatgtggagacttgtttgttgttgttctttgtttttt

SEQ ID NO: 348 - DNA, 2879 bp, Homo sapiens
tgtacaaagatggctgccacattggcgctgtcattttggtactgagcagagcgacgggcttaattcgacccaatccaggccagagtctttctctcaggggcttcctcgtgctcagctaatcctccgatcaatccttgggaatccctgggacctcttcggtatccctactctcagccagggatcatgtcttgggccgctcgcccgcccttcctccctcagcggcatgccgcagggcagtgtgggccggtgggggtgcgaaaagaaatgcattgtggggtcgcgtcccggtggcggcggcgacggccctggctggatcccgcagcggcggcggcggcggcggtggcaggcggagaacaacaaaccccggagccggagccaggggaggctggacgggacgggatgggcgacagcgggcgggactcccgaagcccagacagctcctccccaaatccccttccccagggagtccctcccccttctcctcctgggccacccctacccccttcaacagctccatcccttggaggctctggggccccacccccacccccgatgccaccacccccactgggctctccctttccagtcatcagttcttccatggggtcccctggtctgccccctccagctcccccaggattctccgggcctgtcagcagcccccagattaactcaacagtgtcactccctgggggtgggtctggcccccctgaagatgtgaagccaccagtcttaggggtccggggcctgcactgtccaccccctccaggtggccctggggctggcaaacggctatgtgcaatctgyggggacagaagctcaggcaaacactacggggtttacagctgtgagggttgcaagggcttcttcaaacgcaccatccgcaaagaccttacatactcttgccgggacaacaaagactgcacagtggacaagcgccagcggaaccgctgtcagtactgccgctatcagaagtgcctggccactggcatgaagagggaggcggtacaggaggagcgtcagcggggaaaggacaaggatggggatggggagggggctgggggagcccccgaggagatgcctgtggacaggatcctggaggcagagcttgctgtggaacagaagagtgaccagggcgttgagggtcctgggggaaccgggggtagcggcagcagcccaaatgaccctgtgactaacatctgtcaggcagctgacaaacagctattcacgcttgttgagtgggcgaagaggatcccacacttttcctccttgcctctggatgatcaggtcatattgctgcgggcaggctggaatgaactcctcattgcctccttytcacaccgatccattgatgttcgagatggcatcctccttgccacaggtcttcacgtgcaccgcaactcagcccattcagcaggagtaggagccatctttgatcgggtgctgacagagctagtgtccaaaatgcgtgacatgaggatggacaagacagagcttggctgcctgagggcaatcattctgtttaatccagatgccaagggcctctccaaccctagtgaggtggaggtcctgcgggagaaagtgtatgcatcactkgagacctactgcaaacagaagtaccctgagcagcagggacggtttgccaagctgctgctacgtcttcctgccctccggtccattggccttaagtgtctagagcatctgtttttcttcaagctcattggtgacacccccatcgacaccttcytcatggagatgcttgaggctccccatcaactggcctgagctcagacccagacgtggtgcttctcacactggaggagcacacatccaagagggactccaagccctggggcagggtggggggccatgttcccagaaccttgatggggtgagaagtacagggcagaaccaagaacataaaccctccaagggatctgcttgatatcccaagttggaagggaccccagatacctgtgaggactggttgtctctcttcggtgsccttgagtctcwgaatttgtcgggktctcccatgatttggggtgatttctcaccctctgtccttcccccagcacaaagcactggccttgcctccaggaccttgcttccttctcatcttgcctcattttgcttcccatctgaagagtggaaatggggawctcccccagaggtggatactggggggcaggcctcccaagctgatggacatgagagtagggccctgacaggccttcctcctctcaaacctggcagatgggggcctctctggaagagggaggggccctgtcactgtccaraktctctttttacacttcacctccttctgcagtcagactgaaatataaaaaaggtggtggtggtggtgaaggggctggtggagatgtaggaaccgatctgctatttttaatttcctgtgaggatagagacttgcagttagactcaaagaagtactgtactttcccaggttgactaagaaatgccagtggtggaggtgggtgtttgggaaaggcagggccctgaaatggcctgtccctagggctctccaagcactagccttcccagcttcccgccgcccccccyatctcttcctgtctaacttggggaaggggcctgggctgtgaggacagggcccccacaggggatggtttcacgagtgtagtcccggaggccttccctttacagctctcctccagccctgggcacatagcataggctggggacacaggatcctggcctgagaattgaggggaggtggccagcccgcagargtggggtgctggggctgcatgatttttgccctgcgtcccttctctttggggctcctttcccctctcatacataaaatcgctttcaaattaaaatcgctgttttctgga

SEQ ID NO: 349 - DNA, 2358 bp, Homo sapiens
ggagaggatcccggagccggtgagaattctctgttttttctctaccatcctttccaggccttttcctcacctaatgagtcgtagagacgagggcccagagagtctgtaaagtggctggtgaaagattagtgtcccagggccctacatccgggaggtggttcgggataaagagaactagtcttgggaacaatgtaggtgggaacttaagggaatgggagagcggcccatagaggtggacggagggcgcgattggagtaaagcggaccctgtgtaggtatagagttgagtcaagtggagtcactgcctctgtccctctggtcagcgtgatggccagaggcctgggggscccccactgggtggccgtgggactgctgacctgggcgaccttggggcttctggtggctggactcgggggtcatgacgacctgcacgacgatctgcaagaggacttccatggccacagccacaggcactcacatgaagatttccaccatgghcacagccatgcccatggycatggccacactcacgagagcatctggcatggacatacccacgatcacgaccatggacattcacatgagratttacaccatggccatagccatggctactcccatgagagcctctaccacagaggacatggacatgaccatgagcatagccatggaggctatggggagtctggggctccasgcatcaagcaggacctggatgctgtcactctctgggcttatgcactgggggccacagtgctgatctcagcagctccattttttgtcctcttccttatccccgtggagtcgaactctccccggcatcgctctctacttcagatcttgctcagttttgcttccggtgggctcctgggagatgctttcctgcacctcattcctcatgctcttgaacctcattctcaccacactctggagcaacccggacatggacactcscacagtggccagggccccattctgtctgtgggmctgtgggttctcagtggaattgttgcctttcttgtcgtggagaaatttgtgagacatgtgaaaggaggacatggtcacagtcatggacatggacacgctcacagtcatacacgtggaagtcatggacayggaagacaagagcgttctaccaaggagaagcagagctcagaggaagaagraaaggaaacaagaggggttcagaagaggcgaggagggagcacagtacccaaagatgggccagtgagacctcagaacgctgaagaagaaaaaagaggcttagacctgcgtgtgtyggggtacctgaatctggctgctgacttggcacacaacttcactgatggtctggccattggggcttcctttcgagggggccggggactagggatcctgaccacaatgactgtcctgctacatgaagtgccccacgaggtcggrgactttgccatcttggtccagtctggctgcacaaaaagcaggcgatgcgtctgcaactactgacagcagtaggggcactggcaggcacagcctgtgcccttctcactgaaggaggagcagtgggragtgaaattgcaggtggtgcaggtcctggctgggtcctgccatttactgcaggtggctttatctacgtagcaacagtgtctgtgttgcccgagctgctgagggaggcatcaccattgcaatcacttctggaggtgctggggctgctggggggagttatcatgatggtgctgattgcccaccttgagtgaggggtggataaactacccctgccccaaacctctacccctaactccaggtcaggggtgcgtagaggttgggggccctggccagggacatctgccaaaggaaggaactgtagcctgggagaatggttactttggcattagggccttcaagggctggcagtcttacagaggctggagcggtgagaatgagaggccagagggaccatagtgttgggcactgtctgaccatgttgcatttggaaggctaaatggggccatgaagaaggctggaagggacagggggtgatggcagcctacctggtgtcccctaccccacctgttctcggagaaccaagttgctacacaggaagttctccaaggtccagtttcctttctcccaccagttggtggaggcttcagggaagaccagagtcctggacagagagggtaacaggaggagtcggggataaacatcaaacatcaatcgtgtgtcctgatttgggagtgattggggggatggggtgggagagggttarttggtattctcatggcctgattttttttgtttctattccttttatatcactgtgtttgaatcgagggggaggggtggtaaccggaaataaagacctccgatcttccgcccc

SEQ ID NO: 350 - DNA, 2149 bp, Homo sapiens
atattggtaaaggcattagggcgaaggtggaacggaacttcctgttctcgcgggatctaaaggcsggactgccacgtccaagcaaaccgggaaaggagaggatcccggagccgcgtgatggccagaggcctgggggscccccactgggtggccgtgggactgctgacctgggcgaccttggggcttctggtggctggactcgggggtcatgacgacctgcacgacgatctgcaagaggacttccatggccacagccacaggcactcacatgaagatttccaccatgghcacagccatgcccatggycatggccacactcacgagagcatctggcatggacatacccacgatcacgaccatggacattcacatgagratttacaccatggccatagccatggctactcccatgagagcctctaccacagaggacatggacatgaccatgagcatagccatggaggctatggggagtctggggctccasgcatcaagcaggacctggatgctgtcactctctgggcttatgcactgggggccacagtgctgatctcagcagctccattttttgtcctcttccttatccccgtggagtcgaactctccccggcatcgctctctacttcagatcttgctcagttttgcttccggtgggctcctgggagatgctttcctgcacctcattcctcatgctcttgaacctcattctcaccacactctggagcaacccggacatggacactcscacagtggccagggccccattctgtctgtgggmctgtgggttctcagtggaattgttgcctttcttgtcgtggagaaatttgtgagacatgtgaaaggaggacatggtcacagtcatggacatggacacgctcacagtcatacacgtggaagtcatggacayggaagacaagagcgttctaccaaggagaagcagagctcagaggaagaagraaaggaaacaagaggggttcagaagaggcgaggagggagcacagtacccaaagatgggccagtgagacctcagaacgctgaagaagaaaaaagaggcttagacctgcgtgtgtyggggtacctgaatctggctgctgacttggcacacaacttcactgatggtctggccattggggcttcctttcgagggggccggggactagggatcctgaccacaatgactgtcctgctacatgaagtgccccacgaggtcggrgactttgccatcttggtccagtctggctgcacaaaaagcaggcgatgcgtctgcaactactgacagcagtaggggcactggcaggcacagcctgtgcccttctcactgaaggaggagcagtgggragtgaaattgcaggtggtgcaggtcctggctgggtcctgccatttactgcaggtggctttatctacgtagcaacagtgtctgtgttgcccgagctgctgagggaggcatcaccattgcaatcacttctggaggtgctggggctgctggggggagttatcatgatggtgctgattgcccaccttgagtgaggggtggataaactacccctgccccaaacctctacccctaactccaggtcaggggtgcgtagaggttgggggccctggccagggacatctgccaaaggaaggaactgtagcctgggagaatggttactttggcattagggccttcaagggctggcagtcttacagaggctggagcggtgagaatgagaggccagagggaccatagtgttgggcactgtctgaccatgttgcatttggaaggctaaatggggccatgaagaaggctggaagggacagggggtgatggcagcctacctggtgtcccctaccccacctgttctcggagaaccaagttgctacacaggaagttctccaaggtccagtttcctttctcccaccagttggtggaggcttcagggaagaccagagtcctggacagagagggtaacaggaggagtcggggataaacatcaaacatcaatcgtgtgtcctgatttgggagtgattggggggatggggtgggagagggttarttggtattctcatggcctgattttttttgtttctattccttttatatcactgtgtttgaatcgagggggaggggtggtaaccggaaataaagacctccgatcttccgcccc

SEQ ID NO: 351 - DNA, 1973 bp, Homo sapiens
atgggaaacagggtgaagcagagaagcaggacccggcagtggcaagcactcttccctttcctgctgcctttgttctgcggggcaccctcggagcagatccgctactctattccagaagaaacggtccagggctccgtggtggggaaccttgcggaggacatgcggctgcatgttcaggatttattgacctgaaaccttagagttagtgcagagaaacaatactttaccgtgaacacggagaatgggaacatacttgtgagtgacagaatagatcgagagtcactgtcttcaaaatcctctgtgtcatacccttagagattgtagcagagaatcctctaaatgtttttcacataaatgtgatgatagaagatataaatgataacccacctcattttccccaaaatagcattgttttacaaatcaatgaactagcaattccaggcattcggtttggcctggaatctgctatagatgcagatgtagggcctcactctctccagagttaccagctcagttctaatgaacatttctctctgatgatggacaagactaaaggcaagaacgctccagaattagtgctggagaagcccctgggccaggagcaacagagctctcatctcctggtcctggaagcaatggacatgggtgacccagtcccaactggcactgctgcaattcaaattgaggtcactgatgccaacgataatgccccagtttttagccaggatgtatacaaagtcagccttagagagaatgtgcccccaggcacctctgtactaaaggtgacagccactgaccaggatgagggtgtcaatgcggagatcacctactctttcaaatccctacgagatgatattggaaatatgtttgtgctagaccatcaaaatggggaaattaaatccaaagacttaatagacttcgaatttcgtagcagttataccatgagagtagaagctaaggatggtggaggcatgaccagcgaatgtaaaattatactagaaatcctagatgagaatgacaatgccccagacgtggtttttacttcagtgtccagttctgtaactgaggacgcagaaccctggacggtgatcactctgttcaaaacacatgataaagattcgagagaaaatggggaggttacatgcctcataaacgaaagagttccttttagaatcgaatcttccgccaataatgactataagcttgtaacagatgggaccctggattgggagcggatcccggagtacaacgtcaccatcactgccactgacaagggcaagcctccgctctcatccagcacaagcctcaccctacgcattggtgaagtcaacgrcaatgctccggttttccaccaagtctcctacgtggtccmcgtggccgaaaacaaccttcccggagcctccmtcccacaagtcagcgcctctgacctggacctagggctgaatggccaagtctcctactccatcgttaccactgacttggagctgcggrcactgtcgtcctacgtgtccgtgagcgcacagagcggggtggtggtcgcgcagcgtgccttcgaccacgagcagctgtgcgccttcgagctcacgatgcaggcccacgaccagggctcgcccgcgctcagcgccaacatgagccggcgcatgttggtgggcgacctcaatgacaatgtgccgcgggtgctgtaccccgcgctggggcccgatggctccgcactcttcgatatagtgccacgcgccgcagagtccggctacctggtgaccaaggtggtggcggtggacgcagattcgggacacaacgcttggctgtcctaccacgtgctgcaggccatcgagcccgggcttttcagcctggggctgcacacgggaacctgctggttgctgtgcgtgacggaggacagccgccgctctctgcgccgctacgcttcacctagtcttcgcagacagcctgcaggaggcactgccagacttcagtga

SEQ ID NO: 352 - DNA, 3039 bp, Homo sapiens
attggagagaggggtggtttcgaggtctctgcaagtctagaaagtttcttctagaaaagaaaggctcacggaaaatgtaagatgcagagagaacttgtttatgcaagaggagatggccctggggcccctcgccccggatctactgctcatccaccccatgcgattccaaattccccaccgtctactccrgtgccccattccatgcccccctccccrtccagaattccttatgggggcacccgctccatggttgttcctggcaatgccaccatccccagggacagaatctccagcctgccagtctccagacccatctctccaagcccaagcgccattttagaaagaagagatgtcaagcctgatgaagacatgagtggcaaaaacattgcratgtacagaaatgagggtttctatgctgatccttacctttatcacgagggacrgatgagcatagcctcatcccatggtggacacccactggatgtccccgaccacatcattgcatatcaccgcaccgccatccggtcagcgagtgcttattgtaacccctcaatgcaagcggaaatgcatatggaacaatcactgtacagacagaaatcaaggaaatatccggatagccatttgcctacactgggctccaaaacaccccctgcctctcctcacagagtcagtgacctgaggatgatagacatgcacgctcactataatgcccacggcccccctcacaccatgcagccagaccgggcctctccgagccgccaggcctttaaaaaggagccaggcaccttggtgtatatagaaaagccacggagcgctrcaggattatccagccttgtagacctcggccctcctctaatggagaagcaagtttttgcctacagcacrgcgacaatacccaaagacagagagaccagcgagaaaatgatgaaaaccacagccaacaggaaccacacagatagtgcaggaacgcmccatgtgtctggtgggaagatgctcagtgctctggagtccacggtgcctcccagccagcctccacctgtgggcacctcrgccatccacatgagcctgcttgagatgaggcggagygtggcggaactcaggctccagctccagcagatgcggcagctccagctgcagaaccaggagttgctgagggcaatgatgaagaaggcygagctggaaatcagtggcaaagtgatggaaacaatgaagagactggaggatcccgtgcagcgacagcgcgtcctagtggagcaagagagacaaaaatatcttcatgaggaagagaagatcgtcaagaagttgtgcgagttggaagactttgttgaagacttgaagaaggactccacggcagccagccgattggttactctgaaagacgtggaagacggggctttcctcctgcgtcaagtgggagaggctgtagctaccctgaaaggagaatttccaaccttacaaaacaagatgcgagccatcctgcgcatagaagtggaggccgtgcggtttctgaaggaggagccacacaagctggacagtctcctgaagcgtgtgcgcagcatgacagacgtcctgaccatgctgcggagacatgtcactgatgggctcctgaaaggcacsgacgcagcccaagccgcacagtacatggctatggaaaaggccacrgccgcagaagtcctgaagagtcaggaggaggcagcccacacctccggccagcccttccacagcacaggtgcccctggcgatgcgaagtcggaagtggtgmctttgtccggcatgatggttcgccacrcgcagagctcccctgtggtcatccagccctcccagcactccgtggccctgctgaaccctgctcagaacttgcctcacgtggccagctccccagccgtcccccaggaagcaacctccactctgcagatgtcgcaggctccgcagtccccacagatacccatgaatgggtctgccatgcagagcttgttcattgargaaatccacagtgtgagtgccaagaacagggcagtgtctatcgagaaagcagaaaagaaatgggaggaaaaaaggcaaaatctggatcactataatgggaaagagtttgagaagctcctagaagaagctcaggccaatatcatgaagtcaataccaaatctggagatgccgccagccacaggcccactgccaaggggagatgccccagtggacaaggtggaactttcagaagattctccaaattcggaacaggacttggaaaagctggggggaaagtcgccccctcctcctccgccacctcctcgtcgaagctaccygccaggatcgggactcaccaccacgaggtcaggcgatgtggtctacaccggcagaaaggagaacatcaccgctaaggcaagcagtgaagatgctggaccaagcccacagaccagagctacaaaatatccagcagaggagcctgcttcagcctggaccccatccccaccgcctgtcaccacctcctcctcaaaggatgaggaggaagaagaagaagaaggagacraaataatggcagaactccagggctccagcggggccccacagacgagcaggatgcctgtccccatgagtgccaagaacagacccggaaccctggacaaacccggcaagcagtccaaactgcaggatccccgccaatatcgtcaggtagttttaccttaaacccacttttggatggacgctatttcagttaagcaagtcactgacttagtttataccaaatattgtgctttctttgtaagataacggtttacatagacatcctggatctgggggcatgaagaaagtctaaataaacctttgttacacttttttaccacgcttttgcatgcttgcaataaaacatcttttactttgtgactccaaactccaaattttaactgttaacacacggtgccagaccaggtggcttttctttggtgaatgtagtgtttcatctgaacacctcgggaagcagagacaaaccaacctgtggttgaactgcccttaacgtcaccactactaacgtctatgttgact

SEQ ID NO: 353 - DNA, 5886 bp, Homo sapiens
ccaggggcaggggagatccaagaggccccgcgctggaatgcagttttctcgggcgagggagactttgcaccggagtggaaaatagtttggggtggggtttcgcaccgtcccctcctccccagccccgggccccctcccaggcgctttctgggagcttttagaactgcgctctgaagtttccagagagcgaggagcttttgcggcaggcagagacaatggaagaaaatgaaagccagaaatgtgagccgtgccttccttactcagcagacagaagacagatgcaggaacaaggcaaaggcaatctgcatgtaacatcaccagaagatgcagaatgccgcagaaccaaggaacgcctttctaatggaaacagtcgtggttcagtttccaagtcttcccgcaatatcccaaggagacacaccctaggggggccccgaagttccaaggaaatactgggaatgcaaacatctgagatggatcggaagagagaagcgttcctagaacatctgaagcagaagtacccccaccacgcctctgcaatcatgggtcaccaagagaggctgagagaccagacaaggagccccaaactgtctcacagtcctcaaccacccagtctgggtgacccggtcgagcatttatcagagacgtccgstgattctttggaagccatgtctgagggggatgctccaacycctttttccagaggcagccggactcgtgcgagccttcctgtggtgaggtcaaccaaccagaygaaagaaagatctctgggggttctctatctccagtatggmgatgaaaccaagcagctcaggatgccgaatgaaatcacaagtgcagacacaatccgtgctctcttcgtaagtgcctttccacagcagctcaccatgaaaatgctggaatcgcccagtgtcgccatttacatcaaagatgaaagcagaaatgtctattatgaattaaatgatgtaaggarcattcaagacagatcactcctcaaagtgtacaacaaggatcctgcacatgcgtttaatcacacaccaaaaactatgaatggagacatgaggatgcagagagaacttgtttatgcaagaggagatggccctggggcccctcgccccggatctactgctcatccaccccatgcgattccaaattccccaccgtctactccrgtgccccattccatgcccccctccccrtccagaattccttatgggggcacccgctccatggttgttcctggcaatgccaccatccccagggacagaatctccagcctgccagtctccagacccatctctccaagcccaagcgccattttagaaagaagagatgtcaagcctgatgaagacatgagtggcaaaaacattgcratgtacagaaatgagggtttctatgctgatccttacctttatcacgagggacrgatgagcatagcctcatcccatggtggacacccactggatgtccccgaccacatcattgcatatcaccgcaccgccatccggtcagcgagtgcttattgtaacccctcaatgcaagcggaaatgcatatggaacaatcactgtacagacagaaatcaaggaaatatccggatagccatttgcctacactgggctccaaaacaccccctgcctctcctcacagagtcagtgacctgaggatgatagacatgcacgctcactataatgcccacggcccccctcacaccatgcagccagaccgggcctctccgagccgccaggcctttaaaaaggagccaggcaccttggtgtatatagaaaagccacggagcgctrcaggattatccagccttgtagacctcggccctcctctaatggagaagcaagtttttgcctacagcacrgcgacaatacccaaagacagagagaccagagagaggatgcaagccatggagaaacagattgccagtttaactggccttgttcagtctgcgctttttaaagggcccattacaagttatagcaaagatgcgtctagcgagaaaatgatgaaaaccacagccaacaggaaccacacagatagtgcaggaacgcmccatgtgtctggtgggaagatgctcagtgctctggagtccacggtgcctcccagccagcctccacctgtgggcacctcrgccatccacatgagcctgcttgagatgaggcggagygtggcggaactcaggctccagctccagcagatgcggcagctccagctgcagaaccaggagttgctgagggcaatgatgaagaaggcygagctggaaatcagtggcaaagtgatggaaacaatgaagagactggaggatcccgtgcagcgacagcgcgtcctagtggagcaagagagacaaaaatatcttcatgaggaagagaagatcgtcaagaagttgtgcgagttggaagactttgttgaagacttgaagaaggactccacggcagccagccgattggttactctgaaagacgtggaagacggggctttcctcctgcgtcaagtgggagaggctgtagctaccctgaaaggagaatttccaaccttacaaaacaagatgcgagccatcctgcgcatagaagtggaggccgtgcggtttctgaaggaggagccacacaagctggacagtctcctgaagcgtgtgcgcagcatgacagacgtcctgaccatgctgcggagacatgtcactgatgggctcctgaaaggcacsgacgcagcccaagccgcacagtacatggctatggaaaaggccacrgccgcagaagtcctgaagagtcaggaggaggcagcccacacctccggccagcccttccacagcacaggtgcccctggcgatgcgaagtcggaagtggtgmctttgtccggcatgatggttcgccacrcgcagagctcccctgtggtcatccagccctcccagcactccgtggccctgctgaaccctgctcagaacttgcctcacgtggccagctccccagccgtcccccaggaagcaacctccactctgcagatgtcgcaggctccgcagtccccacagatacccatgaatgggtctgccatgcagagcttgttcattgargaaatccacagtgtgagtgccaagaacagggcagtgtctatcgagaaagcagaaaagaaatgggaggaaaaaaggcaaaatctggatcactataatgggaaagagtttgagaagctcctagaagaagctcaggccaatatcatgaagtcaataccaaatctggagatgccgccagccacaggcccactgccaaggggagatgccccagtggacaaggtggaactttcagaagattctccaaattcggaacaggacttggaaaagctggggggaaagtcgccccctcctcctccgccacctcctcgtcgaagctaccygccaggatcgggactcaccaccacgaggtcaggcgatgtggtctacaccggcagaaaggagaacatcaccgctaaggcaagcagtgaagatgctggaccaagcccacagaccagagctacaaaatatccagcagaggagcctgcttcagcctggaccccatccccaccgcctgtcaccacctcctcctcaaaggatgaggaggaagaagaagaagaaggagacraaataatggcagaactccaggcattccagaagtgttcctttatggatgtaaattcaaacagtcatgctgagccatcccgggctgacagtcacgttaaagacactaggtcgggcgccacagtgccacccaaggagaagaagggctccagcggggccccacagacgagcaggatgcctgtccccatgagtgccaagaacagacccggaaccctggacaaacccggcaagcagtccaaactgcaggatccccgccaatatcgtcaggctaatggaagtgctaagaaatctggtggggactttaagcctacttccccctccttacctgcttctaagattccagccctttctcccagctctgggaaaagcagttctctgccctcttctagtggtgacagctctaacctccctaatccacctgctactaaaccatcgattgcttctaaccctctcagcccccaaacaggaccacctgctcactctgcctccctcatcccttctgtctctaatggctctttgaagtttcagagcctcactcatacaggtaaaggtcaccatctttcattctcaccgcagagtcaaaatggccgagcaccccctcctttgtcattttcctcctcccctccttctcctgcctcctccgtctcactgaatcaaggtgccaagggcaccaggaccatccatactcccagcctcaccagctacaaggcacagaatggaagttcaagcaaagccaccccatccacagcaaaagaaacctcttaaaggtcaaatcctattaggcacaagtcggagttacatttaaaaaaaattaacagtctacaacaactgttttcacaagagaatgtaacatattgctgtatcgtttgaggcttaatgctaaatatgtgctaaatactggattaatagatttcagtaaagctcgttcgttttgtttggttttctttttacctagttgctatagtgtctacagtctatactcaatacctataaaatgcagtaagcatgtgttacagaaagaggttctggtgggagagaaaggtgcgtgtgagacaggagaattgtcttaagcatataaaacatgtatgattccagaattttagtatgttttgtataaaactatttttcattacggagactagaagtgaacagagaattacacaagtgtgactatacaaattgtaaaacagatactataatatttccttttattttagtgttatttagctttattacagatttctatttttgtcaaaacttcatggttcctttcaagatcttttttgccaaaacattttgatactatagcattgtacatttgaaagtagtgttctagactataaaaccaatgaacttctacatgagccctacagacaggcatgtgtagaaggcaatttatcaaacctattgcactgccatgaaaagtgtgtataataatttgctagcccaagcaagctagttttctttgcttgcttcttttctttcttttttccttccttttttttttttttttcttttttaacatgttgagattctctagttgttttctttggcgtatctaaccccttctkttgttttctgagacctggtaacccacgctcttgcattgtggattttaaaatgtatactctgtacggttctgtaaaccgaaaaacttttgtaaatatataaatatacatagacataaaaatactgtatgtgacagcacatagagtagttttcccacaccaaagttaatttttatgcatgctttaaaagtatatatcgggaccggcagaaatggaagtatccatacatttttaaaaagcaacaagtttgcacagctagagtgtttttgtaaataaatgtatttgtataacacagtcatgtaatatacagaactataagcagagactttgcaaaactaaataaagggctgcatgcttattattttttgtaccttgtcactataactacttcctagtcaaagaacgaaatgtaactgttaccgagttaaatgtttttcckctttgagggatgtaaccacatccactcagaggacactacttttctgaaagctctggggtgactaatgatgagttcctaataaattaattgcaagtgtggtgccttggatgtggcctgttggctcgctttcttctctgtggcttatcaaggtgtagatgacagaaagcaaacctggatacagagtttccaccctcagttcctggaggggctcttattattttctctctttttaaaaaacttccagtagaagtaaagtggaaataaaatgtcttta

SEQ ID NO: 354 - DNA, 1856 bp, Homo sapiens
tgcattaaraagtcttcagcagtgatattagacattggggcatgctcttacaggcaatgggtggtgtcataaagagcatatttacattcgttttaattgtggaatttataattggaaatttaggaaatagtttcatagcactggtgaactgtattgactgggtcaagggwagaaagatctcttcggttgatcggatcctcactgctttggcaatctctcgaattagcctggtttggttaatattcggaagctggtgtgtgtctgtgtttttcccagctttatttgccactgaaaaaatgttcagaatgcttactaatatctggacagtgatcaatcattttagtgtctggttagctacaggcctcggtactttttattttctcaagatagccaatttttctaactctrtttttctctacctaaagtggagrgttaaaaaggtggttttggtgctgcttcttgtgacttcggtcttcttgtttttaaatattgcactgataaacatccatataaatgccagtatcaatggatacagaagaaacaagacttgcagttctgattcaagtaactttacaygattttccagtcttattgtattaaccagcactgtgttcattttcataccctttactttgtccctggcaatgtttcttctcytcatcttctccatgtggaaacatcgcaagaagatgcagcacactgtcaaaatatccggagacgccagcaccaaagcccacagaggagttaaaagtgtgatcactttcttcctactctatgccattttctctctgtcttttttcatatcagtttggacctctgaaaggttggaggaaaatctaattattctttcccaggtgatgggaatggcttatccttcatgtcactcatgtgttctgattcttggaaacaagaagctgagacaggcctctctgtcagtgctactgtggctgaggtacatgttcaaagatggggagccctcaggtcacaaagaatttagagaatcatcttgaatatattagaaaaaaaatagctcctaagaaattcttgtatgttatataaatttatacttccttaagattctttcattgtgtataactttgtgaattttacaaagatrtgcttggaatcaacaccatccaaacatatcacaaattaggatatatgaaagtatgtatattaccatacagagaagaatgcgaatactataaagagttcttatacaaacagataatatagattttgtatcaatcattcaccttttttgagatttttaaatgagaaaacctataatgtataaaatacatgtgtgtatgtatgtatgtgacacagttactaaaaataggcttcttaaacttacatctcaatctggtagataaagtacataaaagaatatggaattttagtacctatattaagtgtttttawtttttgtataatatttagtacctgattagcgtgtatgcaaaaaastaatttgcttcgtttgttgaattagaagccagctgccttactaaactaccacatttgctttgctcattctcttggctttgcagatagaaaattatatcatctgcatatagtgacttataatgattattttacttctccattttactacttgtaattcttttttggtatcagttgtataatgaaatggtttgaacattcaaagtgttaagtaatcctgatcgtaactgctgtctttgcaaatggagtgttttctagtgttttaacaataaacgtaatactgactctagctttgagataaattcttttaaaaatattmttcagggagaatatttgtttcctatcttcctgtgtatagtattgtaataaaatctctgttaaaaactatc

SEQ ID NO: 355 - DNA, 7800 bp, Homo sapiens
ttcaccggaatccgttgaaaataggactgactgcaaagccttaaagaaagaaggacctcgggaggagaaacgaaaagccgcctccgggcaagacttggcgtgctccgagccgaggggctgcttcaggacctcgccccctccctttcccgctggagaaattgccgctgatgcattatccaagtggtggttgggaggatttgcagcaacatttttggttttccctcccccttctatgcattctgtttttttcctcccttttctgtttttcttcttcccgggaagtgaattgctgatgcaaatcggactttattcattaatgatgcaaccggattcgtttcaggattacgttgcacgagttgaattttgaatgaaggagaagagtttttttttttttttttaaagaagtgttgactctctagttcgttgtacttttaattattattttatttaaatatacgacttaattgtattcttttaaaaatgcattaagtatatattttatggtaatttaccctcaaaatakatgtatatgggtgaaattgaagacgcttcagttaagtgaggttactggtgtgttggatgtttaattcagcaccagcattgcatgacagttgtttgaataacaagtggtttatttttaaaaccataccttttaaaatttaggttcagataatagtaaaagtcatcataataatttaaaggaaaaccagcagaaatcgaagcaaacatgtctggagaagtgcgtttgaggcagttggagcagtttattttggacgggcccgctcagaccaatgggcagtgcttcagtgtggagacrttactggatatactcatctgcctttatgatgaatgcaataattctccattgagaagagagaagaacattctcgaatacctagaatgggctaaaccatttacttctaaagtgaaacaaatgcgattacatagagaagactttgaaatattaaaggtgattggtcgaggagcttttggggaggttgctgtagtaaaactaaaaaatgcagataaagtgtttgccatgaaaatattgaataaatgggaaatgctgaaaagagctgagacagcatgttttcgtgaagaaagggatgtattagtgaatggagacaataaatggattacaaccttgcactatgctttccaggatgacaataacttatacctggttatggattattatgttggtggggatttgcttactctactcagcaaatttgaagatagattgcctgaagatatggctagattttacttggctgagatggtgatagcaattgactcagttcatcagctacattatgtacacagagacattaaacctgacaatatactgatggatatgaatggacatattcggttagcagattttggttcttgtctgaagctgatggaagatggaayggttcagtcctcagtggctgtaggaactccagattatatctctcctgaaatccttcaagccatggaagatggaaaagggagatatggacctgaatgtgactggtggtctttgggggtctgtatgtatgaaatgctttacggagaaacaccattttatgcagaatcgctggtggagacatacggaaaaatcatgaaccacaaagagaggtttcagtttccagcccaagtgactgatgtgtctgaaaatgctaaggatcttattcgaaggctcatttgtagcagagaacatcgacttggtcaaaatggaatagaagactttaagaaacacccatttttcagtggaattgattgggataatattcggaactgtgaagcaccttatattccagaagttagtagcccaacagatacatcgaattttgatgtagatgatgattgtttaaaaaattctgaaacgatgcccccaccaacacatactgcattttctggccaccatctgccatttgttggttttacatatactagtagctgtgtactttctgatcggagctgtttaagagttacggctggtcccacctcactggatcttgatgttaatgttcagaggactctagacaacaacttagcaactgaagcttatgaaagaagaattaagcgccttgagcaagaaaaacttgaactcagtagaaaacttcaagagtcaacacagactgtccaagctctgcagtattcaactgttgatggtccactaacagcaagcaaagatttagaaataaaaaacttaaaagaagaaattgaaaaactaagaaaacaagtaacagaatcaagtcatttggaacagcaacttgaagaagctaatgctgtgaggcaagaactagatgatgcttttagacaaatcaaggcttatgaaaaacaaatcaaaacgttacaacaagaaagagaagatctaaataaggaactagtccaggctagtgagcgattaaaaaaccaatccaaagagctgaaagacgcacactgtcagaggaaactggccatgcaggaattcatggagatcaatgagcggctaacagaattgcacacccaaaaacagaaacttgctcgccatgtccgagataaggaagaagaggtggacctggtgatgcaaaaagttgaaagcttaaggcaagaactgcgcagaacagaaagagccaaaaaagagctggaagttcatacagaagctctagctgctgaagcatctaaagacaggaagctacgtgaacagagtgagcactattctaagcaactggaaaatgaattggagggactgaagcaaaaacaaattagttactcaccaggagtatgcagcatagaacatcagcaagagataaccaaactaaagactgatttggaaaagaaaagtatcttttatgaagaagaattatctaaaagagaaggaatacatgcaaatgaaataaaaaatcttaagaaagaactgcatgattcagaaggtcagcaacttgctctcaacaaagaaattatgattttaaaaracaaattggaaaaaaccagaagagaaagtcaaagtgaaagggaggaatttgaaagtgagttcaaacaacaatatgaacgagaaaaagtgttgttaactgaagaaaataaaaagctgacgagtgaacttgataagcttactactttgtatgagaacttaagtatacacaaccagcagttagaagaagaggttaaagatctagcagacaagaaagaatcagttgcacattgggaagcccaaatcacagaaataattcagtgggtcagcgatgaaaaggatgcacgagggtatcttcaggccttagcttctaaaatgactgaagaattggaggcattaagaaattccagcttgggtacacgagcaacagatatgccctggaaaatgcgtcgttttgcgaaactggatatgtcagctagactggagttgcagtcrgctctggatgcagaaataagagccaaacaggccatccaagaagagttgaataaagttaaagcatctaatatcataacagaatgtaaactaaaagattcagagaagaagaacttggaactactctcagaaatcgaacagctgataaaggacactgaagagcttagatctgaaaagggtatagagcaccaagactcacagcattctttcttggcatttttgaatacgcctaccgatgctctggatcaatttgaaactgtagactccactccactttcagttcacacaccaaccttaaggaaaaaaggatgtcctggttcaactggctttccacctaagcgcaagactcaccagttttttgtaaaatcttttactactcctaccaagtgtcatcagtgtacctccttgatggtgggtttaataagacagggctgttcatgtgaagtgtgtggattctcatgccatataacttgtgtaaacaaagctccaaccacttgtccagttcctcctgaacagacaaaaggtcccctgggtatagatcctcaraaaggaataggaacagcatatgaaggtcatgtcaggattcctaagccagctggagtgaagaaagggtggcagagagcactggctatagtgtgtgacttcaaactctttctgtacgatattgctgaaggaaaagcatctcagcccagtgttgtcattagtcaagtgattgacatgagggatgaagaattttctgtgagttcagtcttggcttctgatgttatccatgcaagtcggaaagatataccctgtatatttagggtaacttcccagctctcagcatctaataacaaatgttcaatcctgatgctagcagacactgagaatgagaagaataagtgggtgggagtgctgagtgaattgcacaagattttgaagaaaaacaaattcagagaccrctcagtctatgttcccaaagaggcttatgacagcactctacccctcattaaaacaacccaggcagccgcaatcatagatcatgaaagaattgctttgggaaacgaagaagggttatttgttgtacatgtcaccaaagatgaaattattagagttggtgacaataagaagattcatcagattgaactcattccaaatgatcagcttgttgctgtgatctcaggacgaaatcgtcatgtacgactttttcctatgtcagcattggatgggcgagagaccgatttttacaagctgtcagaaactaaagggtgtcaaaccrtaacttctggaaaggtgcgccatggagctctcacatgcctgtgtgtggctatgaaaaggcaggtcctctgttatgaactatttcagagcaagacccgtcacagaaaatttaargaaattcaagtcccatataatgtccagtggatggcaatcttcagtgaacaactctgtgtgggattccagtcaggatttctaagataccccttgaatggagaaggaaatccatacagtatgctccattcaaatgaccatacactatcatttattgcacatcaaccaatggatgctatctgcgcagttgagatctccagtaaagaatatctgctgtgttttaacagcattgggatatacactgactgccagggccgaagatctagacaacaggaattgatgtggccagcaaatccttcctcttgttgttacaatgcaccatatctctcggtgtacagtgaaaatgcagttgatatctttgatgtgaactccatggaatggattcagactcttcctctcaaaaaggttcgacccttaaacaatgaaggatcattaaatcttttagggttggagaccattagattaatatatttcaaaaataagatggcagaaggggacgaactggtagtacctgaaacatcagataatagtcggaaacaaatggttagaaacattaacaataagcggcgttattccttcagagtcccagaagaggaaaggatgcagcagaggagggaaatgytacgagatccagaaatgagaaataaattaatttctaatccaactaattttaatcacatagcacacatgggtcctggagatggaatacagatcctgaaagatctgcccatgaaccctcggcctcaggaaagtcggacagtattcagtggctcagtcagtattccatctatcrccaaatcccgccctgagccaggccgctccatgagtgctagcagtggcttgtcagcaaggtcatccgcacagaatggcagcgcattaaagagggaattctctggaggaagctacagtgccaagcggcagcccatgccctccccgtcagagggctctttgtcctcyggaggcatggaccaaggaagtgatgccccagcgagggactttgacggagaggactctgactctccgaggcattccacagcttccaacagttccaacctaagcagccccccaagcccagyttcaccccgaaaaaccaagagcctctccctggagagcactgaccgcgggagctgggacccgtgagctgcctcagcactgggacctcycgctctccgctccctgccactcrcctcctctcactttcatctcttccctccacctcgcctgctcggcctgaaagccaccaggggcyggcagcagtagcaggacagggmttcaggagttctgacgacacgactctcagatccacgcccccagcctaacagcaacaacaaagacagactttccgtagcagcttagattaacgttgatttcattccatgcacttagagttgctttcagtaacattttacccctactcccaaaggtagcttaaatagacagattacacaaatgtaagtgataagaataagattagacagattttgctttcacagtagagtctcattatagtcctaaaatagctcatgggcttctccgcatccagaagggagaatysgtccctggagtggctcamtaagctcttaatcagcaaacgcagtgagtatcaacctgattgttgccaggaaatcctyatgaattaaaacaatgcatattttactacagtacagagwttaaatgaatacataaatgtagaagtactgaatgtatatatttaaaaggagcctcttgtattcaacaaaagatggatgcatatataagagagatgatttaatttaaagaaatatgttgtttcttgtctgtaatgtaatgtaaagggtggaaaggcctcaagctcacatttgtagagagagagcgagagaaatcagagttccctttattgccctgtcctcaaactggtcataggctctagtcacctggggagctgtagaaaacacttgcagagccaggttttgctggtttggggcatgccctgggcaccagagctttaacatttgaagccacttcagcagcagcagcaaaaggcgaactcatctctacccaagatgtttcttttcctagtggtggaatttgaacacttctcactttttattgtattttatcttccgcagataaatgtagaaatacacgrttctgtcacctctgatcccttccatctgaaaggktacaaggagtgttgtagcttctgaaggtgcagaaaacaatttctaaaaatgcttttattcctgggctaatcctgtccctccctaagtcrcagcgaggtgtctgtcccagggctggagatgcttcccaaggaggagtctgttttgttgagagtgggcgtgggcttcttcacataagcctggggaaggaagaaaaaacggctttcattaccaaataatgtaaaacctcaaaagcaagggcttcaacagccttaaccaaatattattccccatagccagtggaaaatggatgtgacaaccccagtgcgcaggccagagtgagtgagcccagcacggcgctccgactggcttcctctctcaggtgctggattgtggggttagtggcatttccagctggattcctcctgttgtagttgccataaggaaatgagatgcagaatcagaaggatctatttctacagaatcatttcaccagttaagcacatgagtagagaaagagataaaaataaaagtatctcatgaaggaaagagattttgcctctcttttacttttcacctaagtttctctgagaaatagagacaggattctctctttaaaattcagtgaaaatgaagaaagttttcctgcagttgctaacctgagttgcagtgtttaaggccatcatttcactgctgctgtctgtgactccacgtctgtgtcactgaggtgacctgcgtgtcactgaggtggccaccatgctggcctgcggcatgtgcagggagctgaggctgtttccaggtgatgctgctgtgtggagaaggttctgagatgcagtgagggaagaaaggatcctgctggggattccattgtaagcacctataatcgggaattttcatgtaacagctttgacatttaaa

SEQ ID NO: 356 - DNA, 7557 bp, Homo sapiens
ttcaccggaatccgttgaaaataggactgactgcaaagccttaaagaaagaaggacctcgggaggagaaacgaaaagccgcctccgggcaagacttggcgtgctccgagccgaggggctgcttcaggacctcgccccctccctttcccgctggagaaattgccgctgatgcattatccaagtggtggttgggaggatttgcagcaacatttttggttttccctcccccttctatgcattctgtttttttcctcccttttctgtttttcttcttcccgggaagtgaattgctgatgcaaatcggactttattcattaatgatgcaaccggattcgtttcaggattacgttgcacgagttgaattttgaatgaaggagaagagtttttttttttttttttaaagaagtgttgactctctagttcgttgtacttttaattattattttatttaaatatacgacttaattgtattcttttaaaaatgcattaagtatatattttatggtaatttaccctcaaaatakatgtatatgggtgaaattgaagacgcttcagttaagtgaggttactggtgtgttggatgtttaattcagcaccagcattgcatgacagttgtttgaataacaagtggtttatttttaaaaccataccttttaaaatttaggttcagataatagtaaaagtcatcataataatttaaaggaaaaccagcagaaatcgaagcaaacatgtctggagaagtgcgtttgaggcagttggagcagtttattttggacgggcccgctcagaccaatgggcagtgcttcagtgtggagacrttactggatatactcatctgcctttatgatgaatgcaataattctccattgagaagagagaagaacattctcgaatacctagaatgggctaaaccatttacttctaaagtgaaacaaatgcgattacatagagaagactttgaaatattaaaggtgattggtcgaggagcttttggggaggttgctgtagtaaaactaaaaaatgcagataaagtgtttgccatgaaaatattgaataaatgggaaatgctgaaaagagctgagacagcatgttttcgtgaagaaagggatgtattagtgaatggagacaataaatggattacaaccttgcactatgctttccaggatgacaataacttatacctggttatggattattatgttggtggggatttgcttactctactcagcaaatttgaagatagattgcctgaagatatggctagattttacttggctgagatggtgatagcaattgactcagttcatcagctacattatgtacacagagacattaaacctgacaatatactgatggatatgaatggacatattcggttagcagattttggttcttgtctgaagctgatggaagatggaayggttcagtcctcagtggctgtaggaactccagattatatctctcctgaaatccttcaagccatggaagatggaaaagggagatatggacctgaatgtgactggtggtctttgggggtctgtatgtatgaaatgctttacggagaaacaccattttatgcagaatcgctggtggagacatacggaaaaatcatgaaccacaaagagaggtttcagtttccagcccaagtgactgatgtgtctgaaaatgctaaggatcttattcgaaggctcatttgtagcagagaacatcgacttggtcaaaatggaatagaagactttaagaaacacccatttttcagtggaattgattgggataatattcggaactgtgaagcaccttatattccagaagttagtagcccaacagatacatcgaattttgatgtagatgatgattgtttaaaaaattctgaaacgatgcccccaccaacacatactgcattttctggccaccatctgccatttgttggttttacatatactagtagctgtgtactttctgatcggagctgtttaagagttacggctggtcccacctcactggatcttgatgttaatgttcagaggactctagacaacaacttagcaactgaagcttatgaaagaagaattaagcgccttgagcaagaaaaacttgaactcagtagaaaacttcaagagtcaacacagactgtccaagctctgcagtattcaactgttgatggtccactaacagcaagcaaagatttagaaataaaaaacttaaaagaagaaattgaaaaactaagaaaacaagtaacagaatcaagtcatttggaacagcaacttgaagaagctaatgctgtgaggcaagaactagatgatgcttttagacaaatcaaggcttatgaaaaacaaatcaaaacgttacaacaagaaagagaagatctaaataagctggaagttcatacagaagctctagctgctgaagcatctaaagacaggaagctacgtgaacagagtgagcactattctaagcaactggaaaatgaattggagggactgaagcaaaaacaaattagttactcaccaggagtatgcagcatagaacatcagcaagagataaccaaactaaagactgatttggaaaagaaaagtatcttttatgaagaagaattatctaaaagagaaggaatacatgcaaatgaaataaaaaatcttaagaaagaactgcatgattcagaaggtcagcaacttgctctcaacaaagaaattatgattttaaaaracaaattggaaaaaaccagaagagaaagtcaaagtgaaagggaggaatttgaaagtgagttcaaacaacaatatgaacgagaaaaagtgttgttaactgaagaaaataaaaagctgacgagtgaacttgataagcttactactttgtatgagaacttaagtatacacaaccagcagttagaagaagaggttaaagatctagcagacaagaaagaatcagttgcacattgggaagcccaaatcacagaaataattcagtgggtcagcgatgaaaaggatgcacgagggtatcttcaggccttagcttctaaaatgactgaagaattggaggcattaagaaattccagcttgggtacacgagcaacagatatgccctggaaaatgcgtcgttttgcgaaactggatatgtcagctagactggagttgcagtcrgctctggatgcagaaataagagccaaacaggccatccaagaagagttgaataaagttaaagcatctaatatcataacagaatgtaaactaaaagattcagagaagaagaacttggaactactctcagaaatcgaacagctgataaaggacactgaagagcttagatctgaaaagggtatagagcaccaagactcacagcattctttcttggcatttttgaatacgcctaccgatgctctggatcaatttgaaactgtagactccactccactttcagttcacacaccaaccttaaggaaaaaaggatgtcctggttcaactggctttccacctaagcgcaagactcaccagttttttgtaaaatcttttactactcctaccaagtgtcatcagtgtacctccttgatggtgggtttaataagacagggctgttcatgtgaagtgtgtggattctcatgccatataacttgtgtaaacaaagctccaaccacttgtccagttcctcctgaacagacaaaaggtcccctgggtatagatcctcaraaaggaataggaacagcatatgaaggtcatgtcaggattcctaagccagctggagtgaagaaagggtggcagagagcactggctatagtgtgtgacttcaaactctttctgtacgatattgctgaaggaaaagcatctcagcccagtgttgtcattagtcaagtgattgacatgagggatgaagaattttctgtgagttcagtcttggcttctgatgttatccatgcaagtcggaaagatataccctgtatatttagggtaacttcccagctctcagcatctaataacaaatgttcaatcctgatgctagcagacactgagaatgagaagaataagtgggtgggagtgctgagtgaattgcacaagattttgaagaaaaacaaattcagagaccrctcagtctatgttcccaaagaggcttatgacagcactctacccctcattaaaacaacccaggcagccgcaatcatagatcatgaaagaattgctttgggaaacgaagaagggttatttgttgtacatgtcaccaaagatgaaattattagagttggtgacaataagaagattcatcagattgaactcattccaaatgatcagcttgttgctgtgatctcaggacgaaatcgtcatgtacgactttttcctatgtcagcattggatgggcgagagaccgatttttacaagctgtcagaaactaaagggtgtcaaaccrtaacttctggaaaggtgcgccatggagctctcacatgcctgtgtgtggctatgaaaaggcaggtcctctgttatgaactatttcagagcaagacccgtcacagaaaatttaargaaattcaagtcccatataatgtccagtggatggcaatcttcagtgaacaactctgtgtgggattccagtcaggatttctaagataccccttgaatggagaaggaaatccatacagtatgctccattcaaatgaccatacactatcatttattgcacatcaaccaatggatgctatctgcgcagttgagatctccagtaaagaatatctgctgtgttttaacagcattgggatatacactgactgccagggccgaagatctagacaacaggaattgatgtggccagcaaatccttcctcttgttgttacaatgcaccatatctctcggtgtacagtgaaaatgcagttgatatctttgatgtgaactccatggaatggattcagactcttcctctcaaaaaggttcgacccttaaacaatgaaggatcattaaatcttttagggttggagaccattagattaatatatttcaaaaataagatggcagaaggggacgaactggtagtacctgaaacatcagataatagtcggaaacaaatggttagaaacattaacaataagcggcgttattccttcagagtcccagaagaggaaaggatgcagcagaggagggaaatgytacgagatccagaaatgagaaataaattaatttctaatccaactaattttaatcacatagcacacatgggtcctggagatggaatacagatcctgaaagatctgcccatgaaccctcggcctcaggaaagtcggacagtattcagtggctcagtcagtattccatctatcrccaaatcccgccctgagccaggccgctccatgagtgctagcagtggcttgtcagcaaggtcatccgcacagaatggcagcgcattaaagagggaattctctggaggaagctacagtgccaagcggcagcccatgccctccccgtcagagggctctttgtcctcyggaggcatggaccaaggaagtgatgccccagcgagggactttgacggagaggactctgactctccgaggcattccacagcttccaacagttccaacctaagcagccccccaagcccagyttcaccccgaaaaaccaagagcctctccctggagagcactgaccgcgggagctgggacccgtgagctgcctcagcactgggacctcycgctctccgctccctgccactcrcctcctctcactttcatctcttccctccacctcgcctgctcggcctgaaagccaccaggggcyggcagcagtagcaggacagggmttcaggagttctgacgacacgactctcagatccacgcccccagcctaacagcaacaacaaagacagactttccgtagcagcttagattaacgttgatttcattccatgcacttagagttgctttcagtaacattttacccctactcccaaaggtagcttaaatagacagattacacaaatgtaagtgataagaataagattagacagattttgctttcacagtagagtctcattatagtcctaaaatagctcatgggcttctccgcatccagaagggagaatysgtccctggagtggctcamtaagctcttaatcagcaaacgcagtgagtatcaacctgattgttgccaggaaatcctyatgaattaaaacaatgcatattttactacagtacagagwttaaatgaatacataaatgtagaagtactgaatgtatatatttaaaaggagcctcttgtattcaacaaaagatggatgcatatataagagagatgatttaatttaaagaaatatgttgtttcttgtctgtaatgtaatgtaaagggtggaaaggcctcaagctcacatttgtagagagagagcgagagaaatcagagttccctttattgccctgtcctcaaactggtcataggctctagtcacctggggagctgtagaaaacacttgcagagccaggttttgctggtttggggcatgccctgggcaccagagctttaacatttgaagccacttcagcagcagcagcaaaaggcgaactcatctctacccaagatgtttcttttcctagtggtggaatttgaacacttctcactttttattgtattttatcttccgcagataaatgtagaaatacacgrttctgtcacctctgatcccttccatctgaaaggktacaaggagtgttgtagcttctgaaggtgcagaaaacaatttctaaaaatgcttttattcctgggctaatcctgtccctccctaagtcrcagcgaggtgtctgtcccagggctggagatgcttcccaaggaggagtctgttttgttgagagtgggcgtgggcttcttcacataagcctggggaaggaagaaaaaacggctttcattaccaaataatgtaaaacctcaaaagcaagggcttcaacagccttaaccaaatattattccccatagccagtggaaaatggatgtgacaaccccagtgcgcaggccagagtgagtgagcccagcacggcgctccgactggcttcctctctcaggtgctggattgtggggttagtggcatttccagctggattcctcctgttgtagttgccataaggaaatgagatgcagaatcagaaggatctatttctacagaatcatttcaccagttaagcacatgagtagagaaagagataaaaataaaagtatctcatgaaggaaagagattttgcctctcttttacttttcacctaagtttctctgagaaatagagacaggattctctctttaaaattcagtgaaaatgaagaaagttttcctgcagttgctaacctgagttgcagtgtttaaggccatcatttcactgctgctgtctgtgactccacgtctgtgtcactgaggtgacctgcgtgtcactgaggtggccaccatgctggcctgcggcatgtgcagggagctgaggctgtttccaggtgatgctgctgtgtggagaaggttctgagatgcagtgagggaagaaaggatcctgctggggattccattgtaagcacctataatcgggaattttcatgtaacagctttgacatttaaa

SEQ ID NO: 357 - DNA, 2887 bp, Homo sapiens
gagacggagtctcgctctgttgcccaggctggagtgcagtggcacgatctcggctcactgcaagctccgcctcccaggttcacgcyattctcctgcctcagcctccggagtagctgggactacaggtgcccgccaacacgccaggctaattttttgtatttttagtagagacgaggtttcaccgtgttagccaggatggtctagatctcctgacctcgtgatccaccggcctcggcytcccaaagtgctggccgagtgccaccgcacccggccgaaaggtattttttttaacagaagaaaatcagattattcctagatcagaaagaagctccattgttcctgtactttaaaaactacaaacacccattaagaccacttggaacctcaggaacaaggaccaaaaggtctcagaggaactaagtctttctagtcatgaaatattgttttactaaccaaaagagaggcataattttagctgctagacaaagtggccaggaatcccggagcctacagcactggcttctgctccttgaattttgtgaagcgggaaaggaccagttccactacaccatcctggaagaggccaaggacggcacatagcgtcttcgcggtccctattgcgcaggacctgggtctggagcttgtggagctgataccgcgcctgtttcagttggattccaaaagcckcagaaaccttctggaggtaaatctgcagaatggcatttttgtgagttctctgatagacctcgaggagctgtgtgggaggatctcggagtgcagcatccacctggaagtgatcgtggacaagctgctacaggttttccatgtggaggtgaaagtgaagaacaataaagacaacctgccagtgttctcagcaacacaaaagaatctgtttctgaaacgagagctcttgattatcgtgtttcactagagggtgtctgtgatgccgacgtcggggccaatgctctgatgacttacatactgtgccgcaatgattatttttccctggaaataccaacaagagcaggtaaaaccacttgaaggtgtattttaaaaattctttcagataggtaagtcacttcagagctactcttggtgctcaaagcaactgatgggggcgaagctgagctgacaggcaccaaagcattatatatcacagcgctggatgtaaatgatgatgcccagtgtttgacaaaggagtctatcatgtgaaattactggaaaatgcaagagaaggtacactggttattagacttaaccccttggattttgacgagggttcaaaccgtcacattgtttctttgcaactgatgtctcccctaacatagaagccctttttcgcatagattcagacagtggataaataaatgtaaagataggttttgaggaaactaaataatgaaagattcaaatacaggcagttgacacaggcaattccccaatgtttgatcactgcacagacttgatagaagtcttggacatcaatgatagtgttccagagttagcagtaagtcactatcattccctgtacaggaggacgctccactgggtaccgtcatagccctaatcagtgtaattgaccctaacttcagtgccaagggacagacgacccgcaccctgactcctcacgtctcttcaagctggtgtctaccttcaaaaggcgctgcccagaaactattcgttggtactccacagcgccctggaccaagagagcaaatctatccattgttggtaatcgctcggaatggggactcgctttcattgttggccacagccatcgggtccgtggaagtggccgaacagtgaaccacaatgccctggcgttccagcagcccgagtacatggtgttcgtgaaaggtaacaacccgcggggctgccacgacttcacagtgyccgcgcgggaccgggacgcgcaggagaacgtgctggtgtcctactcgttgatggaacagcgggtgggcgagtgcgcgctgtctagctatgtgtgggtgcacgcggagagcggcaagaggtacgcgttgcagccactggactacgaggagctggagctgctgcagttctaggtgagagcgcgcgacgcgggcatgccgcctctgagcagcaatgtgacgctgccaggtattagtgctggaacgacaactwtgtctgcgytgctggcgccttgggtgggctggcggcgctgtgagtgagctggtgcggtattcagtggatgcaggccacttggtggcgaaggtgcgcacggtggactccagctatgacgcctggttgtcgcaacagctgcatctgtcagctggcagcacccgttccacgtggggctctgcacgggcgagatcagcacgacgagtaccctggacgaggcgaaagctacgcgccaccgcctgctggtgctggtgaaggaccactgcgagctggcgctgactgccaccgtcaccgtggtggcgtcgctggcggagagcagccaagcgaggaaggtcccatcgcgggctttggcgggcgtcgaggtccgggaggcagcgctggtggatgtcaacgtgtacctgatcatcgccatctgcgtggtgtccagcctgttagtgctcacgttgctgctgtacacgacgctgcggtgcttggcgcagctcaccgagagctcgtgcatgccgggcaagcccacgctggtgtaccgcagcgtagtgggatctggtcttactcgcagcaaaggagattttactctggagagtcgcctcccaaggtcaacattacggcttttagtcctagtgttctcccatggttcagattttggagatggacttcaataggaaatttttgagaatataagtactgtaatcctggaaagtatttcattcctattaatgtccctcatagtgacattgataatgttcaccaa

SEQ ID NO: 358 - DNA, 900 bp, Homo sapiens
atgatgtgttttctgctcatcatttcatcaattctggtagtgtttgcatttgttcttggaaatgttgccaatggcttcatagcyctagtaaatgtcattgactgggttaacacacgaaagatctcctcagctgagcaaattctcactgctctggtggtctccagaattggtttactctgggtcatgttattcctttggtatgcaactgtgtttaattctgctttatatggtttagaagtaagaattgttgcttctaatgcctgggctgtaacgaaccatttcagcatgtggcttgctgctagcctcagcatattttrtttgctcaagattgccaatttctccaaccttatttctctccacctaaagaagagaattmagagtgttgttctggtgatactgttggggcccttggtatttytgatttgtaatcttgctgtgataaccatggatgagagagtgtggacaaaagaatatgaaggaaatgtgacttggaagatcaaattgaggaatgcaatacacctttcaagcttgactgtaactactctagcaaacctcataccctttactctgagcctaatatgttttctgctgttaatctgttctctttgtaaacatctcaagaagatgcggctccatagcaaaggatctcaagatcccagcaccaaggtccatataaaagctttgcaaactgtgacctccttcctcatgttatttgccatttactttctgtgtataatcacatcaacttggaatcttaggacacagcagagcaaacttgtactcctgctttgccaaactgttgcaatcatgtatccttcattccactcattcatcctgattatgggaagtaggaagctaaaacagacctttctttcagttttgtggcagatgacaygctga

SEQ ID NO: 359 - DNA, 1381 bp, Homo sapiens
atgatgagttttctacacattgttttttccattctagtagtggttgcatttattcttggaaattttgccaatggctttatagcactgataaatttcattgcctgggtcaagagacaaaagatctcctcagctgatcaaattattgctgctctggcrgtctccagagttggtttgctctgggtaatattattacattggtattcaactgtgttgaatccaacttcatctaatttaraagtaataatttttatttctaatgcytgggcagtaaccaatcatttcagcatctggcttgctactagcctcagcatattttatttgctcaagatcgtcaatttctccagacttatttttcatcacttaaaaaggaaggctaagagtgtagttctggtgatagtgttggggtctttgttctttttggtttgtcamcttgtgatgaaamacacgtatataaatgtgtggacagaagaatgtgaaggaaacgtaacttggaagatcaaactgaggaatgcaatgcacctttccaacttgactgtagccatgctagcaaacttgataccattcactctgaccctgatatcttttctgctgttaatctactctctgtgtaaacatctgaagaagatgcagctccatggcaaaggatctcaagatcccagcaccaagatccacataaaagctctgcaaactgtgacctccttcctcrtattacttgccatttactttctgtgtctaatcatatcgttttggaattytaagatgckaccaaaagaaattgtcttaatgctttgccaagcttttggaatcatatatccatcattccactcattcattctgatttgggggaacaagacgctaaagcagacctttctttcagttttgtggcaggtgacttgctgggcaaaaggacagaaccagtcaactccatagattcacaagaggygcattgtgtgttttctagcagaaaacaaattgatggtgtctggaacattttatatttcccacaagtttttccgtagtctatgtatttgagtaatttccaaaagttgacatagaaaagtcttttacctaagtttattatataaaagtatatatatataatatacatttgcgtgtgtgtgtatgtctgaatgtatatgaaaatttaatatttaccataacatacctttaatcaacttttcatataaactgttcagttataccaaagtaggataagaaatttctcagaattatgaacccatgtgtatttcacacatttttttatatgatatttcatttgaggaatttatgatctctatttataattaagaactgacagcttatatcagaaaatcattgctgtttttcgttgtaaaatcattgctgtttttcgttgtaattt

SEQ ID NO: 360 - DNA, 903 bp, Homo sapiens
atgataacttttctacccatcattttttccattctagtagtggttacatttgttcttgggaattttgctaatggcttcatagtgttggtaaattscattgagtgggtcaagagacaaaagatctcctttgctgaccaaattctcactgctctggcrgtctccagagttggtttgctctgggtaatattattacattggtatgcaactgttttgaatccaggttcatatagtttaggagtaagaattactactattaatgcctgggctgtaaccaaccatttcagcatctgggttgctactagcctcagcatattttatttsctcaagattgccaatttctccaactttatttttcttcacttaaaaaggagaattaagagtgtcattccagtgatactattggggtctttgttatttttggtttgtcatcttgttgtggtaaacatggatgagagtatgtggacaaaagaatatgaaggaaacgtgagttgggagatcaaattgagtgatccgacgcacctttcagatatgactgtaaccacgcttgcaaacttaataccctttactctgtccctgttatcttttctgctcttaatctgttctttgtgtaaacatctcaagaagatgcagytccatggcaaaggatctccagattccaayaccaaggtccacataaaagctttgcaaacggtgacctccttcctcttgttatttgctgtttactttctgtccctaatsacatcgatttggaattttaggaggaggctgtagaacgaacctgtcctcatgctcrgccaaactactgcaattatatacccttcatttcattcattcatcctaatttggggaagcaagaagctgaaacagacctttcttttgattttgtgtcagattaagtgctga

SEQ ID NO: 361 - DNA, 828 bp, Homo sapiens
gtctccctgattgattttattctcaactgcttggccatctccaggatatgtttcctgtagataacaattttagctacctctttcaatataggctatgagaaaatgcctgattctaagaatcttgcagtaagttttgacattctctggacaggatccagctatttctgcctgtcctgtaccacttgcctcagtgtcttctatttcctcaaggtagccaacttctccaatcccattttcctctggatgaaatggaaaattcacaaggtgcttctctttattgtactagaggcaacgatctctttctgcacaacttccattctgaaggaaataataattaatagtttaatctaagaacgggtaacaataaaaggcaacttgacatttaattatatggataccatgcatgatttcacttctctgtttctccttcagatgatgttcatccttccttttgtggaaacactggcttccattcttctcttaatcctctccttatggagccacaccaggcagatgaagctacatggtatttattccagggatcccagcacagaagcccatgtaaaacctataaaagctataatttcatttctactcctctttattgtgcattatttcatcagtatcatactaacattggcctgtcctcttctagacttcgttgcggcaaggacttttagtagtgtgctggtatttttccatccatctggccattcatttcttctaattttacgggacwgcaaactgaagcaagcttctctctgtgtcctgaagaagatgaagtatgccaaaaaggacataatctctcatttttataaacatgcctga

SEQ ID NO: 362 - DNA, 906 bp, Homo sapiens
atatgtgttctgctcatcattttatcaattctggtagtgtttgcatttgttcttggaaatgttgccaatggcttcatagctctarttaatgtcaatgactgggttaagacacaaaagatctcmtcaactgaccaaattgtcactgctctggcattctccagaattggtttactttgatcatattattacattggtatgcaactgtgtttaattcagctttatatagtttagaagtaagaattgttccttctaatgtctcggcaataatcaatcatttcagcatttggcttgctacgagcctcagcatattttatttgttcaagattgccaatttctccaattttatttttctccacctaaagaagagaattaagagtgttcttcttgtgatactgttggggtccttggtatttttgatttgtaatcttgctgtggtaaccatggatgacagtgtgtggacaaaagaatttgaaggaaatgtgacttkgaagatcgaattgaggaatgcaatacacctttcaaacatgactataaccaaccatgctagcaaacttcacactgttcattctgactctaatatcttttctgctgttagtctgttctccgtgtaaacatctcaagatgatgcagctccatggcaaaggatctcaagatctcagcaccaaggtccatataaaacctttgcaaactgttatctccttccktatgttatttgccatttactttctgtgtataatcacatcaacttggaatcctaggacacagcagagcaatcttgtattcctgctttaccaaactcttgcaatcatgtatccttcattccactcattcatcctgattatgagaagtaggaagctaaaacagacctctctttcagttttgtgtcaggtgacgtgctgggtgaaa

SEQ ID NO: 363 - DNA, 900 bp, Homo sapiens
atgataacttttctatacatttttttttcaattctaataatggttttatttgttctcggaaactttgccaatggcttcatagcactggtaaatttcattgactgggtgaagagaaaaaagatctcctcagctgaccaaattctcactgctctggcggtctccagaattggtttgctctgggcattattattaaattggtatttaactgtgttgaatccagctttttatagtgtagaattaagaattacttcttataatgcctgggttgtaaccaaccatttcagcatgtggcttgctgctaacctcagcatattttatttgctcaagattgccaatttctccaaccttctttttcttcatttaaagaggagagttaggartgtcattctggtgatactgttggggactttgatatttttggtttgtcatcttcttgtggcaaacatggatgagagtatgtgggcagaagaatatgaaggaaacatgactgggaagatgaaattgaggaatacagtacatctttcatatttgactgtaactaccctatggagcttcataccctttactctgtccctgatatcttttctgatgctaatctgttctctgtrtaaacatctcaagaagatgcagctccatggagaaggatcgcaagatctcagcaccaaggtccacataaaagctttgcaaactctgatctccttcctcttgttatgtgccattttctttctattcctaatcgtttcggtttggagtcctaggaggctgcggaatgacccrgttgtcatggttagcaaggctgttggaaacatatatcttgcattcgactcattcatcctaatttggagaaccaagaagctaaaacacacctttcttttgattttgtgtcagattaggtgctga

SEQ ID NO: 364 - DNA, 930 bp, Homo sapiens
atgataacttttctgcccatcattttttccattctaatagtggttacatttgtgattggaaattttgctaatggcttcatagcattggtaaattccattgagtggktcaagagacaaaagatctcttttgctgaccaaattctcactgctctggcagtctccagagttggtttactctgggtattagtattaaattggtatgcaactgagttgaatccagcttttaacagtatagaagtaagaattactgcttacaatgtctgggcagtaatcaaccatttcagcaactggcttgctactagcctcagcatattttatttgctcaagattgccaatttctccaaccttatttttcttcacttaaagaggagagttaagagtgttgttctggtgatactattggggcctttgctatttttggtttgtcatctttttgtgataaacatgaatcagattatatggacaaaagaatatgaaggaaacatgacttggaagatcaaactgaggagtgcaatgtacctttcaaatacaacrgtaaccatcctagcaaacttagttcccttcactctgaccctgatatcttttctgctgttaatctgttctctgtgtaaacatctcaaaaagatgcagctccatggcaaaggatctcaagatcccagcatgaaggtccacataaaagctwtgcaaactgtgacctccttcctcttgttatgtgccatttactttctgtccataatcatgtcagtttrgagttttgagagtctggaaaacaaacctgtcttcatgttctgcgaagctattgcattcagctatccttcaacccacccattcatcctgatttggggaaacaagaagctaaagcagacttttctttcagttttgtggcatgtgaggtactgggtgaaaggagagaagccttcatctycatag

SEQ ID NO: 365 - DNA, 885 bp, Homo sapiens
atgatatgttttctgctcatcattttatcaattctggtagtgtttgcatttgttcttggaaatgttgccaatggcttcatagctctagtaggtgtccttgagtgggttaagacacaaaagatctcatcarctgaccaaatttctcactgctctggtggtgtccagarttggtttactctgggtcatattattacattggtatgcaactgtgtttaatttggcttcayatagattagaagtaagaatttttggttctaatgtctcagcaataaccaagcatttcagcatstgggtgttactagcctcagcatatttcatttgctcaagactgccaatttctccaaccttatttttctccacctaaagaaraggattaagaatgttggtttggtgatgctgttggggcccttggtatttttcatttgtaatcttgctctgataaccaygggtgagagtgtgtggacaaaagaatatgaaggaaatttgtcttggatgatcaaattgaggaatgcaatacagctttcaaacttgactgtaaccatgccagcaaacgtcacaccctgcactctgacactaatatcttttctgctgttaatctattctccatgtaaacatgtcaagaagatgcagctccatggcaaaggatctcaacatctcagcaccaaggtgcacataaaagctttgcaaactgtgatctccttccttatgttatttgccatttactttctgtgtctaatcacatcaacttggaatcctaggactcagcagagcaaacttgtattcctgctttaccaaactcttggattcatgtatcytttgttccactcattcatcctgactatgggaagtaggaagccaaaacagacctttctttcagctttgtga

SEQ ID NO: 366 - DNA, 930 bp, Homo sapiens
atgacaacttttatacccatcattttttccagtgtggtagtggttctatttgttattggaaattttgctaatggcttcatagcattggtaaattccattgagygggtcaagagacaaaagatctcttttgctgaccagattctcactgctctggcggtctccagagttggtttgctctgggtattattattaaattggtattcaactgtgtttaatccagctttttatagtgtagaagtaagaactactgcttataatgtctgggcagtaaccggccatttcagcaactggcttgctactagcctcagcatattttatttgctcaagattgccaatttctccaaccttatttttcttcacttaaagaggagagttaagagtgtcattctggtgatgctgttggggcctttactatttttggcytgtcaactttttgtgataaacatgaaagagattgtacggacaaaagaatatgaaggaaacwtgacttggaagatcaaattgaggagtgcagtgtacctttcagatgcgactgtaaccacgctaggaaacttagtgcccttcactctgaccctgctatgttttttgctgttaatctgttctctgtgtaaacatctcaagaagatgcagctccatggtaaaggatctsaagatcccagcaccaaggtccacataaaagytttgcaaactgtgatctttttcctcttgttatgtgccrtttactttctgtccataatgatatcagtttggagttttgggagtctggaaaacaaacctgtcttcatgttctgcaaagctattagattcagctatccttcaatccaccsattcatcctgatttggggaaacaagaagctaaagcagacttttctttcagttttgcggcaagtgaggtactgggtgaaaggagagaagccttcrtctccatag

SEQ ID NO: 367 - DNA, 2007 bp, Homo sapiens
ggagacagctaaggaaagaagctggggcrcatgtttctgcccaaagccgggttttggmcgaggtgactacacaccccctttcctggctcccataggctaagtgcytggcttcttgagaagcctgcttcttgagaacaaaaaagtgatttaaagcctcatgggagatgagcaatcctcaagacacaagcagaaaaagtcccagtgatacaggaagcgggttcaggaacctgctggttcctgatacataaatcagacagcctctgctgcatgacacgaagcttgcttctgcctggcatctgtgagcagctgccmggctcyggccaggatcccttccttctcctcaktggctgatggatcccaaggggctcctctccttgaccttmgtgctgtttctctycctggcttttggggcaagctacggaacaggtgggcgcatgatgaactgcccaaagattctccggcakttgggaagcaaagtgctgctgcccctgacatatgaaaggataaataagagcatgaacaaaagcatccacattgtygtcacaatggcaaaatcactggagaacagtgtcgagaacaaaatagtgtctcttgatccatccgaagcaggccctccacgttatctaggagatcgctacaagttttatctggagaatctcaccctggggatacgggaaagcaggaaggaggatgagggatggtaccttatgaccctggagaaaaatgtttcagttcagcgcttttgcctgcagttgaggctttatgagcaggtctccactccagaaattaaagttttaaacaagacccaggagaacgggacctgcaccttgatactgggctgcacagtggagaagggggaccatgtggcttacagctggagtgaaaaggcgggcacccacccactgaacccagccaacagctcccacctcctgtccctcaccctcggcccccagcatgctgacaatatctacatctgcacygtgagcaaccctatcagcaacaattcccagaccttcagcccgtggcccggatgcaggacagacccctcagaaacaaaaccatgggcagtgtatgctgggctgttagggggtgtcatcatgattctcatcatggtggtaatactacagttgagaagaagaggtaaaacgaaccattaccagacaacagtggaaaaaaaaagccttacgatctatgcccaagtccagaaaccaggtcctcttcagaagaaacttgactccttcccagctcaggacccttgcaccaccatatatgttgctgccacagagcctgtcycagagtctgtccaggaaacaaattccatcacagtctatgctagtgtgacacttmcagagagctgacaccagagaccaacaaagggactttctgaaggaaaatggaaaaaccaaaatgaacactgaacttggccacaggccccaagtttcctctggcagacatgctgcacgtctgtacccttctcagwtcaactccctggtgatgtttcttccacatacatctgtgaaatgaacaaggaagkgaggcttcccaagaatttagcttgctgtgcagtggctgcaggcgcagaacagagcgttacttgataacagcgttccatctttgtgttgtagcagatgaaatggacagtaatgtgagttcagactttgggcatcttgctcttrgctggaactggataataaaaatcagactgaawgccaggacatctgagtacctatctcacacactggaccaccagtcacaaagtctggaaaagtttacattttggctatctttactttgttctgggagctgatcatgataacctgcagacctgatsaagcctctgtgcctcagtttctctctcaggataaagagtgaatagaggcygaagggtgaatttcttattatacataaaacactctgatattattgtataaaggaagctaagaatattattttatttgcaaaacccagaagctaaaaagtcaataaacagaaagaatgattttgaga

SEQ ID NO: 368 - DNA, 3327 bp, Homo sapiens
gtcagtcctttcgcrcctcggcggcgcggcatagcccggctcggcctgtaaagcagtctcaagcctgccgcagggagaagatggcggtcgccgtragaactttgcaggaacagctggaaaaggccaaagagagtcttaagaacgtggatgagaacattcgcaagctcaccgggcgggatccgaatgacgtgaggcccatccaagccagattgctggccctttctggtcctggtggaggtagaggacgtggtagtttattactgaggcgtggattctcagatagtggaggaggacccccagccaaacagagagaccttgaaggggcagtcagtaggctgggcggggagcgtcggaccagaagagaatcacgccaggaaagcgacccggaggatgatgatgttaaaaagccagcattgcagtcttcagttgtagctacctccaaagagcgcacacgtagagaccttatccaggatcaaaatatggatgaaaagggaaagcaaaggaaccggcgaatatttggcttgttgatgggyacccttcaraaatttaaacaagaatccactgttgctactgaaaggcaaaagcggcgccaggaaattgaacaaaaacttgaagtkcaggcagaagaagagagaaagcaggttgaaaatgaaaggagagaactgtttgaagagaggcgtgctaaacagacagaactgcggcttttrgaacagaaagttgagcttgcgcagctgcaagaagaatggaatgaacataatgccaaaataattaaatatataagaactaagacaaagccccatttgttttatattcctggaagaatgtgtccagctacycaaaaactaatagaagagtcacagagaaaaatgaacgctttatttgaggtagacgcatcgaatttgcagaacaaataaataaaatggaggctaggcctagaagacaatcaatgaaggaaaaagagcatcaggtggtgcgtaatgaagaacagsaggcggaacaagaagagggtaaggtggctcagcgagaggaagagttggawgagacaggtaatyagcacaatgatgtawaaatagaggaagcaggagaggaagaggaaaaggaaatagcgattgttcatagtgatgcagagaaagarcaggaggaggargaacaaaaacaggaaatggaggttaagatggaggaggaaactgaggtaagggaaagtgagaagcagcaggatagtcagcctgaagaagttatggatgtgctagagatggttgagaatgtcaaacatgtaattgctgacsaggaggtaatggaaactaatcgagttgaaagtgtagaaccttcagaaaatgaagctagcaaagaattggaaccagaaatggaatttgaaattgagccagataaagaatgtaaatwcctttctcctgggaaagagaatgtcagtgctttagacatggaaaaggagtctgasgaaaaagaagaaaaagaatctgagccccaacctgagcctgtggctcaacctcagcctcagtctcagccccagcttcagcttcaatcccagtcscaawcagtactccagtcccagkctccctctcagrctgaggatttgtcattagctgstttacagccaacaccccaagttactcaggagcaawggcatttactacctgagaggaaggattttcctgtagagtctgtaaaactcactgaggtaccagtagagccagtcttgacagtacatccagagagcaagagcaaaaccaaaactaggagcagaagtagaggtcgagctagaaataaaacaagcaagagtagaagtcgaagcagtagcagtagcagttctagtagcagttcaaccagtagcagcagtggaagtagttccagcagtggaagtagtagcagtcgcagtagttccagtagcagctccagtacaagtggcagcagcagcagagatagtagcagtagcyctagtagtagtagtgagagtagaagtcggagtaggggcyggggacataatagagatagaaagcacagaaggagcgtggatcggaagagaagggatacttcaggactagaaagaagtcmcaaatcttcaaaaggtggtartagtagagatacaaaaggatcaaaggataagaattcccggtccgacagaaagaggtctatatcagagagtagtcgatcaggcaaaagatcttcaagaagtgaaagagaccgaaaatcagacyggaaagacaaaaggcgttaatggaagaagccaggctttcttagccattctttgcagcagaagatttcttgataraaaaggattacctttccttgtaaagaggatgctgccttaagaattgcatgttgtaaaaaatctttttggaaartacagactgtttgtttaccagacattcttgtactttttgcataattttgtaagagttatttatcaaaattatgtgaggttccaaaatatgtaaaaatgataataataaaaaaagattaacatcccttgtcatcttttttaaatatcctatactcttcagtaagaatctgtatattttaataggcaaatctttaagtctgttcccttctaattctgtatcatacattgcttttgtagaaataaatgtgtgtttatttcattatttttgggatgtcctcgttgacacttgtataataaatatcctctttatcattttcagcttttaacactagatactgcacgtgattagaatgtttttgaaggtttcctcgtttttatttgccttggacagtttttagttgtcagagtcagagctttgcagctttgagggggaacagttctctttaaaatcatttgctattttctattctcccttgttattttaatctaagcattttcccccgtttctcatattttaaccatatgttcggtagataactaaacagtatgatctggttggcattttcttcctgatgatgggagcgtcattcttttgtcttcatggttacttgtgtgatataacatacatctgttaaagaaaatcacttctttctaggggagggaggtagaaaagtatctttcaaacttggtttttgagtttgtgtcttgtcttaactttgtgttggctctaacttaaacatgctgatatgtgttttcaagaattttgtttaaggaagtattgtatggaagtccacaaaatgaaggaagttcatctaggttttaatatgtaagcaagataacacacaagtgtaccaagtgattattaactttgttgttttacaaatttgtatgaacttggagtatctgttggccattactatacatgtgcaaataaatgtggcttagacttgtgtgactgcttaagacta

SEQ ID NO: 369 - DNA, 1598 bp, Homo sapiens
agttagtcagtctctcctttgtgctgccacaacactttgatctctctctttcacttcacttatctgatttcttaaaaatttatctgaaaaagagttcatacagacagcagtaaattcaagcaatacaaaaggtaattccctgtcacccgtgacctgaaggctcctaattctctcgagaggcaattgctgtgacctgagacaatctgtgtacgtattctgcaccttctatcttgggaattatttcagattggcttctgtgtgtgtgtctkagttctttttggacctgtctcccttactagagtgtgaagtacaggttttatcttygttgtactttcttacctacacctgacactgggcttggccttggactagggacttgagagagatataagataggtaagtgaatgaatgaatgaagcatggctggccagtgcttacccactcagggttgggtgccatcttttccacagatcccacccctggggaagcactactcccagcgctgggcccaggaggacctgctggaggagcagaaggatggggcccgggcagcggctgtggctgacaagaagaaaggcctcatggggccactgaccgaactggacactaaagatgtggatgccctgctgaagaagtctgaggcccagcatgaacagccggaagatggatgcccctttggtgccctgacgcagcgcctcctgcaggccctggtggaggaaaatattatttcccctatggaggattctcctattcctgacatgtctgggaaagaatcaggggctgacggggcaagcacctcccctcgcaatcagaacaagcccttcagtgtgccgcatactaagtccctggagagccgcatcaaggaggagctaattgcccagggccttttggagtctgaggaccgccccgcagaggactccgaggatgaggtccttgctgagcttcgcaaacggcaggctgagctgaaggcacttagtgcccacaaccgcaccaagaagcacgacctgctgaggctggcaaaggaggaggtgagccggcaggagctgaggcagcgggtgcgcatggctgacaacgaggtcatggacgcctttcgcaagatcatggctgcccggcagaagaagcggactcccaccaagaaagaaaaggaccaggcctggaagactcwgaaggrgcgtgagagcatcctgaagctgctggatgggtagccctcacccctgcctcakgctgattatctggcctaggggaggggaagggaggcccacttccttctttgggcacaggaaacattggcctgtggctgtccctcaaatggcggcagtctctagagggcyrtggcccttcccctgaggtcttttggcctagctctgtacaaccaggacacaggaagccctgctgggctagcctgaggcctagtctctgcttggtccccgagatggggttggaggggacttcgtttctgggtcttcctcttcccctctttaccatcccccactccctaatcccctacccctgtctccccttcaaggacttctcccttgtggttttgtaaagtgcaaacttaagaataaagtgactgctgtggtttttcaaaaaaagca

SEQ ID NO: 370 - DNA, 2947 bp, Homo sapiens
caccatcgcgggcgctggctgggccggaaagcggaagtayggaagtggccagccccgcgatgcctgccctttcgcgagaagcgcagctacggtctccgcccggacttccggacggtaccatctatgctccgagcggggtagagagcccttacgaacgcttgggccttccggaagttttccacctagggctgtctcggtatttttaaattcttgcactcgagtcactatttaagctcctccaggaatgggtgyagcttccctttgtgccttcggycttcttgtcacctttgccacagcctcccccaggtatgcaatggtacagcccagcttcagattgggcaccaaattaggacaagccgaagcggacgagcccttcgtttcttccggttctgtacccccatcctttctctcgcccctcctacccgcagctcctggcgctcggcggggctaactgcagcgsggagatctcggccgccaagctccgcctcccgccccgggctgtgccccggggctcgcctgagkccgaccacccgcaccccacctctagcggctttgctcgaggcccaccttcttcccacccccggcaaactccagtaggctcgccctcgctgactccccgcccccgcgtcaactgcaaggggcccgcccatagccagttccggggcggttgctcacatcgaccggaactccccgccccctcccgcggcccctggggccgtaggaggccgcagcgaggaggtagagggggcgggggtcgcactagggtgtccctagagaacgaggactctgaaggcgggacatttgggcgacccccgggcggggccarccattaaacagtcccacttctgtgccagacactgaactgggctcttgacgggcatcatctcttaatcctcagaacatcccagggagctccacaggatccccatatcctgggccatgagtgagttgaaagactgccccttgcagttccacgacttcaagtctgtggatcacctgaaggtctgtccccgctacacggcagtgctggcacgctctgaggatgatggcatcggcatcgaggagctggacaccctgcagctggagctggagaccctgctgtcttctgccagccggcgcctgcgtgtgcttgaggccgaaacccagatcctcaccgactggcaggataagaaaggtgacagacgattcctgaagctgggtcgagaccatgaacttggagctccccccaaacatgggaagcccaagaagcagaaactggaagggaaggcaggacatgggccgggccrtggcccaggacggcccaaatccaaaaaccttcagcccaagatccaggaatatgaattcactgatgaccctatcgacgtgccacggatccccaaaaatgatgcccccaacaggttctgggcttcagtggagccctactgtgctgacatcaccagcgaggaggtccgcacacttgaggagttactgaagcccccagaagatgaggctgagcattacaagatcccacccctggggaagcactactcccagcgctgggcccaggaggacctgctggaggagcagaaggatggggcccgggcagcggctgtggctgacaagaagaaaggcctcatggggccactgaccgaactggacactaaagatgtggatgccctgctgaagaagtctgaggcccagcatgaacagccggaagatggatgcccctttggtgccctgacgcagcgcctcctgcaggccctggtggaggaaaatattatttcccctatggaggattctcctattcctgacatgtctgggaaagaatcaggggctgacggggcaagcacctcccctcgcaatcagaacaagcccttcagtgtgccgcatactaagtccctggagagccgcatcaaggaggagctaattgcccagggccttttggagtctgaggaccgccccgcagaggactccgaggatgaggtccttgctgagcttcgcaaacggcaggctgagctgaaggcacttagtgcccacaaccgcaccaagaagcacgacctgctgaggtgagcgttagcaggatgcacagtcccgggggtggccttggaggctgtggccacggctagtcacctttcaggggttttacaacaggctttccaatcctggctggcctctaaatcacctggagagcctcgaaaaaaacagcagtggccagtccaccgggtatgtcccaaacaaattctgattccacagagtggggctcaggcatctgtgactgaccgattgatttgatttgtttttgttttgtttttttttgagagggagtctcgcactgtcacccaggctggagtgcagtggcatgatctcggctcactgcaagctccgcctcccaggttcatgccattctcctgcctcagcctcctgagtagctgatactacaggcacccaccaccacgcccagctaatttttttgtatttttagtagagacggggtttcaccgtgttagccaggatggtctcgatctcctgacctcgtgatccacccgcctcggcctcccaaagtgccgggattacaggcgtgagccactgcgcctggcctagtttggttttttaattatggtaaaggcataatataaaatgtatctccatgggaggctgaggcaggagaatcagttgaacctgggaggcggaggttgcagtgagctgagactgcaccattgcattccagcctgggcaacaagagtgaaactgcatctcaaaaaaaaaaagaaaaaaaatttacgcttcttaaccatttttaagtgtacagtttagtagtgttacccatattcacattgttgtgtgatttattttttgtcttttcatgcttcttttctttttatccccaaagttttgttattaaaaatttgatacacacagaaaatctgaaagaatcatacaataaacatcagtatattctccacctaga

SEQ ID NO: 371 - DNA, 2557 bp, Homo sapiens
caccatcgcgggcgctggctgggccggaaagcggaagtayggaagtggccagccccgcgatgcctgccctttcgcgagaagcgcagctacggtctccgcccggacttccggacggtaccatctatgctccgagcggggtagagagcccttacgaacgcttgggccttccggaagttttccacctagggctgtctcggtatttttaaattcttgcactcgagtcactatttaagctcctccaggaatgggtgyagcttccctttgtgccttcggycttcttgtcacctttgccacagcctcccccaggtatgcaatggtacagcccagcttcagattgggcaccaaattaggacaagccgaagcggacgagcccttcgtttcttccggttctgtacccccatcctttctctcgcccctcctacccgcagctcctggcgctcggcggggctaactgcagcgsggagatctcggccgccaagctccgcctcccgccccgggctgtgccccggggctcgcctgagkccgaccacccgcaccccacctctagcggctttgctcgaggcccaccttcttcccacccccggcaaactccagtaggctcgccctcgctgactccccgcccccgcgtcaactgcaaggggcccgcccatagccagttccggggcggttgctcacatcgaccggaactccccgccccctcccgcggcccctggggccgtaggaggccgcagcgaggaggtagagggggcgggggtcgcactagggtgtccctagagaacgaggactctgaaggcgggacatttgggcgacccccgggcggggccarccattaaacagtcccacttctgtgccagacactgaactgggctcttgacgggcatcatctcttaatcctcagaacatcccagggagctccacaggatccccatatcctgggccatgagtgagttgaaagactgccccttgcagttccacgacttcaagtctgtggatcacctgaaggtctgtccccgctacacggcagtgctggcacgctctgaggatgatggcatcggcatcgaggagctggacaccctgcagctggagctggagaccctgctgtcttctgccagccggcgcctgcgtgtgcttgaggccgaaacccagatcctcaccgactggcaggataagaaaggtgacagacgattcctgaagctgggtcgagaccatgaacttggagctccccccaaacatgggaagcccaagaagcagaaactggaagggaaggcaggacatgggccgggccrtggcccaggacggcccaaatccaaaaaccttcagcccaagatccaggaatatgaattcactgatgaccctatcgacgtgccacggatccccaaaaatgatgcccccaacaggttctgggcttcagtggagccctactgtgctgacatcaccagcgaggaggtccgcacacttgaggagttactgaagcccccagaagatgaggctgagcattacaagatcccacccctggggaagcactactcccagcgctgggcccaggaggacctgctggaggagcagaaggatggggcccgggcagcggctgtggctgacaagaagaaaggcctcatggggccactgaccgaactggacactaaagatgtggatgccctgctgaagaagtctgaggcccagcatgaacagccggaagatggatgcccctttggtgccctgacgcagcgcctcctgcaggccctggtggaggaaaatattatttcccctatggaggattctcctattcctgacatgtctgggaaagaatcaggggctgacggggcaagcacctcccctcgcaatcagaacaagcccttcagtgtgccgcatactaagtccctggagagccgcatcaaggaggagctaattgcccagggccttttggagtctgaggaccgccccgcagaggactccgaggatgaggtccttgctgagcttcgcaaacggcaggctgagctgaaggcacttagtgcccacaaccgcaccaagaagcacgacctgctgaggtgagcgttagcaggatgcacagtcccgggggtggccttggaggctgtggccacggctagtcacctttcaggggttttacaacaggctttccaatcctggctggcctctaaatcacctggagagcctcgaaaaaaacagcagtggccagtccaccgggtatgtcccaaacaaattctgattccacagagtggggctcaggcatctgtgactgaccgattgatttgatttgtttttgttttgtttttttttgagagggagtctcgcactcctgggcaacaagagtgaaactgcatctcaaaaaaaaaaagaaaaaaaatttacgcttcttaaccatttttaagtgtacagtttagtagtgttacccatattcacattgttgtgtgatttattttttgtcttttcatgcttcttttctttttatccccaaagttttgttattaaaaatttgatacacacagaaaatctgaaagaatcatacaataaacatcagtatattctccacctagactaa

SEQ ID NO: 372 - DNA, 2631 bp, Homo sapiens
caccatcgcgggcgctggctgggccggaaagcggaagtayggaagtggccagccccgcgatgcctgccctttcgcgagaagcgcagctacggtctccgcccggacttccggacggtaccatctatgctccgagcggggtagagagcccttacgaacgcttgggccttccggaagttttccacctagggctgtctcggtatttttaaattcttgcactcgagtcactatttaagctcctccaggaatgggtgyagcttccctttgtgccttcggycttcttgtcacctttgccacagcctcccccaggtatgcaatggtacagcccagcttcagattgggcaccaaattaggacaagccgaagcggacgagcccttcgtttcttccggttctgtacccccatcctttctctcgcccctcctacccgcagctcctggcgctcggcggggctaactgcagcgsggagatctcggccgccaagctccgcctcccgccccgggctgtgccccggggctcgcctgagkccgaccacccgcaccccacctctagcggctttgctcgaggcccaccttcttcccacccccggcaaactccagtaggctcgccctcgctgactccccgcccccgcgtcaactgcaaggggcccgcccatagccagttccggggcggttgctcacatcgaccggaactccccgccccctcccgcggcccctggggccgtaggaggccgcagcgaggaggtagagggggcgggggtcgcactagggtgtccctagagaacgaggactctgaaggcgggacatttgggcgacccccgggcggggccarccattaaacagtcccacttctgtgccagacactgaactgggctcttgacgggcatcatctcttaatcctcagaacatcccagggagctccacaggatccccatatcctgggccatgagtgagttgaaagactgccccttgcagttccacgacttcaagtctgtggatcacctgaaggtctgtccccgctacacggcagtgctggcacgctctgaggatgatggcatcggcatcgaggagctggacaccctgcagctggagctggagaccctgctgtcttctgccagccggcgcctgcgtgtgcttgaggccgaaacccagatcctcaccgactggcaggataagaaaggtgacagacgattcctgaagctgggtcgagaccatgaacttggagctccccccaaacatgggaagcccaagaagcagaaactggaagggaaggcaggacatgggccgggccrtggcccaggacggcccaaatccaaaaaccttcagcccaagatccaggaatatgaattcactgatgaccctatcgacgtgccacggatccccaaaaatgatgcccccaacaggttctgggcttcagtggagccctactgtgctgacatcaccagcgaggaggtccgcacacttgaggagttactgaagcccccagaagatgaggctgagcattacaagatcccacccctggggaagcactactcccagcgctgggcccaggaggacctgctggaggagcagaaggatggggcccgggcagcggctgtggctgacaagaagaaaggcctcatggggccactgaccgaactggacactaaagatgtggatgccctgctgaagaagtctgaggcccagcatgaacagccggaagatggatgcccctttggtgccctgacgcagcgcctcctgcaggccctggtggaggaaaatattatttcccctatggaggattctcctattcctgacatgtctgggaaagaatcaggggctgacggggcaagcacctcccctcgcaatcagaacaagcccttcagtgtgccgcatactaagtccctggagagccgcatcaaggaggagctaattgcccagggccttttggagtctgaggaccgccccgcagaggactccgaggatgaggtccttgctgagcttcgcaaacggcaggctgagctgaaggcacttagtgcccacaaccgcaccaagaagcacgacctgctgaggctggcaaaggaggaggtgagccggcaggagctgaggcagcgggtgcgcatggctgacaacgaggtcatggacgcctttcgcaagatcatggctgcccggcagaagaagcggactcccaccaagaaagaaaaggaccaggcctggaagactcwgaaggrgcgtgagagcatcctgaagctgctggatgggtagccctcacccctgcctcakgctgattatctggcctaggggaggggaagggaggcccacttccttctttgggcacaggaaacattggcctgtggctgtccctcaaatggcggcagtctctagagggcyrtggcccttcccctgaggtcttttggcctagctctgtacaaccaggacacaggaagccctgctgggctagcctgaggcctagtctctgcttggtccccgagatggggttggaggggacttcgtttctgggtcttcctcttcccctctttaccatcccccactccctaatcccctacccctgtctccccttcaaggacttctcccttgtggttttgtaaagtgcaaacttaagaataaagtgactgctgtggtttttcaaaaaaagca

SEQ ID NO: 373 - DNA, 594 bp, Homo sapiens
csggagatggacggccgccgtgttttgggccggttctggagtggctggcggcggggcctgggtgtscgcccagtgcccgaggacgcaggctttggcaccgaagcccggtgattaagtaccccctctctcatgcgggacggaggctagggcagggggaaggcacgtgcgggatctggatcaggtagatgttacccgaaaacagccccgttggcctctctgagcctcggtgccctccgctgtagaatggraccggtcgtacctgaattttcgaggacctctagtgacgttgaacaagccacagggtctaccagtgacaggtatgggccggggatgtgggaagggaatgcagcggaagggggtttcgtgwctgagggagggaaaagtgaaggcatgaagctttggcctcttgtaatttttctttcttactttccaggaaaaccaggagagctgacgttgttctcagtgctgccagagctgagccagtccctagggctcagggagcrggagcttcaggttgtccgagcatctgggaagtaagtggtaggggtgacaggaagctaggagtacaggcatccatctgtggtggggaaacag

SEQ ID NO: 374 - DNA, 1296 bp, Homo sapiens
tgaccaatcagcgcgctggctggagcgcgggtctgcccctctggacgcacatgcgcgctgtcctggctcsggagatggacggccgccgtgttttgggccggttctggagtggctggcggcggggcctgggtgtscgcccagtgcccgaggacgcaggctttggcaccgaagcccggcatcagaggcaaccccgcggctcctgccaacggtcggggcccctcggggaccagcccttcgcggggctgctgccaaaaaacctcagtcgggaggagctggttgatgcgctgcgggcagccgtggtggaccggaaaggacctctagtgacgttgaacaagccacagggtctaccagtgacaggaaaaccaggagagctgacgttgttctcagtgctgccagagctgagccagtccctagggctcagggagcrggagcttcaggttgtccgagcatctgggaaagaaagctctgggcttgtactcctctccagctgtccccagacagctagtcgcctccagaagtacttcacccatgcacggagagcccaaaggcccacagccacctactgtgctgtcactgatgggatcccagctscttctgaggggaagatccaggctgccctgaaactggaacacattgatggggtcaatctcacagttccagtgaaggccccatcccgaaaggacatcctggaaggtgtcaagaagactctcagtcactttcgtgtggtagccacaggctctggctgtgccctggtccagctgcagccactgacagtgttctccagtcaactacaggtgcacatggtactacagctctgccctgtgcttggggaccacatgtactctgcccgtgtgggcactgtcctgggccagcgatttctgctgccagctgagaacaacaagccccaaagacaggtcctggatgaagccctcctcagacgcctccacctgaccccctcccaggctgcccagctgcccttgcacctccacctacatcggctccttctcccaggcaccagggccagggacacccctgttgagctcctggcaccactgcccccttatttctccaggaccctacagtgcctggggctccgcttacaatagtcctccctctgttcctgaccccctcacacacactggaaagtgagggtgggggctctgcagtcagacaaacctaagatcacatcctggacaggccacttgcttgctgtgtggcattgggcaagtaactttacctctctggacttgtgataataaaagttcctacctcatgttatggttttgaggatttgct

SEQ ID NO: 375 - DNA, 824 bp, Homo sapiens
tgaccaatcagcgcgctggctggagcgcgggtctgcccctctggacgcacatgcgcgctgtcctggctcsggagatggacggccgccgtgttttgggccggttctggagtggctggcggcggggcctgggtgtscgcccagtgcccgaggacgcaggctttggcaccgaagcccggcatcagaggcaaccccgcggctcctgccaacggtcggggcccctcggggaccagcccttcgcggggctgctgccaaaaaacctcagtcgggaggagctggttgatgcgctgcgggcagccgtggtggaccggaaaggacctctagtgacgttgaacaagccacagggtctaccagtgacaggaaaaccaggagagctgacgttgttctcagtgctgccagagctgagccagtccctagggctcagggagcrggagcttcaggttgtccgagcatctgggaagtaagtggtaggggtgacaggaagctaggagtacaggcatccatctgtggtggggaaacagctgcttggggataagctgagacattttccatgggaaggtttgagatcatagaggtggatacaagtactgtgaagaagaggaagccgatggctctgggttcaaatcctcaagtacaaatggtgtgataccaggcaaagcatgacacctccctgacgctgggcacagtgactcacacctgtaatcccaacacttctggaggccaaggcaagaggatcacttgagcccaggagttcgagaccagcctgggcaaaatagaccccatctctggaaaaacaacaacaaaactttccgcrtggtggctcatgc

SEQ ID NO: 376 - DNA, 1779 bp, Homo sapiens
cgctccggcagtggtgctgggagtgtcgtggacgccgtgcygttactcgtagtcagkcggcggcgcaggcggcggcggcggcatakcgcacagcgcgccttagcagcagcagcagcagcagcrgcatcggaggtacccccgccgtcgcagcccccgcgctggtgcagccaccctcgytccctctgctcttcctcccttcgctcgcaccatggctgatcagctgaccgaagaacagattgctgaattcaaggaagccttctccctatttgataaagatggcgatggcaccatcacaacaaaggaacttggaactgtcatgaggtcactgggtcagaacccaacagaagctgaattgcaggatatgatcaatgaagtggatgctgatggtaatggcaccattgacttccccgaatttttgactatgatggctagaaaaatgaaagatacagatagtgaagaagaaatccgtgaggcattccgagtctttgacaaggatggcaatggttatatcagtgcagcagaactacgtcacgtcatgacaaacttaggagaaaaactaacagatgaagaagtagatgaaatgatcagagaagcagatattgatggagacggacaagtcaactatgaagaattcgtacagatgatgactgcaaaatgaagacctactttcaactcctttttcccccctctagaagaatcaaattgaatcttttacttacctcttgcaaaaaaaagaaaaaagaaaaaagttcatttattcattctgtttctatatagcaaaactgaatgtcaaaagtaccttctgtccacacacacaaaatctgcatgtattggttggtggtcctgtcccctaaagatcaagctacacatcagttttacaatataaatacttgtactaccttaatgataaggactccttaaagttccatttgctaatgattaatacactgtttgggctggccagtttttcatgcatgcagcttgacgattgagcacagtcaggcctttgtattaaaaatgaaaaatgaaaaaacaaattcaaaacctattcaaatgggttctagttcaatttgtytagtataaattgtcatagctggtttactgaaaacaaacacatttaaaattggtttacctcaggatgacgtggtcctcttgtacttcgtgtgctccgacccatggtgacgatgacacaccctggtggcatgcccgtgtatgttggtttagcgttgtctgcattgttctagagtgaaacaggtgtcaggctgtcactgttcacacaaatttttaataagaaacatttaccaagggagcatctttggactctctgtttttaaaaccttytgaaccatgacttggagccggcagagtaggctgtggctgtggacttcagcacaaccatcaacattgctgttcaaagaaattacagtttacgtccattccaagttgtaaatgctagtcttttttttttttttttccaataaaaagaccattaacttaaagtggtgttaaatgctttgtaaagctgagatctaaatggggacaaggcaggtggaggggaggccagtgtacatgtaaatgcccacagcccagcattgggtttccctcccaaggccccagcaccaacctctgagcccaagaccttgcctgaaaacaagcagataccgattgcttcatcctatttatggacrtgtaggtctagttgcattttcactggggggaggggggaaggtgaattatggtaacttttaatgatctattcaggcagtagagctcttaagg

SEQ ID NO: 377 - DNA, 4207 bp, Homo sapiens
cgctccggcagtggtgctgggagtgtcgtggacgccgtgcygttactcgtagtcagkcggcggcgcaggcggcggcggcggcatakcgcacagcgcgccttagcagcagcagcagcagcagcrgcatcggaggtacccccgccgtcgcagcccccgcgctggtgcagccaccctcgytccctctgctcttcctcccttcgctcgcaccatggctgatcagctgaccgaagaacagattgctgaattcaaggaagccttctccctatttgataaagatggcgatggcaccatcacaacaaaggaacttggaactgtcatgaggtcactgggtcagaacccaacagaagctgaattgcaggatatgatcaatgaagtggatgctgatggtaatggcaccattgacttccccgaatttttgactatgatggctagaaaaatgaaagatacagatagtgaagaagaaatccgtgaggcattccgagtctttgacaaggatggcaatggttatatcagtgcagcagaactacgtcacgtcatgacaaacttaggagaaaaactaacagatgaagaagtagatgaaatgatcagagaagcagatattgatggagacggacaagtcaactatgaagaattcgtacagatgatgactgcaaaatgaagacctactttcaactcctttttcccccctctagaagaatcaaattgaatcttttacttacctcttgcaaaaaaaagaaaaaagaaaaaagttcatttattcattctgtttctatatagcaaaactgaatgtcaaaagtaccttctgtccacacacacaaaatctgcatgtattggttggtggtcctgtcccctaaagatcaagctacacatcagttttacaatataaatacttgtactaccttaatgataaggactccttaaagttccatttgctaatgattaatacactgtttgggctggccagtttttcatgcatgcagcttgacgattgagcacagtcaggcctttgtattaaaaatgaaaaatgaaaaaacaaattcaaaacctattcaaatgggttctagttcaatttgtytagtataaattgtcatagctggtttactgaaaacaaacacatttaaaattggtttacctcaggatgacgtgcagaaaaatgggtgaaggataaaccgttgagacgtggccccactggtaggatggtcctcttgtacttcgtgtgctccgacccatggtgacgatgacacaccctggtggcatgcccgtgtatgttggtttagcgttgtctgcattgttctagagtgaaacaggtgtcaggctgtcactgttcacacaaatttttaataagaaacatttaccaagggagcatctttggactctctgtttttaaaaccttytgaaccatgacttggagccggcagagtaggctgtggctgtggacttcagcacaaccatcaacattgctgttcaaagaaattacagtttacgtccattccaagttgtaaatgctagtcttttttttttttttttccaataaaaagaccattaacttaaagtggtgttaaatgctttgtaaagctgagatctaaatggggacaaggcaggtggaggggaggccagtgtacatgtaaatgcccacagcccagcattgggtttccctcccaaggccccagcaccaacctctgagcccaagaccttgcctgaaaacaagcagataccgattgcttcatcctatttatggacrtgtaggtctagttgcattttcactggggggaggggggaaggtgaattatggtaacttttaatgatctattcaggcagtagagctcttaaggaaaaaaaaaacccactttctctcaagcatgtatttaggggttgttctcaattgtgctgctgattacctgtcttatgtaactacttgagaccatctgcaagagacatgatttagtgtgtctgtaattcaatcttcgctgtgtgtggtagaagcagtagtcacttttgtaagccagtctcttcatgcctaaaagacactaccagtcacctttgattcgcgacttttaatttatgattatacttagcckcctcctcctttttttttttttccsaagttgacttgactttgcttttttccccccaagtagaactaatgctagcttccagcttgaaagtaaaactccagtgtggagtgaattttgtgtctaattataaacctgtaaccaaaactcagacatctggtactggtctttgcattgagattggtccctgtaaaaccccctttaaaagcatattgcatttagtacagagctcttttttgaaatgaaggctggagatgtgcatttttcacggtgttaactggttrtatcttattagcaaggagattggggttttgagtgtttgcgtgggtggtttcaatttgccagggaacagtggcaggctgctagcaaggcagtgagaagctcttggcagccaaatgggtgcattcagggctgatttatagagacccttggcttctccttctcctactccctgtytttctggcattttgtagcttgttagattttctgccagaggggtgggtcagagcagtggaggggagacatcgcccatgtgctkctgctactggtccttgggctgggtggttggtagaggagatgttgacactatgagctaagggttggcttttgtaattacctgaatctgaaaggaatgcctaaggttaccttggggtttctcttctggtgagatagggttcctggtttgagtaagttaatgtcctggatatttcttgtggcagggggtggtcaaagagcctgattgctgacccagtctcaggcctgtggtcgatgacctctcggtagtttcaaagggggctggagggggatatttgacttgttttttcgaaatgtagccttctaaccctcaagtctttagaagctgggtggactcttagtggtcctgcagcgtatcctaaaagactacctttgaaacaggattcttgtatggccaggatcstgtctgggaaccagaaaccctacaccctccccctccagggaatgctgagttccagttttgagcagaggtgaggcagaatccactgtagccttccgccctggtatttggggggatgaccagcccaggcgttgggtgttagtctgcatgagtttgtgagaggaaatagctgggtgtcctggcagtgcccttgaagttggttaggaccttcctgtaaactcttgcccctacttctaactactctataaatatatacatatatttatatataaagtgattagttgaactggcatcctgctttagcctgagacttgccataagaaactgctgagtacttggcaaaccctttcatagttttgttctccatctgtttggggtaggtgttgagygaggcaaatggatctcgatatttcagatgggcttttgatgcactgttgccaaggaaggctttttctgattttttgacaaatgaatttttgcacactttcattggtgtctttcggcaacttacacacattgaaaatgagctattgtacatatttttatattctctttataaatgcatgtctgattgtacttgtaacaatattgtaatgaacggctgtgcagtaggcccagcgctgctgtgtctcgtcagaggaatagcttaccacgaacccctcagcatactgggaatctcttcctgaacaacgaatgtaaatttggtcaagtctactcttccgttcattcaattattttaagcatttgaattatttattgtatatcctaaatatatttctcctttggcagtgactagatttccactaatgtgtcttaatctatccctccagctggcagttactgtttttttaatcccctgaagttgtcctgtaggagacagaaattctttgctgtctgtatcccttggagtaagaaggtagtggcatgggtggagtgtgtgttctttctccaaatctattatgatgtttattaaacacttctgtagcaaagatggtggtagttcttttgttactgaagttgcccttcaccatggctatttgaaaaggagatgtacttggacgtttctgtaaatcttgagataaactgtttggagatttaaccacctctctgatggrggaccaactctatggaaattgtaaatacgttttatttataaacctggcactgtattcaataaacatttctgcagcctttcatctct

SEQ ID NO: 378 - DNA, 2389 bp, Homo sapiens
gacactcgcatgtcttttcaacctccaggttctgcaaaatactgaagaaaagtccaggagctaacggcgggcgctgtcgagcacggggaggtgctgaaatagtcctggcgtgctgattcaagctttgattggcagagccacccggtgactgacagggggtctccatggcgcccgcgccgccaatccgcccaccccaatagcggagccagctcgcctgccggcgtgcctgagccgagccgagcccgaaccccaagccgcggagccagcacctcctccagtcggggtcgyccgctcccggccgttgagccaccgccgccacccggtagtgtgtcccgctgccccaatccgcctcatcaacaagcgcctggcacactcagccaggccygcgggcatctgctgcgtgtcccgctccgggctcagtgccctcgccgccgccggcactgcctcgatgttccagctgcccatcttraatttcagcccccagcaagtggccggggtatgtgagaccctggaagagagcggcgatgtggagcgcctgggtcgcttcctctggtcgctgcccgtggcccctgcggcctgcgaggccctcaacaagaatgagtcggtgctacgcgcacgagccatcgtggcctttcacggtggcaactaccgcgagctctatcatatcctggaaaaccacaagttcaccaaggagtcgcacgccaagctgcaggcgctgtggcttgaagcacactaccaggaggctgagaagctgcgtggaagacccctgggacctgtggacaagtaccgagtaaggaagaagttcccgctgccgcgcaccatttgggacggcgaacagaagacacactgcttcaaggagcgcacgcggmacctgctacgcgagtggtacctgcaggatccataccctaaccccagcaaaaaacgtgagctcgcccaggcaaccggactgacccctacgcaggtgggcaactggttcaaaaaccgccgacaaagggaccgagcggctgcagccaagaacagactccagcagcaggtcctgtcacagggttccgggcgggcactacgggcggagggcgacggcacgccagaggtgctgggcgtygccaccagcccggccgccagtctatccagcaaggcggccacttcagccatctccatcacgtccagcgacagcgagtgcgacatctgagttgcccatccaggatgctcagaagcagattccagtgtaaaaacgagaaaaacaaaatgaaagaggggaagaagatgagagacctgcaaatccagcgccasagaagccaggtgaccagggacccgcgggctcgggttgccgtttcccgccccaccccgcggccggcctggcttcactggcgccctttggccgcgaccacgggaaccagcggtgaggcctgacccagcaccacgttcttcttgctttgctttttcctaaggattttgctgcaaagtctccttcggaacccgaactgcaagctgagcgcctgcccagattctcccatgggtatttcacgtcgaaaggacgctgttacatatgtataactttcgctttaaagtttttttttaacaaaacatatatatgctgtttatttacttatttaagagaccgccatggtaggtttctctgtagcttggggaacttgctgtttctaaacatgcaggctggtggtgatgggttctgtgtggagaagccaaacaataaaacaacctagtgggcaaccttcttaattaagggagctgctctcagattccttttcttcttattattattaatatcattcccttcaccaggcatgcagggacccttgagcaaatggtctccggaaggtcttacctatatatcttttgccttctttggtgcttcctggtatatgttttaaacaacctatggtaggtctataaccacctcccacgtcaaattacacgtatgtgcatatatgtatgtacctatacaaacatatgtatgtatgcatacacgtgatatatttaaggctagaaattggcaacatgtgagcgtcctctctaaggcaagtccccgcatccccagcacaggtaattatggcttgtccacttgacactcgtttacatgaagtgtcaacagctttcaggagcaatttaggaagccaaactatgggactcaataagtgagtcctattttctaaaaatgcaaaactatcctgactcargctctgcagcaagaaaggctttctgtctccttcaaggccccctccaatacaaaagcagcaggcacccatgatcatgctagagtgagcatatactgcatttaggattgagctattattaaaataagacaaaagatgatagaagaggttgtaaataattagactaacatcttcttgctgcagaatttggtttt

SEQ ID NO: 379 - DNA, 38665 bp, Homo sapiens
aagcgttgcacaattcccccaacctccatacatacggcagctcttctagacacaggttttcccaggtcaaatgcggggaccccagccatatctcccaccctgagaaattttggagtttcagggagctcagaagctctgcagaggccaccctctctgaggggattcttcttagacctccatccagaggcaaatgttgacctgtccatgctgaaaccctcaggccttcctgggtcatcttctcccacccgctccttgatgacagggagcaggagcactaaagccacaccagaaatggattcaggactgacaggagccaccttgtcacctaagacatctacaggtgcaatcgtggtgacagaacatactctgccctttacttccccagataagaccttggccagtcctacatcttcggttgtgggaagaaccacccagtctttgggggtgatgtcctctgctctccctgagtcaacctctagaggaatgacacactccgagcaaagaaccagcccatcgctgagtccccaggtcaatggaactccctctaggaactaccctgctacaagcatggtttcaggattgagttccccaaggaccaggaccagttccacagaaggaaattttaccaaagaagcatctacatacacactcactgtagagaccacaagtggcccagtcactgagaagtacacagtccccactgagacctcaacaactgaaggtgacagcacagagaccccctgggacacaagatatattcctgtaaaaatcacatctccaatgaaaacatttgcagattcaactgcatccaaggaaaatgccccagtgtctatgactccagctgagaccacagttactgactcacatactccaggaaggacaaacccatcatttgggacactttattcttccttccttgacctatcacctaaagggaccccaaattccagaggtgaaacaagcctggaactgattctatcaaccactggatatcccttctcctctcctgaacctggctctgcaggacacagcagaataagtaccagtgcgcctttgtcatcatctgcttcagttctcgataataaaatatcagagaccagcatattctcaggccagagtctcacctcccctctgtctcctggggtgcccgaggccagagccagcacaatgcccaactcagctatccctttttccatgacactaagcaatgcagaaacaagtgccgaaagggtcagaagcacaatttcctctctgggkactccatcaatatccacaaagcagacagcagagactatccttaccttccatgccttcgctgagaccatggatatacccagcacccacatagccaagactttggcttcagaatggttgggaagtccaggtacccttggtggcaccagcacttcagcgctgacaaccacatctccatctaccactttagtctcagaggagaccaacacccatcactccacgagtggaaaggaracagaaggaactttgaatacatctatgactccacttgagacctctgctcctggagaagagtccgaaatgactgccaccttggtccccactctaggttttacaactcttgacagcaagatcagaagtccatctcaggtctcttcatcccacccaacaagagagctcagaaccacaggcagcacctctgggaggcagagttccagcacagctgcccacgggagctctgacatcctgagggcaaccacttccagcacctcaaaagcatcatcatggaccagtgaaagcacagctcagcaatttagtgaaccccagcacacacagtgggtggagacaagtcctagcatgaaaacagagagacccccagcatcaaccagtgtggcagcccctatcaccacttctgttccctcagtggtctctggcttcaccaccctgaagaccagctccacaaaagggatttggcttgaagaaacatctgcagacacactcatcggagaatccacagctggcccaaccacccatcagtttgctgttcccactgggatttcaatgacaggaggcagcagcaccaggggaagccagggcacaacccacctactcaccagagccacagcatcatctgagacatccgcagatttgactctggccacgaacggtgtcccagtctccgtgtctccagcagtgagcaagacggctgctggctcaagtcctccaggagggacaaagccatcatatacaatggtttcttctgtcatccctgagacatcatctctacagtcctcagctttcagggaaggaaccagcctgggactgactccattaaacactagacatcccttctcttcccctgaaccagactctgcaggacacaccaagataagcaccagcattcctctgttgtcatctgcttcagttcttgaggataaagtgtcagcgaccagcacattctcacaccacaaagccacctcatctattaccacagggactcctgaaatctcaacaaagacaaagcccagctcagccgttctttcctccatgaccctaagcaatgcagcaacaagtcctgaaagagtcagaaatgcaacttcccctctgactcatccatctccatcaggggaagagacagcagggagtgtcctcactctcagcacctctgctgagactacagactcacctaacatccacccaactgggacactgacttcagaatcgtcagagagtcctagcactctcagcctcccaagtgtctctggagtcaaaaccacattttcttcatctactccttccactcatctatttactagtggagaagaaacagaggaaacttcgaatccatctgtgtctcaacctgagacttctgtttccagagtaaggaccaccttggccagcacctctgtccctaccccagtattccccaccatggacacctggcctacacgttcagctcagttctcttcatcccacctagtgagtgagctcagagctacgagcagtacctcagttacaaactcaactggttcagctcttcctaaaatatctcacctcactgggacggcaacaatgtcacagaccaatagagacacgtttaatgactctgctgcaccccaaagcacaacttggccagagactagtcccagattcaagacagggttaccttcagcaacaaccactgtttcaacctctgccacttctctctctgctactgtaatggtctctaaattcacttctccagcaactagttccatggaagcaacttctatcagggaaccatcaacaaccatcctcacaacagagaccacgaatggcccaggcwctatggctgtggcttctaccaacatcycaattggaaagggctacattactgaaggaagattggacacaagccatctgcccattggaaccacagcttcctctgagacatctatggattttaccatggccaaagaaagtgtctcaatgtcagtatctccatctcagtccatggatgctgctggctcaagcactccaggaaggacaagccaattcgttgacacattttctgatgatgtctatcatttaacatccagagaaattacaatacctagagatggaacaagctcagctctgactccacaaatgactgcaactcaccctccatctcctgatcctggctctgctagaagcacctggcttggcatcttgtcctcatctccttcttctcctactcccaaagtcacaatgagctccacattttcaactcagagagtcaccacaagcatgataatggacacagttgaaactagtcggtggaacatgcccaacttaccttccacgacttccttgacaccaagtaatattccaacaagtggtgccataggaaaaagcaccctggttcccttggacactccatctccagccacatcattggaggcatcagaagggggacttccaaccctcagcacctaccctgaatcaacaaacacacccagcatccacctcggagcacacgctagttcagaaagtccaagcaccatcaamcttaccatggcttcagtagtaaaacctggctcttacacacctctcaccttcccctcaatagagacccacattcatgtatcaacagccagaatggcttactcttctgggtcttcacctgagatgacagctcctggagagactaacactggtagtacctgggaccccaccacctacatcaccactacggatcctaaggatacaagttcagctcaggtctctacaccccactcagtgaggacactcagaaccacagaaaacyatccaaagacagagtccgccaccccagctgcttactctggaagtcctaaaatctcaagttcacccaatctcaccagtccggccacaaaagcatggaccatcacagacacaactgaacactccactcaattacattacacaaawttggcagaaaaatcatctggatttgagacacagtcagctccaggacctgtctctgtagtaatccctacctcccctaccattggaagcagcacattggaactaacttctgatgtcccaggggaacccctggtccttgctcccagtgagcagaccacaatcactctccccatggcaacatggctgagtaccagtttgacagaggaaatggcttcaacagaccttgatatttcaagtccaagttcacccatgagtacatttgctatttttccacctatgtccacaccttctcatgaactttcaaagtcagaggcagataccagtgccattagaaatacagattcaacaacgttggatcagcacctaggaatcaggagtttgggcagaactggggacttaacaactgttcctatcaccccactgacaaccacgtggaccagtgtgattgaacactcaacacaagcacaggacaccctttctgcaacgatgagtcctactcacgtgacacagtcactcaaagatcaaacatctataccagcctcagcatccccttcccatcttactgaagtctaccctgagctcgggacacaagggagaagctcctctgaggcaaccactttttggaaaccatctacagacacactgtccagagagattgagactggcccaacaaacattcaatccactccacccatggacaacacaacaacagggagcagtagtagtggagtcaccctgggcatagcccaccttcccataggaacatcctccccagctgagacatccacaaacatggcaytggaaagaagaagttctacagccactgtctctatggctgggacaatgggactccttgttactagtgctccaggaagaagcatcagccagtcattaggaagagtttcctctgtcctttctgagtcaactactgaaggagtcacagattctagtaagggaagcagcccaaggctgaacacacagggaaatacagctctctcctcctctcttgaacccagctatgctgaaggaagccagatgagcacaagcatccctctaacctcatctcctacaactcctgatgtggaattcatagggggcagcacattttggaccaaggaggtcaccacagttatgacctcagacatctccaagtcttcagcaaggacagagtccagctcagctacccttatgtccacagctttgggaagcactgaaaatacaggaaaagaaaaactcagaactgcctctatggatcttccatctccaactccatcaatggaggtgacaccatggatttctytcactctcagtaatgcccccaataccacagattcacttgacctcagccatggggtgcacaccagctctgcagggactttggccactgacaggtcattgaatactggtgtcactagagcctccagattggaaaacggctctgatacctcttctaagtccctgtctatgggaaacagcactcacacttccatgactkacacagagaagagtgaagtgtcttcttcaatccatccccgacctgagacctcagctcctggagcagagaccactttgacttccactcctggaaacagggccataagcttaacattgcctttttcatccattccagtggaagaagtcatttctacaggcataaccycaggaccagacatcaactcagcacccatgacacattctcccatcaccccaccaacaattgtatggaccagtacaggcacaattgaacagtccactcaaccactacatgcagtttcttcagaaaaagtttctgtgcagacacagtcaactccatatgtcaactctgtggcagtgtctgcttcccctacccatgagaattcagtctcttctggaagcagcacatcctctccatattcctcagcctcacttgaatccttggattccacaatcagtaggaggaatgcaatcacttcctggctatgggacctcactacayctctccccactacaacttggccaagtactagtttatctgaggcactgtcctcaggccattctggggtttcaaacccaagttcaactacgactgaatttccactcttttcagctgcatccacatctgctgctaagcaaagaaatccagaaacagagacccatggtccccagaatacagccgcgagtactttgaacactgatgcatcctcggtcacaggtctttctgagactcctgtgggggcaagtatcagctctgaagtccctcttccaatggccrtaacttctagatcagatgtttctggccttacatctgagagtactgctaacccgagtttaggcacagcctcttcagcagggaccaaattaactaggacaatatccctgcccacttcagagtctttggtttcctttagaatgaacaaggatccatggacagtgtcaatccctttggggtcccatccaactactaatacagaaacaagcatcccagtaaacagcgcaggtccacctggcttgtccacagtagcatcagatgtaattgacacaccttcagatggggctgagagtattcccactgtctccttttccccctcccctgatactgaagtgacaactatctcacatttcccagaaaagacarctcattcatttagaaccatttcatctctcactcatgagttgacttcaagaktgacacctattcctggggattggatgagttcagctatgtctacaaagcccacaggagccagtccctccattacactgggagagagaaggacaatcacctctgctgctccaaccacttcccccatagttctcactgctagtttcacrgagaccagcacagtttcactggataatgaaactacagtaaaaacctcagatatccttgasgcacggaaaacaaatgagctcccctcagatagcagttcttcttctgatctgatcaacacctccatagcttcttcaactatggatgtcactaaaacagcctccatcagtcccactagcatctcaggaatgacagcaagttcctccccatctctcttctcttcagatagaccccaggttcccacatctacaacagagacaaatacagccacctctccatctgtttccagtaacacctattctcttgatgggggctccaatgtgggtggcactccatccactttaccaccctttacaatcacccaccctgtcgagacaagctcggccctattagcctggtctagaccagtaagaactttcagcaccatggtcagcactgacactgcctccggagaaaatcctacctctagcaattctgtggtgacttctgttccagcaccaggtacatggrccagtgtaggcagtactactgacttacctgccatgggctttctcaagacaagtcctgcaggagaggcacactcacttctagcrtcaactattgaaccagccactgccttcactccycatctctcagcagcagtggtcactggatccagtgctacatcagaagccagtcttctcactacgagtgaaagcaaagccattcattcttcaccacagaccccaactacacccacctctggagcaaactgggaaacttcagctactcctgagagccttttggtagtcactgagacttcagacacaacacttacctcaaagattttggtcacagataccatcttgttttcaactgtgtccacgccaccttctaaatttccaagtacggggactctgtctggagcttccttccctactttactcccggacactccagccatccctctcactgccactgagccaacaagttcattagctacatcctttgattccaccccactggtgactatagcttcrgatagtcttggcacagtcccagagactaccctgaccatgtcagagacctcaaatggtgatgcactggttcttaagacagtaagtaacccagataggagcatccctggaatcactatccaaggagtaacagaaagtccactccatccttcttccacttccccctctaagattgttgctccacggaatacaacctatgaaggttcgatcacagtgrcactttctactttgcctgcgggaactactggttcccttgtattcagtcagagttctgaaaactcagagacaacggctttggtagactcatcagctgggcttgagagggcatctgtgatgccactaaccacaggaagccagggtatggcyagctctggaggaatcagaagtgggtccactcactcaactggaaccaaaacattttcttctctccctctgaccatgaacccaggtgaggttacagccatgtctgaaatcaccaygaacagactgacagctactcaatcaacagcacccaaagggatacctgtgaagcccaccagtgctgagtcaggcctcctaacacctgtctctgcctcctcaagcccatcaaaggcctttgcctcactgactacagctcccycaacttgggggatcccacagtctaccttgayatttgagttttctgaggtyccaagtttggatactaagtccgcttctttaccaactcctggacagtccctgaacaccattccagactcagatgcaagcacagcatcttcctcactgtccaagtctccagaaaaaaacccaagggcaaggatgatgacttccacaaaggccataagtgcaagctcatttcaatcaacaggttttactgaaacccctgagggatctgcctccccttctatggcagggcatgaacccagagtccccacttcaggaacaggggaccctagatatgcctcagagagcatgtcttatccagacccaagcaaggcatcatcagctatgacatcgacctctcttgcatcaaaactcacaactctcttcagcacaggtcaagcagcaaggtctggttctagttcctctcccataagcctatccactgagaaagaaacaagcttcctttcccccactgcatccacctccagaaagacttcactatttcttgggccttccatggcaaggcagcccaacatattggtgcatcttcagacttcagctctgacactttctccaacatccactctaaatatgtcccaggaggagcctcctgagttaacctcaagccagaccattgcagaagaagagggaacaacagctgaaacacagacgttaaccttcacaccatctgagaccccaacatccttgttacctgtctcttctcccacagaacccacagccagaagaaagagttctccagaaacatgggcaagctctatttcagttcctgccaagacctcsttggttgaaacaactgatggaacgctagtgaccaccataaagatgtcaagccaggcagcacaaggaaattccacgtggcctgccccagcagaggagacggggascagtccagcaggcacatccccaggaagcccagaaatgtctaccactctcaaaatcatgagctccaaggaacccrgcatcagcccagagatcaggtccactgtgagaaattctccttggaagactccagaaacaactgttcccatggagaccacagtggaaccagtcacccttcagtccacagccctaggaagtggcagcaccagcatctctcacctgcccacaggaaccacatcaccaaccaagtcaccaacagaaaatatgttggctacagaaagggtctccctctccccatccccacctgaggcttggaccaacctttattctggaactccaggagggaccaggcagtcactggccacaatgtcctctgtctccctagagtcaccaactgctagaagcatcacagggactggtcagcaaagcagtccagaactggtttyaaagacaactggaatggaattctctatgtggcatggctctactggagggaccacaggggacacacatgtctctctgagcacatcttccaatatccttgaagaccctgtaaccagcccaaactctgtgagctcattgacagataaatccaaacataaaaccgagacatgggtmagcaccacagccattccctccactgtcctgaataataagataatggcagctgaacaacagacaagtcratctgtggatgaggcttattcatcaactagttcttggtcagatcagacatctgggagtgacatcacccttggtgcatctcctgatgtcacaaacacattatacatcacctccacagcacaaaccacctcactagtrtctctgccctctggagaccaaggcattacaagcctcaccaatccctcaggaggaaaaacaagctctgcrtcatctgtcacatctccttcaatagggcttgagactctgakggccaatgtaagtgcagtgamaagtgacattgcccctactgctgggcatctatctcagacttcatctcctgcggaagtgagcatcctggacrtaaccacagctcctactccaggtatctccaccaccatcaccaccatgggaaccaactcaatctcaactaccacacccaacccagaagtgggtatgagtaccatggacagcaccccggccacagagaggcrcacaacttctacagaacacccttccacctggtcttccacagctgcatcagattcctggactgtcacagacatgacttcaaacttgaaagttgcaagatctcctggaacaatttccacaatgcatacaacttcattcttagcctcaagcactgaattagactccatgtctactccccatggccgtataactgtcattggaaccagcctggtcactccatcctctgatgcttcagctgtaaagacagagaccagtacaagtgaaagaacattgagtccttcagacacaactgcatctactcccatctcaactttttctcgtgtccagaggatgagcatctcagttcctgacattttaagtacaagttggactcccagtagtacagaagcagaagatgtgcctgtttcaatggtttctacagatcatgctagtacaaagactgacccaaataygcccctgtccacttttctgtttgattctctgtccactcttgactgggacactgggagatctctgtcatcagccacagccactacctcagctcctcagggggccacaactccccargaactcactttggaaaccatgatcagcccagctacctcacagttgcccttctctatagggcacattacaagtgcagtcayaccagctgcaatggcaaggagctctggagttactttttcaagaccagatcccacaagcaaaaaggcagagcagacttccactcagcttcccaccaccacttctgcacatccagrgcaggtgcccagatcagcagcaacaactctggatgtgatcccacacacagcaaaaactccagatgcaacttttcagagacaagggcagacagctcttacaacagaggcaagagctacatctgactcctggaatgagaaagaaaaatcaaccccaagtgcaccttggatcactgagatgatgaattctgtctcagaagataccatcaaggaggttaccagctcctccagtgtrttaaggaccctgaatacgctggacataaacttggaatctgggacgacttcatccccaagttggaaaagcagcccatatgagagaattgccccttctgagtcyaccacagacaaagaggcaattcacccttctacaaacacagtagagaccacwggctgggtcacaagttccgaacatgcttctcattccactatcccagcccactcagcgtcatccaaactcacatctccagtggttacaacctccaccagggaacaagcaatagtttctatgtcaacaaccacatggccagagtctacaagggctagaacagagcctaattccttcttgactattgaactgagggacgtcagcccttacatggacaccagctcaaccacacaaacaagtwttatctcttccccaggttccactgcgatcaccaaggggcctagaacagaaattacctcctctaagagaatatccagctcattccttgcccagtctatgaggtcgtcagacagcccctcagaagccatcwccaggctgtctaactttcctgccatgacagaatctggaggaatgatccttgctatgcaaacaagtccacctggcgctacatcactaagtgcacctactttggatacatcagccacagcctcctggacagggactccactggctacgactcagagatttacatactcagagaagaccactctctttagcaaaggtcctgaggatacatcacagccaagccctccctctgtggaagaaaccagctcttcctcttccctggtacctatcmatgctacaacctcgccttccaatattttgttgacatcacaagggcacagtccctcctctactccacctgtgacctcagttttcttgtctgagacctctggcctggggaagaccacagacatgtcgaggataagcttggaacctggcacaagtttacctcccaatttgagcagtacagcaggtgaggcgttatccacttatgaagcctccagagatacaaaggcaattcatcattctgcagacacagcagtgacgaatatggaggcaaccagttctgaatattctcctatcccaggccatacaaagccatccaaagccacatctccattggttacctcccacatcatgggggacatcacttcttccacatcagtatttggctcctccgagaccacagagattgagacagtgtcctctgtgaaccagggacttcaggagagaagcacatcccaggtggccagctctgctacagagacaagcactgtcattacccatgtgtctagtggtgatgctactactcatgtcaccaagacacaagccactttctctagcggaacatccatctcaagccctcatcagtttataacttctaccaacacatttacagatgtgagcaccaacccctccacctctctgataatgacagaatcttcaggagtgaccatcaccacccaaacaggtcctaytggagctgcaacacagggtccatatctcttggacacatcaaccatgccttacttgacagagactccattagctgtgactccagattttatgcaatcagagaagaccactctcataagcaaaggtcccaaggatgtgtcctggacaagccctccctctgtggcagaaaccagctatccctcttccctgacacctttcttggtcacaaccatacctcctgccacttccacgttacaagggcaacatacatcctctcctgtttctgcgacttcagttcttacctctggactggtgaagaccacagatatgttgaacacaagcatggaacctgtgaccaattcacctcaaaatttgaacaatccatcaaatgagatactggccactttggcagccaccacagatatagagactattcatcctyccataaacaaagcagtgaccaatatggggactgccagttcagcacatgtactgcattccactctcccagtcagctcagaaccatctacagccacatctccaatggttcctgcctccagcatgggggacgctcttgcttctatatcaatacctggttctgagaccacagacattgagggagagccaacatcctccctgactgctggacgaaaagagaacagcaccctccaggagatgaactcaactacagagtcaaacatcatcctctccaatgtgtctgtgggggctattactgaagccacaaaaatggaagtcccctcttttgatgcaacattcataccaactcctgctcagtcaacaaagttcccagatattttctcagtagccagcagtagactttcaaactctcctcccatgacaatatctacccacatgaccaccacccagacagggtcttctggagctacatcaaagattccacttgccttagacacatcaaccttggaaacctcagcagggactccatcagtggtgactgaggggtttgcccactcaaaaataaccactgcaatgaacaatgatgtcaaggacgtgtcacagacaaaccctccctttcaggatgaagccagctctccctcttctcaagcacctgtccttgtcacaaccttaccttcttctgttgctttcacaccgcaatggcacagtacctcctctcctgtttctatgtcctcagttcttacttcttcactggtaaagaccgcaggcaaggtggatacaagcttagaaacagtgaccagttcacctcaaagtatgagcaacactttggatgacatatcggtcacttcagcagccaccacagatatagagacaacgcatccttccataaacacagtagttaccaatgtggggaccaccggttcagcatttgaatcacattctactgtctcagcttacccagagccatctaaagtcacatctccaaatgttaccacctccaccatggaagacaccacaatttccagatcaatacctaaatcctctaagactacaagaactgagactgagacaacttcctccctgactcctaaactgagggagaccagcrtctcccaggagatcacctcgtccacagagacaagcactgttccttacaaagagctcactggtgccactaccgaggtatccaggacagatgtcacttcctctagcagtacatccttccctggccctgatcagtccacagtgtcactagacatctccacagaaaccaacaccaggctgtctacctccccaataatgacagaatctgcagaaataaccatcaccacccaaacaggtcctcatggggctacatcacaggatacttttaccatggacccatcaaatacaaccccccaggcagggatccactcagctatgactcatggattttcacaattggatgtgaccactcttatgagcagaattccacaggatgtatcatggacaagtcctccctctgtggataaaaccagctccccctcttcctttctgycctcacctgcaatgacmacaccttccctgatttcttctaccttaccagaggataagctctcctctcctatgacttcacttctcacctctggcctagtgaagattacagacatattacgtacacgcttggaacctgtgaccagctcacttccaaatttcagcagcacctcagataagatactggccacttctaaagacagtaaagacacaaaggaaatttttccttctataaacacagaagagaccaatgtgaaagccaacaactctggacatgaatcccattcccctgcactggctgactcagagacacccaaagccacaactcaaatggttatcaccaccactgtgggagatccagctccttccacatcaatgccagtgcatggttcctctgagaytacaaacattaagagagagccaacatatttcttgactcctagactgagagagaccagtacctctcaggagtccagctttcccacggacacaagttttctactttccaaagtccccactggtactattactgaggtctccagtacaggggtcawctcttctagcaaaatttccaccccagaccatgataagtccacagtgccacctgacaccttcacaggagagatccccagggtcttcacctcctctattaagacaaaatctgcagaaatgacgatcaccacccaagcaagtcctcctgagtctgcatcgcacagtacccttcccttggacacatcaaccacactttcccagggagggactcattcaactgtgactcagggattcccatactcagaggtgaccactctcatgggcatgggtcctgggaatgtgtcatggatgacaactccccctgtggaagaaaccagctctgtgtcttccctgatgtcttcacctgccatgacatccccttctcctgtttcctccacatcaccacagagcatcccctcctctcctcttcctgtgactgcacttcctacttctgttctggtgacaaccacagatgtgttgggcacaacaagcccagagtctgtaaccagttcacctccaaatttgagcagcatcactcatgagagaccggccacttacaaagacactgcacacacagaagccgccatgcmtcattccacaaacaccgcagtgaccaatgtagggacttccgggtctggacataaatcacaatcctctgtcctagctgactcagagacatcgaaagccacacctctgatgagtaccacctccaccctgggggacacaagtgtttccacatcaactcctaatatctctcagactaaccaaattcaaacagagccaacagcatccctgagccctagactgagggagagcagcacgtctgagaagaccagctcaacaacagagacaaatactgccttttcttatgtgcccacaggtgctattactcaggcctccagaacagaaatctcctctagcagaacatccatctcagaccttgatcggyccacaatagcacccgacatctccacaggaatgatcaccaggctcttcacctcccccatcatgacaaaatctgcagaaatgaccgtcaccactcaaacaactactcctggggctacatcacagggtatccttccctgggacacatcaaccacacttttccagggagggactcattcaaccgtgtctcagggattcccacactcagagataaccactcttcggagcagaacccctggagatgtgtcatggatgacaactccccctgtggaagaaaccagctctgggttttccctgatgtcaccttccatgacatccccttctcctgtttcctccacatcaccagagagcatcccctcctctcctctccctgtgactgcacttcttacttctgttctggtgacaaccacaaatgtattgggcacaacaagcccagagmccgtaacgagttcacctccaaatttaagcagccccacacaggaragactgaccacttacaaagacactgcgcacacagaagccatgcatgcttccatgcatacaaacactgcagtggccaacgtggggacctccattkctggacatgaatcacaatcttctgtcccagctgattcasacacatccaaagccacatctccaatgggtaycaccttcrccatgggggatacaagtgtttctacatcaactcctgccttctttgagactagaattcagactgaatcaacatcctctttgattcctggattaagggacaccaggacstctgaggagatcaacactgtgacagagaccagcactgtcctttcagaagtgcccactactactactactgaggtctccaggacagaagttatcacttccagcagaacaaccatctcagggyctgatcattccaaaatgtcaccctacatctccacagaaaccatcaccaggctctccacttttcctkttgtaacaggatccacagaaatggccatcaccaaccaaacaggtcctatagggactatctcacaggctrcccttaccctggacacatcaagcacagcttyctgggaagggactcactcacctgtgactcagagatttccacactcagaggagaccactactatgagcagaagtactaagggcgtgtcatggcaaagccctccctctgtggaagaaaccagttctccttcttccccagtgcctttacctgcaataacctcacattcatctctttattccgcagtatcaggaagtagccccacttctgctctccctgtgacttcccttctcacctctggcaggaggaagaccatagacatgttggacacacactcagaacttgtgaccagctccttaccaagtgcaagtagcttctcaggtgagatactcacttctgaagcctccacaaatacagagacaattcacttttcagagaacacagcagaaaccaatatggggaccaccaattctatgcataaactacattcctctgtctcaatccactcccagccatccggacacacacctccaaaggttactggatctatgatggaggacgctattgtttccacatcaacacctggttctcctgagactaaaaatgttgacagagactcaacatcccctctgactcctgaactgaaagaggacagcaccgccctggtgatgaactcaactacagagtcaaacactgttttctccagtgtgtccctggatgctgctactgaggtctccagggcagaagtcacctactatgatcctacattcatgccagcttctgctcagtcaacaaagtccccagacatttcacctgaagccagcagcagtcattctaactctcctcccttgacaatatctacacamaagaccatcgccacacaaacaggtccttctggggtgacatctcttggccaactgaccctggacacatcaaccatagccacctcagcaggaactccatcagccagaactcaggattttgtagattcagaaacaaccagtgtcatgaacaatgatctcaatgatgtgttgaagacaagccctttctctgcagaagaagccaactctctctcttctcaggcacctctccttgtgacaacctcaccttctcctgtaacttccacattgcaagagcacagtacctcctctcttgtttctgtgacctcagtacccacccctacactggcgaagatcacagacatggacacaaacttagaacctgtgactcgttcacctcaaaatttaaggaacaccttggccacttcagaagccaccacagatacacacacaatgcatccttctataaacacagcagtggccaatrtggggaccaccagttcaccaaatgaattctattttactgtctcacctgactcagacccatataaagccacatccgcagtagttatcacttccacctcgggggactcaatagtttccacatcaatgcctagatcctctgcgatgaaaaagattgagyctgagacaaytttctccctgatatttagactgagggagactagcacctcccagaaaattggctcatcctcagacacaagcacggtctttgacaaagcattcactgctgctactactgaggtctccagaacagaaytcacctcctctagcagaacatccatccaaggcactgaaaagcccacaatgtcaccggacacctccacaagatctgtcaccatgctttctacttttgctggcctgacaaaatccgaagaaaggaycattgccacccaaacaggtcctcatagggcgacatcacagggtacccttacctgggacacatcaatcacaacctcacaggcagggacccactcagctatgactcatggattttcacaattagatttgtccactcttacgagtagagttcctgagtacatatcagggacaagcccaccctctgtggaaaaaaccagctcttcctcttcccttctgtctttaccagcaataacctcaccgtcccctgtacctactacattaccagaaagtaggccgtcttctcctgttcatctgacttcactccccacctctggcctagtgaagaccacagatatgctggcatctgtggccagtttacctccaaacttgggcagcacctcacataagataccgactacttcagaagacattaaagatacagagaaaatgtatccttccacaaacatagcagtaaccaatgtggggaccaccacttctgaaaaggaatcttattcgtctgtcccagcctactcagaaccacccaaagtcacctctccaatggttacctctttcaacataagggacaccattgtttccacatccatgcctggctcctctgagattacaaggattgagatggagtcaacattctccctggctcatgggctgaagggaaccagcacctcccaggaccccatcgtatccacagagaaaagtgctgtccttcacaagttgaccactggtgctactgagacctctaggacagaagttgcctcttctagaagaacatccattccaggccctgatcattccacagagtcaccagacatctccactgaagtgatccccagcctgcctatctcccttggcattacagaatcttcaaatatgaccatcatcactcgaacaggtcctcctcttggctctacatcacagggcacatttaccttggacacaccaactacatcctccagggcaggaacacactcgatggcgactcaggaatttccacactcagaaatgaccactstcatgaacaaggacyctgagattctatcatggacaatccctycttctatagagaaaaccagcttctcctcttccctgatgccttcaccagccatgacttcacctcctgtttcctcaacattaycaaagaccattcacaccactccttctcctatgacctcactgctcacccctagcctagtgatgaccacagacacattgggcacaagcccaraacctacaaccagttcacctmcaaatttgagcagtacctcacatgagatactgacaacagatgaagacaccacagctatagaagccatgcatccttccacaascacagcagcgactaatgtggaaaccaccagttmtggacatgggtcacaatcctctgtcctagctgactcagaaaaaaccaaggccacagctccaatggataccacctccaccatggggcatacaactgtttccacatcaatgtctgtttcctctgagactacaaaaattaagagagagtcaacatattccttgactcctggactgagagagaccagcatttcccaaaatgccagcttttccactgacacaagtattgttctttcagaagtccccactggtactactgctgaggtctccaggacagaagtcacctcctctggtagaacatccatccctggcccttctcagtccacagttttgccagaaatatccacaagaacaatgacaaggctctttgcctygcccaccatgacagaatcagcagaaatgaccatccccactcaaacaggtccttctgggtctacctcacaggatacccttaccttggacacatccaccacaaagtcccaggcaaagactcattcaactttgrctcagagatttccacactcagagatgaccactctcatgagcagaggtcctggagatatgtcatggcaaagctctccctctctggaaaatcccagctctctcccttccctgctgtctttacctgccacaacctcacctcctcccatttcctccacattaccagtgactatctcctcctctcctcttcctgtgacttcacttctcacctctagcccggtaacgaccacagacatgttacacacaagcccagaacttgtaaccagttcacctccaaagctgagccacacttcagatgagagactgaccactggcaaggacaccacaaatacagaagctgtgcatccttccacaaacacagcagcgtccaatgtggagattcccagctctggacatgaatccccttcctctgccttagctgactcagagacatccaaagccacatcaccaatgtttattacctccacccaggaggatacaactgttgccatatcaacccctcacttcttggagactagcagaattcagaaagagtcaatttcctccctgagccctaaattgagggagacaggcagttctgtggagacaagctcagccatagagacaagtgctgtcctttctgaagtgtccrttggtgctactastgagatctccaggacagaagtcacctcctctagcagaacatccatctctggttctgctgagtccacaatgttgccagaaatatccaccacaagaaaaatcattaagttycctacttcccccatcctggcagaatcatcagaaatgaccatcaagacccaaacaagtcctcctgggtctacatcagagagtacctttacattagacacatcaaccactccctccttggtaataacccattcgactatgactcagagattgccacactcagagataaccactctkgtgagtagaggtgctggggatgtgccacggcccagctctctccctgtggaagaaacaagccctccatcttcccagctgtctttatctgccatgatctcaccttctcctgtttcttccacattaccagcaagtagccactcctcttctgcttctgtgacttcacttctcacaccaggccaagtgaagactactgaggtgttggacgcaagtgcagaacctgaaaccagttcacctccaagtttgagcagcacctcagttgaaatactggccacctctgaagtcaccacagatacggagaaaattcatcctttctcaaacacggcagtaaccaaagttggaacttccagttctggacatgaatccccttcctctgtcctacctgactcagagacaaccaaagccacatcggcaatgggtaccatctccattatgggggatacaagtgtttctacattaactcctgccttatctaacactaggaaaattcagtcagagccagcttcctcactgaccaccagattgagggagaccagcacctctgaagagaccagcttagccacagaagcaaacactgttctttctaaagtgtccactggtgctactactgaggtctccaggacagaagccatctcctttagcagaacatccatgtcaggccctgagcagtccacaatgtcacaagacatctccataggaaccatccccaggatttctgcctcctctgtcctgacagaatctgcaaaaatgaccatcacaacccaaacaggtccttcggagtctacactagaaagtacccttaatttgaacacagcaaccacaccctcttgggtggaaacccactctatagtaattcagggatttccacacccagagatgaccacttccatgggcagaggtcctggaggtgtgtcatggcctagccctccctttgtgaaagaaaccagccctccatcctccccgctgtctttacctgccgtgacctcacctcatcctgtttccaccacattcctagcacatatccccccctctccccttcctgtgacttcacttctcacctctggcccggcgacaaccacagatatcttgggtacaagcacagaacctggaaccagttcatcttcaagtttgagcaccacctcccatgagagactgaccacttacaaagacactgcacatacagaagccgtgcatccttccacaaacacaggagggaccaatgtggcaaccaccagctctggatataaatcacagtcctctgtcctagctgactcatctccaatgtgtaccacctccaccatgggggatacaartgttctcacatcaactcctgccttccttgagactaggaggattcagacagagctagcttcctccctgacccctggattgagggagtccagyggctctgaagggaccagctcaggcaccaagatgagcactgtcctctctaaagtgcccactggtgctactactgagatctccaaggaagacgtcacctccatcccaggtcccgctcaatccacaatatcaccagacatctccacaagaaccgtcagctggttctctacatcccctgtcatgacagaatcagcagaaataaccatgaacacccatacaagtcctttaggggccacaacacaaggcaccagtactttggmcacgtcaagcacaacctctttgacaatgacacactcaactatatctcaaggattttcacactcacagatgagcactcttatgaggaggggtcctgaggatgtatcatggatgagccctccccttctggaaaaaactagaccttccttttctctgatgtcttcaccagccacaacttcaccttctcctgtttcctccacattaccagagagcatctcttcctctcctcttcctgtgacttcactcctcacgtctggcttggcaaaaactacagatatgttgcacaaaagctcagaacctgtaaccaactcacctgcaaatttgagcagcacctcagttgaaatactggccacctctgaagtcaccacagatacagagaaaactcatccttcttcaaacagaacagtgaccgatgtggggacctccagttctggacatgaatccacttcctttgtcctagctgactcacagacatccaaagtcacatctccaatggttattacctccaccatggaggatacgagtgtctccacatcaactcctggcttttttgagactagcagaattcagacagaaccaacatcctccctgacccttggactgagaaagaccagcagctctgaggggaccagcttagccacagagatgagcactgtcctttctggagtgcccactggtgccactgctgaagtctccaggacagaagtcacctcctctagcagaacatccatctcaggctttgctcagctcacagtgtcaccagagacttccacagaaaccatcaccagactccctacctccagcataatgacagaatcagcagaaatgatgatcaagacacaaacagatcctcctgggtctacaccagagagtactcatactgtggacatatcaacaacacccaactgggtagaaacccactcgactgtgactcagagattttcacactcagagatgaccactcttgtgagcagaagccctggtgatatgttatggcctagtcaatcctctgtggaagaaaccagctctgcctcttccctgctgtctctgcctgccacgacctcaccttctcctgtttcctctacattagtagaggatttcccttccgcttctcttcctgtgacttctcttctcamccctggcctggtgataaccacagacaggatgggcataagcagagaacctggaaccagttccacttcaaatttgagcagcacctcccatgagagactgaccactttggaagacactgtagatacagaagmcatgcagccttccacacacacagcagtgaccaacgtgaggacctccatttctggacatgaatcacaatcttctgtcctatctgactcagagacacccaaagccacatctccaatgggtaccacctacaccatgggggaaacgagtgtttccatatccacttctgacttctttgagaccagcagaattcagatagaaccaacatcctccctgacttctggattgagggagaccagcagctctgagaggatcagctcagccacagagggaagcactgtcctttctgaagtgcccagtggtgctaccactgaggtctccaggacagaagtgatatcctctaggggaacatccatgtcagggcctgatcagttcaccatatcaccagacatctctactgaagcgatcaccaggctttctacttcccccattatgacagaatcagcagaaagtgccatcactattgagacaggttctcctggggctacatcagagggtaccctcaccttggacacctcaacaacaaccttttggtcagggacccactcaactgcatctccaggattttcacactcagagatgaccactcttatgagtagaactcctggagatgtgccatggccgagccttccctctgtggaagaagccagctctgtctcttcctcactgtcttcacctgccatgacctcaacttcttttttctccacattaccagagagcatctcctcctctcctcatcctgtgactgcacttctcacccttggcccagtgaagaccacagacatgttgcgcacaagctcagaacctgaaaccagttcacctccaaatttgagcagcacctcagctgaaatattagccacstctgaagtcaccaaagatagagagaaaattcatccctcctcaaacacacctgtagtcaatgtagggactgtgatttataaacatctatccccttcctctgttttggctgacttagtgacaacaaaacccacatctccaatggctaccacctccactctggggaatacaagtgtttccacatcaactcctgccttcccagaaactatgatgacacagccaacttcctccctgacttctggattaagggagatcagtacctctcaagagaccagctcagcaacagagagaagtgcttctctttctggaatgcccactggtgctactactaaggtctccagaacagaagccctctccttaggcagaacatccaccccaggtcctgctcaatccacaatatcaccagaaatctccacrgaaaccatcactagaatttctactcccctcaccacgacaggatcagcagaaatgaccatcacccccaaaacaggtcattctggggcatcctcacaaggtacctttaccttggacacatcaagcagagcctcctggccaggaactcactcagctgcaactcacagatctccacactcagggatgaccactcctatgagcagaggtcctgaggatgtgtcatggccaagccgcccatcagtggaaaaaactagccctccatcttccctggtgtctttatctgcagtaacctcaccttcgccactttattccacaccatctgagagtagccactcrtctcctctccgggtgacttctcttttcacccctgtcaygatgaagaccacagacatgttggacacaagcttggaacctgtgaccacttcacctcccagtatgaatatcacctcagatgagagtctggccacttctaaagccaccatggagacagargcaattcagctttcagaaaacacagctgtgactcagatgggcaccatcagygctagacaagaattctattcctcttatccaggyctcccagagccatccaaagtgacatctccartggtcacctcttccaccataaaagacattgtttctacaaccatacctgcttcctctgagataacaagaattgagatggagtcaacatccaccctgacccccacaccaagggagaccagcacctcycaggagatccactcagccacaaagccaagcactgttccttacaaggcactcactagtgccacgattgaggactccatgacacaagtcatgtcctctagcagaggacctagccctgatcagtccacaatgtcacaagacatatccactgaagtgatcaccaggctctctacctcccccatcaagrcagaatctacagaaatgaccattaccacccaaacaggttctcctggggctacatcaaggggtacccttaccttggacacttcaacaacttttatgtcagggacscaytcaactgcatctcaaggattttcacactcacagatgaccrctcttatgagtagaactcctggagakgtgccatggctaagccatccctctgtggaagaagccagctctgcctctttctcactgtcttcacctgtcatgacctcatcttctcccgtttcttccacattaccagacagcatccactcttcttcgcttcctgtgacatcacttctcacctcagggctggtgaagaccacagagctgttgggcacaagctcagaacctgaaaccagttcacccccaaatttgagcagcacctcagctgaaatactggccaycactgaagtcactacagatacagagaaactggagatgaccaatgtggtaacctcaggttatacacatgaatctccttcctctgtcctagctgactcagtgacaacaaaggccacatcttcaatgggtatcacctaccccacaggagatacaaatgttctcacatcaacccctgccttctctgacaccagtaggattcaaacaaagtcaaagctctcactgactcctgggttgatggagaccagcatctctgaagagaccagctctgccacagaaaaaagcactgtcctttctagtgtgcccactggtgctactactgaggtctccaggacagaagccatctcttctagcagaacatccatcccaggccctgctcaatccacaatgtcatcagrcacctccatggaaaccatcactagaatttctacccccctcacaaggaaagaatcaacagacatggccatcacccccaaaacaggtccttctggggctacctcgcaggrtacctttaccttggactcatcaagcacagcctcctggccaggaactcactcagctacaactcagagatttccacrgtcagtggtgacaactcctatgagcagaggtcctgaggatgtgtcatggcyaagcccgctgtctgtggaaaamaacagccctccatcttccctggtatcttcatcttcagtaacctcaccttcgccactttattccacaccatctgggagtagccactcctctcctgtccctgtcacttctcttttcacctctatcatgatgaaggccacagacatgttggatgcaagtttggaacctgagaccacttcagctcccaatatgaatatcacctcagatgagagtctggccrcttctaaagccaccacggagacagaggcaattcasgtttttgaaaatacagcarcgtcccatgtggaaaccaccagtgctacagaggaactctattcctcttccccaggcttctcagagccaacaaaagtgatatctccagtggtcacctcttcctctataagagacaacatggtttccacaacaatgcctggctcctctggcattacaaggattgagatagagtcaatgtcatctctgacccctggactgagggagaccagaacctcccaggacatcacctcatccacagagacaagcactgtcctttacaagatgycctctggtgccactcctgaggtctccaggacagaagttatgccctctagcagaacatccattcctggccctgctcagtccacaatgtcactagacatctccgatgaagttgtcaccaggctgtctacctctcccatcatgacagaatctgcagaaataaccatcaccacccaaacaggttattctctggctacatcccaggttacccttcccttgggcacctcaatgacctttttgtcagggacccactcaactatgtctcaaggactttcayactcagagatraccaatcttatgagcagggrtcctgaaagtctgtcatggacgagccctcgctttgtggaaacaactagatcttcctcttctctgacatcattacctctcacgacctcactttctcctgtgtcctccacattactagacagtagcccctcctctcctcttcctgtgacttcacttatcctcccaggcctggtgaagactacagaagtgttggatacaagctcagagcctaaaaccagttcatctccaaatttgagcagcacctcagttgaaataccggccacctctgaaatcatgacagatacagagaaaattcatccttcctcaaacacagcggtggccaaagtgaggacctccagttctgttcatgaatctcattcctctgtcctagctgactcagaaacaaccataaccataccttcaatgggtatcacctccgctgtggasgataccactgttttcacatcaaatcctgccttctctgagactaggaggattccgacagagccaacattctcattgactcctggattcagggagactagcacctctgaagagaccacctcaatcacagaaacaagtgcagtcctttwtggagtgcccactagtgctactactgaartctccatgacagaaatmatgtcctctaatagaayacacatccctgactctgatcagtccacgatgtctccagacatcatcactgaagtgatcaccaggctctcttcctcatccatgatgtcagaatcaacacaaatgaccatcaccacccaaaaaagttctcctggggctacagcacagagtactcttaccttggccacaacaacagcccccttggcaaggacccactcaactgttcctcctagatttttacactcagagatgacaactcttatgagtaggagtcctgaaaatccatcatggaagagctctcyctttgtggaaaaaactagctcttcatcttctctgttgtccttacctgtcacgacctcaccttctgtttcttccacattaccgcagagtatcccttcctcctctttttctgtgacttcactcctcaccccaggcatggtgaagactacagacacaagcacagaacctggaaccagtttatctccaaatctgagtggcacctcagttgaaatactggctgcctctgaagtcaccacagatacagagaaaattcatccttcttcaagcatggcagtgaccaatgtgggaaccaccagttctggacatgaactrtattcctctgtttcaatccactcggagccatccaaggctacatacccagtgggtactccctcttccatggctgaaacctctatttccacatcaatgcctgctaattttsagaccayaggatttgaggytgagccattttctcatttgacttctggayttaggaagacmaacatgtccctggacaccagctcagtcacaccaacaaatacaccttcttctcctgggtccactcaccttttacagagttccaagactgatttcacctcttctgcaaaaacatcatccccagactggcctccagcctcacagtatactgaaattccagtggacataatcaccccstttaatgcttctccatctattacggagtccactgggataacctccttcccagaatccaggtttactatgtctgtaacagaaagtactcatcatctgagtacagatttgctgccttcagctgagactatttccactggcacagtgatgccttctctatcagaggccatgacttcatttgccaccactggagttccacgagccatctcaggttcaggtartccattctctaggacagagtcaggccctggggatgctactctgtccaccattgcagagagcctgccttcatccactcctgtgccattctcctcttcaaccttcactaccactgattcttcaaccatcccagccctccatgagataacttcctcttcagctaccccatatagagtggacaccagtcttgggacagagagcagcactactgaaggacgcttggttatggtcagtactttggacacttcaagccaaccaggcaggacatcttcatcacccattttggataccagaatgacagagagygttgagctgggaacagtgacaagtgcttatcaagttccttcactctcaacacggttgacaagaactgatggcattatggaacacatcacaaaaatacccaatgaagcagcacacagaggtaccataagaccagtcaaaggccctcagacatccacttcgcctgccagtcctaaaggactacacacaggagggacaaaaaraatggagaccaccaccacagctctgaagaccaccaccacagctctgaagaccacttccagagccaccttgaccaccagtgtctatactcccactttgggaacactgamtcccctcaatgcatcaatgcaaatggccagcacaatccccacagaaatgatgatcacaaccccatatgttttccctgatgttccagaaacgacatcctcattggctaccagcctgggagcagaaaccagcacagctcttcccaggacaaccccatctgttttcaatagagaatcagagaccacagcctcactggtctctcrttctggggcagagagawgtccggttattcaaactctagatgtttcttctagtgagccagatacaacagcttcatgggttatccatcctgcagagaccatcccaactgtttccaagacaacccccaattttttccacagtgaattagacactgtatcttccacagccaccagtcatggggcagaygtcagctcagccattccaacaaatatctcacctagtgaactagatgcactgaccccactggtcactatttcggggacagatactagtacaacattcccaacactgactaagtccccacatgaaacagagacaagaaccacatggctcactcatcctgcagagaccagctcaactattcccagaacaatccccaatttttctcatmatgaatcagatgccacaccttcaatagccaccagtcctggggcagaaaccagttcagctattccaattatgactgtctcacctggtgcagaagatctggtgacctcacaggtcactagttctggsacagacagaaatatgactattccaactttgactctttctcctggtgaaccaaagacsatagcctcattagtcayccatcctgaagcacagacaagttcggccattccaacttcaactatctcgcctgctgtatcacggttggtgacctcaatggtcaccagtttggcggcaaagacaagtacaactaatcgagctctgacaaactcccctggtgaaccagctacaacagtttcattggtcacgcatyctgcacagaccagcccaacagttccctggacaacttccatttttttccatagtaaatcagacaccacaccttcaatgaccaccagtcatggggcagaatccagttcagctgttccaactccaactgtttcaactgaggtaccaggagtagtgacccctttggtcaccagttctagggcagtgatcagtacaactattccaattctgactctttctcctggtgaaccagagaccacaccttcaatggccaccagkcatggggaagaagccagttctgctattccaactccaactgtttcacctggggtaccaggagtggtgacctctctggtcactagttctagggcagtgactagtacaactattccaattctgactttttctcttggtgaaccagagaccacaccttcaatggscaccagtcatgggacagaagctggctcagctgttccaactgttttacctgaggtaccaggaatggtgacctctctggttgctagttctagggcagtaaccagtacaactcttccaactctgactctttctcctggtgaaccagagaccacaccttcaatggccaccagtcatggggcagaagccagctcaactgttccaactgtttcacctgaggtaccaggagtggtgacctctctggtcactagttctagtggagtaaacagtacaagtattccaactctgattctttctcctggtgaactagaaaccacaccttcaatggccaccagtcatggggcagaagccagctcagctgttccaactccaactgtttcacctggggtatcaggartggtgacccctctggtcactagttccagggcagtgaccagtacaactattccaattctaactctttcttctagtgagccagagaccacaccttcaatggccaccagtcatggggtagaagccagctcagctgttctaactgtttcacctgaggtaccaggaatggtgacctytctggtcactagttctagagcagtaaccagtacaactattccaactctgactatttcttctgatgaaccagagaccrcaacttcattggtcacccattctgaggcaaagatgatttcagccattccaactttagstgtctcccctactgtacaagggctggtgacttcactggtcactagttctgggtcagagaccagtgcgttttcaaatctaactgttgcctcaagtcaaccagagaccatagactcatgggtcgctcatcctgggacagaagcaagttctgttgttccaactttgactgtctccactggtgagccgtttacaaatatctcattggtcacccatcctgcagagagtagctcaactcttcccaggacaacctcaaggttttcccacagtgaattagacactatgccttctacagtcaccagtcctgaggcagaatccagctcagccatttcaacaactatttcacctggtataccaggtgtgctgacatcactggtcactagctctgggagagacatcagtgcaacttttccaacagtgcctgagtccccacatgaatcagaggcaacagcctcatgggttactcatcctgcagtcaccagcacaacagttcccaggacaacccctaattattctcatagtgaaccagacaccacaccatcaatagccaccagtcctggggcagaagccacttcagattttccaacaataactgtctcacctgatgtaccagatatggtaacctcacaggtcactagttctgggacagacaccagtataactattccaactctgactctttcttctggtgagccagagaccacaacctcatttatcacctattctgagacacayacaagttcagccattccaactctccctgtctcccctgrtgcatcaaagatgctgacctcactggtcatcagttctgggacagacagcactacaactttcccaacactgacggagaccccatatgaaccagagacaacagccatacagctcattcatcctgcagagaccaacacaatggttcccaggacaactcccaagttttcccatagtaagtcagacaccacactcccagtagccatcaccagtcctgggccagaagccagttcagctgtttcaacgacaactatctcacctgatatgtcagatctggtgacctcactggtccctagttctgggacrgacaccagtacaaccttcccaacattgagtgagaccccatatgaaccagagactacagccacgtggctcactcatcctgcagaaaccagmacaacggtttctgggacaattcccaacttttcccataggggatcagacactgcaccctcaatggtcaccagtcctggagtagacacgaggtcaggtgttccaactacaaccatcccacccagtataccaggggtagtgacctcacaggtcactagttctgcaacagacactagtacagctattccaactttgactccttctcctggtgaaccagagaccacagcctcatcagctacccatcctgggacacagactggcttcactgttccaattcggactgttccctctagtgagccagatacaatggcttcctgggtcactcatcctccacagaccagcacacctgtttccagaacaacctccagtttttcccatagtagtccagatgccacacctgtaatggccaccagtcctaggacagaagccagttcagctgtactgacaacaatctcacctggtgcaccagagatggtgacttcacagatcactagttctggggcagcaaccagtacaactgttccaactttgactcattctcctggtatgccagagaccacagccttattgagcacccatcccagaacagagacaagtaaaacatttcctgcttcaactgtgtttcctcaagtatcagagaccacagcctcactcaccattagacctggtgcagagactagcacagctctcccaactcagacaacatcctctctcttcaccctacttgtaactggaaccagcagagttgatctaagtccaactgcttcacctggtgtttctgcaaaaacagccccactttccacccatccagggacagaaaccagcacaatgattccaacttcaactctttcccttggtttactagagactacaggcttactggccacmagctcttcagcagagaccagcasgagtactctaactctgactgtttcccctgctgtctctgggctttccagtgcctctataacaactgataagmcccaaactgtgacctcctggaacacagaaacctcaccatctgtaacttcagttggacccccagaattttccaggaytgtcacaggcaccactatgaccttgataccatcagagatgccaacaccacctaaaaccagtcatggagaaggagtgagtccaaccactatcttgagaactacaatggttgaagccactaatttagctaccacaggttccagtcccactgtggccaagacaacaaccaccttcaatacactggctggaagcctctttactcctctgaccacacctgggatgtccaccttggcctctgagagtgtgacctcaagaacaagttataaccatcggtcctggatctccaccaccagcagttataaccgtcggtactggacccctgccaccagcactccagtgacttctacattctccccagggatttccacatcctccatccccagctccacagcagccacagtcccattcatggtgccattcaccctcaacttcaccatcaccaacctgcagtacgaggaggacatgcggcaccctggttccaggaagttcaacgccacagagagagaactgcagggtctgctcaaacccttgttcaggaatagcagtctggaatacctctattcaggctgcagactagcctcactcaggccagagaaggatagctcagccayggcagtggatgccatctgcacacatcgccctgaccctgaagacctcggactggacagagagcgactgtactgggagctgagcaatctgacaaatggcatccaggagctgggcccctacaccctggaccggaacagtctctatgtcaatggtttcacccatcgaagctctatgcccaccaccagcactcctgggacctccacagtggatgtgggaacctcagggactccatcctccagccccagccccacgactgctggccctctcctgatgccgttcaccctcaacttcaccatcaccaacctgcagtacgaggaggacatgcgtcgcactggctccaggaagttcaacaccatggagagtgtcctgcagggtctgctcaagcccttgttcaagaacaccagtgttggccctctgtactctggctgcagattgaccttgctcaggcccgagaaagatggggcagccactggagtggatgccatctgcacccaccgccttgaccccaaaagccctggactcaacagggagcagctgtactgggagytaagcaaactgaccaatgacattgaagagctgggcccctacaccctggacaggaacagtctctatgtcaatggtttcacccatcagagctctgtgtccaccaccagcactcctgggacctccacagtggatctcagaacctcagggactccatcctccctctccagccccacaattatggctgctggccctctcctggtaccattcaccctcaacttcaccatcaccaacctgcagtatggggaggacatgggtcaccctggctccaggaagttcaacaccacagagagggtcctgcagggtctgcttggtcccatattcaagaacaccagtgttggccctctgtactctggctgcagactgacctctctcaggtcygagaaggatggagcagccactggagtggatgccatctgcatccatcatcttgaccccaaaagccctggactcaacagagagcggctgtactgggagctgagccaactgaccaatggcatcaaagagctgggcccctacaccctggacaggaacagtctctatgtcaatggtttcacccatcggacctctgtgcccaccascagcactcctgggacctccacagtggaccttggaacctcagggactccattctccctcccaagccccgcaactgctggccctctcctggtgctgttcaccctcaacttcaccatcaccaacctgaagtatgaggaggacatgcatcgccctggctccaggaagttcaacaccactgagagggtcctgcagactctgcttggtcctatgttcaagaacaccagtgttggccttctgtactctggctgcagactgaccttgctcaggtccgagaaggatggagcagccactggagtggatgccatctgcacccaccgtcttgaccccaaaagccctggagtggacagggagcagctatactgggagctgagccagctgaccaatggcatcaaagagctgggcccctacaccctggacaggaacagtctctatgtcaatggtctcctgggacctccacagtggaccttgggtcagggactccatcctccctccccagccccctctcctggtgccgttcaccctcaacttcaccatcaccaacctgaagtacgaggaggacatgcattgccctggctccaggaagttcaacaccacagagagagtcctgcagagtctgcttggtcccatgttcaagaacaccagtgttggccctctgtactctggctgcagactgaccttgctcaggtccgagaaggatggagcagccactggagtggatgccatctgcacccaccgtcttgaccccaaaagccctggagtggacagggagcagctatactgggagctgagccagctgaccaatggcatcaaagagctgggtccctacaccctggacagaaacagtctctatgtcaatggtgtttcacccatcagacctctgcgcccaacaccagcactcctgggacctccacagtggaccttg

SEQ ID NO: 380 - DNA, 38546 bp, Homo sapiens
aagcgttgcacaattcccccaacctccatacatacggcagctcttctagacacaggttttcccaggtcaaatgcggggaccccagccatatctcccaccctgagaaattttggagtttcagggagctcagaagctctgcagaggccaccctctctgaggggattcttcttagacctccatccagaggcaaatgttgacctgtccatgctgaaaccctcaggccttcctgggtcatcttctcccacccgctccttgatgacagggagcaggagcactaaagccacaccagaaatggattcaggactgacaggagccaccttgtcacctaagacatctacaggtgcaatcgtggtgacagaacatactctgccctttacttccccagataagaccttggccagtcctacatcttcggttgtgggaagaaccacccagtctttgggggtgatgtcctctgctctccctgagtcaacctctagaggaatgacacactccgagcaaagaaccagcccatcgctgagtccccaggtcaatggaactccctctaggaactaccctgctacaagcatggtttcaggattgagttccccaaggaccaggaccagttccacagaaggaaattttaccaaagaagcatctacatacacactcactgtagagaccacaagtggcccagtcactgagaagtacacagtccccactgagacctcaacaactgaaggtgacagcacagagaccccctgggacacaagatatattcctgtaaaaatcacatctccaatgaaaacatttgcagattcaactgcatccaaggaaaatgccccagtgtctatgactccagctgagaccacagttactgactcacatactccaggaaggacaaacccatcatttgggacactttattcttccttccttgacctatcacctaaagggaccccaaattccagaggtgaaacaagcctggaactgattctatcaaccactggatatcccttctcctctcctgaacctggctctgcaggacacagcagaataagtaccagtgcgcctttgtcatcatctgcttcagttctcgataataaaatatcagagaccagcatattctcaggccagagtctcacctcccctctgtctcctggggtgcccgaggccagagccagcacaatgcccaactcagctatccctttttccatgacactaagcaatgcagaaacaagtgccgaaagggtcagaagcacaatttcctctctgggkactccatcaatatccacaaagcagacagcagagactatccttaccttccatgccttcgctgagaccatggatatacccagcacccacatagccaagactttggcttcagaatggttgggaagtccaggtacccttggtggcaccagcacttcagcgctgacaaccacatctccatctaccactttagtctcagaggagaccaacacccatcactccacgagtggaaaggaracagaaggaactttgaatacatctatgactccacttgagacctctgctcctggagaagagtccgaaatgactgccaccttggtccccactctaggttttacaactcttgacagcaagatcagaagtccatctcaggtctcttcatcccacccaacaagagagctcagaaccacaggcagcacctctgggaggcagagttccagcacagctgcccacgggagctctgacatcctgagggcaaccacttccagcacctcaaaagcatcatcatggaccagtgaaagcacagctcagcaatttagtgaaccccagcacacacagtgggtggagacaagtcctagcatgaaaacagagagacccccagcatcaaccagtgtggcagcccctatcaccacttctgttccctcagtggtctctggcttcaccaccctgaagaccagctccacaaaagggatttggcttgaagaaacatctgcagacacactcatcggagaatccacagctggcccaaccacccatcagtttgctgttcccactgggatttcaatgacaggaggcagcagcaccaggggaagccagggcacaacccacctactcaccagagccacagcatcatctgagacatccgcagatttgactctggccacgaacggtgtcccagtctccgtgtctccagcagtgagcaagacggctgctggctcaagtcctccaggagggacaaagccatcatatacaatggtttcttctgtcatccctgagacatcatctctacagtcctcagctttcagggaaggaaccagcctgggactgactccattaaacactagacatcccttctcttcccctgaaccagactctgcaggacacaccaagataagcaccagcattcctctgttgtcatctgcttcagttcttgaggataaagtgtcagcgaccagcacattctcacaccacaaagccacctcatctattaccacagggactcctgaaatctcaacaaagacaaagcccagctcagccgttctttcctccatgaccctaagcaatgcagcaacaagtcctgaaagagtcagaaatgcaacttcccctctgactcatccatctccatcaggggaagagacagcagggagtgtcctcactctcagcacctctgctgagactacagactcacctaacatccacccaactgggacactgacttcagaatcgtcagagagtcctagcactctcagcctcccaagtgtctctggagtcaaaaccacattttcttcatctactccttccactcatctatttactagtggagaagaaacagaggaaacttcgaatccatctgtgtctcaacctgagacttctgtttccagagtaaggaccaccttggccagcacctctgtccctaccccagtattccccaccatggacacctggcctacacgttcagctcagttctcttcatcccacctagtgagtgagctcagagctacgagcagtacctcagttacaaactcaactggttcagctcttcctaaaatatctcacctcactgggacggcaacaatgtcacagaccaatagagacacgtttaatgactctgctgcaccccaaagcacaacttggccagagactagtcccagattcaagacagggttaccttcagcaacaaccactgtttcaacctctgccacttctctctctgctactgtaatggtctctaaattcacttctccagcaactagttccatggaagcaacttctatcagggaaccatcaacaaccatcctcacaacagagaccacgaatggcccaggcwctatggctgtggcttctaccaacatcycaattggaaagggctacattactgaaggaagattggacacaagccatctgcccattggaaccacagcttcctctgagacatctatggattttaccatggccaaagaaagtgtctcaatgtcagtatctccatctcagtccatggatgctgctggctcaagcactccaggaaggacaagccaattcgttgacacattttctgatgatgtctatcatttaacatccagagaaattacaatacctagagatggaacaagctcagctctgactccacaaatgactgcaactcaccctccatctcctgatcctggctctgctagaagcacctggcttggcatcttgtcctcatctccttcttctcctactcccaaagtcacaatgagctccacattttcaactcagagagtcaccacaagcatgataatggacacagttgaaactagtcggtggaacatgcccaacttaccttccacgacttccttgacaccaagtaatattccaacaagtggtgccataggaaaaagcaccctggttcccttggacactccatctccagccacatcattggaggcatcagaagggggacttccaaccctcagcacctaccctgaatcaacaaacacacccagcatccacctcggagcacacgctagttcagaaagtccaagcaccatcaamcttaccatggcttcagtagtaaaacctggctcttacacacctctcaccttcccctcaatagagacccacattcatgtatcaacagccagaatggcttactcttctgggtcttcacctgagatgacagctcctggagagactaacactggtagtacctgggaccccaccacctacatcaccactacggatcctaaggatacaagttcagctcaggtctctacaccccactcagtgaggacactcagaaccacagaaaacyatccaaagacagagtccgccaccccagctgcttactctggaagtcctaaaatctcaagttcacccaatctcaccagtccggccacaaaagcatggaccatcacagacacaactgaacactccactcaattacattacacaaawttggcagaaaaatcatctggatttgagacacagtcagctccaggacctgtctctgtagtaatccctacctcccctaccattggaagcagcacattggaactaacttctgatgtcccaggggaacccctggtccttgctcccagtgagcagaccacaatcactctccccatggcaacatggctgagtaccagtttgacagaggaaatggcttcaacagaccttgatatttcaagtccaagttcacccatgagtacatttgctatttttccacctatgtccacaccttctcatgaactttcaaagtcagaggcagataccagtgccattagaaatacagattcaacaacgttggatcagcacctaggaatcaggagtttgggcagaactggggacttaacaactgttcctatcaccccactgacaaccacgtggaccagtgtgattgaacactcaacacaagcacaggacaccctttctgcaacgatgagtcctactcacgtgacacagtcactcaaagatcaaacatctataccagcctcagcatccccttcccatcttactgaagtctaccctgagctcgggacacaagggagaagctcctctgaggcaaccactttttggaaaccatctacagacacactgtccagagagattgagactggcccaacaaacattcaatccactccacccatggacaacacaacaacagggagcagtagtagtggagtcaccctgggcatagcccaccttcccataggaacatcctccccagctgagacatccacaaacatggcaytggaaagaagaagttctacagccactgtctctatggctgggacaatgggactccttgttactagtgctccaggaagaagcatcagccagtcattaggaagagtttcctctgtcctttctgagtcaactactgaaggagtcacagattctagtaagggaagcagcccaaggctgaacacacagggaaatacagctctctcctcctctcttgaacccagctatgctgaaggaagccagatgagcacaagcatccctctaacctcatctcctacaactcctgatgtggaattcatagggggcagcacattttggaccaaggaggtcaccacagttatgacctcagacatctccaagtcttcagcaaggacagagtccagctcagctacccttatgtccacagctttgggaagcactgaaaatacaggaaaagaaaaactcagaactgcctctatggatcttccatctccaactccatcaatggaggtgacaccatggatttctytcactctcagtaatgcccccaataccacagattcacttgacctcagccatggggtgcacaccagctctgcagggactttggccactgacaggtcattgaatactggtgtcactagagcctccagattggaaaacggctctgatacctcttctaagtccctgtctatgggaaacagcactcacacttccatgactkacacagagaagagtgaagtgtcttcttcaatccatccccgacctgagacctcagctcctggagcagagaccactttgacttccactcctggaaacagggccataagcttaacattgcctttttcatccattccagtggaagaagtcatttctacaggcataaccycaggaccagacatcaactcagcacccatgacacattctcccatcaccccaccaacaattgtatggaccagtacaggcacaattgaacagtccactcaaccactacatgcagtttcttcagaaaaagtttctgtgcagacacagtcaactccatatgtcaactctgtggcagtgtctgcttcccctacccatgagaattcagtctcttctggaagcagcacatcctctccatattcctcagcctcacttgaatccttggattccacaatcagtaggaggaatgcaatcacttcctggctatgggacctcactacayctctccccactacaacttggccaagtactagtttatctgaggcactgtcctcaggccattctggggtttcaaacccaagttcaactacgactgaatttccactcttttcagctgcatccacatctgctgctaagcaaagaaatccagaaacagagacccatggtccccagaatacagccgcgagtactttgaacactgatgcatcctcggtcacaggtctttctgagactcctgtgggggcaagtatcagctctgaagtccctcttccaatggccrtaacttctagatcagatgtttctggccttacatctgagagtactgctaacccgagtttaggcacagcctcttcagcagggaccaaattaactaggacaatatccctgcccacttcagagtctttggtttcctttagaatgaacaaggatccatggacagtgtcaatccctttggggtcccatccaactactaatacagaaacaagcatcccagtaaacagcgcaggtccacctggcttgtccacagtagcatcagatgtaattgacacaccttcagatggggctgagagtattcccactgtctccttttccccctcccctgatactgaagtgacaactatctcacatttcccagaaaagacarctcattcatttagaaccatttcatctctcactcatgagttgacttcaagaktgacacctattcctggggattggatgagttcagctatgtctacaaagcccacaggagccagtccctccattacactgggagagagaaggacaatcacctctgctgctccaaccacttcccccatagttctcactgctagtttcacrgagaccagcacagtttcactggataatgaaactacagtaaaaacctcagatatccttgasgcacggaaaacaaatgagctcccctcagatagcagttcttcttctgatctgatcaacacctccatagcttcttcaactatggatgtcactaaaacagcctccatcagtcccactagcatctcaggaatgacagcaagttcctccccatctctcttctcttcagatagaccccaggttcccacatctacaacagagacaaatacagccacctctccatctgtttccagtaacacctattctcttgatgggggctccaatgtgggtggcactccatccactttaccaccctttacaatcacccaccctgtcgagacaagctcggccctattagcctggtctagaccagtaagaactttcagcaccatggtcagcactgacactgcctccggagaaaatcctacctctagcaattctgtggtgacttctgttccagcaccaggtacatggrccagtgtaggcagtactactgacttacctgccatgggctttctcaagacaagtcctgcaggagaggcacactcacttctagcrtcaactattgaaccagccactgccttcactccycatctctcagcagcagtggtcactggatccagtgctacatcagaagccagtcttctcactacgagtgaaagcaaagccattcattcttcaccacagaccccaactacacccacctctggagcaaactgggaaacttcagctactcctgagagccttttggtagtcactgagacttcagacacaacacttacctcaaagattttggtcacagataccatcttgttttcaactgtgtccacgccaccttctaaatttccaagtacggggactctgtctggagcttccttccctactttactcccggacactccagccatccctctcactgccactgagccaacaagttcattagctacatcctttgattccaccccactggtgactatagcttcrgatagtcttggcacagtcccagagactaccctgaccatgtcagagacctcaaatggtgatgcactggttcttaagacagtaagtaacccagataggagcatccctggaatcactatccaaggagtaacagaaagtccactccatccttcttccacttccccctctaagattgttgctccacggaatacaacctatgaaggttcgatcacagtgrcactttctactttgcctgcgggaactactggttcccttgtattcagtcagagttctgaaaactcagagacaacggctttggtagactcatcagctgggcttgagagggcatctgtgatgccactaaccacaggaagccagggtatggcyagctctggaggaatcagaagtgggtccactcactcaactggaaccaaaacattttcttctctccctctgaccatgaacccaggtgaggttacagccatgtctgaaatcaccaygaacagactgacagctactcaatcaacagcacccaaagggatacctgtgaagcccaccagtgctgagtcaggcctcctaacacctgtctctgcctcctcaagcccatcaaaggcctttgcctcactgactacagctcccycaacttgggggatcccacagtctaccttgayatttgagttttctgaggtyccaagtttggatactaagtccgcttctttaccaactcctggacagtccctgaacaccattccagactcagatgcaagcacagcatcttcctcactgtccaagtctccagaaaaaaacccaagggcaaggatgatgacttccacaaaggccataagtgcaagctcatttcaatcaacaggttttactgaaacccctgagggatctgcctccccttctatggcagggcatgaacccagagtccccacttcaggaacaggggaccctagatatgcctcagagagcatgtcttatccagacccaagcaaggcatcatcagctatgacatcgacctctcttgcatcaaaactcacaactctcttcagcacaggtcaagcagcaaggtctggttctagttcctctcccataagcctatccactgagaaagaaacaagcttcctttcccccactgcatccacctccagaaagacttcactatttcttgggccttccatggcaaggcagcccaacatattggtgcatcttcagacttcagctctgacactttctccaacatccactctaaatatgtcccaggaggagcctcctgagttaacctcaagccagaccattgcagaagaagagggaacaacagctgaaacacagacgttaaccttcacaccatctgagaccccaacatccttgttacctgtctcttctcccacagaacccacagccagaagaaagagttctccagaaacatgggcaagctctatttcagttcctgccaagacctcsttggttgaaacaactgatggaacgctagtgaccaccataaagatgtcaagccaggcagcacaaggaaattccacgtggcctgccccagcagaggagacggggascagtccagcaggcacatccccaggaagcccagaaatgtctaccactctcaaaatcatgagctccaaggaacccrgcatcagcccagagatcaggtccactgtgagaaattctccttggaagactccagaaacaactgttcccatggagaccacagtggaaccagtcacccttcagtccacagccctaggaagtggcagcaccagcatctctcacctgcccacaggaaccacatcaccaaccaagtcaccaacagaaaatatgttggctacagaaagggtctccctctccccatccccacctgaggcttggaccaacctttattctggaactccaggagggaccaggcagtcactggccacaatgtcctctgtctccctagagtcaccaactgctagaagcatcacagggactggtcagcaaagcagtccagaactggtttyaaagacaactggaatggaattctctatgtggcatggctctactggagggaccacaggggacacacatgtctctctgagcacatcttccaatatccttgaagaccctgtaaccagcccaaactctgtgagctcattgacagataaatccaaacataaaaccgagacatgggtmagcaccacagccattccctccactgtcctgaataataagataatggcagctgaacaacagacaagtcratctgtggatgaggcttattcatcaactagttcttggtcagatcagacatctgggagtgacatcacccttggtgcatctcctgatgtcacaaacacattatacatcacctccacagcacaaaccacctcactagtrtctctgccctctggagaccaaggcattacaagcctcaccaatccctcaggaggaaaaacaagctctgcrtcatctgtcacatctccttcaatagggcttgagactctgakggccaatgtaagtgcagtgamaagtgacattgcccctactgctgggcatctatctcagacttcatctcctgcggaagtgagcatcctggacrtaaccacagctcctactccaggtatctccaccaccatcaccaccatgggaaccaactcaatctcaactaccacacccaacccagaagtgggtatgagtaccatggacagcaccccggccacagagaggcrcacaacttctacagaacacccttccacctggtcttccacagctgcatcagattcctggactgtcacagacatgacttcaaacttgaaagttgcaagatctcctggaacaatttccacaatgcatacaacttcattcttagcctcaagcactgaattagactccatgtctactccccatggccgtataactgtcattggaaccagcctggtcactccatcctctgatgcttcagctgtaaagacagagaccagtacaagtgaaagaacattgagtccttcagacacaactgcatctactcccatctcaactttttctcgtgtccagaggatgagcatctcagttcctgacattttaagtacaagttggactcccagtagtacagaagcagaagatgtgcctgtttcaatggtttctacagatcatgctagtacaaagactgacccaaataygcccctgtccacttttctgtttgattctctgtccactcttgactgggacactgggagatctctgtcatcagccacagccactacctcagctcctcagggggccacaactccccargaactcactttggaaaccatgatcagcccagctacctcacagttgcccttctctatagggcacattacaagtgcagtcayaccagctgcaatggcaaggagctctggagttactttttcaagaccagatcccacaagcaaaaaggcagagcagacttccactcagcttcccaccaccacttctgcacatccagrgcaggtgcccagatcagcagcaacaactctggatgtgatcccacacacagcaaaaactccagatgcaacttttcagagacaagggcagacagctcttacaacagaggcaagagctacatctgactcctggaatgagaaagaaaaatcaaccccaagtgcaccttggatcactgagatgatgaattctgtctcagaagataccatcaaggaggttaccagctcctccagtgtrttaaggaccctgaatacgctggacataaacttggaatctgggacgacttcatccccaagttggaaaagcagcccatatgagagaattgccccttctgagtcyaccacagacaaagaggcaattcacccttctacaaacacagtagagaccacwggctgggtcacaagttccgaacatgcttctcattccactatcccagcccactcagcgtcatccaaactcacatctccagtggttacaacctccaccagggaacaagcaatagtttctatgtcaacaaccacatggccagagtctacaagggctagaacagagcctaattccttcttgactattgaactgagggacgtcagcccttacatggacaccagctcaaccacacaaacaagtwttatctcttccccaggttccactgcgatcaccaaggggcctagaacagaaattacctcctctaagagaatatccagctcattccttgcccagtctatgaggtcgtcagacagcccctcagaagccatcwccaggctgtctaactttcctgccatgacagaatctggaggaatgatccttgctatgcaaacaagtccacctggcgctacatcactaagtgcacctactttggatacatcagccacagcctcctggacagggactccactggctacgactcagagatttacatactcagagaagaccactctctttagcaaaggtcctgaggatacatcacagccaagccctccctctgtggaagaaaccagctcttcctcttccctggtacctatcmatgctacaacctcgccttccaatattttgttgacatcacaagggcacagtccctcctctactccacctgtgacctcagttttcttgtctgagacctctggcctggggaagaccacagacatgtcgaggataagcttggaacctggcacaagtttacctcccaatttgagcagtacagcaggtgaggcgttatccacttatgaagcctccagagatacaaaggcaattcatcattctgcagacacagcagtgacgaatatggaggcaaccagttctgaatattctcctatcccaggccatacaaagccatccaaagccacatctccattggttacctcccacatcatgggggacatcacttcttccacatcagtatttggctcctccgagaccacagagattgagacagtgtcctctgtgaaccagggacttcaggagagaagcacatcccaggtggccagctctgctacagagacaagcactgtcattacccatgtgtctagtggtgatgctactactcatgtcaccaagacacaagccactttctctagcggaacatccatctcaagccctcatcagtttataacttctaccaacacatttacagatgtgagcaccaacccctccacctctctgataatgacagaatcttcaggagtgaccatcaccacccaaacaggtcctaytggagctgcaacacagggtccatatctcttggacacatcaaccatgccttacttgacagagactccattagctgtgactccagattttatgcaatcagagaagaccactctcataagcaaaggtcccaaggatgtgtcctggacaagccctccctctgtggcagaaaccagctatccctcttccctgacacctttcttggtcacaaccatacctcctgccacttccacgttacaagggcaacatacatcctctcctgtttctgcgacttcagttcttacctctggactggtgaagaccacagatatgttgaacacaagcatggaacctgtgaccaattcacctcaaaatttgaacaatccatcaaatgagatactggccactttggcagccaccacagatatagagactattcatcctyccataaacaaagcagtgaccaatatggggactgccagttcagcacatgtactgcattccactctcccagtcagctcagaaccatctacagccacatctccaatggttcctgcctccagcatgggggacgctcttgcttctatatcaatacctggttctgagaccacagacattgagggagagccaacatcctccctgactgctggacgaaaagagaacagcaccctccaggagatgaactcaactacagagtcaaacatcatcctctccaatgtgtctgtgggggctattactgaagccacaaaaatggaagtcccctcttttgatgcaacattcataccaactcctgctcagtcaacaaagttcccagatattttctcagtagccagcagtagactttcaaactctcctcccatgacaatatctacccacatgaccaccacccagacagggtcttctggagctacatcaaagattccacttgccttagacacatcaaccttggaaacctcagcagggactccatcagtggtgactgaggggtttgcccactcaaaaataaccactgcaatgaacaatgatgtcaaggacgtgtcacagacaaaccctccctttcaggatgaagccagctctccctcttctcaagcacctgtccttgtcacaaccttaccttcttctgttgctttcacaccgcaatggcacagtacctcctctcctgtttctatgtcctcagttcttacttcttcactggtaaagaccgcaggcaaggtggatacaagcttagaaacagtgaccagttcacctcaaagtatgagcaacactttggatgacatatcggtcacttcagcagccaccacagatatagagacaacgcatccttccataaacacagtagttaccaatgtggggaccaccggttcagcatttgaatcacattctactgtctcagcttacccagagccatctaaagtcacatctccaaatgttaccacctccaccatggaagacaccacaatttccagatcaatacctaaatcctctaagactacaagaactgagactgagacaacttcctccctgactcctaaactgagggagaccagcrtctcccaggagatcacctcgtccacagagacaagcactgttccttacaaagagctcactggtgccactaccgaggtatccaggacagatgtcacttcctctagcagtacatccttccctggccctgatcagtccacagtgtcactagacatctccacagaaaccaacaccaggctgtctacctccccaataatgacagaatctgcagaaataaccatcaccacccaaacaggtcctcatggggctacatcacaggatacttttaccatggacccatcaaatacaaccccccaggcagggatccactcagctatgactcatggattttcacaattggatgtgaccactcttatgagcagaattccacaggatgtatcatggacaagtcctccctctgtggataaaaccagctccccctcttcctttctgycctcacctgcaatgacmacaccttccctgatttcttctaccttaccagaggataagctctcctctcctatgacttcacttctcacctctggcctagtgaagattacagacatattacgtacacgcttggaacctgtgaccagctcacttccaaatttcagcagcacctcagataagatactggccacttctaaagacagtaaagacacaaaggaaatttttccttctataaacacagaagagaccaatgtgaaagccaacaactctggacatgaatcccattcccctgcactggctgactcagagacacccaaagccacaactcaaatggttatcaccaccactgtgggagatccagctccttccacatcaatgccagtgcatggttcctctgagaytacaaacattaagagagagccaacatatttcttgactcctagactgagagagaccagtacctctcaggagtccagctttcccacggacacaagttttctactttccaaagtccccactggtactattactgaggtctccagtacaggggtcawctcttctagcaaaatttccaccccagaccatgataagtccacagtgccacctgacaccttcacaggagagatccccagggtcttcacctcctctattaagacaaaatctgcagaaatgacgatcaccacccaagcaagtcctcctgagtctgcatcgcacagtacccttcccttggacacatcaaccacactttcccagggagggactcattcaactgtgactcagggattcccatactcagaggtgaccactctcatgggcatgggtcctgggaatgtgtcatggatgacaactccccctgtggaagaaaccagctctgtgtcttccctgatgtcttcacctgccatgacatccccttctcctgtttcctccacatcaccacagagcatcccctcctctcctcttcctgtgactgcacttcctacttctgttctggtgacaaccacagatgtgttgggcacaacaagcccagagtctgtaaccagttcacctccaaatttgagcagcatcactcatgagagaccggccacttacaaagacactgcacacacagaagccgccatgcmtcattccacaaacaccgcagtgaccaatgtagggacttccgggtctggacataaatcacaatcctctgtcctagctgactcagagacatcgaaagccacacctctgatgagtaccacctccaccctgggggacacaagtgtttccacatcaactcctaatatctctcagactaaccaaattcaaacagagccaacagcatccctgagccctagactgagggagagcagcacgtctgagaagaccagctcaacaacagagacaaatactgccttttcttatgtgcccacaggtgctattactcaggcctccagaacagaaatctcctctagcagaacatccatctcagaccttgatcggyccacaatagcacccgacatctccacaggaatgatcaccaggctcttcacctcccccatcatgacaaaatctgcagaaatgaccgtcaccactcaaacaactactcctggggctacatcacagggtatccttccctgggacacatcaaccacacttttccagggagggactcattcaaccgtgtctcagggattcccacactcagagataaccactcttcggagcagaacccctggagatgtgtcatggatgacaactccccctgtggaagaaaccagctctgggttttccctgatgtcaccttccatgacatccccttctcctgtttcctccacatcaccagagagcatcccctcctctcctctccctgtgactgcacttcttacttctgttctggtgacaaccacaaatgtattgggcacaacaagcccagagmccgtaacgagttcacctccaaatttaagcagccccacacaggaragactgaccacttacaaagacactgcgcacacagaagccatgcatgcttccatgcatacaaacactgcagtggccaacgtggggacctccattkctggacatgaatcacaatcttctgtcccagctgattcasacacatccaaagccacatctccaatgggtaycaccttcrccatgggggatacaagtgtttctacatcaactcctgccttctttgagactagaattcagactgaatcaacatcctctttgattcctggattaagggacaccaggacstctgaggagatcaacactgtgacagagaccagcactgtcctttcagaagtgcccactactactactactgaggtctccaggacagaagttatcacttccagcagaacaaccatctcagggyctgatcattccaaaatgtcaccctacatctccacagaaaccatcaccaggctctccacttttcctkttgtaacaggatccacagaaatggccatcaccaaccaaacaggtcctatagggactatctcacaggctrcccttaccctggacacatcaagcacagcttyctgggaagggactcactcacctgtgactcagagatttccacactcagaggagaccactactatgagcagaagtactaagggcgtgtcatggcaaagccctccctctgtggaagaaaccagttctccttcttccccagtgcctttacctgcaataacctcacattcatctctttattccgcagtatcaggaagtagccccacttctgctctccctgtgacttcccttctcacctctggcaggaggaagaccatagacatgttggacacacactcagaacttgtgaccagctccttaccaagtgcaagtagcttctcaggtgagatactcacttctgaagcctccacaaatacagagacaattcacttttcagagaacacagcagaaaccaatatggggaccaccaattctatgcataaactacattcctctgtctcaatccactcccagccatccggacacacacctccaaaggttactggatctatgatggaggacgctattgtttccacatcaacacctggttctcctgagactaaaaatgttgacagagactcaacatcccctctgactcctgaactgaaagaggacagcaccgccctggtgatgaactcaactacagagtcaaacactgttttctccagtgtgtccctggatgctgctactgaggtctccagggcagaagtcacctactatgatcctacattcatgccagcttctgctcagtcaacaaagtccccagacatttcacctgaagccagcagcagtcattctaactctcctcccttgacaatatctacacamaagaccatcgccacacaaacaggtccttctggggtgacatctcttggccaactgaccctggacacatcaaccatagccacctcagcaggaactccatcagccagaactcaggattttgtagattcagaaacaaccagtgtcatgaacaatgatctcaatgatgtgttgaagacaagccctttctctgcagaagaagccaactctctctcttctcaggcacctctccttgtgacaacctcaccttctcctgtaacttccacattgcaagagcacagtacctcctctcttgtttctgtgacctcagtacccacccctacactggcgaagatcacagacatggacacaaacttagaacctgtgactcgttcacctcaaaatttaaggaacaccttggccacttcagaagccaccacagatacacacacaatgcatccttctataaacacagcagtggccaatrtggggaccaccagttcaccaaatgaattctattttactgtctcacctgactcagacccatataaagccacatccgcagtagttatcacttccacctcgggggactcaatagtttccacatcaatgcctagatcctctgcgatgaaaaagattgagyctgagacaaytttctccctgatatttagactgagggagactagcacctcccagaaaattggctcatcctcagacacaagcacggtctttgacaaagcattcactgctgctactactgaggtctccagaacagaaytcacctcctctagcagaacatccatccaaggcactgaaaagcccacaatgtcaccggacacctccacaagatctgtcaccatgctttctacttttgctggcctgacaaaatccgaagaaaggaycattgccacccaaacaggtcctcatagggcgacatcacagggtacccttacctgggacacatcaatcacaacctcacaggcagggacccactcagctatgactcatggattttcacaattagatttgtccactcttacgagtagagttcctgagtacatatcagggacaagcccaccctctgtggaaaaaaccagctcttcctcttcccttctgtctttaccagcaataacctcaccgtcccctgtacctactacattaccagaaagtaggccgtcttctcctgttcatctgacttcactccccacctctggcctagtgaagaccacagatatgctggcatctgtggccagtttacctccaaacttgggcagcacctcacataagataccgactacttcagaagacattaaagatacagagaaaatgtatccttccacaaacatagcagtaaccaatgtggggaccaccacttctgaaaaggaatcttattcgtctgtcccagcctactcagaaccacccaaagtcacctctccaatggttacctctttcaacataagggacaccattgtttccacatccatgcctggctcctctgagattacaaggattgagatggagtcaacattctccctggctcatgggctgaagggaaccagcacctcccaggaccccatcgtatccacagagaaaagtgctgtccttcacaagttgaccactggtgctactgagacctctaggacagaagttgcctcttctagaagaacatccattccaggccctgatcattccacagagtcaccagacatctccactgaagtgatccccagcctgcctatctcccttggcattacagaatcttcaaatatgaccatcatcactcgaacaggtcctcctcttggctctacatcacagggcacatttaccttggacacaccaactacatcctccagggcaggaacacactcgatggcgactcaggaatttccacactcagaaatgaccactstcatgaacaaggacyctgagattctatcatggacaatccctycttctatagagaaaaccagcttctcctcttccctgatgccttcaccagccatgacttcacctcctgtttcctcaacattaycaaagaccattcacaccactccttctcctatgacctcactgctcacccctagcctagtgatgaccacagacacattgggcacaagcccaraacctacaaccagttcacctmcaaatttgagcagtacctcacatgagatactgacaacagatgaagacaccacagctatagaagccatgcatccttccacaascacagcagcgactaatgtggaaaccaccagttmtggacatgggtcacaatcctctgtcctagctgactcagaaaaaaccaaggccacagctccaatggataccacctccaccatggggcatacaactgtttccacatcaatgtctgtttcctctgagactacaaaaattaagagagagtcaacatattccttgactcctggactgagagagaccagcatttcccaaaatgccagcttttccactgacacaagtattgttctttcagaagtccccactggtactactgctgaggtctccaggacagaagtcacctcctctggtagaacatccatccctggcccttctcagtccacagttttgccagaaatatccacaagaacaatgacaaggctctttgcctygcccaccatgacagaatcagcagaaatgaccatccccactcaaacaggtccttctgggtctacctcacaggatacccttaccttggacacatccaccacaaagtcccaggcaaagactcattcaactttgrctcagagatttccacactcagagatgaccactctcatgagcagaggtcctggagatatgtcatggcaaagctctccctctctggaaaatcccagctctctcccttccctgctgtctttacctgccacaacctcacctcctcccatttcctccacattaccagtgactatctcctcctctcctcttcctgtgacttcacttctcacctctagcccggtaacgaccacagacatgttacacacaagcccagaacttgtaaccagttcacctccaaagctgagccacacttcagatgagagactgaccactggcaaggacaccacaaatacagaagctgtgcatccttccacaaacacagcagcgtccaatgtggagattcccagctctggacatgaatccccttcctctgccttagctgactcagagacatccaaagccacatcaccaatgtttattacctccacccaggaggatacaactgttgccatatcaacccctcacttcttggagactagcagaattcagaaagagtcaatttcctccctgagccctaaattgagggagacaggcagttctgtggagacaagctcagccatagagacaagtgctgtcctttctgaagtgtccrttggtgctactastgagatctccaggacagaagtcacctcctctagcagaacatccatctctggttctgctgagtccacaatgttgccagaaatatccaccacaagaaaaatcattaagttycctacttcccccatcctggcagaatcatcagaaatgaccatcaagacccaaacaagtcctcctgggtctacatcagagagtacctttacattagacacatcaaccactccctccttggtaataacccattcgactatgactcagagattgccacactcagagataaccactctkgtgagtagaggtgctggggatgtgccacggcccagctctctccctgtggaagaaacaagccctccatcttcccagctgtctttatctgccatgatctcaccttctcctgtttcttccacattaccagcaagtagccactcctcttctgcttctgtgacttcacttctcacaccaggccaagtgaagactactgaggtgttggacgcaagtgcagaacctgaaaccagttcacctccaagtttgagcagcacctcagttgaaatactggccacctctgaagtcaccacagatacggagaaaattcatcctttctcaaacacggcagtaaccaaagttggaacttccagttctggacatgaatccccttcctctgtcctacctgactcagagacaaccaaagccacatcggcaatgggtaccatctccattatgggggatacaagtgtttctacattaactcctgccttatctaacactaggaaaattcagtcagagccagcttcctcactgaccaccagattgagggagaccagcacctctgaagagaccagcttagccacagaagcaaacactgttctttctaaagtgtccactggtgctactactgaggtctccaggacagaagccatctcctttagcagaacatccatgtcaggccctgagcagtccacaatgtcacaagacatctccataggaaccatccccaggatttctgcctcctctgtcctgacagaatctgcaaaaatgaccatcacaacccaaacaggtccttcggagtctacactagaaagtacccttaatttgaacacagcaaccacaccctcttgggtggaaacccactctatagtaattcagggatttccacacccagagatgaccacttccatgggcagaggtcctggaggtgtgtcatggcctagccctccctttgtgaaagaaaccagccctccatcctccccgctgtctttacctgccgtgacctcacctcatcctgtttccaccacattcctagcacatatccccccctctccccttcctgtgacttcacttctcacctctggcccggcgacaaccacagatatcttgggtacaagcacagaacctggaaccagttcatcttcaagtttgagcaccacctcccatgagagactgaccacttacaaagacactgcacatacagaagccgtgcatccttccacaaacacaggagggaccaatgtggcaaccaccagctctggatataaatcacagtcctctgtcctagctgactcatctccaatgtgtaccacctccaccatgggggatacaartgttctcacatcaactcctgccttccttgagactaggaggattcagacagagctagcttcctccctgacccctggattgagggagtccagyggctctgaagggaccagctcaggcaccaagatgagcactgtcctctctaaagtgcccactggtgctactactgagatctccaaggaagacgtcacctccatcccaggtcccgctcaatccacaatatcaccagacatctccacaagaaccgtcagctggttctctacatcccctgtcatgacagaatcagcagaaataaccatgaacacccatacaagtcctttaggggccacaacacaaggcaccagtactttggmcacgtcaagcacaacctctttgacaatgacacactcaactatatctcaaggattttcacactcacagatgagcactcttatgaggaggggtcctgaggatgtatcatggatgagccctccccttctggaaaaaactagaccttccttttctctgatgtcttcaccagccacaacttcaccttctcctgtttcctccacattaccagagagcatctcttcctctcctcttcctgtgacttcactcctcacgtctggcttggcaaaaactacagatatgttgcacaaaagctcagaacctgtaaccaactcacctgcaaatttgagcagcacctcagttgaaatactggccacctctgaagtcaccacagatacagagaaaactcatccttcttcaaacagaacagtgaccgatgtggggacctccagttctggacatgaatccacttcctttgtcctagctgactcacagacatccaaagtcacatctccaatggttattacctccaccatggaggatacgagtgtctccacatcaactcctggcttttttgagactagcagaattcagacagaaccaacatcctccctgacccttggactgagaaagaccagcagctctgaggggaccagcttagccacagagatgagcactgtcctttctggagtgcccactggtgccactgctgaagtctccaggacagaagtcacctcctctagcagaacatccatctcaggctttgctcagctcacagtgtcaccagagacttccacagaaaccatcaccagactccctacctccagcataatgacagaatcagcagaaatgatgatcaagacacaaacagatcctcctgggtctacaccagagagtactcatactgtggacatatcaacaacacccaactgggtagaaacccactcgactgtgactcagagattttcacactcagagatgaccactcttgtgagcagaagccctggtgatatgttatggcctagtcaatcctctgtggaagaaaccagctctgcctcttccctgctgtctctgcctgccacgacctcaccttctcctgtttcctctacattagtagaggatttcccttccgcttctcttcctgtgacttctcttctcamccctggcctggtgataaccacagacaggatgggcataagcagagaacctggaaccagttccacttcaaatttgagcagcacctcccatgagagactgaccactttggaagacactgtagatacagaagmcatgcagccttccacacacacagcagtgaccaacgtgaggacctccatttctggacatgaatcacaatcttctgtcctatctgactcagagacacccaaagccacatctccaatgggtaccacctacaccatgggggaaacgagtgtttccatatccacttctgacttctttgagaccagcagaattcagatagaaccaacatcctccctgacttctggattgagggagaccagcagctctgagaggatcagctcagccacagagggaagcactgtcctttctgaagtgcccagtggtgctaccactgaggtctccaggacagaagtgatatcctctaggggaacatccatgtcagggcctgatcagttcaccatatcaccagacatctctactgaagcgatcaccaggctttctacttcccccattatgacagaatcagcagaaagtgccatcactattgagacaggttctcctggggctacatcagagggtaccctcaccttggacacctcaacaacaaccttttggtcagggacccactcaactgcatctccaggattttcacactcagagatgaccactcttatgagtagaactcctggagatgtgccatggccgagccttccctctgtggaagaagccagctctgtctcttcctcactgtcttcacctgccatgacctcaacttcttttttctccacattaccagagagcatctcctcctctcctcatcctgtgactgcacttctcacccttggcccagtgaagaccacagacatgttgcgcacaagctcagaacctgaaaccagttcacctccaaatttgagcagcacctcagctgaaatattagccacstctgaagtcaccaaagatagagagaaaattcatccctcctcaaacacacctgtagtcaatgtagggactgtgatttataaacatctatccccttcctctgttttggctgacttagtgacaacaaaacccacatctccaatggctaccacctccactctggggaatacaagtgtttccacatcaactcctgccttcccagaaactatgatgacacagccaacttcctccctgacttctggattaagggagatcagtacctctcaagagaccagctcagcaacagagagaagtgcttctctttctggaatgcccactggtgctactactaaggtctccagaacagaagccctctccttaggcagaacatccaccccaggtcctgctcaatccacaatatcaccagaaatctccacrgaaaccatcactagaatttctactcccctcaccacgacaggatcagcagaaatgaccatcacccccaaaacaggtcattctggggcatcctcacaaggtacctttaccttggacacatcaagcagagcctcctggccaggaactcactcagctgcaactcacagatctccacactcagggatgaccactcctatgagcagaggtcctgaggatgtgtcatggccaagccgcccatcagtggaaaaaactagccctccatcttccctggtgtctttatctgcagtaacctcaccttcgccactttattccacaccatctgagagtagccactcrtctcctctccgggtgacttctcttttcacccctgtcaygatgaagaccacagacatgttggacacaagcttggaacctgtgaccacttcacctcccagtatgaatatcacctcagatgagagtctggccacttctaaagccaccatggagacagargcaattcagctttcagaaaacacagctgtgactcagatgggcaccatcagygctagacaagaattctattcctcttatccaggyctcccagagccatccaaagtgacatctccartggtcacctcttccaccataaaagacattgtttctacaaccatacctgcttcctctgagataacaagaattgagatggagtcaacatccaccctgacccccacaccaagggagaccagcacctcycaggagatccactcagccacaaagccaagcactgttccttacaaggcactcactagtgccacgattgaggactccatgacacaagtcatgtcctctagcagaggacctagccctgatcagtccacaatgtcacaagacatatccactgaagtgatcaccaggctctctacctcccccatcaagrcagaatctacagaaatgaccattaccacccaaacaggttctcctggggctacatcaaggggtacccttaccttggacacttcaacaacttttatgtcagggacscaytcaactgcatctcaaggattttcacactcacagatgaccrctcttatgagtagaactcctggagakgtgccatggctaagccatccctctgtggaagaagccagctctgcctctttctcactgtcttcacctgtcatgacctcatcttctcccgtttcttccacattaccagacagcatccactcttcttcgcttcctgtgacatcacttctcacctcagggctggtgaagaccacagagctgttgggcacaagctcagaacctgaaaccagttcacccccaaatttgagcagcacctcagctgaaatactggccaycactgaagtcactacagatacagagaaactggagatgaccaatgtggtaacctcaggttatacacatgaatctccttcctctgtcctagctgactcagtgacaacaaaggccacatcttcaatgggtatcacctaccccacaggagatacaaatgttctcacatcaacccctgccttctctgacaccagtaggattcaaacaaagtcaaagctctcactgactcctgggttgatggagaccagcatctctgaagagaccagctctgccacagaaaaaagcactgtcctttctagtgtgcccactggtgctactactgaggtctccaggacagaagccatctcttctagcagaacatccatcccaggccctgctcaatccacaatgtcatcagrcacctccatggaaaccatcactagaatttctacccccctcacaaggaaagaatcaacagacatggccatcacccccaaaacaggtccttctggggctacctcgcaggrtacctttaccttggactcatcaagcacagcctcctggccaggaactcactcagctacaactcagagatttccacrgtcagtggtgacaactcctatgagcagaggtcctgaggatgtgtcatggcyaagcccgctgtctgtggaaaamaacagccctccatcttccctggtatcttcatcttcagtaacctcaccttcgccactttattccacaccatctgggagtagccactcctctcctgtccctgtcacttctcttttcacctctatcatgatgaaggccacagacatgttggatgcaagtttggaacctgagaccacttcagctcccaatatgaatatcacctcagatgagagtctggccrcttctaaagccaccacggagacagaggcaattcasgtttttgaaaatacagcarcgtcccatgtggaaaccaccagtgctacagaggaactctattcctcttccccaggcttctcagagccaacaaaagtgatatctccagtggtcacctcttcctctataagagacaacatggtttccacaacaatgcctggctcctctggcattacaaggattgagatagagtcaatgtcatctctgacccctggactgagggagaccagaacctcccaggacatcacctcatccacagagacaagcactgtcctttacaagatgycctctggtgccactcctgaggtctccaggacagaagttatgccctctagcagaacatccattcctggccctgctcagtccacaatgtcactagacatctccgatgaagttgtcaccaggctgtctacctctcccatcatgacagaatctgcagaaataaccatcaccacccaaacaggttattctctggctacatcccaggttacccttcccttgggcacctcaatgacctttttgtcagggacccactcaactatgtctcaaggactttcayactcagagatraccaatcttatgagcagggrtcctgaaagtctgtcatggacgagccctcgctttgtggaaacaactagatcttcctcttctctgacatcattacctctcacgacctcactttctcctgtgtcctccacattactagacagtagcccctcctctcctcttcctgtgacttcacttatcctcccaggcctggtgaagactacagaagtgttggatacaagctcagagcctaaaaccagttcatctccaaatttgagcagcacctcagttgaaataccggccacctctgaaatcatgacagatacagagaaaattcatccttcctcaaacacagcggtggccaaagtgaggacctccagttctgttcatgaatctcattcctctgtcctagctgactcagaaacaaccataaccataccttcaatgggtatcacctccgctgtggasgataccactgttttcacatcaaatcctgccttctctgagactaggaggattccgacagagccaacattctcattgactcctggattcagggagactagcacctctgaagagaccacctcaatcacagaaacaagtgcagtcctttwtggagtgcccactagtgctactactgaartctccatgacagaaatmatgtcctctaatagaayacacatccctgactctgatcagtccacgatgtctccagacatcatcactgaagtgatcaccaggctctcttcctcatccatgatgtcagaatcaacacaaatgaccatcaccacccaaaaaagttctcctggggctacagcacagagtactcttaccttggccacaacaacagcccccttggcaaggacccactcaactgttcctcctagatttttacactcagagatgacaactcttatgagtaggagtcctgaaaatccatcatggaagagctctcyctttgtggaaaaaactagctcttcatcttctctgttgtccttacctgtcacgacctcaccttctgtttcttccacattaccgcagagtatcccttcctcctctttttctgtgacttcactcctcaccccaggcatggtgaagactacagacacaagcacagaacctggaaccagtttatctccaaatctgagtggcacctcagttgaaatactggctgcctctgaagtcaccacagatacagagaaaattcatccttcttcaagcatggcagtgaccaatgtgggaaccaccagttctggacatgaactrtattcctctgtttcaatccactcggagccatccaaggctacatacccagtgggtactccctcttccatggctgaaacctctatttccacatcaatgcctgctaattttsagaccayaggatttgaggytgagccattttctcatttgacttctggayttaggaagacmaacatgtccctggacaccagctcagtcacaccaacaaatacaccttcttctcctgggtccactcaccttttacagagttccaagactgatttcacctcttctgcaaaaacatcatccccagactggcctccagcctcacagtatactgaaattccagtggacataatcaccccstttaatgcttctccatctattacggagtccactgggataacctccttcccagaatccaggtttactatgtctgtaacagaaagtactcatcatctgagtacagatttgctgccttcagctgagactatttccactggcacagtgatgccttctctatcagaggccatgacttcatttgccaccactggagttccacgagccatctcaggttcaggtartccattctctaggacagagtcaggccctggggatgctactctgtccaccattgcagagagcctgccttcatccactcctgtgccattctcctcttcaaccttcactaccactgattcttcaaccatcccagccctccatgagataacttcctcttcagctaccccatatagagtggacaccagtcttgggacagagagcagcactactgaaggacgcttggttatggtcagtactttggacacttcaagccaaccaggcaggacatcttcatcacccattttggataccagaatgacagagagygttgagctgggaacagtgacaagtgcttatcaagttccttcactctcaacacggttgacaagaactgatggcattatggaacacatcacaaaaatacccaatgaagcagcacacagaggtaccataagaccagtcaaaggccctcagacatccacttcgcctgccagtcctaaaggactacacacaggagggacaaaaaraatggagaccaccaccacagctctgaagaccaccaccacagctctgaagaccacttccagagccaccttgaccaccagtgtctatactcccactttgggaacactgamtcccctcaatgcatcaatgcaaatggccagcacaatccccacagaaatgatgatcacaaccccatatgttttccctgatgttccagaaacgacatcctcattggctaccagcctgggagcagaaaccagcacagctcttcccaggacaaccccatctgttttcaatagagaatcagagaccacagcctcactggtctctcrttctggggcagagagawgtccggttattcaaactctagatgtttcttctagtgagccagatacaacagcttcatgggttatccatcctgcagagaccatcccaactgtttccaagacaacccccaattttttccacagtgaattagacactgtatcttccacagccaccagtcatggggcagaygtcagctcagccattccaacaaatatctcacctagtgaactagatgcactgaccccactggtcactatttcggggacagatactagtacaacattcccaacactgactaagtccccacatgaaacagagacaagaaccacatggctcactcatcctgcagagaccagctcaactattcccagaacaatccccaatttttctcatmatgaatcagatgccacaccttcaatagccaccagtcctggggcagaaaccagttcagctattccaattatgactgtctcacctggtgcagaagatctggtgacctcacaggtcactagttctggsacagacagaaatatgactattccaactttgactctttctcctggtgaaccaaagacsatagcctcattagtcayccatcctgaagcacagacaagttcggccattccaacttcaactatctcgcctgctgtatcacggttggtgacctcaatggtcaccagtttggcggcaaagacaagtacaactaatcgagctctgacaaactcccctggtgaaccagctacaacagtttcattggtcacgcatyctgcacagaccagcccaacagttccctggacaacttccatttttttccatagtaaatcagacaccacaccttcaatgaccaccagtcatggggcagaatccagttcagctgttccaactccaactgtttcaactgaggtaccaggagtagtgacccctttggtcaccagttctagggcagtgatcagtacaactattccaattctgactctttctcctggtgaaccagagaccacaccttcaatggccaccagkcatggggaagaagccagttctgctattccaactccaactgtttcacctggggtaccaggagtggtgacctctctggtcactagttctagggcagtgactagtacaactattccaattctgactttttctcttggtgaaccagagaccacaccttcaatggscaccagtcatgggacagaagctggctcagctgttccaactgttttacctgaggtaccaggaatggtgacctctctggttgctagttctagggcagtaaccagtacaactcttccaactctgactctttctcctggtgaaccagagaccacaccttcaatggccaccagtcatggggcagaagccagctcaactgttccaactgtttcacctgaggtaccaggagtggtgacctctctggtcactagttctagtggagtaaacagtacaagtattccaactctgattctttctcctggtgaactagaaaccacaccttcaatggccaccagtcatggggcagaagccagctcagctgttccaactccaactgtttcacctggggtatcaggartggtgacccctctggtcactagttccagggcagtgaccagtacaactattccaattctaactctttcttctagtgagccagagaccacaccttcaatggccaccagtcatggggtagaagccagctcagctgttctaactgtttcacctgaggtaccaggaatggtgacctytctggtcactagttctagagcagtaaccagtacaactattccaactctgactatttcttctgatgaaccagagaccrcaacttcattggtcacccattctgaggcaaagatgatttcagccattccaactttagstgtctcccctactgtacaagggctggtgacttcactggtcactagttctgggtcagagaccagtgcgttttcaaatctaactgttgcctcaagtcaaccagagaccatagactcatgggtcgctcatcctgggacagaagcaagttctgttgttccaactttgactgtctccactggtgagccgtttacaaatatctcattggtcacccatcctgcagagagtagctcaactcttcccaggacaacctcaaggttttcccacagtgaattagacactatgccttctacagtcaccagtcctgaggcagaatccagctcagccatttcaacaactatttcacctggtataccaggtgtgctgacatcactggtcactagctctgggagagacatcagtgcaacttttccaacagtgcctgagtccccacatgaatcagaggcaacagcctcatgggttactcatcctgcagtcaccagcacaacagttcccaggacaacccctaattattctcatagtgaaccagacaccacaccatcaatagccaccagtcctggggcagaagccacttcagattttccaacaataactgtctcacctgatgtaccagatatggtaacctcacaggtcactagttctgggacagacaccagtataactattccaactctgactctttcttctggtgagccagagaccacaacctcatttatcacctattctgagacacayacaagttcagccattccaactctccctgtctcccctgrtgcatcaaagatgctgacctcactggtcatcagttctgggacagacagcactacaactttcccaacactgacggagaccccatatgaaccagagacaacagccatacagctcattcatcctgcagagaccaacacaatggttcccaggacaactcccaagttttcccatagtaagtcagacaccacactcccagtagccatcaccagtcctgggccagaagccagttcagctgtttcaacgacaactatctcacctgatatgtcagatctggtgacctcactggtccctagttctgggacrgacaccagtacaaccttcccaacattgagtgagaccccatatgaaccagagactacagccacgtggctcactcatcctgcagaaaccagmacaacggtttctgggacaattcccaacttttcccataggggatcagacactgcaccctcaatggtcaccagtcctggagtagacacgaggtcaggtgttccaactacaaccatcccacccagtataccaggggtagtgacctcacaggtcactagttctgcaacagacactagtacagctattccaactttgactccttctcctggtgaaccagagaccacagcctcatcagctacccatcctgggacacagactggcttcactgttccaattcggactgttccctctagtgagccagatacaatggcttcctgggtcactcatcctccacagaccagcacacctgtttccagaacaacctccagtttttcccatagtagtccagatgccacacctgtaatggccaccagtcctaggacagaagccagttcagctgtactgacaacaatctcacctggtgcaccagagatggtgacttcacagatcactagttctggggcagcaaccagtacaactgttccaactttgactcattctcctggtatgccagagaccacagccttattgagcacccatcccagaacagagacaagtaaaacatttcctgcttcaactgtgtttcctcaagtatcagagaccacagcctcactcaccattagacctggtgcagagactagcacagctctcccaactcagacaacatcctctctcttcaccctacttgtaactggaaccagcagagttgatctaagtccaactgcttcacctggtgtttctgcaaaaacagccccactttccacccatccagggacagaaaccagcacaatgattccaacttcaactctttcccttggtttactagagactacaggcttactggccacmagctcttcagcagagaccagcasgagtactctaactctgactgtttcccctgctgtctctgggctttccagtgcctctataacaactgataagmcccaaactgtgacctcctggaacacagaaacctcaccatctgtaacttcagttggacccccagaattttccaggaytgtcacaggcaccactatgaccttgataccatcagagatgccaacaccacctaaaaccagtcatggagaaggagtgagtccaaccactatcttgagaactacaatggttgaagccactaatttagctaccacaggttccagtcccactgtggccaagacaacaaccaccttcaatacactggctggaagcctctttactcctctgaccacacctgggatgtccaccttggcctctgagagtgtgacctcaagaacaagttataaccatcggtcctggatctccaccaccagcagttataaccgtcggtactggacccctgccaccagcactccagtgacttctacattctccccagggatttccacatcctccatccccagctccacagcagccacagtcccattcatggtgccattcaccctcaacttcaccatcaccaacctgcagtacgaggaggacatgcggcaccctggttccaggaagttcaacgccacagagagagaactgcagggtctgctcaaacccttgttcaggaatagcagtctggaatacctctattcaggctgcagactagcctcactcaggccagagaaggatagctcagccayggcagtggatgccatctgcacacatcgccctgaccctgaagacctcggactggacagagagcgactgtactgggagctgagcaatctgacaaatggcatccaggagctgggcccctacaccctggaccggaacagtctctatgtcaatggtttcacccatcgaagctctatgcccaccaccagcactcctgggacctccacagtggatgtgggaacctcagggactccatcctccagccccagccccacgactgctggccctctcctgatgccgttcaccctcaacttcaccatcaccaacctgcagtacgaggaggacatgcgtcgcactggctccaggaagttcaacaccatggagagtgtcctgcagggtctgctcaagcccttgttcaagaacaccagtgttggccctctgtactctggctgcagattgaccttgctcaggcccgagaaagatggggcagccactggagtggatgccatctgcacccaccgccttgaccccaaaagccctggactcaacagggagcagctgtactgggagytaagcaaactgaccaatgacattgaagagctgggcccctacaccctggacaggaacagtctctatgtcaatggtttcacccatcagagctctgtgtccaccaccagcactcctgggacctccacagtggatctcagaacctcagggactccatcctccctctccagccccacaattatggctgctggccctctcctggtaccattcaccctcaacttcaccatcaccaacctgcagtatggggaggacatgggtcaccctggctccaggaagttcaacaccacagagagggtcctgcagggtctgcttggtcccatattcaagaacaccagtgttggccctctgtactctggctgcagactgacctctctcaggtcygagaaggatggagcagccactggagtggatgccatctgcatccatcatcttgaccccaaaagccctggactcaacagagagcggctgtactgggagctgagccaactgaccaatggcatcaaagagctgggcccctacaccctggacaggaacagtctctatgtcaatggtttcacccatcggacctctgtgcccaccascagcactcctgggacctccacagtggaccttggaacctcagggactccattctccctcccaagccccgcaactgctggccctctcctggtgctgttcaccctcaacttcaccatcaccaacctgaagtatgaggaggacatgcatcgccctggctccaggaagttcaacaccactgagagggtcctgcagactctgcttggtcctatgttcaagaacaccagtgttggccttctgtactctggctgcagactgaccttgctcaggtccgagaaggatggagcagccactggagtggatgccatctgcacccaccgtcttgaccccaaaagccctggagtggacagggagcagctatactgggagctgagccagctgaccaatggcatcaaagagctgggcccctacaccctggacaggaacagtctctatgtcaatggtttcacccattggatccctgtgcccaccagcactcctgggacctccacagtggaccttgggtcagggactccatcctccctccccagccccctctcctggtgccgttcaccctcaacttcaccatcaccaacctgaagtacgaggaggacatgcattgccctggctccaggaagttcaacaccacagagagagtcctgcagagtctgcttggtcccatgttcaagaacaccagtgttggccctctgtactctggctgcagactgaccttgctcaggtccgagaaggatggagcagccactggagtggatgccatctgcacccaccgtcttgaccccaaaagccctggagtggacagggagcag

SEQ ID NO: 381 - DNA, 3572 bp, Homo sapiens
acagctgctggccctctcctggtgccattcaccctcaacttcaccatcaccaacctgcagtacgaggaggacatgcatcacccaggctccaggaagttcaacaccacggagcgggtcctgcagggtctgcttggtcccatgttcaagaacaccagtgtcggccttctgtactctggctgcagactgaccttgctcaggcctgagaagaatggggcagccactggaatggatgccatctgcagccaccgtcttgaccccaaaagccctggactcaacagagagcagctgtactgggagctgagccagctgacccatggcatcaaagagctgggcccctacaccctggacaggaacagtctctatgtcaatggttatagccgccagccctctcctggtgctattcacaattaacttcaccatcactaacctgcggtatgaggagaacatgcatcaccctggctctagaaagtttaacaccacggagagagtccttcagggtctgctcaggcctgtgttcaagaacaccagtgttggccctctgtactctggctgcagactgaccttgctcaggcccaagaaggatggggcagccaccaaagtggatgccatctgcacctaccgccctgatcccaaaagccctggactggacagagagcagctatactgggagctgagccagctracccacagcatcactgagctgggcccctacaccctggacagggacagtctctatgtcaatggtttcacacagcggagctctgtgcccaccactagcattcctgggacccccacagtggacctgggaacatctgggactccagtttctaaacctggtccctcggccactggccctgtcctgctgccattcaccctcaattttaccatcaytaacctgcagtatgaggaggacatgcrtcgccctggctccaggaagttcaacaccacggagagggtccttcagggtctggtgagacccctttcaagaacaccagtgtcagctctctgtactctggttgcagactgaccttgctcaggcctgaaaaggatgggacagccactggagtggatgccatctgcacccaccacccctgaccccaaaagccctaggctggacagagagcagctgtattgggagctgagccagctgacccacaatatcactgagctgggcccctatgccctggacaacgacagcctctttgtcaatggtttcactcatcggagctctgtgtccaccaccagcactcctgggacccccacagtgtatctgggagcatctaagactccagcctcgatatttggcccttcagctgccagccatctcctgatactattcaccctcaacttcaccatcactaacctgcggtatgaggagaacatgtggcctggctccaggaagttcaacactacagagagggtccttcagggcctgctaaggcccttgttcaagaacaccagtgttggccctctgtactctggctgcaggctgaccttgctcaggccagagaaagatggggaagccaccggagtggatgccatctgcacccaccgccctgaccccacaggccctgggctggacagagagcagctgtatttggagctgagccagctgacccacagcatcactgagctgggcccctacacactggacagggacagtctctatgtcaatggtttcacccatcggagctctgtacycaccaccagsaccggggtggtcagcgaggagccattcacactgaacttcaccatcaacaacctgcgctacatggcggacatgggccaacccggctccctcaagttcaacatcacagacaacgtcatgmagcacctgctcagtcctttgttccagaggagcagcctgggtgcacggtacacaggctgcagggtcatcgcactaaggtctgtgaagaacggtgctgagacacgggtggacctcctctgcacctacctgcagcccytcagcggcccaggtctgcctatcaagcaggtgttccatgagctgagccagcagacccatggcatcacccggctgggcccctactctctggacaaagacagcctctaccttaacggttacaatgaacctggtccagatgagcctcctacaactcccaagccagccaccacattcctgcctcctctgtcagaagccacaacagccatggggtaccacctgaagaccctcacactcaacttcaccatctccaatctccagtattcaccagatatgggcaagggctcagctacattcaactccaccgagggggtccttcagcacctgctcagacccttgttccagaagagcagcatgggccccttctacttgggttgccaactgatctccctcaggcctgagaaggatggggcagccactggtgtggacaccacctgcacctaccaccctgaccctgtgggccccgggctggacatacagcagctttactgggagctgagtcagctgacccatggtgtcacccaactgggcttctatgtcctggacagggatagcctcttcatcaatggctatgcaccccagaatttatcaatccggggcgagtaccagataaatttccacattgtcaactggaacctcagtaatccagaccccacatcctcagagtacatcaccctgctgarggacatccaggacaaggtcaccacactctacaaaggcmgtcaactacatgacacattccgcttctgcctggtcrccaacttgacgatggactccgtgttggtcactgtcaaggcattgttctcctccaatttggaccccagcctggtggagcaagtctttctagataagaccctgaatgcctcattccattggctgggctccacctaccagttggtggacatccatgtgacagaaatggagtcatcagtttatcaaccaacaagcagctccagcacccagcacttctacctgaatttcaccatcaccaacctaccatattcccaggacaaagcccagccaggcaccaccaattaccagaggaacaaaaggaatattgaggatgcgctcaaccaactcttccgaaacagcagcatcaagagttatttttctgactgtcaagtttcaacattcaggtctgtccccaacaggcaccacaccggggtggactccctgtgtaacttctcgccactggctcggagagtagacagagttgccatctatgaggaatttctgcggatgacccggaatggtacccagctgcagaacttcaccctggacaggagcagtgtccttgtggatgggtattctcccaacagaaatgagcccttaactgggaattctgaccttcccttctgggctgtcatcctcatcggcttggcaggactcctgggastcatcacatgcctgatctgcggtgtcctggtgaccacccrccggcggaagaaggaaggagaatacaacgtccagcaacagtgcccaggctactaccagtcacacctagacctggaggatctgcaatgactggaacttgccggtgcctggggtgcctttcccccagccagggtccaaagaagcttggctggggcagaaataaaccatattggtcgga

SEQ ID NO: 382 - DNA, 39790 bp, Homo sapiens
aagcgttgcacaattcccccaacctccatacatacggcagctcttctagacacaggttttcccaggtcaaatgcggggaccccagccatatctcccaccctgagaaattttggagtttcagggagctcagaagctctgcagaggccaccctctctgaggggattcttcttagacctccatccagaggcaaatgttgacctgtccatgctgaaaccctcaggccttcctgggtcatcttctcccacccgctccttgatgacagggagcaggagcactaaagccacaccagaaatggattcaggactgacaggagccaccttgtcacctaagacatctacaggtgcaatcgtggtgacagaacatactctgccctttacttccccagataagaccttggccagtcctacatcttcggttgtgggaagaaccacccagtctttgggggtgatgtcctctgctctccctgagtcaacctctagaggaatgacacactccgagcaaagaaccagcccatcgctgagtccccaggtcaatggaactccctctaggaactaccctgctacaagcatggtttcaggattgagttccccaaggaccaggaccagttccacagaaggaaattttaccaaagaagcatctacatacacactcactgtagagaccacaagtggcccagtcactgagaagtacacagtccccactgagacctcaacaactgaaggtgacagcacagagaccccctgggacacaagatatattcctgtaaaaatcacatctccaatgaaaacatttgcagattcaactgcatccaaggaaaatgccccagtgtctatgactccagctgagaccacagttactgactcacatactccaggaaggacaaacccatcatttgggacactttattcttccttccttgacctatcacctaaagggaccccaaattccagaggtgaaacaagcctggaactgattctatcaaccactggatatcccttctcctctcctgaacctggctctgcaggacacagcagaataagtaccagtgcgcctttgtcatcatctgcttcagttctcgataataaaatatcagagaccagcatattctcaggccagagtctcacctcccctctgtctcctggggtgcccgaggccagagccagcacaatgcccaactcagctatccctttttccatgacactaagcaatgcagaaacaagtgccgaaagggtcagaagcacaatttcctctctgggkactccatcaatatccacaaagcagacagcagagactatccttaccttccatgccttcgctgagaccatggatatacccagcacccacatagccaagactttggcttcagaatggttgggaagtccaggtacccttggtggcaccagcacttcagcgctgacaaccacatctccatctaccactttagtctcagaggagaccaacacccatcactccacgagtggaaaggaracagaaggaactttgaatacatctatgactccacttgagacctctgctcctggagaagagtccgaaatgactgccaccttggtccccactctaggttttacaactcttgacagcaagatcagaagtccatctcaggtctcttcatcccacccaacaagagagctcagaaccacaggcagcacctctgggaggcagagttccagcacagctgcccacgggagctctgacatcctgagggcaaccacttccagcacctcaaaagcatcatcatggaccagtgaaagcacagctcagcaatttagtgaaccccagcacacacagtgggtggagacaagtcctagcatgaaaacagagagacccccagcatcaaccagtgtggcagcccctatcaccacttctgttccctcagtggtctctggcttcaccaccctgaagaccagctccacaaaagggatttggcttgaagaaacatctgcagacacactcatcggagaatccacagctggcccaaccacccatcagtttgctgttcccactgggatttcaatgacaggaggcagcagcaccaggggaagccagggcacaacccacctactcaccagagccacagcatcatctgagacatccgcagatttgactctggccacgaacggtgtcccagtctccgtgtctccagcagtgagcaagacggctgctggctcaagtcctccaggagggacaaagccatcatatacaatggtttcttctgtcatccctgagacatcatctctacagtcctcagctttcagggaaggaaccagcctgggactgactccattaaacactagacatcccttctcttcccctgaaccagactctgcaggacacaccaagataagcaccagcattcctctgttgtcatctgcttcagttcttgaggataaagtgtcagcgaccagcacattctcacaccacaaagccacctcatctattaccacagggactcctgaaatctcaacaaagacaaagcccagctcagccgttctttcctccatgaccctaagcaatgcagcaacaagtcctgaaagagtcagaaatgcaacttcccctctgactcatccatctccatcaggggaagagacagcagggagtgtcctcactctcagcacctctgctgagactacagactcacctaacatccacccaactgggacactgacttcagaatcgtcagagagtcctagcactctcagcctcccaagtgtctctggagtcaaaaccacattttcttcatctactccttccactcatctatttactagtggagaagaaacagaggaaacttcgaatccatctgtgtctcaacctgagacttctgtttccagagtaaggaccaccttggccagcacctctgtccctaccccagtattccccaccatggacacctggcctacacgttcagctcagttctcttcatcccacctagtgagtgagctcagagctacgagcagtacctcagttacaaactcaactggttcagctcttcctaaaatatctcacctcactgggacggcaacaatgtcacagaccaatagagacacgtttaatgactctgctgcaccccaaagcacaacttggccagagactagtcccagattcaagacagggttaccttcagcaacaaccactgtttcaacctctgccacttctctctctgctactgtaatggtctctaaattcacttctccagcaactagttccatggaagcaacttctatcagggaaccatcaacaaccatcctcacaacagagaccacgaatggcccaggcwctatggctgtggcttctaccaacatcycaattggaaagggctacattactgaaggaagattggacacaagccatctgcccattggaaccacagcttcctctgagacatctatggattttaccatggccaaagaaagtgtctcaatgtcagtatctccatctcagtccatggatgctgctggctcaagcactccaggaaggacaagccaattcgttgacacattttctgatgatgtctatcatttaacatccagagaaattacaatacctagagatggaacaagctcagctctgactccacaaatgactgcaactcaccctccatctcctgatcctggctctgctagaagcacctggcttggcatcttgtcctcatctccttcttctcctactcccaaagtcacaatgagctccacattttcaactcagagagtcaccacaagcatgataatggacacagttgaaactagtcggtggaacatgcccaacttaccttccacgacttccttgacaccaagtaatattccaacaagtggtgccataggaaaaagcaccctggttcccttggacactccatctccagccacatcattggaggcatcagaagggggacttccaaccctcagcacctaccctgaatcaacaaacacacccagcatccacctcggagcacacgctagttcagaaagtccaagcaccatcaamcttaccatggcttcagtagtaaaacctggctcttacacacctctcaccttcccctcaatagagacccacattcatgtatcaacagccagaatggcttactcttctgggtcttcacctgagatgacagctcctggagagactaacactggtagtacctgggaccccaccacctacatcaccactacggatcctaaggatacaagttcagctcaggtctctacaccccactcagtgaggacactcagaaccacagaaaacyatccaaagacagagtccgccaccccagctgcttactctggaagtcctaaaatctcaagttcacccaatctcaccagtccggccacaaaagcatggaccatcacagacacaactgaacactccactcaattacattacacaaawttggcagaaaaatcatctggatttgagacacagtcagctccaggacctgtctctgtagtaatccctacctcccctaccattggaagcagcacattggaactaacttctgatgtcccaggggaacccctggtccttgctcccagtgagcagaccacaatcactctccccatggcaacatggctgagtaccagtttgacagaggaaatggcttcaacagaccttgatatttcaagtccaagttcacccatgagtacatttgctatttttccacctatgtccacaccttctcatgaactttcaaagtcagaggcagataccagtgccattagaaatacagattcaacaacgttggatcagcacctaggaatcaggagtttgggcagaactggggacttaacaactgttcctatcaccccactgacaaccacgtggaccagtgtgattgaacactcaacacaagcacaggacaccctttctgcaacgatgagtcctactcacgtgacacagtcactcaaagatcaaacatctataccagcctcagcatccccttcccatcttactgaagtctaccctgagctcgggacacaagggagaagctcctctgaggcaaccactttttggaaaccatctacagacacactgtccagagagattgagactggcccaacaaacattcaatccactccacccatggacaacacaacaacagggagcagtagtagtggagtcaccctgggcatagcccaccttcccataggaacatcctccccagctgagacatccacaaacatggcaytggaaagaagaagttctacagccactgtctctatggctgggacaatgggactccttgttactagtgctccaggaagaagcatcagccagtcattaggaagagtttcctctgtcctttctgagtcaactactgaaggagtcacagattctagtaagggaagcagcccaaggctgaacacacagggaaatacagctctctcctcctctcttgaacccagctatgctgaaggaagccagatgagcacaagcatccctctaacctcatctcctacaactcctgatgtggaattcatagggggcagcacattttggaccaaggaggtcaccacagttatgacctcagacatctccaagtcttcagcaaggacagagtccagctcagctacccttatgtccacagctttgggaagcactgaaaatacaggaaaagaaaaactcagaactgcctctatggatcttccatctccaactccatcaatggaggtgacaccatggatttctytcactctcagtaatgcccccaataccacagattcacttgacctcagccatggggtgcacaccagctctgcagggactttggccactgacaggtcattgaatactggtgtcactagagcctccagattggaaaacggctctgatacctcttctaagtccctgtctatgggaaacagcactcacacttccatgactkacacagagaagagtgaagtgtcttcttcaatccatccccgacctgagacctcagctcctggagcagagaccactttgacttccactcctggaaacagggccataagcttaacattgcctttttcatccattccagtggaagaagtcatttctacaggcataaccycaggaccagacatcaactcagcacccatgacacattctcccatcaccccaccaacaattgtatggaccagtacaggcacaattgaacagtccactcaaccactacatgcagtttcttcagaaaaagtttctgtgcagacacagtcaactccatatgtcaactctgtggcagtgtctgcttcccctacccatgagaattcagtctcttctggaagcagcacatcctctccatattcctcagcctcacttgaatccttggattccacaatcagtaggaggaatgcaatcacttcctggctatgggacctcactacayctctccccactacaacttggccaagtactagtttatctgaggcactgtcctcaggccattctggggtttcaaacccaagttcaactacgactgaatttccactcttttcagctgcatccacatctgctgctaagcaaagaaatccagaaacagagacccatggtccccagaatacagccgcgagtactttgaacactgatgcatcctcggtcacaggtctttctgagactcctgtgggggcaagtatcagctctgaagtccctcttccaatggccrtaacttctagatcagatgtttctggccttacatctgagagtactgctaacccgagtttaggcacagcctcttcagcagggaccaaattaactaggacaatatccctgcccacttcagagtctttggtttcctttagaatgaacaaggatccatggacagtgtcaatccctttggggtcccatccaactactaatacagaaacaagcatcccagtaaacagcgcaggtccacctggcttgtccacagtagcatcagatgtaattgacacaccttcagatggggctgagagtattcccactgtctccttttccccctcccctgatactgaagtgacaactatctcacatttcccagaaaagacarctcattcatttagaaccatttcatctctcactcatgagttgacttcaagaktgacacctattcctggggattggatgagttcagctatgtctacaaagcccacaggagccagtccctccattacactgggagagagaaggacaatcacctctgctgctccaaccacttcccccatagttctcactgctagtttcacrgagaccagcacagtttcactggataatgaaactacagtaaaaacctcagatatccttgasgcacggaaaacaaatgagctcccctcagatagcagttcttcttctgatctgatcaacacctccatagcttcttcaactatggatgtcactaaaacagcctccatcagtcccactagcatctcaggaatgacagcaagttcctccccatctctcttctcttcagatagaccccaggttcccacatctacaacagagacaaatacagccacctctccatctgtttccagtaacacctattctcttgatgggggctccaatgtgggtggcactccatccactttaccaccctttacaatcacccaccctgtcgagacaagctcggccctattagcctggtctagaccagtaagaactttcagcaccatggtcagcactgacactgcctccggagaaaatcctacctctagcaattctgtggtgacttctgttccagcaccaggtacatggrccagtgtaggcagtactactgacttacctgccatgggctttctcaagacaagtcctgcaggagaggcacactcacttctagcrtcaactattgaaccagccactgccttcactccycatctctcagcagcagtggtcactggatccagtgctacatcagaagccagtcttctcactacgagtgaaagcaaagccattcattcttcaccacagaccccaactacacccacctctggagcaaactgggaaacttcagctactcctgagagccttttggtagtcactgagacttcagacacaacacttacctcaaagattttggtcacagataccatcttgttttcaactgtgtccacgccaccttctaaatttccaagtacggggactctgtctggagcttccttccctactttactcccggacactccagccatccctctcactgccactgagccaacaagttcattagctacatcctttgattccaccccactggtgactatagcttcrgatagtcttggcacagtcccagagactaccctgaccatgtcagagacctcaaatggtgatgcactggttcttaagacagtaagtaacccagataggagcatccctggaatcactatccaaggagtaacagaaagtccactccatccttcttccacttccccctctaagattgttgctccacggaatacaacctatgaaggttcgatcacagtgrcactttctactttgcctgcgggaactactggttcccttgtattcagtcagagttctgaaaactcagagacaacggctttggtagactcatcagctgggcttgagagggcatctgtgatgccactaaccacaggaagccagggtatggcyagctctggaggaatcagaagtgggtccactcactcaactggaaccaaaacattttcttctctccctctgaccatgaacccaggtgaggttacagccatgtctgaaatcaccaygaacagactgacagctactcaatcaacagcacccaaagggatacctgtgaagcccaccagtgctgagtcaggcctcctaacacctgtctctgcctcctcaagcccatcaaaggcctttgcctcactgactacagctcccycaacttgggggatcccacagtctaccttgayatttgagttttctgaggtyccaagtttggatactaagtccgcttctttaccaactcctggacagtccctgaacaccattccagactcagatgcaagcacagcatcttcctcactgtccaagtctccagaaaaaaacccaagggcaaggatgatgacttccacaaaggccataagtgcaagctcatttcaatcaacaggttttactgaaacccctgagggatctgcctccccttctatggcagggcatgaacccagagtccccacttcaggaacaggggaccctagatatgcctcagagagcatgtcttatccagacccaagcaaggcatcatcagctatgacatcgacctctcttgcatcaaaactcacaactctcttcagcacaggtcaagcagcaaggtctggttctagttcctctcccataagcctatccactgagaaagaaacaagcttcctttcccccactgcatccacctccagaaagacttcactatttcttgggccttccatggcaaggcagcccaacatattggtgcatcttcagacttcagctctgacactttctccaacatccactctaaatatgtcccaggaggagcctcctgagttaacctcaagccagaccattgcagaagaagagggaacaacagctgaaacacagacgttaaccttcacaccatctgagaccccaacatccttgttacctgtctcttctcccacagaacccacagccagaagaaagagttctccagaaacatgggcaagctctatttcagttcctgccaagacctcsttggttgaaacaactgatggaacgctagtgaccaccataaagatgtcaagccaggcagcacaaggaaattccacgtggcctgccccagcagaggagacggggascagtccagcaggcacatccccaggaagcccagaaatgtctaccactctcaaaatcatgagctccaaggaacccrgcatcagcccagagatcaggtccactgtgagaaattctccttggaagactccagaaacaactgttcccatggagaccacagtggaaccagtcacccttcagtccacagccctaggaagtggcagcaccagcatctctcacctgcccacaggaaccacatcaccaaccaagtcaccaacagaaaatatgttggctacagaaagggtctccctctccccatccccacctgaggcttggaccaacctttattctggaactccaggagggaccaggcagtcactggccacaatgtcctctgtctccctagagtcaccaactgctagaagcatcacagggactggtcagcaaagcagtccagaactggtttyaaagacaactggaatggaattctctatgtggcatggctctactggagggaccacaggggacacacatgtctctctgagcacatcttccaatatccttgaagaccctgtaaccagcccaaactctgtgagctcattgacagataaatccaaacataaaaccgagacatgggtmagcaccacagccattccctccactgtcctgaataataagataatggcagctgaacaacagacaagtcratctgtggatgaggcttattcatcaactagttcttggtcagatcagacatctgggagtgacatcacccttggtgcatctcctgatgtcacaaacacattatacatcacctccacagcacaaaccacctcactagtrtctctgccctctggagaccaaggcattacaagcctcaccaatccctcaggaggaaaaacaagctctgcrtcatctgtcacatctccttcaatagggcttgagactctgakggccaatgtaagtgcagtgamaagtgacattgcccctactgctgggcatctatctcagacttcatctcctgcggaagtgagcatcctggacrtaaccacagctcctactccaggtatctccaccaccatcaccaccatgggaaccaactcaatctcaactaccacacccaacccagaagtgggtatgagtaccatggacagcaccccggccacagagaggcrcacaacttctacagaacacccttccacctggtcttccacagctgcatcagattcctggactgtcacagacatgacttcaaacttgaaagttgcaagatctcctggaacaatttccacaatgcatacaacttcattcttagcctcaagcactgaattagactccatgtctactccccatggccgtataactgtcattggaaccagcctggtcactccatcctctgatgcttcagctgtaaagacagagaccagtacaagtgaaagaacattgagtccttcagacacaactgcatctactcccatctcaactttttctcgtgtccagaggatgagcatctcagttcctgacattttaagtacaagttggactcccagtagtacagaagcagaagatgtgcctgtttcaatggtttctacagatcatgctagtacaaagactgacccaaataygcccctgtccacttttctgtttgattctctgtccactcttgactgggacactgggagatctctgtcatcagccacagccactacctcagctcctcagggggccacaactccccargaactcactttggaaaccatgatcagcccagctacctcacagttgcccttctctatagggcacattacaagtgcagtcayaccagctgcaatggcaaggagctctggagttactttttcaagaccagatcccacaagcaaaaaggcagagcagacttccactcagcttcccaccaccacttctgcacatccagrgcaggtgcccagatcagcagcaacaactctggatgtgatcccacacacagcaaaaactccagatgcaacttttcagagacaagggcagacagctcttacaacagaggcaagagctacatctgactcctggaatgagaaagaaaaatcaaccccaagtgcaccttggatcactgagatgatgaattctgtctcagaagataccatcaaggaggttaccagctcctccagtgtrttaaggaccctgaatacgctggacataaacttggaatctgggacgacttcatccccaagttggaaaagcagcccatatgagagaattgccccttctgagtcyaccacagacaaagaggcaattcacccttctacaaacacagtagagaccacwggctgggtcacaagttccgaacatgcttctcattccactatcccagcccactcagcgtcatccaaactcacatctccagtggttacaacctccaccagggaacaagcaatagtttctatgtcaacaaccacatggccagagtctacaagggctagaacagagcctaattccttcttgactattgaactgagggacgtcagcccttacatggacaccagctcaaccacacaaacaagtwttatctcttccccaggttccactgcgatcaccaaggggcctagaacagaaattacctcctctaagagaatatccagctcattccttgcccagtctatgaggtcgtcagacagcccctcagaagccatcwccaggctgtctaactttcctgccatgacagaatctggaggaatgatccttgctatgcaaacaagtccacctggcgctacatcactaagtgcacctactttggatacatcagccacagcctcctggacagggactccactggctacgactcagagatttacatactcagagaagaccactctctttagcaaaggtcctgaggatacatcacagccaagccctccctctgtggaagaaaccagctcttcctcttccctggtacctatcmatgctacaacctcgccttccaatattttgttgacatcacaagggcacagtccctcctctactccacctgtgacctcagttttcttgtctgagacctctggcctggggaagaccacagacatgtcgaggataagcttggaacctggcacaagtttacctcccaatttgagcagtacagcaggtgaggcgttatccacttatgaagcctccagagatacaaaggcaattcatcattctgcagacacagcagtgacgaatatggaggcaaccagttctgaatattctcctatcccaggccatacaaagccatccaaagccacatctccattggttacctcccacatcatgggggacatcacttcttccacatcagtatttggctcctccgagaccacagagattgagacagtgtcctctgtgaaccagggacttcaggagagaagcacatcccaggtggccagctctgctacagagacaagcactgtcattacccatgtgtctagtggtgatgctactactcatgtcaccaagacacaagccactttctctagcggaacatccatctcaagccctcatcagtttataacttctaccaacacatttacagatgtgagcaccaacccctccacctctctgataatgacagaatcttcaggagtgaccatcaccacccaaacaggtcctaytggagctgcaacacagggtccatatctcttggacacatcaaccatgccttacttgacagagactccattagctgtgactccagattttatgcaatcagagaagaccactctcataagcaaaggtcccaaggatgtgtcctggacaagccctccctctgtggcagaaaccagctatccctcttccctgacacctttcttggtcacaaccatacctcctgccacttccacgttacaagggcaacatacatcctctcctgtttctgcgacttcagttcttacctctggactggtgaagaccacagatatgttgaacacaagcatggaacctgtgaccaattcacctcaaaatttgaacaatccatcaaatgagatactggccactttggcagccaccacagatatagagactattcatcctyccataaacaaagcagtgaccaatatggggactgccagttcagcacatgtactgcattccactctcccagtcagctcagaaccatctacagccacatctccaatggttcctgcctccagcatgggggacgctcttgcttctatatcaatacctggttctgagaccacagacattgagggagagccaacatcctccctgactgctggacgaaaagagaacagcaccctccaggagatgaactcaactacagagtcaaacatcatcctctccaatgtgtctgtgggggctattactgaagccacaaaaatggaagtcccctcttttgatgcaacattcataccaactcctgctcagtcaacaaagttcccagatattttctcagtagccagcagtagactttcaaactctcctcccatgacaatatctacccacatgaccaccacccagacagggtcttctggagctacatcaaagattccacttgccttagacacatcaaccttggaaacctcagcagggactccatcagtggtgactgaggggtttgcccactcaaaaataaccactgcaatgaacaatgatgtcaaggacgtgtcacagacaaaccctccctttcaggatgaagccagctctccctcttctcaagcacctgtccttgtcacaaccttaccttcttctgttgctttcacaccgcaatggcacagtacctcctctcctgtttctatgtcctcagttcttacttcttcactggtaaagaccgcaggcaaggtggatacaagcttagaaacagtgaccagttcacctcaaagtatgagcaacactttggatgacatatcggtcacttcagcagccaccacagatatagagacaacgcatccttccataaacacagtagttaccaatgtggggaccaccggttcagcatttgaatcacattctactgtctcagcttacccagagccatctaaagtcacatctccaaatgttaccacctccaccatggaagacaccacaatttccagatcaatacctaaatcctctaagactacaagaactgagactgagacaacttcctccctgactcctaaactgagggagaccagcrtctcccaggagatcacctcgtccacagagacaagcactgttccttacaaagagctcactggtgccactaccgaggtatccaggacagatgtcacttcctctagcagtacatccttccctggccctgatcagtccacagtgtcactagacatctccacagaaaccaacaccaggctgtctacctccccaataatgacagaatctgcagaaataaccatcaccacccaaacaggtcctcatggggctacatcacaggatacttttaccatggacccatcaaatacaaccccccaggcagggatccactcagctatgactcatggattttcacaattggatgtgaccactcttatgagcagaattccacaggatgtatcatggacaagtcctccctctgtggataaaaccagctccccctcttcctttctgycctcacctgcaatgacmacaccttccctgatttcttctaccttaccagaggataagctctcctctcctatgacttcacttctcacctctggcctagtgaagattacagacatattacgtacacgcttggaacctgtgaccagctcacttccaaatttcagcagcacctcagataagatactggccacttctaaagacagtaaagacacaaaggaaatttttccttctataaacacagaagagaccaatgtgaaagccaacaactctggacatgaatcccattcccctgcactggctgactcagagacacccaaagccacaactcaaatggttatcaccaccactgtgggagatccagctccttccacatcaatgccagtgcatggttcctctgagaytacaaacattaagagagagccaacatatttcttgactcctagactgagagagaccagtacctctcaggagtccagctttcccacggacacaagttttctactttccaaagtccccactggtactattactgaggtctccagtacaggggtcawctcttctagcaaaatttccaccccagaccatgataagtccacagtgccacctgacaccttcacaggagagatccccagggtcttcacctcctctattaagacaaaatctgcagaaatgacgatcaccacccaagcaagtcctcctgagtctgcatcgcacagtacccttcccttggacacatcaaccacactttcccagggagggactcattcaactgtgactcagggattcccatactcagaggtgaccactctcatgggcatgggtcctgggaatgtgtcatggatgacaactccccctgtggaagaaaccagctctgtgtcttccctgatgtcttcacctgccatgacatccccttctcctgtttcctccacatcaccacagagcatcccctcctctcctcttcctgtgactgcacttcctacttctgttctggtgacaaccacagatgtgttgggcacaacaagcccagagtctgtaaccagttcacctccaaatttgagcagcatcactcatgagagaccggccacttacaaagacactgcacacacagaagccgccatgcmtcattccacaaacaccgcagtgaccaatgtagggacttccgggtctggacataaatcacaatcctctgtcctagctgactcagagacatcgaaagccacacctctgatgagtaccacctccaccctgggggacacaagtgtttccacatcaactcctaatatctctcagactaaccaaattcaaacagagccaacagcatccctgagccctagactgagggagagcagcacgtctgagaagaccagctcaacaacagagacaaatactgccttttcttatgtgcccacaggtgctattactcaggcctccagaacagaaatctcctctagcagaacatccatctcagaccttgatcggyccacaatagcacccgacatctccacaggaatgatcaccaggctcttcacctcccccatcatgacaaaatctgcagaaatgaccgtcaccactcaaacaactactcctggggctacatcacagggtatccttccctgggacacatcaaccacacttttccagggagggactcattcaaccgtgtctcagggattcccacactcagagataaccactcttcggagcagaacccctggagatgtgtcatggatgacaactccccctgtggaagaaaccagctctgggttttccctgatgtcaccttccatgacatccccttctcctgtttcctccacatcaccagagagcatcccctcctctcctctccctgtgactgcacttcttacttctgttctggtgacaaccacaaatgtattgggcacaacaagcccagagmccgtaacgagttcacctccaaatttaagcagccccacacaggaragactgaccacttacaaagacactgcgcacacagaagccatgcatgcttccatgcatacaaacactgcagtggccaacgtggggacctccattkctggacatgaatcacaatcttctgtcccagctgattcasacacatccaaagccacatctccaatgggtaycaccttcrccatgggggatacaagtgtttctacatcaactcctgccttctttgagactagaattcagactgaatcaacatcctctttgattcctggattaagggacaccaggacstctgaggagatcaacactgtgacagagaccagcactgtcctttcagaagtgcccactactactactactgaggtctccaggacagaagttatcacttccagcagaacaaccatctcagggyctgatcattccaaaatgtcaccctacatctccacagaaaccatcaccaggctctccacttttcctkttgtaacaggatccacagaaatggccatcaccaaccaaacaggtcctatagggactatctcacaggctrcccttaccctggacacatcaagcacagcttyctgggaagggactcactcacctgtgactcagagatttccacactcagaggagaccactactatgagcagaagtactaagggcgtgtcatggcaaagccctccctctgtggaagaaaccagttctccttcttccccagtgcctttacctgcaataacctcacattcatctctttattccgcagtatcaggaagtagccccacttctgctctccctgtgacttcccttctcacctctggcaggaggaagaccatagacatgttggacacacactcagaacttgtgaccagctccttaccaagtgcaagtagcttctcaggtgagatactcacttctgaagcctccacaaatacagagacaattcacttttcagagaacacagcagaaaccaatatggggaccaccaattctatgcataaactacattcctctgtctcaatccactcccagccatccggacacacacctccaaaggttactggatctatgatggaggacgctattgtttccacatcaacacctggttctcctgagactaaaaatgttgacagagactcaacatcccctctgactcctgaactgaaagaggacagcaccgccctggtgatgaactcaactacagagtcaaacactgttttctccagtgtgtccctggatgctgctactgaggtctccagggcagaagtcacctactatgatcctacattcatgccagcttctgctcagtcaacaaagtccccagacatttcacctgaagccagcagcagtcattctaactctcctcccttgacaatatctacacamaagaccatcgccacacaaacaggtccttctggggtgacatctcttggccaactgaccctggacacatcaaccatagccacctcagcaggaactccatcagccagaactcaggattttgtagattcagaaacaaccagtgtcatgaacaatgatctcaatgatgtgttgaagacaagccctttctctgcagaagaagccaactctctctcttctcaggcacctctccttgtgacaacctcaccttctcctgtaacttccacattgcaagagcacagtacctcctctcttgtttctgtgacctcagtacccacccctacactggcgaagatcacagacatggacacaaacttagaacctgtgactcgttcacctcaaaatttaaggaacaccttggccacttcagaagccaccacagatacacacacaatgcatccttctataaacacagcagtggccaatrtggggaccaccagttcaccaaatgaattctattttactgtctcacctgactcagacccatataaagccacatccgcagtagttatcacttccacctcgggggactcaatagtttccacatcaatgcctagatcctctgcgatgaaaaagattgagyctgagacaaytttctccctgatatttagactgagggagactagcacctcccagaaaattggctcatcctcagacacaagcacggtctttgacaaagcattcactgctgctactactgaggtctccagaacagaaytcacctcctctagcagaacatccatccaaggcactgaaaagcccacaatgtcaccggacacctccacaagatctgtcaccatgctttctacttttgctggcctgacaaaatccgaagaaaggaycattgccacccaaacaggtcctcatagggcgacatcacagggtacccttacctgggacacatcaatcacaacctcacaggcagggacccactcagctatgactcatggattttcacaattagatttgtccactcttacgagtagagttcctgagtacatatcagggacaagcccaccctctgtggaaaaaaccagctcttcctcttcccttctgtctttaccagcaataacctcaccgtcccctgtacctactacattaccagaaagtaggccgtcttctcctgttcatctgacttcactccccacctctggcctagtgaagaccacagatatgctggcatctgtggccagtttacctccaaacttgggcagcacctcacataagataccgactacttcagaagacattaaagatacagagaaaatgtatccttccacaaacatagcagtaaccaatgtggggaccaccacttctgaaaaggaatcttattcgtctgtcccagcctactcagaaccacccaaagtcacctctccaatggttacctctttcaacataagggacaccattgtttccacatccatgcctggctcctctgagattacaaggattgagatggagtcaacattctccctggctcatgggctgaagggaaccagcacctcccaggaccccatcgtatccacagagaaaagtgctgtccttcacaagttgaccactggtgctactgagacctctaggacagaagttgcctcttctagaagaacatccattccaggccctgatcattccacagagtcaccagacatctccactgaagtgatccccagcctgcctatctcccttggcattacagaatcttcaaatatgaccatcatcactcgaacaggtcctcctcttggctctacatcacagggcacatttaccttggacacaccaactacatcctccagggcaggaacacactcgatggcgactcaggaatttccacactcagaaatgaccactstcatgaacaaggacyctgagattctatcatggacaatccctycttctatagagaaaaccagcttctcctcttccctgatgccttcaccagccatgacttcacctcctgtttcctcaacattaycaaagaccattcacaccactccttctcctatgacctcactgctcacccctagcctagtgatgaccacagacacattgggcacaagcccaraacctacaaccagttcacctmcaaatttgagcagtacctcacatgagatactgacaacagatgaagacaccacagctatagaagccatgcatccttccacaascacagcagcgactaatgtggaaaccaccagttmtggacatgggtcacaatcctctgtcctagctgactcagaaaaaaccaaggccacagctccaatggataccacctccaccatggggcatacaactgtttccacatcaatgtctgtttcctctgagactacaaaaattaagagagagtcaacatattccttgactcctggactgagagagaccagcatttcccaaaatgccagcttttccactgacacaagtattgttctttcagaagtccccactggtactactgctgaggtctccaggacagaagtcacctcctctggtagaacatccatccctggcccttctcagtccacagttttgccagaaatatccacaagaacaatgacaaggctctttgcctygcccaccatgacagaatcagcagaaatgaccatccccactcaaacaggtccttctgggtctacctcacaggatacccttaccttggacacatccaccacaaagtcccaggcaaagactcattcaactttgrctcagagatttccacactcagagatgaccactctcatgagcagaggtcctggagatatgtcatggcaaagctctccctctctggaaaatcccagctctctcccttccctgctgtctttacctgccacaacctcacctcctcccatttcctccacattaccagtgactatctcctcctctcctcttcctgtgacttcacttctcacctctagcccggtaacgaccacagacatgttacacacaagcccagaacttgtaaccagttcacctccaaagctgagccacacttcagatgagagactgaccactggcaaggacaccacaaatacagaagctgtgcatccttccacaaacacagcagcgtccaatgtggagattcccagctctggacatgaatccccttcctctgccttagctgactcagagacatccaaagccacatcaccaatgtttattacctccacccaggaggatacaactgttgccatatcaacccctcacttcttggagactagcagaattcagaaagagtcaatttcctccctgagccctaaattgagggagacaggcagttctgtggagacaagctcagccatagagacaagtgctgtcctttctgaagtgtccrttggtgctactastgagatctccaggacagaagtcacctcctctagcagaacatccatctctggttctgctgagtccacaatgttgccagaaatatccaccacaagaaaaatcattaagttycctacttcccccatcctggcagaatcatcagaaatgaccatcaagacccaaacaagtcctcctgggtctacatcagagagtacctttacattagacacatcaaccactccctccttggtaataacccattcgactatgactcagagattgccacactcagagataaccactctkgtgagtagaggtgctggggatgtgccacggcccagctctctccctgtggaagaaacaagccctccatcttcccagctgtctttatctgccatgatctcaccttctcctgtttcttccacattaccagcaagtagccactcctcttctgcttctgtgacttcacttctcacaccaggccaagtgaagactactgaggtgttggacgcaagtgcagaacctgaaaccagttcacctccaagtttgagcagcacctcagttgaaatactggccacctctgaagtcaccacagatacggagaaaattcatcctttctcaaacacggcagtaaccaaagttggaacttccagttctggacatgaatccccttcctctgtcctacctgactcagagacaaccaaagccacatcggcaatgggtaccatctccattatgggggatacaagtgtttctacattaactcctgccttatctaacactaggaaaattcagtcagagccagcttcctcactgaccaccagattgagggagaccagcacctctgaagagaccagcttagccacagaagcaaacactgttctttctaaagtgtccactggtgctactactgaggtctccaggacagaagccatctcctttagcagaacatccatgtcaggccctgagcagtccacaatgtcacaagacatctccataggaaccatccccaggatttctgcctcctctgtcctgacagaatctgcaaaaatgaccatcacaacccaaacaggtccttcggagtctacactagaaagtacccttaatttgaacacagcaaccacaccctcttgggtggaaacccactctatagtaattcagggatttccacacccagagatgaccacttccatgggcagaggtcctggaggtgtgtcatggcctagccctccctttgtgaaagaaaccagccctccatcctccccgctgtctttacctgccgtgacctcacctcatcctgtttccaccacattcctagcacatatccccccctctccccttcctgtgacttcacttctcacctctggcccggcgacaaccacagatatcttgggtacaagcacagaacctggaaccagttcatcttcaagtttgagcaccacctcccatgagagactgaccacttacaaagacactgcacatacagaagccgtgcatccttccacaaacacaggagggaccaatgtggcaaccaccagctctggatataaatcacagtcctctgtcctagctgactcatctccaatgtgtaccacctccaccatgggggatacaartgttctcacatcaactcctgccttccttgagactaggaggattcagacagagctagcttcctccctgacccctggattgagggagtccagyggctctgaagggaccagctcaggcaccaagatgagcactgtcctctctaaagtgcccactggtgctactactgagatctccaaggaagacgtcacctccatcccaggtcccgctcaatccacaatatcaccagacatctccacaagaaccgtcagctggttctctacatcccctgtcatgacagaatcagcagaaataaccatgaacacccatacaagtcctttaggggccacaacacaaggcaccagtactttggmcacgtcaagcacaacctctttgacaatgacacactcaactatatctcaaggattttcacactcacagatgagcactcttatgaggaggggtcctgaggatgtatcatggatgagccctccccttctggaaaaaactagaccttccttttctctgatgtcttcaccagccacaacttcaccttctcctgtttcctccacattaccagagagcatctcttcctctcctcttcctgtgacttcactcctcacgtctggcttggcaaaaactacagatatgttgcacaaaagctcagaacctgtaaccaactcacctgcaaatttgagcagcacctcagttgaaatactggccacctctgaagtcaccacagatacagagaaaactcatccttcttcaaacagaacagtgaccgatgtggggacctccagttctggacatgaatccacttcctttgtcctagctgactcacagacatccaaagtcacatctccaatggttattacctccaccatggaggatacgagtgtctccacatcaactcctggcttttttgagactagcagaattcagacagaaccaacatcctccctgacccttggactgagaaagaccagcagctctgaggggaccagcttagccacagagatgagcactgtcctttctggagtgcccactggtgccactgctgaagtctccaggacagaagtcacctcctctagcagaacatccatctcaggctttgctcagctcacagtgtcaccagagacttccacagaaaccatcaccagactccctacctccagcataatgacagaatcagcagaaatgatgatcaagacacaaacagatcctcctgggtctacaccagagagtactcatactgtggacatatcaacaacacccaactgggtagaaacccactcgactgtgactcagagattttcacactcagagatgaccactcttgtgagcagaagccctggtgatatgttatggcctagtcaatcctctgtggaagaaaccagctctgcctcttccctgctgtctctgcctgccacgacctcaccttctcctgtttcctctacattagtagaggatttcccttccgcttctcttcctgtgacttctcttctcamccctggcctggtgataaccacagacaggatgggcataagcagagaacctggaaccagttccacttcaaatttgagcagcacctcccatgagagactgaccactttggaagacactgtagatacagaagmcatgcagccttccacacacacagcagtgaccaacgtgaggacctccatttctggacatgaatcacaatcttctgtcctatctgactcagagacacccaaagccacatctccaatgggtaccacctacaccatgggggaaacgagtgtttccatatccacttctgacttctttgagaccagcagaattcagatagaaccaacatcctccctgacttctggattgagggagaccagcagctctgagaggatcagctcagccacagagggaagcactgtcctttctgaagtgcccagtggtgctaccactgaggtctccaggacagaagtgatatcctctaggggaacatccatgtcagggcctgatcagttcaccatatcaccagacatctctactgaagcgatcaccaggctttctacttcccccattatgacagaatcagcagaaagtgccatcactattgagacaggttctcctggggctacatcagagggtaccctcaccttggacacctcaacaacaaccttttggtcagggacccactcaactgcatctccaggattttcacactcagagatgaccactcttatgagtagaactcctggagatgtgccatggccgagccttccctctgtggaagaagccagctctgtctcttcctcactgtcttcacctgccatgacctcaacttcttttttctccacattaccagagagcatctcctcctctcctcatcctgtgactgcacttctcacccttggcccagtgaagaccacagacatgttgcgcacaagctcagaacctgaaaccagttcacctccaaatttgagcagcacctcagctgaaatattagccacstctgaagtcaccaaagatagagagaaaattcatccctcctcaaacacacctgtagtcaatgtagggactgtgatttataaacatctatccccttcctctgttttggctgacttagtgacaacaaaacccacatctccaatggctaccacctccactctggggaatacaagtgtttccacatcaactcctgccttcccagaaactatgatgacacagccaacttcctccctgacttctggattaagggagatcagtacctctcaagagaccagctcagcaacagagagaagtgcttctctttctggaatgcccactggtgctactactaaggtctccagaacagaagccctctccttaggcagaacatccaccccaggtcctgctcaatccacaatatcaccagaaatctccacrgaaaccatcactagaatttctactcccctcaccacgacaggatcagcagaaatgaccatcacccccaaaacaggtcattctggggcatcctcacaaggtacctttaccttggacacatcaagcagagcctcctggccaggaactcactcagctgcaactcacagatctccacactcagggatgaccactcctatgagcagaggtcctgaggatgtgtcatggccaagccgcccatcagtggaaaaaactagccctccatcttccctggtgtctttatctgcagtaacctcaccttcgccactttattccacaccatctgagagtagccactcrtctcctctccgggtgacttctcttttcacccctgtcaygatgaagaccacagacatgttggacacaagcttggaacctgtgaccacttcacctcccagtatgaatatcacctcagatgagagtctggccacttctaaagccaccatggagacagargcaattcagctttcagaaaacacagctgtgactcagatgggcaccatcagygctagacaagaattctattcctcttatccaggyctcccagagccatccaaagtgacatctccartggtcacctcttccaccataaaagacattgtttctacaaccatacctgcttcctctgagataacaagaattgagatggagtcaacatccaccctgacccccacaccaagggagaccagcacctcycaggagatccactcagccacaaagccaagcactgttccttacaaggcactcactagtgccacgattgaggactccatgacacaagtcatgtcctctagcagaggacctagccctgatcagtccacaatgtcacaagacatatccactgaagtgatcaccaggctctctacctcccccatcaagrcagaatctacagaaatgaccattaccacccaaacaggttctcctggggctacatcaaggggtacccttaccttggacacttcaacaacttttatgtcagggacscaytcaactgcatctcaaggattttcacactcacagatgaccrctcttatgagtagaactcctggagakgtgccatggctaagccatccctctgtggaagaagccagctctgcctctttctcactgtcttcacctgtcatgacctcatcttctcccgtttcttccacattaccagacagcatccactcttcttcgcttcctgtgacatcacttctcacctcagggctggtgaagaccacagagctgttgggcacaagctcagaacctgaaaccagttcacccccaaatttgagcagcacctcagctgaaatactggccaycactgaagtcactacagatacagagaaactggagatgaccaatgtggtaacctcaggttatacacatgaatctccttcctctgtcctagctgactcagtgacaacaaaggccacatcttcaatgggtatcacctaccccacaggagatacaaatgttctcacatcaacccctgccttctctgacaccagtaggattcaaacaaagtcaaagctctcactgactcctgggttgatggagaccagcatctctgaagagaccagctctgccacagaaaaaagcactgtcctttctagtgtgcccactggtgctactactgaggtctccaggacagaagccatctcttctagcagaacatccatcccaggccctgctcaatccacaatgtcatcagrcacctccatggaaaccatcactagaatttctacccccctcacaaggaaagaatcaacagacatggccatcacccccaaaacaggtccttctggggctacctcgcaggrtacctttaccttggactcatcaagcacagcctcctggccaggaactcactcagctacaactcagagatttccacrgtcagtggtgacaactcctatgagcagaggtcctgaggatgtgtcatggcyaagcccgctgtctgtggaaaamaacagccctccatcttccctggtatcttcatcttcagtaacctcaccttcgccactttattccacaccatctgggagtagccactcctctcctgtccctgtcacttctcttttcacctctatcatgatgaaggccacagacatgttggatgcaagtttggaacctgagaccacttcagctcccaatatgaatatcacctcagatgagagtctggccrcttctaaagccaccacggagacagaggcaattcasgtttttgaaaatacagcarcgtcccatgtggaaaccaccagtgctacagaggaactctattcctcttccccaggcttctcagagccaacaaaagtgatatctccagtggtcacctcttcctctataagagacaacatggtttccacaacaatgcctggctcctctggcattacaaggattgagatagagtcaatgtcatctctgacccctggactgagggagaccagaacctcccaggacatcacctcatccacagagacaagcactgtcctttacaagatgycctctggtgccactcctgaggtctccaggacagaagttatgccctctagcagaacatccattcctggccctgctcagtccacaatgtcactagacatctccgatgaagttgtcaccaggctgtctacctctcccatcatgacagaatctgcagaaataaccatcaccacccaaacaggttattctctggctacatcccaggttacccttcccttgggcacctcaatgacctttttgtcagggacccactcaactatgtctcaaggactttcayactcagagatraccaatcttatgagcagggrtcctgaaagtctgtcatggacgagccctcgctttgtggaaacaactagatcttcctcttctctgacatcattacctctcacgacctcactttctcctgtgtcctccacattactagacagtagcccctcctctcctcttcctgtgacttcacttatcctcccaggcctggtgaagactacagaagtgttggatacaagctcagagcctaaaaccagttcatctccaaatttgagcagcacctcagttgaaataccggccacctctgaaatcatgacagatacagagaaaattcatccttcctcaaacacagcggtggccaaagtgaggacctccagttctgttcatgaatctcattcctctgtcctagctgactcagaaacaaccataaccataccttcaatgggtatcacctccgctgtggasgataccactgttttcacatcaaatcctgccttctctgagactaggaggattccgacagagccaacattctcattgactcctggattcagggagactagcacctctgaagagaccacctcaatcacagaaacaagtgcagtcctttwtggagtgcccactagtgctactactgaartctccatgacagaaatmatgtcctctaatagaayacacatccctgactctgatcagtccacgatgtctccagacatcatcactgaagtgatcaccaggctctcttcctcatccatgatgtcagaatcaacacaaatgaccatcaccacccaaaaaagttctcctggggctacagcacagagtactcttaccttggccacaacaacagcccccttggcaaggacccactcaactgttcctcctagatttttacactcagagatgacaactcttatgagtaggagtcctgaaaatccatcatggaagagctctcyctttgtggaaaaaactagctcttcatcttctctgttgtccttacctgtcacgacctcaccttctgtttcttccacattaccgcagagtatcccttcctcctctttttctgtgacttcactcctcaccccaggcatggtgaagactacagacacaagcacagaacctggaaccagtttatctccaaatctgagtggcacctcagttgaaatactggctgcctctgaagtcaccacagatacagagaaaattcatccttcttcaagcatggcagtgaccaatgtgggaaccaccagttctggacatgaactrtattcctctgtttcaatccactcggagccatccaaggctacatacccagtgggtactccctcttccatggctgaaacctctatttccacatcaatgcctgctaattttsagaccayaggatttgaggytgagccattttctcatttgacttctggayttaggaagacmaacatgtccctggacaccagctcagtcacaccaacaaatacaccttcttctcctgggtccactcaccttttacagagttccaagactgatttcacctcttctgcaaaaacatcatccccagactggcctccagcctcacagtatactgaaattccagtggacataatcaccccstttaatgcttctccatctattacggagtccactgggataacctccttcccagaatccaggtttactatgtctgtaacagaaagtactcatcatctgagtacagatttgctgccttcagctgagactatttccactggcacagtgatgccttctctatcagaggccatgacttcatttgccaccactggagttccacgagccatctcaggttcaggtartccattctctaggacagagtcaggccctggggatgctactctgtccaccattgcagagagcctgccttcatccactcctgtgccattctcctcttcaaccttcactaccactgattcttcaaccatcccagccctccatgagataacttcctcttcagctaccccatatagagtggacaccagtcttgggacagagagcagcactactgaaggacgcttggttatggtcagtactttggacacttcaagccaaccaggcaggacatcttcatcacccattttggataccagaatgacagagagygttgagctgggaacagtgacaagtgcttatcaagttccttcactctcaacacggttgacaagaactgatggcattatggaacacatcacaaaaatacccaatgaagcagcacacagaggtaccataagaccagtcaaaggccctcagacatccacttcgcctgccagtcctaaaggactacacacaggagggacaaaaaraatggagaccaccaccacagctctgaagaccaccaccacagctctgaagaccacttccagagccaccttgaccaccagtgtctatactcccactttgggaacactgamtcccctcaatgcatcaatgcaaatggccagcacaatccccacagaaatgatgatcacaaccccatatgttttccctgatgttccagaaacgacatcctcattggctaccagcctgggagcagaaaccagcacagctcttcccaggacaaccccatctgttttcaatagagaatcagagaccacagcctcactggtctctcrttctggggcagagagawgtccggttattcaaactctagatgtttcttctagtgagccagatacaacagcttcatgggttatccatcctgcagagaccatcccaactgtttccaagacaacccccaattttttccacagtgaattagacactgtatcttccacagccaccagtcatggggcagaygtcagctcagccattccaacaaatatctcacctagtgaactagatgcactgaccccactggtcactatttcggggacagatactagtacaacattcccaacactgactaagtccccacatgaaacagagacaagaaccacatggctcactcatcctgcagagaccagctcaactattcccagaacaatccccaatttttctcatmatgaatcagatgccacaccttcaatagccaccagtcctggggcagaaaccagttcagctattccaattatgactgtctcacctggtgcagaagatctggtgacctcacaggtcactagttctggsacagacagaaatatgactattccaactttgactctttctcctggtgaaccaaagacsatagcctcattagtcayccatcctgaagcacagacaagttcggccattccaacttcaactatctcgcctgctgtatcacggttggtgacctcaatggtcaccagtttggcggcaaagacaagtacaactaatcgagctctgacaaactcccctggtgaaccagctacaacagtttcattggtcacgcatyctgcacagaccagcccaacagttccctggacaacttccatttttttccatagtaaatcagacaccacaccttcaatgaccaccagtcatggggcagaatccagttcagctgttccaactccaactgtttcaactgaggtaccaggagtagtgacccctttggtcaccagttctagggcagtgatcagtacaactattccaattctgactctttctcctggtgaaccagagaccacaccttcaatggccaccagkcatggggaagaagccagttctgctattccaactccaactgtttcacctggggtaccaggagtggtgacctctctggtcactagttctagggcagtgactagtacaactattccaattctgactttttctcttggtgaaccagagaccacaccttcaatggscaccagtcatgggacagaagctggctcagctgttccaactgttttacctgaggtaccaggaatggtgacctctctggttgctagttctagggcagtaaccagtacaactcttccaactctgactctttctcctggtgaaccagagaccacaccttcaatggccaccagtcatggggcagaagccagctcaactgttccaactgtttcacctgaggtaccaggagtggtgacctctctggtcactagttctagtggagtaaacagtacaagtattccaactctgattctttctcctggtgaactagaaaccacaccttcaatggccaccagtcatggggcagaagccagctcagctgttccaactccaactgtttcacctggggtatcaggartggtgacccctctggtcactagttccagggcagtgaccagtacaactattccaattctaactctttcttctagtgagccagagaccacaccttcaatggccaccagtcatggggtagaagccagctcagctgttctaactgtttcacctgaggtaccaggaatggtgacctytctggtcactagttctagagcagtaaccagtacaactattccaactctgactatttcttctgatgaaccagagaccrcaacttcattggtcacccattctgaggcaaagatgatttcagccattccaactttagstgtctcccctactgtacaagggctggtgacttcactggtcactagttctgggtcagagaccagtgcgttttcaaatctaactgttgcctcaagtcaaccagagaccatagactcatgggtcgctcatcctgggacagaagcaagttctgttgttccaactttgactgtctccactggtgagccgtttacaaatatctcattggtcacccatcctgcagagagtagctcaactcttcccaggacaacctcaaggttttcccacagtgaattagacactatgccttctacagtcaccagtcctgaggcagaatccagctcagccatttcaacaactatttcacctggtataccaggtgtgctgacatcactggtcactagctctgggagagacatcagtgcaacttttccaacagtgcctgagtccccacatgaatcagaggcaacagcctcatgggttactcatcctgcagtcaccagcacaacagttcccaggacaacccctaattattctcatagtgaaccagacaccacaccatcaatagccaccagtcctggggcagaagccacttcagattttccaacaataactgtctcacctgatgtaccagatatggtaacctcacaggtcactagttctgggacagacaccagtataactattccaactctgactctttcttctggtgagccagagaccacaacctcatttatcacctattctgagacacayacaagttcagccattccaactctccctgtctcccctgrtgcatcaaagatgctgacctcactggtcatcagttctgggacagacagcactacaactttcccaacactgacggagaccccatatgaaccagagacaacagccatacagctcattcatcctgcagagaccaacacaatggttcccaggacaactcccaagttttcccatagtaagtcagacaccacactcccagtagccatcaccagtcctgggccagaagccagttcagctgtttcaacgacaactatctcacctgatatgtcagatctggtgacctcactggtccctagttctgggacrgacaccagtacaaccttcccaacattgagtgagaccccatatgaaccagagactacagccacgtggctcactcatcctgcagaaaccagmacaacggtttctgggacaattcccaacttttcccataggggatcagacactgcaccctcaatggtcaccagtcctggagtagacacgaggtcaggtgttccaactacaaccatcccacccagtataccaggggtagtgacctcacaggtcactagttctgcaacagacactagtacagctattccaactttgactccttctcctggtgaaccagagaccacagcctcatcagctacccatcctgggacacagactggcttcactgttccaattcggactgttccctctagtgagccagatacaatggcttcctgggtcactcatcctccacagaccagcacacctgtttccagaacaacctccagtttttcccatagtagtccagatgccacacctgtaatggccaccagtcctaggacagaagccagttcagctgtactgacaacaatctcacctggtgcaccagagatggtgacttcacagatcactagttctggggcagcaaccagtacaactgttccaactttgactcattctcctggtatgccagagaccacagccttattgagcacccatcccagaacagagacaagtaaaacatttcctgcttcaactgtgtttcctcaagtatcagagaccacagcctcactcaccattagacctggtgcagagactagcacagctctcccaactcagacaacatcctctctcttcaccctacttgtaactggaaccagcagagttgatctaagtccaactgcttcacctggtgtttctgcaaaaacagccccactttccacccatccagggacagaaaccagcacaatgattccaacttcaactctttcccttggtttactagagactacaggcttactggccacmagctcttcagcagagaccagcasgagtactctaactctgactgtttcccctgctgtctctgggctttccagtgcctctataacaactgataagmcccaaactgtgacctcctggaacacagaaacctcaccatctgtaacttcagttggacccccagaattttccaggaytgtcacaggcaccactatgaccttgataccatcagagatgccaacaccacctaaaaccagtcatggagaaggagtgagtccaaccactatcttgagaactacaatggttgaagccactaatttagctaccacaggttccagtcccactgtggccaagacaacaaccaccttcaatacactggctggaagcctctttactcctctgaccacacctgggatgtccaccttggcctctgagagtgtgacctcaagaacaagttataaccatcggtcctggatctccaccaccagcagttataaccgtcggtactggacccctgccaccagcactccagtgacttctacattctccccagggatttccacatcctccatccccagctccacagcagccacagtcccattcatggtgccattcaccctcaacttcaccatcaccaacctgcagtacgaggaggacatgcggcaccctggttccaggaagttcaacgccacagagagagaactgcagggtctgctcaaacccttgttcaggaatagcagtctggaatacctctattcaggctgcagactagcctcactcaggccagagaaggatagctcagccayggcagtggatgccatctgcacacatcgccctgaccctgaagacctcggactggacagagagcgactgtactgggagctgagcaatctgacaaatggcatccaggagctgggcccctacaccctggaccggaacagtctctatgtcaatggtttcacccatcgaagctctatgcccaccaccagcactcctgggacctccacagtggatgtgggaacctcagggactccatcctccagccccagccccacgactgctggccctctcctgatgccgttcaccctcaacttcaccatcaccaacctgcagtacgaggaggacatgcgtcgcactggctccaggaagttcaacaccatggagagtgtcctgcagggtctgctcaagcccttgttcaagaacaccagtgttggccctctgtactctggctgcagattgaccttgctcaggcccgagaaagatggggcagccactggagtggatgccatctgcacccaccgccttgaccccaaaagccctggactcaacagggagcagctgtactgggagytaagcaaactgaccaatgacattgaagagctgggcccctacaccctggacaggaacagtctctatgtcaatggtttcacccatcagagctctgtgtccaccaccagcactcctgggacctccacagtggatctcagaacctcagggactccatcctccctctccagccccacaattatggctgctggccctctcctggtaccattcaccctcaacttcaccatcaccaacctgcagtatggggaggacatgggtcaccctggctccaggaagttcaacaccacagagagggtcctgcagggtctgcttggtcccatattcaagaacaccagtgttggccctctgtactctggctgcagactgacctctctcaggtcygagaaggatggagcagccactggagtggatgccatctgcatccatcatcttgaccccaaaagccctggactcaacagagagcggctgtactgggagctgagccaactgaccaatggcatcaaagagctgggcccctacaccctggacaggaacagtctctatgtcaatggtttcacccatcggacctctgtgcccaccascagcactcctgggacctccacagtggaccttggaacctcagggactccattctccctcccaagccccgcaactgctggccctctcctggtgctgttcaccctcaacttcaccatcaccaacctgaagtatgaggaggacatgcatcgccctggctccaggaagttcaacaccactgagagggtcctgcagactctgcttggtcctatgttcaagaacaccagtgttggccttctgtactctggctgcagactgaccttgctcaggtctcaggtccgagaaggatggagcagccactggagtggatgccatctgcacccaccgtcttgaccccaaaagccctggagtggacagggagcagctatactgggagctgagccagctgaccaatggcatcaaagagctgggcccctacaccctggacaggaacagtctctatgtcaatggtctcctgggacctccacagtggaccttgggtcagggactccatcctccctccccagccccctctcctggtgccgttcaccctcaacttcaccatcaccaacctgaagtacgaggaggacatgcattgccctggctccaggaagttcaacaccacagagagagtcctgcagagtctgcttggtcccatgttcaagaacaccagtgttggccctctgtactctggctgcagactgaccttgctcagcttcctcaggtccgagaaggatggagcagccactggagtggatgccatctgcacccaccgtcttgaccccaaaagccctggagtggacagggagcagctatactgggagctgagccagctgaccaatggcatcaaagagctgggtccctacaccctggacagaaacagtctctatgtcaatggtctgctggccctctcctggtgccattcaccctcaacttcaccatcaccaacctgcagtacgaggaggacatgcatcacccaggctccaggaagttcaacaccacggagcgggtcctgcagggtctgcttggtcccatgttcaagaacaccagtgtcggccttctgtactctggctgcagactgaccttgctcaggcctgagaagaatggggcagccactggaatggatgccatctgcagccaccgtcttgaccccaaaagccctggactcaacagagagcagctgtactgggagctgagccagctgacccatggcatcaaagagctgggcccctacaccctggacaggaacagtctctatgtcaatggtttcacccatcggagctctgtggcccccaccagcactcctgggacctccacagtggaccttgggacctcagggactccattctccctccccagccccacaacagctgttcctctcctggtgccgttcaccctcaactttaccatcaccaatctgcagtatggggaggacatgcgtcaccctggctccaggaagttcaacaccacagagagggtcctgcagggtctgcttggtcccttgttcaagaactccagtgtcggccctctgtactctggctgcagactgatctctctcagtgaccaatggcatcaaagagctgggcccctacaccctggaccggaacagtctctacgtcaatggcttcacccatcggagctctgtgccaaccaccagtattcctgggacctctgcagtgcacctggaaacctctgggactccagcctccctccctggccacacagcccctggccctctcctggtgccattcaccctcaacttcactatcaccaacctgcagtatgaggaggacttagtcccatwttcaagaactccagtgttggccctctgtactctggctgcagactgacctctctcaggcccgagaaggatggggcagcaactggaatggatgctgtctgcctctaccaccctaatcccaaaagacctgggctggacagagagcagctgtactgggagctaagccagctgacccacaacatcactgagctgggcccctacagcctggacagggacagtctctatgtcaatggtttcacccatcagaactctgtgcccaccaccagtagt

SEQ ID NO: 383 - DNA, 41958 bp, Homo sapiens
aagcgttgcacaattcccccaacctccatacatacggcagctcttctagacacaggttttcccaggtcaaatgcggggaccccagccatatctcccaccctgagaaattttggagtttcagggagctcagaagctctgcagaggccaccctctctgaggggattcttcttagacctccatccagaggcaaatgttgacctgtccatgctgaaaccctcaggccttcctgggtcatcttctcccacccgctccttgatgacagggagcaggagcactaaagccacaccagaaatggattcaggactgacaggagccaccttgtcacctaagacatctacaggtgcaatcgtggtgacagaacatactctgccctttacttccccagataagaccttggccagtcctacatcttcggttgtgggaagaaccacccagtctttgggggtgatgtcctctgctctccctgagtcaacctctagaggaatgacacactccgagcaaagaaccagcccatcgctgagtccccaggtcaatggaactccctctaggaactaccctgctacaagcatggtttcaggattgagttccccaaggaccaggaccagttccacagaaggaaattttaccaaagaagcatctacatacacactcactgtagagaccacaagtggcccagtcactgagaagtacacagtccccactgagacctcaacaactgaaggtgacagcacagagaccccctgggacacaagatatattcctgtaaaaatcacatctccaatgaaaacatttgcagattcaactgcatccaaggaaaatgccccagtgtctatgactccagctgagaccacagttactgactcacatactccaggaaggacaaacccatcatttgggacactttattcttccttccttgacctatcacctaaagggaccccaaattccagaggtgaaacaagcctggaactgattctatcaaccactggatatcccttctcctctcctgaacctggctctgcaggacacagcagaataagtaccagtgcgcctttgtcatcatctgcttcagttctcgataataaaatatcagagaccagcatattctcaggccagagtctcacctcccctctgtctcctggggtgcccgaggccagagccagcacaatgcccaactcagctatccctttttccatgacactaagcaatgcagaaacaagtgccgaaagggtcagaagcacaatttcctctctgggkactccatcaatatccacaaagcagacagcagagactatccttaccttccatgccttcgctgagaccatggatatacccagcacccacatagccaagactttggcttcagaatggttgggaagtccaggtacccttggtggcaccagcacttcagcgctgacaaccacatctccatctaccactttagtctcagaggagaccaacacccatcactccacgagtggaaaggaracagaaggaactttgaatacatctatgactccacttgagacctctgctcctggagaagagtccgaaatgactgccaccttggtccccactctaggttttacaactcttgacagcaagatcagaagtccatctcaggtctcttcatcccacccaacaagagagctcagaaccacaggcagcacctctgggaggcagagttccagcacagctgcccacgggagctctgacatcctgagggcaaccacttccagcacctcaaaagcatcatcatggaccagtgaaagcacagctcagcaatttagtgaaccccagcacacacagtgggtggagacaagtcctagcatgaaaacagagagacccccagcatcaaccagtgtggcagcccctatcaccacttctgttccctcagtggtctctggcttcaccaccctgaagaccagctccacaaaagggatttggcttgaagaaacatctgcagacacactcatcggagaatccacagctggcccaaccacccatcagtttgctgttcccactgggatttcaatgacaggaggcagcagcaccaggggaagccagggcacaacccacctactcaccagagccacagcatcatctgagacatccgcagatttgactctggccacgaacggtgtcccagtctccgtgtctccagcagtgagcaagacggctgctggctcaagtcctccaggagggacaaagccatcatatacaatggtttcttctgtcatccctgagacatcatctctacagtcctcagctttcagggaaggaaccagcctgggactgactccattaaacactagacatcccttctcttcccctgaaccagactctgcaggacacaccaagataagcaccagcattcctctgttgtcatctgcttcagttcttgaggataaagtgtcagcgaccagcacattctcacaccacaaagccacctcatctattaccacagggactcctgaaatctcaacaaagacaaagcccagctcagccgttctttcctccatgaccctaagcaatgcagcaacaagtcctgaaagagtcagaaatgcaacttcccctctgactcatccatctccatcaggggaagagacagcagggagtgtcctcactctcagcacctctgctgagactacagactcacctaacatccacccaactgggacactgacttcagaatcgtcagagagtcctagcactctcagcctcccaagtgtctctggagtcaaaaccacattttcttcatctactccttccactcatctatttactagtggagaagaaacagaggaaacttcgaatccatctgtgtctcaacctgagacttctgtttccagagtaaggaccaccttggccagcacctctgtccctaccccagtattccccaccatggacacctggcctacacgttcagctcagttctcttcatcccacctagtgagtgagctcagagctacgagcagtacctcagttacaaactcaactggttcagctcttcctaaaatatctcacctcactgggacggcaacaatgtcacagaccaatagagacacgtttaatgactctgctgcaccccaaagcacaacttggccagagactagtcccagattcaagacagggttaccttcagcaacaaccactgtttcaacctctgccacttctctctctgctactgtaatggtctctaaattcacttctccagcaactagttccatggaagcaacttctatcagggaaccatcaacaaccatcctcacaacagagaccacgaatggcccaggcwctatggctgtggcttctaccaacatcycaattggaaagggctacattactgaaggaagattggacacaagccatctgcccattggaaccacagcttcctctgagacatctatggattttaccatggccaaagaaagtgtctcaatgtcagtatctccatctcagtccatggatgctgctggctcaagcactccaggaaggacaagccaattcgttgacacattttctgatgatgtctatcatttaacatccagagaaattacaatacctagagatggaacaagctcagctctgactccacaaatgactgcaactcaccctccatctcctgatcctggctctgctagaagcacctggcttggcatcttgtcctcatctccttcttctcctactcccaaagtcacaatgagctccacattttcaactcagagagtcaccacaagcatgataatggacacagttgaaactagtcggtggaacatgcccaacttaccttccacgacttccttgacaccaagtaatattccaacaagtggtgccataggaaaaagcaccctggttcccttggacactccatctccagccacatcattggaggcatcagaagggggacttccaaccctcagcacctaccctgaatcaacaaacacacccagcatccacctcggagcacacgctagttcagaaagtccaagcaccatcaamcttaccatggcttcagtagtaaaacctggctcttacacacctctcaccttcccctcaatagagacccacattcatgtatcaacagccagaatggcttactcttctgggtcttcacctgagatgacagctcctggagagactaacactggtagtacctgggaccccaccacctacatcaccactacggatcctaaggatacaagttcagctcaggtctctacaccccactcagtgaggacactcagaaccacagaaaacyatccaaagacagagtccgccaccccagctgcttactctggaagtcctaaaatctcaagttcacccaatctcaccagtccggccacaaaagcatggaccatcacagacacaactgaacactccactcaattacattacacaaawttggcagaaaaatcatctggatttgagacacagtcagctccaggacctgtctctgtagtaatccctacctcccctaccattggaagcagcacattggaactaacttctgatgtcccaggggaacccctggtccttgctcccagtgagcagaccacaatcactctccccatggcaacatggctgagtaccagtttgacagaggaaatggcttcaacagaccttgatatttcaagtccaagttcacccatgagtacatttgctatttttccacctatgtccacaccttctcatgaactttcaaagtcagaggcagataccagtgccattagaaatacagattcaacaacgttggatcagcacctaggaatcaggagtttgggcagaactggggacttaacaactgttcctatcaccccactgacaaccacgtggaccagtgtgattgaacactcaacacaagcacaggacaccctttctgcaacgatgagtcctactcacgtgacacagtcactcaaagatcaaacatctataccagcctcagcatccccttcccatcttactgaagtctaccctgagctcgggacacaagggagaagctcctctgaggcaaccactttttggaaaccatctacagacacactgtccagagagattgagactggcccaacaaacattcaatccactccacccatggacaacacaacaacagggagcagtagtagtggagtcaccctgggcatagcccaccttcccataggaacatcctccccagctgagacatccacaaacatggcaytggaaagaagaagttctacagccactgtctctatggctgggacaatgggactccttgttactagtgctccaggaagaagcatcagccagtcattaggaagagtttcctctgtcctttctgagtcaactactgaaggagtcacagattctagtaagggaagcagcccaaggctgaacacacagggaaatacagctctctcctcctctcttgaacccagctatgctgaaggaagccagatgagcacaagcatccctctaacctcatctcctacaactcctgatgtggaattcatagggggcagcacattttggaccaaggaggtcaccacagttatgacctcagacatctccaagtcttcagcaaggacagagtccagctcagctacccttatgtccacagctttgggaagcactgaaaatacaggaaaagaaaaactcagaactgcctctatggatcttccatctccaactccatcaatggaggtgacaccatggatttctytcactctcagtaatgcccccaataccacagattcacttgacctcagccatggggtgcacaccagctctgcagggactttggccactgacaggtcattgaatactggtgtcactagagcctccagattggaaaacggctctgatacctcttctaagtccctgtctatgggaaacagcactcacacttccatgactkacacagagaagagtgaagtgtcttcttcaatccatccccgacctgagacctcagctcctggagcagagaccactttgacttccactcctggaaacagggccataagcttaacattgcctttttcatccattccagtggaagaagtcatttctacaggcataaccycaggaccagacatcaactcagcacccatgacacattctcccatcaccccaccaacaattgtatggaccagtacaggcacaattgaacagtccactcaaccactacatgcagtttcttcagaaaaagtttctgtgcagacacagtcaactccatatgtcaactctgtggcagtgtctgcttcccctacccatgagaattcagtctcttctggaagcagcacatcctctccatattcctcagcctcacttgaatccttggattccacaatcagtaggaggaatgcaatcacttcctggctatgggacctcactacayctctccccactacaacttggccaagtactagtttatctgaggcactgtcctcaggccattctggggtttcaaacccaagttcaactacgactgaatttccactcttttcagctgcatccacatctgctgctaagcaaagaaatccagaaacagagacccatggtccccagaatacagccgcgagtactttgaacactgatgcatcctcggtcacaggtctttctgagactcctgtgggggcaagtatcagctctgaagtccctcttccaatggccrtaacttctagatcagatgtttctggccttacatctgagagtactgctaacccgagtttaggcacagcctcttcagcagggaccaaattaactaggacaatatccctgcccacttcagagtctttggtttcctttagaatgaacaaggatccatggacagtgtcaatccctttggggtcccatccaactactaatacagaaacaagcatcccagtaaacagcgcaggtccacctggcttgtccacagtagcatcagatgtaattgacacaccttcagatggggctgagagtattcccactgtctccttttccccctcccctgatactgaagtgacaactatctcacatttcccagaaaagacarctcattcatttagaaccatttcatctctcactcatgagttgacttcaagaktgacacctattcctggggattggatgagttcagctatgtctacaaagcccacaggagccagtccctccattacactgggagagagaaggacaatcacctctgctgctccaaccacttcccccatagttctcactgctagtttcacrgagaccagcacagtttcactggataatgaaactacagtaaaaacctcagatatccttgasgcacggaaaacaaatgagctcccctcagatagcagttcttcttctgatctgatcaacacctccatagcttcttcaactatggatgtcactaaaacagcctccatcagtcccactagcatctcaggaatgacagcaagttcctccccatctctcttctcttcagatagaccccaggttcccacatctacaacagagacaaatacagccacctctccatctgtttccagtaacacctattctcttgatgggggctccaatgtgggtggcactccatccactttaccaccctttacaatcacccaccctgtcgagacaagctcggccctattagcctggtctagaccagtaagaactttcagcaccatggtcagcactgacactgcctccggagaaaatcctacctctagcaattctgtggtgacttctgttccagcaccaggtacatggrccagtgtaggcagtactactgacttacctgccatgggctttctcaagacaagtcctgcaggagaggcacactcacttctagcrtcaactattgaaccagccactgccttcactccycatctctcagcagcagtggtcactggatccagtgctacatcagaagccagtcttctcactacgagtgaaagcaaagccattcattcttcaccacagaccccaactacacccacctctggagcaaactgggaaacttcagctactcctgagagccttttggtagtcactgagacttcagacacaacacttacctcaaagattttggtcacagataccatcttgttttcaactgtgtccacgccaccttctaaatttccaagtacggggactctgtctggagcttccttccctactttactcccggacactccagccatccctctcactgccactgagccaacaagttcattagctacatcctttgattccaccccactggtgactatagcttcrgatagtcttggcacagtcccagagactaccctgaccatgtcagagacctcaaatggtgatgcactggttcttaagacagtaagtaacccagataggagcatccctggaatcactatccaaggagtaacagaaagtccactccatccttcttccacttccccctctaagattgttgctccacggaatacaacctatgaaggttcgatcacagtgrcactttctactttgcctgcgggaactactggttcccttgtattcagtcagagttctgaaaactcagagacaacggctttggtagactcatcagctgggcttgagagggcatctgtgatgccactaaccacaggaagccagggtatggcyagctctggaggaatcagaagtgggtccactcactcaactggaaccaaaacattttcttctctccctctgaccatgaacccaggtgaggttacagccatgtctgaaatcaccaygaacagactgacagctactcaatcaacagcacccaaagggatacctgtgaagcccaccagtgctgagtcaggcctcctaacacctgtctctgcctcctcaagcccatcaaaggcctttgcctcactgactacagctcccycaacttgggggatcccacagtctaccttgayatttgagttttctgaggtyccaagtttggatactaagtccgcttctttaccaactcctggacagtccctgaacaccattccagactcagatgcaagcacagcatcttcctcactgtccaagtctccagaaaaaaacccaagggcaaggatgatgacttccacaaaggccataagtgcaagctcatttcaatcaacaggttttactgaaacccctgagggatctgcctccccttctatggcagggcatgaacccagagtccccacttcaggaacaggggaccctagatatgcctcagagagcatgtcttatccagacccaagcaaggcatcatcagctatgacatcgacctctcttgcatcaaaactcacaactctcttcagcacaggtcaagcagcaaggtctggttctagttcctctcccataagcctatccactgagaaagaaacaagcttcctttcccccactgcatccacctccagaaagacttcactatttcttgggccttccatggcaaggcagcccaacatattggtgcatcttcagacttcagctctgacactttctccaacatccactctaaatatgtcccaggaggagcctcctgagttaacctcaagccagaccattgcagaagaagagggaacaacagctgaaacacagacgttaaccttcacaccatctgagaccccaacatccttgttacctgtctcttctcccacagaacccacagccagaagaaagagttctccagaaacatgggcaagctctatttcagttcctgccaagacctcsttggttgaaacaactgatggaacgctagtgaccaccataaagatgtcaagccaggcagcacaaggaaattccacgtggcctgccccagcagaggagacggggascagtccagcaggcacatccccaggaagcccagaaatgtctaccactctcaaaatcatgagctccaaggaacccrgcatcagcccagagatcaggtccactgtgagaaattctccttggaagactccagaaacaactgttcccatggagaccacagtggaaccagtcacccttcagtccacagccctaggaagtggcagcaccagcatctctcacctgcccacaggaaccacatcaccaaccaagtcaccaacagaaaatatgttggctacagaaagggtctccctctccccatccccacctgaggcttggaccaacctttattctggaactccaggagggaccaggcagtcactggccacaatgtcctctgtctccctagagtcaccaactgctagaagcatcacagggactggtcagcaaagcagtccagaactggtttyaaagacaactggaatggaattctctatgtggcatggctctactggagggaccacaggggacacacatgtctctctgagcacatcttccaatatccttgaagaccctgtaaccagcccaaactctgtgagctcattgacagataaatccaaacataaaaccgagacatgggtmagcaccacagccattccctccactgtcctgaataataagataatggcagctgaacaacagacaagtcratctgtggatgaggcttattcatcaactagttcttggtcagatcagacatctgggagtgacatcacccttggtgcatctcctgatgtcacaaacacattatacatcacctccacagcacaaaccacctcactagtrtctctgccctctggagaccaaggcattacaagcctcaccaatccctcaggaggaaaaacaagctctgcrtcatctgtcacatctccttcaatagggcttgagactctgakggccaatgtaagtgcagtgamaagtgacattgcccctactgctgggcatctatctcagacttcatctcctgcggaagtgagcatcctggacrtaaccacagctcctactccaggtatctccaccaccatcaccaccatgggaaccaactcaatctcaactaccacacccaacccagaagtgggtatgagtaccatggacagcaccccggccacagagaggcrcacaacttctacagaacacccttccacctggtcttccacagctgcatcagattcctggactgtcacagacatgacttcaaacttgaaagttgcaagatctcctggaacaatttccacaatgcatacaacttcattcttagcctcaagcactgaattagactccatgtctactccccatggccgtataactgtcattggaaccagcctggtcactccatcctctgatgcttcagctgtaaagacagagaccagtacaagtgaaagaacattgagtccttcagacacaactgcatctactcccatctcaactttttctcgtgtccagaggatgagcatctcagttcctgacattttaagtacaagttggactcccagtagtacagaagcagaagatgtgcctgtttcaatggtttctacagatcatgctagtacaaagactgacccaaataygcccctgtccacttttctgtttgattctctgtccactcttgactgggacactgggagatctctgtcatcagccacagccactacctcagctcctcagggggccacaactccccargaactcactttggaaaccatgatcagcccagctacctcacagttgcccttctctatagggcacattacaagtgcagtcayaccagctgcaatggcaaggagctctggagttactttttcaagaccagatcccacaagcaaaaaggcagagcagacttccactcagcttcccaccaccacttctgcacatccagrgcaggtgcccagatcagcagcaacaactctggatgtgatcccacacacagcaaaaactccagatgcaacttttcagagacaagggcagacagctcttacaacagaggcaagagctacatctgactcctggaatgagaaagaaaaatcaaccccaagtgcaccttggatcactgagatgatgaattctgtctcagaagataccatcaaggaggttaccagctcctccagtgtrttaaggaccctgaatacgctggacataaacttggaatctgggacgacttcatccccaagttggaaaagcagcccatatgagagaattgccccttctgagtcyaccacagacaaagaggcaattcacccttctacaaacacagtagagaccacwggctgggtcacaagttccgaacatgcttctcattccactatcccagcccactcagcgtcatccaaactcacatctccagtggttacaacctccaccagggaacaagcaatagtttctatgtcaacaaccacatggccagagtctacaagggctagaacagagcctaattccttcttgactattgaactgagggacgtcagcccttacatggacaccagctcaaccacacaaacaagtwttatctcttccccaggttccactgcgatcaccaaggggcctagaacagaaattacctcctctaagagaatatccagctcattccttgcccagtctatgaggtcgtcagacagcccctcagaagccatcwccaggctgtctaactttcctgccatgacagaatctggaggaatgatccttgctatgcaaacaagtccacctggcgctacatcactaagtgcacctactttggatacatcagccacagcctcctggacagggactccactggctacgactcagagatttacatactcagagaagaccactctctttagcaaaggtcctgaggatacatcacagccaagccctccctctgtggaagaaaccagctcttcctcttccctggtacctatcmatgctacaacctcgccttccaatattttgttgacatcacaagggcacagtccctcctctactccacctgtgacctcagttttcttgtctgagacctctggcctggggaagaccacagacatgtcgaggataagcttggaacctggcacaagtttacctcccaatttgagcagtacagcaggtgaggcgttatccacttatgaagcctccagagatacaaaggcaattcatcattctgcagacacagcagtgacgaatatggaggcaaccagttctgaatattctcctatcccaggccatacaaagccatccaaagccacatctccattggttacctcccacatcatgggggacatcacttcttccacatcagtatttggctcctccgagaccacagagattgagacagtgtcctctgtgaaccagggacttcaggagagaagcacatcccaggtggccagctctgctacagagacaagcactgtcattacccatgtgtctagtggtgatgctactactcatgtcaccaagacacaagccactttctctagcggaacatccatctcaagccctcatcagtttataacttctaccaacacatttacagatgtgagcaccaacccctccacctctctgataatgacagaatcttcaggagtgaccatcaccacccaaacaggtcctaytggagctgcaacacagggtccatatctcttggacacatcaaccatgccttacttgacagagactccattagctgtgactccagattttatgcaatcagagaagaccactctcataagcaaaggtcccaaggatgtgtcctggacaagccctccctctgtggcagaaaccagctatccctcttccctgacacctttcttggtcacaaccatacctcctgccacttccacgttacaagggcaacatacatcctctcctgtttctgcgacttcagttcttacctctggactggtgaagaccacagatatgttgaacacaagcatggaacctgtgaccaattcacctcaaaatttgaacaatccatcaaatgagatactggccactttggcagccaccacagatatagagactattcatcctyccataaacaaagcagtgaccaatatggggactgccagttcagcacatgtactgcattccactctcccagtcagctcagaaccatctacagccacatctccaatggttcctgcctccagcatgggggacgctcttgcttctatatcaatacctggttctgagaccacagacattgagggagagccaacatcctccctgactgctggacgaaaagagaacagcaccctccaggagatgaactcaactacagagtcaaacatcatcctctccaatgtgtctgtgggggctattactgaagccacaaaaatggaagtcccctcttttgatgcaacattcataccaactcctgctcagtcaacaaagttcccagatattttctcagtagccagcagtagactttcaaactctcctcccatgacaatatctacccacatgaccaccacccagacagggtcttctggagctacatcaaagattccacttgccttagacacatcaaccttggaaacctcagcagggactccatcagtggtgactgaggggtttgcccactcaaaaataaccactgcaatgaacaatgatgtcaaggacgtgtcacagacaaaccctccctttcaggatgaagccagctctccctcttctcaagcacctgtccttgtcacaaccttaccttcttctgttgctttcacaccgcaatggcacagtacctcctctcctgtttctatgtcctcagttcttacttcttcactggtaaagaccgcaggcaaggtggatacaagcttagaaacagtgaccagttcacctcaaagtatgagcaacactttggatgacatatcggtcacttcagcagccaccacagatatagagacaacgcatccttccataaacacagtagttaccaatgtggggaccaccggttcagcatttgaatcacattctactgtctcagcttacccagagccatctaaagtcacatctccaaatgttaccacctccaccatggaagacaccacaatttccagatcaatacctaaatcctctaagactacaagaactgagactgagacaacttcctccctgactcctaaactgagggagaccagcrtctcccaggagatcacctcgtccacagagacaagcactgttccttacaaagagctcactggtgccactaccgaggtatccaggacagatgtcacttcctctagcagtacatccttccctggccctgatcagtccacagtgtcactagacatctccacagaaaccaacaccaggctgtctacctccccaataatgacagaatctgcagaaataaccatcaccacccaaacaggtcctcatggggctacatcacaggatacttttaccatggacccatcaaatacaaccccccaggcagggatccactcagctatgactcatggattttcacaattggatgtgaccactcttatgagcagaattccacaggatgtatcatggacaagtcctccctctgtggataaaaccagctccccctcttcctttctgycctcacctgcaatgacmacaccttccctgatttcttctaccttaccagaggataagctctcctctcctatgacttcacttctcacctctggcctagtgaagattacagacatattacgtacacgcttggaacctgtgaccagctcacttccaaatttcagcagcacctcagataagatactggccacttctaaagacagtaaagacacaaaggaaatttttccttctataaacacagaagagaccaatgtgaaagccaacaactctggacatgaatcccattcccctgcactggctgactcagagacacccaaagccacaactcaaatggttatcaccaccactgtgggagatccagctccttccacatcaatgccagtgcatggttcctctgagaytacaaacattaagagagagccaacatatttcttgactcctagactgagagagaccagtacctctcaggagtccagctttcccacggacacaagttttctactttccaaagtccccactggtactattactgaggtctccagtacaggggtcawctcttctagcaaaatttccaccccagaccatgataagtccacagtgccacctgacaccttcacaggagagatccccagggtcttcacctcctctattaagacaaaatctgcagaaatgacgatcaccacccaagcaagtcctcctgagtctgcatcgcacagtacccttcccttggacacatcaaccacactttcccagggagggactcattcaactgtgactcagggattcccatactcagaggtgaccactctcatgggcatgggtcctgggaatgtgtcatggatgacaactccccctgtggaagaaaccagctctgtgtcttccctgatgtcttcacctgccatgacatccccttctcctgtttcctccacatcaccacagagcatcccctcctctcctcttcctgtgactgcacttcctacttctgttctggtgacaaccacagatgtgttgggcacaacaagcccagagtctgtaaccagttcacctccaaatttgagcagcatcactcatgagagaccggccacttacaaagacactgcacacacagaagccgccatgcmtcattccacaaacaccgcagtgaccaatgtagggacttccgggtctggacataaatcacaatcctctgtcctagctgactcagagacatcgaaagccacacctctgatgagtaccacctccaccctgggggacacaagtgtttccacatcaactcctaatatctctcagactaaccaaattcaaacagagccaacagcatccctgagccctagactgagggagagcagcacgtctgagaagaccagctcaacaacagagacaaatactgccttttcttatgtgcccacaggtgctattactcaggcctccagaacagaaatctcctctagcagaacatccatctcagaccttgatcggyccacaatagcacccgacatctccacaggaatgatcaccaggctcttcacctcccccatcatgacaaaatctgcagaaatgaccgtcaccactcaaacaactactcctggggctacatcacagggtatccttccctgggacacatcaaccacacttttccagggagggactcattcaaccgtgtctcagggattcccacactcagagataaccactcttcggagcagaacccctggagatgtgtcatggatgacaactccccctgtggaagaaaccagctctgggttttccctgatgtcaccttccatgacatccccttctcctgtttcctccacatcaccagagagcatcccctcctctcctctccctgtgactgcacttcttacttctgttctggtgacaaccacaaatgtattgggcacaacaagcccagagmccgtaacgagttcacctccaaatttaagcagccccacacaggaragactgaccacttacaaagacactgcgcacacagaagccatgcatgcttccatgcatacaaacactgcagtggccaacgtggggacctccattkctggacatgaatcacaatcttctgtcccagctgattcasacacatccaaagccacatctccaatgggtaycaccttcrccatgggggatacaagtgtttctacatcaactcctgccttctttgagactagaattcagactgaatcaacatcctctttgattcctggattaagggacaccaggacstctgaggagatcaacactgtgacagagaccagcactgtcctttcagaagtgcccactactactactactgaggtctccaggacagaagttatcacttccagcagaacaaccatctcagggyctgatcattccaaaatgtcaccctacatctccacagaaaccatcaccaggctctccacttttcctkttgtaacaggatccacagaaatggccatcaccaaccaaacaggtcctatagggactatctcacaggctrcccttaccctggacacatcaagcacagcttyctgggaagggactcactcacctgtgactcagagatttccacactcagaggagaccactactatgagcagaagtactaagggcgtgtcatggcaaagccctccctctgtggaagaaaccagttctccttcttccccagtgcctttacctgcaataacctcacattcatctctttattccgcagtatcaggaagtagccccacttctgctctccctgtgacttcccttctcacctctggcaggaggaagaccatagacatgttggacacacactcagaacttgtgaccagctccttaccaagtgcaagtagcttctcaggtgagatactcacttctgaagcctccacaaatacagagacaattcacttttcagagaacacagcagaaaccaatatggggaccaccaattctatgcataaactacattcctctgtctcaatccactcccagccatccggacacacacctccaaaggttactggatctatgatggaggacgctattgtttccacatcaacacctggttctcctgagactaaaaatgttgacagagactcaacatcccctctgactcctgaactgaaagaggacagcaccgccctggtgatgaactcaactacagagtcaaacactgttttctccagtgtgtccctggatgctgctactgaggtctccagggcagaagtcacctactatgatcctacattcatgccagcttctgctcagtcaacaaagtccccagacatttcacctgaagccagcagcagtcattctaactctcctcccttgacaatatctacacamaagaccatcgccacacaaacaggtccttctggggtgacatctcttggccaactgaccctggacacatcaaccatagccacctcagcaggaactccatcagccagaactcaggattttgtagattcagaaacaaccagtgtcatgaacaatgatctcaatgatgtgttgaagacaagccctttctctgcagaagaagccaactctctctcttctcaggcacctctccttgtgacaacctcaccttctcctgtaacttccacattgcaagagcacagtacctcctctcttgtttctgtgacctcagtacccacccctacactggcgaagatcacagacatggacacaaacttagaacctgtgactcgttcacctcaaaatttaaggaacaccttggccacttcagaagccaccacagatacacacacaatgcatccttctataaacacagcagtggccaatrtggggaccaccagttcaccaaatgaattctattttactgtctcacctgactcagacccatataaagccacatccgcagtagttatcacttccacctcgggggactcaatagtttccacatcaatgcctagatcctctgcgatgaaaaagattgagyctgagacaaytttctccctgatatttagactgagggagactagcacctcccagaaaattggctcatcctcagacacaagcacggtctttgacaaagcattcactgctgctactactgaggtctccagaacagaaytcacctcctctagcagaacatccatccaaggcactgaaaagcccacaatgtcaccggacacctccacaagatctgtcaccatgctttctacttttgctggcctgacaaaatccgaagaaaggaycattgccacccaaacaggtcctcatagggcgacatcacagggtacccttacctgggacacatcaatcacaacctcacaggcagggacccactcagctatgactcatggattttcacaattagatttgtccactcttacgagtagagttcctgagtacatatcagggacaagcccaccctctgtggaaaaaaccagctcttcctcttcccttctgtctttaccagcaataacctcaccgtcccctgtacctactacattaccagaaagtaggccgtcttctcctgttcatctgacttcactccccacctctggcctagtgaagaccacagatatgctggcatctgtggccagtttacctccaaacttgggcagcacctcacataagataccgactacttcagaagacattaaagatacagagaaaatgtatccttccacaaacatagcagtaaccaatgtggggaccaccacttctgaaaaggaatcttattcgtctgtcccagcctactcagaaccacccaaagtcacctctccaatggttacctctttcaacataagggacaccattgtttccacatccatgcctggctcctctgagattacaaggattgagatggagtcaacattctccctggctcatgggctgaagggaaccagcacctcccaggaccccatcgtatccacagagaaaagtgctgtccttcacaagttgaccactggtgctactgagacctctaggacagaagttgcctcttctagaagaacatccattccaggccctgatcattccacagagtcaccagacatctccactgaagtgatccccagcctgcctatctcccttggcattacagaatcttcaaatatgaccatcatcactcgaacaggtcctcctcttggctctacatcacagggcacatttaccttggacacaccaactacatcctccagggcaggaacacactcgatggcgactcaggaatttccacactcagaaatgaccactstcatgaacaaggacyctgagattctatcatggacaatccctycttctatagagaaaaccagcttctcctcttccctgatgccttcaccagccatgacttcacctcctgtttcctcaacattaycaaagaccattcacaccactccttctcctatgacctcactgctcacccctagcctagtgatgaccacagacacattgggcacaagcccaraacctacaaccagttcacctmcaaatttgagcagtacctcacatgagatactgacaacagatgaagacaccacagctatagaagccatgcatccttccacaascacagcagcgactaatgtggaaaccaccagttmtggacatgggtcacaatcctctgtcctagctgactcagaaaaaaccaaggccacagctccaatggataccacctccaccatggggcatacaactgtttccacatcaatgtctgtttcctctgagactacaaaaattaagagagagtcaacatattccttgactcctggactgagagagaccagcatttcccaaaatgccagcttttccactgacacaagtattgttctttcagaagtccccactggtactactgctgaggtctccaggacagaagtcacctcctctggtagaacatccatccctggcccttctcagtccacagttttgccagaaatatccacaagaacaatgacaaggctctttgcctygcccaccatgacagaatcagcagaaatgaccatccccactcaaacaggtccttctgggtctacctcacaggatacccttaccttggacacatccaccacaaagtcccaggcaaagactcattcaactttgrctcagagatttccacactcagagatgaccactctcatgagcagaggtcctggagatatgtcatggcaaagctctccctctctggaaaatcccagctctctcccttccctgctgtctttacctgccacaacctcacctcctcccatttcctccacattaccagtgactatctcctcctctcctcttcctgtgacttcacttctcacctctagcccggtaacgaccacagacatgttacacacaagcccagaacttgtaaccagttcacctccaaagctgagccacacttcagatgagagactgaccactggcaaggacaccacaaatacagaagctgtgcatccttccacaaacacagcagcgtccaatgtggagattcccagctctggacatgaatccccttcctctgccttagctgactcagagacatccaaagccacatcaccaatgtttattacctccacccaggaggatacaactgttgccatatcaacccctcacttcttggagactagcagaattcagaaagagtcaatttcctccctgagccctaaattgagggagacaggcagttctgtggagacaagctcagccatagagacaagtgctgtcctttctgaagtgtccrttggtgctactastgagatctccaggacagaagtcacctcctctagcagaacatccatctctggttctgctgagtccacaatgttgccagaaatatccaccacaagaaaaatcattaagttycctacttcccccatcctggcagaatcatcagaaatgaccatcaagacccaaacaagtcctcctgggtctacatcagagagtacctttacattagacacatcaaccactccctccttggtaataacccattcgactatgactcagagattgccacactcagagataaccactctkgtgagtagaggtgctggggatgtgccacggcccagctctctccctgtggaagaaacaagccctccatcttcccagctgtctttatctgccatgatctcaccttctcctgtttcttccacattaccagcaagtagccactcctcttctgcttctgtgacttcacttctcacaccaggccaagtgaagactactgaggtgttggacgcaagtgcagaacctgaaaccagttcacctccaagtttgagcagcacctcagttgaaatactggccacctctgaagtcaccacagatacggagaaaattcatcctttctcaaacacggcagtaaccaaagttggaacttccagttctggacatgaatccccttcctctgtcctacctgactcagagacaaccaaagccacatcggcaatgggtaccatctccattatgggggatacaagtgtttctacattaactcctgccttatctaacactaggaaaattcagtcagagccagcttcctcactgaccaccagattgagggagaccagcacctctgaagagaccagcttagccacagaagcaaacactgttctttctaaagtgtccactggtgctactactgaggtctccaggacagaagccatctcctttagcagaacatccatgtcaggccctgagcagtccacaatgtcacaagacatctccataggaaccatccccaggatttctgcctcctctgtcctgacagaatctgcaaaaatgaccatcacaacccaaacaggtccttcggagtctacactagaaagtacccttaatttgaacacagcaaccacaccctcttgggtggaaacccactctatagtaattcagggatttccacacccagagatgaccacttccatgggcagaggtcctggaggtgtgtcatggcctagccctccctttgtgaaagaaaccagccctccatcctccccgctgtctttacctgccgtgacctcacctcatcctgtttccaccacattcctagcacatatccccccctctccccttcctgtgacttcacttctcacctctggcccggcgacaaccacagatatcttgggtacaagcacagaacctggaaccagttcatcttcaagtttgagcaccacctcccatgagagactgaccacttacaaagacactgcacatacagaagccgtgcatccttccacaaacacaggagggaccaatgtggcaaccaccagctctggatataaatcacagtcctctgtcctagctgactcatctccaatgtgtaccacctccaccatgggggatacaartgttctcacatcaactcctgccttccttgagactaggaggattcagacagagctagcttcctccctgacccctggattgagggagtccagyggctctgaagggaccagctcaggcaccaagatgagcactgtcctctctaaagtgcccactggtgctactactgagatctccaaggaagacgtcacctccatcccaggtcccgctcaatccacaatatcaccagacatctccacaagaaccgtcagctggttctctacatcccctgtcatgacagaatcagcagaaataaccatgaacacccatacaagtcctttaggggccacaacacaaggcaccagtactttggmcacgtcaagcacaacctctttgacaatgacacactcaactatatctcaaggattttcacactcacagatgagcactcttatgaggaggggtcctgaggatgtatcatggatgagccctccccttctggaaaaaactagaccttccttttctctgatgtcttcaccagccacaacttcaccttctcctgtttcctccacattaccagagagcatctcttcctctcctcttcctgtgacttcactcctcacgtctggcttggcaaaaactacagatatgttgcacaaaagctcagaacctgtaaccaactcacctgcaaatttgagcagcacctcagttgaaatactggccacctctgaagtcaccacagatacagagaaaactcatccttcttcaaacagaacagtgaccgatgtggggacctccagttctggacatgaatccacttcctttgtcctagctgactcacagacatccaaagtcacatctccaatggttattacctccaccatggaggatacgagtgtctccacatcaactcctggcttttttgagactagcagaattcagacagaaccaacatcctccctgacccttggactgagaaagaccagcagctctgaggggaccagcttagccacagagatgagcactgtcctttctggagtgcccactggtgccactgctgaagtctccaggacagaagtcacctcctctagcagaacatccatctcaggctttgctcagctcacagtgtcaccagagacttccacagaaaccatcaccagactccctacctccagcataatgacagaatcagcagaaatgatgatcaagacacaaacagatcctcctgggtctacaccagagagtactcatactgtggacatatcaacaacacccaactgggtagaaacccactcgactgtgactcagagattttcacactcagagatgaccactcttgtgagcagaagccctggtgatatgttatggcctagtcaatcctctgtggaagaaaccagctctgcctcttccctgctgtctctgcctgccacgacctcaccttctcctgtttcctctacattagtagaggatttcccttccgcttctcttcctgtgacttctcttctcamccctggcctggtgataaccacagacaggatgggcataagcagagaacctggaaccagttccacttcaaatttgagcagcacctcccatgagagactgaccactttggaagacactgtagatacagaagmcatgcagccttccacacacacagcagtgaccaacgtgaggacctccatttctggacatgaatcacaatcttctgtcctatctgactcagagacacccaaagccacatctccaatgggtaccacctacaccatgggggaaacgagtgtttccatatccacttctgacttctttgagaccagcagaattcagatagaaccaacatcctccctgacttctggattgagggagaccagcagctctgagaggatcagctcagccacagagggaagcactgtcctttctgaagtgcccagtggtgctaccactgaggtctccaggacagaagtgatatcctctaggggaacatccatgtcagggcctgatcagttcaccatatcaccagacatctctactgaagcgatcaccaggctttctacttcccccattatgacagaatcagcagaaagtgccatcactattgagacaggttctcctggggctacatcagagggtaccctcaccttggacacctcaacaacaaccttttggtcagggacccactcaactgcatctccaggattttcacactcagagatgaccactcttatgagtagaactcctggagatgtgccatggccgagccttccctctgtggaagaagccagctctgtctcttcctcactgtcttcacctgccatgacctcaacttcttttttctccacattaccagagagcatctcctcctctcctcatcctgtgactgcacttctcacccttggcccagtgaagaccacagacatgttgcgcacaagctcagaacctgaaaccagttcacctccaaatttgagcagcacctcagctgaaatattagccacstctgaagtcaccaaagatagagagaaaattcatccctcctcaaacacacctgtagtcaatgtagggactgtgatttataaacatctatccccttcctctgttttggctgacttagtgacaacaaaacccacatctccaatggctaccacctccactctggggaatacaagtgtttccacatcaactcctgccttcccagaaactatgatgacacagccaacttcctccctgacttctggattaagggagatcagtacctctcaagagaccagctcagcaacagagagaagtgcttctctttctggaatgcccactggtgctactactaaggtctccagaacagaagccctctccttaggcagaacatccaccccaggtcctgctcaatccacaatatcaccagaaatctccacrgaaaccatcactagaatttctactcccctcaccacgacaggatcagcagaaatgaccatcacccccaaaacaggtcattctggggcatcctcacaaggtacctttaccttggacacatcaagcagagcctcctggccaggaactcactcagctgcaactcacagatctccacactcagggatgaccactcctatgagcagaggtcctgaggatgtgtcatggccaagccgcccatcagtggaaaaaactagccctccatcttccctggtgtctttatctgcagtaacctcaccttcgccactttattccacaccatctgagagtagccactcrtctcctctccgggtgacttctcttttcacccctgtcaygatgaagaccacagacatgttggacacaagcttggaacctgtgaccacttcacctcccagtatgaatatcacctcagatgagagtctggccacttctaaagccaccatggagacagargcaattcagctttcagaaaacacagctgtgactcagatgggcaccatcagygctagacaagaattctattcctcttatccaggyctcccagagccatccaaagtgacatctccartggtcacctcttccaccataaaagacattgtttctacaaccatacctgcttcctctgagataacaagaattgagatggagtcaacatccaccctgacccccacaccaagggagaccagcacctcycaggagatccactcagccacaaagccaagcactgttccttacaaggcactcactagtgccacgattgaggactccatgacacaagtcatgtcctctagcagaggacctagccctgatcagtccacaatgtcacaagacatatccactgaagtgatcaccaggctctctacctcccccatcaagrcagaatctacagaaatgaccattaccacccaaacaggttctcctggggctacatcaaggggtacccttaccttggacacttcaacaacttttatgtcagggacscaytcaactgcatctcaaggattttcacactcacagatgaccrctcttatgagtagaactcctggagakgtgccatggctaagccatccctctgtggaagaagccagctctgcctctttctcactgtcttcacctgtcatgacctcatcttctcccgtttcttccacattaccagacagcatccactcttcttcgcttcctgtgacatcacttctcacctcagggctggtgaagaccacagagctgttgggcacaagctcagaacctgaaaccagttcacccccaaatttgagcagcacctcagctgaaatactggccaycactgaagtcactacagatacagagaaactggagatgaccaatgtggtaacctcaggttatacacatgaatctccttcctctgtcctagctgactcagtgacaacaaaggccacatcttcaatgggtatcacctaccccacaggagatacaaatgttctcacatcaacccctgccttctctgacaccagtaggattcaaacaaagtcaaagctctcactgactcctgggttgatggagaccagcatctctgaagagaccagctctgccacagaaaaaagcactgtcctttctagtgtgcccactggtgctactactgaggtctccaggacagaagccatctcttctagcagaacatccatcccaggccctgctcaatccacaatgtcatcagrcacctccatggaaaccatcactagaatttctacccccctcacaaggaaagaatcaacagacatggccatcacccccaaaacaggtccttctggggctacctcgcaggrtacctttaccttggactcatcaagcacagcctcctggccaggaactcactcagctacaactcagagatttccacrgtcagtggtgacaactcctatgagcagaggtcctgaggatgtgtcatggcyaagcccgctgtctgtggaaaamaacagccctccatcttccctggtatcttcatcttcagtaacctcaccttcgccactttattccacaccatctgggagtagccactcctctcctgtccctgtcacttctcttttcacctctatcatgatgaaggccacagacatgttggatgcaagtttggaacctgagaccacttcagctcccaatatgaatatcacctcagatgagagtctggccrcttctaaagccaccacggagacagaggcaattcasgtttttgaaaatacagcarcgtcccatgtggaaaccaccagtgctacagaggaactctattcctcttccccaggcttctcagagccaacaaaagtgatatctccagtggtcacctcttcctctataagagacaacatggtttccacaacaatgcctggctcctctggcattacaaggattgagatagagtcaatgtcatctctgacccctggactgagggagaccagaacctcccaggacatcacctcatccacagagacaagcactgtcctttacaagatgycctctggtgccactcctgaggtctccaggacagaagttatgccctctagcagaacatccattcctggccctgctcagtccacaatgtcactagacatctccgatgaagttgtcaccaggctgtctacctctcccatcatgacagaatctgcagaaataaccatcaccacccaaacaggttattctctggctacatcccaggttacccttcccttgggcacctcaatgacctttttgtcagggacccactcaactatgtctcaaggactttcayactcagagatraccaatcttatgagcagggrtcctgaaagtctgtcatggacgagccctcgctttgtggaaacaactagatcttcctcttctctgacatcattacctctcacgacctcactttctcctgtgtcctccacattactagacagtagcccctcctctcctcttcctgtgacttcacttatcctcccaggcctggtgaagactacagaagtgttggatacaagctcagagcctaaaaccagttcatctccaaatttgagcagcacctcagttgaaataccggccacctctgaaatcatgacagatacagagaaaattcatccttcctcaaacacagcggtggccaaagtgaggacctccagttctgttcatgaatctcattcctctgtcctagctgactcagaaacaaccataaccataccttcaatgggtatcacctccgctgtggasgataccactgttttcacatcaaatcctgccttctctgagactaggaggattccgacagagccaacattctcattgactcctggattcagggagactagcacctctgaagagaccacctcaatcacagaaacaagtgcagtcctttwtggagtgcccactagtgctactactgaartctccatgacagaaatmatgtcctctaatagaayacacatccctgactctgatcagtccacgatgtctccagacatcatcactgaagtgatcaccaggctctcttcctcatccatgatgtcagaatcaacacaaatgaccatcaccacccaaaaaagttctcctggggctacagcacagagtactcttaccttggccacaacaacagcccccttggcaaggacccactcaactgttcctcctagatttttacactcagagatgacaactcttatgagtaggagtcctgaaaatccatcatggaagagctctcyctttgtggaaaaaactagctcttcatcttctctgttgtccttacctgtcacgacctcaccttctgtttcttccacattaccgcagagtatcccttcctcctctttttctgtgacttcactcctcaccccaggcatggtgaagactacagacacaagcacagaacctggaaccagtttatctccaaatctgagtggcacctcagttgaaatactggctgcctctgaagtcaccacagatacagagaaaattcatccttcttcaagcatggcagtgaccaatgtgggaaccaccagttctggacatgaactrtattcctctgtttcaatccactcggagccatccaaggctacatacccagtgggtactccctcttccatggctgaaacctctatttccacatcaatgcctgctaattttsagaccayaggatttgaggytgagccattttctcatttgacttctggayttaggaagacmaacatgtccctggacaccagctcagtcacaccaacaaatacaccttcttctcctgggtccactcaccttttacagagttccaagactgatttcacctcttctgcaaaaacatcatccccagactggcctccagcctcacagtatactgaaattccagtggacataatcaccccstttaatgcttctccatctattacggagtccactgggataacctccttcccagaatccaggtttactatgtctgtaacagaaagtactcatcatctgagtacagatttgctgccttcagctgagactatttccactggcacagtgatgccttctctatcagaggccatgacttcatttgccaccactggagttccacgagccatctcaggttcaggtartccattctctaggacagagtcaggccctggggatgctactctgtccaccattgcagagagcctgccttcatccactcctgtgccattctcctcttcaaccttcactaccactgattcttcaaccatcccagccctccatgagataacttcctcttcagctaccccatatagagtggacaccagtcttgggacagagagcagcactactgaaggacgcttggttatggtcagtactttggacacttcaagccaaccaggcaggacatcttcatcacccattttggataccagaatgacagagagygttgagctgggaacagtgacaagtgcttatcaagttccttcactctcaacacggttgacaagaactgatggcattatggaacacatcacaaaaatacccaatgaagcagcacacagaggtaccataagaccagtcaaaggccctcagacatccacttcgcctgccagtcctaaaggactacacacaggagggacaaaaaraatggagaccaccaccacagctctgaagaccaccaccacagctctgaagaccacttccagagccaccttgaccaccagtgtctatactcccactttgggaacactgamtcccctcaatgcatcaatgcaaatggccagcacaatccccacagaaatgatgatcacaaccccatatgttttccctgatgttccagaaacgacatcctcattggctaccagcctgggagcagaaaccagcacagctcttcccaggacaaccccatctgttttcaatagagaatcagagaccacagcctcactggtctctcrttctggggcagagagawgtccggttattcaaactctagatgtttcttctagtgagccagatacaacagcttcatgggttatccatcctgcagagaccatcccaactgtttccaagacaacccccaattttttccacagtgaattagacactgtatcttccacagccaccagtcatggggcagaygtcagctcagccattccaacaaatatctcacctagtgaactagatgcactgaccccactggtcactatttcggggacagatactagtacaacattcccaacactgactaagtccccacatgaaacagagacaagaaccacatggctcactcatcctgcagagaccagctcaactattcccagaacaatccccaatttttctcatmatgaatcagatgccacaccttcaatagccaccagtcctggggcagaaaccagttcagctattccaattatgactgtctcacctggtgcagaagatctggtgacctcacaggtcactagttctggsacagacagaaatatgactattccaactttgactctttctcctggtgaaccaaagacsatagcctcattagtcayccatcctgaagcacagacaagttcggccattccaacttcaactatctcgcctgctgtatcacggttggtgacctcaatggtcaccagtttggcggcaaagacaagtacaactaatcgagctctgacaaactcccctggtgaaccagctacaacagtttcattggtcacgcatyctgcacagaccagcccaacagttccctggacaacttccatttttttccatagtaaatcagacaccacaccttcaatgaccaccagtcatggggcagaatccagttcagctgttccaactccaactgtttcaactgaggtaccaggagtagtgacccctttggtcaccagttctagggcagtgatcagtacaactattccaattctgactctttctcctggtgaaccagagaccacaccttcaatggccaccagkcatggggaagaagccagttctgctattccaactccaactgtttcacctggggtaccaggagtggtgacctctctggtcactagttctagggcagtgactagtacaactattccaattctgactttttctcttggtgaaccagagaccacaccttcaatggscaccagtcatgggacagaagctggctcagctgttccaactgttttacctgaggtaccaggaatggtgacctctctggttgctagttctagggcagtaaccagtacaactcttccaactctgactctttctcctggtgaaccagagaccacaccttcaatggccaccagtcatggggcagaagccagctcaactgttccaactgtttcacctgaggtaccaggagtggtgacctctctggtcactagttctagtggagtaaacagtacaagtattccaactctgattctttctcctggtgaactagaaaccacaccttcaatggccaccagtcatggggcagaagccagctcagctgttccaactccaactgtttcacctggggtatcaggartggtgacccctctggtcactagttccagggcagtgaccagtacaactattccaattctaactctttcttctagtgagccagagaccacaccttcaatggccaccagtcatggggtagaagccagctcagctgttctaactgtttcacctgaggtaccaggaatggtgacctytctggtcactagttctagagcagtaaccagtacaactattccaactctgactatttcttctgatgaaccagagaccrcaacttcattggtcacccattctgaggcaaagatgatttcagccattccaactttagstgtctcccctactgtacaagggctggtgacttcactggtcactagttctgggtcagagaccagtgcgttttcaaatctaactgttgcctcaagtcaaccagagaccatagactcatgggtcgctcatcctgggacagaagcaagttctgttgttccaactttgactgtctccactggtgagccgtttacaaatatctcattggtcacccatcctgcagagagtagctcaactcttcccaggacaacctcaaggttttcccacagtgaattagacactatgccttctacagtcaccagtcctgaggcagaatccagctcagccatttcaacaactatttcacctggtataccaggtgtgctgacatcactggtcactagctctgggagagacatcagtgcaacttttccaacagtgcctgagtccccacatgaatcagaggcaacagcctcatgggttactcatcctgcagtcaccagcacaacagttcccaggacaacccctaattattctcatagtgaaccagacaccacaccatcaatagccaccagtcctggggcagaagccacttcagattttccaacaataactgtctcacctgatgtaccagatatggtaacctcacaggtcactagttctgggacagacaccagtataactattccaactctgactctttcttctggtgagccagagaccacaacctcatttatcacctattctgagacacayacaagttcagccattccaactctccctgtctcccctgrtgcatcaaagatgctgacctcactggtcatcagttctgggacagacagcactacaactttcccaacactgacggagaccccatatgaaccagagacaacagccatacagctcattcatcctgcagagaccaacacaatggttcccaggacaactcccaagttttcccatagtaagtcagacaccacactcccagtagccatcaccagtcctgggccagaagccagttcagctgtttcaacgacaactatctcacctgatatgtcagatctggtgacctcactggtccctagttctgggacrgacaccagtacaaccttcccaacattgagtgagaccccatatgaaccagagactacagccacgtggctcactcatcctgcagaaaccagmacaacggtttctgggacaattcccaacttttcccataggggatcagacactgcaccctcaatggtcaccagtcctggagtagacacgaggtcaggtgttccaactacaaccatcccacccagtataccaggggtagtgacctcacaggtcactagttctgcaacagacactagtacagctattccaactttgactccttctcctggtgaaccagagaccacagcctcatcagctacccatcctgggacacagactggcttcactgttccaattcggactgttccctctagtgagccagatacaatggcttcctgggtcactcatcctccacagaccagcacacctgtttccagaacaacctccagtttttcccatagtagtccagatgccacacctgtaatggccaccagtcctaggacagaagccagttcagctgtactgacaacaatctcacctggtgcaccagagatggtgacttcacagatcactagttctggggcagcaaccagtacaactgttccaactttgactcattctcctggtatgccagagaccacagccttattgagcacccatcccagaacagagacaagtaaaacatttcctgcttcaactgtgtttcctcaagtatcagagaccacagcctcactcaccattagacctggtgcagagactagcacagctctcccaactcagacaacatcctctctcttcaccctacttgtaactggaaccagcagagttgatctaagtccaactgcttcacctggtgtttctgcaaaaacagccccactttccacccatccagggacagaaaccagcacaatgattccaacttcaactctttcccttggtttactagagactacaggcttactggccacmagctcttcagcagagaccagcasgagtactctaactctgactgtttcccctgctgtctctgggctttccagtgcctctataacaactgataagmcccaaactgtgacctcctggaacacagaaacctcaccatctgtaacttcagttggacccccagaattttccaggaytgtcacaggcaccactatgaccttgataccatcagagatgccaacaccacctaaaaccagtcatggagaaggagtgagtccaaccactatcttgagaactacaatggttgaagccactaatttagctaccacaggttccagtcccactgtggccaagacaacaaccaccttcaatacactggctggaagcctctttactcctctgaccacacctgggatgtccaccttggcctctgagagtgtgacctcaagaacaagttataaccatcggtcctggatctccaccaccagcagttataaccgtcggtactggacccctgccaccagcactccagtgacttctacattctccccagggatttccacatcctccatccccagctccacagcagccacagtcccattcatggtgccattcaccctcaacttcaccatcaccaacctgcagtacgaggaggacatgcggcaccctggttccaggaagttcaacgccacagagagagaactgcagggtctgctcaaacccttgttcaggaatagcagtctggaatacctctattcaggctgcagactagcctcactcaggccagagaaggatagctcagccayggcagtggatgccatctgcacacatcgccctgaccctgaagacctcggactggacagagagcgactgtactgggagctgagcaatctgacaaatggcatccaggagctgggcccctacaccctggaccggaacagtctctatgtcaatggtttcacccatcgaagctctatgcccaccaccagcactcctgggacctccacagtggatgtgggaacctcagggactccatcctccagccccagccccacgactgctggccctctcctgatgccgttcaccctcaacttcaccatcaccaacctgcagtacgaggaggacatgcgtcgcactggctccaggaagttcaacaccatggagagtgtcctgcagggtctgcttggtcccatgttcaagaacaccagtgttggccctctgtactctggctgcagactgaccttgctcaggtccgagaaggatggagcagccactggagtggatgccatctgcacccaccgtcttgaccccaaaagccctggagtggacagggagcagctatactgggagctgagccagctgaccaatggcatcaaagagctgggtccctacaccctggacagaaacagtctctatgtcaatggtttcacccatcagactgctggccctctcctggtgccattcaccctcaacttcaccatcaccaacctgcagtacgaggaggacatgcatcacccaggctccaggaagttcaacaccacggagcgggtcctgcagggtctgcttggtcccatgttcaagaacaccagtgtcggccttctgtactctggctgcagactgaccttgctcaggcctgagaagaatggggcagccactggaatggatgccatctgcagccaccgtcttgaccccaaaagccctggactcaacagagagcagctgtactgggagctgagccagctgacccatggcatcaaagagctgggcccctacaccctggacaggaacagtctctatgtcaatggtttcacccatcggagctctgtggcccccaccagcactcctgggacctccacagtggaccttgggacctcagggactccattctccctccccagccccacaacagctgttcctctcctggtgccgttcaccctcaactttaccatcaccaatctgcagtatggggaggacatgcgtcaccctggctccaggaagttcaacaccacagagagggtcctgcagggtctgcttggtcccttgttcaagaactccagtgtcggccctctgtactctggctgcagactgatctctctcaggtctgagaaggatggggcagccactggagtggatgccatctgcacccaccaccttaaccctcaaagccctggactggacagggagcagctgtactggcagctgagccagatgaccaatggcatcaaagagctgggcccctacaccctggaccggaacagtctctacgtcaatggcttcacccatcggagctctgtgccaaccaccagtattcctgggacctctgcagtgcacctggaaacctctgggactccagcctccctccctggccacacagcccctggccctctcctggtgccattcaccctcaacttcactatcaccaacctgcagtatgaggaggacatgcgtcaccctggttccaggaagttcaacaccacggagagagtcctgcaggctgctggccctctcctggtgccattcaccctmaacttcaccatcaccaacctgcagtatgaggaggacatgcatcgccctggatctaggaagttcaacrccacagagagggtcctgcagggtctgcttagtcccatwttcaagaactccagtgttggccctctgtactctggctgcagactgacctacagagagcagctgtactgggagctaagccagctgacccacaacatcactgagctgggcccctacagcctggacagggacagtctctatgtcaacttcaccatcactaacctgcggtatgaggagaacatgcatcaccctggctctagaaagtttaacaccacggagagagtccttcagggtctgctcaggcctgtgttcaagaacaccagtgttggccctctgtactctggctgcagactgaccttgctcaggcccaagaaggatggggcagccaccaaagtggatgccatctgcacctaccgccctgatcccaaaagccctggactggacagagagcagctatactgggagctgagccagctracccacagcatcactgagctgggcccctacaccctggacagggacagtctctatgtcaatggtttcacacagcggagctctgtgcccaccacacagccactggccctgtcctgctgccattcaccctcaattttaccatcaytaacctgcagtatgaggaggacatgcrtcgccctggctccaggaagttcaacaccacggagagggtccttcagggtctggcccttgttcaagaacaccagtgtcagctctctgtactctggttgcagactgaccttgctcaggcctgagaaggatggggcagccaccagagtggatgctgtctgcacccatcgtcctgaccccaaaagccctggactggacagagagcggctgtactggaagctgagccagctgacccacggcatcactgagctgggcccctacaccctggacaggcacagtctctatgtcaatggtttcacccatcagagctctatgacgaccaccagaactcctgatacctccacaatgcacctggcaacctcgagaactccagcctccctgtctggaccyaygacaggcctgaaaaggatgggacagccactggagtggatgccatctgcacccaccacccctgaccccaaaagccctaggctggacagagagcagctgtattgggagctgagccagctgacccacaatatcactgagctgggcccctatgccctggacaacgacagcctctttgtcaatggtttcactcatcggagctctgtgtccaccaccagcactcctgggacccccacagtgtatctgggagcatctaagactccagcctcgatatttggcccttcagctgccagccatctcctgatactattcaccctcaacttcaccatcactaacctgcggtatgaggagaacatgtggcctggctccaggaagttcaacactacagagagggtccttcagggcctgctaaggcccttgttcaagaacaccagtgttggccctctgtactctggctgcaggctgaccttgctcaggccagagaaagatggggaagccaccggagtggatgccatctgcacccaccgccctgaccccacaggccctgggctggacagagagcagctgtatttggagctgagccagctgacccacagcatcactgagctgggcccctacacactggacagggacagtctctatgtcaatggtttcacccatcggagctctgtacycaccaccagsaccggggtggtcagcgaggagccattcacactgaacttcaccatcaacaacctgcgctacatggcggacatgggccaacccggctccctcaagttcaacatcacagacaacgtcatgmagcacctgctcagtcctttgttccagaggagcagcctgggtgcacggtacacaggctgcagggtcatcgcactaaggtctgtgaagaacggtgctgagacacgggtggacctcctctgcacctacctgcagcccytcagcggcccaggtctgcctatcaagcaggtgttccatgagctgagccagcagacccatggcatcacccggctgggcccctactctctggacaaagacagcctctaccttaacggttacaatgaacctggtccagatgagcctcctacaactcccaagccagccaccacattcctgcctcctctgtcagaagccacaacagccatggggtaccacctgaagaccctcacactcaacttcaccatctccaatctccagtattcaccagatatgggcaagggctcagctacattcaactccaccgagggggtccttcagcacctgctcagacccttgttccagaagagcagcatgggccccttctacttgggttgccaactgatctccctcaggcctgagaaggatggggcagccactggtgtggacaccacctgcacctaccaccctgaccctgtgggccccgggctggacatacagcagctttactgggagctgagtcagctgacccatggtgtcacccaactgggcttctatgtcctggacagggatagcctcttcatcaatggctatgcaccccagaatttatcaatccggggcgagtaccagataaatttccacattgtcaactggaacctcagtaatccagaccccacatcctcagagtacatcaccctgctgarggacatccaggacaaggtcaccacactctacaaaggcmgtcaactacatgacacattccgcttctgcctggtcrccaacttgacgatggactccgtgttggtcactgtcaaggcattgttctcctccaatttggaccccagcctggtggagcaagtctttctagataagaccctgaatgcctcattccattggctgggctccacctaccagttggtggacatccatgtgacagaaatggagtcatcagtttatcaaccaacaagcagctccagcacccagcacttctacctgaatttcaccatcaccaacctaccatattcccaggacaaagcccagccaggcaccaccaattaccagaggaacaaaaggaatattgaggatgcgctcaaccaactcttccgaaacagcagcatcaagagttatttttctgactgtcaagtttcaacattcaggtctgtccccaacaggcaccacaccggggtggactccctgtgtaacttctcgccactggctcggagagtagacagagttgccatctatgaggaatttctgcggatgacccggaatggtacccagctgcagaacttcaccctggacaggagcagtgtccttgtggatgggtattctcccaacagaaatgagcccttaactgggaattctgaccttcccttctgggctgtcatcctcatcggcttggcaggactcctgggastcatcacatgcctgatctgcggtgtcctggtgaccacccrccggcggaagaaggaaggagaatacaacgtccagcaacagtgcccaggctactaccagtcacacctagacctggaggatctgcaatgactggaacttgccggtgcctggggtgcctttcccccagccagggtccaaagaagcttggctggggcagaaataaaccatattggtcgg

SEQ ID NO: 384 - DNA, 43342 bp, Homo sapiens
aagcgttgcacaattcccccaacctccatacatacggcagctcttctagacacaggttttcccaggtcaaatgcggggaccccagccatatctcccaccctgagaaattttggagtttcagggagctcagaagctctgcagaggccaccctctctgaggggattcttcttagacctccatccagaggcaaatgttgacctgtccatgctgaaaccctcaggccttcctgggtcatcttctcccacccgctccttgatgacagggagcaggagcactaaagccacaccagaaatggattcaggactgacaggagccaccttgtcacctaagacatctacaggtgcaatcgtggtgacagaacatactctgccctttacttccccagataagaccttggccagtcctacatcttcggttgtgggaagaaccacccagtctttgggggtgatgtcctctgctctccctgagtcaacctctagaggaatgacacactccgagcaaagaaccagcccatcgctgagtccccaggtcaatggaactccctctaggaactaccctgctacaagcatggtttcaggattgagttccccaaggaccaggaccagttccacagaaggaaattttaccaaagaagcatctacatacacactcactgtagagaccacaagtggcccagtcactgagaagtacacagtccccactgagacctcaacaactgaaggtgacagcacagagaccccctgggacacaagatatattcctgtaaaaatcacatctccaatgaaaacatttgcagattcaactgcatccaaggaaaatgccccagtgtctatgactccagctgagaccacagttactgactcacatactccaggaaggacaaacccatcatttgggacactttattcttccttccttgacctatcacctaaagggaccccaaattccagaggtgaaacaagcctggaactgattctatcaaccactggatatcccttctcctctcctgaacctggctctgcaggacacagcagaataagtaccagtgcgcctttgtcatcatctgcttcagttctcgataataaaatatcagagaccagcatattctcaggccagagtctcacctcccctctgtctcctggggtgcccgaggccagagccagcacaatgcccaactcagctatccctttttccatgacactaagcaatgcagaaacaagtgccgaaagggtcagaagcacaatttcctctctgggkactccatcaatatccacaaagcagacagcagagactatccttaccttccatgccttcgctgagaccatggatatacccagcacccacatagccaagactttggcttcagaatggttgggaagtccaggtacccttggtggcaccagcacttcagcgctgacaaccacatctccatctaccactttagtctcagaggagaccaacacccatcactccacgagtggaaaggaracagaaggaactttgaatacatctatgactccacttgagacctctgctcctggagaagagtccgaaatgactgccaccttggtccccactctaggttttacaactcttgacagcaagatcagaagtccatctcaggtctcttcatcccacccaacaagagagctcagaaccacaggcagcacctctgggaggcagagttccagcacagctgcccacgggagctctgacatcctgagggcaaccacttccagcacctcaaaagcatcatcatggaccagtgaaagcacagctcagcaatttagtgaaccccagcacacacagtgggtggagacaagtcctagcatgaaaacagagagacccccagcatcaaccagtgtggcagcccctatcaccacttctgttccctcagtggtctctggcttcaccaccctgaagaccagctccacaaaagggatttggcttgaagaaacatctgcagacacactcatcggagaatccacagctggcccaaccacccatcagtttgctgttcccactgggatttcaatgacaggaggcagcagcaccaggggaagccagggcacaacccacctactcaccagagccacagcatcatctgagacatccgcagatttgactctggccacgaacggtgtcccagtctccgtgtctccagcagtgagcaagacggctgctggctcaagtcctccaggagggacaaagccatcatatacaatggtttcttctgtcatccctgagacatcatctctacagtcctcagctttcagggaaggaaccagcctgggactgactccattaaacactagacatcccttctcttcccctgaaccagactctgcaggacacaccaagataagcaccagcattcctctgttgtcatctgcttcagttcttgaggataaagtgtcagcgaccagcacattctcacaccacaaagccacctcatctattaccacagggactcctgaaatctcaacaaagacaaagcccagctcagccgttctttcctccatgaccctaagcaatgcagcaacaagtcctgaaagagtcagaaatgcaacttcccctctgactcatccatctccatcaggggaagagacagcagggagtgtcctcactctcagcacctctgctgagactacagactcacctaacatccacccaactgggacactgacttcagaatcgtcagagagtcctagcactctcagcctcccaagtgtctctggagtcaaaaccacattttcttcatctactccttccactcatctatttactagtggagaagaaacagaggaaacttcgaatccatctgtgtctcaacctgagacttctgtttccagagtaaggaccaccttggccagcacctctgtccctaccccagtattccccaccatggacacctggcctacacgttcagctcagttctcttcatcccacctagtgagtgagctcagagctacgagcagtacctcagttacaaactcaactggttcagctcttcctaaaatatctcacctcactgggacggcaacaatgtcacagaccaatagagacacgtttaatgactctgctgcaccccaaagcacaacttggccagagactagtcccagattcaagacagggttaccttcagcaacaaccactgtttcaacctctgccacttctctctctgctactgtaatggtctctaaattcacttctccagcaactagttccatggaagcaacttctatcagggaaccatcaacaaccatcctcacaacagagaccacgaatggcccaggcwctatggctgtggcttctaccaacatcycaattggaaagggctacattactgaaggaagattggacacaagccatctgcccattggaaccacagcttcctctgagacatctatggattttaccatggccaaagaaagtgtctcaatgtcagtatctccatctcagtccatggatgctgctggctcaagcactccaggaaggacaagccaattcgttgacacattttctgatgatgtctatcatttaacatccagagaaattacaatacctagagatggaacaagctcagctctgactccacaaatgactgcaactcaccctccatctcctgatcctggctctgctagaagcacctggcttggcatcttgtcctcatctccttcttctcctactcccaaagtcacaatgagctccacattttcaactcagagagtcaccacaagcatgataatggacacagttgaaactagtcggtggaacatgcccaacttaccttccacgacttccttgacaccaagtaatattccaacaagtggtgccataggaaaaagcaccctggttcccttggacactccatctccagccacatcattggaggcatcagaagggggacttccaaccctcagcacctaccctgaatcaacaaacacacccagcatccacctcggagcacacgctagttcagaaagtccaagcaccatcaamcttaccatggcttcagtagtaaaacctggctcttacacacctctcaccttcccctcaatagagacccacattcatgtatcaacagccagaatggcttactcttctgggtcttcacctgagatgacagctcctggagagactaacactggtagtacctgggaccccaccacctacatcaccactacggatcctaaggatacaagttcagctcaggtctctacaccccactcagtgaggacactcagaaccacagaaaacyatccaaagacagagtccgccaccccagctgcttactctggaagtcctaaaatctcaagttcacccaatctcaccagtccggccacaaaagcatggaccatcacagacacaactgaacactccactcaattacattacacaaawttggcagaaaaatcatctggatttgagacacagtcagctccaggacctgtctctgtagtaatccctacctcccctaccattggaagcagcacattggaactaacttctgatgtcccaggggaacccctggtccttgctcccagtgagcagaccacaatcactctccccatggcaacatggctgagtaccagtttgacagaggaaatggcttcaacagaccttgatatttcaagtccaagttcacccatgagtacatttgctatttttccacctatgtccacaccttctcatgaactttcaaagtcagaggcagataccagtgccattagaaatacagattcaacaacgttggatcagcacctaggaatcaggagtttgggcagaactggggacttaacaactgttcctatcaccccactgacaaccacgtggaccagtgtgattgaacactcaacacaagcacaggacaccctttctgcaacgatgagtcctactcacgtgacacagtcactcaaagatcaaacatctataccagcctcagcatccccttcccatcttactgaagtctaccctgagctcgggacacaagggagaagctcctctgaggcaaccactttttggaaaccatctacagacacactgtccagagagattgagactggcccaacaaacattcaatccactccacccatggacaacacaacaacagggagcagtagtagtggagtcaccctgggcatagcccaccttcccataggaacatcctccccagctgagacatccacaaacatggcaytggaaagaagaagttctacagccactgtctctatggctgggacaatgggactccttgttactagtgctccaggaagaagcatcagccagtcattaggaagagtttcctctgtcctttctgagtcaactactgaaggagtcacagattctagtaagggaagcagcccaaggctgaacacacagggaaatacagctctctcctcctctcttgaacccagctatgctgaaggaagccagatgagcacaagcatccctctaacctcatctcctacaactcctgatgtggaattcatagggggcagcacattttggaccaaggaggtcaccacagttatgacctcagacatctccaagtcttcagcaaggacagagtccagctcagctacccttatgtccacagctttgggaagcactgaaaatacaggaaaagaaaaactcagaactgcctctatggatcttccatctccaactccatcaatggaggtgacaccatggatttctytcactctcagtaatgcccccaataccacagattcacttgacctcagccatggggtgcacaccagctctgcagggactttggccactgacaggtcattgaatactggtgtcactagagcctccagattggaaaacggctctgatacctcttctaagtccctgtctatgggaaacagcactcacacttccatgactkacacagagaagagtgaagtgtcttcttcaatccatccccgacctgagacctcagctcctggagcagagaccactttgacttccactcctggaaacagggccataagcttaacattgcctttttcatccattccagtggaagaagtcatttctacaggcataaccycaggaccagacatcaactcagcacccatgacacattctcccatcaccccaccaacaattgtatggaccagtacaggcacaattgaacagtccactcaaccactacatgcagtttcttcagaaaaagtttctgtgcagacacagtcaactccatatgtcaactctgtggcagtgtctgcttcccctacccatgagaattcagtctcttctggaagcagcacatcctctccatattcctcagcctcacttgaatccttggattccacaatcagtaggaggaatgcaatcacttcctggctatgggacctcactacayctctccccactacaacttggccaagtactagtttatctgaggcactgtcctcaggccattctggggtttcaaacccaagttcaactacgactgaatttccactcttttcagctgcatccacatctgctgctaagcaaagaaatccagaaacagagacccatggtccccagaatacagccgcgagtactttgaacactgatgcatcctcggtcacaggtctttctgagactcctgtgggggcaagtatcagctctgaagtccctcttccaatggccrtaacttctagatcagatgtttctggccttacatctgagagtactgctaacccgagtttaggcacagcctcttcagcagggaccaaattaactaggacaatatccctgcccacttcagagtctttggtttcctttagaatgaacaaggatccatggacagtgtcaatccctttggggtcccatccaactactaatacagaaacaagcatcccagtaaacagcgcaggtccacctggcttgtccacagtagcatcagatgtaattgacacaccttcagatggggctgagagtattcccactgtctccttttccccctcccctgatactgaagtgacaactatctcacatttcccagaaaagacarctcattcatttagaaccatttcatctctcactcatgagttgacttcaagaktgacacctattcctggggattggatgagttcagctatgtctacaaagcccacaggagccagtccctccattacactgggagagagaaggacaatcacctctgctgctccaaccacttcccccatagttctcactgctagtttcacrgagaccagcacagtttcactggataatgaaactacagtaaaaacctcagatatccttgasgcacggaaaacaaatgagctcccctcagatagcagttcttcttctgatctgatcaacacctccatagcttcttcaactatggatgtcactaaaacagcctccatcagtcccactagcatctcaggaatgacagcaagttcctccccatctctcttctcttcagatagaccccaggttcccacatctacaacagagacaaatacagccacctctccatctgtttccagtaacacctattctcttgatgggggctccaatgtgggtggcactccatccactttaccaccctttacaatcacccaccctgtcgagacaagctcggccctattagcctggtctagaccagtaagaactttcagcaccatggtcagcactgacactgcctccggagaaaatcctacctctagcaattctgtggtgacttctgttccagcaccaggtacatggrccagtgtaggcagtactactgacttacctgccatgggctttctcaagacaagtcctgcaggagaggcacactcacttctagcrtcaactattgaaccagccactgccttcactccycatctctcagcagcagtggtcactggatccagtgctacatcagaagccagtcttctcactacgagtgaaagcaaagccattcattcttcaccacagaccccaactacacccacctctggagcaaactgggaaacttcagctactcctgagagccttttggtagtcactgagacttcagacacaacacttacctcaaagattttggtcacagataccatcttgttttcaactgtgtccacgccaccttctaaatttccaagtacggggactctgtctggagcttccttccctactttactcccggacactccagccatccctctcactgccactgagccaacaagttcattagctacatcctttgattccaccccactggtgactatagcttcrgatagtcttggcacagtcccagagactaccctgaccatgtcagagacctcaaatggtgatgcactggttcttaagacagtaagtaacccagataggagcatccctggaatcactatccaaggagtaacagaaagtccactccatccttcttccacttccccctctaagattgttgctccacggaatacaacctatgaaggttcgatcacagtgrcactttctactttgcctgcgggaactactggttcccttgtattcagtcagagttctgaaaactcagagacaacggctttggtagactcatcagctgggcttgagagggcatctgtgatgccactaaccacaggaagccagggtatggcyagctctggaggaatcagaagtgggtccactcactcaactggaaccaaaacattttcttctctccctctgaccatgaacccaggtgaggttacagccatgtctgaaatcaccaygaacagactgacagctactcaatcaacagcacccaaagggatacctgtgaagcccaccagtgctgagtcaggcctcctaacacctgtctctgcctcctcaagcccatcaaaggcctttgcctcactgactacagctcccycaacttgggggatcccacagtctaccttgayatttgagttttctgaggtyccaagtttggatactaagtccgcttctttaccaactcctggacagtccctgaacaccattccagactcagatgcaagcacagcatcttcctcactgtccaagtctccagaaaaaaacccaagggcaaggatgatgacttccacaaaggccataagtgcaagctcatttcaatcaacaggttttactgaaacccctgagggatctgcctccccttctatggcagggcatgaacccagagtccccacttcaggaacaggggaccctagatatgcctcagagagcatgtcttatccagacccaagcaaggcatcatcagctatgacatcgacctctcttgcatcaaaactcacaactctcttcagcacaggtcaagcagcaaggtctggttctagttcctctcccataagcctatccactgagaaagaaacaagcttcctttcccccactgcatccacctccagaaagacttcactatttcttgggccttccatggcaaggcagcccaacatattggtgcatcttcagacttcagctctgacactttctccaacatccactctaaatatgtcccaggaggagcctcctgagttaacctcaagccagaccattgcagaagaagagggaacaacagctgaaacacagacgttaaccttcacaccatctgagaccccaacatccttgttacctgtctcttctcccacagaacccacagccagaagaaagagttctccagaaacatgggcaagctctatttcagttcctgccaagacctcsttggttgaaacaactgatggaacgctagtgaccaccataaagatgtcaagccaggcagcacaaggaaattccacgtggcctgccccagcagaggagacggggascagtccagcaggcacatccccaggaagcccagaaatgtctaccactctcaaaatcatgagctccaaggaacccrgcatcagcccagagatcaggtccactgtgagaaattctccttggaagactccagaaacaactgttcccatggagaccacagtggaaccagtcacccttcagtccacagccctaggaagtggcagcaccagcatctctcacctgcccacaggaaccacatcaccaaccaagtcaccaacagaaaatatgttggctacagaaagggtctccctctccccatccccacctgaggcttggaccaacctttattctggaactccaggagggaccaggcagtcactggccacaatgtcctctgtctccctagagtcaccaactgctagaagcatcacagggactggtcagcaaagcagtccagaactggtttyaaagacaactggaatggaattctctatgtggcatggctctactggagggaccacaggggacacacatgtctctctgagcacatcttccaatatccttgaagaccctgtaaccagcccaaactctgtgagctcattgacagataaatccaaacataaaaccgagacatgggtmagcaccacagccattccctccactgtcctgaataataagataatggcagctgaacaacagacaagtcratctgtggatgaggcttattcatcaactagttcttggtcagatcagacatctgggagtgacatcacccttggtgcatctcctgatgtcacaaacacattatacatcacctccacagcacaaaccacctcactagtrtctctgccctctggagaccaaggcattacaagcctcaccaatccctcaggaggaaaaacaagctctgcrtcatctgtcacatctccttcaatagggcttgagactctgakggccaatgtaagtgcagtgamaagtgacattgcccctactgctgggcatctatctcagacttcatctcctgcggaagtgagcatcctggacrtaaccacagctcctactccaggtatctccaccaccatcaccaccatgggaaccaactcaatctcaactaccacacccaacccagaagtgggtatgagtaccatggacagcaccccggccacagagaggcrcacaacttctacagaacacccttccacctggtcttccacagctgcatcagattcctggactgtcacagacatgacttcaaacttgaaagttgcaagatctcctggaacaatttccacaatgcatacaacttcattcttagcctcaagcactgaattagactccatgtctactccccatggccgtataactgtcattggaaccagcctggtcactccatcctctgatgcttcagctgtaaagacagagaccagtacaagtgaaagaacattgagtccttcagacacaactgcatctactcccatctcaactttttctcgtgtccagaggatgagcatctcagttcctgacattttaagtacaagttggactcccagtagtacagaagcagaagatgtgcctgtttcaatggtttctacagatcatgctagtacaaagactgacccaaataygcccctgtccacttttctgtttgattctctgtccactcttgactgggacactgggagatctctgtcatcagccacagccactacctcagctcctcagggggccacaactccccargaactcactttggaaaccatgatcagcccagctacctcacagttgcccttctctatagggcacattacaagtgcagtcayaccagctgcaatggcaaggagctctggagttactttttcaagaccagatcccacaagcaaaaaggcagagcagacttccactcagcttcccaccaccacttctgcacatccagrgcaggtgcccagatcagcagcaacaactctggatgtgatcccacacacagcaaaaactccagatgcaacttttcagagacaagggcagacagctcttacaacagaggcaagagctacatctgactcctggaatgagaaagaaaaatcaaccccaagtgcaccttggatcactgagatgatgaattctgtctcagaagataccatcaaggaggttaccagctcctccagtgtrttaaggaccctgaatacgctggacataaacttggaatctgggacgacttcatccccaagttggaaaagcagcccatatgagagaattgccccttctgagtcyaccacagacaaagaggcaattcacccttctacaaacacagtagagaccacwggctgggtcacaagttccgaacatgcttctcattccactatcccagcccactcagcgtcatccaaactcacatctccagtggttacaacctccaccagggaacaagcaatagtttctatgtcaacaaccacatggccagagtctacaagggctagaacagagcctaattccttcttgactattgaactgagggacgtcagcccttacatggacaccagctcaaccacacaaacaagtwttatctcttccccaggttccactgcgatcaccaaggggcctagaacagaaattacctcctctaagagaatatccagctcattccttgcccagtctatgaggtcgtcagacagcccctcagaagccatcwccaggctgtctaactttcctgccatgacagaatctggaggaatgatccttgctatgcaaacaagtccacctggcgctacatcactaagtgcacctactttggatacatcagccacagcctcctggacagggactccactggctacgactcagagatttacatactcagagaagaccactctctttagcaaaggtcctgaggatacatcacagccaagccctccctctgtggaagaaaccagctcttcctcttccctggtacctatcmatgctacaacctcgccttccaatattttgttgacatcacaagggcacagtccctcctctactccacctgtgacctcagttttcttgtctgagacctctggcctggggaagaccacagacatgtcgaggataagcttggaacctggcacaagtttacctcccaatttgagcagtacagcaggtgaggcgttatccacttatgaagcctccagagatacaaaggcaattcatcattctgcagacacagcagtgacgaatatggaggcaaccagttctgaatattctcctatcccaggccatacaaagccatccaaagccacatctccattggttacctcccacatcatgggggacatcacttcttccacatcagtatttggctcctccgagaccacagagattgagacagtgtcctctgtgaaccagggacttcaggagagaagcacatcccaggtggccagctctgctacagagacaagcactgtcattacccatgtgtctagtggtgatgctactactcatgtcaccaagacacaagccactttctctagcggaacatccatctcaagccctcatcagtttataacttctaccaacacatttacagatgtgagcaccaacccctccacctctctgataatgacagaatcttcaggagtgaccatcaccacccaaacaggtcctaytggagctgcaacacagggtccatatctcttggacacatcaaccatgccttacttgacagagactccattagctgtgactccagattttatgcaatcagagaagaccactctcataagcaaaggtcccaaggatgtgtcctggacaagccctccctctgtggcagaaaccagctatccctcttccctgacacctttcttggtcacaaccatacctcctgccacttccacgttacaagggcaacatacatcctctcctgtttctgcgacttcagttcttacctctggactggtgaagaccacagatatgttgaacacaagcatggaacctgtgaccaattcacctcaaaatttgaacaatccatcaaatgagatactggccactttggcagccaccacagatatagagactattcatcctyccataaacaaagcagtgaccaatatggggactgccagttcagcacatgtactgcattccactctcccagtcagctcagaaccatctacagccacatctccaatggttcctgcctccagcatgggggacgctcttgcttctatatcaatacctggttctgagaccacagacattgagggagagccaacatcctccctgactgctggacgaaaagagaacagcaccctccaggagatgaactcaactacagagtcaaacatcatcctctccaatgtgtctgtgggggctattactgaagccacaaaaatggaagtcccctcttttgatgcaacattcataccaactcctgctcagtcaacaaagttcccagatattttctcagtagccagcagtagactttcaaactctcctcccatgacaatatctacccacatgaccaccacccagacagggtcttctggagctacatcaaagattccacttgccttagacacatcaaccttggaaacctcagcagggactccatcagtggtgactgaggggtttgcccactcaaaaataaccactgcaatgaacaatgatgtcaaggacgtgtcacagacaaaccctccctttcaggatgaagccagctctccctcttctcaagcacctgtccttgtcacaaccttaccttcttctgttgctttcacaccgcaatggcacagtacctcctctcctgtttctatgtcctcagttcttacttcttcactggtaaagaccgcaggcaaggtggatacaagcttagaaacagtgaccagttcacctcaaagtatgagcaacactttggatgacatatcggtcacttcagcagccaccacagatatagagacaacgcatccttccataaacacagtagttaccaatgtggggaccaccggttcagcatttgaatcacattctactgtctcagcttacccagagccatctaaagtcacatctccaaatgttaccacctccaccatggaagacaccacaatttccagatcaatacctaaatcctctaagactacaagaactgagactgagacaacttcctccctgactcctaaactgagggagaccagcrtctcccaggagatcacctcgtccacagagacaagcactgttccttacaaagagctcactggtgccactaccgaggtatccaggacagatgtcacttcctctagcagtacatccttccctggccctgatcagtccacagtgtcactagacatctccacagaaaccaacaccaggctgtctacctccccaataatgacagaatctgcagaaataaccatcaccacccaaacaggtcctcatggggctacatcacaggatacttttaccatggacccatcaaatacaaccccccaggcagggatccactcagctatgactcatggattttcacaattggatgtgaccactcttatgagcagaattccacaggatgtatcatggacaagtcctccctctgtggataaaaccagctccccctcttcctttctgycctcacctgcaatgacmacaccttccctgatttcttctaccttaccagaggataagctctcctctcctatgacttcacttctcacctctggcctagtgaagattacagacatattacgtacacgcttggaacctgtgaccagctcacttccaaatttcagcagcacctcagataagatactggccacttctaaagacagtaaagacacaaaggaaatttttccttctataaacacagaagagaccaatgtgaaagccaacaactctggacatgaatcccattcccctgcactggctgactcagagacacccaaagccacaactcaaatggttatcaccaccactgtgggagatccagctccttccacatcaatgccagtgcatggttcctctgagaytacaaacattaagagagagccaacatatttcttgactcctagactgagagagaccagtacctctcaggagtccagctttcccacggacacaagttttctactttccaaagtccccactggtactattactgaggtctccagtacaggggtcawctcttctagcaaaatttccaccccagaccatgataagtccacagtgccacctgacaccttcacaggagagatccccagggtcttcacctcctctattaagacaaaatctgcagaaatgacgatcaccacccaagcaagtcctcctgagtctgcatcgcacagtacccttcccttggacacatcaaccacactttcccagggagggactcattcaactgtgactcagggattcccatactcagaggtgaccactctcatgggcatgggtcctgggaatgtgtcatggatgacaactccccctgtggaagaaaccagctctgtgtcttccctgatgtcttcacctgccatgacatccccttctcctgtttcctccacatcaccacagagcatcccctcctctcctcttcctgtgactgcacttcctacttctgttctggtgacaaccacagatgtgttgggcacaacaagcccagagtctgtaaccagttcacctccaaatttgagcagcatcactcatgagagaccggccacttacaaagacactgcacacacagaagccgccatgcmtcattccacaaacaccgcagtgaccaatgtagggacttccgggtctggacataaatcacaatcctctgtcctagctgactcagagacatcgaaagccacacctctgatgagtaccacctccaccctgggggacacaagtgtttccacatcaactcctaatatctctcagactaaccaaattcaaacagagccaacagcatccctgagccctagactgagggagagcagcacgtctgagaagaccagctcaacaacagagacaaatactgccttttcttatgtgcccacaggtgctattactcaggcctccagaacagaaatctcctctagcagaacatccatctcagaccttgatcggyccacaatagcacccgacatctccacaggaatgatcaccaggctcttcacctcccccatcatgacaaaatctgcagaaatgaccgtcaccactcaaacaactactcctggggctacatcacagggtatccttccctgggacacatcaaccacacttttccagggagggactcattcaaccgtgtctcagggattcccacactcagagataaccactcttcggagcagaacccctggagatgtgtcatggatgacaactccccctgtggaagaaaccagctctgggttttccctgatgtcaccttccatgacatccccttctcctgtttcctccacatcaccagagagcatcccctcctctcctctccctgtgactgcacttcttacttctgttctggtgacaaccacaaatgtattgggcacaacaagcccagagmccgtaacgagttcacctccaaatttaagcagccccacacaggaragactgaccacttacaaagacactgcgcacacagaagccatgcatgcttccatgcatacaaacactgcagtggccaacgtggggacctccattkctggacatgaatcacaatcttctgtcccagctgattcasacacatccaaagccacatctccaatgggtaycaccttcrccatgggggatacaagtgtttctacatcaactcctgccttctttgagactagaattcagactgaatcaacatcctctttgattcctggattaagggacaccaggacstctgaggagatcaacactgtgacagagaccagcactgtcctttcagaagtgcccactactactactactgaggtctccaggacagaagttatcacttccagcagaacaaccatctcagggyctgatcattccaaaatgtcaccctacatctccacagaaaccatcaccaggctctccacttttcctkttgtaacaggatccacagaaatggccatcaccaaccaaacaggtcctatagggactatctcacaggctrcccttaccctggacacatcaagcacagcttyctgggaagggactcactcacctgtgactcagagatttccacactcagaggagaccactactatgagcagaagtactaagggcgtgtcatggcaaagccctccctctgtggaagaaaccagttctccttcttccccagtgcctttacctgcaataacctcacattcatctctttattccgcagtatcaggaagtagccccacttctgctctccctgtgacttcccttctcacctctggcaggaggaagaccatagacatgttggacacacactcagaacttgtgaccagctccttaccaagtgcaagtagcttctcaggtgagatactcacttctgaagcctccacaaatacagagacaattcacttttcagagaacacagcagaaaccaatatggggaccaccaattctatgcataaactacattcctctgtctcaatccactcccagccatccggacacacacctccaaaggttactggatctatgatggaggacgctattgtttccacatcaacacctggttctcctgagactaaaaatgttgacagagactcaacatcccctctgactcctgaactgaaagaggacagcaccgccctggtgatgaactcaactacagagtcaaacactgttttctccagtgtgtccctggatgctgctactgaggtctccagggcagaagtcacctactatgatcctacattcatgccagcttctgctcagtcaacaaagtccccagacatttcacctgaagccagcagcagtcattctaactctcctcccttgacaatatctacacamaagaccatcgccacacaaacaggtccttctggggtgacatctcttggccaactgaccctggacacatcaaccatagccacctcagcaggaactccatcagccagaactcaggattttgtagattcagaaacaaccagtgtcatgaacaatgatctcaatgatgtgttgaagacaagccctttctctgcagaagaagccaactctctctcttctcaggcacctctccttgtgacaacctcaccttctcctgtaacttccacattgcaagagcacagtacctcctctcttgtttctgtgacctcagtacccacccctacactggcgaagatcacagacatggacacaaacttagaacctgtgactcgttcacctcaaaatttaaggaacaccttggccacttcagaagccaccacagatacacacacaatgcatccttctataaacacagcagtggccaatrtggggaccaccagttcaccaaatgaattctattttactgtctcacctgactcagacccatataaagccacatccgcagtagttatcacttccacctcgggggactcaatagtttccacatcaatgcctagatcctctgcgatgaaaaagattgagyctgagacaaytttctccctgatatttagactgagggagactagcacctcccagaaaattggctcatcctcagacacaagcacggtctttgacaaagcattcactgctgctactactgaggtctccagaacagaaytcacctcctctagcagaacatccatccaaggcactgaaaagcccacaatgtcaccggacacctccacaagatctgtcaccatgctttctacttttgctggcctgacaaaatccgaagaaaggaycattgccacccaaacaggtcctcatagggcgacatcacagggtacccttacctgggacacatcaatcacaacctcacaggcagggacccactcagctatgactcatggattttcacaattagatttgtccactcttacgagtagagttcctgagtacatatcagggacaagcccaccctctgtggaaaaaaccagctcttcctcttcccttctgtctttaccagcaataacctcaccgtcccctgtacctactacattaccagaaagtaggccgtcttctcctgttcatctgacttcactccccacctctggcctagtgaagaccacagatatgctggcatctgtggccagtttacctccaaacttgggcagcacctcacataagataccgactacttcagaagacattaaagatacagagaaaatgtatccttccacaaacatagcagtaaccaatgtggggaccaccacttctgaaaaggaatcttattcgtctgtcccagcctactcagaaccacccaaagtcacctctccaatggttacctctttcaacataagggacaccattgtttccacatccatgcctggctcctctgagattacaaggattgagatggagtcaacattctccctggctcatgggctgaagggaaccagcacctcccaggaccccatcgtatccacagagaaaagtgctgtccttcacaagttgaccactggtgctactgagacctctaggacagaagttgcctcttctagaagaacatccattccaggccctgatcattccacagagtcaccagacatctccactgaagtgatccccagcctgcctatctcccttggcattacagaatcttcaaatatgaccatcatcactcgaacaggtcctcctcttggctctacatcacagggcacatttaccttggacacaccaactacatcctccagggcaggaacacactcgatggcgactcaggaatttccacactcagaaatgaccactstcatgaacaaggacyctgagattctatcatggacaatccctycttctatagagaaaaccagcttctcctcttccctgatgccttcaccagccatgacttcacctcctgtttcctcaacattaycaaagaccattcacaccactccttctcctatgacctcactgctcacccctagcctagtgatgaccacagacacattgggcacaagcccaraacctacaaccagttcacctmcaaatttgagcagtacctcacatgagatactgacaacagatgaagacaccacagctatagaagccatgcatccttccacaascacagcagcgactaatgtggaaaccaccagttmtggacatgggtcacaatcctctgtcctagctgactcagaaaaaaccaaggccacagctccaatggataccacctccaccatggggcatacaactgtttccacatcaatgtctgtttcctctgagactacaaaaattaagagagagtcaacatattccttgactcctggactgagagagaccagcatttcccaaaatgccagcttttccactgacacaagtattgttctttcagaagtccccactggtactactgctgaggtctccaggacagaagtcacctcctctggtagaacatccatccctggcccttctcagtccacagttttgccagaaatatccacaagaacaatgacaaggctctttgcctygcccaccatgacagaatcagcagaaatgaccatccccactcaaacaggtccttctgggtctacctcacaggatacccttaccttggacacatccaccacaaagtcccaggcaaagactcattcaactttgrctcagagatttccacactcagagatgaccactctcatgagcagaggtcctggagatatgtcatggcaaagctctccctctctggaaaatcccagctctctcccttccctgctgtctttacctgccacaacctcacctcctcccatttcctccacattaccagtgactatctcctcctctcctcttcctgtgacttcacttctcacctctagcccggtaacgaccacagacatgttacacacaagcccagaacttgtaaccagttcacctccaaagctgagccacacttcagatgagagactgaccactggcaaggacaccacaaatacagaagctgtgcatccttccacaaacacagcagcgtccaatgtggagattcccagctctggacatgaatccccttcctctgccttagctgactcagagacatccaaagccacatcaccaatgtttattacctccacccaggaggatacaactgttgccatatcaacccctcacttcttggagactagcagaattcagaaagagtcaatttcctccctgagccctaaattgagggagacaggcagttctgtggagacaagctcagccatagagacaagtgctgtcctttctgaagtgtccrttggtgctactastgagatctccaggacagaagtcacctcctctagcagaacatccatctctggttctgctgagtccacaatgttgccagaaatatccaccacaagaaaaatcattaagttycctacttcccccatcctggcagaatcatcagaaatgaccatcaagacccaaacaagtcctcctgggtctacatcagagagtacctttacattagacacatcaaccactccctccttggtaataacccattcgactatgactcagagattgccacactcagagataaccactctkgtgagtagaggtgctggggatgtgccacggcccagctctctccctgtggaagaaacaagccctccatcttcccagctgtctttatctgccatgatctcaccttctcctgtttcttccacattaccagcaagtagccactcctcttctgcttctgtgacttcacttctcacaccaggccaagtgaagactactgaggtgttggacgcaagtgcagaacctgaaaccagttcacctccaagtttgagcagcacctcagttgaaatactggccacctctgaagtcaccacagatacggagaaaattcatcctttctcaaacacggcagtaaccaaagttggaacttccagttctggacatgaatccccttcctctgtcctacctgactcagagacaaccaaagccacatcggcaatgggtaccatctccattatgggggatacaagtgtttctacattaactcctgccttatctaacactaggaaaattcagtcagagccagcttcctcactgaccaccagattgagggagaccagcacctctgaagagaccagcttagccacagaagcaaacactgttctttctaaagtgtccactggtgctactactgaggtctccaggacagaagccatctcctttagcagaacatccatgtcaggccctgagcagtccacaatgtcacaagacatctccataggaaccatccccaggatttctgcctcctctgtcctgacagaatctgcaaaaatgaccatcacaacccaaacaggtccttcggagtctacactagaaagtacccttaatttgaacacagcaaccacaccctcttgggtggaaacccactctatagtaattcagggatttccacacccagagatgaccacttccatgggcagaggtcctggaggtgtgtcatggcctagccctccctttgtgaaagaaaccagccctccatcctccccgctgtctttacctgccgtgacctcacctcatcctgtttccaccacattcctagcacatatccccccctctccccttcctgtgacttcacttctcacctctggcccggcgacaaccacagatatcttgggtacaagcacagaacctggaaccagttcatcttcaagtttgagcaccacctcccatgagagactgaccacttacaaagacactgcacatacagaagccgtgcatccttccacaaacacaggagggaccaatgtggcaaccaccagctctggatataaatcacagtcctctgtcctagctgactcatctccaatgtgtaccacctccaccatgggggatacaartgttctcacatcaactcctgccttccttgagactaggaggattcagacagagctagcttcctccctgacccctggattgagggagtccagyggctctgaagggaccagctcaggcaccaagatgagcactgtcctctctaaagtgcccactggtgctactactgagatctccaaggaagacgtcacctccatcccaggtcccgctcaatccacaatatcaccagacatctccacaagaaccgtcagctggttctctacatcccctgtcatgacagaatcagcagaaataaccatgaacacccatacaagtcctttaggggccacaacacaaggcaccagtactttggmcacgtcaagcacaacctctttgacaatgacacactcaactatatctcaaggattttcacactcacagatgagcactcttatgaggaggggtcctgaggatgtatcatggatgagccctccccttctggaaaaaactagaccttccttttctctgatgtcttcaccagccacaacttcaccttctcctgtttcctccacattaccagagagcatctcttcctctcctcttcctgtgacttcactcctcacgtctggcttggcaaaaactacagatatgttgcacaaaagctcagaacctgtaaccaactcacctgcaaatttgagcagcacctcagttgaaatactggccacctctgaagtcaccacagatacagagaaaactcatccttcttcaaacagaacagtgaccgatgtggggacctccagttctggacatgaatccacttcctttgtcctagctgactcacagacatccaaagtcacatctccaatggttattacctccaccatggaggatacgagtgtctccacatcaactcctggcttttttgagactagcagaattcagacagaaccaacatcctccctgacccttggactgagaaagaccagcagctctgaggggaccagcttagccacagagatgagcactgtcctttctggagtgcccactggtgccactgctgaagtctccaggacagaagtcacctcctctagcagaacatccatctcaggctttgctcagctcacagtgtcaccagagacttccacagaaaccatcaccagactccctacctccagcataatgacagaatcagcagaaatgatgatcaagacacaaacagatcctcctgggtctacaccagagagtactcatactgtggacatatcaacaacacccaactgggtagaaacccactcgactgtgactcagagattttcacactcagagatgaccactcttgtgagcagaagccctggtgatatgttatggcctagtcaatcctctgtggaagaaaccagctctgcctcttccctgctgtctctgcctgccacgacctcaccttctcctgtttcctctacattagtagaggatttcccttccgcttctcttcctgtgacttctcttctcamccctggcctggtgataaccacagacaggatgggcataagcagagaacctggaaccagttccacttcaaatttgagcagcacctcccatgagagactgaccactttggaagacactgtagatacagaagmcatgcagccttccacacacacagcagtgaccaacgtgaggacctccatttctggacatgaatcacaatcttctgtcctatctgactcagagacacccaaagccacatctccaatgggtaccacctacaccatgggggaaacgagtgtttccatatccacttctgacttctttgagaccagcagaattcagatagaaccaacatcctccctgacttctggattgagggagaccagcagctctgagaggatcagctcagccacagagggaagcactgtcctttctgaagtgcccagtggtgctaccactgaggtctccaggacagaagtgatatcctctaggggaacatccatgtcagggcctgatcagttcaccatatcaccagacatctctactgaagcgatcaccaggctttctacttcccccattatgacagaatcagcagaaagtgccatcactattgagacaggttctcctggggctacatcagagggtaccctcaccttggacacctcaacaacaaccttttggtcagggacccactcaactgcatctccaggattttcacactcagagatgaccactcttatgagtagaactcctggagatgtgccatggccgagccttccctctgtggaagaagccagctctgtctcttcctcactgtcttcacctgccatgacctcaacttcttttttctccacattaccagagagcatctcctcctctcctcatcctgtgactgcacttctcacccttggcccagtgaagaccacagacatgttgcgcacaagctcagaacctgaaaccagttcacctccaaatttgagcagcacctcagctgaaatattagccacstctgaagtcaccaaagatagagagaaaattcatccctcctcaaacacacctgtagtcaatgtagggactgtgatttataaacatctatccccttcctctgttttggctgacttagtgacaacaaaacccacatctccaatggctaccacctccactctggggaatacaagtgtttccacatcaactcctgccttcccagaaactatgatgacacagccaacttcctccctgacttctggattaagggagatcagtacctctcaagagaccagctcagcaacagagagaagtgcttctctttctggaatgcccactggtgctactactaaggtctccagaacagaagccctctccttaggcagaacatccaccccaggtcctgctcaatccacaatatcaccagaaatctccacrgaaaccatcactagaatttctactcccctcaccacgacaggatcagcagaaatgaccatcacccccaaaacaggtcattctggggcatcctcacaaggtacctttaccttggacacatcaagcagagcctcctggccaggaactcactcagctgcaactcacagatctccacactcagggatgaccactcctatgagcagaggtcctgaggatgtgtcatggccaagccgcccatcagtggaaaaaactagccctccatcttccctggtgtctttatctgcagtaacctcaccttcgccactttattccacaccatctgagagtagccactcrtctcctctccgggtgacttctcttttcacccctgtcaygatgaagaccacagacatgttggacacaagcttggaacctgtgaccacttcacctcccagtatgaatatcacctcagatgagagtctggccacttctaaagccaccatggagacagargcaattcagctttcagaaaacacagctgtgactcagatgggcaccatcagygctagacaagaattctattcctcttatccaggyctcccagagccatccaaagtgacatctccartggtcacctcttccaccataaaagacattgtttctacaaccatacctgcttcctctgagataacaagaattgagatggagtcaacatccaccctgacccccacaccaagggagaccagcacctcycaggagatccactcagccacaaagccaagcactgttccttacaaggcactcactagtgccacgattgaggactccatgacacaagtcatgtcctctagcagaggacctagccctgatcagtccacaatgtcacaagacatatccactgaagtgatcaccaggctctctacctcccccatcaagrcagaatctacagaaatgaccattaccacccaaacaggttctcctggggctacatcaaggggtacccttaccttggacacttcaacaacttttatgtcagggacscaytcaactgcatctcaaggattttcacactcacagatgaccrctcttatgagtagaactcctggagakgtgccatggctaagccatccctctgtggaagaagccagctctgcctctttctcactgtcttcacctgtcatgacctcatcttctcccgtttcttccacattaccagacagcatccactcttcttcgcttcctgtgacatcacttctcacctcagggctggtgaagaccacagagctgttgggcacaagctcagaacctgaaaccagttcacccccaaatttgagcagcacctcagctgaaatactggccaycactgaagtcactacagatacagagaaactggagatgaccaatgtggtaacctcaggttatacacatgaatctccttcctctgtcctagctgactcagtgacaacaaaggccacatcttcaatgggtatcacctaccccacaggagatacaaatgttctcacatcaacccctgccttctctgacaccagtaggattcaaacaaagtcaaagctctcactgactcctgggttgatggagaccagcatctctgaagagaccagctctgccacagaaaaaagcactgtcctttctagtgtgcccactggtgctactactgaggtctccaggacagaagccatctcttctagcagaacatccatcccaggccctgctcaatccacaatgtcatcagrcacctccatggaaaccatcactagaatttctacccccctcacaaggaaagaatcaacagacatggccatcacccccaaaacaggtccttctggggctacctcgcaggrtacctttaccttggactcatcaagcacagcctcctggccaggaactcactcagctacaactcagagatttccacrgtcagtggtgacaactcctatgagcagaggtcctgaggatgtgtcatggcyaagcccgctgtctgtggaaaamaacagccctccatcttccctggtatcttcatcttcagtaacctcaccttcgccactttattccacaccatctgggagtagccactcctctcctgtccctgtcacttctcttttcacctctatcatgatgaaggccacagacatgttggatgcaagtttggaacctgagaccacttcagctcccaatatgaatatcacctcagatgagagtctggccrcttctaaagccaccacggagacagaggcaattcasgtttttgaaaatacagcarcgtcccatgtggaaaccaccagtgctacagaggaactctattcctcttccccaggcttctcagagccaacaaaagtgatatctccagtggtcacctcttcctctataagagacaacatggtttccacaacaatgcctggctcctctggcattacaaggattgagatagagtcaatgtcatctctgacccctggactgagggagaccagaacctcccaggacatcacctcatccacagagacaagcactgtcctttacaagatgycctctggtgccactcctgaggtctccaggacagaagttatgccctctagcagaacatccattcctggccctgctcagtccacaatgtcactagacatctccgatgaagttgtcaccaggctgtctacctctcccatcatgacagaatctgcagaaataaccatcaccacccaaacaggttattctctggctacatcccaggttacccttcccttgggcacctcaatgacctttttgtcagggacccactcaactatgtctcaaggactttcayactcagagatraccaatcttatgagcagggrtcctgaaagtctgtcatggacgagccctcgctttgtggaaacaactagatcttcctcttctctgacatcattacctctcacgacctcactttctcctgtgtcctccacattactagacagtagcccctcctctcctcttcctgtgacttcacttatcctcccaggcctggtgaagactacagaagtgttggatacaagctcagagcctaaaaccagttcatctccaaatttgagcagcacctcagttgaaataccggccacctctgaaatcatgacagatacagagaaaattcatccttcctcaaacacagcggtggccaaagtgaggacctccagttctgttcatgaatctcattcctctgtcctagctgactcagaaacaaccataaccataccttcaatgggtatcacctccgctgtggasgataccactgttttcacatcaaatcctgccttctctgagactaggaggattccgacagagccaacattctcattgactcctggattcagggagactagcacctctgaagagaccacctcaatcacagaaacaagtgcagtcctttwtggagtgcccactagtgctactactgaartctccatgacagaaatmatgtcctctaatagaayacacatccctgactctgatcagtccacgatgtctccagacatcatcactgaagtgatcaccaggctctcttcctcatccatgatgtcagaatcaacacaaatgaccatcaccacccaaaaaagttctcctggggctacagcacagagtactcttaccttggccacaacaacagcccccttggcaaggacccactcaactgttcctcctagatttttacactcagagatgacaactcttatgagtaggagtcctgaaaatccatcatggaagagctctcyctttgtggaaaaaactagctcttcatcttctctgttgtccttacctgtcacgacctcaccttctgtttcttccacattaccgcagagtatcccttcctcctctttttctgtgacttcactcctcaccccaggcatggtgaagactacagacacaagcacagaacctggaaccagtttatctccaaatctgagtggcacctcagttgaaatactggctgcctctgaagtcaccacagatacagagaaaattcatccttcttcaagcatggcagtgaccaatgtgggaaccaccagttctggacatgaactrtattcctctgtttcaatccactcggagccatccaaggctacatacccagtgggtactccctcttccatggctgaaacctctatttccacatcaatgcctgctaattttsagaccayaggatttgaggytgagccattttctcatttgacttctggayttaggaagacmaacatgtccctggacaccagctcagtcacaccaacaaatacaccttcttctcctgggtccactcaccttttacagagttccaagactgatttcacctcttctgcaaaaacatcatccccagactggcctccagcctcacagtatactgaaattccagtggacataatcaccccstttaatgcttctccatctattacggagtccactgggataacctccttcccagaatccaggtttactatgtctgtaacagaaagtactcatcatctgagtacagatttgctgccttcagctgagactatttccactggcacagtgatgccttctctatcagaggccatgacttcatttgccaccactggagttccacgagccatctcaggttcaggtartccattctctaggacagagtcaggccctggggatgctactctgtccaccattgcagagagcctgccttcatccactcctgtgccattctcctcttcaaccttcactaccactgattcttcaaccatcccagccctccatgagataacttcctcttcagctaccccatatagagtggacaccagtcttgggacagagagcagcactactgaaggacgcttggttatggtcagtactttggacacttcaagccaaccaggcaggacatcttcatcacccattttggataccagaatgacagagagygttgagctgggaacagtgacaagtgcttatcaagttccttcactctcaacacggttgacaagaactgatggcattatggaacacatcacaaaaatacccaatgaagcagcacacagaggtaccataagaccagtcaaaggccctcagacatccacttcgcctgccagtcctaaaggactacacacaggagggacaaaaaraatggagaccaccaccacagctctgaagaccaccaccacagctctgaagaccacttccagagccaccttgaccaccagtgtctatactcccactttgggaacactgamtcccctcaatgcatcaatgcaaatggccagcacaatccccacagaaatgatgatcacaaccccatatgttttccctgatgttccagaaacgacatcctcattggctaccagcctgggagcagaaaccagcacagctcttcccaggacaaccccatctgttttcaatagagaatcagagaccacagcctcactggtctctcrttctggggcagagagawgtccggttattcaaactctagatgtttcttctagtgagccagatacaacagcttcatgggttatccatcctgcagagaccatcccaactgtttccaagacaacccccaattttttccacagtgaattagacactgtatcttccacagccaccagtcatggggcagaygtcagctcagccattccaacaaatatctcacctagtgaactagatgcactgaccccactggtcactatttcggggacagatactagtacaacattcccaacactgactaagtccccacatgaaacagagacaagaaccacatggctcactcatcctgcagagaccagctcaactattcccagaacaatccccaatttttctcatmatgaatcagatgccacaccttcaatagccaccagtcctggggcagaaaccagttcagctattccaattatgactgtctcacctggtgcagaagatctggtgacctcacaggtcactagttctggsacagacagaaatatgactattccaactttgactctttctcctggtgaaccaaagacsatagcctcattagtcayccatcctgaagcacagacaagttcggccattccaacttcaactatctcgcctgctgtatcacggttggtgacctcaatggtcaccagtttggcggcaaagacaagtacaactaatcgagctctgacaaactcccctggtgaaccagctacaacagtttcattggtcacgcatyctgcacagaccagcccaacagttccctggacaacttccatttttttccatagtaaatcagacaccacaccttcaatgaccaccagtcatggggcagaatccagttcagctgttccaactccaactgtttcaactgaggtaccaggagtagtgacccctttggtcaccagttctagggcagtgatcagtacaactattccaattctgactctttctcctggtgaaccagagaccacaccttcaatggccaccagkcatggggaagaagccagttctgctattccaactccaactgtttcacctggggtaccaggagtggtgacctctctggtcactagttctagggcagtgactagtacaactattccaattctgactttttctcttggtgaaccagagaccacaccttcaatggscaccagtcatgggacagaagctggctcagctgttccaactgttttacctgaggtaccaggaatggtgacctctctggttgctagttctagggcagtaaccagtacaactcttccaactctgactctttctcctggtgaaccagagaccacaccttcaatggccaccagtcatggggcagaagccagctcaactgttccaactgtttcacctgaggtaccaggagtggtgacctctctggtcactagttctagtggagtaaacagtacaagtattccaactctgattctttctcctggtgaactagaaaccacaccttcaatggccaccagtcatggggcagaagccagctcagctgttccaactccaactgtttcacctggggtatcaggartggtgacccctctggtcactagttccagggcagtgaccagtacaactattccaattctaactctttcttctagtgagccagagaccacaccttcaatggccaccagtcatggggtagaagccagctcagctgttctaactgtttcacctgaggtaccaggaatggtgacctytctggtcactagttctagagcagtaaccagtacaactattccaactctgactatttcttctgatgaaccagagaccrcaacttcattggtcacccattctgaggcaaagatgatttcagccattccaactttagstgtctcccctactgtacaagggctggtgacttcactggtcactagttctgggtcagagaccagtgcgttttcaaatctaactgttgcctcaagtcaaccagagaccatagactcatgggtcgctcatcctgggacagaagcaagttctgttgttccaactttgactgtctccactggtgagccgtttacaaatatctcattggtcacccatcctgcagagagtagctcaactcttcccaggacaacctcaaggttttcccacagtgaattagacactatgccttctacagtcaccagtcctgaggcagaatccagctcagccatttcaacaactatttcacctggtataccaggtgtgctgacatcactggtcactagctctgggagagacatcagtgcaacttttccaacagtgcctgagtccccacatgaatcagaggcaacagcctcatgggttactcatcctgcagtcaccagcacaacagttcccaggacaacccctaattattctcatagtgaaccagacaccacaccatcaatagccaccagtcctggggcagaagccacttcagattttccaacaataactgtctcacctgatgtaccagatatggtaacctcacaggtcactagttctgggacagacaccagtataactattccaactctgactctttcttctggtgagccagagaccacaacctcatttatcacctattctgagacacayacaagttcagccattccaactctccctgtctcccctgrtgcatcaaagatgctgacctcactggtcatcagttctgggacagacagcactacaactttcccaacactgacggagaccccatatgaaccagagacaacagccatacagctcattcatcctgcagagaccaacacaatggttcccaggacaactcccaagttttcccatagtaagtcagacaccacactcccagtagccatcaccagtcctgggccagaagccagttcagctgtttcaacgacaactatctcacctgatatgtcagatctggtgacctcactggtccctagttctgggacrgacaccagtacaaccttcccaacattgagtgagaccccatatgaaccagagactacagccacgtggctcactcatcctgcagaaaccagmacaacggtttctgggacaattcccaacttttcccataggggatcagacactgcaccctcaatggtcaccagtcctggagtagacacgaggtcaggtgttccaactacaaccatcccacccagtataccaggggtagtgacctcacaggtcactagttctgcaacagacactagtacagctattccaactttgactccttctcctggtgaaccagagaccacagcctcatcagctacccatcctgggacacagactggcttcactgttccaattcggactgttccctctagtgagccagatacaatggcttcctgggtcactcatcctccacagaccagcacacctgtttccagaacaacctccagtttttcccatagtagtccagatgccacacctgtaatggccaccagtcctaggacagaagccagttcagctgtactgacaacaatctcacctggtgcaccagagatggtgacttcacagatcactagttctggggcagcaaccagtacaactgttccaactttgactcattctcctggtatgccagagaccacagccttattgagcacccatcccagaacagagacaagtaaaacatttcctgcttcaactgtgtttcctcaagtatcagagaccacagcctcactcaccattagacctggtgcagagactagcacagctctcccaactcagacaacatcctctctcttcaccctacttgtaactggaaccagcagagttgatctaagtccaactgcttcacctggtgtttctgcaaaaacagccccactttccacccatccagggacagaaaccagcacaatgattccaacttcaactctttcccttggtttactagagactacaggcttactggccacmagctcttcagcagagaccagcasgagtactctaactctgactgtttcccctgctgtctctgggctttccagtgcctctataacaactgataagmcccaaactgtgacctcctggaacacagaaacctcaccatctgtaacttcagttggacccccagaattttccaggaytgtcacaggcaccactatgaccttgataccatcagagatgccaacaccacctaaaaccagtcatggagaaggagtgagtccaaccactatcttgagaactacaatggttgaagccactaatttagctaccacaggttccagtcccactgtggccaagacaacaaccaccttcaatacactggctggaagcctctttactcctctgaccacacctgggatgtccaccttggcctctgagagtgtgacctcaagaacaagttataaccatcggtcctggatctccaccaccagcagttataaccgtcggtactggacccctgccaccagcactccagtgacttctacattctccccagggatttccacatcctccatccccagctccacagcagccacagtcccattcatggtgccattcaccctcaacttcaccatcaccaacctgcagtacgaggaggacatgcggcaccctggttccaggaagttcaacgccacagagagagaactgcagggtctgctcaaacccttgttcaggaatagcagtctggaatacctctattcaggctgcagactagcctcactcaggccagagaaggatagctcagccayggcagtggatgccatctgcacacatcgccctgaccctgaagacctcggactggacagagagcgactgtactgggagctgagcaatctgacaaatggcatccaggagctgggcccctacaccctggaccggaacagtctctatgtcaatggtttcacccatcgaagctctatgcccaccaccagcactcctgggacctccacagtggatgtgggaacctcagggactccatcctccagccccagccccacgactgctggccctctcctgatgccgttcaccctcaacttcaccatcaccaacctgcagtacgaggaggacatgcgtcgcactggctccaggaagttcaacaccatggagagtgtcctgcagggtctgctcaagcccttgttcaagaacaccagtgttggccctctgtactctggctgcagattgaccttgctcaggcccgagaaagatggggcagccactggagtggatgccatctgcacccaccgccttgaccccaaaagccctggactcaacagggagcagctgtactgggagytaagcaaactgaccaatgacattgaagagctgggcccctacaccctggacaggaacagtctctatgtcaatggtttcacccatcagagctctgtgtccaccaccagcactcctgggacctccacagtggatctcagaacctcagggactccatcctccctctccagccccacaattatggctgctggccctctcctggtaccattcaccctcaacttcaccatcaccaacctgcagtatggggaggacatgggtcaccctggctccaggaagttcaacaccacagagagggtcctgcagggtctgcttggtcccatattcaagaacaccagtgttggccctctgtactctggctgcagactgacctctctcaggtcygagaaggatggagcagccactggagtggatgccatctgcatccatcatcttgaccccaaaagccctggactcaacagagagcggctgtactgggagctgagccaactgaccaatggcatcaaagagctgggcccctacaccctggacaggaacagtctctatgtcaatggtttcacccatcggacctctgtgcccaccascagcactcctgggacctccacagtggaccttggaacctcagggactccattctccctcccaagccccgcaactgctggccctctcctggtgctgttcaccctcaacttcaccatcaccaacctgaagtatgaggaggacatgcatcgccctggctccaggaagttcaacaccactgagagggtcctgcagactctgcttggtcctatgttcaagaacaccagtgttggccttctgtactctggctgcagactgaccttgctcaggtccgagaaggatggagcagccactggagtggatgccatctgcacccaccgtcttgaccccaaaagccctggagtggacagggagcagctatactgggagctgagccagctgaccaatggcatcaaagagctgggcccctacaccctggacaggaacagtctctatgtcaatggtctcctgggacctccacagtggaccttgggtcagggactccatcctccctccccagccccctctcctggtgccgttcaccctcaacttcaccatcaccaacctgaagtacgaggaggacatgcattgccctggctccaggaagttcaacaccacagagagagtcctgcagagtctgcttggtcccatgttcaagaacaccagtgttggccctctgtactctggctgcagactgacgtccgagaaggatggagcagccactggagtggatgccatctgcacccaccgtcttgaccccaaaagccctggagtggacagggagcagctatactgggagctgagccagctgaccaatggcatcaaagagctgggtccctacaccctggacagaaacagtctctatgtcaatggtctgctggccctctcctggtgccattcaccctcaacttcaccatcaccaacctgcagtacgaggaggacatgcatcacccaggctccaggaagttcaacaccacggagcgggtcctgcagggtctgcttggtcccatgttcaagaacaccagtgtcggccttctgtactctggctgcagactgaccttgctcaggcctgagaagaatggggcagccactggaatggatgccatctgcagccaccgtcttgaccccaaaagccctggactcaacagagagcagctgtactgggagctgagccagctgacccatggcatcaaagagctgggcccctacaccctggacaggaacagtctctatgtcaatggtttcacccatcggagctctgtggcccccaccagcactcctgggacctccacagtggaccttgggacctcagggactccattctccctccccagccccacaacagctgttcctctcctggtgccgttcaccctcaactttaccatcaccaatctgcagtatggggaggacatgcgtcaccctggctccaggaagttcaacaccacagagagggtcctgcagggtctgcttggtcccttgttcaagaactccagtgtcggccctctgtactctggctgcagactgatctctctcaggtctgagaaggatggggcagccactggagtggatgccatctgcacccaccaccttaaccctcaaagccctggactggacagggagcagctgtactggcagctgagccagatgaccaatggcatcaaagagctgggcccctacaccctggaccggaacagtctctacgtcaatggtttcacccatcggagctctgggctcaccaccagcactccttggacttccacagttgaccttggaacctcagggactccatcccccgtccccagccccacaattcctgggacctctgcagtgcacctggaaacctctgggactccagcctccctccctggccacacactgctggccctctcctggtgccattcaccctmaacttcaccatcaccaacctgcagtatgaggaggacatgcatcgccctggatctaggaagttcaacrccacagagagggtcctgcagggtctgcttagtcccatwttcaagaactccagtgttggccctctgtactctggctgcagactgacctatggggcagcaactggaatggatgctgtctgcctctaccaccctaatcccaaaagacctgggctggacagagagcagctgtactgggagctaagccagctgacccacaacatcactgagctgggcccctacagcctggacagggacagtctctatgtcaatggctcctgggacctccacagtgtactgggcaaccactgggactccatcctccttccccggccacacagaacttcaccatcactaacctgcggtatgaggagaacatgcatcaccctggctctagaaagtttaacaccacggagagagtccttcagggtctgctcaggcctgtgttcaagaacaccagtgttggccctctgtactctggctgcagactgaccttgctcaggatggggcagccaccaaagtggatgccatctgcacctaccgccctgatcccaaaagccctggactggacagagagcagctatactgggagctgagccagctracccacagcatcactgagctgggcccctacaccctggacagggacagtctctatgtcaatgacagccactggccctgtcctgctgccattcaccctcaattttaccatcaytaacctgcagtatgaggaggacatgcrtcgccctggctccaggaagttcaacaccacggagagggtccttcagggtctgcttatgcccttgttcaagaacaccagtgtcagctctctgtactctggttgcagactgaccttgctcaggcctgagaaggatggggcagccaccagagtggatgctgtctgcacccatcgtcctgaccccaaaagccctggactggacagagagcggctgtactggaagctgagccagctgacccacggcatcactgagctgggcccctacaccctggacaggcacagtctctatgtcaatggtttcacccatcagagctctatgacgaccaccagaactcctgatacctccacaatgcacctggcaacctcgagaactccagcctccctgtctggaccyaygacaggcctgaaaaggatgggacagccactggagtggatgccatctgcacccaccacccctgaccccaaaagccctaggctggacagagagcagctgtattgggagctgagccagctgacccacaatatcactgagctgggcccctatgccctggacaacgacagcctctttgtcaatggtttcactcatcggagctctgtgtccaccaccagcactcctgggacccccacagtgtatctgggagcatctaagactccagcctcgatatttggcccttcagctgccagccatctcctgatactattcaccctcaacttcaccatcactaacctgcggtatgaggagaacatgtggcctggctccaggaagttcaacactacagagagggtccttcagggcctgctaaggcccttgttcaagaacaccagtgttggccctctgtactctggctgcaggctgaccttgctcaggccagagaaagatggggaagccaccggagtggatgccatctgcacccaccgccctgaccccacaggccctgggctggacagagagcagctgtatttggagctgagccagctgacccacagcatcactgagctgggcccctacacactggacagggacagtctctatgtcaatggtttcacccatcggagctctgtacycaccaccagsaccggggtggtcagcgaggagccattcacactgaacttcaccatcaacaacctgcgctacatggcggacatgggccaacccggctccctcaagttcaacatcacagacaacgtcatgmagcacctgctcagtcctttgttccagaggagcagcctgggtgcacggtacacaggctgcagggtcatcgcactaaggtctgtgaagaacggtgctgagacacgggtggacctcctctgcacctacctgcagcccytcagcggcccaggtctgcctatcaagcaggtgttccatgagctgagccagcagacccatggcatcacccggctgggcccctactctctggacaaagacagcctctaccttaacggttacaatgaacctggtccagatgagcctcctacaactcccaagccagccaccacattcctgcctcctctgtcagaagccacaacagccatggggtaccacctgaagaccctcacactcaacttcaccatctccaatctccagtattcaccagatatgggcaagggctcagctacattcaactccaccgagggggtccttcagcacctgctcagacccttgttccagaagagcagcatgggccccttctacttgggttgccaactgatctccctcaggcctgagaaggatggggcagccactggtgtggacaccacctgcacctaccaccctgaccctgtgggccccgggctggacatacagcagctttactgggagctgagtcagctgacccatggtgtcacccaactgggcttctatgtcctggacagggatagcctcttcatcaatggctatgcaccccagaatttatcaatccggggcgagtaccagataaatttccacattgtcaactggaacctcagtaatccagaccccacatcctcagagtacatcaccctgctgarggacatccaggacaaggtcaccacactctacaaaggcmgtcaactacatgacacattccgcttctgcctggtcrccaacttgacgatggactccgtgttggtcactgtcaaggcattgttctcctccaatttggaccccagcctggtggagcaagtctttctagataagaccctgaatgcctcattccattggctgggctccacctaccagttggtggacatccatgtgacagaaatggagtcatcagtttatcaaccaacaagcagctccagcacccagcacttctacctgaatttcaccatcaccaacctaccatattcccaggacaaagcccagccaggcaccaccaattaccagaggaacaaaaggaatattgaggatgcgctcaaccaactcttccgaaacagcagcatcaagagttatttttctgactgtcaagtttcaacattcaggtctgtccccaacaggcaccacaccggggtggactccctgtgtaacttctcgccactggctcggagagtagacagagttgccatctatgaggaatttctgcggatgacccggaatggtacccagctgcagaacttcaccctggacaggagcagtgtccttgtggatgggtattctcccaacagaaatgagcccttaactgggaattctgaccttcccttctgggctgtcatcctcatcggcttggcaggactcctgggastcatcacatgcctgatctgcggtgtcctggtgaccacccrccggcggaagaaggaaggagaatacaacgtccagcaacagtgcccaggctactaccagtcacacctagacctggaggatctgcaatgactggaacttgccggtgcctggggtgcctttcccccagccagggtccaaagaagcttggctggggcagaaataaaccatattggtcgg

SEQ ID NO: 385 - DNA, 3461 bp, Homo sapiens
gtctgagaaggatggggcagccactggagtggatgccatctgcacccaccaccttaaccctcaaagccctggactggacagggagcagctgtactggcagctgagccagatgaccaatggcatcaaagagctgggcccctacaccctggaccggaacagtctctacgtcaatggcttcacccatcggagctctgtgccaaccaccagtattcctgggacctctgcagtgcacctggaaacctctgggactccagcctccctcctatagccgccagccctctcctggtgctattcacaattaacttcaccatcactaacctgcggtatgaggagaacatgcatcaccctggctctagaaagtttaacaccacggagagagtccttcagggtctgctcaggcctgtgttcaagaacaccagtgttggccctctgtactctggctgcagactgaccttgctcaggcccaagaaggatggggcagccaccaaagtggatgccatctgcacctaccgccctgatcccaaaagccctggactggacagagagcagctatactgggagctgagccagctracccacagcatcactgagctgggcccctacaccctggacagggacagtctctatgtcaatggtttcacacagcggagctctgtgcccaccactagcattcctgggacccccacagtggacctgggaacatctgggactccagtttctaaacctggtccctcggccactggccctgtcctgctgccattcaccctcaattttaccatcaytaacctgcagtatgaggaggacatgcrtcgccctggctccaggaagttcaacaccacggagagggtccttcagggtctggtgagacccctttcaagaacaccagtgtcagctctctgtactctggttgcagactgaccttgctcaggcctgaaaaggatgggacagccactggagtggatgccatctgcacccaccacccctgaccccaaaagccctaggctggacagagagcagctgtattgggagctgagccagctgacccacaatatcactgagctgggcccctatgccctggacaacgacagcctctttgtcaatggtttcactcatcggagctctgtgtccaccaccagcactcctgggacccccacagtgtatctgggagcatctaagactccagcctcgatatttggcccttcagctgccagccatctcctgatactattcaccctcaacttcaccatcactaacctgcggtatgaggagaacatgtggcctggctccaggaagttcaacactacagagagggtccttcagggcctgctaaggcccttgttcaagaacaccagtgttggccctctgtactctggctgcaggctgaccttgctcaggccagagaaagatggggaagccaccggagtggatgccatctgcacccaccgccctgaccccacaggccctgggctggacagagagcagctgtatttggagctgagccagctgacccacagcatcactgagctgggcccctacacactggacagggacagtctctatgtcaatggtttcacccatcggagctctgtacycaccaccagsaccggggtggtcagcgaggagccattcacactgaacttcaccatcaacaacctgcgctacatggcggacatgggccaacccggctccctcaagttcaacatcacagacaacgtcatgmagcacctgctcagtcctttgttccagaggagcagcctgggtgcacggtacacaggctgcagggtcatcgcactaaggtctgtgaagaacggtgctgagacacgggtggacctcctctgcacctacctgcagcccytcagcggcccaggtctgcctatcaagcaggtgttccatgagctgagccagcagacccatggcatcacccggctgggcccctactctctggacaaagacagcctctaccttaacggttacaatgaacctggtccagatgagcctcctacaactcccaagccagccaccacattcctgcctcctctgtcagaagccacaacagccatggggtaccacctgaagaccctcacactcaacttcaccatctccaatctccagtattcaccagatatgggcaagggctcagctacattcaactccaccgagggggtccttcagcacctgctcagacccttgttccagaagagcagcatgggccccttctacttgggttgccaactgatctccctcaggcctgagaaggatggggcagccactggtgtggacaccacctgcacctaccaccctgaccctgtgggccccgggctggacatacagcagctttactgggagctgagtcagctgacccatggtgtcacccaactgggcttctatgtcctggacagggatagcctcttcatcaatggctatgcaccccagaatttatcaatccggggcgagtaccagataaatttccacattgtcaactggaacctcagtaatccagaccccacatcctcagagtacatcaccctgctgarggacatccaggacaaggtcaccacactctacaaaggcmgtcaactacatgacacattccgcttctgcctggtcrccaacttgacgatggactccgtgttggtcactgtcaaggcattgttctcctccaatttggaccccagcctggtggagcaagtctttctagataagaccctgaatgcctcattccattggctgggctccacctaccagttggtggacatccatgtgacagaaatggagtcatcagtttatcaaccaacaagcagctccagcacccagcacttctacctgaatttcaccatcaccaacctaccatattcccaggacaaagcccagccaggcaccaccaattaccagaggaacaaaaggaatattgaggatgcgctcaaccaactcttccgaaacagcagcatcaagagttatttttctgactgtcaagtttcaacattcaggtctgtccccaacaggcaccacaccggggtggactccctgtgtaacttctcgccactggctcggagagtagacagagttgccatctatgaggaatttctgcggatgacccggaatggtacccagctgcagaacttcaccctggacaggagcagtgtccttgtggatgggtattctcccaacagaaatgagcccttaactgggaattctgaccttcccttctgggctgtcatcctcatcggcttggcaggactcctgggastcatcacatgcctgatctgcggtgtcctggtgaccacccrccggcggaagaaggaaggagaatacaacgtccagcaacagtgcccaggctactaccagtcacacctagacctggaggatctgcaatgactggaacttgccggtgcctggggtgcctttcccccagccagggtccaaagaagcttggctggggcagaaataaaccatattggtcg

SEQ ID NO: 386 - DNA, 2426 bp, Homo sapiens
acagacgtccctgcggggctcctcctgagcgtccctcctgccagccagggtcgcagccgcagcggcggccgcagctcttagcccacacaggacttgtaaactcttactgcacccttctctccattaggagcttttcctccctccttccccccaacccctctgtcctcctcactttggggaatttaatgctttctttagcatctttttgtgtgcgtgatctaggggaggagacaccccagagctccaactagctctcagctgaattctacttttgtttttatgtcttcctcgcctcctctcgygtccctcttatctgactgatctgcgaagtctgatgcttctgccagagggagaggaataaatagatgttgctgcttccgaaggcttagacgttgggaaagagcagcctgggcggcaggggcggtggctggagctcggtaaagctcgtgggaccccattgggggaatttgatccaaggaagcggtgattgccrggggaggagaagctcccagatccttgtgtccacttgcagcgggggaggcggagacggcggagcgggccttttggcgtccactgcgcggctgcaccctgccccatcctgccgggatcatggtctgcggcagcccgggagggatgctgctgctgcgggccgggctgcttgccctggctgctctctgcctgctccgggtgcccgggkctcgggctgcagcctgtgagcccgtccgcatccccctgtgcaagtccctgccctggaacatgactaagatgcccaaccacctgcaccacagcactcaggccaacgccatcctggccatcgagcagttcgaaggtctgctgggcacccactgcagccccgatctgctcttcttcctctgtgccatgtacgcgcccatctgcaccattgacttccagcacgagcccatcaagccctgtaagtctgtgtgcgagcgggcccggcagggctgtgagcccatactcatcaagtaccgccactcgtggccggagaacctggcctgcgaggagctgccagtgtacgacaggggcgtgtgcatctctcccgaggccatcgttactgcggacggagctgattttcctatggattctagtaacggaaactgtagaggggcaagcagtgaacgctgtaaatgtaagcctattagagctacacagaagacctatttccggaacaattacaactatgtcattygggctaaagttaaagagataaagactaagtgccatgatgtgactgcagtagtggaggtgaaggagattctaaagtcctctctggtaaacattccacgggacactgtcaacctctataccagctctggctgcctctgccctccacttaatgttaatgaggaatatatcatcatgggctatgaagatgaggaacgttccagattactcttggtggaaggctctatagctgagaagtggaaggatcgactyggtaaaaaagttaagcgctgggatatgaagcttcgtcatcttggactcagtaaaagtgattctagcaatagtgattccactcagagtcagaagtctggcaggaactcgaacccccggcaagcasgcaactaaatcccgaaatacaaaaagtaacacagtggacttcctattaagacttacttgcattgctggactagcaaaggaaaattgcactattgcacatcatattctattgtttactataaaaatcatgtgataactgattattacttctgtttctcttttggtttctgcttctctcttctctcaacccctttgtaatggtttgggggcagactcttaartatattgtgagttttctatttcactaatcatgagaaaaactgttcttttgcaataataataaattaaacatgctgttaccagagcctctttgctggagtctccagatgttwatttactttctgcaccccaattgggaatgcaatattggatgaaaagagaggtttctggtattcacagaaagctagatatgccttaaaacatactctgccgatctaattacagccttatttttgtatgccttttgggcattctcctcatgcttagaaagttccaaatgtttataaaggtaaaatggcagtttgaagtcaaatgtcacataggcaaagcaatcaagcaccaggaagtgtttatgaggaaacaacacccaagatgaattatttttgagactgtcaggaagtaaaataaataggagcttaagaaagaacattttgcctgattgagaagcacaactgaaaccagtagccgctggkgtgttaatggtagcattcttcttttggcaatacatttgatttgttcatgaatatattaatcagcattagagaaatgaattataactagacatctgctgttatcaccatagttttgtttaatttgcttccttttaaataaacccattggtgaaagtc

SEQ ID NO: 387 - DNA, 2096 bp, Homo sapiens
tctgatgcttctgccagagggagaggaataaatagatgttgctgcttccgaaggcttagacgttgggaaagagcagcctgggcggcaggggcggtggctggagctcggtaaagctcgtgggaccccattgggggaatttgatccaaggaagcggtgattgccrggggaggagaagctcccagatccttgtgtccacttgcagcgggggaggcggagacggcggagcgggccttttggcgtccactgcgcggctgcaccctgccccatcctgccgggatcatggtctgcggcagcccgggagggatgctgctgctgcgggccgggctgcttgccctggctgctctctgcctgctccgggtgcccgggkctcgggctgcagcctgtgagcccgtccgcatccccctgtgcaagtccctgccctggaacatgactaagatgcccaaccacctgcaccacagcactcaggccaacgccatcctggccatcgagcagttcgaaggtctgctgggcacccactgcagccccgatctgctcttcttcctctgtgccatgtacgcgcccatctgcaccattgacttccagcacgagcccatcaagccctgtaagtctgtgtgcgagcgggcccggcagggctgtgagcccatactcatcaagtaccgccactcgtggccggagaacctggcctgcgaggagctgccagtgtacgacaggggcgtgtgcatctctcccgaggccatcgttactgcggacggagctgattttcctatggattctagtaacggaaactgtagaggggcaagcagtgaacgctgtaaatgtaagcctattagagctacacagaagacctatttccggaacaattacaactatgtcattygggctaaagttaaagagataaagactaagtgccatgatgtgactgcagtagtggaggtgaaggagattctaaagtcctctctggtaaacattccacgggacactgtcaacctctataccagctctggctgcctctgccctccacttaatgttaatgaggaatatatcatcatgggctatgaagatgaggaacgttccagattactcttggtggaaggctctatagctgagaagtggaaggatcgactyggtaaaaaagttaagcgctgggatatgaagcttcgtcatcttggactcagtaaaagtgattctagcaatagtgattccactcagagtcagaagtctggcaggaactcgaacccccggcaagcasgcaactaaatcccgaaatacaaaaagtaacacagtggacttcctattaagacttacttgcattgctggactagcaaaggaaaattgcactattgcacatcatattctattgtttactataaaaatcatgtgataactgattattacttctgtttctcttttggtttctgcttctctcttctctcaacccctttgtaatggtttgggggcagactcttaartatattgtgagttttctatttcactaatcatgagaaaaactgttcttttgcaataataataaattaaacatgctgttaccagagcctctttgctggagtctccagatgttwatttactttctgcaccccaattgggaatgcaatattggatgaaaagagaggtttctggtattcacagaaagctagatatgccttaaaacatactctgccgatctaattacagccttatttttgtatgccttttgggcattctcctcatgcttagaaagttccaaatgtttataaaggtaaaatggcagtttgaagtcaaatgtcacataggcaaagcaatcaagcaccaggaagtgtttatgaggaaacaacacccaagatgaattatttttgagactgtcaggaagtaaaataaataggagcttaagaaagaacattttgcctgattgagaagcacaactgaaaccagtagccgctggkgtgttaatggtagcattcttcttttggcaatacatttgatttgttcatgaatatattaatcagcattagagaaatgaattataactagacatctgctgttatcaccatagttttgtttaatttgcttccttttaaataaacccattggtgaaagtc

SEQ ID NO: 388 - DNA, 2456 bp, Homo sapiens
ctggagtggggtaagaggcraattatagacacaaggggctcctctgcaggaaggaggccaagggaaagaggcttgaaaggcttgatatttcacccaccaccactcactgccggagtaagcaggtctccccttcccagggctgaggggaggcagggatgtgtgctgtcccagggctgagaagtggcaggtgagctggtgattccttactgcccaggttctgtctaggaaggtgcgtcctcaccatgctggatggtgtcctagtccaggakcaccccctgarctcctggcctagactccaaagggttgggtagatgagcaaagactttacaaagaccttaggcgatatatgtccaggagcacccaggaattactgggctaccactgcagactgcaggacaagctccaagaacaggaaggaagtcttgcagctgaagggaggcactccttggcctcsgcagccgatcacatgaaggtggtgccaagtmtcctgctctccgtcctcctggcacaggtgtggctggtacccrgcttggcccccagtcctcagtygccagagaccccagcccctcagaaccagaccagcagggtagtgcaggctcccarggaggaagaggaagatgagcaggaggccagcgaggagaaggccrgtgaggaagagaaagcctggctgatggccagcaggcagcagcttgccaaggagacttcaaacttcggattcagcctgctgygaaagatctccatgaggcacgatggcaacatggtcttctctccatttggcatgtccttggccatgacaggcttgatgctgggggccacagggccgactgaaacccagatcaagagagggctccacttgcaggccctgaagcccaccaagcccgggctcctgccttccctctttaagggactcagagagaccctctcccgcaacctggaacwgggcctcwcacaggggagttttgccttcatccacaaggattttgatgtcaaagagactttcttcaatttatccaagaggtattttgatacagagtgcgtgcctatgaattttcrcaatgcctcacaggccaaaaggctcatgaatcattacattaacaaagagactcgggggaaaattcccaaactgtttgatgagattaatcctgaaaccaaattaattcttgtggattacatcttgttcaaagggaaatggttgaccccatttgaycctgtcttcaccgaagycgacactttccacctggacaagtacaagaccattaaggtgcccatgatgtayrgtgcaggcaagtttgcctccacctttgacaagaattttcgttgtcatgtcctcaaactgccctaccaaggaaatgccaccatgctggtggtcctcatggagaaaatgggtgaccacctcgcccttgaagactacctgaccacagacttggtggagacatggctcagaaacatgaaaaccagaaacatggaagttttctttccgaagttcaagctagatcagaagtatgagatgcatgagctgcttaggcagatgggaatcagaagaatcttctcaccctttgctgaccttagtgaactctcagctactggaagaaatctccaagtatccagggttttacraagaacagtgattgaagttgatgaaaggggcactgaggcagtggcrggaatcttgtcagaaattactgcttattccatgcctcctgtcatcaaagtggaccggccatttcatttcatgatctatgaagaaacctctggaatgcttctgtttctgggcagggtggtgaatccgactctcctataattcaggacaygcataagcacttcgtgctgtagtagatgctgaatctgaggtatcaaacacacacaggataccagcaatggatggcaggggagagtgttccttttgttcttaactagtttagggtgttctcaaataaatacagtagtccccacttatctgagggggatacattcaaagacccccagcagatgcctgaaacggtggacagtgctgaaccttatatatattttttcctacacatacatacctatgataaagtttaatttataaattaggcacagtaagagattaacaataataacaacattaagtaaaatgagttacttgaaygcaagcactgcaataccataacagtcaaactgattatagagaaggctactaagtgactcatgggcgaggagcatagacagtgtggagacattgggcaaggggagaattcacatcctgggtgggacagagcaggacratgcaagattccatcccactactcagaatggcatgctgcttaagacttttagattgtttatttctggaatttttcatttaatgtttttggaccatggttgaccatggttaactgagactgcagaaagcaaaaccatggataagggaggactactacaaaagcattaaattgatacatattttttaagat

SEQ ID NO: 389 - DNA, 2124 bp, Homo sapiens
tgctgaaggttctgggctgcaaagctgaagctttggtttctgctctaaatgaaggacttttccaggacccaaggccacacactggaagtcttgcagctgaagggaggcactccttggcctcsgcagccgatcacatgaaggtggtgccaagtmtcctgctctccgtcctcctggcacaggtgtggctggtacccrgcttggcccccagtcctcagtygccagagaccccagcccctcagaaccagaccagcagggtagtgcaggctcccarggaggaagaggaagatgagcaggaggccagcgaggagaaggccrgtgaggaagagaaagcctggctgatggccagcaggcagcagcttgccaaggagacttcaaacttcggattcagcctgctgygaaagatctccatgaggcacgatggcaacatggtcttctctccatttggcatgtccttggccatgacaggcttgatgctgggggccacagggccgactgaaacccagatcaagagagggctccacttgcaggccctgaagcccaccaagcccgggctcctgccttccctctttaagggactcagagagaccctctcccgcaacctggaacwgggcctcwcacaggggagttttgccttcatccacaaggattttgatgtcaaagagactttcttcaatttatccaagaggtattttgatacagagtgcgtgcctatgaattttcrcaatgcctcacaggccaaaaggctcatgaatcattacattaacaaagagactcgggggaaaattcccaaactgtttgatgagattaatcctgaaaccaaattaattcttgtggattacatcttgttcaaagggaaatggttgaccccatttgaycctgtcttcaccgaagycgacactttccacctggacaagtacaagaccattaaggtgcccatgatgtayrgtgcaggcaagtttgcctccacctttgacaagaattttcgttgtcatgtcctcaaactgccctaccaaggaaatgccaccatgctggtggtcctcatggagaaaatgggtgaccacctcgcccttgaagactacctgaccacagacttggtggagacatggctcagaaacatgaaaaccagaaacatggaagttttctttccgaagttcaagctagatcagaagtatgagatgcatgagctgcttaggcagatgggaatcagaagaatcttctcaccctttgctgaccttagtgaactctcagctactggaagaaatctccaagtatccagggttttacraagaacagtgattgaagttgatgaaaggggcactgaggcagtggcrggaatcttgtcagaaattactgcttattccatgcctcctgtcatcaaagtggaccggccatttcatttcatgatctatgaagaaacctctggaatgcttctgtttctgggcagggtggtgaatccgactctcctataattcaggacaygcataagcacttcgtgctgtagtagatgctgaatctgaggtatcaaacacacacaggataccagcaatggatggcaggggagagtgttccttttgttcttaactagtttagggtgttctcaaataaatacagtagtccccacttatctgagggggatacattcaaagacccccagcagatgcctgaaacggtggacagtgctgaaccttatatatattttttcctacacatacatacctatgataaagtttaatttataaattaggcacagtaagagattaacaataataacaacattaagtaaaatgagttacttgaaygcaagcactgcaataccataacagtcaaactgattatagagaaggctactaagtgactcatgggcgaggagcatagacagtgtggagacattgggcaaggggagaattcacatcctgggtgggacagagcaggacratgcaagattccatcccactactcagaatggcatgctgcttaagacttttagattgtttatttctggaatttttcatttaatgtttttggaccatggttgaccatggttaactgagactgcagaaagcaaaaccatggataagggaggactactacaaaagcattaaattgatacatattttttaagat

SEQ ID NO: 390 - DNA, 1991 bp, Homo sapiens
tgctgaaggttctgggctgcaaagctgaagctttggtttctgctctaaatgaaggacttttccaggacccaaggccacacactggaagtcttgcagctgaagggaggcactccttggcctcsgcagccgatcacatgaaggtggtgccaagtmtcctgctctccgtcctcctggcacaggtgtggctggtacccrgcttggcccccagtcctcagtygccagagaccccagcccctcagaaccagaccagcagggtagtgcaggctcccarggaggaagaggaagatgagcaggaggccagcgaggagaaggccrgtgaggaagagaaagcctggctgatggccagcaggcagcagcttgccaaggagacttcaaacttcggattcagcctgctgygaaagatctccatgaggcacgatggcaacatggtcttctctccatttggcatgtccttggccatgacaggcttgatgctgggggccacagggccgactgaaacccagatcaagagagggctccacttgcaggccctgaagcccaccaagcccgggctcctgccttccctctttaagggactcagagagaccctctcccgcaacctggaacwgggcctcwcacaggggagttttgccttcatccacaaggattttgatgtcaaagagactttcttcaatttatccaagaggtattttgatacagagtgcgtgcctatgaattttcrcaatgcctcacaggccaaaaggctcatgaatcattacattaacaaagagactcgggggaaaattcccaaactgtttgatgagattaatcctgaaaccaaattaattcttgtggattacatcttgttcaaagggaaatggttgaccccatttgaycctgtcttcaccgaagycgacactttccacctggacaagtacaagaccattaaggtgcccatgatgtayrgtgcaggcaagtttgcctccacctttgacaagaattttcgttgtcatgtcctcaaactgccctaccaaggaaatgccaccatgctggtggtcctcatggagaaaatgggtgaccacctcgcccttgaagactacctgaccacagacttggtggagacatggctcagaaacatgaaaaccagaaacatggaagttttctttccgaagttcaagctagatcagaagtatgagatgcatgagctgcttaggcagatgggaatcagaagaatcttctcaccctttgctgaccttagtgaactctcagctactggaagaaatctccaagtatccagggttttacraagaacagtgattgaagttgatgaaaggggcactgaggcagtggcrggaatcttgtcagaaattactgcttattccatgcctcctgtcatcaaagtggaccggccatttcatttcatgatctatgaagaaacctctggaatgcttctgtttctgggcagggtggtgaatccgactctcctataattcaggacaygcataagcacttcgtgctgtagtagatgctgaatctgaggtatcaaacacacacaggataccagcaatggatggcaggggagagtgttccttttgttcttaactagtttagggtgttctcaaataaatacagtagtccccacttatctgagggggatacattcaaagacccccagcagatgcctgaaacggtggacagtgctgaaccttatatatattttttcctacacatacatacctatgataaagtttaatttataaattaggcacagtaagagattaacaataataacaacattaatatagagaaggctactaagtgactcatgggcgaggagcatagacagtgtggagacattgggcaaggggagaattcacatcctgggtgggacagagcaggacratgcaagattccatcccactactcagaatggcatgctgcttaagacttttagattgtttatttctggaatttttcatttaatgtttttggaccatggttgaccatggtta

SEQ ID NO: 391 - DNA, 2116 bp, Homo sapiens
tacatttagaatttttatttttgaagtacataattcaaatgtaatttttaaattttatatattttagtaataaaatacatttcatacatttaaatgttgtcacaagattttgttgtctatcctgtttagtactttgatagttgcctgaaagttgggaagaagagctaatatttcaaatggcaaaataaaagttcagagatctgcttcccgccgtgccccgcggccagccggggcagccgggaagcggatggggcggtgcatcactcgggtccgctccacaccgtcgccactgctgtggtagccggttggccgaggggccacgataactggttgcccgcagtaggagcagaattcggtatgtaccgccgccaggaagatggaggggcctttgtccgtgttcggagaccgcagcagtggggaggcgatccgctcccagaacattatggctgcagcttcgattgccaatattgtaaaaagtgctcttggtccgttgtcttggataaaatgttggtggatgatactggtgatgtaaccattactaatgatggtgcaaccatcctgaagttactggaggtagaacatcctgcagctaatkttctttgtgagctggctgatctgcaagacaaagaagttagagatggaactacctcagtggttattattgcagcagaactcctaaaaaatgcagattaattagttaaacagaaaattcatcccacatcagttattagtggctaacgacttgcttgcaaggaagcagtgcattttatcaatgaaaacctaattgttaacaaagatgaactgggaagagattgcctgattaatgctgctaagacaatccatgtcttccaaaatcattggaataaatggtgatttctttgctaacatggtagtagatgctgtacttgctattaaatacacagatataagaggccagccacattatccagtgaattctgttaatattttgaaagcccgtgggagaagtcaaacagagagcatgcacgtcagtggctgtgcactcaactgtgtggtgggatcccacggcatgcccaagagaatcataaatgcaaaaattgcttgccttgactttagcctgaaaaaaacatgaagcttggtgtacagtggtcattacagatcatgaaaaactggaccaaattagacaaagagaatcagattatcaccaaggagagaattcagaagatcctggcaactggtgccaacgttattctaaccactggtggaattgatgatatgtgtctgaagtattttgtggaggcaggtgctatggcagttagaagagttttaaaggcattgctaaagcttctggagcaactattctgtcaaccctggccaattcggaaggtgaagaaacttttgaagctgcaatgttgggacaggcagaagtggtacgggagggaatttgtgatgatgagctgatcttaaaaacactaaggctcatacatctgcatcgattatcttacgtggggcaaatgatatcatgtgtggtgagatggagcgctctttacatgatgcactttgtgtagtgaagagagttttggagtcaaaatccatggttccaggcgggggtgctgtagaagcagccctttccatataccttgaaaactatgcaaccagcatggggtctcaggaagagcttgctattgcagagtttgcaagatcacttcttgttattcctaatacactggcagttaatgctgcccaggactccacagatctggtcacaaaattcagagcttttcataatgaggctcaggttaacccagaacataaaaatctgaaatggattggtcttgatttgagcaatggtgaacgtggagacaacaaacaagcagggatgtttgaaccaaccatagttaaagttaagagtttgaaatttgcaacagaagctgcaattaccattcttcgaattgatgatcttactaaattacatccagaaagtaaagatgataaacatggaggttatgaagatgctgttcactctggagcccttaatgattgatctgatgtctcttttatttataacaatgtgaaatgcaattgtcttgtaccttgagttgagtattacacattaaagtacaacaagctgttaaaa

SEQ ID NO: 392 - DNA, 4332 bp, Homo sapiens
  misc_feature (2849)..(2849): n is a, c, g, or t
ggttttacgtgcaagatccaggctctgcgtgataagctgtggatcttcctggttcagtctttctatgctgttcgtcacacagaaagctggaagctgatgagcacagatgatcaacagaaaatccaagcagctgcatttgacaaaggtgatgatcgaagacttggcaaaaagcctatattcagtagctcgcagcaaaggaaacaagtttctgactctggtgatataaaaatcaaatcttggaggggaaataacaagaaagagtgttggagttatctctctactaataaaaagatgaaatctgatggattaggagcatctggacattcgtcaagtaccaatagaaatagtataaataaaactctgaagcaagatgatgtaaaggaaaaagatggtacaaaaatagcatctaagattacaaaagaactaaaaactgggggaaaaaatgtttctggaaagcccaaaactgtaacaaaatccaaaacagaaaatggtgataaggcacggttggaaaacatgtcacctagacaagttgtagaaagatcagcaacagcagcagcagcagcaactggacagaagaatttactaaatggaaaaggagtgagaaatcaggaagggcaaatttcaggtgccagacccaaggtactcacaggaaacttaaatgtgcaagccaaagcaaagcctttgaagaaagctacagggaaggattcaccatgcctcagcatcgcaggaccctccagcagatccacagattcaagtatggaattctcaatttccactgaatgtctggatgaaccgaaagaaaatggatcaacagaagaagaaaagccttctggacataaactatccttttgtgattctccaggacagatgatgaaaaacagtgtagatagtgtcaaaaattccactgtagccataaaatctcgacctgtttcaagagttaccaatggaacttccaataaaaaaagtattcrtgaacaagacactaatgtaaataacagtgtactaaagaaagtcagtggcaaaggatgtaktgagccagtaccacaggcaattttgaagaaaagaggaactagcaatggatgtactgcagctcagcagaggacaaagagtaccccatctaatcttactaaaactcaaggatcccaaggagagtcaccaaactcagtaaaatcttcagtctcttcaaggcagtctgatgaaaatgtggcaaagttggaccacaatacaactacagagaaacaagcacctaagagaaaaatggtcaagcaastacacacagctttgcctaaggttaatgcaaaaatagtggcaatgcctaaaaatctaaatcagtcaaaraaaggtgaaactttgaataataaagattcaaaacagaaaatgcctcctggacaggttatatcaaaaactcagccttcctcccaaagacctttaaaacatgaaacatctactgtccaaaaaagtatgtttcrtgatgtgcgtgataataacaacaaggacagtgtttctgaacrgaagcctcacaaacctctcattaatcttgcatctgaaataagtgatgcagaagcactccagtcatcctgcaggcctgacccacaaaagccattaaacgatcaagaaaaagagaagttggcrttagaatgccaaaatatttcaaagctggataaatcattaaaacacgaactggaatcaaaacagatttgtttagataaaagtgaaacaaaatttcccaatcacaaagaaacagatgrttgcgatgcagctaacatatgttgtcattctgttgggagtgataatgtaaattcaaaattttatagcaccacagccctaaaatacatggtttcaaatccawatgaaaactccttgaactctaatccagtttgtgatttagactcaacaagtgcagggcaaatccatttgrtatcagatagggagaaccaagtagggagaaaagatacaaacaaacaatcaagtattaaatgtgtggaagatgtttcactgtgtaatcctgaaaggacaaatggtaccttaaattctgctcaagaagacaaaaaatcgaaagttcctgtggaaggactgacaattcctagtaagttgtcagatgaatctgctatggatgaagacaaacatgctacagcagactcagatgtatcttccaagtgtttttcgggacagctatcagaaraaaattctcctaaaaatayggaaacatcagaatctccagagagccatgaaactccagaaactccatttgtgggtcactggaatttgagtactggtgttctgcatcagcgagagagtcctgaatctgacactggcagtgctaccacctcctccgatgacataaagcccagatctgaagactatgatgctggagggtctcaggatgatgatgggtcaaatgacagaggtatctctaaatgtggcactatgctgtgccatgattttcttggaagaagtagcagtgataccagtactcctgaagaattaaaaatttatgatagtaatttaagaattgaagtaaaaatgaaaaagcaaagtartaatgatcttttccaagttaattcaacgagtgatgatgaaatccctaggaaaaggccagaaatttggtctcgatctgcaatagttcactctagggaaagagaaaatattccacgaggcagtgtccagtttgctcaggaaatagatcaggtatcttcttcagcagatgaaacagaagatgaaagatctgaagctgaaaacgttgcagaaaatttctctatatctaacccagctcctcagcagtttcagggaataattaatttagcttttgaagatgcaactgaaaatgaatgtcgtgaattttctgcaantaaaaagtttaaaaggtcagttttactttcagtcgatgaatgtgaagagctgggatcagatgaaggagaagtccatactccctttcaggcttctgtagattctktttcaccttctgatgtttttgatggcatttctcatgaacatcatggaaggacctgctattccagattctcacgagaaagtgaagataatattttagaatgtaaacaaaataaaggcaatagtgtatgtaaaaatgaaagcactgtcttggatcttagtagcattgactcttcaagaaaaaataaacagagtgtttcagccacagaaaaaaagaacacaatagacrtcctatccagtagaagcagacagcttcttcgagaagataaaaaagtaaacaatggaagcaatgtggaaaatgacattcagcaacgcagcaaattcttggatagtgatgtaaaatctcaagaaagaccatgtcacttggatcttcatcaaagagaacccaattctgacataccaaagaacagctctacaaaatctctagactcctttcggagtcaagttctgcctcaggaaggtccagtgaaagagagccattctacaactactgaaaaagctaatattgctttatctgcaggagacatagatgattgtgacacactggcacaaacccgcatgtatgaccatcggccttcaaaaaccctgtctccaatatatgagatggatgtaatagaagcatttgagcagaaagtggaatcagaaacacatgttacagatatggattttgaagatgaccaacattttgcraaacaagattggacactactaaagcaactgctctctgaacaggattcaaacttagatgttacaaattccgttcctgaagacttaagtttagcacagtatctaatcaatcagacactacttttagcacgagatagctcaaaacctcagggtataacacatattgacactttgaacagatggagtgaactaacatctccacttgattcctcagcgagcatcaccatggctagtttttcctctgaagattgttcgcctcaaggcgagtggacaattctggaactggaaactcagcattaagtgttaacattttggaaaaatttatgcyactcctttattttttgatgcctatattatatccaaatgataattgcattagccggatataaactttctttaatattgagtctttccaatttaatgaggtaaacatagtttatttattaatatatcacatatagaaaaatgtttttctaaagtttttgagcatgttttctctaattattagagaaattagaagacttataaggaaaccctagcttcagttttcctttcctagctgatgatttgttcacttaatcattattcaagaatttaaaatgtgaatgcagaagtagatcagtccctttactttttgctctgcatagggtaacatagtaatttaacaataaaaacttaccgtgcttgtgtccattc

SEQ ID NO: 393 - DNA, 1060 bp, Homo sapiens
ctagttctcactctgacgtcccgcgtcctttttcatttgtctgcttctcgctcccttccrtgttctgttccctcttcctccctcttccctgggcctgtttctcgctgtccctgtcttttatccttctcatctgcctcttttttgctcaccctgtttctcactgccctcccctccgcctttytcacccctctgtccttttgagctcttttttgctstgtctcttcatttgccttttgcactctcaaamtctttcatcttcccattcgctgtctgtatttctccataactatatctttcttcctctgtctccgcccacccacatttttctctttccctttctctctttggggaccctcccccatgctcccctgccccatccccttttccccttcccrtcttctcatccctccattcccatctttccccagcaattaccagctctggctgggtcrccacaacttgtttgacgacgaaaacacagcccagtttgttcatgtcagtgagagcttcccacaccctggcttcaacatgagcctcctggagaaccacacccgccaagcagacgaggactacagccacgacctcatgctgctccgcctgacagagcctgctgataccatcacagaygctgtgaaggtcgtggagttgcccaccsaggaacccgaagtggggagcacctgtttggcttccggctggggcagcatcgaaccagagaatttctcatttccagatgatctccagtgtgtggacctcaaaatcctgcctaatgatgagtgcraaaaagcccaygtccagaaggwgacagacttcatgctgtgtgtcggacacctggaaggtggcaaagacacctgtgtgggtgattcagggggcccgctgatgtgtgatggtgtgctccaaggtgtcacatcatggggctacgtcccttgtggcacccccaataagccttctgtcgccgtcagagtgctgtcttatgtgaagtggatcgaggacaccatagcggagaactcctgaacgcccagccctgtcccctacccccagtaaaatcaaatgtgcatccaat

SEQ ID NO: 394 - DNA, 874 bp, Homo sapiens
tcctccacctgctggcccctggacacctctgtcaccatgtggttcctggttctgtgcctcgccctgtccctgggggggactggtgctgcgcccccgattcagtcccggattgtgggaggctgggagtgtgagcagcattcccagccctggcaggcggctctgtaccatttcagcactttccagtgtgggggcatcctggtgcaccgccagtgggtgctcacagctgctcattgcatcagcgacaattaccagctctggctgggtcrccacaacttgtttgacgacgaaaacacagcccagtttgttcatgtcagtgagagcttcccacaccctggcttcaacatgagcctcctggagaaccacacccgccaagcagacgaggactacagccacgacctcatgctgctccgcctgacagagcctgctgataccatcacagaygctgtgaaggtcgtggagttgcccaccsaggaacccgaagtggggagcacctgtttggcttccggctggggcagcatcgaaccagagaatttctcatttccagatgatctccagtgtgtggacctcaaaatcctgcctaatgatgagtgcraaaaagcccaygtccagaaggwgacagacttcatgctgtgtgtcggacacctggaaggtggcaaagacacctgtgtgggtgattcagggggcccgctgatgtgtgatggtgtgctccaaggtgtcacatcatggggctacgtcccttgtggcacccccaataagccttctgtcgccgtcagagtgctgtcttatgtgaagtggatcgaggacaccatagcggagaactcctgaacgcccagccctgtcccctacccccagtaaaatcaaatgtgcatccaat

SEQ ID NO: 395 - DNA, 3487 bp, Homo sapiens
cgggggcctggcccgcgcgctcccctcccgcaggcgccacctcggacatccccgggattgctacttctctgccaacttcgccaactcgccagcacttggagaggcccggctcccctcccggcgccctctgaccgcccccgccccgcgcgctctccgaccaccgcctctcggatgamcaggttccaggggagctgagcgagtcgcctcccccgcccagcttcagccctggctgcagctgcagcgcgagccatgcgcccccagtgcaccccggcccggcccaccgccccggggccattctgctgaccgcccagccccgagccccgacagtggcaagttgcggctactgcrgttgcaagctccggccaacccggaggagccccagcggggagcgcagtgctgcgccccccgcccccgcgcgccccgcagcagccgggcgttcactcatcctccctccccyaccgtccctcccttttctcctcaagtcctgaagttgagtttgagaggcgacacggcggcggcggccgcgctgctcccgctcctctgcctccccatggatatgcactgcaaagcagaccccttctccgcgatgcacccagggcacgggggtgtgaaccagctcgggggggtgtttgtgaacggccggcccctacccgacgtggtgaggcagcgcatcgtggagctggcccaccagggtgtgcggccctgtgacatctcccggcagctgcgggtcagccacggctgtgtcagcaaaatcctgggcaggtactacgagaccrgcagcatcaagccgggtgtgatcggtggctccaagcccaaagtggcgacgcccaaagtggtggacaagattgctgaatacaaacgacagaacccgactatgttcgcctgggagattcgagaccggctcctggccgagggcatctgtgacaatgacacagtgcccagcgtctcttccatcaacagaatcatccggaccaaagttcagcagcctttccacccaacgccggatggggctgggacaggagtgaccgcccctggccacaccattgttcccagcacggcctcccctcctgtttccagcgcctccaatgacccagtgggatcctactccatcaatgggatcctggggattcctcgctccaatggtgagaagaggaaacgtgatgaagttgaggtatacactgatcctgcccacattagaggaggtggaggtttgcatctggtctggactttaagagatgtgtctgagggctcagtccccaatggagattcccagagtggtgtggacagtttgcggaagcacttgygagctgacaccttcacccagyagcagctggaagctttggatcgggtctttgagcgtccttcctaccctgacgtcttccaggcatcagagcacatcaaatcagaacaggggaaygagtactccctcccagccctgacccctgggcttgatgaagtcaagtcgagtctatctgcatccaccaaccctgagctgggcagcaacgtgtcaggcacacagacatacccmgttgtgactggtcgtgacatggcgagcaccactctgcctggttacccccctcacgtgccccccactggccagggaagctaccccacctccaccctggcaggaatggtgcctgggagcgagttctccggcaacccgtacagccacccccagtacacggcctacaacgaggcttggagattcagcaaccccgccttactaatgccgccccccggggctccgcccctgccgctgctgccgctgcctatgaccgccactagttaccgcggggaccacatcaagcttcaggccgacagcttcggcctccacatcgtccccgtctgaccccaccccggagggagggaggaccgacgcgacgcgatgcctcccggccaccgccccagcctcaccccatcccacgacccccgcaacccttcacatcacccccctcgaaggtcggacaggacgggtggagccgygggcgggaccctcaggcccgggcccgccgcccccagccccgcctgccgcccctccccgcctgcctggactgcgcggcgccgtgagggggattcggcccagctcgtcccggcctccaccaagccagccccgaagcccgccagccaccctgccggactcgggcgcgacctgctggcgcgcgccggatgtttctgtgacacacaatcagcgcggaccgcagcgcggcccagccccgggcacccgcctcggacgctcgggcgccaggaggcttcgctggaggggctgggccaaggagattaagaagaaaacgactttctgcaggaggaagagcccgctgccgaatccctgggaaaaattcttttcccccagtgccagccggactgccctcgccttccgggtgtgccctgtcccagaagatggaatgggggtgtgggggtccggctctaggaacgggctttgggggcgtcaggtctttccaaggttgggacccaaggatcggggggcccagcagcccgcaccgatcgagccggactctcggctcttcactgctcctcctggcctgcctagttccccagggcccggcacctcctgctgcgagacccggctctcagccctgccttgcccctacctcagcgtctcttccacctgctggcctcccagtttcccctcctgccagtccttcgcctgtcccttgacgccctgcatcctcctccctgactcgcagccccatcggacgctctcccgggaccgccgcaggaccagtttccatagactgcggactggggtcttcctccagcagttacttgatgccccctcccccgacacagactctcaatctgccggtggtaagaaccggttctgagctggcgtctgagctgctgcggggtggaagtggggggctgcccactccactcctcccatcccctcccagcctcctcctccggcaggaactgaacagaaccacaaaaagtctacatttatttaatatgatggtctttgcaaaaaggaacaaaacaacacaaaagcccaccaggctgctgctttgtggaaagacggtgtgtgtcgtgtgaaggcgaaacccggtgtacataacccctccccctccgccccgccccgcccggccccgtagagtccctgtcgcccgccggccctgcctgtagatacgccccgctgtctgtgctgtgagagtcgccgctcgctgggggggaagggggggacacagctacacgcccattaaagcacagcacgtcctgggggaggggggcattttttatgttacaaaaaaaaattacgaaagaaaagaaatctctwtgcaaaatgacgaacatggtcctgtggactcctctggcctgttttgttggctctttctctgtaattccgtgttttcgctttttcctccctgcccctctctccctctgcccctctctcctctccgcttctctccccctctgtctctgtctctctccgtctctgtcgctcttgtctgtctgtctctgctctttcctc

SEQ ID NO: 396 - DNA, 3506 bp, Homo sapiens
cgggggcctggcccgcgcgctcccctcccgcaggcgccacctcggacatccccgggattgctacttctctgccaacttcgccaactcgccagcacttggagaggcccggctcccctcccggcgccctctgaccgcccccgccccgcgcgctctccgaccaccgcctctcggatgamcaggttccaggggagctgagcgagtcgcctcccccgcccagcttcagccctggctgcagctgcagcgcgagccatgcgcccccagtgcaccccggcccggcccaccgccccggggccattctgctgaccgcccagccccgagccccgacagtggcaagttgcggctactgcrgttgcaagctccggccaacccggaggagccccagcggggagcgcagtgctgcgccccccgcccccgcgcgccccgcagcagccgggcgttcactcatcctccctccccyaccgtccctcccttttctcctcaagtcctgaagttgagtttgagaggcgacacggcggcggcggccgcgctgctcccgctcctctgcctccccatggatatgcactgcaaagcagaccccttctccgcgatgcacccagggcacgggggtgtgaaccagctcgggggggtgtttgtgaacggccggcccctacccgacgtggtgaggcagcgcatcgtggagctggcccaccagggtgtgcggccctgtgacatctcccggcagctgcgggtcagccacggctgtgtcagcaaaatcctgggcaggtactacgagaccrgcagcatcaagccgggtgtgatcggtggctccaagcccaaagtggcgacgcccaaagtggtggacaagattgctgaatacaaacgacagaacccgactatgttcgcctgggagattcgagaccggctcctggccgagggcatctgtgacaatgacacagtgcccagcgtctcttccatcaacagaatcatccggaccaaagttcagcagcctttccacccaacgccggatggggctgggacaggagtgaccgcccctggccacaccattgttcccagcacggcctcccctcctgtttccagcgcctccaatgacccagtgggatcctactccatcaatgggatcctggggattcctcgctccaatggtgagaagaggaaacgtgatgaagttgaggtatacactgatcctgcccacattagaggaggtggaggtttgcatctggtctggactttaagagatgtgtctgagggctcagtccccaatggagattcccagagtggtgtggacagtttgcggaagcacttgygagctgacaccttcacccagyagcagctggaagctttggatcgggtctttgagcgtccttcctaccctgacgtcttccaggcatcagagcacatcaaatcagaacaggggaaygagtactccctcccagccctgacccctgggcttgatgaagtcaagtcgagtctatctgcatccaccaaccctgagctgggcagcaacgtgtcaggcacacagacatacccmgttgtgactggtcgtgacatggcgagcaccactctgcctggttacccccctcacgtgccccccactggccagggaagctaccccacctccaccctggcaggaatggtgcctgggagcgagttctccggcaacccgtacagccacccccagtacacggcctacaacgaggcttggagattcagcaaccccgccttactaagttccccttattattatagtgccgccccccggggctccgcccctgccgctgctgccgctgcctatgaccgccactagttaccgcggggaccacatcaagcttcaggccgacagcttcggcctccacatcgtccccgtctgaccccaccccggagggagggaggaccgacgcgacgcgatgcctcccggccaccgccccagcctcaccccatcccacgacccccgcaacccttcacatcacccccctcgaaggtcggacaggacgggtggagccgygggcgggaccctcaggcccgggcccgccgcccccagccccgcctgccgcccctccccgcctgcctggactgcgcggcgccgtgagggggattcggcccagctcgtcccggcctccaccaagccagccccgaagcccgccagccaccctgccggactcgggcgcgacctgctggcgcgcgccggatgtttctgtgacacacaatcagcgcggaccgcagcgcggcccagccccgggcacccgcctcggacgctcgggcgccaggaggcttcgctggaggggctgggccaaggagattaagaagaaaacgactttctgcaggaggaagagcccgctgccgaatccctgggaaaaattcttttcccccagtgccagccggactgccctcgccttccgggtgtgccctgtcccagaagatggaatgggggtgtgggggtccggctctaggaacgggctttgggggcgtcaggtctttccaaggttgggacccaaggatcggggggcccagcagcccgcaccgatcgagccggactctcggctcttcactgctcctcctggcctgcctagttccccagggcccggcacctcctgctgcgagacccggctctcagccctgccttgcccctacctcagcgtctcttccacctgctggcctcccagtttcccctcctgccagtccttcgcctgtcccttgacgccctgcatcctcctccctgactcgcagccccatcggacgctctcccgggaccgccgcaggaccagtttccatagactgcggactggggtcttcctccagcagttacttgatgccccctcccccgacacagactctcaatctgccggtggtaagaaccggttctgagctggcgtctgagctgctgcggggtggaagtggggggctgcccactccactcctcccatcccctcccagcctcctcctccggcaggaactgaacagaaccacaaaaagtctacatttatttaatatgatggtctttgcaaaaaggaacaaaacaacacaaaagcccaccaggctgctgctttgtggaaagacggtgtgtgtcgtgtgaaggcgaaacccggtgtacataacccctccccctccgccccgccccgcccggccccgtagagtccctgtcgcccgccggccctgcctgtagatacgccccgctgtctgtgctgtgagagtcgccgctcgctgggggggaagggggggacacagctacacgcccattaaagcacagcacgtcctgggggaggggggcattttttatgttacaaaaaaaaattacgaaagaaaagaaatctctwtgcaaaatgacgaacatggtcctgtggactcctctggcctgttttgttggctctttctctgtaattccgtgttttcgctttttcctccctgcccctctctccctctgcccctctctcctctccgcttctctccccctctgtctctgtctctctccgtctctgtcgctcttgtctgtctgtctctgctctttcctc

SEQ ID NO: 397 - DNA, 3452 bp, Homo sapiens
cgggggcctggcccgcgcgctcccctcccgcaggcgccacctcggacatccccgggattgctacttctctgccaacttcgccaactcgccagcacttggagaggcccggctcccctcccggcgccctctgaccgcccccgccccgcgcgctctccgaccaccgcctctcggatgamcaggttccaggggagctgagcgagtcgcctcccccgcccagcttcagccctggctgcagctgcagcgcgagccatgcgcccccagtgcaccccggcccggcccaccgccccggggccattctgctgaccgcccagccccgagccccgacagtggcaagttgcggctactgcrgttgcaagctccggccaacccggaggagccccagcggggagcgcagtgctgcgccccccgcccccgcgcgccccgcagcagccgggcgttcactcatcctccctccccyaccgtccctcccttttctcctcaagtcctgaagttgagtttgagaggcgacacggcggcggcggccgcgctgctcccgctcctctgcctccccatggatatgcactgcaaagcagaccccttctccgcgatgcacccagggcacgggggtgtgaaccagctcgggggggtgtttgtgaacggccggcccctacccgacgtggtgaggcagcgcatcgtggagctggcccaccagggtgtgcggccctgtgacatctcccggcagctgcgggtcagccacggctgtgtcagcaaaatcctgggcaggtactacgagaccrgcagcatcaagccgggtgtgatcggtggctccaagcccaaagtggcgacgcccaaagtggtggacaagattgctgaatacaaacgacagaacccgactatgttcgcctgggagattcgagaccggctcctggccgagggcatctgtgacaatgacacagtgcccagcgtctcttccatcaacagaatcatccggaccaaagttcagcagcctttccacccaacgccggatggggctgggacaggagtgaccgcccctggccacaccattgttcccagcacggcctcccctcctgtttccagcgcctccaatgacccagtgggatcctactccatcaatgggatcctggggattcctcgctccaatggtgagaagaggaaacgtgatgaagatgtgtctgagggctcagtccccaatggagattcccagagtggtgtggacagtttgcggaagcacttgygagctgacaccttcacccagyagcagctggaagctttggatcgggtctttgagcgtccttcctaccctgacgtcttccaggcatcagagcacatcaaatcagaacaggggaaygagtactccctcccagccctgacccctgggcttgatgaagtcaagtcgagtctatctgcatccaccaaccctgagctgggcagcaacgtgtcaggcacacagacatacccmgttgtgactggtcgtgacatggcgagcaccactctgcctggttacccccctcacgtgccccccactggccagggaagctaccccacctccaccctggcaggaatggtgcctgggagcgagttctccggcaacccgtacagccacccccagtacacggcctacaacgaggcttggagattcagcaaccccgccttactaagtgaatcgggtccctcttccccttattattatagtgccgccccccggggctccgcccctgccgctgctgccgctgcctatgaccgccactagttaccgcggggaccacatcaagcttcaggccgacagcttcggcctccacatcgtccccgtctgaccccaccccggagggagggaggaccgacgcgacgcgatgcctcccggccaccgccccagcctcaccccatcccacgacccccgcaacccttcacatcacccccctcgaaggtcggacaggacgggtggagccgygggcgggaccctcaggcccgggcccgccgcccccagccccgcctgccgcccctccccgcctgcctggactgcgcggcgccgtgagggggattcggcccagctcgtcccggcctccaccaagccagccccgaagcccgccagccaccctgccggactcgggcgcgacctgctggcgcgcgccggatgtttctgtgacacacaatcagcgcggaccgcagcgcggcccagccccgggcacccgcctcggacgctcgggcgccaggaggcttcgctggaggggctgggccaaggagattaagaagaaaacgactttctgcaggaggaagagcccgctgccgaatccctgggaaaaattcttttcccccagtgccagccggactgccctcgccttccgggtgtgccctgtcccagaagatggaatgggggtgtgggggtccggctctaggaacgggctttgggggcgtcaggtctttccaaggttgggacccaaggatcggggggcccagcagcccgcaccgatcgagccggactctcggctcttcactgctcctcctggcctgcctagttccccagggcccggcacctcctgctgcgagacccggctctcagccctgccttgcccctacctcagcgtctcttccacctgctggcctcccagtttcccctcctgccagtccttcgcctgtcccttgacgccctgcatcctcctccctgactcgcagccccatcggacgctctcccgggaccgccgcaggaccagtttccatagactgcggactggggtcttcctccagcagttacttgatgccccctcccccgacacagactctcaatctgccggtggtaagaaccggttctgagctggcgtctgagctgctgcggggtggaagtggggggctgcccactccactcctcccatcccctcccagcctcctcctccggcaggaactgaacagaaccacaaaaagtctacatttatttaatatgatggtctttgcaaaaaggaacaaaacaacacaaaagcccaccaggctgctgctttgtggaaagacggtgtgtgtcgtgtgaaggcgaaacccggtgtacataacccctccccctccgccccgccccgcccggccccgtagagtccctgtcgcccgccggccctgcctgtagatacgccccgctgtctgtgctgtgagagtcgccgctcgctgggggggaagggggggacacagctacacgcccattaaagcacagcacgtcctgggggaggggggcattttttatgttacaaaaaaaaattacgaaagaaaagaaatctctwtgcaaaatgacgaacatggtcctgtggactcctctggcctgttttgttggctctttctctgtaattccgtgttttcgctttttcctccctgcccctctctccctctgcccctctctcctctccgcttctctccccctctgtctctgtctctctccgtctctgtcgctcttgtctgtctgtctctgctctttcctc

SEQ ID NO: 398 - DNA, 1738 bp, Homo sapiens
cgggggcctggcccgcgcgctcccctcccgcaggcgccacctcggacatccccgggattgctacttctctgccaacttcgccaactcgccagcacttggagaggcccggctcccctcccggcgccctctgaccgcccccgccccgcgcgctctccgaccaccgcctctcggatgamcaggttccaggggagctgagcgagtcgcctcccccgcccagcttcagccctggctgcagctgcagcgcgagccatgcgcccccagtgcaccccggcccggcccaccgccccggggccattctgctgaccgcccagccccgagccccgacagtggcaagttgcggctactgcrgttgcaagctccggccaacccggaggagccccagcggggagcgcagtgctgcgccccccgcccccgcgcgccccgcagcagccgggcgttcactcatcctccctccccyaccgtccctcccttttctcctcaagtcctgaagttgagtttgagaggcgacacggcggcggcggccgcgctgctcccgctcctctgcctccccatggatatgcactgcaaagcagaccccttctccgcgatgcacccagggcacgggggtgtgaaccagctcgggggggtgtttgtgaacggccggcccctacccgacgtggtgaggcagcgcatcgtggagctggcccaccagggtgtgcggccctgtgacatctcccggcagctgcgggtcagccacggctgtgtcagcaaaatcctgggcaggtactacgagaccrgcagcatcaagccgggtgtgatcggtggctccaagcccaaagtggcgacgcccaaagtggtggacaagattgctgaatacaaacgacagaacccgactatgttcgcctgggagattcgagaccggctcctggccgagggcatctgtgacaatgacacagtgcccagcgtctcttccatcaacagaatcatccggaccaaagttcagcagcctttccacccaacgccggatggggctgggacaggagtgaccgcccctggccacaccattgttcccagcacggcctcccctcctgtttccagcgcctccaatgacccagtgggatcctactccatcaatgggatcctggggattcctcgctccaatggtgagaagaggaaacgtgatgaagatgtgtctgagggctcagtccccaatggagattcccagagtggtgtggacagtttgcggaagcacttgygagctgacaccttcacccagyagcagctggaagctttggatcgggtctttgagcgtccttcctaccctgacgtcttccaggcatcagagcacatcaaatcagaacaggggaaygagtactccctcccagccctgacccctgggcttgatgaagtcaagtcgagtctatctgcatccaccaaccctgagctgggcagcaacgtgtcaggcacacagacatacccmgttgtgactggtcgtgacatggcgagcaccactctgcctggttacccccctcacgtgccccccactggccagggaagctaccccacctccaccctggcaggaatggtgcctgaggctgcagttggtccctcatcctccctcatgagcaagccggggaggaagcttgcagaagtgcccccttgtgtgcaacccactggagcgagttctccggcaacccgtacagccacccccagtacacggcctacaacgaggcttggagattcagcaaccccgccttac

SEQ ID NO: 399 - DNA, 2977 bp, Homo sapiens
ctgctcccgctcctctgcctccccatggatatgcactgcaaagcagaccccttctccgcgatgcaccggcacgggggtgtgaaccagctcgggggggtgtttgtgaacggccggcccctacccgacgtggtgaggcagcgcatcgtggagctggcccaccagggtgtgcggccctgtgacatctcccggcagctgcgggtcagccacggctgtgtcagcaaaatcctgggcaggtactacgagaccrgcagcatcaagccgggtgtgatcggtggctccaagcccaaagtggcgacgcccaaagtggtggacaagattgctgaatacaaacgacagaacccgactatgttcgcctgggagattcgagaccggctcctggccgagggcatctgtgacaatgacacagtgcccagcgtctcttccatcaacagaatcatccggaccaaagttcagcagcctttccacccaacgccggatggggctgggacaggagtgaccgcccctggccacaccattgttcccagcacggcctcccctcctgtttccagcgcctccaatgacccagtgggatcctactccatcaatgggatcctggggattcctcgctccaatggtgagaagaggaaacgtgatgaagttgaggtatacactgatcctgcccacattagaggaggtggaggtttgcatctggtctggactttaagagatgtgtctgagggctcagtccccaatggagattcccagagtggtgtggacagtttgcggaagcacttgygagctgacaccttcacccagyagcagctggaagctttggatcgggtctttgagcgtccttcctaccctgacgtcttccaggcatcagagcacatcaaatcagaacaggggaaygagtactccctcccagccctgacccctgggcttgatgaagtcaagtcgagtctatctgcatccaccaaccctgagctgggcagcaacgtgtcaggcacacagacatacccmgttgtgactggtcgtgacatggcgagcaccactctgcctggttacccccctcacgtgccccccactggccagggaagctaccccacctccaccctggcaggaatggtgcctgggagcgagttctccggcaacccgtacagccacccccagtacacggcctacaacgaggcttggagattcagcaaccccgccttactaagttccccttattattatagtgccgccccccggggctccgcccctgccgctgctgccgctgcctatgaccgccactagttaccgcggggaccacatcaagcttcaggccgacagcttcggcctccacatcgtccccgtctgaccccaccccggagggagggaggaccgacgcgacgcgatgcctcccggccaccgccccagcctcaccccatcccacgacccccgcaacccttcacatcacccccctcgaaggtcggacaggacgggtggagccgygggcgggaccctcaggcccgggcccgccgcccccagccccgcctgccgcccctccccgcctgcctggactgcgcggcgccgtgagggggattcggcccagctcgtcccggcctccaccaagccagccccgaagcccgccagccaccctgccggactcgggcgcgacctgctggcgcgcgccggatgtttctgtgacacacaatcagcgcggaccgcagcgcggcccagccccgggcacccgcctcggacgctcgggcgccaggaggcttcgctggaggggctgggccaaggagattaagaagaaaacgactttctgcaggaggaagagcccgctgccgaatccctgggaaaaattcttttcccccagtgccagccggactgccctcgccttccgggtgtgccctgtcccagaagatggaatgggggtgtgggggtccggctctaggaacgggctttgggggcgtcaggtctttccaaggttgggacccaaggatcggggggcccagcagcccgcaccgatcgagccggactctcggctcttcactgctcctcctggcctgcctagttccccagggcccggcacctcctgctgcgagacccggctctcagccctgccttgcccctacctcagcgtctcttccacctgctggcctcccagtttcccctcctgccagtccttcgcctgtcccttgacgccctgcatcctcctccctgactcgcagccccatcggacgctctcccgggaccgccgcaggaccagtttccatagactgcggactggggtcttcctccagcagttacttgatgccccctcccccgacacagactctcaatctgccggtggtaagaaccggttctgagctggcgtctgagctgctgcggggtggaagtggggggctgcccactccactcctcccatcccctcccagcctcctcctccggcaggaactgaacagaaccacaaaaagtctacatttatttaatatgatggtctttgcaaaaaggaacaaaacaacacaaaagcccaccaggctgctgctttgtggaaagacggtgtgtgtcgtgtgaaggcgaaacccggtgtacataacccctccccctccgccccgccccgcccggccccgtagagtccctgtcgcccgccggccctgcctgtagatacgccccgctgtctgtgctgtgagagtcgccgctcgctgggggggaagggggggacacagctacacgcccattaaagcacagcacgtcctgggggaggggggcattttttatgttacaaaaaaaaattacgaaagaaaagaaatctctwtgcaaaatgacgaacatggtcctgtggactcctctggcctgttttgttggctctttctctgtaattccgtgttttcgctttttcctccctgcccctctctccctctgcccctctctcctctccgcttctctccccctctgtctctgtctctctccgtctctgtcgctcttgtctgtctgtctctgctctttcctc

SEQ ID NO: 400 - DNA, 3437 bp, Homo sapiens
cgggggcctggcccgcgcgctcccctcccgcaggcgccacctcggacatccccgggattgctacttctctgccaacttcgccaactcgccagcacttggagaggcccggctcccctcccggcgccctctgaccgcccccgccccgcgcgctctccgaccaccgcctctcggatgamcaggttccaggggagctgagcgagtcgcctcccccgcccagcttcagccctggctgcagctgcagcgcgagccatgcgcccccagtgcaccccggcccggcccaccgccccggggccattctgctgaccgcccagccccgagccccgacagtggcaagttgcggctactgcrgttgcaagctccggccaacccggaggagccccagcggggagcgcagtgctgcgccccccgcccccgcgcgccccgcagcagccgggcgttcactcatcctccctccccyaccgtccctcccttttctcctcaagtcctgaagttgagtttgagaggcgacacggcggcggcggccgcgctgctcccgctcctctgcctccccatggatatgcactgcaaagcagaccccttctccgcgatgcacccagggcacgggggtgtgaaccagctcgggggggtgtttgtgaacggccggcccctacccgacgtggtgaggcagcgcatcgtggagctggcccaccagggtgtgcggccctgtgacatctcccggcagctgcgggtcagccacggctgtgtcagcaaaatcctgggcaggtactacgagaccrgcagcatcaagccgggtgtgatcggtggctccaagcccaaagtggcgacgcccaaagtggtggacaagattgctgaatacaaacgacagaacccgactatgttcgcctgggagattcgagaccggctcctggccgagggcatctgtgacaatgacacagtgcccagcgtctcttccatcaacagaatcatccggaccaaagttcagcagcctttccacccaacgccggatggggctgggacaggagtgaccgcccctggccacaccattgttcccagcacggcctcccctcctgtttccagcgcctccaatgacccagtgggatcctactccatcaatgggatcctggggattcctcgctccaatggtgagaagaggaaacgtgatgaagatgtgtctgagggctcagtccccaatggagattcccagagtggtgtggacagtttgcggaagcacttgygagctgacaccttcacccagyagcagctggaagctttggatcgggtctttgagcgtccttcctaccctgacgtcttccaggcatcagagcacatcaaatcagaacaggggaaygagtactccctcccagccctgacccctgggcttgatgaagtcaagtcgagtctatctgcatccaccaaccctgagctgggcagcaacgtgtcaggcacacagacatacccmgttgtgactggtcgtgacatggcgagcaccactctgcctggttacccccctcacgtgccccccactggccagggaagctaccccacctccaccctggcaggaatggtgcctgggagcgagttctccggcaacccgtacagccacccccagtacacggcctacaacgaggcttggagattcagcaaccccgccttactaagttccccttattattatagtgccgccccccggggctccgcccctgccgctgctgccgctgcctatgaccgccactagttaccgcggggaccacatcaagcttcaggccgacagcttcggcctccacatcgtccccgtctgaccccaccccggagggagggaggaccgacgcgacgcgatgcctcccggccaccgccccagcctcaccccatcccacgacccccgcaacccttcacatcacccccctcgaaggtcggacaggacgggtggagccgygggcgggaccctcaggcccgggcccgccgcccccagccccgcctgccgcccctccccgcctgcctggactgcgcggcgccgtgagggggattcggcccagctcgtcccggcctccaccaagccagccccgaagcccgccagccaccctgccggactcgggcgcgacctgctggcgcgcgccggatgtttctgtgacacacaatcagcgcggaccgcagcgcggcccagccccgggcacccgcctcggacgctcgggcgccaggaggcttcgctggaggggctgggccaaggagattaagaagaaaacgactttctgcaggaggaagagcccgctgccgaatccctgggaaaaattcttttcccccagtgccagccggactgccctcgccttccgggtgtgccctgtcccagaagatggaatgggggtgtgggggtccggctctaggaacgggctttgggggcgtcaggtctttccaaggttgggacccaaggatcggggggcccagcagcccgcaccgatcgagccggactctcggctcttcactgctcctcctggcctgcctagttccccagggcccggcacctcctgctgcgagacccggctctcagccctgccttgcccctacctcagcgtctcttccacctgctggcctcccagtttcccctcctgccagtccttcgcctgtcccttgacgccctgcatcctcctccctgactcgcagccccatcggacgctctcccgggaccgccgcaggaccagtttccatagactgcggactggggtcttcctccagcagttacttgatgccccctcccccgacacagactctcaatctgccggtggtaagaaccggttctgagctggcgtctgagctgctgcggggtggaagtggggggctgcccactccactcctcccatcccctcccagcctcctcctccggcaggaactgaacagaaccacaaaaagtctacatttatttaatatgatggtctttgcaaaaaggaacaaaacaacacaaaagcccaccaggctgctgctttgtggaaagacggtgtgtgtcgtgtgaaggcgaaacccggtgtacataacccctccccctccgccccgccccgcccggccccgtagagtccctgtcgcccgccggccctgcctgtagatacgccccgctgtctgtgctgtgagagtcgccgctcgctgggggggaagggggggacacagctacacgcccattaaagcacagcacgtcctgggggaggggggcattttttatgttacaaaaaaaaattacgaaagaaaagaaatctctwtgcaaaatgacgaacatggtcctgtggactcctctggcctgttttgttggctctttctctgtaattccgtgttttcgctttttcctccctgcccctctctccctctgcccctctctcctctccgcttctctccccctctgtctctgtctctctccgtctctgtcgctcttgtctgtctgtctctgctctttcctc

SEQ ID NO: 401 - DNA, 2992 bp, Homo sapiens
ctgctcccgctcctctgcctccccatggatatgcactgcaaagcagaccccttctccgcgatgcaccggcacgggggtgtgaaccagctcgggggggtgtttgtgaacggccggcccctacccgacgtggtgaggcagcgcatcgtggagctggcccaccagggtgtgcggccctgtgacatctcccggcagctgcgggtcagccacggctgtgtcagcaaaatcctgggcaggtactacgagaccrgcagcatcaagccgggtgtgatcggtggctccaagcccaaagtggcgacgcccaaagtggtggacaagattgctgaatacaaacgacagaacccgactatgttcgcctgggagattcgagaccggctcctggccgagggcatctgtgacaatgacacagtgcccagcgtctcttccatcaacagaatcatccggaccaaagttcagcagcctttccacccaacgccggatggggctgggacaggagtgaccgcccctggccacaccattgttcccagcacggcctcccctcctgtttccagcgcctccaatgacccagtgggatcctactccatcaatgggatcctggggattcctcgctccaatggtgagaagaggaaacgtgatgaagttgaggtatacactgatcctgcccacattagaggaggtggaggtttgcatctggtctggactttaagagatgtgtctgagggctcagtccccaatggagattcccagagtggtgtggacagtttgcggaagcacttgygagctgacaccttcacccagyagcagctggaagctttggatcgggtctttgagcgtccttcctaccctgacgtcttccaggcatcagagcacatcaaatcagaacaggggaaygagtactccctcccagccctgacccctgggcttgatgaagtcaagtcgagtctatctgcatccaccaaccctgagctgggcagcaacgtgtcaggcacacagacatacccmgttgtgactggtcgtgacatggcgagcaccactctgcctggttacccccctcacgtgccccccactggccagggaagctaccccacctccaccctggcaggaatggtgcctgggagcgagttctccggcaacccgtacagccacccccagtacacggcctacaacgaggcttggagattcagcaaccccgccttactaagtgaatcgggtccctcttccccttattattatagtgccgccccccggggctccgcccctgccgctgctgccgctgcctatgaccgccactagttaccgcggggaccacatcaagcttcaggccgacagcttcggcctccacatcgtccccgtctgaccccaccccggagggagggaggaccgacgcgacgcgatgcctcccggccaccgccccagcctcaccccatcccacgacccccgcaacccttcacatcacccccctcgaaggtcggacaggacgggtggagccgygggcgggaccctcaggcccgggcccgccgcccccagccccgcctgccgcccctccccgcctgcctggactgcgcggcgccgtgagggggattcggcccagctcgtcccggcctccaccaagccagccccgaagcccgccagccaccctgccggactcgggcgcgacctgctggcgcgcgccggatgtttctgtgacacacaatcagcgcggaccgcagcgcggcccagccccgggcacccgcctcggacgctcgggcgccaggaggcttcgctggaggggctgggccaaggagattaagaagaaaacgactttctgcaggaggaagagcccgctgccgaatccctgggaaaaattcttttcccccagtgccagccggactgccctcgccttccgggtgtgccctgtcccagaagatggaatgggggtgtgggggtccggctctaggaacgggctttgggggcgtcaggtctttccaaggttgggacccaaggatcggggggcccagcagcccgcaccgatcgagccggactctcggctcttcactgctcctcctggcctgcctagttccccagggcccggcacctcctgctgcgagacccggctctcagccctgccttgcccctacctcagcgtctcttccacctgctggcctcccagtttcccctcctgccagtccttcgcctgtcccttgacgccctgcatcctcctccctgactcgcagccccatcggacgctctcccgggaccgccgcaggaccagtttccatagactgcggactggggtcttcctccagcagttacttgatgccccctcccccgacacagactctcaatctgccggtggtaagaaccggttctgagctggcgtctgagctgctgcggggtggaagtggggggctgcccactccactcctcccatcccctcccagcctcctcctccggcaggaactgaacagaaccacaaaaagtctacatttatttaatatgatggtctttgcaaaaaggaacaaaacaacacaaaagcccaccaggctgctgctttgtggaaagacggtgtgtgtcgtgtgaaggcgaaacccggtgtacataacccctccccctccgccccgccccgcccggccccgtagagtccctgtcgcccgccggccctgcctgtagatacgccccgctgtctgtgctgtgagagtcgccgctcgctgggggggaagggggggacacagctacacgcccattaaagcacagcacgtcctgggggaggggggcattttttatgttacaaaaaaaaattacgaaagaaaagaaatctctwtgcaaaatgacgaacatggtcctgtggactcctctggcctgttttgttggctctttctctgtaattccgtgttttcgctttttcctccctgcccctctctccctctgcccctctctcctctccgcttctctccccctctgtctctgtctctctccgtctctgtcgctcttgtctgtctgtctctgctctttcctc

SEQ ID NO: 402 - DNA, 3418 bp, Homo sapiens
cgggggcctggcccgcgcgctcccctcccgcaggcgccacctcggacatccccgggattgctacttctctgccaacttcgccaactcgccagcacttggagaggcccggctcccctcccggcgccctctgaccgcccccgccccgcgcgctctccgaccaccgcctctcggatgamcaggttccaggggagctgagcgagtcgcctcccccgcccagcttcagccctggctgcagctgcagcgcgagccatgcgcccccagtgcaccccggcccggcccaccgccccggggccattctgctgaccgcccagccccgagccccgacagtggcaagttgcggctactgcrgttgcaagctccggccaacccggaggagccccagcggggagcgcagtgctgcgccccccgcccccgcgcgccccgcagcagccgggcgttcactcatcctccctccccyaccgtccctcccttttctcctcaagtcctgaagttgagtttgagaggcgacacggcggcggcggccgcgctgctcccgctcctctgcctccccatggatatgcactgcaaagcagaccccttctccgcgatgcacccagggcacgggggtgtgaaccagctcgggggggtgtttgtgaacggccggcccctacccgacgtggtgaggcagcgcatcgtggagctggcccaccagggtgtgcggccctgtgacatctcccggcagctgcgggtcagccacggctgtgtcagcaaaatcctgggcaggtactacgagaccrgcagcatcaagccgggtgtgatcggtggctccaagcccaaagtggcgacgcccaaagtggtggacaagattgctgaatacaaacgacagaacccgactatgttcgcctgggagattcgagaccggctcctggccgagggcatctgtgacaatgacacagtgcccagcgtctcttccatcaacagaatcatccggaccaaagttcagcagcctttccacccaacgccggatggggctgggacaggagtgaccgcccctggccacaccattgttcccagcacggcctcccctcctgtttccagcgcctccaatgacccagtgggatcctactccatcaatgggatcctggggattcctcgctccaatggtgagaagaggaaacgtgatgaagatgtgtctgagggctcagtccccaatggagattcccagagtggtgtggacagtttgcggaagcacttgygagctgacaccttcacccagyagcagctggaagctttggatcgggtctttgagcgtccttcctaccctgacgtcttccaggcatcagagcacatcaaatcagaacaggggaaygagtactccctcccagccctgacccctgggcttgatgaagtcaagtcgagtctatctgcatccaccaaccctgagctgggcagcaacgtgtcaggcacacagacatacccmgttgtgactggtcgtgacatggcgagcaccactctgcctggttacccccctcacgtgccccccactggccagggaagctaccccacctccaccctggcaggaatggtgcctgggagcgagttctccggcaacccgtacagccacccccagtacacggcctacaacgaggcttggagattcagcaaccccgccttactaatgccgccccccggggctccgcccctgccgctgctgccgctgcctatgaccgccactagttaccgcggggaccacatcaagcttcaggccgacagcttcggcctccacatcgtccccgtctgaccccaccccggagggagggaggaccgacgcgacgcgatgcctcccggccaccgccccagcctcaccccatcccacgacccccgcaacccttcacatcacccccctcgaaggtcggacaggacgggtggagccgygggcgggaccctcaggcccgggcccgccgcccccagccccgcctgccgcccctccccgcctgcctggactgcgcggcgccgtgagggggattcggcccagctcgtcccggcctccaccaagccagccccgaagcccgccagccaccctgccggactcgggcgcgacctgctggcgcgcgccggatgtttctgtgacacacaatcagcgcggaccgcagcgcggcccagccccgggcacccgcctcggacgctcgggcgccaggaggcttcgctggaggggctgggccaaggagattaagaagaaaacgactttctgcaggaggaagagcccgctgccgaatccctgggaaaaattcttttcccccagtgccagccggactgccctcgccttccgggtgtgccctgtcccagaagatggaatgggggtgtgggggtccggctctaggaacgggctttgggggcgtcaggtctttccaaggttgggacccaaggatcggggggcccagcagcccgcaccgatcgagccggactctcggctcttcactgctcctcctggcctgcctagttccccagggcccggcacctcctgctgcgagacccggctctcagccctgccttgcccctacctcagcgtctcttccacctgctggcctcccagtttcccctcctgccagtccttcgcctgtcccttgacgccctgcatcctcctccctgactcgcagccccatcggacgctctcccgggaccgccgcaggaccagtttccatagactgcggactggggtcttcctccagcagttacttgatgccccctcccccgacacagactctcaatctgccggtggtaagaaccggttctgagctggcgtctgagctgctgcggggtggaagtggggggctgcccactccactcctcccatcccctcccagcctcctcctccggcaggaactgaacagaaccacaaaaagtctacatttatttaatatgatggtctttgcaaaaaggaacaaaacaacacaaaagcccaccaggctgctgctttgtggaaagacggtgtgtgtcgtgtgaaggcgaaacccggtgtacataacccctccccctccgccccgccccgcccggccccgtagagtccctgtcgcccgccggccctgcctgtagatacgccccgctgtctgtgctgtgagagtcgccgctcgctgggggggaagggggggacacagctacacgcccattaaagcacagcacgtcctgggggaggggggcattttttatgttacaaaaaaaaattacgaaagaaaagaaatctctwtgcaaaatgacgaacatggtcctgtggactcctctggcctgttttgttggctctttctctgtaattccgtgttttcgctttttcctccctgcccctctctccctctgcccctctctcctctccgcttctctccccctctgtctctgtctctctccgtctctgtcgctcttgtctgtctgtctctgctctttcctc

SEQ ID NO: 403 - DNA, 1788 bp, Homo sapiens
ctaaaaatacaaaaaattagccgggcatggtggcagacgcccgtaattccagctactcatgaggctgaggccggagaatcacttgaacctgggaggcagatgttgcagtgagtggagattgtgccacttcactccagcctgggtgacaaagctgatgaattcatccgagcaaatgccaccaacaagctgacagtcatagctgagcaaatccaacatttgcaagaacaagccaggaaggtactggaagatgctcacagagatgccaacctgcaccatgtagcttgtaatatagtgaaaaaacctggcaacatttactatctctataaacgggagagtggtcagcagtatttttccatcatttctccaaaggaatgggggacaagttgtccayatgacttccttggtgcctrcaaactacagcatgacttgtcctggactccgtatgaggacattgagaagcaagatgctaaaatcagcatgatggacaygttgctaagccagtcagtggccctgcctccgtgcactgaacccaacttccagggactgactcactgagagtgggctttgacaaacagctctcacaggacctggctgtcaacctccttgttgcccccactgttgccttgagaattgaagacatgtaggtgactcacaaacttcttggaaagagaccctgtgtgaatgtaaatgctgtcattatgacttttaattgggatgggaataatcattgagacagagtcactgtctttcgggatcctctttggaccacagatacccaagtcagtcagtttcagagtattggccagtgtactttccttcttcctctccatcacttcttcccttaagttaaagtgttagagaagaccttcttcccataaaaaggttggtggatcgttttccagagagaactgttttcagtcttttatatatatatatatatatatawaactggtagtatttaacattggggttgaggctgtctcacagttggtgcaactccagtttaaaattcatctgggaacgagaatgttgagtaatggagggtgatttaaaaaacaacarcaacaacaaaaaaaaaaacacttggcttggctggaccagagagtgtgtgattctgggatttctgtgctgttgatgaggtttgtcttgccccttttgctctctctgccttgctagagtgacagaatctgaggcagcaaaggccaggtttggggagagtcaactttgaaactcacaaattttagacttggaagagacattggatgctgccactaatcattatagagtccactgtgtagtctcccaagttggaaatcccaggctcagccacctgcagcagaacaaacccatttaaatggctacttaacactgtggaagagagtaaggcagtagagtgagaagcaagaaaaacagccaaattgttgactgtgagttaactcagattgaaatccattttgaccagaattattcaagaacttaacagggttttggcaaaattactgtagttcttattctgactaggctcttgtaggactctaccttctttcctatctgtttggtggaattagctaagtttatggattatttcgcatggctataatctattgcaatatgctgtaaaaggagggagagatgtgtacttgaactgacarttggccaaatttctctctgggaatgatgttcctgatgctgatctgtttggtaataccctccccgggccgccccccgattcatggtctttcctcataaactgcatttcttgtgagctgtaagaggtctacctaaggc

SEQ ID NO: 404 - DNA, 1876 bp, Homo sapiens
cctactcgcacagcccagggagtggggaggataaggcgctgtcatggaggacgccgcmgcgccggggcggaccgagggggtccttgaaaggcaaggagcgccgccagctgcaggccagggaggagccctggtggagctcaccccgacccccggcggcctggccctggtgagcccctaccacacccaccgggccggggaccccttagacctcgtggcgctcgcagagcaggtgcagaaggctgatgaattcatccgagcaaatgccaccaacaagctgacagtcatagctgagcaaatccaacatttgcaagaacaagccaggaaggtactggaagatgctcacagagatgccaacctgcaccatgtagcttgtaatatagtgaaaaaacctggcaacatttactatctctataaacgggagagtggtcagcagtatttttccatcatttctccaaaggaatgggggacaagttgtccayatgacttccttggtgcctrcaaactacagcatgacttgtcctggactccgtatgaggacattgagaagcaagatgctaaaatcagcatgatggacaygttgctaagccagtcagtggccctgcctccgtgcactgaacccaacttccagggactgactcactgagagtgggctttgacaaacagctctcacaggacctggctgtcaacctccttgttgcccccactgttgccttgagaattgaagacatgtaggtgactcacaaacttcttggaaagagaccctgtgtgaatgtaaatgctgtcattatgacttttaattgggatgggaataatcattgagacagagtcactgtctttcgggatcctctttggaccacagatacccaagtcagtcagtttcagagtattggccagtgtactttccttcttcctctccatcacttcttcccttaagttaaagtgttagagaagaccttcttcccataaaaaggttggtggatcgttttccagagagaactgttttcagtcttttatatatatatatatatatatawaactggtagtatttaacattggggttgaggctgtctcacagttggtgcaactccagtttaaaattcatctgggaacgagaatgttgagtaatggagggtgatttaaaaaacaacarcaacaacaaaaaaaaaaacacttggcttggctggaccagagagtgtgtgattctgggatttctgtgctgttgatgaggtttgtcttgccccttttgctctctctgccttgctagagtgacagaatctgaggcagcaaaggccaggtttggggagagtcaactttgaaactcacaaattttagacttggaagagacattggatgctgccactaatcattatagagtccactgtgtagtctcccaagttggaaatcccaggctcagccacctgcagcagaacaaacccatttaaatggctacttaacactgtggaagagagtaaggcagtagagtgagaagcaagaaaaacagccaaattgttgactgtgagttaactcagattgaaatccattttgaccagaattattcaagaacttaacagggttttggcaaaattactgtagttcttattctgactaggctcttgtaggactctaccttctttcctatctgtttggtggaattagctaagtttatggattatttcgcatggctataatctattgcaatatgctgtaaaaggagggagagatgtgtacttgaactgacarttggccaaatttctctctgggaatgatgttcctgatgctgatctgtttggtaataccctccccgggccgccccccgattcatggtctttcctcataaactgcatttcttgtgagctgtaagaggtctacctaaggc

SEQ ID NO: 405 - DNA, 2664 bp, Homo sapiens
tggggcttcgcccgggggcgggccttcgccgggggtaggactccggycttggtggcgggtggctggcggttccgttaggtctgagggagcgatggcggtrcgcgcgttgaagctgctgaccacactgctggctgtcgtggccgctgcctcccaagccgaggtcgagtccgaggcaggatggggcatggtgacgcctgatctgctcttcgccgaggggaccgcagcctacgcgcgcggggactggcccggggtggtcctgagcatggaacgggcgctgcgctcccgggcagccctccgcgcccttcgcctgcgctgccgcacccagtgtgccgccgacttcccgtgggagctggaccccgactggtcccccagcccggcccaggcctcgggcgccgccgccctgcgcgacctgagcttcttcgggggccttctgcgtcgcgctgcctgcctgcgccgctgcctcgggccgccggccgcccactcgctcagcgaagagatggagctggagttccgcaagcggagcccctacaactacctgcaggtcgcctacttcaagatcaacaagttggagaaagctgttgctgcagcacacaccttcttcgtgggcaatcctgagcacatggaaatgcagcagaacctagactattaccaaaccatgtctggagtgaaggaggccgacttcaaggatcttgagactcaaccccatatgcaagaatttcgactgggagtgcgactctactcagaggaacagccacaggaagctgtgccccacctagaggcggcgctgcaagaatactttgtggcctatgaggagtgccgtgccctctgcgaagggccctatgactacgatggctacaactaccttgagtacaacgctgacctcttccaggccatcacagatcattacatccaggtcctcaactgtaagcagaactgtgtcacggagcttgcttcccacccaagtcgagagaagccctttgaagacttcctcccatcgcattataattatctgcagtttgcctactataacattgggaattatacacaggctgttgaatgtgccaagacctatcttctcttcttccccaatgacgaggtgatgaaccaaaatttggcytattatgcagctatgcttrgagaagaacacaccagatccatcggcccccgtgagagtgccaaggagtaccgacagcgaagcctactggaaaaagaactgcttttcttcgcttatgatgtttttggaattccctttgtggatccggattcatggactccagaagaagtgattcccaagagattgcaagagaaacagaagtcagaacgrgaaacagccgtacgcatctcccaggagattgggaaccttatgaaggaaatygagacccttgtggaagagaagaccaaggagtcactggatgtgagcagactgacccgggaaggtggccccctgctgtatgaaggcatcagtctcaccatgaactccaaactcctgaatggttcccagcgggtggtgatggacggcgtaatctctgaccacgagtgtcaggagctgcagagactgaccaatgtggcagcaacctcaggagatggctaccggggtcagacctcccsacatactcccaatgaaaagttctatggtgtcactgtcttcaaagccctcaagstggggcaagaaggcaaagttcctctgcagagtgcccacctgtactacaacgtgacggagaaggtgcggcgcatcatrgagtcctacttccgcctggatacgcccctctacttttcctactctcatctggtgtgccgcactgccatygaagaggtccaggcagagaggaaggatgatagtcatccagtccacgtggacaactgcatcctgaatgccgagaccctcgtgtgtgtcaaagagccyccagcctacaccttccgcgactacagcgccatcctttacctaaatggggacttcgatggcggaaacttttatttcactgaactggatgccaagaccgtgacggcagaggtgcagcctmagtgtggaagagccgtgggattctcttcaggcactgaaaacccacatggagtgaaggctgtcaccagggggcagcgctgtgccatcgccctgtggttcaccctggaccctcgacacagcgagcgggacagggtgcaggcagatgacctggtgaagatgctcttcagcccagaagagatggacctctcccaggagcagcccctggatgcccagcagggyccccccgaacctgcacaagagtctctctcaggcagtgaatcgaagcccaaggatgagctatgacagcgtccaggtcagacggatgggtgactagacccatggagaggaactcttctgcactctgagctggccagcccctyggggctgcagagcagtgagcctacatctgccactcagccgaggggaccctgctcacagccttctacatggtgctactgmtcttggagtggacatgaccagacaccgcaccccctggatctggctgagggctcaggacacaggcccagccacccccaggggcctccacaggccgctgcatracagcgatacagtacttaagtgtctgtgtakacaaccaaagaataaatgattcatggttttttttacttggtttgttcagacaatggaaatttgcccattctgtc

SEQ ID NO: 406 - DNA, 2893 bp, Homo sapiens
tggggcttcgcccgggggcgggccttcgccgggggtaggactccggycttggtggcgggtggctggcggttccgttaggtctgagggagcgatggcggtrcgcgcgttgaagctgctgaccacactgctggctgtcgtggccgctgcctcccaagccgaggtcgagtccgaggcaggatggggcatggtgacgcctgatctgctcttcgccgaggggaccgcagcctacgcgcgcggggactggcccggggtggtcctgagcatggaacgggcgctgcgctcccgggcagccctccgcgcccttcgcctgcgctgccgcacccagtgtgccgccgacttcccgtgggagctggaccccgactggtcccccagcccggcccaggcctcgggcgccgccgccctgcgcgacctgagcttcttcgggggccttctgcgtcgcgctgcctgcctgcgccgctgcctcgggccgccggccgcccactcgctcagcgaagagatggagctggagttccgcaagcggagcccctacaactacctgcaggtcgcctacttcaagatcaacaagttggagaaagctgttgctgcagcacacaccttcttcgtgggcaatcctgagcacatggaaatgcagcagaacctagactattaccaaaccatgtctggagtgaaggaggccgacttcaaggatcttgagactcaaccccatatgcaagaatttcgactgggagtgcgactctactcagaggaacagccacaggaagctgtgccccacctagaggcggcgctgcaagaatactttgtggcctatgaggagtgccgtgccctctgcgaagggccctatgactacgatggctacaactaccttgagtacaacgctgacctcttccaggccatcacagatcattacatccaggtcctcaactgtaagcagaactgtgtcacggagcttgcttcccacccaagtcgagagaagccctttgaagacttcctcccatcgcattataattatctgcagtttgcctactataacattgggaattatacacaggctgttgaatgtgccaagacctatcttctcttcttccccaatgacgaggtgatgaaccaaaatttggcytattatgcagctatgcttrgagaagaacacaccagatccatcggcccccgtgagcagggcacctagggaaagatgtgaccccggaaagtactcagtttccctgccctggagtgccaaggagtaccgacagcgaagcctactggaaaaagaactgcttttcttcgcttatgatgtttttggaattccctttgtggatccggattcatggactccagaagaagtgattcccaagagattgcaagagaaacagaagtgaggaccttgaagaaactgcatggttggatcagtctgatgaagcacttgaggcttcctgagcccaggcagatgtgaactcctggcaaggggtgggcaggtccagtttgggaagtcggggtggagcccagggctggccctggaatgcagtcctcagagcggctgtgctcataggtcagaacgrgaaacagccgtacgcatctcccaggagattgggaaccttatgaaggaaatygagacccttgtggaagagaagaccaaggagtcactggatgtgagcagactgacccgggaaggtggccccctgctgtatgaaggcatcagtctcaccatgaactccaaactcctgaatggttcccagcgggtggtgatggacggcgtaatctctgaccacgagtgtcaggagctgcagagactgaccaatgtggcagcaacctcaggagatggctaccggggtcagacctcccsacatactcccaatgaaaagttctatggtgtcactgtcttcaaagccctcaagstggggcaagaaggcaaagttcctctgcagagtgcccacctgtactacaacgtgacggagaaggtgcggcgcatcatrgagtcctacttccgcctggatacgcccctctacttttcctactctcatctggtgtgccgcactgccatygaagaggtccaggcagagaggaaggatgatagtcatccagtccacgtggacaactgcatcctgaatgccgagaccctcgtgtgtgtcaaagagccyccagcctacaccttccgcgactacagcgccatcctttacctaaatggggacttcgatggcggaaacttttatttcactgaactggatgccaagaccgtgacggcagaggtgcagcctmagtgtggaagagccgtgggattctcttcaggcactgaaaacccacatggagtgaaggctgtcaccagggggcagcgctgtgccatcgccctgtggttcaccctggaccctcgacacagcgagcgggacagggtgcaggcagatgacctggtgaagatgctcttcagcccagaagagatggacctctcccaggagcagcccctggatgcccagcagggyccccccgaacctgcacaagagtctctctcaggcagtgaatcgaagcccaaggatgagctatgacagcgtccaggtcagacggatgggtgactagacccatggagaggaactcttctgcactctgagctggccagcccctyggggctgcagagcagtgagcctacatctgccactcagccgaggggaccctgctcacagccttctacatggtgctactgmtcttggagtggacatgaccagacaccgcaccccctggatctggctgagggctcaggacacaggcccagccacccccaggggcctccacaggccgctgcatracagcgatacagtacttaagtgtctgtgtakacaaccaaagaataaatgattcatggttttttttacttggtttgttcagacaatggaaatttgcccattctgtc

SEQ ID NO: 407 - DNA, 3083 bp, Homo sapiens
tggggcttcgcccgggggcgggccttcgccgggggtaggactccggycttggtggcgggtggctggcggttccgttaggtctgagggagcgatggcggtrcgcgcgttgaagctgctgaccacactgctggctgtcgtggccgctgcctcccaagccgaggtcgagtccgaggcaggatggggcatggtgacgcctgatctgctcttcgccgaggggaccgcagcctacgcgcgcggggactggcccggggtggtcctgagcatggaacgggcgctgcgctcccgggcagccctccgcgcccttcgcctgcgctgccgcacccagtgtgccgccgacttcccgtgggagctggaccccgactggtcccccagcccggcccaggcctcgggcgccgccgccctgcgcgacctgagcttcttcgggggccttctgcgtcgcgctgcctgcctgcgccgctgcctcgggccgccggccgcccactcgctcagcgaagagatggagctggagttccgcaagcggagcccctacaactacctgcaggtcgcctacttcaagatcaacaagttggagaaagctgttgctgcagcacacaccttcttcgtgggcaatcctgagcacatggaaatgcagcagaacctagactattaccaaaccatgtctggagtgaaggaggccgacttcaaggatcttgagactcaaccccatatgcaagaatttcgactgggagtgcgactctactcagaggaacagccacaggaagctgtgccccacctagaggcggcgctgcaagaatactttgtggcctatgaggagtgccgtgccctctgcgaagggccctatgactacgatggctacaactaccttgagtacaacgctgacctcttccaggccatcacagatcattacatccaggtcctcaactgtaagcagaactgtgtcacggagcttgcttcccacccaagtcgagagaagccctttgaagacttcctcccatcgcattataattatctgcagtttgcctactataacattgggaattatacacaggctgttgaatgtgccaagacctatcttctcttcttccccaatgacgaggtgatgaaccaaaatttggcytattatgcagctatgcttrgagaagaacacaccagatccatcggcccccgtgagagtgccaaggagtaccgacagcgaagcctactggaaaaagaactgcttttcttcgcttatgatgtttttggaattccctttgtggatccggattcatggactccagaagaagtgattcccaagagattgcaagagaaacagaagtcagaacgrgaaacagccgtacgcatctcccaggagattgggaaccttatgaaggaaatygagacccttgtggaagagaagaccaaggagtcactggatgtgagcagactgacccgggaaggtggccccctgctgtatgaaggcatcagtctcaccatgaactccaaactcctgaatggttcccagcgggtggtgatggacggcgtaatctctgaccacgagtgtcaggagctgcagagactgaccaatgtggcagcaacctcaggagatggctaccggggtcagacctcccsacatactcccaatgaaaagttctatggtgtcactgtcttcaaagccctcaagstggggcaagaaggcaaagttcctctgcagagtgcccacctgtactacaacgtgacggagaaggtgcggcgcatcatrgagtcctacttccgcctggatacgcccctctacttttcctactctcatctggtgtgccgcactgccatygaagaggtccaggcagagaggaaggatgatagtcatccagtccacgtggacaactgcatcctgaatgccgagaccctcgtgtgtgtcaaagagccyccagcctacaccttccgcgactacagcgccatcctttacctaaatggggacttcgatggcggaaacttttatttcactgaactggatgccaagaccgtgacggcagaggtgcagcctmagtgtggaagagccgtgggattctcttcaggcactgaaaacccacatggagtgaaggctgtcaccagggggcagcgctgtgccatcgccctgtggttcaccctggaccctcgacacagcgagcgggtgagagcagctcgagcgggtgagagcagctggtgctgtggtgacccgttcccagagcgcccttggtttgcctwtctcttccccaaatcccattgccagtggctgagacacgaaaggagcacttgggacaccagctccaacgccctgtcattatggtcacattgccttgtcctccctgggcctgctgtgaacgggatccaggtggggaaagaggtcaagacagggagcgatgctgagttcttggttccctccttgggccccacttcagctgtccttttccagagagtaggacctgctgggaaggagatgagcctggggccattaaggaaccttccttgtcccctgggaagtagcagctgagagatagcgagtgtctggagcggaggcctctctgaatgggcaggggtttgtccttgcaggacagggtgcaggcagatgacctggtgaagatgctcttcagcccagaagagatggacctctcccaggagcagcccctggatgcccagcagggyccccccgaacctgcacaagagtctctctcaggcagtgaatcgaagcccaaggatgagctatgacagcgtccaggtcagacggatgggtgactagacccatggagaggaactcttctgcactctgagctggccagcccctyggggctgcagagcagtgagcctacatctgccactcagccgaggggaccctgctcacagccttctacatggtgctactgmtcttggagtggacatgaccagacaccgcaccccctggatctggctgagggctcaggacacaggcccagccacccccaggggcctccacaggccgctgcatracagcgatacagtacttaagtgtctgtgtakacaaccaaagaataaatgattcatggttttttttacttggtttgttcagacaatggaaatttgcccattctgtc

SEQ ID NO: 408 - DNA, 2404 bp, Homo sapiens
tggggcttcgcccgggggcgggccttcgccgggggtaggactccggycttggtggcgggtggctggcggttccgttaggtctgagggagcgatggcggtrcgcgcgttgaagctgctgaccacactgctggctgtcgtggccgctgcctcccaagccgaggtcgagtccgaggcaggatggggcatggtgacgcctgatctgctcttcgccgaggggaccgcagcctacgcgcgcggggactggcccggggtggtcctgagcatggaacgggcgctgcgctcccgggcagccctccgcgcccttcgcctgcgctgccgcacccagtgtgccgccgacttcccgtgggagctggaccccgactggtcccccagcccggcccaggcctcgggcgccgccgccctgcgcgacctgagcttcttcgggggccttctgcgtcgcgctgcctgcctgcgccgctgcctcgggccgccggccgcccactcgctcagcgaagagatggagctggagttccgcaagcggagcccctacaactacctgcaggtcgcctacttcaagatcaacaagttggagaaagctgttgctgcagcacacaccttcttcgtgggcaatcctgagcacatggaaatgcagcagaacctagactattaccaaaccatgtctggagtgaaggaggccgacttcaaggatcttgagactcaaccccatatgtagcaagaatttcgactgggagtgcgactctactcagaggaacagccacaggaagctgtgccccacctagaggcggcgctgcaagaatactttgtggcctatgaggagtgccgtgccctctgcgaagggccctatgactacgatggctacaactaccttgagtacaacgctgacctcttccaggccatcacagatcattacatccaggtcctcaactgtaagcagaactgtgtcacggagcttgcttcccacccaagtcgagagaagccctttgaagacttcctcccatcgcattataattatctgcagtttgcctactataacattgggaattatacacaggctgttgaatgtgccaagacctatcttctcttcttccccaatgacgaggtgatgaaccaaaatttggcytattatgcagctatgcttrgagaagaacacaccagatccatcggcccccgtgagcagggcacctagggaaagatgtgaccccggaaagtactcagtttccctgccctggagtgccaaggagtaccgacagcgaagcctactggaaaaagaactgcttttcttcgcttatgatgtttttggaattccctttgtggatccggattcatggactccagaagaagtgattcccaagagattgcaagagaaacagaagtcagaacgrgaaacagccgtacgcatctcccaggagattgggaaccttatgaaggaaatygagacccttgtggaagagaagaccaaggagtcactggatgtgagcagactgacccgggaaggtggccccctgctgtatgaaggcatcagtctcaccatgaactccaaactcctgaatggttcccagcgggtggtgatggacggcgtaatctctgaccacgagtgtcaggagctgcagagactgaccaatgtggcagcaacctcaggagatggctaccggggtcagacctcccsacatactcccaatgaaaagttctatggtgtcactgtcttcaaagccctcaagstggggcaagaaggcaaagttcctctgcagagtgcccacctgtactacaacgtgacggagaaggtgcggcgcatcatrgagtcctacttccgcctggatacgcccctctacttttcctactctcatctggtgtgccgcactgccatygaagaggtccaggcagagaggaaggatgatagtcatccagtccacgtggacaactgcatcctgaatgccgagaccctcgtgtgtgtcaaagagccyccagcctacaccttccgcgactacagcgccatcctttacctaaatggggacttcgatggcggaaacttttatttcactgaactggatgccaagaccgtgacggcagaggtgcagcctmagtgtggaagagccgtgggattctcttcaggcactgaaaacccacatggagtgaaggctgtcaccaggggcagcccctggatgcccagcagggyccccccgaacctgcacaagagtctctctcaggcagtgaatcgaaccttctacatggtgctactgmtcttggagtggacatgaccagacaccgcaccccctggatctggctgagggctcaggacacaggcccagccacccccaggggcctccacaggccgctgcatracagcgatacagtacttaagtgtctgtgtakacaaccaaagaataaatgattcatggtttttttt

SEQ ID NO: 409 - DNA, 939 bp, Homo sapiens
ttctggatgtgggaaggagagccctgcaggcagggggcttccaggcttgggacacctgggcattcctgggccaggaaagcacccaacaaacctgcaactcagaagccaaatgagacctatcccaggcaggtccrctctgcgatggtggctctcatacaccgcacagaagtgaggcatcggggacagccgctgcggcagcactcgagccagctcaagcccgcagctcgcaggragatccagctccgtcctgcctgcagcagcmcaaccctgcacacccaccatggatgtcttcaagaagggcttctccatcgccaaggagggcgtggtgggtgcggtggaaaagaccaagcagggggtgacggaagcagctgagaagaccaaggagggggtcatgtatgtgggagccaagaccaaggagaatgttgtacagagcgtgacctcagtggccgagaagaccaaggagcaggccaacgcsgtgagcgaggctgtggtgagcagcgtcaacactgtggccaccaagaccgtggaggaggcggagaacatcgcggtcacctccggggtggtgcgcaaggaggacttgggccatctgccccccaacaggagggtgawgcatccaaagagaaagaggaagtggcagaggaggcccagagtgggggagactagagggctacaggccagcgtggatgacctgaagagcyctcctctgccttggacaccatcccctcctagcacaaggagtgcccgccttgagtgacatgcggctgcccacgctcctgccctcytctcyctggccacccttggcctgtccacctgtgctgctgcaccaacctcactgccctccctcggccccacccaccctctggtccttctgaccccactwatgctgctgtgaattttttttttaaatgattkcaaataaaacttgagcccactcctgcc

SEQ ID NO: 410 - DNA, 870 bp, Homo sapiens
ttctggatgtgggaaggagagccctgcaggcagggggcttccaggcttgggacacctgggcattcctgggccaggaaagcacccaacaaacctgcaactcagaagccaaatgagacctatcccaggcaggtccrctctgcgatggtggctctcatacaccgcacagaagtgaggcatcggggacagccgctgcggcagcactcgagccagctcaagcccgcagctcgcaggragatccagctccgtcctgcctgcagcagcmcaaccctgcacacccaccatggatgtcttcaagaagggcttctccatcgccaaggagggcgtggtgggtgcggtggaaaagaccaagcagggggtgacggaagcagctgagaagaccaaggagggggtcatgtatgtgggagccaagaccaaggagaatgttgtacagagcgtgacctcagccaccaagaccgtggaggaggcggagaacatcgcggtcacctccggggtggtgcgcaaggaggacttgggccatctgccccccaacaggagggtgawgcatccaaagagaaagaggaagtggcagaggaggcccagagtgggggagactagagggctacaggccagcgtggatgacctgaagagcyctcctctgccttggacaccatcccctcctagcacaaggagtgcccgccttgagtgacatgcggctgcccacgctcctgccctcytctcyctggccacccttggcctgtccacctgtgctgctgcaccaacctcactgccctccctcggccccacccaccctctggtccttctgaccccactwatgctgctgtgaattttttttttaaatgattkcaaataaaacttgagcccactcctgcc

SEQ ID NO: 411 - DNA, 1225 bp, Homo sapiens
ttctggatgtgggaaggagagccctgcaggcagggggcttccaggcttgggacacctgggcattcctgggccaggaaagcacccaacaaacctgcaactcagaagccaaatgagacctatcccaggcaggtccrctctgcgatggtggctctcatacaccgcacagaagtgaggcatcggggacagccgctgcggcagcactcgagccagctcaagcccgcagctcgcaggragatccagctccgtcctgcctgcagcagcmcaaccctgcacacccaccatggatgtcttcaagaagggcttctccatcgccaaggagggcgtggtgggtgcggtggaaaagaccaagcagggggtgacggaagcagctgagaagaccaaggagggggtcatgtatgtgggagccaagaccaaggagaatgttgtacagagcgtgacctcagtggccgagaagaccaaggagcaggccaacgcsgtgagcgaggctgtggtgagcagcgtcaacactgtggccaccaagaccgtggaggaggcggagaacatcgcggtcacctccggggtggtgcgcaaggaggacttgggccatctgccccccaacaggagggtgawgcatccaaagagaaagaggaagtggcagaggaggtaggagctgggctcctggggtgcaccatgkggggttccttkgtagggaccccatcccccacagacgcactgcttccctcctgggctcccagggcccagaggggcctcctgaccttccacagcccctacagggactgtgtrcagggctaaccctgaacctgagtgggaggtccccccacggatgacccctcaggcatggggcacagaagacaacttttctcagcccmctcagggtggcccattaaggctggggcctggagctgggtgtgcaggtcattctctctcccaggcccagagtgggggagactagagggctacaggccagcgtggatgacctgaagagcyctcctctgccttggacaccatcccctcctagcacaaggagtgcccgccttgagtgacatgcggctgcccacgctcctgccctcytctcyctggccacccttggcctgtccacctgtgctgctgcaccaacctcactgccctccctcggccccacccaccctctggtccttctgaccccactwatgctgctgtgaattttttttttaaatgattkcaaataaaacttgagcccactcct

SEQ ID NO: 412 - DNA, 816 bp, Homo sapiens
ctgggctccagctggcctccgcatcaatatttcatcggcgtcaataggaggcatcggggacagccgctgcggcagcactcgagccagctcaagcccgcagctcgcaggragatccagctccgtcctgcctgcagcagcmcaaccctgcacacccaccatggatgtcttcaagaagggcttctccatcgccaaggagggcgtggtgggtgcggtggaaaagaccaagcagggggtgacggaagcagctgagaagaccaaggagggggtcatgtatgtgggagccaagaccaaggagaatgttgtacagagcgtgacctcagtggccgagaagaccaaggagcaggccaacgcsgtgagcgaggctgtggtgagcagcgtcaacactgtggccaccaagaccgtggaggaggcggagaacatcgcggtcacctccggggtggtgcgcaaggaggacttgggccatctgccccccaacaggagggtgawgcatccaaagagaaagaggaagtggcagaggaggcccagagtgggggagactagagggctacaggccagcgtggatgacctgaagagcyctcctctgccttggacaccatcccctcctagcacaaggagtgcccgccttgagtgacatgcggctgcccacgctcctgccctcytctcyctggccacccttggcctgtccacctgtgctgctgcaccaacctcactgccctccctcggccccacccaccctctggtccttctgaccccactwatgctgctgtgaattttttttttaaatgattkcaaataaaacttgagcccactcctgcc

SEQ ID NO: 413 - DNA, 4080 bp, Homo sapiens
atttaacttgaagacaacgtcactagcagtttctggagctacttgccaaggctgagtgtgagctgagcctgccccaccaccaagatgatcctgagcttgctgttcagccttgggggccccctgggctgggggctgctgggggcatgggcccaggcttccagtactagcctctctgatctgcagagctccaggacacctggggtctggaaggcagaggctgaggacaccrgcaaggaccccgtwggacgtaactggtgcccctacccaatgtccaagctggtcaccttactagctctttgcaaaacagagaaattcctcatccactcgcagcagccrtgtccgcagggagctccagactgccagaaagtcaaagtcatgtaccgcatggcccacaagccagtgtaccaggtcaagcagaaggtgmtgacctctttggcctggaggtgctgccctggctacacgggccccaactgcgagcaccacgattccatggcaatccctgagcctgcagatcctggtgacagccaccaggaacctcaggatggaccagtcagcttcaaacctggccaccttgctgcagtgatcaatgaggttgaggtgcaacaggaacagcaggaacatctgctggsagatctccagaatgatgtgcaccgggtggcagacagcctgccaggcctgtggaaagccctgcctggtaacctcacagstgcagtgatggaagcaaatcaaacagggcacgagttccctgatagatccttggagcaggtgctgctaccccacgtggacaccttcctacaagtgcatttcagccccatctggaggagctttaaccaaagcctgcacagccttacccaggccataagaaacctgtctcttgacgtggaggccaaccgccaggccatctccagagtccaggacagtgccgtggccagggctgacttccaggagcttggtgccaaatttgaggccaaggtccaggagaacactcagagagtgggtcagctgcgacaggacgtggaggaccgcctgcacgcccagcactttaccctgcaccgctcgatctcagagctccaagccgatgtggacaccaaattgaagaggctgcacaaggctcaggaggccccagggaccaatggcagtctggtgttggcaacgcctggggctggggcaaggcctgagccggacagcctgcaggccaggctgggccagctgcagaggaacctctcagagctgcacatgaccacggcccgcagggaggaggagttgcagtacaccctggaggacatgagggccaccctgacccggcacgtggatgagatcaaggaactgtactccgaatcggacgagactttcgatcagattagcaaggtggagcggcaggtggaggagctgcaggtgaaccacacggcgctccgtgagctgcgcgtgatcctgatggagaagtctctgatcatggaggagaacaaggaggaggtggagcggcagctcctggagctcaacctcacgctgcagcacctgcagggtggccatgccgacctcatcaagtacgtgaaggactgcaattgccagaagctctatttagacctggacgtcatccgggagggccagagggacgccacgcgtgccctggaggagacccaggtgagcctggacgagcggcggcagctggacggctcctccctgcaggccctgcagaacgccgtggacgccgtgtcgctggccgtggacgcgcacaaagcggagggcgagcgggcgcgggcggccacgtcgcggctccggagccaagtgcaggcgctggatgacgaggtgggcgcgctgaaggcggccgcggccgaggcccgccacgaggtgcgccagctgcacagcgccttcgccgccctgctggaggacgcgctgcggcacgaggcggtgctggccgcgctcttcggggaggaggtgctggaggagatgtctgagcagacgccgggaccgctgcccctgagctacgagcagatccgcgtggccctgcaggacgccgctagcgggctgcaggagcaggcgctcggctgggacgagctggccgcccgagtgacggccctggagcaggcctcggagcccccgcggccggcagagcacctggagcccagccacgacgcgggccgcgaggaggccgccaccaccgccctggccgggctggcgcgggagctccagagcctgagcaacgacgtcaagaatgtcgggcggtgctgcgaggcygaggccggggccggggccgcctccctcaacgcctcccttsacggcctccacaacgcactcttcgccactcagcgcagcttggagcagcaccagcggctcttccacagcctctttgggaacttccaagggctcatggaagccaacgtcagcctggacctggggaagctgcagaccatgctgagcaggaaagggaagaagcagcagaaagacctggaagctccccggaagagggacaagaaggaagcggagcctttggtggacatacgggtcacagggcctgtgccaggtgccttgggcgcggcgctctgggaggcaggatcccctgtggccttctatgccagsttttcagaagggacggctgccctgcagacagtgaagttcaacaccacatacatcaacattggcagcagctacttccctgaacatggctacttccgagcccctgagcgtggtgtctacctgtttgcagtgagcgttgaatttggcccagggccaggcacygggcagctggtgtttggaggtcaccatcggactccagtctgtaccactgggcaggggagtggaagcacagcaacgstctttgccatggctgagctgcagaagggtgagcgagtatggtttgagttaacccagggatcaataacaaagagaagcctgtcgggcactgcatttgggggcttcctgatgtttaagacctgaaccccagccccaatctgatcagacatcatggactcgcccagctctcctcggcctggggctcyggccaaggatgggctggaggtcattcagttggtctgtctcttccctggaaaccttcygcaaagatggtgtggtgtacgtggcttccctgtaaccacatggggcttggccatttctccatgatgagaaggactggaatgcttctccgggcaggacatggtcctaggaagcctgaaccttggcttggcatgccttctcagacagcacggcctgggctccaactcttcaccacaccctgtattctacaacttctttggtgttttgctcctcctgtggttggaaacttctgtacaacactttaaacttttctcttgcttcctcttctcttctcccttatcgtatgatagaaagacattcttccccaggaggaatgtttaaaatggaggcaacattttggccaacattggaaagcactagagggcaatgggattaaaccaacctgcttggtctctattagtcagtaatgaagacgacagcctggccaaccaagggaaaggaaattagtatctttagtttcagtcattccttgtaggatatggtttagctgtgcccccacctaaaatatcatcttgaattgtaatccctataatccccacatcaagggagagatcaggtggaggtaattggatcttgggggcggttcccccatgctgttcttgtgatagttctcacgagatctgatgattttataagtttgatagttcctcctgtgttcattctccttcctgccaccttgtgaagatgccttggttcctcttcactgtctgccatgattgtaagtttcctgaggcctccccagccatgtggaacagtgagtcaattaaacctctttcctttataaattatccagtcttgggcaattcttgatagcagtgtgaaaatggactaatacacttgtgtttatctgtaatttaaatttcatgtctttttctccttgccttacatagggtaaagaccaagaaatgccaaacgtgaactaaaatatgtagggccttcaacttttttacttcctccagtatcttaggaccatcgtaattcttgttagcatctctaaccaggaggcagctgagggaggagggaaagaag

SEQ ID NO: 414 - DNA, 2673 bp, Homo sapiens
cagcgaccgccgcgggggcaaggcctggagctgtggttcgaatytgtgcaggcagcgggtgctggcttttagggtccgccgcctctctgcctaatgagctgcaccagaatgatccaggttttagatccacgtcctttgacaagttcggtcatgcccgtggatgtggccatgaggctttgcttggcacattcaccacctgtgaagagtttcctgggcccgtacgatgaatttcaacgacgacattttgtgaataaattaaagcccctgaaatcatgtctcaatataaaacacaaagccaaatcacagaatgactggaagtgctcacacaaccaagccaagaagcgcgttgtgtttgctgactccaagggcctctctctcactgcgatccatgtcttctccgacctcccagaagaaccakcgtgggatctgcagtttgatctcttggaccttaatgatatctcctctgccttaaaacaccacgaggagaaaaacttgattttagatttccctcagccttcaacygattacttaagtttccggagccactttcagaagaactttgtctgtctggaraactgctcrttgcaagagcgaacagtgacagggactgttaaagtcaaaaatgtgagttttgagaagaaagttcagatccgtatcactttcgattcttggaaaaactacactgacgtagactgtgtctatatgaaaaatgtgtatggtggcacagatagtgataccttctcatttgccattgacttaccccctgtcattccaactgagcagaaaattgagttctgcatttcttaccatgctaatgggcaagtcttttgggacaacaatgatggtcagaattatagaattgttcatgttcaatggaagcctgatggggtgcagacacagatggyaccccaggactgtgcattccaccagacgtctcctaagacagagttagagtcaacaatctttggcagtccgaggctggctagtgggctcttcccagagtggcagagctgggggagaatggagaacttggcctcttatcgatgaattaagcaacaatgtaactggtcttgacttgtcatattcccccatgcaatcctaggtctgtattgctcaattttaggaagcctttgctactccatcagtaggtttagatttgagcttttgagacctggctatggaaaagaaagacacttgagaatttagtgttggggtctgtacagatgatgctacccaatttggctttgaaggatcaagtaacaggttgaaaactatttttataaaggtaatactttttcagttcccttcttccttccctctcaatccactagctttcatgttgggcaaggaaaagttgaggaaggatggctgatggtgatggaaagctrtgttaatggtatgaggaatgtgtgaaaagtatacacaaagggctctgaagctcaagtcagaggagtgggaggtctgatcattgttggtggaaaaacgtaaggktattttgtgtttttaagttggttttacaattctttcctggggaaattatttctggaggggaaaaagatccattctacgtatccttgtggagaaaagctaaataacctttaagaatgtgggtggtattggagaaagaagatgaattatagctccggagaatcaagatcttaagtgaagcctttctgttcagatgtgatctataaaaaatcataatttggggaaagtttaagcaaatctggctttgtagtcctgatgttataagtgactttgtgatcaaactgtcaggcttgggttcttgttatagaatgcttggtatagaaaaaccatgccatcattaatggctaacaacacgtagggacttcatgtcatgtcaaagatagctctttgcaagtgccttgattaaaccagaaaactgtcatcgtttaacccaaatatctgaatggtcatctggtaactcatgggtttttggcctcataagatggtccactctgtacacaggcattcctcctgcaataatgttgtatctttgagaccgttgtcagtgtacacaactcacatccttcatattgaaggtgactcatttttctgcacacttttttgatgtgatgcttgacgtgaggcccgacactaggattctcaatgcaagaatccagtaccttgcacatagaagtagcaacccatcccttgcctattttcatcttgctgttttcttttttttaaaaaaatggatgtgacttgttttgaatgttttgtattatacttgtttttgtgtgtgcataaattcattctgtaggatcttaagaaaaagagtcccagaatgttgcttctattattgtgcacaaccattgagaggtgttacaagaatgcagttaattttaacatgtgtgatgtgccatggtggaaaagtactatcggaataactctgcagtgacagaatttgaagtttggctagcatccatacttttctactgtaaatatttcactctcctctagctatccttgatgagcttctcactttaagaataaatgtgtttgatataaggcctgagtatattttctttctcaaagccacagtcaaataagaaactcaactgacattctcatttttcatttaggaacaactgagcagagttagtatggaccaagacatggatccatctgaggatattcacaaggccccag

SEQ ID NO: 415 - DNA, 3167 bp, Homo sapiens
ggccggcctgcgccctggggctcgcagtggtttgtttgcgctgtggatggagtggcggtgcggtcccctgtggagcgcaaacaaggcgcttggttggcgcgggcgcctggctgccttcctcgtggtggggccttcggagcaatcgtcctggttctggcgatggttgagacgcctcgattgcggcgtrtaacgaacaccttccaccatgaccacctcagcaagttcccacttaaataaaggcatcaagcaggtgtacatgtccctgcctcagggtgagaaagtccaggccatgtatatctggatcgatggtactggagaaggactgcgctgcaagacccggaccctggacagtgagcccaagtgtgtggaagagttgcctgagtggaatttcgatggctcyagtactttacagtctgagggttccaacagtgacatgtatctcgtgcctgctgccatgtttcgggaccccttccgwaaggaccctaacaagctggtgttatgtgaagttttcaagtacaatcgaaggcctgcagagaccaatttgaggcacacctgtaaacggataatggacatggtgagcaaccagcacccctggtttggcatggagcaggagtataccctcatggggacagatgggcacccctttggttggccttccaacggcttcccagggccccagggtccatattactgtggtgtgggagcagacagagcctatggcagggacatcgtggaggcccattaccgggcctgcttgtatgctggagtcaagattgcggggactaatgccgaggtcatgcctgcccagtgggaatttcagattggaccttgtgaaggaatcagcatgggagatcatctctgggtggcccgtttcatcttgcatcgtgtgtgtgaagactttggagtgatagcaacctttgatcctaagcccattcctgggaactggaatggtgcaggctgccataccaacttyagcaccaaggccatgcgggaggagaatggtctgaagtacatcgaggaggccattgaraaactaagcaagcggcaccagtaccacatccgtgcctatgatcccaagggaggcctggacaatgcccgacgtctaactggattccatgaaacctccaacatcaacgacttttctgctggtgtagccaatcgtagcgccagcatacgcattccccggactgttggccaggagaagaagggttactttgaagatcgtcgcccctctgccaactgcgaccccttttcggtgacagaagccctcatccgcacgtgtcttctcaatgaaaccggcgatgagcccttccagtacaaaaattaagtggactagacctccagctgttgagcccctcctagttcttcatcccactccaactcttccccctctcccagttgtcccgattgtaactcaaagggtggaatatcaaggtcgtttttttcattccatgtgcccagttaatcttgctttctttgtttggctgggatagaggggtcaagttattaatttcttcacacctaccctcctttttttccctatcactgaagctttttagtgcattagtggggaggagggtggggagacataaccactgcttccatttaatggggtgcacctgtccaataggcgtagctatccggacagagcacgtttgcagaagggggwctcttcttccaggtagctgaaaggggaagacctgacgtactctggttaggttaggacttgccctcgtggtggaaacttttcttaaaaagttataaccaactttyctattaaaagtgggaattaggagagaaggtaggggttgggaatcagagagaatggctttggtctcttgcttgtgggactagcctggcttgggactaaatgccctgctctgaacacgaagcttagtataaactgatggatatccctaccttgaaagaagaaaaggttcttactgcttggtccttgatttatcacacaaagcagaatagtatttttatatttaaatgtaaagacaaaaaactatatgtatggttttgtggattatgtgtgttttgctaaaggaaaaaaccatccaggtcacggggcaccaaatttgagacaaatagtcggattagaaataaagcatctcattttgagtagagagcaagggaagtgrttcttagrtggtgatctgggattaggccctcaagacccttttgggtttctgccctgcccaccctctggagaaggtgggcactggattagttaacagacracrcgttactagcagtcacttgatctccgtggctttggtttaaaagrcacacttgtccacataggtttagagataagagttggctggtcaacttgagcatgttactgacagagggggtattggggttattttctggtaggaatagcatgtcactaaagcaggccttttgatattaaattttttaaaaagcaaaattatagaagtttagattttaatcaaatttgtagggtttctaggtaatttttacagaattgcttgtttgcttcaactgtctcctacctctgctcttggaggagatggggacagggctggagtcaaaacacttgtaattttgtatcttgatgtctttgttaagactgctgaagaattattttttttcttttataataaggaataaaccccmcctttattccttcatttcatctaccattttytggttcttgtgttggctgtggcaggccagctgtggttttyttttgccatgacaacttytaattgccatgtacagtatgttcaaagtcaaataactcctcattgtaaacaaactgtgtaactgcccaaarcagcacttataaatcagcctaacataagatctctctgatgtgtttgtgattctttcaaatccctatgtgccattatatttctttatttcctaaaacaggcaaaataagctcaagtttatgtactctgagtttttaaaacactggagtgatgttgctgaccagccgtttcctgtacctctctaagttgggtatttgggacttaagggattaagtttttcacctagacttagttacacacaatcttggcatttcctagcctagaggtttgtagcagggtacaagccccactcctcccccttcctttgctcccctgagtttggttttggcttaccataacattgttttgaccattcctagc

SEQ ID NO: 416 - DNA, 2567 bp, Homo sapiens
ggccggcctgcgccctggggctcgcagtggtttgtttgcgctgtggatggagtggcggtgcggtcccctgtggagcgcaaacaaggcgcttggttggcgcgggcgcctggctgccttcctcgtggtggggccttcggagcaatcgtcctggttctggcgatggttgagacgcctcgattgcggcgtrtaacgaacaccttccaccatgaccacctcagcaagttcccacttaaataaaggcatcaagcaggtgtacatgtccctgcctcagggtgagaaagtccaggccatgtatatctggatcgatggtactggagaaggactgcgctgcaagacccggaccctggacagtgagcccaagtgtgtggaagagttgcctgagtggaatttcgatggctcyagtactttacagtctgagggttccaacagtgacatgtatctcgtgcctgctgccatgtttcgggaccccttccgwaaggaccctaacaagctggtgttatgtgaagttttcaagtacaatcgaaggcctgcagagaccaatttgaggcacacctgtaaacggataatggacatggtgagcaaccagcacccctggtttggcatggagcaggagtataccctcatggggacagatgggcacccctttggttggccttccaacggcttcccagggccccagggtccatattactgtggtgtgggagcagacagagcctatggcagggacatcgtggaggcccattaccgggcctgcttgtatgctggagtcaagattgcggggactaatgccgaggtcatgcctgcccagtgggaatttcagattggaccttgtgaaggaatcagcatgggagatcatctctgggtggcccgtttcatcttgcatcgtgtgtgtgaagactttggagtgatagcaacctttgatcctaagcccattcctgggaactggaatggtgcaggctgccataccaacttyagcaccaaggccatgcgggaggagaatggtctgaagtacatcgaggaggccattgaraaactaagcaagcggcaccagtaccacatccgtgcctatgatcccaagggaggcctggacaatgcccgacgtctaactggattccatgaaacctccaacatcaacgacttttctgctggtgtagccaatcgtagcgccagcatacgcattccccggactgttggccaggagaagaagggttactttgaagatcgtcgcccctctgccaactgcgaccccttttcggtgacagaagccctcatccgcacgtgtcttctcaatgaaaccggcgatgagcccttccagtacaaaatccaactcttccccctctcccagttgtcccgattgtaactcaaagggtggaatatcaaggtcgtttttttcattccatgtgcccagttaatcttgctttctttgtttggctgggatagaggggtcaagttattaatttcttcacacctaccctcctttttttccctatcactgaagctttttagtgcattagtggggaggagggtggggagacataaccactgcttccatttaatggggtgcacctgtccaataggcgtagctatccggacagagcacgtttgcagaagggggwctcttcttccaggtagctgaaaggggaagacctgacgtactctggttaggttaggacttgccctcgtggtggaaacttttcttaaaaagttataaccaactttyctattaaaagtgggaattaggagagaagggactagcctggcttgggactaaatgccctgctctgaacacgaagcttagtataaactgatggatatccctaccttgaaagaagaaaaggttcttactgcttggtccttgatttatcacacaaagcagaatagtatttttatatttaaatgtaaagacaaaaaactatatgtatggttttgtggattatgtgtgttttgctaaaggaaaaaaccatccaggtcacggggcaccaaatttgagacaaatagtcggattagaaataaagcatctcattttgagtagagagcaagggaagtgrttcttagrtggtgatctgggattaggccctcaagacccttttgggtttctgccctgcccaccctctggagaaggtgggcactggattagttaacagacracrcgttactagcagtcacttgatctccgtggctttggtttaaaagrcacacttgtccacataggtttagagataagagttggctggtcaacttgagcatgttactgacagagggggtattggggttattttctggtaggaatagcatgtcactaaagcaggccttttgatattaaattttttaaaaagcaaaattatagaagtttagattttaatcaaatttgtagggtttctaggtaatttttacagaattgcttgtttgcttcaactgtctcctacctctgctcttggaggagatggggacagggctggagtcaaaacacttgtaattttgtatcttgatgtctttgttaagactgctgaagaattattttttttcttttataataaggaataaaccccmcctttattccttcattt

SEQ ID NO: 417 - DNA, 2263 bp, Homo sapiens
ggccggcctgcgccctggggctcgcagtggtttgtttgcgctgtggatggagtggcggtgcggtcccctgtggagcgcaaacaaggcgcttggttggcgcgggcgcctggctgccttcctcgtggtggggccttcggagcaatcgtcctggttctggcgatggttgagacgcctcgattgcggcgtrtaacgaacaccttccaccatgaccacctcagcaagttcccacttaaataaaggcatcaagcaggtgtacatgtccctgcctcagggtgagaaagtccaggccatgtatatctggatcgatggtactggagaaggactgcgctgcaagacccggaccctggacagtgagcccaagtgtgtggaagagttgcctgagtggaatttcgatggctcyagtactttacagtctgagggttccaacagtgacatgtatctcgtgcctgctgccatgtttcgggaccccttccgwaaggaccctaacaagctggtgttatgtgaagttttcaagtacaatcgaaggcctgcagagaccaatttgaggcacacctgtaaacggataatggacatggtgagcaaccagcacccctggtttggcatggagcaggagtataccctcatggggacagatgggcacccctttggttggccttccaacggcttcccagggccccagggtccatattactgtggtgtgggagcagacagagcctatggcagggacatcgtggaggcccattaccgggcctgcttgtatgctggagtcaagattgcggggactaatgccgaggtcatgcctgcccaggtaaattggaccttgtgaaggaatcagcatgggagatcatctctgggtggcccgtttcatcttgcatcgtgtgtgtgaagactttggagtgatagcaacctttgatcctaagcccattcctgggaactggaatggtgcaggctgccataccaacttyagcaccaaggccatgcgggaggagaatggtctgaagtacatcgaggaggccattgaraaactaagcaagcggcaccagtaccacatccgtgcctatgatcccaagggaggcctggacaatgcccgacgtctaactggattccatgaaacctccaacatcaacgacttttctgctggtgtagccaatcgtagcgccagcatacgcattccccggactgttggccaggagaagaagggttactttgaagatcgtcgcccctctgccaactgcgaccccttttcggtgacagaagccctcatccgcacgtgtcttctcaatgaaaccggcgatgagcccttccagtacaaaatccaactcttccccctctcccagttgtcccgattgtaactcaaagggtggaatatcaaggtcgtttttttcattccatgtgcccagttaatcttgctttctttgtttggctgggatagaggggtcaagttattaatttcttcacacctaccctcctttttttccctatcactgaagctttttagtgcattagtggggaggagggtggggagacataaccactgcttccatttaatggggtgcacctgtccaataggcgtagctatccggacagagcacgtttgcagaagggggwctcttcttccaggtagctgaaaggggaagacctgacgtactctggttaggttaggacttgccctcgtggtggaaacttttcttaaaaagttataaccaactttyctattaaaagtgggaattaggagagaagggactagcctggcttgggactaaatgccctgctctgaacacgaagcttagtataaactgatggatatccctaccttgaaagaagaaaaggttcttactgcttggtccttgatttatcacacaaagcagaatagtatttttatatttaaatgtaaagacaaaaaactatatgtatggttttgtggattatgtgtgttttgctaaaggaaaaaaccatccaggtcacggggcaccaaatttgagacaaatagtcggattagaaataaagcatctcattttgagtagagagcaagggaagtgrttcttagrtggtgatctgggattaggccctcaagacccttttgggtttctgccctgcccaccctctggagaaggtgggcactggattagttaacagacracrcgttactagcagtcacttgatctccgtggctttggtttgagcatgttactgacagagggggtattggggttattttctggtaggaatagcatgtcactaaagcaggccttttgatattaaa

SEQ ID NO: 418 - DNA, 3095 bp, Homo sapiens
ggcyctgcagagtcgagagtgggagaagagcggagcgtgtgagcagtactgcggcctcctctcckctcctaacctcgctctcgcggcctasctttacccgcccgcctgctcggcgaccagaacaccttccaccatgaccacctcagcaagttcccacttaaataaaggcatcaagcaggtgtacatgtccctgcctcagggtgagaaagtccaggccatgtatatctggatcgatggtactggagaaggactgcgctgcaagacccggaccctggacagtgagcccaagtgtgtggaagagttgcctgagtggaatttcgatggctcyagtactttacagtctgagggttccaacagtgacatgtatctcgtgcctgctgccatgtttcgggaccccttccgwaaggaccctaacaagctggtgttatgtgaagttttcaagtacaatcgaaggcctgcagagaccaatttgaggcacacctgtaaacggataatggacatggtgagcaaccagcacccctggtttggcatggagcaggagtataccctcatggggacagatgggcacccctttggttggccttccaacggcttcccagggccccagggtccatattactgtggtgtgggagcagacagagcctatggcagggacatcgtggaggcccattaccgggcctgcttgtatgctggagtcaagattgcggggactaatgccgaggtcatgcctgcccagtgggaatttcagattggaccttgtgaaggaatcagcatgggagatcatctctgggtggcccgtttcatcttgcatcgtgtgtgtgaagactttggagtgatagcaacctttgatcctaagcccattcctgggaactggaatggtgcaggctgccataccaacttyagcaccaaggccatgcgggaggagaatggtctgaagtacatcgaggaggccattgaraaactaagcaagcggcaccagtaccacatccgtgcctatgatcccaagggaggcctggacaatgcccgacgtctaactggattccatgaaacctccaacatcaacgacttttctgctggtgtagccaatcgtagcgccagcatacgcattccccggactgttggccaggagaagaagggttactttgaagatcgtcgcccctctgccaactgcgaccccttttcggtgacagaagccctcatccgcacgtgtcttctcaatgaaaccggcgatgagcccttccagtacaaaaattaagtggactagacctccagctgttgagcccctcctagttcttcatcccactccaactcttccccctctcccagttgtcccgattgtaactcaaagggtggaatatcaaggtcgtttttttcattccatgtgcccagttaatcttgctttctttgtttggctgggatagaggggtcaagttattaatttcttcacacctaccctcctttttttccctatcactgaagctttttagtgcattagtggggaggagggtggggagacataaccactgcttccatttaatggggtgcacctgtccaataggcgtagctatccggacagagcacgtttgcagaagggggwctcttcttccaggtagctgaaaggggaagacctgacgtactctggttaggttaggacttgccctcgtggtggaaacttttcttaaaaagttataaccaactttyctattaaaagtgggaattaggagagaaggtaggggttgggaatcagagagaatggctttggtctcttgcttgtgggactagcctggcttgggactaaatgccctgctctgaacacgaagcttagtataaactgatggatatccctaccttgaaagaagaaaaggttcttactgcttggtccttgatttatcacacaaagcagaatagtatttttatatttaaatgtaaagacaaaaaactatatgtatggttttgtggattatgtgtgttttgctaaaggaaaaaaccatccaggtcacggggcaccaaatttgagacaaatagtcggattagaaataaagcatctcattttgagtagagagcaagggaagtgrttcttagrtggtgatctgggattaggccctcaagacccttttgggtttctgccctgcccaccctctggagaaggtgggcactggattagttaacagacracrcgttactagcagtcacttgatctccgtggctttggtttaaaagrcacacttgtccacataggtttagagataagagttggctggtcaacttgagcatgttactgacagagggggtattggggttattttctggtaggaatagcatgtcactaaagcaggccttttgatattaaattttttaaaaagcaaaattatagaagtttagattttaatcaaatttgtagggtttctaggtaatttttacagaattgcttgtttgcttcaactgtctcctacctctgctcttggaggagatggggacagggctggagtcaaaacacttgtaattttgtatcttgatgtctttgttaagactgctgaagaattattttttttcttttataataaggaataaaccccmcctttattccttcatttcatctaccattttytggttcttgtgttggctgtggcaggccagctgtggttttyttttgccatgacaacttytaattgccatgtacagtatgttcaaagtcaaataactcctcattgtaaacaaactgtgtaactgcccaaarcagcacttataaatcagcctaacataagatctctctgatgtgtttgtgattctttcaaatccctatgtgccattatatttctttatttcctaaaacaggcaaaataagctcaagtttatgtactctgagtttttaaaacactggagtgatgttgctgaccagccgtttcctgtacctctctaagttgggtatttgggacttaagggattaagtttttcacctagacttagttacacacaatcttggcatttcctagcctagaggtttgtagcagggtacaagccccactcctcccccttcctttgctcccctgagtttggttttggcttaccataacattgttttgaccattcctagc

SEQ ID NO: 419 - DNA, 3048 bp, Homo sapiens
tcgagagtgggagaagagcggagcgtgtgagcagtactgcggcctcctctcckctcctaacctcgctctcgcgaacaccttccaccatgaccacctcagcaagttcccacttaaataaaggcatcaagcaggtgtacatgtccctgcctcagggtgagaaagtccaggccatgtatatctggatcgatggtactggagaaggactgcgctgcaagacccggaccctggacagtgagcccaagtgtgtggaagagttgcctgagtggaatttcgatggctcyagtactttacagtctgagggttccaacagtgacatgtatctcgtgcctgctgccatgtttcgggaccccttccgwaaggaccctaacaagctggtgttatgtgaagttttcaagtacaatcgaaggcctgcagagaccaatttgaggcacacctgtaaacggataatggacatggtgagcaaccagcacccctggtttggcatggagcaggagtataccctcatggggacagatgggcacccctttggttggccttccaacggcttcccagggccccagggtccatattactgtggtgtgggagcagacagagcctatggcagggacatcgtggaggcccattaccgggcctgcttgtatgctggagtcaagattgcggggactaatgccgaggtcatgcctgcccagtgggaatttcagattggaccttgtgaaggaatcagcatgggagatcatctctgggtggcccgtttcatcttgcatcgtgtgtgtgaagactttggagtgatagcaacctttgatcctaagcccattcctgggaactggaatggtgcaggctgccataccaacttyagcaccaaggccatgcgggaggagaatggtctgaagtacatcgaggaggccattgaraaactaagcaagcggcaccagtaccacatccgtgcctatgatcccaagggaggcctggacaatgcccgacgtctaactggattccatgaaacctccaacatcaacgacttttctgctggtgtagccaatcgtagcgccagcatacgcattccccggactgttggccaggagaagaagggttactttgaagatcgtcgcccctctgccaactgcgaccccttttcggtgacagaagccctcatccgcacgtgtcttctcaatgaaaccggcgatgagcccttccagtacaaaaattaagtggactagacctccagctgttgagcccctcctagttcttcatcccactccaactcttccccctctcccagttgtcccgattgtaactcaaagggtggaatatcaaggtcgtttttttcattccatgtgcccagttaatcttgctttctttgtttggctgggatagaggggtcaagttattaatttcttcacacctaccctcctttttttccctatcactgaagctttttagtgcattagtggggaggagggtggggagacataaccactgcttccatttaatggggtgcacctgtccaataggcgtagctatccggacagagcacgtttgcagaagggggwctcttcttccaggtagctgaaaggggaagacctgacgtactctggttaggttaggacttgccctcgtggtggaaacttttcttaaaaagttataaccaactttyctattaaaagtgggaattaggagagaaggtaggggttgggaatcagagagaatggctttggtctcttgcttgtgggactagcctggcttgggactaaatgccctgctctgaacacgaagcttagtataaactgatggatatccctaccttgaaagaagaaaaggttcttactgcttggtccttgatttatcacacaaagcagaatagtatttttatatttaaatgtaaagacaaaaaactatatgtatggttttgtggattatgtgtgttttgctaaaggaaaaaaccatccaggtcacggggcaccaaatttgagacaaatagtcggattagaaataaagcatctcattttgagtagagagcaagggaagtgrttcttagrtggtgatctgggattaggccctcaagacccttttgggtttctgccctgcccaccctctggagaaggtgggcactggattagttaacagacracrcgttactagcagtcacttgatctccgtggctttggtttaaaagrcacacttgtccacataggtttagagataagagttggctggtcaacttgagcatgttactgacagagggggtattggggttattttctggtaggaatagcatgtcactaaagcaggccttttgatattaaattttttaaaaagcaaaattatagaagtttagattttaatcaaatttgtagggtttctaggtaatttttacagaattgcttgtttgcttcaactgtctcctacctctgctcttggaggagatggggacagggctggagtcaaaacacttgtaattttgtatcttgatgtctttgttaagactgctgaagaattattttttttcttttataataaggaataaaccccmcctttattccttcatttcatctaccattttytggttcttgtgttggctgtggcaggccagctgtggttttyttttgccatgacaacttytaattgccatgtacagtatgttcaaagtcaaataactcctcattgtaaacaaactgtgtaactgcccaaarcagcacttataaatcagcctaacataagatctctctgatgtgtttgtgattctttcaaatccctatgtgccattatatttctttatttcctaaaacaggcaaaataagctcaagtttatgtactctgagtttttaaaacactggagtgatgttgctgaccagccgtttcctgtacctctctaagttgggtatttgggacttaagggattaagtttttcacctagacttagttacacacaatcttggcatttcctagcctagaggtttgtagcagggtacaagccccactcctcccccttcctttgctcccctgagtttggttttggcttaccataacattgttttgaccattcctagc

SEQ ID NO: 420 - DNA, 3300 bp, Homo sapiens
gccacaccccggcctaacgctgctgctcccgccgctactggagtggtggggargggcccccaaggctgtgcaacgcggagcgtgagaggaaggtataaagggtagcgagagggcgggaccgaggaggaaagggaaaaaaaaaaaactagggggataggggtggggggacgcgcgaagggcgcgctctcgcgtcacgtgaccgggacgcgccgttcttccgtcggccattttaggtggtccgcggcggcgccattaaagcgaggaggaggcgagagcggccgccgctggtgcttattcttttttagtgcagcgggagagagcgggagtgtgcgccgcgcgagagtgggaggcgaagggggcaggccagggagaggcgcaggagcctttgcagccacgcgcgcgccttccctgtcttgtgtgcttcgcgaggtagagcgggcgcgcggcagcggcggggattactttgctgctagtttcggttcgcggcagcggcgggtgtagtctcggcggcagcggcggagacactagcactatgtcggaggagcagttcggcggggacggggcggcggcagcggcaacggcggcggtaggcggctcggcgggcgagcaggagggagccatggtggcggcgacacagggggcagcggcggcggcgggaagcggagccgggaccgggggcggaaccgcgtctggaggcaccgaagggggcagcgccgagtcggagggggcgaagattgacgccagtaagaacgaggaggatgaaggccattcaaactcctccccacgacactctgaagcagcgacggcacagcgggaagaatggaaaatgtttataggaggccttagctgggacactacaaagaaagatcykaaggactacttttccaaatttggtgaagttgtagactgcactctgaagttagatcctatcacagggcgatcaaggggttttggctttgtgctatttaaagaatcggagagtgtagataaggtcatggatcaaaaagaacataaattgaatgggaaggtgattgatcctaaaagggccaaagccatgaaaacaaaagagccggttaaaaaaatttttgttggtggcctttctccagatacacctgaagagaaaataagggagtactttggtggttttggtgaggtggaatccatagagctccccatggacaacaagaccaataagaggcgtgggttctgctttattacctttaaggaagaagaaccagtgaagaagataatggaaaagaaataccacaatgttggtcttagtaaatgtgaaataaaagtagccatgtcgaaggaacaatatcagcaacagcaacagtggggatctagaggaggatttgcaggaagagctcgtggaagaggtggtggccccagtcaaaactggaaccagggatatagtaactattggaatcaaggytatggcaactatggatataacagccaaggttacggtggttatggaggatatgactacactggttacaacaactactatggatatggtgattatagcacgggaacttcattgcaggccctgtgtcgcgctgacttcacgattctcacaggcccgctcaatgcggacagggtacgagatgctcacgctctcgaatgctgccgtttggtggtgaagcagtattttccaatttgaagattcatttgaaggtggctcctgccacctgctaatagcagttcaaactaaatttttwgtatcaagtccctgaatggaagtatgacgttgggtccctctgaagtttaattctgagttctcattaaaagaaatttgctttcattgttttatttcttaattgctatgcttcagaatcaatttgtgttttatgccctttcccccagtattgtagagcaagtcttgtgttaaaagcccagtgtgacagtgtcatgatgtagtagtgtcttactggttttttaataaatccttttgtataaaaatgtattggctcttttatcatcagaataggaaaaattgtcatggattcaagttattaaaagcataagtttggaagacaggcttgccgaaattgaggacatgattaaaattgcagtgaagtttgaaatgtttttagcaaaatctaatttttgccataatgtgtcctccctgtccaaattgggaaygacttaatgtcaatttgtttgttggttgttttaataatacttccttatgtagccattaagatttatatgaatattttcccaaatgcccagtttttgcttaatatgtattgtgctttttagaacaaatctggataaatgtgcaaaagtacccctttgcacagatarttaatgttttatgcttccattaaataaaaaggacttaaaatctgttaattataatagaaatgcggctagttcagagagatttttagagctgtggtggacttcatagatgaattcaagtgttgagggaggattaaagaaatatataccgtgwttatgtgtgtgtgcttatttgtttgaatgattttattttccatttctcaaaggttttatttttttggttagggccttaaaatttcaggactgtgattattagtatgtgtgcctaaggaactttttgagtcactcttaagaaagtgaaactgaagagtctaagtgataactataggattaagtcagaattgtttttcctgtcatttgttggaagcttcttgagttctgttattagcattcagggaattgatacccatcaacttgaatggaaaatcstttgtaggtattacttaagtgaatgttaagagttccaccctgagtggtaatctaaggctgtgcagtcagttacttcagactgctcagaatagttcattagaaaggtaacaaatgagaaatgtattattatacagttctatagtagtgaagtgatggaatacctttcttacttttgtggagttacatctgatgctaagaatttgacctccaactaagcaaacattttaatgagcaaaagttagtgttattaaagtttttttatgatagatccaaattgaggacctgtgtcctgtttttataagattgcaacccagctatgctcatttgtttatgttttgtatatggctgcttttgtgttacagtggtagagtttagtagttaggacagagacctgcaaagcaaaataatttacagtctggccctttacagaaaagtttgctgactcatggtcaaaataaatgaaaattttttgtgttagggttgttaagctagggttctttttggtatcatatgcttattttatgtaaatctctcaataaaaaattatttttaagagacagg

SEQ ID NO: 421 - DNA, 1989 bp, Homo sapiens
ctgtgcaacgcggagcgtgagaggaaggtcatggatcaaaaagaacataaattgaatgggaaggtgattgatcctaaaagggccaaagccatgaaaacaaaagagccggttaaaaaaatttttgttggtggcctttctccagatacacctgaagagaaaataagggagtactttggtggttttggtgaggtggaatccatagagctccccatggacaacaagaccaataagaggcgtgggttctgctttattacctttaaggaagaagaaccagtgaagaagataatggaaaagaaataccacaatgttggtcttagtaaatgtgaaataaaagtagccatgtcgaaggaacaatatcagcaacagcaacagtggggatctagaggaggatttgcaggaagagctcgtggaagaggtggtgaccagcagagtggttatgggaaggtatccaggcgaggtggtcatcaaaatagctacaaaccatactaaattattccatttgcaacttatccccaacaggtatgttctaaaaatagtttttttttgtcatttacaatagtagtttttataatctatattgttcataaaayaatgcttaatttaagagtttcacagcacccagaagtgcttaccatattataacatagtgactttcaaagatatgtaacacaggtgctcttaagcttttgcctttttgtcctattattaacaagtcagtaaagttaacaggtaaagtactgctaatgggtacaaattaaggaattgcagcaaaaaagtattgcctactaactctgacattataccttgtttgtacccgccagcgggaacttcattgcaggccctgtgtcgcgctgacttcacgattctcacaggcccgctcaatgcggacagggtacgagatgctcacgctctcgaatgctgccgtttggtatggtctcttccaacatcctgtatcagcattataaaataaaatggatacttcaagctttgccttcacttatttctttgctttttaaaaactatttgtaatgtaattttaatgcattttttacaggcccagtaatggttaaatacgtcagcttactgaataattttaactatttattcttctaaggatacagcttgtctctggattttccagtcttaattttatattttattaatctattttaatgcttgcttttcccatttatagacgttgtagcagtaattgcaagaagttcttgagctgaattcctgttgtgacaacttcctataattacagtagataactttttyttttagtcgtatataacttttctataacttgtgatggacaagagatatgcttatccaataaaataagcttaaatattagatgctcttgggtcaaaatgtccttttaccaaattgacctttttatgagttctttgggtaaatactttaaagctttttatattttaaagaatacttgtaaaagcatatcacatcttaaaccagtggtgcacatgtggatttacagctcatggactctactgttcagctttaatttataaaacatatcacacatttaatgttatacagtatttacatatagtggaacatagggataactcagttttatgtaaatttttgttaagtgttgtagcctgcccagagtgacttctattttttcttctttgtctccaggtggtgaagcagtattttccaatttgaagattcatttgaaggtggctcctgccacctgctaatagcagttcaaactaaatttttwgtatcaagtccctgaatggaagtatgacgttgggtccctctgaagtttaattctgagttctcattaaaagaaatttgctttcattgttttatttcttaattgctatgcttcagaatcaatttgtgttttatgccctttcccccagtattgtagagcaagtcttgtgttaaaagcccagtgtgacagtgtcatgatgtagtagtgtcttactggttttttaataaatccttttgtat

SEQ ID NO: 422 - DNA, 3251 bp, Homo sapiens
gccacaccccggcctaacgctgctgctcccgccgctactggagtggtggggargggcccccaaggctgtgcaacgcggagcgtgagaggaaggtataaagggtagcgagagggcgggaccgaggaggaaagggaaaaaaaaaaaactagggggataggggtggggggacgcgcgaagggcgcgctctcgcgtcacgtgaccgggacgcgccgttcttccgtcggccattttaggtggtccgcggcggcgccattaaagcgaggaggaggcgagagcggccgccgctggtgcttattcttttttagtgcagcgggagagagcgggagtgtgcgccgcgcgagagtgggaggcgaagggggcaggccagggagaggcgcaggagcctttgcagccacgcgcgcgccttccctgtcttgtgtgcttcgcgaggtagagcgggcgcgcggcagcggcggggattactttgctgctagtttcggttcgcggcagcggcgggtgtagtctcggcggcagcggcggagacactagcactatgtcggaggagcagttcggcggggacggggcggcggcagcggcaacggcggcggtaggcggctcggcgggcgagcaggagggagccatggtggcggcgacacagggggcagcggcggcggcgggaagcggagccgggaccgggggcggaaccgcgtctggaggcaccgaagggggcagcgccgagtcggagggggcgaagattgacgccagtaagaacgaggaggatgaaggccattcaaactcctccccacgacactctgaagcagcgacggcacagcgggaagaatggaaaatgtttataggaggccttagctgggacactacaaagaaagatcykaaggactacttttccaaatttggtgaagttgtagactgcactctgaagttagatcctatcacagggcgatcaaggggttttggctttgtgctatttaaagaatcggagagtgtagataaggtcatggatcaaaaagaacataaattgaatgggaaggtgattgatcctaaaagggccaaagccatgaaaacaaaagagccggttaaaaaaatttttgttggtggcctttctccagatacacctgaagagaaaataagggagtactttggtggttttggtgaggtggaatccatagagctccccatggacaacaagaccaataagaggcgtgggttctgctttattacctttaaggaagaagaaccagtgaagaagataatggaaaagaaataccacaatgttggtcttagtaaatgtgaaataaaagtagccatgtcgaaggaacaatatcagcaacagcaacagtggggatctagaggaggatttgcaggaagagctcgtggaagaggtggtgaccagcagagtggttatgggaaggtatccaggcgaggtggtcatcaaaatagctacaaaccatactaaattattccatttgcaacttatccccaacagcgggaacttcattgcaggccctgtgtcgcgctgacttcacgattctcacaggcccgctcaatgcggacagggtacgagatgctcacgctctcgaatgctgccgtttggtggtgaagcagtattttccaatttgaagattcatttgaaggtggctcctgccacctgctaatagcagttcaaactaaatttttwgtatcaagtccctgaatggaagtatgacgttgggtccctctgaagtttaattctgagttctcattaaaagaaatttgctttcattgttttatttcttaattgctatgcttcagaatcaatttgtgttttatgccctttcccccagtattgtagagcaagtcttgtgttaaaagcccagtgtgacagtgtcatgatgtagtagtgtcttactggttttttaataaatccttttgtataaaaatgtattggctcttttatcatcagaataggaaaaattgtcatggattcaagttattaaaagcataagtttggaagacaggcttgccgaaattgaggacatgattaaaattgcagtgaagtttgaaatgtttttagcaaaatctaatttttgccataatgtgtcctccctgtccaaattgggaaygacttaatgtcaatttgtttgttggttgttttaataatacttccttatgtagccattaagatttatatgaatattttcccaaatgcccagtttttgcttaatatgtattgtgctttttagaacaaatctggataaatgtgcaaaagtacccctttgcacagatarttaatgttttatgcttccattaaataaaaaggacttaaaatctgttaattataatagaaatgcggctagttcagagagatttttagagctgtggtggacttcatagatgaattcaagtgttgagggaggattaaagaaatatataccgtgwttatgtgtgtgtgcttatttgtttgaatgattttattttccatttctcaaaggttttatttttttggttagggccttaaaatttcaggactgtgattattagtatgtgtgcctaaggaactttttgagtcactcttaagaaagtgaaactgaagagtctaagtgataactataggattaagtcagaattgtttttcctgtcatttgttggaagcttcttgagttctgttattagcattcagggaattgatacccatcaacttgaatggaaaatcstttgtaggtattacttaagtgaatgttaagagttccaccctgagtggtaatctaaggctgtgcagtcagttacttcagactgctcagaatagttcattagaaaggtaacaaatgagaaatgtattattatacagttctatagtagtgaagtgatggaatacctttcttacttttgtggagttacatctgatgctaagaatttgacctccaactaagcaaacattttaatgagcaaaagttagtgttattaaagtttttttatgatagatccaaattgaggacctgtgtcctgtttttataagattgcaacccagctatgctcatttgtttatgttttgtatatggctgcttttgtgttacagtggtagagtttagtagttaggacagagacctgcaaagcaaaataatttacagtctggccctttacagaaaagtttgctgactcatggtcaaaataaatgaaaattttttgtgttagggttgttaagctagggttctttttggtatcatatgcttattttatgtaaatctctcaataaaaaattatttttaagagacagg

SEQ ID NO: 423 - DNA, 3089 bp, Homo sapiens
gcccccaaggctgtgcaacgcggagcgtgagaggaaggtataaagggtagcgagagggcgggaccgaggaggaaagggaaaaaaaaaaaactagggggataggggtggggggacgcgcgaagggcgcgctctcgcgtcacgtgaccgggacgcgccgttcttccgtcggccattttaggtggtccgcggcggcgccattaaagcgaggaggaggcgagagcggccgccgctggtgcttattcttttttagtgcagcgggagagagcgggagtgtgcgccgcgcgagagtgggaggcgaagggggcaggccagggagaggcgcaggagcctttgcagccacgcgcgcgccttccctgtcttgtgtgcttcgcgaggtagagcgggcgcgcggcagcggcggggattactttgctgctagtttcggttcgcggcagcggcgggtgtagtctcggcggcagcggcggagacactagcactatgtcggaggagcagttcggcggggacggggcggcggcagcggcaacggcggcggtaggcggctcggcgggcgagcaggagggagccatggtggcggcgacacagggggcagcggcggcggcgggaagcggagccgggaccgggggcggaaccgcgtctggaggcaccgaagggggcagcgccgagtcggagggggcgaagattgacgccagtaagaacgaggaggatgaaggccattcaaactcctccccacgacactctgaagcagcgacggcacagcgggaagaatggaaaatgtttataggaggccttagctgggacactacaaagaaagatcykaaggactacttttccaaatttggtgaagttgtagactgcactctgaagttagatcctatcacagggcgatcaaggggttttggctttgtgctatttaaagaatcggagagtgtagataaggtcatggatcaaaaagaacataaattgaatgggaaggtgattgatcctaaaagggccaaagccatgaaaacaaaagagccggttaaaaaaatttttgttggtggcctttctccagatacacctgaagagaaaataagggagtactttggtggttttggtgaggtggaatccatagagctccccatggacaacaagaccaataagaggcgtgggttctgctttattacctttaaggaagaagaaccagtgaagaagataatggaaaagaaataccacaatgttggtcttagtaaatgtgaaataaaagtagccatgtcgaaggaacaatatcagcaacagcaacagtggggatctagaggaggatttgcaggaagagctcgtggaagaggtggtgaccagcagagtggttatgggaaggtatccaggcgaggtggtcatcaaaatagctacaaaccatactaaattattccatttgcaacttatccccaacaggtggtgaagcagtattttccaatttgaagattcatttgaaggtggctcctgccacctgctaatagcagttcaaactaaatttttwgtatcaagtccctgaatggaagtatgacgttgggtccctctgaagtttaattctgagttctcattaaaagaaatttgctttcattgttttatttcttaattgctatgcttcagaatcaatttgtgttttatgccctttcccccagtattgtagagcaagtcttgtgttaaaagcccagtgtgacagtgtcatgatgtagtagtgtcttactggttttttaataaatccttttgtataaaaatgtattggctcttttatcatcagaataggaaaaattgtcatggattcaagttattaaaagcataagtttggaagacaggcttgccgaaattgaggacatgattaaaattgcagtgaagtttgaaatgtttttagcaaaatctaatttttgccataatgtgtcctccctgtccaaattgggaaygacttaatgtcaatttgtttgttggttgttttaataatacttccttatgtagccattaagatttatatgaatattttcccaaatgcccagtttttgcttaatatgtattgtgctttttagaacaaatctggataaatgtgcaaaagtacccctttgcacagatarttaatgttttatgcttccattaaataaaaaggacttaaaatctgttaattataatagaaatgcggctagttcagagagatttttagagctgtggtggacttcatagatgaattcaagtgttgagggaggattaaagaaatatataccgtgwttatgtgtgtgtgcttatttgtttgaatgattttattttccatttctcaaaggttttatttttttggttagggccttaaaatttcaggactgtgattattagtatgtgtgcctaaggaactttttgagtcactcttaagaaagtgaaactgaagagtctaagtgataactataggattaagtcagaattgtttttcctgtcatttgttggaagcttcttgagttctgttattagcattcagggaattgatacccatcaacttgaatggaaaatcstttgtaggtattacttaagtgaatgttaagagttccaccctgagtggtaatctaaggctgtgcagtcagttacttcagactgctcagaatagttcattagaaaggtaacaaatgagaaatgtattattatacagttctatagtagtgaagtgatggaatacctttcttacttttgtggagttacatctgatgctaagaatttgacctccaactaagcaaacattttaatgagcaaaagttagtgttattaaagtttttttatgatagatccaaattgaggacctgtgtcctgtttttataagattgcaacccagctatgctcatttgtttatgttttgtatatggctgcttttgtgttacagtggtagagtttagtagttaggacagagacctgcaaagcaaaataatttacagtctggccctttacagaaaagtttgctgactcatggtcaaaataaatgaaaattttttgtgttagggttgttaagctagggttctttttggtatcatatgcttattttatgtaaatctctcaataaaaaattatttttaagagacagg

SEQ ID NO: 424 - DNA, 2896 bp, Homo sapiens
gccacaccccggcctaacgctgctgctcccgccgctactggagtggtggggargggcccccaaggctgtgcaacgcggagcgtgagaggaaggtataaagggtagcgagagggcgggaccgaggaggaaagggaaaaaaaaaaaactagggggataggggtggggggacgcgcgaagggcgcgctctcgcgtcacgtgaccgggacgcgccgttcttccgtcggccattttaggtggtccgcggcggcgccattaaagcgaggaggaggcgagagcggccgccgctggtgcttattcttttttagtgcagcgggagagagcgggagtgtgcgccgcgcgagagtgggaggcgaagggggcaggccagggagaggcgcaggagcctttgcagccacgcgcgcgccttccctgtcttgtgtgcttcgcgaggtagagcgggcgcgcggcagcggcggggattactttgctgctagtttcggttcgcggcagcggcgggtgtagtctcggcggcagcggcggagacactagcactatgtcggaggagcagttcggcggggacggggcggcggcagcggcaacggcggcggtaggcggctcggcgggcgagcaggagggagccatggtggcggcgacacagggggcagcggcggcggcgggaagcggagccgggaccgggggcggaaccgcgtctggaggcaccgaagggggcagcgccgagtcggagggggcgaagattgacgccagtaagaacgaggaggatgaagggaaaatgtttataggaggccttagctgggacactacaaagaaagatcykaaggactacttttccaaatttggtgaagttgtagactgcactctgaagttagatcctatcacagggcgatcaaggggttttggctttgtgctatttaaagaatcggagagtgtagataaggtcatggatcaaaaagaacataaattgaatgggaaggtgattgatcctaaaagggccaaagccatgaaaacaaaagagccggttaaaaaaatttttgttggtggcctttctccagatacacctgaagagaaaataagggagtactttggtggttttggtgaggtggaatccatagagctccccatggacaacaagaccaataagaggcgtgggttctgctttattacctttaaggaagaagaaccagtgaagaagataatggaaaagaaataccacaatgttggtcttagtaaatgtgaaataaaagtagccatgtcgaaggaacaatatcagcaacagcaacagtggggatctagaggaggatttgcaggaagagctcgtggaagaggtggtgaccagcagagtggttatgggaaggtatccaggcgaggtggtcatcaaaatagctacaaaccatactaaattattccatttgcaacttatccccaacaggtatgttctaaaaatagtttttttttgtcatttacaatagtagtttttataatctatattgttcataaaayaatgcttaatttaagagtttcacagcacccagaagtgcttaccatattataacatagtgactttcaaagatatgtaacacaggtgctcttaagcttttgcctttttgtcctattattaacaagtcagtaaagttaacaggtaaagtactgctaatgggtacaaattaaggaattgcagcaaaaaagtattgcctactaactctgacattataccttgtttgtacccgccagcgggaacttcattgcaggccctgtgtcgcgctgacttcacgattctcacaggcccgctcaatgcggacagggtacgagatgctcacgctctcgaatgctgccgtttggtatggtctcttccaacatcctgtatcagcattataaaataaaatggatacttcaagctttgccttcacttatttctttgctttttaaaaactatttgtaatgtaattttaatgcattttttacaggcccagtaatggttaaatacgtcagcttactgaataattttaactatttattcttctaaggatacagcttgtctctggattttccagtcttaattttatattttattaatctattttaatgcttgcttttcccatttatagacgttgtagcagtaattgcaagaagttcttgagctgaattcctgttgtgacaacttcctataattacagtagataactttttyttttagtcgtatataacttttctataacttgtgatggacaagagatatgcttatccaataaaataagcttaaatattagatgctcttgggtcaaaatgtccttttaccaaattgacctttttatgagttctttgggtaaatactttaaagctttttatattttaaagaatacttgtaaaagcatatcacatcttaaaccagtggtgcacatgtggatttacagctcatggactctactgttcagctttaatttataaaacatatcacacatttaatgttatacagtatttacatatagtggaacatagggataactcagttttatgtaaatttttgttaagtgttgtagcctgcccagagtgacttctattttttcttctttgtctccaggtggtgaagcagtattttccaatttgaagattcatttgaaggtggctcctgccacctgctaatagcagttcaaactaaatttttwgtatcaagtccctgaatggaagtatgacgttgggtccctctgaagtttaattctgagttctcattaaaagaaatttgctttcattgttttatttcttaattgctatgcttcagaatcaatttgtgttttatgccctttcccccagtattgtagagcaagtcttgtgttaaaagcccagtgtgacagtgtcatgatgtagtagtgtcttactggttttttaataaatccttttgtat

SEQ ID NO: 425 - DNA, 3043 bp, Homo sapiens
gccacaccccggcctaacgctgctgctcccgccgctactggagtggtggggargggcccccaaggctgtgcaacgcggagcgtgagaggaaggtataaagggtagcgagagggcgggaccgaggaggaaagggaaaaaaaaaaaactagggggataggggtggggggacgcgcgaagggcgcgctctcgcgtcacgtgaccgggacgcgccgttcttccgtcggccattttaggtggtccgcggcggcgccattaaagcgaggaggaggcgagagcggccgccgctggtgcttattcttttttagtgcagcgggagagagcgggagtgtgcgccgcgcgagagtgggaggcgaagggggcaggccagggagaggcgcaggagcctttgcagccacgcgcgcgccttccctgtcttgtgtgcttcgcgaggtagagcgggcgcgcggcagcggcggggattactttgctgctagtttcggttcgcggcagcggcgggtgtagtctcggcggcagcggcggagacactagcactatgtcggaggagcagttcggcggggacggggcggcggcagcggcaacggcggcggtaggcggctcggcgggcgagcaggagggagccatggtggcggcgacacagggggcagcggcggcggcgggaagcggagccgggaccgggggcggaaccgcgtctggaggcaccgaagggggcagcgccgagtcggagggggcgaagattgacgccagtaagaacgaggaggatgaagggaaaatgtttataggaggccttagctgggacactacaaagaaagatcykaaggactacttttccaaatttggtgaagttgtagactgcactctgaagttagatcctatcacagggcgatcaaggggttttggctttgtgctatttaaagaatcggagagtgtagataaggtcatggatcaaaaagaacataaattgaatgggaaggtgattgatcctaaaagggccaaagccatgaaaacaaaagagccggttaaaaaaatttttgttggtggcctttctccagatacacctgaagagaaaataagggagtactttggtggttttggtgaggtggaatccatagagctccccatggacaacaagaccaataagaggcgtgggttctgctttattacctttaaggaagaagaaccagtgaagaagataatggaaaagaaataccacaatgttggtcttagtaaatgtgaaataaaagtagccatgtcgaaggaacaatatcagcaacagcaacagtggggatctagaggaggatttgcaggaagagctcgtggaagaggtggtggccccagtcaaaactggaaccagggatatagtaactattggaatcaaggytatggcaactatggatataacagccaaggttacggtggttatggaggatatgactacactggttacaacaactactatggatatggtgattatagcaaccagcagagtggttatgggaaggtatccaggcgaggtggtcatcaaaatagctacaaaccatactaaattattccatttgcaacttatccccaacaggtatgttctaaaaatagtttttttttgtcatttacaatagtagtttttataatctatattgttcataaaayaatgcttaatttaagagtttcacagcacccagaagtgcttaccatattataacatagtgactttcaaagatatgtaacacaggtgctcttaagcttttgcctttttgtcctattattaacaagtcagtaaagttaacaggtaaagtactgctaatgggtacaaattaaggaattgcagcaaaaaagtattgcctactaactctgacattataccttgtttgtacccgccagcgggaacttcattgcaggccctgtgtcgcgctgacttcacgattctcacaggcccgctcaatgcggacagggtacgagatgctcacgctctcgaatgctgccgtttggtatggtctcttccaacatcctgtatcagcattataaaataaaatggatacttcaagctttgccttcacttatttctttgctttttaaaaactatttgtaatgtaattttaatgcattttttacaggcccagtaatggttaaatacgtcagcttactgaataattttaactatttattcttctaaggatacagcttgtctctggattttccagtcttaattttatattttattaatctattttaatgcttgcttttcccatttatagacgttgtagcagtaattgcaagaagttcttgagctgaattcctgttgtgacaacttcctataattacagtagataactttttyttttagtcgtatataacttttctataacttgtgatggacaagagatatgcttatccaataaaataagcttaaatattagatgctcttgggtcaaaatgtccttttaccaaattgacctttttatgagttctttgggtaaatactttaaagctttttatattttaaagaatacttgtaaaagcatatcacatcttaaaccagtggtgcacatgtggatttacagctcatggactctactgttcagctttaatttataaaacatatcacacatttaatgttatacagtatttacatatagtggaacatagggataactcagttttatgtaaatttttgttaagtgttgtagcctgcccagagtgacttctattttttcttctttgtctccaggtggtgaagcagtattttccaatttgaagattcatttgaaggtggctcctgccacctgctaatagcagttcaaactaaatttttwgtatcaagtccctgaatggaagtatgacgttgggtccctctgaagtttaattctgagttctcattaaaagaaatttgctttcattgttttatttcttaattgctatgcttcagaatcaatttgtgttttatgccctttcccccagtattgtagagcaagtcttgtgttaaaagcccagtgtgacagtgtcatgatgtagtagtgtcttactggttttttaataaatccttttgtat

SEQ ID NO: 426 - DNA, 3236 bp, Homo sapiens
gcccccaaggctgtgcaacgcggagcgtgagaggaaggtataaagggtagcgagagggcgggaccgaggaggaaagggaaaaaaaaaaaactagggggataggggtggggggacgcgcgaagggcgcgctctcgcgtcacgtgaccgggacgcgccgttcttccgtcggccattttaggtggtccgcggcggcgccattaaagcgaggaggaggcgagagcggccgccgctggtgcttattcttttttagtgcagcgggagagagcgggagtgtgcgccgcgcgagagtgggaggcgaagggggcaggccagggagaggcgcaggagcctttgcagccacgcgcgcgccttccctgtcttgtgtgcttcgcgaggtagagcgggcgcgcggcagcggcggggattactttgctgctagtttcggttcgcggcagcggcgggtgtagtctcggcggcagcggcggagacactagcactatgtcggaggagcagttcggcggggacggggcggcggcagcggcaacggcggcggtaggcggctcggcgggcgagcaggagggagccatggtggcggcgacacagggggcagcggcggcggcgggaagcggagccgggaccgggggcggaaccgcgtctggaggcaccgaagggggcagcgccgagtcggagggggcgaagattgacgccagtaagaacgaggaggatgaaggccattcaaactcctccccacgacactctgaagcagcgacggcacagcgggaagaatggaaaatgtttataggaggccttagctgggacactacaaagaaagatcykaaggactacttttccaaatttggtgaagttgtagactgcactctgaagttagatcctatcacagggcgatcaaggggttttggctttgtgctatttaaagaatcggagagtgtagataaggtcatggatcaaaaagaacataaattgaatgggaaggtgattgatcctaaaagggccaaagccatgaaaacaaaagagccggttaaaaaaatttttgttggtggcctttctccagatacacctgaagagaaaataagggagtactttggtggttttggtgaggtggaatccatagagctccccatggacaacaagaccaataagaggcgtgggttctgctttattacctttaaggaagaagaaccagtgaagaagataatggaaaagaaataccacaatgttggtcttagtaaatgtgaaataaaagtagccatgtcgaaggaacaatatcagcaacagcaacagtggggatctagaggaggatttgcaggaagagctcgtggaagaggtggtggccccagtcaaaactggaaccagggatatagtaactattggaatcaaggytatggcaactatggatataacagccaaggttacggtggttatggaggatatgactacactggttacaacaactactatggatatggtgattatagcaaccagcagagtggttatgggaaggtatccaggcgaggtggtcatcaaaatagctacaaaccatactaaattattccatttgcaacttatccccaacaggtggtgaagcagtattttccaatttgaagattcatttgaaggtggctcctgccacctgctaatagcagttcaaactaaatttttwgtatcaagtccctgaatggaagtatgacgttgggtccctctgaagtttaattctgagttctcattaaaagaaatttgctttcattgttttatttcttaattgctatgcttcagaatcaatttgtgttttatgccctttcccccagtattgtagagcaagtcttgtgttaaaagcccagtgtgacagtgtcatgatgtagtagtgtcttactggttttttaataaatccttttgtataaaaatgtattggctcttttatcatcagaataggaaaaattgtcatggattcaagttattaaaagcataagtttggaagacaggcttgccgaaattgaggacatgattaaaattgcagtgaagtttgaaatgtttttagcaaaatctaatttttgccataatgtgtcctccctgtccaaattgggaaygacttaatgtcaatttgtttgttggttgttttaataatacttccttatgtagccattaagatttatatgaatattttcccaaatgcccagtttttgcttaatatgtattgtgctttttagaacaaatctggataaatgtgcaaaagtacccctttgcacagatarttaatgttttatgcttccattaaataaaaaggacttaaaatctgttaattataatagaaatgcggctagttcagagagatttttagagctgtggtggacttcatagatgaattcaagtgttgagggaggattaaagaaatatataccgtgwttatgtgtgtgtgcttatttgtttgaatgattttattttccatttctcaaaggttttatttttttggttagggccttaaaatttcaggactgtgattattagtatgtgtgcctaaggaactttttgagtcactcttaagaaagtgaaactgaagagtctaagtgataactataggattaagtcagaattgtttttcctgtcatttgttggaagcttcttgagttctgttattagcattcagggaattgatacccatcaacttgaatggaaaatcstttgtaggtattacttaagtgaatgttaagagttccaccctgagtggtaatctaaggctgtgcagtcagttacttcagactgctcagaatagttcattagaaaggtaacaaatgagaaatgtattattatacagttctatagtagtgaagtgatggaatacctttcttacttttgtggagttacatctgatgctaagaatttgacctccaactaagcaaacattttaatgagcaaaagttagtgttattaaagtttttttatgatagatccaaattgaggacctgtgtcctgtttttataagattgcaacccagctatgctcatttgtttatgttttgtatatggctgcttttgtgttacagtggtagagtttagtagttaggacagagacctgcaaagcaaaataatttacagtctggccctttacagaaaagtttgctgactcatggtcaaaataaatgaaaattttttgtgttagggttgttaagctagggttctttttggtatcatatgcttattttatgtaaatctctcaataaaaaattatttttaagagacagg

SEQ ID NO: 427 - DNA, 1718 bp, Homo sapiens
gccacaccccggcctaacgctgctgctcccgccgctactggagtggtggggargggcccccaaggctgtgcaacgcggagcgtgagaggaaggtataaagggtagcgagagggcgggaccgaggaggaaagggaaaaaaaaaaaactagggggataggggtggggggacgcgcgaagggcgcgctctcgcgtcacgtgaccgggacgcgccgttcttccgtcggccattttaggtggtccgcggcggcgccattaaagcgaggaggaggcgagagcggccgccgctggtgcttattcttttttagtgcagcgggagagagcgggagtgtgcgccgcgcgagagtgggaggcgaagggggcaggccagggagaggcgcaggagcctttgcagccacgcgcgcgccttccctgtcttgtgtgcttcgcgaggtagagcgggcgcgcggcagcggcggggattactttgctgctagtttcggttcgcggcagcggcgggtgtagtctcggcggcagcggcggagacactagcactatgtcggaggagcagttcggcggggacggggcggcggcagcggcaacggcggcggtaggcggctcggcgggcgagcaggagggagccatggtggcggcgacacagggggcagcggcggcggcgggaagcggagccgggaccgggggcggaaccgcgtctggaggcaccgaagggggcagcgccgagtcggagggggcgaagattgacgccagtaagaacgaggaggatgaaggccattcaaactcctccccacgacactctgaagcagcgacggcacagcgggaagaatggaaaatgtttataggaggccttagctgggacactacaaagaaagatcykaaggactacttttccaaatttggtgaagttgtagactgcactctgaagttagatcctatcacagggcgatcaaggggttttggctttgtgctatttaaagaatcggagagtgtagataaggtcatggatcaaaaagaacataaattgaatgggaaggtgattgatcctaaaagggccaaagccatgaaaacaaaagagccggttaaaaaaatttttgttggtggcctttctccagatacacctgaagagaaaataagggagtactttggtggttttggtgaggtggaatccatagagctccccatggacaacaagaccaataagaggcgtgggttctgctttattacctttaaggaagaagaaccagtgaagaagataatggaaaagaaataccacaatgttggtcttagtaaatgtgaaataaaagtagccatgtcgaaggaacaatatcagcaacagcaacagtggggatctagaggaggatttgcaggaagagctcgtggaagaggtggtgaccagcagagtggttatgggaaggtatccaggcgaggtggtcatcaaaatagctacaaaccatactaaattattccatttgcaacttatccccaacaggtggtgaagcagtattttccaatttgaagattcatttgaaggtggctcctgccacctgctaatagcagttcaaactaaatttttwgtatcaagtccctgaatggaagtatgacgttgggtccctgccctttcccccagtattgtagagcaagtcttgtgttaaaagcccagtgtgacagtgtcatgatgtagtagtgtcttactggttttttaataaatccttttgtataaaaat

SEQ ID NO: 428 - DNA, 3341 bp, Homo sapiens
gccacaccccggcctaacgctgctgctcccgccgctactggagtggtggggargggcccccaaggctgtgcaacgcggagcgtgagaggaaggtataaagggtagcgagagggcgggaccgaggaggaaagggaaaaaaaaaaaactagggggataggggtggggggacgcgcgaagggcgcgctctcgcgtcacgtgaccgggacgcgccgttcttccgtcggccattttaggtggtccgcggcggcgccattaaagcgaggaggaggcgagagcggccgccgctggtgcttattcttttttagtgcagcgggagagagcgggagtgtgcgccgcgcgagagtgggaggcgaagggggcaggccagggagaggcgcaggagcctttgcagccacgcgcgcgccttccctgtcttgtgtgcttcgcgaggtagagcgggcgcgcggcagcggcggggattactttgctgctagtttcggttcgcggcagcggcgggtgtagtctcggcggcagcggcggagacactagcactatgtcggaggagcagttcggcggggacggggcggcggcagcggcaacggcggcggtaggcggctcggcgggcgagcaggagggagccatggtggcggcgacacagggggcagcggcggcggcgggaagcggagccgggaccgggggcggaaccgcgtctggaggcaccgaagggggcagcgccgagtcggagggggcgaagattgacgccagtaagaacgaggaggatgaagggaaaatgtttataggaggccttagctgggacactacaaagaaagatcykaaggactacttttccaaatttggtgaagttgtagactgcactctgaagttagatcctatcacagggcgatcaaggggttttggctttgtgctatttaaagaatcggagagtgtagataaggtcatggatcaaaaagaacataaattgaatgggaaggtgattgatcctaaaagggccaaagccatgaaaacaaaagagccggttaaaaaaatttttgttggtggcctttctccagatacacctgaagagaaaataagggagtactttggtggttttggtgaggtggaatccatagagctccccatggacaacaagaccaataagaggcgtgggttctgctttattacctttaaggaagaagaaccagtgaagaagataatggaaaagaaataccacaatgttggtcttagtaaatgtgaaataaaagtagccatgtcgaaggaacaatatcagcaacagcaacagtggggatctagaggaggatttgcaggaagagctcgtggaagaggtggtggccccagtcaaaactggaaccagggatatagtaactattggaatcaaggytatggcaactatggatataacagccaaggttacggtggttatggaggatatgactacactggttacaacaactactatggatatggtgattatagcaaccagcagagtggttatgggaaggtatccaggcgaggtggtcatcaaaatagctacaaaccatactaaattattccatttgcaacttatccccaacagcgggaacttcattgcaggccctgtgtcgcgctgacttcacgattctcacaggcccgctcaatgcggacagggtacgagatgctcacgctctcgaatgctgccgtttggtggtgaagcagtattttccaatttgaagattcatttgaaggtggctcctgccacctgctaatagcagttcaaactaaatttttwgtatcaagtccctgaatggaagtatgacgttgggtccctctgaagtttaattctgagttctcattaaaagaaatttgctttcattgttttatttcttaattgctatgcttcagaatcaatttgtgttttatgccctttcccccagtattgtagagcaagtcttgtgttaaaagcccagtgtgacagtgtcatgatgtagtagtgtcttactggttttttaataaatccttttgtataaaaatgtattggctcttttatcatcagaataggaaaaattgtcatggattcaagttattaaaagcataagtttggaagacaggcttgccgaaattgaggacatgattaaaattgcagtgaagtttgaaatgtttttagcaaaatctaatttttgccataatgtgtcctccctgtccaaattgggaaygacttaatgtcaatttgtttgttggttgttttaataatacttccttatgtagccattaagatttatatgaatattttcccaaatgcccagtttttgcttaatatgtattgtgctttttagaacaaatctggataaatgtgcaaaagtacccctttgcacagatarttaatgttttatgcttccattaaataaaaaggacttaaaatctgttaattataatagaaatgcggctagttcagagagatttttagagctgtggtggacttcatagatgaattcaagtgttgagggaggattaaagaaatatataccgtgwttatgtgtgtgtgcttatttgtttgaatgattttattttccatttctcaaaggttttatttttttggttagggccttaaaatttcaggactgtgattattagtatgtgtgcctaaggaactttttgagtcactcttaagaaagtgaaactgaagagtctaagtgataactataggattaagtcagaattgtttttcctgtcatttgttggaagcttcttgagttctgttattagcattcagggaattgatacccatcaacttgaatggaaaatcstttgtaggtattacttaagtgaatgttaagagttccaccctgagtggtaatctaaggctgtgcagtcagttacttcagactgctcagaatagttcattagaaaggtaacaaatgagaaatgtattattatacagttctatagtagtgaagtgatggaatacctttcttacttttgtggagttacatctgatgctaagaatttgacctccaactaagcaaacattttaatgagcaaaagttagtgttattaaagtttttttatgatagatccaaattgaggacctgtgtcctgtttttataagattgcaacccagctatgctcatttgtttatgttttgtatatggctgcttttgtgttacagtggtagagtttagtagttaggacagagacctgcaaagcaaaataatttacagtctggccctttacagaaaagtttgctgactcatggtcaaaataaatgaaaattttttgtgttagggttgttaagctagggttctttttggtatcatatgcttattttatgtaaatctctcaataaaaaattatttttaagagacagg

SEQ ID NO: 429 - DNA, 3398 bp, Homo sapiens
gccacaccccggcctaacgctgctgctcccgccgctactggagtggtggggargggcccccaaggctgtgcaacgcggagcgtgagaggaaggtataaagggtagcgagagggcgggaccgaggaggaaagggaaaaaaaaaaaactagggggataggggtggggggacgcgcgaagggcgcgctctcgcgtcacgtgaccgggacgcgccgttcttccgtcggccattttaggtggtccgcggcggcgccattaaagcgaggaggaggcgagagcggccgccgctggtgcttattcttttttagtgcagcgggagagagcgggagtgtgcgccgcgcgagagtgggaggcgaagggggcaggccagggagaggcgcaggagcctttgcagccacgcgcgcgccttccctgtcttgtgtgcttcgcgaggtagagcgggcgcgcggcagcggcggggattactttgctgctagtttcggttcgcggcagcggcgggtgtagtctcggcggcagcggcggagacactagcactatgtcggaggagcagttcggcggggacggggcggcggcagcggcaacggcggcggtaggcggctcggcgggcgagcaggagggagccatggtggcggcgacacagggggcagcggcggcggcgggaagcggagccgggaccgggggcggaaccgcgtctggaggcaccgaagggggcagcgccgagtcggagggggcgaagattgacgccagtaagaacgaggaggatgaaggccattcaaactcctccccacgacactctgaagcagcgacggcacagcgggaagaatggaaaatgtttataggaggccttagctgggacactacaaagaaagatcykaaggactacttttccaaatttggtgaagttgtagactgcactctgaagttagatcctatcacagggcgatcaaggggttttggctttgtgctatttaaagaatcggagagtgtagataaggtcatggatcaaaaagaacataaattgaatgggaaggtgattgatcctaaaagggccaaagccatgaaaacaaaagagccggttaaaaaaatttttgttggtggcctttctccagatacacctgaagagaaaataagggagtactttggtggttttggtgaggtggaatccatagagctccccatggacaacaagaccaataagaggcgtgggttctgctttattacctttaaggaagaagaaccagtgaagaagataatggaaaagaaataccacaatgttggtcttagtaaatgtgaaataaaagtagccatgtcgaaggaacaatatcagcaacagcaacagtggggatctagaggaggatttgcaggaagagctcgtggaagaggtggtggccccagtcaaaactggaaccagggatatagtaactattggaatcaaggytatggcaactatggatataacagccaaggttacggtggttatggaggatatgactacactggttacaacaactactatggatatggtgattatagcaaccagcagagtggttatgggaaggtatccaggcgaggtggtcatcaaaatagctacaaaccatactaaattattccatttgcaacttatccccaacagcgggaacttcattgcaggccctgtgtcgcgctgacttcacgattctcacaggcccgctcaatgcggacagggtacgagatgctcacgctctcgaatgctgccgtttggtggtgaagcagtattttccaatttgaagattcatttgaaggtggctcctgccacctgctaatagcagttcaaactaaatttttwgtatcaagtccctgaatggaagtatgacgttgggtccctctgaagtttaattctgagttctcattaaaagaaatttgctttcattgttttatttcttaattgctatgcttcagaatcaatttgtgttttatgccctttcccccagtattgtagagcaagtcttgtgttaaaagcccagtgtgacagtgtcatgatgtagtagtgtcttactggttttttaataaatccttttgtataaaaatgtattggctcttttatcatcagaataggaaaaattgtcatggattcaagttattaaaagcataagtttggaagacaggcttgccgaaattgaggacatgattaaaattgcagtgaagtttgaaatgtttttagcaaaatctaatttttgccataatgtgtcctccctgtccaaattgggaaygacttaatgtcaatttgtttgttggttgttttaataatacttccttatgtagccattaagatttatatgaatattttcccaaatgcccagtttttgcttaatatgtattgtgctttttagaacaaatctggataaatgtgcaaaagtacccctttgcacagatarttaatgttttatgcttccattaaataaaaaggacttaaaatctgttaattataatagaaatgcggctagttcagagagatttttagagctgtggtggacttcatagatgaattcaagtgttgagggaggattaaagaaatatataccgtgwttatgtgtgtgtgcttatttgtttgaatgattttattttccatttctcaaaggttttatttttttggttagggccttaaaatttcaggactgtgattattagtatgtgtgcctaaggaactttttgagtcactcttaagaaagtgaaactgaagagtctaagtgataactataggattaagtcagaattgtttttcctgtcatttgttggaagcttcttgagttctgttattagcattcagggaattgatacccatcaacttgaatggaaaatcstttgtaggtattacttaagtgaatgttaagagttccaccctgagtggtaatctaaggctgtgcagtcagttacttcagactgctcagaatagttcattagaaaggtaacaaatgagaaatgtattattatacagttctatagtagtgaagtgatggaatacctttcttacttttgtggagttacatctgatgctaagaatttgacctccaactaagcaaacattttaatgagcaaaagttagtgttattaaagtttttttatgatagatccaaattgaggacctgtgtcctgtttttataagattgcaacccagctatgctcatttgtttatgttttgtatatggctgcttttgtgttacagtggtagagtttagtagttaggacagagacctgcaaagcaaaataatttacagtctggccctttacagaaaagtttgctgactcatggtcaaaataaatgaaaattttttgtgttagggttgttaagctagggttctttttggtatcatatgcttattttatgtaaatctctcaataaaaaattatttttaagagacagg

SEQ ID NO: 430 - DNA, 3179 bp, Homo sapiens
gcccccaaggctgtgcaacgcggagcgtgagaggaaggtataaagggtagcgagagggcgggaccgaggaggaaagggaaaaaaaaaaaactagggggataggggtggggggacgcgcgaagggcgcgctctcgcgtcacgtgaccgggacgcgccgttcttccgtcggccattttaggtggtccgcggcggcgccattaaagcgaggaggaggcgagagcggccgccgctggtgcttattcttttttagtgcagcgggagagagcgggagtgtgcgccgcgcgagagtgggaggcgaagggggcaggccagggagaggcgcaggagcctttgcagccacgcgcgcgccttccctgtcttgtgtgcttcgcgaggtagagcgggcgcgcggcagcggcggggattactttgctgctagtttcggttcgcggcagcggcgggtgtagtctcggcggcagcggcggagacactagcactatgtcggaggagcagttcggcggggacggggcggcggcagcggcaacggcggcggtaggcggctcggcgggcgagcaggagggagccatggtggcggcgacacagggggcagcggcggcggcgggaagcggagccgggaccgggggcggaaccgcgtctggaggcaccgaagggggcagcgccgagtcggagggggcgaagattgacgccagtaagaacgaggaggatgaagggaaaatgtttataggaggccttagctgggacactacaaagaaagatcykaaggactacttttccaaatttggtgaagttgtagactgcactctgaagttagatcctatcacagggcgatcaaggggttttggctttgtgctatttaaagaatcggagagtgtagataaggtcatggatcaaaaagaacataaattgaatgggaaggtgattgatcctaaaagggccaaagccatgaaaacaaaagagccggttaaaaaaatttttgttggtggcctttctccagatacacctgaagagaaaataagggagtactttggtggttttggtgaggtggaatccatagagctccccatggacaacaagaccaataagaggcgtgggttctgctttattacctttaaggaagaagaaccagtgaagaagataatggaaaagaaataccacaatgttggtcttagtaaatgtgaaataaaagtagccatgtcgaaggaacaatatcagcaacagcaacagtggggatctagaggaggatttgcaggaagagctcgtggaagaggtggtggccccagtcaaaactggaaccagggatatagtaactattggaatcaaggytatggcaactatggatataacagccaaggttacggtggttatggaggatatgactacactggttacaacaactactatggatatggtgattatagcaaccagcagagtggttatgggaaggtatccaggcgaggtggtcatcaaaatagctacaaaccatactaaattattccatttgcaacttatccccaacaggtggtgaagcagtattttccaatttgaagattcatttgaaggtggctcctgccacctgctaatagcagttcaaactaaatttttwgtatcaagtccctgaatggaagtatgacgttgggtccctctgaagtttaattctgagttctcattaaaagaaatttgctttcattgttttatttcttaattgctatgcttcagaatcaatttgtgttttatgccctttcccccagtattgtagagcaagtcttgtgttaaaagcccagtgtgacagtgtcatgatgtagtagtgtcttactggttttttaataaatccttttgtataaaaatgtattggctcttttatcatcagaataggaaaaattgtcatggattcaagttattaaaagcataagtttggaagacaggcttgccgaaattgaggacatgattaaaattgcagtgaagtttgaaatgtttttagcaaaatctaatttttgccataatgtgtcctccctgtccaaattgggaaygacttaatgtcaatttgtttgttggttgttttaataatacttccttatgtagccattaagatttatatgaatattttcccaaatgcccagtttttgcttaatatgtattgtgctttttagaacaaatctggataaatgtgcaaaagtacccctttgcacagatarttaatgttttatgcttccattaaataaaaaggacttaaaatctgttaattataatagaaatgcggctagttcagagagatttttagagctgtggtggacttcatagatgaattcaagtgttgagggaggattaaagaaatatataccgtgwttatgtgtgtgtgcttatttgtttgaatgattttattttccatttctcaaaggttttatttttttggttagggccttaaaatttcaggactgtgattattagtatgtgtgcctaaggaactttttgagtcactcttaagaaagtgaaactgaagagtctaagtgataactataggattaagtcagaattgtttttcctgtcatttgttggaagcttcttgagttctgttattagcattcagggaattgatacccatcaacttgaatggaaaatcstttgtaggtattacttaagtgaatgttaagagttccaccctgagtggtaatctaaggctgtgcagtcagttacttcagactgctcagaatagttcattagaaaggtaacaaatgagaaatgtattattatacagttctatagtagtgaagtgatggaatacctttcttacttttgtggagttacatctgatgctaagaatttgacctccaactaagcaaacattttaatgagcaaaagttagtgttattaaagtttttttatgatagatccaaattgaggacctgtgtcctgtttttataagattgcaacccagctatgctcatttgtttatgttttgtatatggctgcttttgtgttacagtggtagagtttagtagttaggacagagacctgcaaagcaaaataatttacagtctggccctttacagaaaagtttgctgactcatggtcaaaataaatgaaaattttttgtgttagggttgttaagctagggttctttttggtatcatatgcttattttatgtaaatctctcaataaaaaattatttttaagagacagg

SEQ ID NO: 431 - DNA, 1671 bp, Homo sapiens
gccacaccccggcctaacgctgctgctcccgccgctactggagtggtggggargggcccccaaggctgtgcaacgcggagcgtgagaggaaggtataaagggtagcgagagggcgggaccgaggaggaaagggaaaaaaaaaaaactagggggataggggtggggggacgcgcgaagggcgcgctctcgcgtcacgtgaccgggacgcgccgttcttccgtcggccattttaggtggtccgcggcggcgccattaaagcgaggaggaggcgagagcggccgccgctggtgcttattcttttttagtgcagcgggagagagcgggagtgtgcgccgcgcgagagtgggaggcgaagggggcaggccagggagaggcgcaggagcctttgcagccacgcgcgcgccttccctgtcttgtgtgcttcgcgaggtagagcgggcgcgcggcagcggcggggattactttgctgctagtttcggttcgcggcagcggcgggtgtagtctcggcggcagcggcggagacactagcactatgtcggaggagcagctcggcgggcgagcaggagggagccatggtggcggcgacacagggggcagcggcggcggcgggaagcggagccgggaccgggggcggaaccgcgtctggaggcaccgaagggggcagcgccgagtcggagggggcgaagattgacgccagtaagaacgaggaggatgaaggccattcaaactcctccccacgacactctgaagcagcgacggcacagcgggaagaatggaaaatgtttataggaggccttagctgggacactacaaagaaagatcykaaggactacttttccaaatttggtgaagttgtagactgcactctgaagttagatcctatcacagggcgatcaaggggttttggctttgtgctatttaaagaatcggagagtgtagataaggtcatggatcaaaaagaacataaattgaatgggaaggtgattgatcctaaaagggccaaagccatgaaaacaaaagagccggttaaaaaaatttttgttggtggcctttctccagatacacctgaagagaaaataagggagtactttggtggttttggtgaggtggaatccatagagctccccatggacaacaagaccaataagaggcgtgggttctgctttattacctttaaggaagaagaaccagtgaagaagataatggaaaagaaataccacaatgttggtcttagtaaatgtgaaataaaagtagccatgtcgaaggaacaatatcagcaacagcaacagtggggatctagaggaggatttgcaggaagagctcgtggaagaggtggtgaccagcagagtggttatgggaaggtatccaggcgaggtggtcatcaaaatagctacaaaccatactaaattattccatttgcaacttatccccaacaggtggtgaagcagtattttccaatttgaagattcatttgaaggtggctcctgccacctgctaatagcagttcaaactaaatttttwgtatcaagtccctgaatggaagtatgacgttgggtccctgccctttcccccagtattgtagagcaagtcttgtgttaaaagcccagtgtgacagtgtcatgatgtagtagtgtcttactggttttttaataaatccttttgtataaaaat

SEQ ID NO: 432 - DNA, 2336 bp, Homo sapiens
atttcaggacttcgctttcgggttcccttgtcctgtgttgtgtaatgcccccgttatggcactagaaatattttttattagccgaagctaaatatagtgggactttggctgatcccgagctcggaggacagccggggtgatccgtttccccccgaggatcgaggtggtgcgctctggacggggttgtgcattctcgccgcgcccgggcggacgatccagcgaacagccccgcttctarccmgagatgctgctgccggcgcccgcgctccgccgcgccctgctgtcccgcccctggaccggggccggcctgcggtggaagcacacctcctccctgaaggtggccaacgagcccgtcttagccttcacgcagggcagccctgagcgagatgccctgcaaaaggccttgaaggacctgaagggccggatggaagccatcccatgcgtggtgggggatgaggaggtgtggacgtcggacgtgcagtaccaagtgtcgccttttaaccatggacataaggtggccaagttctgttatgcagacaagagcctgctcaacaaagccattgaggctgccctggctgcccggaaagagtgggacctgaagcctattgcagaccgggcccagatcttcctgaaggcggcagacatgctgagtgggccgcgcagggctgagatcctcgccaagaccatggtgggacagggtaagaccgtgatccaagcggagattgacgctgcagcggaactcatcgacttcttccggttcaatgccaagtatgcggtggagctggaggggcagcagcccatcagcgtgcccccgagcaccaacagcacggtgtaccggggtctggagggcttcgtggcggccatctcgccctttaacttcactgcaatcggcggcaacctggcgggggcaccggccctgatgggcaacgtggtcctatggaagcccagtgacactgccatgctggccagctatgctgtctaccgcatycttcgggaggctggcctgccccccaacatcatccagtttgtgccagctgatgggcccctatttggggacactgtcaccagctcagagcacctctgtggcatcaacttcacaggcagtgtgcccaccttcaaacacctgtggaagcaggtggcccagaacctggaccggttccacaccttcccacgcctggctggagagtgcggcggaaagaacttccacttcgtgcaccgctcggccgacgtggagagcgtggtgagcgggaccctccgctcagccttcgagtacggtggccagaagtgttccgcstgctygcgtctctacgtgccgcactcgctgtggccrcagatcaaarggcggctgctggaggagcacagtcggatcaaagtgggcgaccctgcagaggattttgggaccttcttctctgcagtgattgatgccaagtcctttgcccgtatcaagaagtggctggagcacgcrcgctcctcrcccagcctcaccatcctggcygggggcaagtgtgatgactccgtgggctactttgtggagccctgcatcgtggagagcaaggaccctcaggagcccatcatgaaggaggagatcttcgggcctgtactgtctgtgtacgtctacccggaygacaagtacaaggagacgctgcagctgrttgacagcrccaccagctatggcctcacgggggcagtgttctcccaggataaggacgtcgtgcaggaggccacaaaggtgctgaggaatgctgccggcaacttctacatcaacgacaagtccactggctcgatagtgggycagcagccctttgggggggcccgagcctctggaaccaatgacaagccagggggcccacactacatcctgcgctggacgtcgccgcaggtcatcaaggagacacataagcccctgggggactggagctacgcgtacatgcagtgagcccctctcgggctccaccgtccagctgtctgtcygtccagatgcctcctgcttggattctgagtggtcagagatctgtaaagcatgactttcaaggatggttcttaggggactgtgaaartgttgggtcttcctccaggatgcctgcatgggaccccacccggagctggtgtggccattcccsragtgccactggcccatggatgggggtgggtgctggtgccasctgggctgggtgtgggttctgtgtccttccaggatmtgtgtcatttcccatgaggggccggggcaggtggctgggtgggggcacaggctggagtattyttagttctactggttctacactgtgaggtggcaatgggatttgctcagatgccacccaataaaatgcctgttactt

SEQ ID NO: 433 - DNA, 3329 bp, Homo sapiens
atttcaggacttcgctttcgggttcccttgtcctgtgttgtgtaatgcccccgttatggcactagaaatattttttattagccgaagctaaatatagtgggactttggctgatcccgagctcggaggacagccggggtgatccgtttccccccgaggatcgaggtggtgcgctctggacggggttgtgcattctcgccgcgcccgggcggacgatccagcgaacagccccgcttctarccmgagatgctgctgccggcgcccgcgctccgccgcgccctgctgtcccgcccctggaccggggccggcctgcggtggaagcacacctcctccctgaaggtggccaacgagcccgtcttagccttcacgcagggcagccctgagcgagatgccctgcaaaaggccttgaaggacctgaagggccggatggaagccatcccatgcgtggtgggggatgaggaggtgtggacgtcggacgtgcagtaccaagtgtcgccttttaaccatggacataaggtggccaagttctgttatgcagacaagagcctgctcaacaaagccattgaggctgccctggctgcccggaaagagtgggacctgaagcctattgcagaccgggcccagatcttcctgaaggcggcagacatgctgagtgggccgcgcagggctgagatcctcgccaagaccatggtgggacagggtaagaccgtgatccaagcggagattgacgctgcagcggaactcatcgacttcttccggttcaatgccaagtatgcggtggagctggaggggcagcagcccatcagcgtgcccccgagcaccaacagcacggtgtaccggggtctggagggcttcgtggcggccatctcgccctttaacttcactgcaatcggcggcaacctggcgggggcaccggccctgatgggcaacgtggtcctatggaagcccagtgacactgccatgctggccagctatgctgtctaccgcatycttcgggaggctggcctgccccccaacatcatccagtttgtgccagctgatgggcccctatttggggacactgtcaccagctcagagcacctctgtggcatcaacttcacaggcagtgtgcccaccttcaaacacctgtggaagcaggtggcccagaacctggaccggttccacaccttcccacgcctggctggagagtgcggcggaaagaacttccacttcgtgcaccgctcggccgacgtggagagcgtggtgagcgggaccctccgctcagccttcgagtacggtggccagaagtgttccgcstgctygcgtctctacgtgccgcactcgctgtggccrcagatcaaarggcggctgctggaggagcacagtcggatcaaagtgggcgaccctgcagaggattttgggaccttcttctctgcagtgattgatgccaagtcctttgcccgtatcaagaagtggctggagcacgcrcgctcctcrcccagcctcaccatcctggcygggggcaagtgtgatgactccgtgggctactttgtggagccctgcatcgtggagagcaaggaccctcaggagcccatcatgaaggaggagatcttcgggcctgtactgtctgtgtacgtctacccggaygacaagtacaaggagacgctgcagctgrttgacagcrccaccagctatggcctcacgggggcagtgttctcccaggataaggacgtcgtgcaggaggccacaaaggtgctgaggaatgctgccggcaacttctacatcaacgacaagtccactggctcgatagtgggycagcagccctttgggggggcccgagcctctggaaccaatgacaagccagggggcccacactacatcctgcgctggacgtcgccgcaggtcatcaaggagacacataagcccctgggggactggagctacgcgtacatgcagtgagcccctctcgggctccaccgtccagctgtctgtcygtccaggtggccgacctcactgcacagaccccactccagcccctccaccccttcttcatgcacagctgcctttctataatccrggcytgactcccttcttaccactgtattctggcctctcccatgcctcaggctctggtttgagatcgtgctrgggaggaacatggccactaccccttatcccatcggccatgtgggaggtatgaccctggtgcctggcaggttctccctctgccctccactgggcccagtggctcagggacctggggaaaggagatggagcagctcttgggatcctttggggaaaaggaggccattctgggccccttggcaaacctcaccactcacagaggctcctggccttgatccctgcccctccaggtgtccagggtaaagtgtaactcagacygacctgtggggcacagggggcaccagctggccttgccctctctggtctgggctgtctrccttcctcactgtatctttgcccagacccacctgggccagtaggcccctgtccccagccacacaccttagatgctggcatgccttactccaggtgcctgtgtttggccgaggcctgtgtgattcccggtctgcaccacatggcggggttggggggccgctggaggccacctgccaaggcgtgggatgggatggtcctgcyggtttaggcygtgattctggaaaaccttggatgggccttcgtcctatgtcagccttccctytgatcctcaggccctacctgtagagacctccactcctagagccagtctcagggtctgggatttccctgcaggagctcagccaccactgtgccatggtgacacaggccaaggcagacattggccctcccttctcccagcccccagaggcctggccttgrgttygtcagcatgggccgaggacgttgcctgtagaatcctcctctgcctgggagtggctctgtgtggaccagtccctcactggcccattctttttttgacgcagccaatctgtgaccacgattcctcccacagatgcctcctgcttggattctgagtggtcagagatctgtaaagcatgactttcaaggatggttcttaggggactgtgaaartgttgggtcttcctccaggatgcctgcatgggaccccacccggagctggtgtggccattcccsragtgctggtgccasctgggctgggtgtgggttctgtgtccttccaggatmtgtgtcatttcccatgaggggccggggcaggtggctgggtgggggcacaggctggagtattyttagttctactggttctacactgtgaggtggcaatgggatttgctcagatgccacccaataaaatgcctgttacttaatcaca

SEQ ID NO: 434 - DNA, 3351 bp, Homo sapiens
atttcaggacttcgctttcgggttcccttgtcctgtgttgtgtaatgcccccgttatggcactagaaatattttttattagccgaagctaaatatagtgggactttggctgatcccgagctcggaggacagccggggtgatccgtttccccccgaggatcgaggtggtgcgctctggacggggttgtgcattctcgccgcgcccgggcggacgatccagcgaacagccccgcttctarccmgagatgctgctgccggcgcccgcgctccgccgcgccctgctgtcccgcccctggaccggggccggcctgcggtggaagcacacctcctccctgaaggtggccaacgagcccgtcttagccttcacgcagggcagccctgagcgagatgccctgcaaaaggccttgaaggacctgaagggccggatggaagccatcccatgcgtggtgggggatgaggaggtgtggacgtcggacgtgcagtaccaagtgtcgccttttaaccatggacataaggtggccaagttctgttatgcagacaagagcctgctcaacaaagccattgaggctgccctggctgcccggaaagagtgggacctgaagcctattgcagaccgggcccagatcttcctgaaggcggcagacatgctgagtgggccgcgcagggctgagatcctcgccaagaccatggtgggacagggtaagaccgtgatccaagcggagattgacgctgcagcggaactcatcgacttcttccggttcaatgccaagtatgcggtggagctggaggggcagcagcccatcagcgtgcccccgagcaccaacagcacggtgtaccggggtctggagggcttcgtggcggccatctcgccctttaacttcactgcaatcggcggcaacctggcgggggcaccggccctgatgggcaacgtggtcctatggaagcccagtgacactgccatgctggccagctatgctgtctaccgcatycttcgggaggctggcctgccccccaacatcatccagtttgtgccagctgatgggcccctatttggggacactgtcaccagctcagagcacctctgtggcatcaacttcacaggcagtgtgcccaccttcaaacacctgtggaagcaggtggcccagaacctggaccggttccacaccttcccacgcctggctggagagtgcggcggaaagaacttccacttcgtgcaccgctcggccgacgtggagagcgtggtgagcgggaccctccgctcagccttcgagtacggtggccagaagtgttccgcstgctygcgtctctacgtgccgcactcgctgtggccrcagatcaaarggcggctgctggaggagcacagtcggatcaaagtgggcgaccctgcagaggattttgggaccttcttctctgcagtgattgatgccaagtcctttgcccgtatcaagaagtggctggagcacgcrcgctcctcrcccagcctcaccatcctggcygggggcaagtgtgatgactccgtgggctactttgtggagccctgcatcgtggagagcaaggaccctcaggagcccatcatgaaggaggagatcttcgggcctgtactgtctgtgtacgtctacccggaygacaagtacaaggagacgctgcagctgrttgacagcrccaccagctatggcctcacgggggcagtgttctcccaggataaggacgtcgtgcaggaggccacaaaggtgctgaggaatgctgccggcaacttctacatcaacgacaagtccactggctcgatagtgggycagcagccctttgggggggcccgagcctctggaaccaatgacaagccagggggcccacactacatcctgcgctggacgtcgccgcaggtcatcaaggagacacataagcccctgggggactggagctacgcgtacatgcagtgagcccctctcgggctccaccgtccagctgtctgtcygtccaggtggccgacctcactgcacagaccccactccagcccctccaccccttcttcatgcacagctgcctttctataatccrggcytgactcccttcttaccactgtattctggcctctcccatgcctcaggctctggtttgagatcgtgctrgggaggaacatggccactaccccttatcccatcggccatgtgggaggtatgaccctggtgcctggcaggttctccctctgccctccactgggcccagtggctcagggacctggggaaaggagatggagcagctcttgggatcctttggggaaaaggaggccattctgggccccttggcaaacctcaccactcacagaggctcctggccttgatccctgcccctccaggtgtccagggtaaagtgtaactcagacygacctgtggggcacagggggcaccagctggccttgccctctctggtctgggctgtctrccttcctcactgtatctttgcccagacccacctgggccagtaggcccctgtccccagccacacaccttagatgctggcatgccttactccaggtgcctgtgtttggccgaggcctgtgtgattcccggtctgcaccacatggcggggttggggggccgctggaggccacctgccaaggcgtgggatgggatggtcctgcyggtttaggcygtgattctggaaaaccttggatgggccttcgtcctatgtcagccttccctytgatcctcaggccctacctgtagagacctccactcctagagccagtctcagggtctgggatttccctgcaggagctcagccaccactgtgccatggtgacacaggccaaggcagacattggccctcccttctcccagcccccagaggcctggccttgrgttygtcagcatgggccgaggacgttgcctgtagaatcctcctctgcctgggagtggctctgtgtggaccagtccctcactggcccattctttttttgacgcagccaatctgtgaccacgattcctcccacagatgcctcctgcttggattctgagtggtcagagatctgtaaagcatgactttcaaggatggttcttaggggactgtgaaartgttgggtcttcctccaggatgcctgcatgggaccccacccggagctggtgtggccattcccsragtgccactggcccatggatgggggtgggtgctggtgccasctgggctgggtgtgggttctgtgtccttccaggatmtgtgtcatttcccatgaggggccggggcaggtggctgggtgggggcacaggctggagtattyttagttctactggttctacactgtgaggtggcaatgggatttgctcagatgccacccaataaaatgcctgttacttaa

SEQ ID NO: 435 - DNA, 2544 bp, Homo sapiens
ccttctggccccgcgcagataccgcggcctccaccgcgtcccgaggagcggccgagtgccctctctcgcctcggcgcccgcatccggggccatccgtcctgccgtckctgcggaggccgcatctggcgcgcatctggaaccgcycggccggccgcgctggagcccgcgcccaccctggcccggccgcgccgggagccctgcccggagctggagccgcacctggagccgcgggcccggggccctgagccgcgcagccggcgcatggtgaactcgctgctgttcggggagatggccttggccttcggctgcccgccgggcggcggcggcgggggctgccctggcgggggcggcggcggcggcggggcagggccgggtccgtcgccggtgacggcggcgctgcgggacgacctgggctccaacatccacctcttgaaggggctcaacgtgcgcttccgctgcttcctggctaaggtgcacgagctggagcggcgcaaccggctgctggagaagcagctggagcagcagcagagcgagcgcgagcggcggctgcgctacaagaccttctcccgcgagcaggccgtgcagaccgggcccgagttgctgcggcccccggcgcccggcggcgggcacggcctcagcagtggcgcggcggccggcgccaacgccaatgccgtggccctgggcggcctgccccccggcggcggctcgcacccgcagcactacggccgcctgcccgggaccatctggagctacacgcaggtgcggcgcacgggcggcggcggcgtggagaccgtgcagggccccggcgtgtcgtgggtgcaccccgacggcgtgggcgtgcagatcgacaccatcacgccggagatccgcgcgctctacaacgtgctggccaaggtgaagcgcgagcgcgacgagtataagcggaggtgggaggaggagctcgccaagcgcatgaaccttcagaccatggtggacacgctgcaggaggcagcacaggaggctgatgccatccaggaggagatgaatgagaagatcgagcggctcaaggccgagctggtggtgtttaaggggcttatgagtgaccccatgacagacctggacacaaagatccaagaaaaggccatgaaggtggacatggacatctgccgccgaatcgatatcacggccaagctgtgcgatgtcgcacagcagcggaactcagaagacgtgtccaagatcttccaggtggtccccaaaaagaaagagcgtaaggtggcttccgatgatgacatctctgagcaggacggggaggtgaaccggttctcggacgatgagrtcggctccatgaacatcaccgatgagatgaagcgcatgtttaaccagctgcgggagacstttgactttgacgacgactgtgacagcctgacgtgggargagaatgaagacacgctgctgctctgggaggatttcaccaactgcaatccgaccatcgacctgcagggcgagcaagaggaaaacttgggcaacttgatccatgagaccgaatccttcttcaagacgagagacaaggagtaccaggaaacgataggtcagatcgagctcgagctggccacagccaaaagtgacatgaaccgacacctgcacgagtacatggagatgtgcagcatgaagcgaggcctggacgtgcagatggagacctgccgccggctcatcaaaggctcygcagacaggaattcaccgtcccccagctccrtggccagcagcgactcaggaagtacagatgagatccaggatgagttcgagcgcgaggcggatgtggagcccatggtcagctgatgactgaggccctgcgagcctggtggtcttggtgatggggccctgccacctctcctcatggggccaggaaggcccctcggagtggggttcgaagccacaccacacagactttctctgccctcccttctctggaggcccygagggactgctgcttccttccttccttccacaccaccaacgggtgccccgtctccatcccccacccacccaaggaatggtgctgtcaatttctattgttctccacattacaaatgcagacttctgtgcggactttgcagtgttaactgtgccttctcccttaagctgagccactttgagctccaaagaattattcctagcaggtgtttttatacagaactctaagctgagggccgggccaaccggccgtggtgtaatgtggtttctgccgtccgtcccacctgctcctctgattggccatgggctatgccctcccttcctcctgagccagcccagactcggcctggagcttggggtgctctgccaacccccaggaaggagccgcttgcctctgtgagctttctaggcctgggtagggaccaccccaattttctcactccctgaaggagagaaaggtggaaggaagggaaggaggacacattttaattttttggggggatcgagtggcaaagttgaagggacaaggcactgtgaggggaaggcagagsctcactgtgtttaaactactatgcaaaaaacaaaacaaacaac

SEQ ID NO: 436 - DNA, 1903 bp, Homo sapiens
tggcgcggcggccggcgccaacgccaatgccgtggccctgggcggcctgccccccggcggcggctcgcacccgcagcactacggccgcctgcccgggaccatctggagctacacgcaggtgcggcgcacgggcggcggcggcgtggagaccgtgcagggccccggcgtgtcgtgggtgcaccccgacggcgtgggcgtgcagatcgacaccatcacgccggagatccgcgcgctctacaacgtgctggccaaggtgaagcgcgagcgcgacgagtataagcggaggtgggaggaggagctcgccaagcgcatgaaccttcagaccatggtggacacgctgcaggaggcagcacaggaggctgatgccatccaggaggagatgaatgagaagatcgagcggctcaaggccgagctggtggtgtttaaggggcttatgagtgaccccatgacagacctggacacaaagatccaagaaaaggccatgaaggtggacatggacatctgccgccgaatcgatatcacggccaagctgtgcgatgtcgcacagcagcggaactcagaagacgtgtccaagatcttccaggtggtccccaaaaagaaagagcgtaaggtggcttccgatgatgacatctctgagcaggacggggaggtgaaccggttctcggacgatgagrtcggctccatgaacatcaccgatgagatgaagcgcatgtttaaccagctgcgggagacstttgactttgacgacgactgtgacagcctgacgtgggargagaatgaagacacgctgctgctctgggaggatttcaccaactgcaatccgaccatcgacctgcagggcgagcaagaggaaaacttgggcaacttgatccatgagaccgaatccttcttcaagacgagagacaaggagtaccaggaaacgataggtcagatcgagctcgagctggccacagccaaaagtgacatgaaccgacacctgcacgagtacatggagatgtgcagcatgaagcgaggcctggacgtgcagatggagacctgccgccggctcatcaaaggctcygcagacaggaattcaccgtcccccagctccrtggccagcagcgactcaggaagtacagatgagatccaggatgagttcgagcgcgaggcggatgtggagcccatggtcagctgatgactgaggccctgcgagcctggtggtcttggtgatggggccctgccacctctcctcatggggccaggaaggcccctcggagtggggttcgaagccacaccacacagactttctctgccctcccttctctggaggcccygagggactgctgcttccttccttccttccacaccaccaacgggtgccccgtctccatcccccacccacccaaggaatggtgctgtcaatttctattgttctccacattacaaatgcagacttctgtgcggactttgcagtgttaactgtgccttctcccttaagctgagccactttgagctccaaagaattattcctagcaggtgtttttatacagaactctaagctgagggccgggccaaccggccgtggtgtaatgtggtttctgccgtccgtcccacctgctcctctgattggccatgggctatgccctcccttcctcctgagccagcccagactcggcctggagcttggggtgctctgccaacccccaggaaggagccgcttgcctctgtgagctttctaggcctgggtagggaccaccccaattttctcactccctgaaggagagaaaggtggaaggaagggaaggaggacacattttaattttttggggggatcgagtggcaaagttgaagggacaaggcactgtgaggggaaggcagagsctcactgtgtttaaactactatgcaaaaaacaaaacaaacaac

SEQ ID NO: 437 - DNA, 2664 bp, Homo sapiens
gagaattacagacagcgaacttgcccctaagccctcgttgwgggtktgtgtttgagcatttaggagaggactccagtgctcctcagcgacagacacagcygcctctgcggtgtctgaaggccctggtcgtggtgacgctagatggccgccctgggcgcctcctgtgggcgtagaggcatcaccactctgcactggcagactcagcatggagttggagcagagtctgacacgagcacttgccatcccaggcgtttcagttctgactgagaaggtagatgcacaggggaggagagggccctttyragctccrctctgcctccaccactcattccctaaccccgcagcctcagcgccctcayctgtaaaatggggagttttgcctacagggttcagcacaatgccagcctgacataggaaccccagtggattgtcagttttgccattatcccctgcatcctggaggtgacaccgcctggttaataggcaacactcccracggcccagcacagccccaggrcagcaggaggctggcctgtggccaagaatgcatggtggagggggcctggagggggactgcagctcctcctcttcctgcttcctccctgctccaccccgtgcctagggcagcacaaaagccaatcgctagcaaactcsctgcctagcaaggcccagcctggggcagaaatggctgcaagtggccgaggtctctgcaaggctgtggccgcctctcccttcccggcgtggagacgagataacayggaagccaggggaggtctgaagcctgagtatgatgcggtggtgataggagcaggacacaacggactggtggctgcagcgtacctgcasagactgggggtgaacaccgccgtcttcgagaggcgccatgtgatcgggggtgcagctgtcactgaggagatcatcccagggtttaagttctcccgygcgtcctacctgctcagcctgctgaggccgcagatttacactgatctggagctgaagaaacatgggctgaggcttcatcttcgaaacccctactccttcacccccatgctggaagagggtgcaggcagcaaggtgcccaggtgccttctgctgggcacagacatggcagaaaaccagaagcagatcgcccagttctcccagaaggatgcccaggtctttcccaaatatgaggagttcatgcatcgcttggcattagccattgaccctctgctggatgcggcccccgtggacatggcggccttccagcatggctccttgctgcaaaggatgaggtcgctctccaccctcaagcccctgctgaaggcaggccgcatcctgggagcccagcttccccgatattatgaggtcctcacagctcccattaccaaggtgctggatcagtggttcgagtctgagcctttaaaagccactctagccacagatgcagtgattggagccatgacaagtccccacactccggggagtgggtatgtgctgctgcaccatgtgatggggggcctggagggaatgcagggggcctggggctacgtccaggggggcatgggtgccctctctgatgcgatcgcaagctcagccaccacacatggagcaagcatcttcactgaaaagacagtggcgaaggtgcaggtgaacagtgaaggctgtgttcaaggagttgtgctggaagatggcacagaggtgagaagcaaaatggtgctgtccaacacatcaccgcagatcaccttcctgaagctgacgccacaggagtggcttcctgaggagttcctggagagaatctctcagctggacacccggtcgcctgtcaccaagatcaatgtggccgtagacaggctgcccagcttcctggcggcccccaatgctcccaggggccagccgctgccccatcaccaatgctccatccacctgaactgtgaagacaccctcctccttcatcaggcctttgaagatgccatggatggcctgccttcccacaggcctgtgattgagctctgcatcccttcctcgctggaccccaccctggctccccctggctgccatgtagtctccctcttcactcagtacaygccctatacgctggctggaggcaaggcctgggacgagcaggagagagacgcttatgcagacagagtgttygattgcatcgaggtctatgcccctggcttcaaggactctgtggttggcagagacatcctcacaccaccagatttggagagaatcttcgggcttcctggagggaacatattccactgcgccatgtccctggaccagctctacttcrcccgccccgtgcccctgcattctggctaccgctgccctctccagggcctgtatctctgtggaagtggggctcatcctggaggaggtgtgatgggagctgctgggcgaaatgcagcacatgtggcctttagggacctcaagagcatgtgaccctgaaccagctctgacccaggaagaagactccacccctgaattccaagtgctccattggatcagcttcccaggaagttcagcttcgggttagtacataaggccaccacaatgctcaagaaattattttagaaaaaacgtacgagttacatttagtgcaagttgaccttatgcccatgcctccatacatggactggttctgttttattaaaactaatatttcatacagattat

SEQ ID NO: 438 - DNA, 2827 bp, Homo sapiens
gagaattacagacagcgaacttgcccctaagccctcgttgwgggtktgtgtttgagcatttaggagaggactccagtgctcctcagcgacagacacagcygcctctgcggtgtctgaaggccctggtcgtggtgacgctagatggccgccctgggcgcctcctgtgggcgtagaggcatcaccactctgcactggcagactcagcatggagttggagcagagtctgacacgagcacttgccatcccaggcgtttcagttctgactgagaaggtagatgcacaggggaggagagggccctttyragctccrctctgcctccaccactcattccctaaccccgcagcctcagcgccctcayctgtaaaatggggagttttgcctacagggttcagcacaatgccagcctgacataggaaccccagtggattgtcagttttgccattatcccctgcatcctggaggtgacaccgcctggttaataggcaacactcccracggcccagcacagccccaggrcagcaggaggctggcctgtggccaagaatgcatggtggagggggcctggagggggactgcagctcctcctcttcctgcttcctccctgctccaccccgtgcctagggcagcacaaaagccaatcgctagcaaactcsctgcctagcaaggcccagcctggggcagaaatggctgcaagtggccgaggtctctgcaaggctgtggccgcctctcccttcccggcgtggagacgagataacayggaagccaggggaggtctgaagcctgagtatgatgcggtggtgataggagcaggacacaacggactggtggctgcagcgtacctgcasagactgggggtgaacaccgccgtcttcgagaggcgccatgtgatcgggggtgcagctgtcactgaggagatcatcccagggtttaagttctcccgygcgtcctacctgctcagcctgctgaggccgcagatttacactgatctggagctgaagaaacatgggctgaggcttcatcttcgaaacccctactccttcacccccatgctggaagagggtgcaggcagcaaggtgcccaggtgccttctgctgggcacagacatggcagaaaaccagaagcagatcgcccagttctcccagaaggatgcccaggtctttcccaaatatgaggagttcatgcatcgcttggcattagccattgaccctctgctggatgcggcccccgtggacatggcggccttccagcatggctccttgctgcaaaggatgaggtcgctctccaccctcaagcccctgctgaaggcaggccgcatcctgggagcccagcttccccgatattatgaggtcctcacagctcccattaccaaggtgctggatcagtggttcgagtctgagcctttaaaagccactctagccacagatgcagtgattggagccatgacaagtccccacactccggggagtgggtatgtgctgctgcaccatgtgatggggggcctggagggaatgcagggggcctggggctacgtccaggggggcatgggtgccctctctgatgcgatcgcaagctcagccaccacacatggagcaagcatcttcactgaaaagacagtggcgaaggtgcaggtgaacagtgaaggctgtgttcaaggagttgtgctggaagatggcacagaggtgagaagcaaaatggtgctgtccaacacatcaccgcagatcaccttcctgaagctgacgccacaggagtggcttcctgaggagttcctggagagaatctctcagctggacacccggtcgcctgtcaccaagatcaatgtggccgtagacaggctgcccagcttcctggcggcccccaatgctcccaggggccagccgctgccccatcaccaatgctccatccacctgaactgtgaagacaccctcctccttcatcaggcctttgaagatgccatggatggcctgccttcccacaggcctgtgattgagctctgcatcccttcctcgctggaccccaccctggctccccctggctgccatgtagtctccctcttcactcagtacaygccctatacgctggctggaggcaaggcctgggacgagcaggagagagacgcttatgcagacagagtgttygattgcatcgaggtctatgcccctggcttcaaggactctgtggttggcagagacatcctcacaccaccagatttggagagaatcttcgggcttcctggagggaacatattccactgcgccatgtccctggaccagctctacttcrcccgccccgtgcccctgcattctggctaccgctgccctctccagggcctgtatctctgtggaagtggggctcatcctggaggaggtgtgatgggagctgctgggcgaaatgcagcacatgtggcctttagggacctcaagagcatgtgaccctgaaccagctctgacccaggaagaagactccacccctgaattccaagtgctccattggatcagcttcccaggaagttcagcttcggcataatcgtgcaggaatttcagttcctggctggccgtgaggaggcaggtagccctgttgaaaaccccatgtggcaagtaactgcagtagcctccagctgactgaagctctcagacctactacctcagagaatggatgctgccaacacatgtgagcaaggaaatggatgcttccccagttgagcttccagatgagaacacagcctggccggcactgtgagtatagccttgtgacaccctgaacagggagtccagctgtgcctagattcctgaacagtggaaactgtgagataataaatgtgtgttgttc

SEQ ID NO: 439 - DNA, 3350 bp, Homo sapiens
  misc_feature (1311)..(1311): n is a, c, g, or t
tgctaatgcttttggtacaaatggatgtggaatataattgaatattttcttgtttaaggggagcatgaagaggtgttgaggttatgtcaagcatctggcacagctgaaggcagatggaaatatttacaagtacgcaatttgagactaagatattgttatcattctcytattgaagacaagagcaatagtaaaacacatcaggtcagggggttaaagacctgtgataaaccacttccgataagttggaaacgtgtgtctatattttcatatctgtatatatataatggtaaagaaagacaccttcgtaaccygcattttccaaagagagraatcacagggagatgtacagcaatggggccatttaagagttctgtgttcatcttgattcttcaccttctagaaggggccctgagtaattcactcattcagctgaacaacaatggctatgaaggcattgtcgttgcaatcgaccccaatgtgccagaagatgaaacactcattcaacaaataaaggacatggtgacccaggcatctctgtatctgyttgaagctacaggaaagcgattttatttcaaaaatgttgccattttgattcctgaaacatggaagacaaaggctgactatgtgagaccaaaacttgagacctacaaaaatgctgatgttctggttgctgagtctactcctccaggtaatgatgaaccctacactgagcagatgggcaactgtggagagaagggtgaaaggatccacctcactcctgatttcattgcaggaaaaaagttagctgaatatggaccacaaggtarggcatttgtccatgagtgggctcatctacgatggggagtatttgacgagtacaataatgatgagaaattctacttatccaatggaagaatacaagcagtaagatgttcagcaggtattactggtacaaatgtagtaaagaagtgtcagggaggcagctgttacaccaaaagatgcacattcaataaagtwacaggactctatgaaaaaggatgtgagtttgttctccaatcccgccagacggagaaggcttctataatgtttgcacaacatgttgattctatagttgaattctgtacagaacaaaaccacaacaaagaagctccaaacaagcaaaatcaaaaatgcaatctccgaagcacatgggaagtgatccgtgattctgaggactttaagaaaaccactcctatgacaacacagccaccaaatcccaccttctcattgctgcagattggacaaagaattgtgtgtttagtccttgacaaatctggaagcatggcgactggnaaccgcctcaatcgactgaatcaagcaggccagcttttcctgctgcagacagttgagctggggtcctgggttgggatggtgacatttgacagtgctgcccatgtacaaartgaactcatacagataaacagtggcagtgacagggacacactcgccaaaagattacctgcagcagcttcaggagggacgtccatctgcagcgggcttcgatcggcatttactgtgattaggaagaaatatccaactgatggatctgwaattgtgctgctgacggatggggaagacaacactataagtgggtgctttaacgaggtcaracawagtggtgccmtcatccacacagtygctttggggccctctgcagctcaagaactagaggagctgtccaaaatgacaggaggtttacagacatatgcttcagatcaagttcagaacaatggcctcattgatgcttttggggccctttcatcaggaaatggagctgtctctcagcgctccatccagcttgagagtaagggattaaccctccagaacagccagtggatgaatggcacagtgatcgtggacagcaccgtgggaaaggacactttgtttcttatcacctggacaaygcagcctccccaaatccttctctgggatcccagtggacagaagcaaggtggctttgtagtggacaaaaacaccaaaatggcctacctccaaatcccaggcattgctaaggttggcacttggaaatacagtctgcaagcaagctcacaaaccttgaccctgactgtcacgtcccgtgcgtccaatgctaccctgcctccaattacagtgacttccaaaacgaacaaggacaccagcaaattccccagccctctggtagtttatgcaaatattcgccaaggagcctccccaattctcagggccagtgtcacagccctgattgaatcagtgaatggaaaaacagttaccttggaactactggataatggagcaggtgctgatgctactaaggatgacggtgtctactcaaggyatttcacaacttatgacacgaatggtagrtacagtgtaaaagtgcgggctctgggaggagttaasgcagccagacggagagtgataccccagcagagtggagcactgtacatacctggctggattgagaatgatgaaatacaatggaatccaccaagacctgaaattaataaggatgatgttcaacacaagcaagtgtgtttcagcagaacatcctcgggaggctcatttgtggcttctgatgtcccaaatgctcccatacctgatctcttcccacctggccaaatcaccgacctgaakgcggaaattcacgggggcagtctcattaatctgacttggacagctcctggggatgattatgaccatggaacagctcacaagtatatcattcgaataagtacaagtattcttgatctcagagacaagttcaatgaatctcttcaagtgaatactacygctctcatcccaaaggaagccaactctgaggaagtctttttgtttaaaccagaaaacattacttttgaaaatggcacagatcttttcattgctattcaggctgttgataaggtcgatctgaaatcagaaatatccaacattgcacgagtatctttgtttattcctccacagactccgccagagacacctagtccygatgaaacgtctgctccttgtcctaatattcatatcaacagcaccattcctggcattcacattttaaaaattatgtggaagtggataggagaactgcagctgtcaatagcctagggctgaatttttgtcagataaataaaataaatcattcatccttttttttgattataaaattttctaaaatgtattttagacttcctgtagggggcgatatactaaatgtatatagtacatttatactaaatgtattcctgtagggggcgatatactaaatgtattttagacttcctgtagggggcgataaaataaaatgctaaacaactgggtatacatgcataaaaactatccattcaaacccaaaaatttaa

SEQ ID NO: 440 - DNA, 4288 bp, Homo sapiens
tgccagccgcggctgccgctggagccggtgtccgggctggtgatggggttaattccctttcgtaagactcttacttgcacccacccagccccgccgtcgccccgccgcgccgcgctccaaccgcctcctcctcctcagtaacgcgggccacggaaaggtatgatatatttgatccaagacagtccattccagtccgggaatctacagtggtgacaaggacatgggactcctcctgccagattacagatggttcactacagttgacatcctggctgacaactgtgaaaaagaaccttggattattttattttatttttgtgggacaccacaatcccaaatccaaaggacgcatcaggcttcaagctccctgtagaattcgaaaataaccttttctaatgaggatgtctgatactgttactgtaaaagatgaaactgcaacaatgaaggatttggaggcagaagtgaaagatacaaccagagttgaaaatcttatcaaatcagaaaactatgggaagattttggtagagaagaatgaacattgtattgagaacaatatagatttgcaggagaaaattcagatccagttaacacaatcatttgagaaagaagagaagccctcaaaagatgaagcagaaaaagaaaaggccagtgataagttgcccagaaaaatgttatcaagagattccagtcaagaatacactgattcaactggcatagatctacatgaatttttagtaaatacattaaaaaacaatcccagggacagaatgatgctgctgaaattggaacaagaaattttagatttcattggtaataatgagtctccacgtaaaaaattccccccaatgacatcttaccataggatgctattacacagagtagccgcttactttggattagaccacaatgttgatcagagtgggaagtctgtcatagtaaacaaaactagcaatacaagaatacctgatcagaaatttaatgaacatattaaggatgataaaggtgaagactttcagaaacgttatatcctcaagagagataactctagctttgacaaagatgataaccagrtgagaatacgtttgaaagatgacagaagaagcaaatctatagaagaaagagaagaagagtaccagagagccagagaccgaatattttcccaagattccctgtgttcccaagagaattacmttattgacaaaagactccaagacgaggatgccagtagtacccagcagaggcgccagatatttagagttaataaagatgcttcagggagatctacaaatagccatcaaagcagcactgagaatgagttgaagtactcggaaccacgaccctggagcagcacagattcagacagctctcttcgaaacctgaaacctgctgtaaccaaagccagcagcttcagtggaatctcagtcctgacaagaggtgatagttctggaagcagcaaaagcataggcaggctttcaaaaacaggtcagcccttcataaacccagatgggagtccagttgtgtataatcctcctatgactcaacaaccagttagatcccaagtgcctggacctccacagccacctctgccagccccwcctcaacaaccagcagctaatcacattttctcacagcaggataacctagggtctcagtttagccacatgagtcttgctcgccagccatctgctgatggttctgaccctcatgccgccatgttccagtccactgtggttcttcagtctccacagcagtctggttatatcatgacagcagcccctccaccacatcctcctccaccgccaccaccaccacctcctcctcctcccctaccacctgggcagccagtccctactgctggatatcctgcctctggtcatcctgtcagccagcctgtgctccagcagcmgggatatattcagcagccatcaccacagatgccagcctgttattgcgctccaggccactatcactccagccaacctcagtatcgcccagtcccttctgttcattacaattcacatctaaaccaaccactgccacaacctgcgcagcagacaggttatcaagttatacccaaccagcagcaaaactaccaaggaatagttggagttcagcaaccccagagtcagagcctagtcagtggccaacccaacagcattggaaatcagattcaaggagtggtcatcccctatacttcagtgccaacatatcaggtttcactgcctcaaggttctcaaggaattccccatcagacttatcaacagcctgttatgttccctaatcagtctaatcaaggatctatgcccacaacaggaatgcctgtttactatagtgtcattccacctggtcaacaaaacaatttaagctcttcagtaggttacctgcaacatccaggatcagaacaagtacaatttcctcgaaccacttcaccatgcagttcccagcagcttcaaggccaccaatgtacagctggaccaccaccgccacctggtggggggatggtgatgatgcagctcagtgtaccaaacaatccacaatcttgtgcccactcacccccgcagtggaaacaaaacaaatattactgtgatcaccagagaggacagaagtgtgtagaatttagcagtgtagacaatattgtccagcacagccctcaactcagtagccccattatttcaccagctcagtcgccagcaccagctcagctgtccaccctgaaaactgtacgtccctctggaccaccactttccatcatgccccaattttctagaccttttgtccccgggcaaggagattccaggtatccattacttggccagccactgcagtacaatcctcctgctgttctgcayggacacattccaaaccaacagggtcagcctggcagcaggcatggaaaccgaggaaggagacaagctaaaaaagctgcatccacagaccttggagcaggagaaacagttgttgggaaggtcttggaaattactgaactaccagatggaataactcgcatggaagctgaaaagctttttggggaactctttaaaattggcgccaagatccggtggctccgggacccccagtcccaaccacgtcgtcaccccctctgctgtggcagtggggacaacactgccaaccctgaacgctctaaacccagtgacttggcctccacctacaccgtcttagccacattcccctccatttcagctgcacagaatgcactgaagaaacaaattaactcagttaacaagtttaagctgagaacaagcaagaagcactatgactttcacattttggaaagggcaagttctcagtaacagccacctttggacccttcgcctttatggttcccctgccctctcccatctttgattggcttggtatttggagcttctgttaacattatagagactcctaggatgtgtgttcatggcattatagcttttgaagaaaggccagtgatccagcaaagggggaaaaatatgcatttcaccccacatgactaggaatccacatcagaatgatacagagttagcaggtttttctaaggaaatgccattcaaatgcctcctaacttttatagttattttgttttatatttctaaattcttgtatcagatccaaagctctattgyacagcaaattattcttcaaaatgattataaccagttgcaccctgtatttctttttgcagccagcacaatgtgacccaacttaaaatttgggggaaaaagaatgcaggagtgaaataaccaagtcaaaaccatgtactatctccttgggggttagggatgctaagaagagcccacaaatagaggattactcttcccctgaatctctaaactcagaaacaattaccaaaaaatacataactcttccttgtagggccctttccttattcatttaggtagtgtgaacattaagtataaaataaattatgttcttaatgcctcttaaaccacttacattcaaaggggaacagaaatcattctaagcaggaaaatacttccactttttttttttcaagtatctctctaataactaaatgccacttatttgcattctccttgtggattttttgtcacctaaggaaatgcatttgatgagtgctggaaacttcttaagtgctttacagtttgttttcattgtttgcagcggatcactggacatcaaagattcattgcacttatgaacaaggaaccttcttttcaatttctgtgtaatttgcaaggctgtacaatgtgtgctgatgcaagcctttttcagttcaagagaataaatgtttacaaatata

SEQ ID NO: 441 - DNA, 5099 bp, Homo sapiens
atggagcccgagtgagcgcggcgcgggcccgtccggccgccggacaacatggaggcagcgccgcccgggccgccgtrgccgctgctgctgctgctgctgctgctgctggcgctgtgcggctgcccggcccccgccgcggcctcgccgctcctgctatttgccaaccgccgggacgtacggctggtggacgccggcggagtcaagctggagtccaccatcgtggtcagcggcctggaggatgcggccgcagtggacttccagttttccaagggagccgtgtactggacagacgtgagcgaggaggccatcaagcagacctacctgaaccagacgggggccgccgtgcagaacgtggtcatctccggcctggtstctccckacggcctcgcctgcgactgggtgggcaagaagctgtactggacggactcagagaccaaccgcatcgaggtggccaacctcaatggcacatcccggaaggtgctcttctggcaggaccttgaccagccgagggccatcgccttggaccccgctcacgggtacatgtactggacagactggggtgagacgccccggattgagcgggcagggatggatggcagcacccggaagatcattgtggactcggacatttactggcccaatggactgaccatcgacctggaggagcagaagctctactgggctgacrycaagctcagcttcatccaccgtgccaacctggacggctcgttccggcagaaggtggtggagggcagcctgacgcaccccttcgccctgacgctctccggggacactctgtactggayagactggcagacccgctccatccatgcctgcaacaagcgcactggggggaagaggaaggagatcctgagtgccctctactcacccatggacatccaggtgctgagccaggagcggcagcctttcttccacactcgctgtgaggaggacaatggcggctgctcccacctgtgcctgctgtccccaagcgagcctttctacacatgcgcctgccccacgggtgtgcagctgcaggacaacggcaggacgtgtaaggcaggagccgaggaggtgctgctgctggcccggcggacggacctacggaggatctcgctggacacgccggacttyaccgacatcgtgctgcaggtggacgacatccggcacgccattgccatcgactacgacccgctagagggctatgtctactggacagatgacgaggtgcgggccatccgcagggcgtacctggacgggtctggggcgcagacgctggtcaacaccgagatcaacgaccccgatggcatcgcggtcgactgggtggccygaaacctctactggaccgacacgggcacggaccgcatcgaggtgacgcgcctcaacggcacctcccgcaagatcytggtgtcggaggacctggacgagccccgagccatcgcactgcaccccgtgatgggcctcatgtactggacagactggggagagaaccctaaaatcgagtgtgccaacttggatgggcaggagcrgcgtgtgctggtcaatgcctccctcgggtggcccaacggcctggccctggacctgcaggaggggaagctctactggggagacgccaagacagacaagatcgaggtgatcaatgttgatgggacgaagaggcggaccctcctggaggacaagctcccgcacattttygggttcacgctgctgggggacttcatctactggactgactggcagcgccgcagcatcgagygggtgcacaaggtcaaggccagccgggacgtcatcattgaccagctgcccgacctgatggggctcaaagctgtgaatgtggccaaggtcgtcggaaccaacccgtgtgcggacaggaacggggggtgcagccacctgtgcttcttcacaccccacgcaacccggtgtggctgccccatcggcctggagctgctgagtgacatgaagacctgcatcgtgcctgargccttcttggtcttcaccagcagagccgccatccacaggatctccctcgagaccaataacaacgacrtggccatcccgctcacgggcgtcaaggaggcctcagccctggacttygatgtgtccaacaaccacatctactggacagacgtcagcctgaagaccatcagccgcgccttcatgaacgggagctcggtggagcaygtggtggagtttggccttgactaccccgagggcatggccgttgactggatgggcaagaacctctactgrgccgayactgggaccaayagaatcgaagtggcgcggctggacgggcagttccggcaagtcctcgtgtggagggacttggacaacccgaggtcgctggccctggatcccaccaagggctacatctactggaccgagtggggcggcaagccgaggatcgtgcgggccttcatggacgggaccaactgcatgacgctggtggacaaggtgggccgggccaacgacctcaccattgactacgctgaccagcgcctctactggaccgacctggacaccaacatgatcgagtcgtccaacatgctgggtcaggagcgggtcgtgattgccgacgatctcccgcacccgttcggtctgacgyagtacagcgattatatctactggacagactggaatctgcacagcattgagcgggccgacaagactagcggccggaaccgcaccctcatccagggccacctggacttcgtgatggacatcctggtgttccactcctcccgccaggatggcctcaatgactgtatgcacaacaacgggcagtgtgggcagctgtgccttgccatccccggcggccaccgctgcggctgcgcctcacactacaccctggaccccagcagccgcaactgcagcccgcccaccaccttcttgctgttcagccagaaatctgccatcagtcggatgatcccggacgaccagcacagcccggatctcatcctgcccctgcatggactgaggaacgtcaaagccatcgactatgacccactggacaagttcatctactgggtggatgggcgccagaacatcaagcgagccaaggacgacgggacccagccctttgttttgacctctctgagccaaggccaaaacccagacaggcagccccacgacctcagcatcgacatctacagccggacactgttctggacgtgcgaggccaccaataccatcaacgtccacaggctgagcggggaagccatgggggtggtgctgcgtggggaccgcgacaagcccagggccatcgtcgtcaacgcggagcgagggtacctgtacttcaccaacatgcaggaccgggcagccaagatcgaacgcgcagccctggayggcaccgagcgcgaggtcctcttcaccaccggcctcatccgccctgtggccctggtggtrgacaacacactgggcaagctgttctgggtggacgcggacctgaagcgcattgagagctgtgacctgtcaggggccaaccgcctgaccctggaggacgccaacatcgtgcagcctctgggcctgaccatccttggcaagcatctcyactggatcgaccgccagcagcagatgatcgagcgtgtggagaagaccaccggggacaagcggactcgcatccagggccgtgtcgcccacctcactggcatccatgcastggaggaagtcagcctggaggagttctcagcccacccatgtgcccgtgacaatggtggctgctcccacatctgtattgccaagggtgatgggacaccacggtgctcatgcccagtccacctcgtgctcctgcagaacctgctgacctgtggagagccgcccacctgctccccggaccagtttgcatgtgccacaggggagatcgactgtatccccggggcctggcgctgtgacggctttcccgagtgcgatgaccagagcgacgaggagggctgccccgtgtgctccgccgcccagttcccctgcgcrcggggtcagtgtgtggacctgcgcctgcgctgcgacggcgaggcagactgtcaggaccgctcagacgaggyggactgtgacgccatctgcctgcccaaccagttccggtgtgcgagcggccagtgtgtcctcatcaaacagcagtgcgactccttccccgactgtatcgayggctccgacgagctcatgtgtgaaatcaccaagccgccctcagacgacagcccggcccacagcagtgccatcgggcccgtcattggcatcatcctctctctcttcgtcatgggtggtgtctattttgtgtgccagcgcgtggtgtgccagcgctatgcgggggccaacgggcccttcccgcacgagtatgtcagcgggaccccgcacgtgcccctcaatttcatagccccgggcggttcccagcatggccccttcacaggcatcgcatgcggaaagtccatgatgagctcygtgagcctgatggggggccggggcggggtgcccctctacgaccggaaccaygtcacaggggcctcgtccagcagctcgtccagcacgaaggccacgctgtacccgccgatcctgaacccgccgccctccccggccacggacccctccctgtacaacatggacatgttctactcttcaaacattccggccactgygagaccgtacaggccctacatcattcgaggaatggcgcccccgacgacgccctgcagcaccgacgtgtgtgacagcgactacagcgccagccgctggaaggccagcaagtactacctggatttgaactcggactcagacccctatccacccccacccacgccccacagccagtacctgtcggcggaggacagctgcccgccctcgcccgccaccgagaggagctacttccatctcttcccgccccctccgtccccctgcacggactcatcctgacctcggccgggccactctggcttctctgtgcccctgtaaatagttttaaatatgaacaaagaaaaaaatatattttatgatttaaaaaataaatataattgggattttaaaaacatgagaaatgtgaactgtgatggggtgggcagggctgggagaactttgtacagtggagaaatatttataaacttaattttgtaaaacag

SEQ ID NO: 442 - DNA, 5135 bp, Homo sapiens
atggagcccgagtgagcgcggcgcgggcccgtccggccgccggacaacatggaggcagcgccgcccgggccgccgtrgccgctgctgctgctgctgctgctgctgctggcgctgtgcggctgcccggcccccgccgcggcctcgccgctcctgctatttgccaaccgccgggacgtacggctggtggacgccggcggagtcaagctggagtccaccatcgtggtcagcggcctggaggatgcggccgcagtggacttccagttttccaagggagccgtgtactggacagacgtgagcgaggaggccatcaagcagacctacctgaaccagacgggggccgccgtgcagaacgtggtcatctccggcctggtstctccckacggcctcgcctgcgactgggtgggcaagaagctgtactggacggactcagagaccaaccgcatcgaggtggccaacctcaatggcacatcccggaaggtgctcttctggcaggaccttgaccagccgagggccatcgccttggaccccgctcacgggtacatgtactggacagactggggtgagacgccccggattgagcgggcagggatggatggcagcacccggaagatcattgtggactcggacatttactggcccaatggactgaccatcgacctggaggagcagaagctctactgggctgacrycaagctcagcttcatccaccgtgccaacctggacggctcgttccggcagaaggtggtggagggcagcctgacgcaccccttcgccctgacgctctccggggacactctgtactggayagactggcagacccgctccatccatgcctgcaacaagcgcactggggggaagaggaaggagatcctgagtgccctctactcacccatggacatccaggtgctgagccaggagcggcagcctttcttccacactcgctgtgaggaggacaatggcggctgctcccacctgtgcctgctgtccccaagcgagcctttctacacatgcgcctgccccacgggtgtgcagctgcaggacaacggcaggacgtgtaaggcaggagccgaggaggtgctgctgctggcccggcggacggacctacggaggatctcgctggacacgccggacttyaccgacatcgtgctgcaggtggacgacatccggcacgccattgccatcgactacgacccgctagagggctatgtctactggacagatgacgaggtgcgggccatccgcagggcgtacctggacgggtctggggcgcagacgctggtcaacaccgagatcaacgaccccgatggcatcgcggtcgactgggtggccygaaacctctactggaccgacacgggcacggaccgcatcgaggtgacgcgcctcaacggcacctcccgcaagatcytggtgtcggaggacctggacgagccccgagccatcgcactgcaccccgtgatgggcctcatgtactggacagactggggagagaaccctaaaatcgagtgtgccaacttggatgggcaggagcrgcgtgtgctggtcaatgcctccctcgggtggcccaacggcctggccctggacctgcaggaggggaagctctactggggagacgccaagacagacaagatcgaggtgatcaatgttgatgggacgaagaggcggaccctcctggaggacaagctcccgcacattttygggttcacgctgctgggggacttcatctactggactgactggcagcgccgcagcatcgagygggtgcacaaggtcaaggccagccgggacgtcatcattgaccagctgcccgacctgatggggctcaaagctgtgaatgtggccaaggtcgtcggaaccaacccgtgtgcggacaggaacggggggtgcagccacctgtgcttcttcacaccccacgcaacccggtgtggctgccccatcggcctggagctgctgagtgacatgaagacctgcatcgtgcctgargccttcttggtcttcaccagcagagccgccatccacaggatctccctcgagaccaataacaacgacrtggccatcccgctcacgggcgtcaaggaggcctcagccctggacttygatgtgtccaacaaccacatctactggacagacgtcagcctgaagaccatcagccgcgccttcatgaacgggagctcggtggagcaygtggtggagtttggccttgactaccccgagggcatggccgttgactggatgggcaagaacctctactgrgccgayactgggaccaayagaatcgaagtggcgcggctggacgggcagttccggcaagtcctcgtgtggagggacttggacaacccgaggtcgctggccctggatcccaccaagggctacatctactggaccgagtggggcggcaagccgaggatcgtgcgggccttcatggacgggaccaactgcatgacgctggtggacaaggtgggccgggccaacgacctcaccattgactacgctgaccagcgcctctactggaccgacctggacaccaacatgatcgagtcgtccaacatgctgggtcaggagcgggtcgtgattgccgacgatctcccgcacccgttcggtctgacgyagtacagcgattatatctactggacagactggaatctgcacagcattgagcgggccgacaagactagcggccggaaccgcaccctcatccagggccacctggacttcgtgatggacatcctggtgttccactcctcccgccaggatggcctcaatgactgtatgcacaacaacgggcagtgtgggcagctgtgccttgccatccccggcggccaccgctgcggctgcgcctcacactacaccctggaccccagcagccgcaactgcagcccgcccaccaccttcttgctgttcagccagaaatctgccatcagtcggatgatcccggacgaccagcacagcccggatctcatcctgcccctgcatggactgaggaacgtcaaagccatcgactatgacccactggacaagttcatctactgggtggatgggcgccagaacatcaagcgagccaaggacgacgggacccaggcagtgctcaggagtcttggtttctttgtcttacagccctttgttttgacctctctgagccaaggccaaaacccagacaggcagccccacgacctcagcatcgacatctacagccggacactgttctggacgtgcgaggccaccaataccatcaacgtccacaggctgagcggggaagccatgggggtggtgctgcgtggggaccgcgacaagcccagggccatcgtcgtcaacgcggagcgagggtacctgtacttcaccaacatgcaggaccgggcagccaagatcgaacgcgcagccctggayggcaccgagcgcgaggtcctcttcaccaccggcctcatccgccctgtggccctggtggtrgacaacacactgggcaagctgttctgggtggacgcggacctgaagcgcattgagagctgtgacctgtcaggggccaaccgcctgaccctggaggacgccaacatcgtgcagcctctgggcctgaccatccttggcaagcatctcyactggatcgaccgccagcagcagatgatcgagcgtgtggagaagaccaccggggacaagcggactcgcatccagggccgtgtcgcccacctcactggcatccatgcastggaggaagtcagcctggaggagttctcagcccacccatgtgcccgtgacaatggtggctgctcccacatctgtattgccaagggtgatgggacaccacggtgctcatgcccagtccacctcgtgctcctgcagaacctgctgacctgtggagagccgcccacctgctccccggaccagtttgcatgtgccacaggggagatcgactgtatccccggggcctggcgctgtgacggctttcccgagtgcgatgaccagagcgacgaggagggctgccccgtgtgctccgccgcccagttcccctgcgcrcggggtcagtgtgtggacctgcgcctgcgctgcgacggcgaggcagactgtcaggaccgctcagacgaggyggactgtgacgccatctgcctgcccaaccagttccggtgtgcgagcggccagtgtgtcctcatcaaacagcagtgcgactccttccccgactgtatcgayggctccgacgagctcatgtgtgaaatcaccaagccgccctcagacgacagcccggcccacagcagtgccatcgggcccgtcattggcatcatcctctctctcttcgtcatgggtggtgtctattttgtgtgccagcgcgtggtgtgccagcgctatgcgggggccaacgggcccttcccgcacgagtatgtcagcgggaccccgcacgtgcccctcaatttcatagccccgggcggttcccagcatggccccttcacaggcatcgcatgcggaaagtccatgatgagctcygtgagcctgatggggggccggggcggggtgcccctctacgaccggaaccaygtcacaggggcctcgtccagcagctcgtccagcacgaaggccacgctgtacccgccgatcctgaacccgccgccctccccggccacggacccctccctgtacaacatggacatgttctactcttcaaacattccggccactgygagaccgtacaggccctacatcattcgaggaatggcgcccccgacgacgccctgcagcaccgacgtgtgtgacagcgactacagcgccagccgctggaaggccagcaagtactacctggatttgaactcggactcagacccctatccacccccacccacgccccacagccagtacctgtcggcggaggacagctgcccgccctcgcccgccaccgagaggagctacttccatctcttcccgccccctccgtccccctgcacggactcatcctgacctcggccgggccactctggcttctctgtgcccctgtaaatagttttaaatatgaacaaagaaaaaaatatattttatgatttaaaaaataaatataattgggattttaaaaacatgagaaatgtgaactgtgatggggtgggcagggctgggagaactttgtacagtggagaaatatttataaacttaattttgtaaaacag

SEQ ID NO: 443 - DNA, 2632 bp, Homo sapiens
tggcaggcaggaaagacagaggaaggaaggagggagaagggaaggagtgaaggaaggagtgaaaaaggggagtctacaccctgtggagctcaagatggtcctgagtggggcgctgtgcttccgaatgaaggactcggcattgaaggtgctttatctgcataataaccagcttctagctggagggctgcatgcagggaaggtcattaaaggtgaagagatcagcgtggtccccaatcggtggctggatgccagcctgtcccccgtcatcctgggtgtccagggtggaagccagtgcctgtcatgtggggtggggcaggagccgactctaacactagagccagtgaacatcatggagctctatcttggtgccaaggaatccaagagcttcaccttctaccggcgggacatggggctcacctccagcttcgagtcggctgcctacccgggctggttcctgtgcacsgtgcctgaagccgatcagcctgtcagactcacccagcttcccgagaatggtggctggaatgcccccatcacagacttctacttccagcagtgtgactagggcaaygtgccccccagaactccctgggcagagccagctcgggtgaggggtgagtggaggagacccatggcggacaatcactctctctgctctcaggacccccasgtctgacttagtgggcacctgaccactttgtcttctggttcccagtttgsataaattctgagatttggagctcagtccasggtcctcccccactggatggtgctactgctgtggaaycttgtaaaaaccatgtggggtaaactgggaataacatgaaaagatttctgtggrggtggggtgggggagtgstgggaatcattcctgcttaatggtaactgacmagtgttaccctgagccccgcaggccaacccatccccagttgagccttatagggtcagtagctctccacatgaagwcctstcactcaccactrtgcaggagagggaggtggtcatagagtcagggatctatggcccttggcccagccccaccyccttccctttaatcctgccactgtcatatgctacctttcctatctcttccctcatcatcttgttgtgggcatgaggaggtgstgatgtcagaagaaatggytcgagctcagaagataaaagataagtagggtatgctgatcctcttttaaaaacccaagatacaatcaaaatcccagatgctggtctctattcccatgaaaaagtgctcatgacatattgagaagacctacttacaaagtggcatatattgcaatttattttaattaaaagatacctatttatatatttctttatagaaaaaagtctggaagagtttacttcaattgtagcaatgtcagggtggtggcagtataggtgatttttcttttaattctgttaatttayctgtatttcctaatttttctacaatgaagatgaattccttgtataaaaataagaaaagaaattaatcttgasgtaagcagagyagacatcatctctgattgtcctcagcctccamttccccagagtaaattcaaattgaatcgagctctgctgctctggttggttgtagtagtgatcaggaawcagatctcagcaaagccactgaggaggaggctgtgmtgagtttgtgtggctggaatctctgggtaaggaacttaaagaacaaaaatcatctggtaattctttcctagaaggatcacagcccctgggattccaaggcattggatccagtctctaagaaggctgctgtactggttgaattgtgtccccctcaaattcacatccttcttggaatctcagtctgtgagtttatttggagataaggtctctgcagatgtagttagttaagacaaggtcatgctggatgaaggtagacctaaattcaatatgactggtttccttgtatgaaaaggagaggacacagagacagaggagaygcggggaagactatgtaaagatgaaggcagagatcggagttttgcagccacaagctaagaaacaccaaggattgtggcaaccatcagaagcttggaagaggcaaagaagaattcttccctagaggctttagagggataacggctctgctgamaccttaatctcagacttccagcctcctgaacgaagaaagaataaatttcggctgttttaagccaccaaggataattggttayrgcagctctaggaaactaatacagctgctaaaatgatccctgtctcctcgtgtttacattctgtgtgtgtcccctcccacaatgtaccaaagttgtctttgtgaccaatagaatatggcagaagtgatggcatgccacttccaagattaggttataaaagacactgcagcttctacttgagccctctctctctgccacccaccgcccccaatctatcttggctcactcgctctgggggaagctagctkccatgctatgagcaggcctataaagagacttaygtggtaaaaaatgaagtctcctgcccacagccacattagtgaacctagaagcagagactctgtgagataatcratgtttgttgttttaagttgctcagttttggtctaacttgttatgcagcaatagataaataatatgcagagaaagagaaacaa

SEQ ID NO: 444 - DNA, 2699 bp, Homo sapiens
cgctgggaatcctgctcctcctcaggtcctggcagtttcagggcccctccctaggccttacttaaaaggctgaggcatccttggaggaacaggcagactccacagctcccgccaggagaaaggaacattctgaggggagtctacaccctgtggagctcaagatggtcctgagtggggcgctgtgcttccgaatgaaggactcggcattgaaggtgctttatctgcataataaccagcttctagctggagggctgcatgcagggaaggtcattaaaggtgaagagatcagcgtggtccccaatcggtggctggatgccagcctgtcccccgtcatcctgggtgtccagggtggaagccagtgcctgtcatgtggggtggggcaggagccgactctaacactagagccagtgaacatcatggagctctatcttggtgccaaggaatccaagagcttcaccttctaccggcgggacatggggctcacctccagcttcgagtcggctgcctacccgggctggttcctgtgcacsgtgcctgaagccgatcagcctgtcagactcacccagcttcccgagaatggtggctggaatgcccccatcacagacttctacttccagcagtgtgactagggcaaygtgccccccagaactccctgggcagagccagctcgggtgaggggtgagtggaggagacccatggcggacaatcactctctctgctctcaggacccccasgtctgacttagtgggcacctgaccactttgtcttctggttcccagtttgsataaattctgagatttggagctcagtccasggtcctcccccactggatggtgctactgctgtggaaycttgtaaaaaccatgtggggtaaactgggaataacatgaaaagatttctgtggrggtggggtgggggagtgstgggaatcattcctgcttaatggtaactgacmagtgttaccctgagccccgcaggccaacccatccccagttgagccttatagggtcagtagctctccacatgaagwcctstcactcaccactrtgcaggagagggaggtggtcatagagtcagggatctatggcccttggcccagccccaccyccttccctttaatcctgccactgtcatatgctacctttcctatctcttccctcatcatcttgttgtgggcatgaggaggtgstgatgtcagaagaaatggytcgagctcagaagataaaagataagtagggtatgctgatcctcttttaaaaacccaagatacaatcaaaatcccagatgctggtctctattcccatgaaaaagtgctcatgacatattgagaagacctacttacaaagtggcatatattgcaatttattttaattaaaagatacctatttatatatttctttatagaaaaaagtctggaagagtttacttcaattgtagcaatgtcagggtggtggcagtataggtgatttttcttttaattctgttaatttayctgtatttcctaatttttctacaatgaagatgaattccttgtataaaaataagaaaagaaattaatcttgasgtaagcagagyagacatcatctctgattgtcctcagcctccamttccccagagtaaattcaaattgaatcgagctctgctgctctggttggttgtagtagtgatcaggaawcagatctcagcaaagccactgaggaggaggctgtgmtgagtttgtgtggctggaatctctgggtaaggaacttaaagaacaaaaatcatctggtaattctttcctagaaggatcacagcccctgggattccaaggcattggatccagtctctaagaaggctgctgtactggttgaattgtgtccccctcaaattcacatccttcttggaatctcagtctgtgagtttatttggagataaggtctctgcagatgtagttagttaagacaaggtcatgctggatgaaggtagacctaaattcaatatgactggtttccttgtatgaaaaggagaggacacagagacagaggagaygcggggaagactatgtaaagatgaaggcagagatcggagttttgcagccacaagctaagaaacaccaaggattgtggcaaccatcagaagcttggaagaggcaaagaagaattcttccctagaggctttagagggataacggctctgctgamaccttaatctcagacttccagcctcctgaacgaagaaagaataaatttcggctgttttaagccaccaaggataattggttayrgcagctctaggaaactaatacagctgctaaaatgatccctgtctcctcgtgtttacattctgtgtgtgtcccctcccacaatgtaccaaagttgtctttgtgaccaatagaatatggcagaagtgatggcatgccacttccaagattaggttataaaagacactgcagcttctacttgagccctctctctctgccacccaccgcccccaatctatcttggctcactcgctctgggggaagctagctkccatgctatgagcaggcctataaagagacttaygtggtaaaaaatgaagtctcctgcccacagccacattagtgaacctagaagcagagactctgtgagataatcratgtttgttgttttaagttgctcagttttggtctaacttgttatgcagcaatagataaataatatgcagagaaagagaaacaa

SEQ ID NO: 445 - DNA, 1188 bp, Homo sapiens
gacacgggttcctccccactctgtctttctcacytctccttcacttttcctagcctcctcaccaccatctgatctatcttrttctcttcacaaaaggctctgaagacatcatgaacccacaacgggaggcagcacccaaatcctatgctattcgtgattctcgacagatggtgtgggtcctgagtggaaattctttaatagcagctcctcttagccgcagcattaagcctgtcactcttcatttaatagcctgtagagacacagaattcagtgacaaggaaaagggtaatatggtttacctgggaatcaagggaaaagatctctgtctcttctgtgcagaaattcagggcaagcctactttgcagcttaagcttcagggctcccaagataacatagggaaggacacttgctggaaactagttggaattcacacatgcataaacctggatgtgagagagagctgcttcatgggaacccttgaccaatggggaataggagtgggtagaaagaagtggaagagttcctttcaacatcaccatctcaggaagaaggacaaagatttctcatccatgcggaccaacataggaatgccaggaaggatgtagaaataaggggaggaagattcccatctctacaatctttgagtgggtttgctatcaatgaaatgctacaaatggaataagttgcagaaatttttctcttttcttgggttctggagagtttgtaaaacaaggacactatgtatttttaaagagttggtaaatcttacctgtaaagctagagaaggtyggagtctttttaggagtagatttggactacataacctgtaaatgtgttttgtccagtccttagagtgttttttaaaaaattgtaaagtcraggttttcatgaaaaatgggaagatcagacaacattgctcctgaattcccacagagcagcaagctactagagctcaatctgttatttcttttcctgatgtayaggggttaagtcctatggaagaaacagcagaattattcaaaattatttacataatgtgcaattattcactagagcatgaggagtgaaacgctctgtttagtatgtataacttaaaaggaacacatacaattaaaagtaattgaaagacatttcttcttaaaaattctataatcttacactggtaaaataaactagtttttcccatgt

SEQ ID NO: 446 - DNA, 934 bp, Homo sapiens
gacacgggttcctccccactctgtctttctcacytctccttcacttttcctagcctcctcaccaccatctgatctatcttrttctcttcacaaaaggctctgaagacatcatgaacccacaacgggaggcagcacccaaatcctatgctattcgtgattctcgacagatggtgtgggtcctgagtggaaattctttaatagcagctcctcttagccgcagcattaagcctgtcactcttcatttaatagcctgtagagacacagaattcagtgacaaggaaaagggtaatatggtttacctgggaatcaagggaaaagatctctgtctcttctgtgcagaaattcagggcaagcctactttgcagcttaaggaaaaaaatatcatggacctgtatgtggagaagaaagcacagaagccctttctctttttccacaataaagaaggctccacttctgtctttcagtcagtctcttaccctggctggttcatagccacctccaccacatcaggacagcccatctttctcaccaaggagagaggcataactaataacactaacttctacttagattctgtggaataaatccagcctaggctgtgggtggctggttccaggatagagaatcaagctgtcagagtcatcttaacagatcattatgcgactgagttcactagcagttcagcccatccatagcttacctcattcttactatccaaaagccacctcctcctccaaacatccatttctgtaccaagaccctcactcgaatgtcactatcccaagatgaaacctaaaaatyactttccattctttcttgatcttaccccaccatccactcagctgccatgcccagtttagtyaaccccccaaatgctgcttcatgcaaccttccattcctattccttttgccaacccatgatgtagagatgtgg

SEQ ID NO: 447 - DNA, 4799 bp, Homo sapiens
gcgctgggagacgtgcggttccgggtcgctgctcggctcgccggctgggcggtgggggttggtgacgcgggccggggctcacgagaggcccgggaggcggggctttgctggcttcccagagagaggcaggacagaatgctttgacctccaagctgttttaaatctagtagataagccagatcctgtgttgccataagcccttggcccacatttaagtgggaatgcagctagcttggatgtctgaaactttgtaggcgcctctgtctgaatcctgaacacaggcaccaggactactgagagctcgtcatctgtgcaggatagccacacagcaaacatgtttgcaaaactgaagaagaaaattgcagaagagactgctgttgctcagaggccaggaggtgctactaggatcccacggtctgtgagcaaggaatcagttgcctcaatgggagctgactcaggagatgactttgcttccgatggaagcagctccagagaagatctttcatcccagcttctgagaaggaatgaacagatacggaagttagaggccagactttctgactatgctgaacaggtccgaaacttgcagaagataaaagagaagcttgaaattgcattagaaaaacaccaggattcttccatgcggaaatttcaagagcagaatgagacattccaagccaacagagccaaaatggcagaaggactggctttggcattagccagaaaggaccaggaatggtcagaaaagatggatcagcttgaaaaggagaaaaatattctgacagcccagttacaggaaatgaagaaccagagtatgaatcttttccaaaggagagatgaaatggatgaattagaggggttccagcagcaggaactaagtaaaataaagcacatgcttttaaaaaaagaagaaagtctagggaaaatggaacaagaattggaggcacgaaccagagaacttagtcgtacccaggaggagttgatgaactccartcagatgtcatcagacttaagccagaagctagaagaattgcagagacactactcaacgctggaagagcagagagatcatgtgatagcttcaaaaacaggtgcagaaagtaagatcacagccctggaacaaaaggaacaagagctccaagcactcattcagcagctttccattgatttgcaaaaggtcactgctgaaactcaagagaaagaagacgttatcacacatttgcaagagaaggttgcatccttggagaagagactagaacagaacttatcaggagaagaacacktgcaagaactcctgaaagagaaaacayttgctgagcagaatttggaggataccagacaacagctcttggcagccagaagcagccaggctaaggccattaacaccctggagactcgggtgagagaactggagcagaccttgcaggcctctgaggagcagctccaacagagcaagggcattgtggctgcccaggaaactcagatacaggagctsgctgccgccaaccaggagagcagccatgtgcagcagcaggcccttgctctggagcagcagttcttggagcgcacccaggcgctagaagcccagatagtggccctggagagaaygcgggcagctgaccagaccaccgcagagcaagggatgagacaactggagcaagaaaatgcagcccttaaagaatgcaggaatgaatatgaacgttctttacaaaatcaccaatttgaactaaagaagctgaaggaagaatggagccaaagagaarttgtgagcgtggccatggctcaagccctggaggaggtgcggaagcaaagggaagagttccagcaacaggcagctaacctgacagccataatagacgagaaggaacagaatctgcgggaaaaaaccgaagtgcttctccagaaagagcaggagattctccagctggagcgaggtcacaactctgccctgctgcagatacaccagctgcaggccgagctggaggccctgaggaccctcaaggcggaggaggctgcagtggtcgcggagcaggaggacctgctgaggctgcggggcccattgcaggcygaagcactctcagtcaatgagtcgcacgtgacctcgagggccatgcaggaccctgtgttccagcttccaackgcaggaagaacaccaaatggtgaggttggggccatggatctcacacagctacagaaggagaaacaggacttggagcagcaacttctggagaaaaataagaccataaagcagatgcagcagcggatgctggagctccggaagactctgcagaaggagctgaaaatcagacccgataatgagctcttcgaagtccgggagaaacctggacctgagatggcaaacatggcgccttccgtcacgaataacactgacctgacagatgcccgcgagatcaactttgagtaccttaaacatgtggttttaaaattcatgtcttgtcgcgaatccgaggcttttcatcttataaaagctgtgtcagtgttgctgaacttttcccaagaggaggagaacatgctcaaggaaactctggartataagatgtcatggtttgggtccaaaccagctcccaagggcagcatccggccgtctatctcaaaccctcggataccatggtcctagaggggactacccaaggatggagctccgtgggttgacactttttctgtgaaaagaacactgacacaccagtctgggtgggtttttaatcactgtaactgcagtattttgtacaagtgtctaaacattgtttacaagactaaggcccacttccctgcaggctgacctgaacctcagggggtagctgatcctgtcattctggtcaccaaacaggagggtcctggcactacccagatttccacagtgctgctaatatcccagctccagccagcaccccatctgcacctgaatcctctaacttcacggtagcacttacagctgaagccatcagcatctggcaggcacacctgagtcaccatgtagcgctgctactggaggtagagacggccctttgagatggtgcccagcaggccaaacccacctgcctctgccaggaacagccaactccatgggaactctatgggagtggcttttaaaaattcagatgagttagaagctttttatcccttcctctcaagaaaatattctttcaccctgtctctcaaaccacctagaactttagaggatccatctttaagggycggtgtggatgaatgagaaaatgcacctttctgacagtatctccactttacttaagaaaactagcaaatatatgaaaagacccttagtaccaaawacactcaattgcctttttaatgaatgtacttgtcttggataggttgctggtaaaccattttaaactattttttatagctgaagttcttcactactataaacatgtcttctgtactataaawtccatttaactggtgttcttaaaatcagagcgtccagaggaaattcttcctaaaactaggattcctgttcctttgtcttctcactcgcactctggcactgctccctctgaagtgcagtgggatctcgtgtgctttgtcttgattctgtgctgcgctgccgctgggcgatgcagaccacctgtcttctactgaaggacagtccgctgtctccagtgggggcagcagctgtcccccagcctcgatggagacaytggggcagtctgccttgtctgtggagctgctctctctccctcatcccaccccaaatacttaaaatgacactacacccagacggcgcccagctggctgcagcacttgtagcatgcacatgactctggtagtaaccaacaaaaacttgttttatggattcctcgtttactgaggaaagggaacatgctggttctggaaaagccacaatattgaatctaaaaggaaaccgtttattgtttgatgaaagtttcactggttaaataaaaaactaaattaataactggagcctctaaatttattatccattatccagtgatggaaagttgtatttctcaatcatgcttagggccaaaataggtatataaaatgtgtcacagaaaaacacgcatttgcaacgttaacctaacgaaatttccatgaagaaccaagtcagggcagcatctccttagtcccagctcaggctctctgccttccagaggccgcttctccagtgactaacctcctcctctggctcctccttgcagacagttatcccttgtttagaacacgaatttccatttacctggtgggaacacgaaacaggagtctcttctgttctgcaagtttgatgggtaagaggtagccttttttcaaagtaggatttcctttttcaactgttccaggaaagaatctctaagactgggtagctcacagccagccaaaggcagctacatttccacagaagcccrtccgctgcctccgtggcttctccagccattgaactggtcccacacgcaccccaggccccactcctcggcagtttcaggtgtagctgtggggcccgttcctaggtctgtactcactttagggaggcttcactgactaggctttcctcctgcatgttgaatttccttcagctttaagaggaagagtggaataaatattctaagtgatttaatgcactttgacttgtataaaactttctgtgttagcgacggtatctatagccctttatacgagygatggatcttgagctctccttccatgttgtaaatagggattgtattcttgaaaactgctgtagcaaattcatctgtggtgcaatacactttttgattaaagctcttcaatccagatgc

SEQ ID NO: 448 - DNA, 4716 bp, Homo sapiens
tgagaagcagtttggacccagctgaaaaattttatttatggagacttgtaatcagcctgatatacagagaacactctggactggaaatatagtcagatcctgtgttgccataagcccttggcccacatttaagtgggaatgcagctagcttggatgtctgaaactttgtaggcgcctctgtctgaatcctgaacacaggcaccaggactactgagagctcgtcatctgtgcaggatagccacacagcaaacatgtttgcaaaactgaagaagaaaattgcagaagagactgctgttgctcagaggccaggaggtgctactaggatcccacggtctgtgagcaaggaatcagttgcctcaatgggagctgactcaggagatgactttgcttccgatggaagcagctccagagaagatctttcatcccagcttctgagaaggaatgaacagatacggaagttagaggccagactttctgactatgctgaacaggtccgaaacttgcagaagataaaagagaagcttgaaattgcattagaaaaacaccaggattcttccatgcggaaatttcaagagcagaatgagacattccaagccaacagagccaaaatggcagaaggactggctttggcattagccagaaaggaccaggaatggtcagaaaagatggatcagcttgaaaaggagaaaaatattctgacagcccagttacaggaaatgaagaaccagagtatgaatcttttccaaaggagagatgaaatggatgaattagaggggttccagcagcaggaactaagtaaaataaagcacatgcttttaaaaaaagaagaaagtctagggaaaatggaacaagaattggaggcacgaaccagagaacttagtcgtacccaggaggagttgatgaactccartcagatgtcatcagacttaagccagaagctagaagaattgcagagacactactcaacgctggaagagcagagagatcatgtgatagcttcaaaaacaggtgcagaaagtaagatcacagccctggaacaaaaggaacaagagctccaagcactcattcagcagctttccattgatttgcaaaaggtcactgctgaaactcaagagaaagaagacgttatcacacatttgcaagagaaggttgcatccttggagaagagactagaacagaacttatcaggagaagaacacktgcaagaactcctgaaagagaaaacayttgctgagcagaatttggaggataccagacaacagctcttggcagccagaagcagccaggctaaggccattaacaccctggagactcgggtgagagaactggagcagaccttgcaggcctctgaggagcagctccaacagagcaagggcattgtggctgcccaggaaactcagatacaggagctsgctgccgccaaccaggagagcagccatgtgcagcagcaggcccttgctctggagcagcagttcttggagcgcacccaggcgctagaagcccagatagtggccctggagagaaygcgggcagctgaccagaccaccgcagagcaagggatgagacaactggagcaagaaaatgcagcccttaaagaatgcaggaatgaatatgaacgttctttacaaaatcaccaatttgaactaaagaagctgaaggaagaatggagccaaagagaarttgtgagcgtggccatggctcaagccctggaggaggtgcggaagcaaagggaagagttccagcaacaggcagctaacctgacagccataatagacgagaaggaacagaatctgcgggaaaaaaccgaagtgcttctccagaaagagcaggagattctccagctggagcgaggtcacaactctgccctgctgcagatacaccagctgcaggccgagctggaggccctgaggaccctcaaggcggaggaggctgcagtggtcgcggagcaggaggacctgctgaggctgcggggcccattgcaggcygaagcactctcagtcaatgagtcgcacgtgacctcgagggccatgcaggaccctgtgttccagcttccaackgcaggaagaacaccaaatggtgaggttggggccatggatctcacacagctacagaaggagaaacaggacttggagcagcaacttctggagaaaaataagaccataaagcagatgcagcagcggatgctggagctccggaagactctgcagaaggagctgaaaatcagacccgataatgagctcttcgaagtccgggagaaacctggacctgagatggcaaacatggcgccttccgtcacgaataacactgacctgacagatgcccgcgagatcaactttgagtaccttaaacatgtggttttaaaattcatgtcttgtcgcgaatccgaggcttttcatcttataaaagctgtgtcagtgttgctgaacttttcccaagaggaggagaacatgctcaaggaaactctggartataagatgtcatggtttgggtccaaaccagctcccaagggcagcatccggccgtctatctcaaaccctcggataccatggtcctagaggggactacccaaggatggagctccgtgggttgacactttttctgtgaaaagaacactgacacaccagtctgggtgggtttttaatcactgtaactgcagtattttgtacaagtgtctaaacattgtttacaagactaaggcccacttccctgcaggctgacctgaacctcagggggtagctgatcctgtcattctggtcaccaaacaggagggtcctggcactacccagatttccacagtgctgctaatatcccagctccagccagcaccccatctgcacctgaatcctctaacttcacggtagcacttacagctgaagccatcagcatctggcaggcacacctgagtcaccatgtagcgctgctactggaggtagagacggccctttgagatggtgcccagcaggccaaacccacctgcctctgccaggaacagccaactccatgggaactctatgggagtggcttttaaaaattcagatgagttagaagctttttatcccttcctctcaagaaaatattctttcaccctgtctctcaaaccacctagaactttagaggatccatctttaagggycggtgtggatgaatgagaaaatgcacctttctgacagtatctccactttacttaagaaaactagcaaatatatgaaaagacccttagtaccaaawacactcaattgcctttttaatgaatgtacttgtcttggataggttgctggtaaaccattttaaactattttttatagctgaagttcttcactactataaacatgtcttctgtactataaawtccatttaactggtgttcttaaaatcagagcgtccagaggaaattcttcctaaaactaggattcctgttcctttgtcttctcactcgcactctggcactgctccctctgaagtgcagtgggatctcgtgtgctttgtcttgattctgtgctgcgctgccgctgggcgatgcagaccacctgtcttctactgaaggacagtccgctgtctccagtgggggcagcagctgtcccccagcctcgatggagacaytggggcagtctgccttgtctgtggagctgctctctctccctcatcccaccccaaatacttaaaatgacactacacccagacggcgcccagctggctgcagcacttgtagcatgcacatgactctggtagtaaccaacaaaaacttgttttatggattcctcgtttactgaggaaagggaacatgctggttctggaaaagccacaatattgaatctaaaaggaaaccgtttattgtttgatgaaagtttcactggttaaataaaaaactaaattaataactggagcctctaaatttattatccattatccagtgatggaaagttgtatttctcaatcatgcttagggccaaaataggtatataaaatgtgtcacagaaaaacacgcatttgcaacgttaacctaacgaaatttccatgaagaaccaagtcagggcagcatctccttagtcccagctcaggctctctgccttccagaggccgcttctccagtgactaacctcctcctctggctcctccttgcagacagttatcccttgtttagaacacgaatttccatttacctggtgggaacacgaaacaggagtctcttctgttctgcaagtttgatgggtaagaggtagccttttttcaaagtaggatttcctttttcaactgttccaggaaagaatctctaagactgggtagctcacagccagccaaaggcagctacatttccacagaagcccrtccgctgcctccgtggcttctccagccattgaactggtcccacacgcaccccaggccccactcctcggcagtttcaggtgtagctgtggggcccgttcctaggtctgtactcactttagggaggcttcactgactaggctttcctcctgcatgttgaatttccttcagctttaagaggaagagtggaataaatattctaagtgatttaatgcactttgacttgtataaaactttctgtgttagcgacggtatctatagccctttatacgagygatggatcttgagctctccttccatgttgtaaatagggattgtattcttgaaaactgctgtagcaaattcatctgtggtgcaatacactttttgattaaagctcttcaatccagatgc

SEQ ID NO: 449 - DNA, 4371 bp, Homo sapiens
gcagaggccgggctgagacgtggccaggggaacacggctggctgtccaggccgtcggggcggcagtagggtccctagcacgtccttgccttcttgggagctccaagcggcgggagaggcaggcgtcagtggctgcgcctccatgcctgcgcgcggggcgggacgctgatggagcgcgccatcagcccggggctgctggtacgggcgctgctgctgctgctgctgctggggctcgcggcaaggacggtggccgcggggcgcgcccgtggcctcccagcgccgacggcggaggcggcgttcggcctcggggcggccgctgctcccacctcaacgacgcgagtaccggcggcgggcgccgtggctgcggccgaggtgactgtggaggacgctgaggcgctgccggcagccgcgggagagcaggagcctcggggtccggaaccagacgatgagacakagttgcgaccgcgcggcaggtcattagtaattatcagcactttagatgggagaattgctgccttggatcctgaaaatcatggtaaaaagcagtgggatttggatgtgggatccggttscttggtgtcatccagccttagcaaaccagaggtatttgggaataagatgatcattccttccctggatggagccctcttccagtgggaccragaccgtgaaagcatggaaacagttcctttcacagttgaatcacttcttgaatcttcttataaatttggagatgatgttgttttggttggaggaaaatctctgactacatatggactcagtgcatatagtggaaaggtgaggtatatctgttcagctctgggttgtcgccaatgggatagtgacgaaatggaacaagaggaagacatcctgcttctacagcgtacccaaaaaactgttagagctgtcggacctcgcagtggcaatgagaagtggaatttcagtgttggccactttgaacttcggtatattccagacatggaaacgagagccggatttattgaaagcacctttaagcccaatgagaacacagaagagtctaaaattatttcagatgtggaagaacaggaagctgccataatggacatagtgataaaggtttcggttgctgactggaaagttatggcattcagtaagaagggaggacatctggaatgggagtaccagttttgtactccaattgcatctgcctggttacttaaggatgggaaagtcattcccatcagtctttttgatgatacaagttatacatctaatgatgatgttttagaagatgaagaagacattgtagaagctgccagaggagccacagaaaacagtgtttacttgggattctccttccagaactcctgtcttggtaggatctgatgaatttgacaaatgtctcagtaatgataagttttctcatgaagaatatagtaatggtgcactttcaatcttgcagtatccatatgataatggttattatctaccatactacaagagggagaggaacaaacgaagcacacagattacagtcagattcctcgacaacccacattacaacaagaatatccgcaaaaaggatcctgttcttcttttacactggtggaaagaaatagttgcaacgattttgttttgtatcatagcaacaacgtttattgtgcgcaggcttttccatcctcatcctcacaggcaaaggaaggagtctgaaactcagtgtcaaactgaaaataaatatgwttctgtaagtggtgaagccaatgacagtagctggaatgacataaaaaactctggatatatatcacratatctaactgattttgagccaattcartgcctgggacgtggtggctttggagttgtttttgaagctaaaaacaaagtagatgactgcaattatgctatcaagaggatccgtctccccaatagggaattggctcgggaaaaggtaatgcgagaagttaaagccttagccaagcttgaacacccgggcattgttagatatttcaatgcctggctcgaagcaccaccagagaagtggcaagaaaagatggatgaaatttggctgaaagatgaaagcacagactggccactcagctctcctagcccaatggatgcaccatcagttaaaatacgcagaatggatcctttckctacaaaagaacatattgaaatcatagctccttcaccacaaagaagcaggtctttttcagtagggattycctgtgaccagacaagttcatctgagagccagttctcaccactggaattctcaggaatggaccatgaggacatcagtgagtcagtggatgcagcatacaacctccaggacagttgccttacagactgtgatgtggaagatgggactatggatggcaatgatgaggggcactcctttgaactttgtccttctgaagcttctccttatgtaaggtcaagggagagaacctcctcttcaatagtatttgaagattctggctgtgataatgcttccagtaaagaagagccgaaaactaatcgattgcatattggcaaccattgtgctaataaactaactgctttcaagcccaccagtagcaaatcttcttctgaagctacattgtctatttctcctccaagaccaaccactttaagtttagatctcactaaaaacaccacagaaaaactccagcccagtycaccaaaggtgtatctttacattcaaatgcagctgtgcagaaaagaaaacctcaaagactggatgaatggacgatgtaccatagaggagagagagaggagcgtgtgtctgcacatcttcctgcagatcgcagaggcagtggagtttcttcacagtaaaggactgatgcacagggacctcaagccatccaacatattctttacaatggatgatgtggtcaaggttggagactttgggttagtgactgcaatggaccaggatgaggaagagcagacggttctgaccccaatgccagcttatgccagacacacaggacaagtagggaccaaactgtatatgagcccagagcagattcatggaaacagctattctcataaagtggacatcttttctttaggcctgattctatttgaattgctgtatccattcagcactcagatggagagagtcaggaccttaactgatgtaagaaatctcaaatttccaccattatttactcagaaatatccttgtgagtacgtgatggttcaagacatgctctctccatcccccatggaacgacctgaagctataaacatcattgaaaatgctgtatttgaggacttggactttccaggaaaaacagtgctcagacagaggtctcgctccttgagttcrtcgggaacaaaacattcaagacagtccaacaactcccatagccctttgccaagcaattagccttaagttgtgctagcaaccctaataggtgatgcagataatagcctacttcttagaatatgcctgtccaaaattgcagacttgaaaagtttgttcttcgctcaatttttttgtggactactttttttatatcaaatttaagctggatttgggggcataacctaatttgagccaactcctgagttttgctatacttaaggaaagggctatctttgttctttgttagtctcttgaaactggctgctggccaagctttatagccctcaccatttgcctaaggaggtagcagcaatcccctaatatatatatatagtgagaactaaaatggatatatttttataatgcagaagaaggaaagtccccctgtgtggtaactgkattgktctagaaatatgctttctagagatatgatgattttgaaactgatttctagaaaaagctgactccatttttgtccctggcgggtaaattaggaatctgcactattttggaggacaagtagcacaaactgtataacggtttatgtccgtagttttatagtcctatttgtagcattcaatagctttattccttagatggttctagggtgggtttacagctttttgtacttttacctccaataaagggaaaatgaagctttttatgtaaattggttgaaaggtctagttttgggaggaaaaaagccgtagtaagaaatggatcatatatattacaactaacttcttcaactatggactttttaagcctaatgaaatcttaagtgtcttatatgtaatcctgtaggttggtacttcccccaaactgattataggtaacagtttaatcatctcacttgctaacatgtttttatttttcactgtaaatatgtttatgttttatttataaaaattctgaaatcaatccatttgggttggtggtgtacagaacacacttaagtgtgttaacttgtgacttctttcaagtctaaatgatttaataaaactttttttaaattaa

SEQ ID NO: 450 - DNA, 4379 bp, Homo sapiens
gcagaggccgggctgagacgtggccaggggaacacggctggctgtccaggccgtcggggcggcagtagggtccctagcacgtccttgccttcttgggagctccaagcggcgggagaggcaggcgtcagtggctgcgcctccatgcctgcgcgcggggcgggacgctgatggagcgcgccatcagcccggggctgctggtacgggcgctgctgctgctgctgctgctggggctcgcggcaaggacggtggccgcggggcgcgcccgtggcctcccagcgccgacggcggaggcggcgttcggcctcggggcggccgctgctcccacctcaacgacgcgagtaccggcggcgggcgccgtggctgcggccgaggtgactgtggaggacgctgaggcgctgccggcagccgcgggagagcaggagcctcggggtccggaaccagacgatgagacakagttgcgaccgcgcggcaggtcattagtaattatcagcactttagatgggagaattgctgccttggatcctgaaaatcatggtaaaaagcagtgggatttggatgtgggatccggttscttggtgtcatccagccttagcaaaccagaggtatttgggaataagatgatcattccttccctggatggagccctcttccagtgggaccragaccgtgaaagcatggaaacagttcctttcacagttgaatcacttcttgaatcttcttataaatttggagatgatgttgttttggttggaggaaaatctctgactacatatggactcagtgcatatagtggaaaggtgaggtatatctgttcagctctgggttgtcgccaatgggatagtgacgaaatggaacaagaggaagacatcctgcttctacagcgtacccaaaaaactgttagagctgtcggacctcgcagtggcaatgagaagtggaatttcagtgttggccactttgaacttcggtatattccagacatggaaacgagagccggatttattgaaagcacctttaagcccaatgagaacacagaagagtctaaaattatttcagatgtggaagaacaggaagctgccataatggacatagtgataaaggtttcggttgctgactggaaagttatggcattcagtaagaagggaggacatctggaatgggagtaccagttttgtactccaattgcatctgcctggttacttaaggatgggaaagtcattcccatcagtctttttgatgatacaagttatacatctaatgatgatgttttagaagatgaagaagacattgtagaagctgccagaggagccacagaaaacagtgtttacttgggtcttttagattctccttccagaactcctgtcttggtaggatctgatgaatttgacaaatgtctcagtaatgataagttttctcatgaagaatatagtaatggtgcactttcaatcttgcagtatccatatgataatggttattatctaccatactacaagagggagaggaacaaacgaagcacacagattacagtcagattcctcgacaacccacattacaacaagaatatccgcaaaaaggatcctgttcttcttttacactggtggaaagaaatagttgcaacgattttgttttgtatcatagcaacaacgtttattgtgcgcaggcttttccatcctcatcctcacaggcaaaggaaggagtctgaaactcagtgtcaaactgaaaataaatatgwttctgtaagtggtgaagccaatgacagtagctggaatgacataaaaaactctggatatatatcacratatctaactgattttgagccaattcartgcctgggacgtggtggctttggagttgtttttgaagctaaaaacaaagtagatgactgcaattatgctatcaagaggatccgtctccccaatagggaattggctcgggaaaaggtaatgcgagaagttaaagccttagccaagcttgaacacccgggcattgttagatatttcaatgcctggctcgaagcaccaccagagaagtggcaagaaaagatggatgaaatttggctgaaagatgaaagcacagactggccactcagctctcctagcccaatggatgcaccatcagttaaaatacgcagaatggatcctttckctacaaaagaacatattgaaatcatagctccttcaccacaaagaagcaggtctttttcagtagggattycctgtgaccagacaagttcatctgagagccagttctcaccactggaattctcaggaatggaccatgaggacatcagtgagtcagtggatgcagcatacaacctccaggacagttgccttacagactgtgatgtggaagatgggactatggatggcaatgatgaggggcactcctttgaactttgtccttctgaagcttctccttatgtaaggtcaagggagagaacctcctcttcaatagtatttgaagattctggctgtgataatgcttccagtaaagaagagccgaaaactaatcgattgcatattggcaaccattgtgctaataaactaactgctttcaagcccaccagtagcaaatcttcttctgaagctacattgtctatttctcctccaagaccaaccactttaagtttagatctcactaaaaacaccacagaaaaactccagcccagtycaccaaaggtgtatctttacattcaaatgcagctgtgcagaaaagaaaacctcaaagactggatgaatggacgatgtaccatagaggagagagagaggagcgtgtgtctgcacatcttcctgcagatcgcagaggcagtggagtttcttcacagtaaaggactgatgcacagggacctcaagccatccaacatattctttacaatggatgatgtggtcaaggttggagactttgggttagtgactgcaatggaccaggatgaggaagagcagacggttctgaccccaatgccagcttatgccagacacacaggacaagtagggaccaaactgtatatgagcccagagcagattcatggaaacagctattctcataaagtggacatcttttctttaggcctgattctatttgaattgctgtatccattcagcactcagatggagagagtcaggaccttaactgatgtaagaaatctcaaatttccaccattatttactcagaaatatccttgtgagtacgtgatggttcaagacatgctctctccatcccccatggaacgacctgaagctataaacatcattgaaaatgctgtatttgaggacttggactttccaggaaaaacagtgctcagacagaggtctcgctccttgagttcrtcgggaacaaaacattcaagacagtccaacaactcccatagccctttgccaagcaattagccttaagttgtgctagcaaccctaataggtgatgcagataatagcctacttcttagaatatgcctgtccaaaattgcagacttgaaaagtttgttcttcgctcaatttttttgtggactactttttttatatcaaatttaagctggatttgggggcataacctaatttgagccaactcctgagttttgctatacttaaggaaagggctatctttgttctttgttagtctcttgaaactggctgctggccaagctttatagccctcaccatttgcctaaggaggtagcagcaatcccctaatatatatatatagtgagaactaaaatggatatatttttataatgcagaagaaggaaagtccccctgtgtggtaactgkattgktctagaaatatgctttctagagatatgatgattttgaaactgatttctagaaaaagctgactccatttttgtccctggcgggtaaattaggaatctgcactattttggaggacaagtagcacaaactgtataacggtttatgtccgtagttttatagtcctatttgtagcattcaatagctttattccttagatggttctagggtgggtttacagctttttgtacttttacctccaataaagggaaaatgaagctttttatgtaaattggttgaaaggtctagttttgggaggaaaaaagccgtagtaagaaatggatcatatatattacaactaacttcttcaactatggactttttaagcctaatgaaatcttaagtgtcttatatgtaatcctgtaggttggtacttcccccaaactgattataggtaacagtttaatcatctcacttgctaacatgtttttatttttcactgtaaatatgtttatgttttatttataaaaattctgaaatcaatccatttgggttggtggtgtacagaacacacttaagtgtgttaacttgtgacttctttcaagtctaaatgatttaataaaactttttttaaattaa

SEQ ID NO: 451 - DNA, 2239 bp, Homo sapiens
ccggttccggggacgggcaacagggactcagggaccagaaggcggctgcaggacgcgaccgagcaggaccccaggcccgggaacgacgtcgcgagcgctgagactgccgggcctcccagcccatcwggcattcgagcgcaggaccgggcgccccggcaccgccgcgcgccacccgctaggatgccggtggccccagcgccctcagccgacggaggagccctttttcaacgccctcgctggagtctggcctgcacgccttgctgaatgaagccggaacctcagccccgcttccctttgaaatgaatgttcctggggcgccctctcgtggattttggagctaatcgtctgtgaatgccaagtgatggcaactgccctcccgccgcgtctccagccggtgcgggggaacgagaccctgcgggagcattaccagtacgtggggaagttggcgggcaggctgaaggaggcctccgagggcagcacgctcaccaccgtgctcttcttggtcatctgcagcttcatcgtcttggagaacctgatggttttgattgccatctggaaaaacaataaatttcacaaccgcatgtactttttcattggcaacctggctctctgcgacctgctggccggcatcgcttacaaggtcaacattctgatgtctggcaagaagacgttcagcctgtctcccacggtctggttcctcagggagggcagtatgttcgtggcccttggggcgtccacctgcagcttactggccatcgccatcgagcggcacttgacaatgatcaaaatgaggccttacgacgccaacaagaggcaccgcgtcttcctcctgatcgggatgtgctggctcattgccttyaygctgggcgccctgcccattctgggctggaactgcctgcacaatctccctgactgctctaccatcctgcccctctactccaagaagtacattgccttctgcatcagcatcttcacggccatcctggtgacsatcgtgatcctctacgcacgcatctacttcctggtgaagtccagcagccgtaaggtggccaaccacaacaactcggagcggtccatggcactgctgcrgaccgtggtgattgtggtgagcgtgttcatcgcctgctggtccccactcttcatcctcttcctcattgatgtggcctgcagggtgcaggcgtgccccatcctcttcaaggctcagtggttcatcgtgttggctgtgctcaactccgccatgaacccggtcatctacacgctggccagcaaggagatgcggcgggccttcttccgtctggtctgcaactgcctggtcaggggacggggggcccgcgcctcacccatccagcctgcgctcgacccaagcagaagtaaatcaagcagcagcaacaatagcagccactctccgaaggtcaaggaagacctgccccacacagccccctcatcctgcatcatggacaagaacgcagcacttcagaatgggatcttctgcaactgatcgtctccatgcgccctgctctgcggctgtgttcttatttattgcatgcgtcgcttccacaggggcccctcaagagctgtgactcgggagagctaccttactttgaccaacagcctgcccagtgtggatgtctcttacagagggggcccaaggaatcaccaccccgcttcagtgtaaacaacgtgccttgtccactttgggctccagagtctttcagatgtactaagctgctgacatcatccactgccttctgctgcatcctagacaccctccctgttgttcacagagagggaaggtcgtgggccacacaatgctgtgtgaccctctccgtgtgcctctgaatggtgttttgatgattttacactacatttcctgtgcgtagaatggatgcttgtatattcgtacatctctatgttacacagaatttgtgttgcaggtgtttgccatgtggtacctacatagaatctccatacaacacacaggtaacaggttatacaagtggattcagactgaacccccagtacaaggacattgttttgaactaggtggacatgccatccctggtctccttagactgacatgattctcatgttaaccaagttttaaaagttcaaattccccaaaaaggcttgtccaaggctggccccagatgtgtgggtctgacccacaccagccctgtgtcctgtcctttcagtcatttgtccctgcgtaattttaatcgtattccaaagcccaattatg

SEQ ID NO: 452 - DNA, 3598 bp, Homo sapiens
ccgcacgcacagcgcacctggcgccgtctgccctccgcagcgctcgcccctttctctgggaggacaacctgctgacccgaagccaggatggatggcagatggcaatgttcctgctgggcctggttcctgctggttctggcagttgtagctggggacacagtgtcaaccgggtccrcggacaacagcccaacatccaatagcctggaggggggcaccgacgccacggccttctggtggggggagtggaccaagtggacggcgtgttcccgcagttgcgggggtggggtgacatcccaggagcggcactgcctgcagcagaggaggaagtccgtcccgggccccgggaacaggacctgcacgggcacrtccaagcggtaccagctctgcagagtgcaggagtgtccgccggacgggaggagcttccgcgaggagcagtgcgtctccttcaactcccacgtgtacaacgggcggacgcaccagtggaagcctctgtacccggatgactatgtccacatctccagcaaaccgtgtgacctgcactgtaccaccgtggacggccagcggcagctcatggtccccgcccgcgacggcacatcctgcaagctcactgacctgcgaggggtttgcgtgtctggaaaatgtgagcccatcggctgtgacggggtgcttttctccacccacacactggacaagtgtggcatctgccagggggacggtagcagctgcacccacgtgacgggcaactatcgcaaggggaatgcccaccttggttactctctggtgacccacatcccggctggtgcccgagacatccagattgtagagaggaagaagtccgctgacgtgctagctcttgcagaygaagctggctactacttcttcaacggcaactacaaggtggacagccccaagaacttcaacatcgcwggcacggtggtcaagtacmggcggcccatggatgtctatgagaccggaatcgagtacatygtggcacaggggcccaccaaccagggcctgaatgtcatggtgtggaaccagaacggcaaaagcccctccatcaccttcgagtacacgctgctgcagccgccacacgagagccgcccccagcccatctactatggcttctccgagagcgctgagagccagggcctggacggggccgggctgatgggcttcrtcccgcacaacggctccctctacggccaggcctcctcagagcggctgggcctggacaaccggctgttcggccacccgggcctggacatggagctgggccccagccagggccaggagaccaacgaggtgtgcgagcaggccggcggcggggcctgcgaggggccccccaggggcaagggcttccgagaccgcaacgtcacggggactcctctcaccggggacaaggatgacgaagaggttgacacccacttcgcctcccaggagttcttctcggctaacgccatctctgaccagctgctgggcgcaggctctgacttgaaggacttcaccctcaatgagactgtgaacagcatctttgcacagggcgccccaaggagctccctggccgagagcttcttcgtggattatgaggagaacgagggggctggcccttacctgctcaacgggtcctacctggagctgagcagygacagggttgccaacagctcctccgaggccccattccccaacgttagcaccagcctgctcacctcggccgggaacaggactcayaaggccaggaccaggcccaaggcgcgcaagcaaggcgtgagtcccgcggacatgtaccggtggaagctctcgtcccacgagccctgcagtgccacctgcaccacaggggtcatgtctgcgtacgccatgtgtgtccgctatgatggcgtcgaggtggatgacagctactgtgacgccctgacccgtcccgagcctgtccacgagttctgcgctgggagggagtgccagcccaggtgggagacgagcagctggagcgagtgttcgcgcacctgcggagagggctaccagttccgcgtcgtgcgctgctggaagatgctctcgcccggcttcgacagctccgtgtacagcgacctgtgcgaggcagccgaggccgtgcggcccgaggaacgcaagacctgccggaaccccgcctgcgggccccagtgggagatgtcggagtggtccgagtgcactgccaagtgtggggagcgcagtgtggtgaccagggacatccgctgctcggaggatgagaagctgtgtgaccccaacaccaggcctgtaggggagaagaactgcacgggcccgccctgtgaccggcagtggaccgtctccgactggggaccgtgcagtggaagctgcgggcaaggccgcaccatcaggcacgtgtactgcaagaccagcgacggacgggtrgtacctgagtcscagtgccagatggagaccaagcctctggccatccacccctgtggggacaaaaactgtcccgcccactggctggcccaggactgggagcggtgcaacaccacctgcgggcgyggggtcaagaagcggctggtgctctgcatggagctggccaacgggaagccgcagacgcgcagtggccccgagtgcgggctcgccaagaagcctcccgaggagagcacgtgtttcgagaggccctgcttcaagtggtacaccagcccctggtcagagtgcaccaagacctgcggggtrggcgtgaggatgcgagacgtcaagtgctaccaggggaccgacatcgtccgtggttgcgatccgttggtgaagcccgttggcagacaggcctgtgatctgcagccctgccccacggagcccccagatgacagctgccaggaccagccaggcaccaactgtgccctggccatcaaagtgaacctctgcgggcactggtactacagcaaggcgtgctgccgctcctgcaggcccccccactcctaggcccggcagctgcagccccttccagatgaagaccaagcgcccctcctggggctgctgcagcttctggggsctccacagacccccctcctgcrgggcacgctggcctaagagacgtggcactgagcctcggctgtcgagaggggacttcccacggcccrtggacctttgtgctcctggggcagagcctccggcacccagtggcctcccccagacagagccacccctgccgtgggaacctgtccgtgttcctgcgtggatcctgtgtttgtggctcccactccccagccccccagcagcccccagccgaggggcccagggcccacagccagcggtggaggtgtcttgctccgggcccgtagcccacgccctctctgggtggcagggccttctgaaggaaacttgcaggcgagcccaacgtggtggggggccttcctccctcagaggccatggggtgagaggggctcaggcagccaaggaggcccaggcgtgctccctcttatggagcccctcccatggagctctcttcccgccgcactttytaccccgggcagaggcgcttgcccacgggacgtttggggatggacctcggcccccgcccctgcagtcagcgtcagtgctcatctacgttaataaagtggtcctatttatggcggca

SEQ ID NO: 453 - DNA, 4068 bp, Homo sapiens
cactggcggagaaaatccccttcttttttttctctctctttttttctttttgagacggaatctcactctttcacccagactggagggcagcggcgagatctcrgctcactgcaacctccacctcccaggttcaagcaattctcctgcctcagccttcygagtagctgggattacaggtgcccgccaccacgcccagctaatttttgtatttttagtagagacaggattttaccatgttggccatgctggtctcaaactcctgacctcgtgtgatccccctgcttcagcctctcaaactgctgggattataggcatgagccactgcgcctggccaacaatccccttctaaaggcaggtggtgtctccagcaccagggccatacggctgcaacacccctacaagtgccgggtctgccagacaaccacgaccaactagtcccagataaccttgaggcctgggcactggctgggccccgagggctcttcccaaagcgtaccctggtcatctggaagaggatcggagctggcctggtggtgacagtggccttgcytcctaggatggatggcagatggcaatgttcctgctgggcctggttcctgctggttctggcagttgtagctggggacacagtgtcaaccgggtccrcggacaacagcccaacatccaatagcctggaggggggcaccgacgccacggccttctggtggggggagtggaccaagtggacggcgtgttcccgcagttgcgggggtggggtgacatcccaggagcggcactgcctgcagcagaggaggaagtccgtcccgggccccgggaacaggacctgcacgggcacrtccaagcggtaccagctctgcagagtgcaggagtgtccgccggacgggaggagcttccgcgaggagcagtgcgtctccttcaactcccacgtgtacaacgggcggacgcaccagtggaagcctctgtacccggatgactatgtccacatctccagcaaaccgtgtgacctgcactgtaccaccgtggacggccagcggcagctcatggtccccgcccgcgacggcacatcctgcaagctcactgacctgcgaggggtttgcgtgtctggaaaatgtgagcccatcggctgtgacggggtgcttttctccacccacacactggacaagtgtggcatctgccagggggacggtagcagctgcacccacgtgacgggcaactatcgcaaggggaatgcccaccttggttactctctggtgacccacatcccggctggtgcccgagacatccagattgtagagaggaagaagtccgctgacgtgctagctcttgcagaygaagctggctactacttcttcaacggcaactacaaggtggacagccccaagaacttcaacatcgcwggcacggtggtcaagtacmggcggcccatggatgtctatgagaccggaatcgagtacatygtggcacaggggcccaccaaccagggcctgaatgtcatggtgtggaaccagaacggcaaaagcccctccatcaccttcgagtacacgctgctgcagccgccacacgagagccgcccccagcccatctactatggcttctccgagagcgctgagagccagggcctggacggggccgggctgatgggcttcrtcccgcacaacggctccctctacggccaggcctcctcagagcggctgggcctggacaaccggctgttcggccacccgggcctggacatggagctgggccccagccagggccaggagaccaacgaggtgtgcgagcaggccggcggcggggcctgcgaggggccccccaggggcaagggcttccgagaccgcaacgtcacggggactcctctcaccggggacaaggatgacgaagaggttgacacccacttcgcctcccaggagttcttctcggctaacgccatctctgaccagctgctgggcgcaggctctgacttgaaggacttcaccctcaatgagactgtgaacagcatctttgcacagggcgccccaaggagctccctggccgagagcttcttcgtggattatgaggagaacgagggggctggcccttacctgctcaacgggtcctacctggagctgagcagygacagggttgccaacagctcctccgaggccccattccccaacgttagcaccagcctgctcacctcggccgggaacaggactcayaaggccaggaccaggcccaaggcgcgcaagcaaggcgtgagtcccgcggacatgtaccggtggaagctctcgtcccacgagccctgcagtgccacctgcaccacaggggtcatgtctgcgtacgccatgtgtgtccgctatgatggcgtcgaggtggatgacagctactgtgacgccctgacccgtcccgagcctgtccacgagttctgcgctgggagggagtgccagcccaggtgggagacgagcagctggagcgagtgttcgcgcacctgcggagagggctaccagttccgcgtcgtgcgctgctggaagatgctctcgcccggcttcgacagctccgtgtacagcgacctgtgcgaggcagccgaggccgtgcggcccgaggaacgcaagacctgccggaaccccgcctgcgggccccagtgggagatgtcggagtggtccgagtgcactgccaagtgtggggagcgcagtgtggtgaccagggacatccgctgctcggaggatgagaagctgtgtgaccccaacaccaggcctgtaggggagaagaactgcacgggcccgccctgtgaccggcagtggaccgtctccgactggggaccgtgcagtggaagctgcgggcaaggccgcaccatcaggcacgtgtactgcaagaccagcgacggacgggtrgtacctgagtcscagtgccagatggagaccaagcctctggccatccacccctgtggggacaaaaactgtcccgcccactggctggcccaggactgggagcggtgcaacaccacctgcgggcgyggggtcaagaagcggctggtgctctgcatggagctggccaacgggaagccgcagacgcgcagtggccccgagtgcgggctcgccaagaagcctcccgaggagagcacgtgtttcgagaggccctgcttcaagtggtacaccagcccctggtcagagtgcaccaagacctgcggggtrggcgtgaggatgcgagacgtcaagtgctaccaggggaccgacatcgtccgtggttgcgatccgttggtgaagcccgttggcagacaggcctgtgatctgcagccctgccccacggagcccccagatgacagctgccaggaccagccaggcaccaactgtgccctggccatcaaagtgaacctctgcgggcactggtactacagcaaggcgtgctgccgctcctgcaggcccccccactcctaggcccggcagctgcagccccttccagatgaagaccaagcgcccctcctggggctgctgcagcttctggggsctccacagacccccctcctgcrgggcacgctggcctaagagacgtggcactgagcctcggctgtcgagaggggacttcccacggcccrtggacctttgtgctcctggggcagagcctccggcacccagtggcctcccccagacagagccacccctgccgtgggaacctgtccgtgttcctgcgtggatcctgtgtttgtggctcccactccccagccccccagcagcccccagccgaggggcccagggcccacagccagcggtggaggtgtcttgctccgggcccgtagcccacgccctctctgggtggcagggccttctgaaggaaacttgcaggcgagcccaacgtggtggggggccttcctccctcagaggccatggggtgagaggggctcaggcagccaaggaggcccaggcgtgctccctcttatggagcccctcccatggagctctcttcccgccgcactttytaccccgggcagaggcgcttgcccacgggacgtttggggatggacctcggcccccgcccctgcagtcagcgtcagtgctcatctacgttaataaagtggtcctatttatggcggca

SEQ ID NO: 454 - DNA, 2555 bp, Homo sapiens
ccataagccctcgacgagacgccggcatggggaggagtctgaccgtgaggcaacaagcctgggttccaggtccagctctgccctgggcccccagggttggccctctctgccctggccttggtttccccatctggaagtggagggcgcccgcctcacctggttagaggggccgcttgtgaagccatcagattgcagggcccgtgcagctgcactgccrtcgggacgtctgtgtgtttaccaggctccccgtcctggggcccggttggtttggaaggcgcggggctggatgagccagagggcacggccagtgccgaggatgtaggccttggcttctccctggctcctaccacgagcgctgggcatctcaggctgttgatggagaagggggcggatgacagccgggaccgtggtcatcaccgggggcatcttggcgactgtgattttgctctgcatcatcgctgttctgtgctactgccggctccagtactactgctgcaagaaggacgagtcggaggaggacgaggaggaaccagacttcgccgttcactcgcacctgcccccgctgcactccaaccgcaacctggtgctgaccaacgggccggcgctctaccccaycgcctccacctccttcagccagaagtccccgcaggcccgcgccctctgccgcagctgctcccactgcgagccccccaccttcttcctgcaggagccgccggaggaggaagaggacgtgctgaacggcggggagcgcgtgctctacaagagcgtgagccaggaggacgtggagctgccccsgggggsyttcgggggcctgcaggckctcaaccccaaccgcctctcagccatgcgggaggccttcgccaggagccgcagcatcarcaccgacgtgtgacctgggcccgcccccgggatcctggccttgaaggtcctgagacaatggggggattcctttggcacacccacctggccccaggccccaagtggggcttggctgagccctcctggaatccctgycctcaggggaggcccagctggggcctggrgctagaaggaccaggtgaccatacagccggctgggcatgcaccagggctctcaggcacagaggccaccgttactcctgatgattctgtctcagacccaacaacctggccttcccaggaggtctccatgtgtcaccccctccctgggtctcacccttctcacctgctcaaggaagggatgacctcagtgaggcccagggccctgcagcaaggccctccctggcaattgcaraccaaggattctgctcctccaccttgaactccagcctctttctctccatttttccctctctctcccctacccgtctctccctctctctcacacacacactcttccgggttcaagggccaagygtctgcctaggctgagacacgtgctgagctccctgaagatggaccrgctgccccctagaagggagactttcaggggcatcagggcccttgggatgctcygccctgaccagctttttggtggcagagggaggcacggggagagggagaggccatgtcgcagtccccctgccgtgggagaggcaacgyggaaatgtatagacccagtgctcagccagaaacagggccagcaagcggcagtgaacggaggcagcccggggctcgtcagggtgggcagagccatggcccaggggttgaaaacccccgagttccccrtgagacttggctggcccttcccacccctgggcctcagtctccccatcttgtgtgatgaggagagaccctgaggacagaggtcttcaggctgtgrgtctcaacaggaactgagatccccaagggagacagagytgcaggtcacctcccctacctgcttctcagcaggaccyaggaggcctggcccagctcctggtggaccccaagcagccagagcctactgctgccatctgaagacctcatctgagcccactttccaccaagcgcccacccaggctgaggtctcctgggaattctcacccgctctcctgctgctaaggaaatgacgtcaatggctaccccagagaaatgccccacatcccaggacaccagccatcaggaaggcagctcttcctcacccagaaagaggcaattatttcctctcagcagcctggccccaggagcccccttccctctctggggctctgcctctccttttgtgccctgccatggagccccagggccggggcagcccctctctgcccagggaaggcaccgycctcaaagacaaggcttggccgggcagtgrccttccctgagcggaggggtggcttgagcaggacacttcttgcccttactcaaaaacgaaatsgccagtttccagaggcgtcgggggaacggctgacgaagwcacaatcgttatgttctcaattgttttcctcctcttactttstctcctgcctsgtttggacaggccagtggcattcgcccttgaggtccctcgcagccccggcccccygggcccgcccacacctctggcttcctctgtgcatcctgtgaagtctgtttctgatgcgttggcrtggggggtg

SEQ ID NO: 455 - DNA, 888 bp, Homo sapiens
atggggggctttgggactaacatctcaagtactaccagcttcactctaacaggcttccctgagatgaagggtctggagcactggctggctgcccttctgctgctgctttrtgctatttccttcytgggcaacatcctcatcctctttatcataaaggaagagcagagcttgcaccagccarygtactacttcctgtctcttttttctgttaatgacctgggtgtgtccttttctacattgcccactgtactggctgctgtgtgttttcatgccccagagamaacttttgatgcctgcctggcccagaygttcttcatccacttttcctcctggacagagtttggcatcctactggccatgagttttgaccactatgtggccatctgtaacccgctgcgctatgccacagtgctcactgatgtccgtgtggcccacaatggcatatccattgtcatccgcagcttctgcatrgtattcccacttcccttcctccygaasagactgcctttctgtaaggccagtgtggtactggcccattcctactgtctgcatgcagacctgattcggctgccctgkggagacactaccatcaacagcatgtatggcctgttcattgtcatctctgcctttggtgtagattcactgctcatcctcctctcctatgtgctcattctacattctgtgctggccattgcctccaggggtgagaggcttaagacactcaayacatgtgtgtcacatatctatgcagtgctgatcttctatgtgcctatggttagtgtgtccatggttcatcgatttgggaggcatgctcctgaatatgtgcacaagttcatgtctctttgtacctccaatgctctacccaattatctattccatcaagactaa

SEQ ID NO: 456 - DNA, 1741 bp, Homo sapiens
crtgtttttccagatggcccccractggacgagagggattgtccgggaaactggacgtggccagaaaattcccagcagactccaatgtgccaggcttgggggaacccattgcccgagctcaagtgtctaaaggatggcactttcccactgcccatcggggaatcagtgactgtcactcragatcttgagggcacctacctctgtcgggccaggagcactcaaggggaggtcacccgcragccccccggtatgagattgtcatcatcactgtggtagcagccgcagtcataatgggcactgcaggcctcagcacgtacctctataaccgccagcggaagatcaagaaatacagactacaacaggcccaaaaagggacccccatgaaaccgaacacacaagccacgcctccctgaacctatcccrggacagggcctcttcctcggccttcccatattggtggcagtggtgccacactgaacagagtggaagacatatgccatgcagctacacctacyggccctgggacgccggaggacagggcattgtcctcagtcagatacaacagcatttggggccatggtacctgcacacctaaaacactaggccacgcatctgatctgtagtcacatgactaagccaagaggaaggagcaagactcaagacatgattgatggatgttaaagtctagcctgatgagaggggaagtggtgggggagacatagccccaccatgaggacatacaactgggaaatactgaaacttgctgcctattgggtatgctgaggycccacagacttacagaagaagtggccctccatagacatgtgtagcatcaaaacacaaaggcccacacttcctgacggatgccagcttgggcactgctgtctactgaccccaacccttgatgatatgtatttattcatttgttattttaccagctatttattgagtgtcttttatgtaggctaaatgaacataggtctctggcctcacggagctcccagtcctratcacattcaaggtcaccaggtacagttgtacaggttgtacactgcaggagagtgcctggcaaaaagatcaratggggctgggacttctcattggccaacctgcctttccccagaaggagtgatttttctaycggcacaaaagcactatatggactggtaatggttacaggttcagagattacccagtgaggccttattcctcccttccccccaaaactgacacctttgttagccacctccccacccacatacatttctgccagtgttcacaatgacactcagcggtcatgtctggacatgagtgcccagggaatatgcccaagctatgccttgtcctcttgtcctgtttgcatttcactgggagcttgcactatgcagctccagtttcctgcagtgatcagggtcctgcaagcagtggggaagggggccaaggtattggaggactccctcccagctttggaagcctcatccgcktgtgtgtgtgtgtgtatgtgtagacaagctctckctctgtcacccaggctggagtgcagtggtgcaatcatggttcactgcagtcttgaccttttgrgctcaagtgatcctcccacctcagcctcctgagtagctgggaccataggctcacaacaccacacctggcaaatttgattttttttttttttyyagagayggggtctygcaacattgcccagacttcctttgtgttagttaataaagctttctcaactgcc

SEQ ID NO: 457 - DNA, 2984 bp, Homo sapiens
gcgccccagtcgaygctgagctcctctgctactcagagttgcaacctcmgcctmgctatggctcccagcagcccccggcccgcgctgcccgcactcctggtcctgctcggggctctgttcccaggacctggcaatgcccagacatctgtgtccccctcaaaagtcatcctgccccggggaggctccgtgctggtgacatgcagcacctcctgtgaccagcccawgttgttgggcatagagaccccgttgcctaaaaaggagttgctcctgcctgggaacaaccggaaggtgtatgaactgagcaatgtgcaagaagatagccaaccaatgtgctattcaaactgccctgatgggcagtcaacagctaaaaccttcctcaccgtgtactggactccagaacgggtggaactggcacccctcccctcttggcagccagtgggcaagaaccttaccctacgctgccaggtggagggtggggcaccccgggccaacctcaccgtggtgctgctccgtggggagaasgagctgaaacgggagccagctgtgggggagcccgctgaggtcacgaccacggtgctggtgaggagagatcaccatggagccaatttctcgtgccgcactgaactggacctgcgsscccaagggctggagctgtttgagaacacctcggccccctaccagctccagacctttgtcctgccagcgactcccccacaacttgtcagcccccgggtcctagaggtggacacgcaggggacmgtggtctgttccctggacrgkctgttcccagtctcggaggcccaggtccacctggcactgggggaccagaggttgaaccccacagtcacctatggcaacgactccttctcggccaaggcctcagtcagtgtgaccgcagaggaygagggcacccagcggctgacgtgtgcagtaatactggggaaccagagccaggagacactgcagacagtgaccatctacagctttccggcgcccaacrtgattctgacgaagccagaggtctcagaagggaccgaggtgacagtgaagtgtgaggcccaccctagagccaaggtgacgctgaatggggttccagcccagccactgggccygagggcccagctcctgctgaaggccaccccagaggacaaygggcgcagcttctcctgctctgcaaccctggaggtggccggccagcttatacacaagaaycagacccgggagcttcgtgtcctgtatggcccccractggacgagagggattgtccgggaaactggacgtggccagaaaattcccagcagactccaatgtgccaggcttgggggaacccattgcccgagctcaagtgtctaaaggatggcactttcccactgcccatcggggaatcagtgactgtcactcragatcttgagggcacctacctctgtcgggccaggagcactcaaggggaggtcacccgcraggtgaccgtgaatgtgctctccccccggtatgagattgtcatcatcactgtggtagcagccgcagtcataatgggcactgcaggcctcagcacgtacctctataaccgccagcggaagatcaagaaatacagactacaacaggcccaaaaagggacccccatgaaaccgaacacacaagccacgcctccctgaacctatcccrggacagggcctcttcctcggccttcccatattggtggcagtggtgccacactgaacagagtggaagacatatgccatgcagctacacctacyggccctgggacgccggaggacagggcattgtcctcagtcagatacaacagcatttggggccatggtacctgcacacctaaaacactaggccacgcatctgatctgtagtcacatgactaagccaagaggaaggagcaagactcaagacatgattgatggatgttaaagtctagcctgatgagaggggaagtggtgggggagacatagccccaccatgaggacatacaactgggaaatactgaaacttgctgcctattgggtatgctgaggycccacagacttacagaagaagtggccctccatagacatgtgtagcatcaaaacacaaaggcccacacttcctgacggatgccagcttgggcactgctgtctactgaccccaacccttgatgatatgtatttattcatttgttattttaccagctatttattgagtgtcttttatgtaggctaaatgaacataggtctctggcctcacggagctcccagtcctratcacattcaaggtcaccaggtacagttgtacaggttgtacactgcaggagagtgcctggcaaaaagatcaratggggctgggacttctcattggccaacctgcctttccccagaaggagtgatttttctaycggcacaaaagcactatatggactggtaatggttacaggttcagagattacccagtgaggccttattcctcccttccccccaaaactgacacctttgttagccacctccccacccacatacatttctgccagtgttcacaatgacactcagcggtcatgtctggacatgagtgcccagggaatatgcccaagctatgccttgtcctcttgtcctgtttgcatttcactgggagcttgcactatgcagctccagtttcctgcagtgatcagggtcctgcaagcagtggggaagggggccaaggtattggaggactccctcccagctttggaagcctcatccgcktgtgtgtgtgtgtgtatgtgtagacaagctctckctctgtcacccaggctggagtgcagtggtgcaatcatggttcactgcagtcttgaccttttgrgctcaagtgatcctcccacctcagcctcctgagtagctgggaccataggctcacaacaccacacctggcaaatttgattttttttttttttyyagagayggggtctygcaacattgcccagacttcctttgtgttagttaataaagctttctcaactgcc

SEQ ID NO: 458 - DNA, 1428 bp, Homo sapiens
cggccctggctctctggcgcggggccccttagtccgggctttttgccatggggtctctgttccctctgtcgctgctgttttttttggcggccgcctacccgggagttgggagcgcgctgggacgccggactaagcgggcgcaaagccccaagggtagccctctcgcgccctccgggacctcagtgcccttctgggtgcgcatgagcccggagttcgtggctgtgcagccggggaagtcagtgcagctcaattgcagcaacagctgtccccagccgcagaattccagcctccgcaccccgctgcggcaaggcaagacgctcagagggccgggttgggtgtcttaccrgctgctcgacgtgagggcctggagctccctcgcgcactgcctcgtgacctgcgcaggaaaaacacgctgggccacctccaggatcaccgcctacaaaccgccccacagcgtgattttggagcctccggtcttaaagggcaggaaatacactttgcgctgccacgtgacgcaggtgttcccggtgggctacttggtggtgaccctgaggcatggaagccgggtcatctattccgaaagcctggagcgcttcaccggcctggatctggccaacgtgaccttgacctacgagtttgctgctggaccccgcgacttctggcagcccgtgatctgccacgcgcgcctcaatctcgacggcctggtggtccgcaacagctcggcacccattacactgatgctcggtgaggcacccctgtaaccctggggactaggaggaagggggcagagagagttatgaccccgagagggcgcacagaccaagcgtgagctccacgcgggtcgacagacctccctgtgttccgttcctaattctcgccttctgctcccagcttggagccccgcgcccacagctttggcctccggttccatcgctgcccttgtagggatcctcctcactgtgggcgctgcgtacctatgcaagtgcctagctatgaagtcccaggcgtaaagggggatgttctatgccggctgagcgagaaaaagaggaatatgaaacaatctggggaaatggccatacatggtggctgacgcctgtaatcccagcactttgggaggccgaggcaggagartcgcttgagcccaggagttcgagaccagcctggacaacatagtgagaccccgtctatgcaaaaaatacacaaattagcctggtgtggtggcccgcacctgtggtcccagctacccgggaggctgagttgggaggatcctttgagccctgaaagtcgaggttgcagtgagccttgatcgtgccactgcactccagcctgggggacagagcacgaccctgtctccaaaaataaaataaaaataaaaataaatattggcgggggaaccctctggaatcaataaaggcttccttaaccagc

SEQ ID NO: 459 - DNA, 1006 bp, Homo sapiens
cttagtccgggctttttgccatggggtctctgttccctctgtcgctgctgttttttttggcggccgcctacccgggagttgggagcgcgctgggacgccggactaagcgggcgcaaagccccaagggtagccctctcgcgccctccgggacctcagtgcccttctgggtgcgcatgagcccggagttcgtggctgtgcagccggggaagtcagtgcagctcaattgcagcaacagctgtccccagccgcagaattccagcctccgcaccccgctgcggcaaggcaagacgctcagagggccgggttgggtgtcttaccrgctgctcgacgtgagggcctggagctccctcgcgcactgcctcgtgacctgcgcaggaaaaacacgctgggccacctccaggatcaccgcctacagtgttcccggtgggctacttggtggtgaccctgaggcatggaagccgggtcatctattccgaaagcctggagcgcttcaccggcctggatctggccaacgtgaccttgacctacgagtttgctgctggaccccgcgacttctggcagcccgtgatctgccacgcgcgcctcaatctcgacggcctggtggtccgcaacagctcggcacccattacactgatgctcgcttggagccccgcgcccacagctttggcctccggttccatcgctgcccttgtagggatcctcctcactgtgggcgctgcgtacctatgcaagtgcctagctatgaagtcccaggcgtaaagggggatgttctatgccggctgagcgagaaaaagaggaatatgaaacaatctggggaaatggccatacatggtggctgacgcctgtaatcccagcactttgggaggccgaggcaggagartcgcttgagcccaggagttcgagaccagcctggacaacatagtgagaccccgtctatgcaaaaaatacacaaattagcctggtgtggtggcccgcacctgtggtcccagctacccgggaggctgag

SEQ ID NO: 460 - DNA, 1281 bp, Homo sapiens
cggccctggctctctggcgcggggccccttagtccgggctttttgccatggggtctctgttccctctgtcgctgctgttttttttggcggccgcctacccgggagttgggagcgcgctgggacgccggactaagcgggcgcaaagccccaagggtagccctctcgcgccctccgggacctcagtgcccttctgggtgcgcatgagcccggagttcgtggctgtgcagccggggaagtcagtgcagctcaattgcagcaacagctgtccccagccgcagaattccagcctccgcaccccgctgcggcaaggcaagacgctcagagggccgggttgggtgtcttaccrgctgctcgacgtgagggcctggagctccctcgcgcactgcctcgtgacctgcgcaggaaaaacacgctgggccacctccaggatcaccgcctacaaaccgccccacagcgtgattttggagcctccggtcttaaagggcaggaaatacactttgcgctgccacgtgacgcaggtgttcccggtgggctacttggtggtgaccctgaggcatggaagccgggtcatctattccgaaagcctggagcgcttcaccggcctggatctggccaacgtgaccttgacctacgagtttgctgctggaccccgcgacttctggcagcccgtgatctgccacgcgcgcctcaatctcgacggcctggtggtccgcaacagctcggcacccattacactgatgctcgcttggagccccgcgcccacagctttggcctccggttccatcgctgcccttgtagggatcctcctcactgtgggcgctgcgtacctatgcaagtgcctagctatgaagtcccaggcgtaaagggggatgttctatgccggctgagcgagaaaaagaggaatatgaaacaatctggggaaatggccatacatggtggctgacgcctgtaatcccagcactttgggaggccgaggcaggagartcgcttgagcccaggagttcgagaccagcctggacaacatagtgagaccccgtctatgcaaaaaatacacaaattagcctggtgtggtggcccgcacctgtggtcccagctacccgggaggctgagttgggaggatcctttgagccctgaaagtcgaggttgcagtgagccttgatcgtgccactgcactccagcctgggggacagagcacgaccctgtctccaaaaataaaataaaaataaaaataaatattggcgggggaaccctctggaatcaataaaggcttccttaaccagc

SEQ ID NO: 461 - DNA, 3050 bp, Homo sapiens
cgcaactctgyctcccccacaccccacccgccgcgccgcgcggagccgtcctctagcccagctcctcggctcgcgctctcctcgcctcctgtgctttccccgccgcggcgatgccagggccttcgccagggctgcgccgggcgctactcggcctctgggctgctctgggcctggggctcttcggcctctcagcggtctcgcaggagcccttctgggcggacctgcagcctcgcgtggcgttcgtggagcgcgggggctcgctgtggctgaattgcagcaccaactgccctyggccggagcgcggtggcctggagacctcgctgcgccgaaacgggacccagaggggtttgcgttggttggcgcggcagctggtggacattcgcgagccggagactcagcccgtctgcttcttccgctgcgcgcggcgcacactacaggcgcgtgggctcattcgcactttccagcgaccagatcgcgtagagctgatgccgctgcctccctggcagccggtgggcgagaacttcaccctgagctgtagggtccccggcgccgggccccgtgcgagcctcacgctgaccctgctgcggggcgcccaggagctgatccgccgcagcttcgccggtgaaccaccccgagcgcggggcgcggtgctcacagccacggtactggctcggagggaggaccatggagccaatttctcgtgtcgcgccgagctggacctgcggccgcacggactgggactgtttgaaaacagctcggcccccagagagctccgaaccttctccctgtctccggatgccccgcgcctcgctgctccccggctcttggaagttggctcggaaaggcccgtgagctgcactctggacggactgtttccagcctcagaggccagggtctacctcgcactgggggaccagaatctgagtcctgatgtcaccctcgaaggggacgcattcgtggccactgccacagccacagctagcgcagagcaggagggtgccaggcagctgrtctgcaacgtcaccctggggggcgaaaaccgggagacccgggagaacgtgaccatctacagcttcccggcaccactcctgaccctgagcgaacccagcgtctccgaggggcagatggtgacagtaacctgcgcagctgggrcccaagctctggtcacactggagggagttccagccgcggtcccggggcagcccgcccagcttcagctaaatgccaccgagaacgacgacagacgcagcttcttctgcgacgccaccctcgatgtggacggggagaccctgatcaagaacaggagcgcagagcttcgtgtcctatacgctccccggctagacgattcggactgccccaggagttggacgtggcccgagggcccagagcagacgctgcgctgcgaggcccgcgggaacccagaaccctcagtgcactgtgcgcgctccgacggcggggccgtgctggctctgggcctgctgggtccagtcactcgggcgctctcaggcacttaccgctgcaaggcggccaatgatcaaggcgaggcggtcaaggacgtaacgctaacggtggagtacgcaccagcgctggacagcrtgggctgcccagaacgcattacttggctggagggaacagaagcctcgctgagctgtgtggcgcacggggtaccgccgcctgatgtgatctgcgtgcgctctggagaactcggggccgtcatcgargggctgttgcgtgtggcccgggagcatgcgggcacttaccgctgcgaagccaccaaccctcggggctctgcggccaaaaatgtggccgtcacrgtggaatatggccccaggtttgaggagccgagctgccccagcaattggacatgggtggaaggatctgggcgcctgttttcctgtgaggtcgatgggaagccacagccaagcgtgaagtgcgtgggctccgggggcrccactgagggggtgctgctgccgctggcacccccagaccctagtcccagagctcccagaatccctagagtcctggcacccggtatctacgtctgcaacgccaccaaccgccacggctccgtggccaaaacagtcgtcgtgagcgcggagtcgccaccggagatggatgaatctacctgcccaagtcaccagacgtggctggaaggggctgaggcttccgcgctggcctgcgccgcccggggtcgcccttccccaggagtgcgctgctctcgggaaggcatcccatggcctgagcagcagcgcgtgtcccgagaggacgcgggcacttaccactgtgtggccaccaatgcgcatggcacggactcccggaccgtcactgtgggcgtggaataccggccagtggtggccgaacttgctgcctcgccccctggaggcgtgcgcccaggaggaaacttcacgttgacctgccgcgcrgaggcctggcctccagcccagatcagctggcgcgcgcccccgrgggccctcaacatcggcctgtcgagcaacaacagcacactgagcgtggcaggcgccatgggaagccacggcggcgagtacgagtgcgcasscaccaacgcgcacgggcgccacgcgcggcgcatcacggtgcgcgtggccggtccgtggctatgggtcgccgtgggcggcgcggcggggggcgcggcgctgctggccgcgggggccggcctggccttctacgtgcagtccaccgcctgcaagaagggcgagtacaacgtgcaggaggccgagagctcaggcgaggccgtgtgtctsaacggagcgggcggcggcgctggcggggcggcaggcgcggagggcggacccsaggcggcggggggcgcggccgagtcgccggcggagggcgaggtcttcgccatacagctgacatcggcgtgagcccgctcccctctccccgcgggccgggggacgccccccagactcacacgggggcttatttattgctttatttatttacttattcatttatttatgtattcaactccaagggcgtcacccccattttctasccatcccctcaataragtttttatraaggaactc

SEQ ID NO: 462 - DNA, 4178 bp, Homo sapiens
tgcagtcggggttcagccagagggggcgccgggcgtaccgacgtagcggggagaaacgggtcgcgctttaacggcgctgcgcaggcgccactcacgggccggacgtgacgcagggaaagttccggcttcggcctccgccgctgccgccgccgctgctacagccgccgccgccgctgttgccgcggcttgttattcttaaaatggcgccgctagacctggacaagtatgtggaaatagcgcggctgtgcaagtacctgccagagaacgacctgaagcggctatgtgactacgtttgtgacctcctcttagaagagtcaaatgttcagccagtatcaacaccagtaacagtgtgtggagatatccatggacagttttatgacctttgtgaactgttcagaactggaggtcaggttcctgacacaaactacatatttatgggtgattttgtagacagaggttactatagtttggagaccttcacttaccttcttgcattaaaggctaaatggcctgatcgtattacacttttgcgaggaaatcatgagagtagacagataacacaggtctatggattttatgatgagtgccaaaccaaatatggaaatgctaatgcctggagatactgtaccaaagtttttgacatgctcacagtagcagctttaatagatgagcagattttgtgtgtccatggtggtttatctcctgatatcaaaacactggatcaaattcgaacyatcgaacggaatcaggaaattcctcataaaggagcattttgtgatctggtttggtcagatcctgaagatgtggatacctgggctatcagtccccgaggagcaggttggctttttggagcaaaggtcacaaatgagtttgttcatatcaacaacttaaaactcatctgcagagcacatcaactagtgcacgaaggctataaatttatgtttgatgagaagctggtgacagtatggtctgctcctaattactgctatcgttgtggaaatattgcttcgatcatggtcttcaaagatgtaaatacaagagaaccaaagttattccgggcrgttccagattcagaacgtgttattcctcccagaacgacaacgccatatttcctttgaggccttcgcccatcctgctgacccatttttctgccctcttcttaccccaattttcttgtattaccctctacaatatactttttattgagcactttgctgctgaaatgctgcctcttgcctttttttttttaaattttaaattatctaaatttattgtttgttgtggtgtctatagcaaagtttttctatcaattttcccccatcccatccccaccctggactcatttgagaagacttgagaaatgtcttaatactcacactgctgcatgtagctcttgcttatttactggtctgggaaacaggatgtgtttcctttttttaaaagccaattgacagattacacctaaatactcctccttttgtatcattcagccttttgttttagtttggtaagttttaagaaatttcagcagcaaagttgttattcagtgggcacgatggactccaaatgcctcaagttatgtatacctgtcccagatgtaaacttcattgtcctttgttggatgatattttaaatggatataaaataaattggtctaaagggctgccctccttgttgtgtttttaaattttagttaaaaactgctacagcttatgactttgtactttaagataattgtattgatcttttttcagattccttgtattttttaataaagtaatcttaaataaaactcagataggttaagtgttagaaattttaaacagcttacattgttagcgtaaagttatcttttcttttttcctaatcagagttcttgaccctttggttattgagtttaaaacttcaattgaaattcaatagtatttatttttkaaaaaaatcactaaactgtgcctaaagaacataactgccatattaatgttttggtttatatcctctatagtaatagaaaaacatttaatacttgtaatgctgaygtgttaatttgataccagttgagtagaatgtgatcaatccagtttacaatctatcatgagtattattaactaaaatctatgtgcttttcaataggaatcattcttctcttgctgtaacacttgaccttaacttttagaaagtgttcatttttaaactgcaactggaaaggttgaaaagttaggactcttgtatttgtgaactgtaatctgaagcagattatttaaagtgtagaaaaagaaacaagttcttcttttttgcaaaggtctgtgataccatatttcagctttgtgtaagtaatttgaatatccaaagggttgtgatgatcagttctgaatatgcaactgtccacttaataaggacaagtattccagtatctcttatgactgtagtcataaatgatgttggaatgtacattttgtgaaatagttggtatccctttactatgattaatttttgttattccaggaaatacttgtgaagccagccaattaataaagcactttagcatctgttcaggtagttttgaaaaccmacttttccccttcaggataagaacttccaggttacctaaaaatgcaataaaaatctttatagtctaagcttcttggcatataatttttcatcarggttttcttttattaattgagcacaatactgttttgatttaatttttttccctcaaaccacccagctccttacatagtttttaattatatagctatmtgaaagaggtggctaagacatttgctgcacacacttgaactaatgttgggtcagtagcttcgtgttactgccctgatcccagtgtaattcaggtggaaaggtatttttatctcacagggatatgtagctatgtattttactaattgtgaaacactggaaattaatgatgcagacaacttggtgtggtctttgaacagctctctgcagtatttttttttttcctgttaccataaattgtatttaagtgcttgctttccacttaagttgtactaatagaaccggtaactcccagccctccctgtttgacactccttagcttagattgatgtagttgtttttgttatccctataatgtgacttttatttttaagtcattgtgtactgcatttgtttgtcactagttgggcacgtgccaataatattctctccattccttatctgccatctctgttttgcctgatttctcttcaactgaataatggctttttgcatggaaaaaatagtttttactattagacgtgtaaagggaagagagagctaatgtattggactttgtgagcctacaaggaatattttggatccctccaataaataagggctatgtactatatgtactatatagagttatcatgtggtggaagatacttgcaagtcatagatttatgggcaggaggatttgttactscctatatctaggctgaatgtaaaatcccttatgttgtatcaatgggggtaaaaactatttttatttgcctatgatatacttggtttctaataaagtgccctaggctctagtgagaactgkctactttgaattgccatttactccctttcctcctttggccgatatgctcttggctagctttttataagttaatgtgtttccccaaaaagtttcactactttatattcatttgagtgtgatcctaaaacacctggatcaacagtacatctcatatgcaatctgcatcagctcctattctgtctggatgtctagaactgttggaagattttgacgtcttaagccctaggttttgctttgggaaataaggtttgaaatattgttcattgcattaagatttgtgtgtgtgtgctttgtaagcccagaaccaggttttggaaaatgcctgtactgtgaaagcaaattaggactctttctgagcctctttcattgtcagaaatagaatcactttccatcagcttccaggaaattgtgtrtctggagtcgaagagatttracatcaagaatccagatttttaaatgtaattgttttttaaatgtgctatattccctcagtgtaaattaataaaaagrttacaggaagtttgtcaaaaaattcaatgcatagtctgtagtatgtcctgacaagaagttagcattttatataagaaattaaaaaatgcttattcctcca

SEQ ID NO: 463 - DNA, 4135 bp, Homo sapiens
tgcagtcggggttcagccagagggggcgccgggcgtaccgacgtagcggggagaaacgggtcgcgctttaacggcgctgcgcaggcgccactcacgggccggacgtgacgcagggaaagttccggcttcggcctccgccgctgccgccgccgctgctacagccgccgccgccgctgttgccgcggcttgttattcttaaaatggcgccgctagacctggacaagtatgtggaaatagcgcggctgtgcaagtacctgccagagaacgacctgaagcggctatgtgactacgtttgtgacctcctcttagaagagtcaaatgttcagccagtatcaacaccagtaacagtgtgtggagatatccatggacagttttatgacctttgtgaactgttcagaactggaggtcaggttcctgacacaaactacatatttatgggtgattttgtagacagaggttactatagtttggagaccttcacttaccttcttgcattaaaggctaaatggcctgatcgtattacacttttgcgaggaaatcatgagagtagacagataacacaggtctatggattttatgatgagtgccaaaccaaatatggaaatgctaatgcctggagatactgtaccaaagtttttgacatgctcacagtagcagctttaatagatgagcagattttgtgtgtccatggtggtttatctcctgatatcaaaacactggatcaaattcgaacyatcgaacggaatcaggaaattcctcataaaggagcattttgtgatctggtttggtcagatcctgaagatgtggatacctgggctatcagtccccgaggagcaggttggctttttggagcaaaggtcacaaatgagtttgttcatatcaacaacttaaaactcatctgcagagcacatcaactagtgcacgaaggctataaatttatgtttgatgagaagctggtgacagtatggtctgctcctaattactgctatcgttgtggaaatattgcttcgatcatggtcttcaaagatgtaaatacaagagaaccaaagttattccgggcrgttccagattcagaacgtgttattcctcccagaacgacaacgccatatttcctttgaggccttcgcccatcctgctgacccatttttctgccctcttcttaccccaattttcttgtattaccctctacaatatactttttattgagcactttgctgctgaaatgctgcctcttgcctttttttttttaaattttaaattatctaaatttattgtttgttgtggtgtctatagcaaagtttttctatcaattttcccccatcccatccccaccctggactcatttgagaagacttgagaaatgtcttaatactcacactgctgcatgtagctcttgcttatttactggtctgggaaacaggatgtgtttcctttttttaaaagccaattgacagattacacctaaatactcctccttttgtatcattcagccttttgttttagtttggtaagttttaagaaatttcagcagcaaagttgttattcagtgggcacgatggactccaaatgcctcaagttatgtatacctgtcccagatgtaaacttcattgtcctttgttggatgatattttaaatggatataaaataaattggtctaaagggctgccctccttgttgtgtttttaaattttagttaaaaactgctacagcttatgactttgtactttaagataattgtattgatcttttttcagattccttgtattttttaataaagtaatcttaaataaaactcagataggttaagtgttagaaattttaaacagcttacattgttagcgtaaagttatcttttcttttttcctaatcagagttcttgaccctttggttattgagtttaaaacttcaattgaaattcaatagtatttatttttkaaaaaaatcactaaactgtgcctaaagaacataactgccatattaatgttttggtttatatcctctatagtaatagaaaaacatttaatacttgtaatgctgaygtgttaatttgataccagttgagtagaatgtgatcaatccagtttacaatctatcatgagtattattaactaaaatctatgtgcttttcaataggaatcattcttctcttgctgtaacacttgaccttaacttttagaaagtgttcatttttaaactgcaactggaaaggttgaaaagttaggactcttgtatttgtgaactgtaatctgaagcagattatttaaagtgtagaaaaagaaacaagttcttcttttttgcaaaggtctgtgataccatatttcagctttgtgtaagtaatttgaatatccaaagggttgtgatgatcagttctgaatatgcaactgtccacttaataaggacaagtattccagtatctcttatgactgtagtcataaatgatgttggaatgtacattttgtgaaatagttggtatccctttactatgattaatttttgttattccaggaaatacttgtgaagccagccaattaataaagcactttagcatctgttcaggtagttttgaaaaccmacttttccccttcaggataagaacttccaggttacctaaaaatgcaataaaaatctttatagtctaagcttcttggcatataatttttcatcarggttttcttttattaattgagcacaatactgttttgatttaatttttttccctcaaaccacccagctccttacatagtttttaattatatagctatmtgaaagaggtggctaagacatttgctgcacacacttgaactaatgttgggtcagtagcttcgtgttactgccctgatcccagtgtaattcaggtggaaaggtatttttatctcacagggatatgtagctatgtattttactaattgtgaaacactggaaattaatgatgcagacaacttggtgtggtctttgaacagctctctgcagtatttttttttttcctgttaccataaattgtatttaagtgcttgctttccacttaagttgtactaatagaaccggtaactcccagccctccctgtttgacactccttagcttagattgatgtagttgtttttgttatccctataatgtgacttttatttttaagtcattgtgtactgcatttgtttgtcactagttgggcacgtgccaataatattctctccattccttatctgccatctctgttttgcctgatttctcttcaactgaataatggctttttgcatggaaaaaatagtttttactattagacgtgtaaagggaagagagagctaatgtattggactttgtgagcctacaaggaatattttggatccctccaataaataagggctatgtactatatgtactatatagagttatcatgtggtggaagatacttgcaagtcatagatttatgggcaggaggatttgttactscctatatctaggctgaatgtaaaatcccttatgttgtatcaatgggggtaaaaactatttttatttgcctatgatatacttggtttctaataaagtgccctaggctctagtgagaactgkctactttgaattgccatttactccctttcctcctttggccgatatgctcttggctagctttttataagttaatgtgtttccccaaaaagtttcactactttatattcatttgagtgtgatcctaaaacacctggatcaacagtacatctcatatgcaatctgcatcagctcctattctgtctggatgtctagaactgttggaagattttgacgtcttaagccctaggttttgctttgggaaataaggtttgaaatattgttcattgcattaagatttgtgtgtgtgtgctttgtaagcccagaaccaggttttggaaaatgcctgtactgtgaaagcaaattaggactctttctgagcctctttcattgtcagaaatagaatcactttccatcagcttccaggaaattgtgtrtctggagtcgaagagatttracatcaagaatccagatttttaaatgtaattgttttttaaatgctaatgtttgtaaagcaccttcagttcttcggatgaaaggtgctatattccctcagtgtaaattaataaaaagrttacaggaagtttgtca

SEQ ID NO: 464 - DNA, 5272 bp, Homo sapiens
aggtgacagctggagggaggagcgggggtggagccgggggaagggtggggaggggatgggctggasctccgggcagtgtgcgaggcgcacgcacaggagcctgcactctgcgtcccgcaccccagcagccgcgccatgagccggagtctcttgctcyggttcttgctgttcctgctcctgctccygccgctccccgtcctgctcgcggacccaggggcgcccacgccagtgaatccctgttgttactatccatgccarcaccagggcatctgtgtccgcttcggccttgaccrctaccagtgtgactgcacccgcacgggctattccggccccaactgyaccatccctggcctgtggacctggctccggaattcactgcggcccagcccctctttcacccacttcctgctcactcacgggcgctggttctgggagtttgtcaatgccaccttcatccragagatgctcatgcgcctggtactcacagtgcgctccaaccttatccccagtccccccacctacaactcagcacatgactacatcagctgggagtctttctccaacgtgagctattacactcktattctgccctctgtgcctaaagattgccccacacccatgggaaccaaagggaagaagcagttgccagatgcccagctcctggcccgccgcttcctgctcaggaggamgttcatacctgacccccaaggcaccaacctcatgtttgccttctttgcacaacacttcacccaccagttcttcaaaacttctggmaagatgggtcctggcttcaccaaggccttgggccatggggtagacctcggccacatttatggagacaatmtggagcgtcagtatcaactgcggctctttaaggatgggaaactcaagtaccaggtgctggatggagaaatgtacccgccctcggtagaagaggcgcctgtgttgatgcactacccccgaggcatcccgccccagagccagatggctgtgggccaggaggtgtttgggctgcttcctgggctcatgctgtatgccacgctctggctacgtgagcacaaccgtgtgtgtgacctgctgaaggcygagcaccccacctggggygatgagcagcttttccagacgacccgcctcatcctcataggggagaccatcaagattgtcatcgaggagtacgtgcagcagctgagtggctatttcctgcagctgaratttgacccagagctgctgttcggtgtccagttccaataccgcaaccgcattgccatggagttcaaccatctctaccactggcaccccctcatgcctgactccttcaaggtgggctcccaggagtacagctacgagcagttcttgttcaacacctccatgttggtggactatggggttgaggccctggtggatgccttctctcgccagattgytggccggatcggtgggggcaggaacatggaccaccacrtcctgcatgtggctgtggatgtcatcagggagtctcgggagatgcggctgcagcccttcaatgagtaccgcragaggtttggcatgaaaccctacacctcyttccaggagctcrtaggagagaaggagatggcagcagagttggaggaattgtatggagacattgatgcrttggagttctacccyggactgcttcttgaaaagtgccatccaaactctatctttggggagagtatgatagagattggggctcccttttccctcaagggtctcctagggaatcccatctgttctccggagtactggaagccgagcacatttggcggcgaggtgggctttaacattgtcaagacggccacactgaagaagctggtctgcctcaacaccaagacctgtccctacgtttccttccgtgtgccggatgccagtcaggatgatgggcctgctgtggagcgaccatccacagagctctgaggggcaggaaagcagcattctggaggggagagctttgtgcttgtcattccagagtgctgaggccagggctgatggtcttaaatgctmattttctggtttggcatggtgagtgttggggytgacatttagaactttaagtctcacccattatctggaatatygtgattctgtttattcttccagaatgctgaactccttgttagcccttcagattgttaggagtggttctcatttggtctgccagaatackgggttcttagttgacaacctagaatgtcagatttctggttgatttgtaacacagtcattctaggatgtggagctactgatgaaatctgctagaaagttagggggttcttatttkgcattccagaatcttgactttctgattggtgattcaaagtgttgtgttcctggctgatgatccagaacagtggctcrtatcccaaatctgtcagcatctggctgtctagaatgtggatttgattcmttttcctgttcagtgagatatcatagagacggagatcctaaggtccaacaagaatgcattccctgaatctgtgcctgcactgagagggcaaggargtggggtgttcttcttgggacccccactaagaccctggtctgaggatgtagagagaacaggtgggctgtattcacgccattggttggaagctaccagagctctatccccatccaggtcttgactcatggcagctgtttctcatgaagctaataaaattcgctttctaaagttacctgttatatatctcttttggtcccatcctctaaagcagaggcaacactggaacatggctagcctttcttgtagccatggctgggcgtgctagaggttgcagcrtgagactttctgctgggatccttgggcccatcactgtatagacatgctaccactggtacttcctttctccctgcgggccaggcactgcccttttcaggaakctstcttaaaatacccattgccccagacctggaagatataacattcagttcccaccatctgattaaaacarcttcctcccttacagagcatacaacagagggggcacccggggaggagagcacatactgtgttccaatttcacscttttaattctcatttgttctcacaccaacagtgtgaagtgcgtggtataatctccatttcaaaaccaaggaagcagcctcagagtggtcgagtgacacacctcacgcaggctgagtccagagcttgtgctcctcttgattcctggtttgactcagttccaggcctgatcttgcctgtctggctcagggtcaaagacagaatggtggagtgtagcctccacctgatattcaggctactcattcagtcccaaatatgtattttcctaagtgtttactatgtgccagttcctgtaacaggtgtggggacacagcagtgagtaatcaatacagacaaggttctgcccttatggagctcacaytccagtggcagacaaacagaccataaataaggaaacgatgaaataagatatatacaaggtgagtgtgacttcccttctaacccyctctgctctgtcctcccctattgcgctctcaagaccagagacccaacagcagtgatctcagggcagacagccctccactccagctctgagacccttttctcaggacctctgtaggcagcagagagagaggacagaggggtaagatgaggggttgagggaaggttcttcatgatccacactttgggcttagtatttctcaggaagagctatggcccagaaacaacaggggaaactagagttcggtctgacagtccttggggttaagtctcctgtcttatggtccagaaactcctgtttctccttagttggctggaaactgctcccatcattccttctggcctctgctgaatgcagggaatgcaatccttccctgctcttgcagttgctctgacgtagaaagatccttcgggtgctggaagtctccatgaagagcttgtgtcctgtcctttcttgcagattctatttcccctcttctgctaatacctcttactttgcttgagaatcctctcctttcttattaatttcagtcttggtggttctatcaggggtgcattctggccaaggggtgggcctgtgaatcaatcctgggcaatcagacaccctctccttaaaaactggcccgtggagactgagatcactgactctgactcatccccacagctggctctgacaagatggtccatttgttcctgcttccgagatccccagggcagcctggatccctgcccttctcaagactttagcttttccttccatccggtggcctattccaggaattcctcttttgcttaaatcagttggagtttgtgtctgttgcttgtaatmaagcctttatggctgctgggctgagtgacacaagcactttaatggcctggagggacttttaatcagtgaagatgcaatcagacaagtgttttggaaagagcaccctygagaagggtgratgacagggcagagcaggaaggacaggaagctggcagaackgaggaggctgcagccgtggtccaaccaggagctgatggcagctggggctaggggaagggctttgagggtggaaggatgggatgggttccagaggtattcctctcttaaatgcaagtgcctagattaggtagactttgcttagtattgacaackgcacatgaaagttttgcaaagggaaacaggctaaatgyaccaagaaagcttcttcagagtgaagaatcttaatgcttgtaatttaaacatttgttcctggagttttgatttggtggatgtgatggttggttttatttgtcagtttggttgggctatagcacmcagttatttaatcaaacagtaatctaggtgtggctgtgaaggtatkttgtagatgtgattaacatctacaatcagttgactttaagtgaaagagattacttaaataatttgggtgagctgcacctgattagttgaaaggcctcaagaacaaacactgcagtttcctggaaaagaagaaactttgcctcaagactatagccatcgactcctgcctgagtttccagcctgctagtctgccctatggatttgaagtttgccaaccccaacaattgtgtgaattaatttctaaaaataaagctatatacagccatcctttggtatttgtgggggatttgtttcaggatctctacagataccaaaatctgtggttcctcaagtcctttatatgaagtggtatagtatttgcatataacctatgtgcaatctcctgtataacttcaatcatctctagattacttataatacctaatacagtgtaaatgctagtt

SEQ ID NO: 465 - DNA, 5161 bp, Homo sapiens
aggtgacagctggagggaggagcgggggtggagccgggggaagggtggggaggggatgggctggasctccgggcagtgtgcgaggcgcacgcacaggagcctgcactctgcgtcccgcaccccagcagccgcgccatgagccggagtctcttgctcyggttcttgctgttcctgctcctgctccygccgctccccgtcctgctcgcggacccaggggcgcccacgccagtgaatccctgttgttactatccatgccarcaccagggcatctgtgtccgcttcggccttgaccrctaccagtgtgactgcacccgcacgggctattccggccccaactgyaccatccctggcctgtggacctggctccggaattcactgcggcccagcccctctttcacccacttcctgctcactcacgggcgctggttctgggagtttgtcaatgccaccttcatccragagatgctcatgcgcctggtactcacagtgcgctccaaccttatccccagtccccccacctacaactcagcacatgactacatcagctgggagtctttctccaacgtgagctattacactcktattctgccctctgtgcctaaagattgccccacacccatgggaaccaaagggaagaagcagttgccagatgcccagctcctggcccgccgcttcctgctcaggaggamgttcatacctgacccccaaggcaccaacctcatgtttgccttctttgcacaacacttcacccaccagttcttcaaaacttctggmaagatgggtcctggcttcaccaaggccttgggccatggggtagacctcggccacatttatggagacaatmtggagcgtcagtatcaactgcggctctttaaggatgggaaactcaagtaccaggtgctggatggagaaatgtacccgccctcggtagaagaggcgcctgtgttgatgcactacccccgaggcatcccgccccagagccagatggctgtgggccaggaggtgtttgggctgcttcctgggctcatgctgtatgccacgctctggctacgtgagcacaaccgtgtgtgtgacctgctgaaggcygagcaccccacctggggygatgagcagcttttccagacgacccgcctcatcctcataggggagaccatcaagattgtcatcgaggagtacgtgcagcagctgagtggctatttcctgcagctgaratttgacccagagctgctgttcggtgtccagttccaataccgcaaccgcattgccatggagttcaaccatctctaccactggcaccccctcatgcctgactccttcaagatcggtgggggcaggaacatggaccaccacrtcctgcatgtggctgtggatgtcatcagggagtctcgggagatgcggctgcagcccttcaatgagtaccgcragaggtttggcatgaaaccctacacctcyttccaggagctcrtaggagagaaggagatggcagcagagttggaggaattgtatggagacattgatgcrttggagttctacccyggactgcttcttgaaaagtgccatccaaactctatctttggggagagtatgatagagattggggctcccttttccctcaagggtctcctagggaatcccatctgttctccggagtactggaagccgagcacatttggcggcgaggtgggctttaacattgtcaagacggccacactgaagaagctggtctgcctcaacaccaagacctgtccctacgtttccttccgtgtgccggatgccagtcaggatgatgggcctgctgtggagcgaccatccacagagctctgaggggcaggaaagcagcattctggaggggagagctttgtgcttgtcattccagagtgctgaggccagggctgatggtcttaaatgctmattttctggtttggcatggtgagtgttggggytgacatttagaactttaagtctcacccattatctggaatatygtgattctgtttattcttccagaatgctgaactccttgttagcccttcagattgttaggagtggttctcatttggtctgccagaatackgggttcttagttgacaacctagaatgtcagatttctggttgatttgtaacacagtcattctaggatgtggagctactgatgaaatctgctagaaagttagggggttcttatttkgcattccagaatcttgactttctgattggtgattcaaagtgttgtgttcctggctgatgatccagaacagtggctcrtatcccaaatctgtcagcatctggctgtctagaatgtggatttgattcmttttcctgttcagtgagatatcatagagacggagatcctaaggtccaacaagaatgcattccctgaatctgtgcctgcactgagagggcaaggargtggggtgttcttcttgggacccccactaagaccctggtctgaggatgtagagagaacaggtgggctgtattcacgccattggttggaagctaccagagctctatccccatccaggtcttgactcatggcagctgtttctcatgaagctaataaaattcgctttctaaagttacctgttatatatctcttttggtcccatcctctaaagcagaggcaacactggaacatggctagcctttcttgtagccatggctgggcgtgctagaggttgcagcrtgagactttctgctgggatccttgggcccatcactgtatagacatgctaccactggtacttcctttctccctgcgggccaggcactgcccttttcaggaakctstcttaaaatacccattgccccagacctggaagatataacattcagttcccaccatctgattaaaacarcttcctcccttacagagcatacaacagagggggcacccggggaggagagcacatactgtgttccaatttcacscttttaattctcatttgttctcacaccaacagtgtgaagtgcgtggtataatctccatttcaaaaccaaggaagcagcctcagagtggtcgagtgacacacctcacgcaggctgagtccagagcttgtgctcctcttgattcctggtttgactcagttccaggcctgatcttgcctgtctggctcagggtcaaagacagaatggtggagtgtagcctccacctgatattcaggctactcattcagtcccaaatatgtattttcctaagtgtttactatgtgccagttcctgtaacaggtgtggggacacagcagtgagtaatcaatacagacaaggttctgcccttatggagctcacaytccagtggcagacaaacagaccataaataaggaaacgatgaaataagatatatacaaggtgagtgtgacttcccttctaacccyctctgctctgtcctcccctattgcgctctcaagaccagagacccaacagcagtgatctcagggcagacagccctccactccagctctgagacccttttctcaggacctctgtaggcagcagagagagaggacagaggggtaagatgaggggttgagggaaggttcttcatgatccacactttgggcttagtatttctcaggaagagctatggcccagaaacaacaggggaaactagagttcggtctgacagtccttggggttaagtctcctgtcttatggtccagaaactcctgtttctccttagttggctggaaactgctcccatcattccttctggcctctgctgaatgcagggaatgcaatccttccctgctcttgcagttgctctgacgtagaaagatccttcgggtgctggaagtctccatgaagagcttgtgtcctgtcctttcttgcagattctatttcccctcttctgctaatacctcttactttgcttgagaatcctctcctttcttattaatttcagtcttggtggttctatcaggggtgcattctggccaaggggtgggcctgtgaatcaatcctgggcaatcagacaccctctccttaaaaactggcccgtggagactgagatcactgactctgactcatccccacagctggctctgacaagatggtccatttgttcctgcttccgagatccccagggcagcctggatccctgcccttctcaagactttagcttttccttccatccggtggcctattccaggaattcctcttttgcttaaatcagttggagtttgtgtctgttgcttgtaatmaagcctttatggctgctgggctgagtgacacaagcactttaatggcctggagggacttttaatcagtgaagatgcaatcagacaagtgttttggaaagagcaccctygagaagggtgratgacagggcagagcaggaaggacaggaagctggcagaackgaggaggctgcagccgtggtccaaccaggagctgatggcagctggggctaggggaagggctttgagggtggaaggatgggatgggttccagaggtattcctctcttaaatgcaagtgcctagattaggtagactttgcttagtattgacaackgcacatgaaagttttgcaaagggaaacaggctaaatgyaccaagaaagcttcttcagagtgaagaatcttaatgcttgtaatttaaacatttgttcctggagttttgatttggtggatgtgatggttggttttatttgtcagtttggttgggctatagcacmcagttatttaatcaaacagtaatctaggtgtggctgtgaaggtatkttgtagatgtgattaacatctacaatcagttgactttaagtgaaagagattacttaaataatttgggtgagctgcacctgattagttgaaaggcctcaagaacaaacactgcagtttcctggaaaagaagaaactttgcctcaagactatagccatcgactcctgcctgagtttccagcctgctagtctgccctatggatttgaagtttgccaaccccaacaattgtgtgaattaatttctaaaaataaagctatatacagccatcctttggtatttgtgggggatttgtttcaggatctctacagataccaaaatctgtggttcctcaagtcctttatatgaagtggtatagtatttgcatataacctatgtgcaatctcctgtataacttcaatcatctctagattacttataatacctaatacagtgtaaatgctagtt

SEQ ID NO: 466 - DNA, 2026 bp, Homo sapiens
gccatcgcgccattcctagttaaggcggcacagggccgagkcgtagtgtgggtgactcctccgttccttgggtcccgtcgtctgtgatactgcagygcagccatggcagaaccgcagcccccgtccggcggcctcacggacgaggccgccctcagttgctgctccgacgcggaccccagtaccaaggattttytattgcagcagaccatgctacgagtgaaggatcctaagaagtcactggatttttatactagagttcttggaatgacgctaatccaaaaatgtgattttcccattatgaagttttcactctacttcttggcttatgaggataaaaatgacatccctaaagaaaaagatgaaaaaatagcctgggcgctctccagaaaagctacacttgagctgacacacaattggggcactgaagatgatgmgacccagagttaccacaatggcaattcagaccctcgaggwttcggtcatattggaattgctgttcctgatgtatacagtgcttgtaaaaggtttgaagaactgggagtcaaatttgtgaagaaacctgatgatggtaaaatgaaaggcctggcatttattcaagatcctgatggctactggattgaaattttgaatcctaacaaaatggcaaccttaatgtagtgctgtgagaattctcctttgagatttcagaagaaaggaaacaatgtgattcaagatatttacataccagaagcatctaggactgatggatcactgtcccrattcaaattattcttcagtccatttccccttcctatttcagctgttccttttcacctaactgttcagtcattctggttttcaagcagtgctttatctcatgtccttgaatatagttgtgtaactttattttttaggtaataattagaacagttcccttcagaggctgcatttgccttcttctgccacctaaatattacttcccttcaaatctgcctttgaatcatcatttttaaaaaaaaattaacatgtttttgttgtagttatcttctggggtttcaattcctcagaaacaacttttttcacaacggaaaggaaagaacactagtgttctttcagtaaagtacaaagtgtttattttacaaaagagtaggtactcttgagagcaattcaaatcatgctgacaaggatactgatagaaaaagtgatttcttcttattataaagtacatttaaagttcaaggactaaccttatttatttgggaaaggggaggaggaaggaaatgatatkgtacccagacactgggctaggctgcaactttatctcatttaatactcccagctgtcatgtgagaaagaaagcaggctaggcatgtgaaatcactttcatggattattaatggatttaagagggcatcaatcagctcaactcaagatttcataatcatttttagtatttagattgtgcctcaaagttgtagtacctcacaatacctccactggtttcctgttgtaaaaaccttcagtgagtttgaccattgtgctcttggctcttgggctggagtaccgtggtgagggagtaaacactagaagtctttagtacaaaactgctctagggacacctggtgattcctacacaagtgatgtttatatttctcataaagagtcttccctatcccaaggtcttcatgatgccagtagccatatatgataaattatgttcagtgataacttagttatcagaaatcagctcagtggtcttccccgccatgattcacatttgatgagtttttaaaaatcaaagtgattttgaaaatctctaatggctcagaaaataaaaacatccagtttgtggatgactatatttagatttctctagactctagtggaagacctttggaaaggccatgccaaccgtgcttgtactgctagaagcactttatgtttcctttttgrgtgaaatggatttatgtgagtgctttaaacaaatagcaatacttatagactgaaataaaatgaaacttcaaataagactatgtttaatttgtaa

SEQ ID NO: 467 - DNA, 1938 bp, Homo sapiens
gccatcgcgccattcctagttaaggcggcacagggccgagkcgtagtgtgggtgactcctccgttccttgggtcccgtcgtctgtgatactgcagygcagccatggcagaaccgcagcccccgtccggcggcctcacggacgaggccgccctcagttgctgctccgacgcggaccccagtaccaaggattttytattgcagcagaccatgctacgagtgaaggatcctaagaagtcactggatttttatactagagttcttggaatgacgctaatccaaaaatgtgattttcccattatgaagttttcactctacttcttggcttatgaggataaaaatgacatccctaaagaaaaagatgaaaaaatagcctgggcgctctccagaaaagctacacttgagctgacacacaattggggcactgaagatgatgmgacccagagttaccacaatggcaattcagaccctcgaggwttcggtcatattggaattgctgttcctgatgtatacagtgcttgtaaaaggtttgaagaactgggagtcaaatttgtgaagaaacctgatgatggtaaaatgaaaggcctggcatttattcaagatcctgatggctactggattgaaattttgaatcctaacaaaatggcaaccttaatgtagtgctgtgagaattctcctttgagatttcagaagaaaggaaacaatgtgattcaagatatttacataccagaagcatctaggactgatggatcactgtcccrattcaaattattcttcagtccatttccccttcctatttcagctgttccttttcacctaactgttcagtcattctggttttcaagcagtgctttatctcatgtccttgaatatagttgtgtaactttattttttaggtaataattagaacagttcccttcagaggctgcatttgccttcttctgccacctaaatattacttcccttcaaatctgcctttgaatcatcatttttaaaaaaaaattaacatgtttttgttgtagttatcttctggggtttcaattcctcagaaacaacttttttcacaacggaaaggaaagaacactagtgttctttcagtaaagtacaaagtgtttattttacaaaagagtaggtactcttgagagcaattcaaatcatgctgacaaggatactgatagaaaaattatttgggaaaggggaggaggaaggaaatgatatkgtacccagacactgggctaggctgcaactttatctcatttaatactcccagctgtcatgtgagaaagaaagcaggctaggcatgtgaaatcactttcatggattattaatggatttaagagggcatcaatcagctcaactcaagatttcataatcatttttagtatttagattgtgcctcaaagttgtagtacctcacaatacctccactggtttcctgttgtaaaaaccttcagtgagtttgaccattgtgctcttggctcttgggctggagtaccgtggtgagggagtaaacactagaagtctttagtacaaaactgctctagggacacctggtgattcctacacaagtgatgtttatatttctcataaagagtcttccctatcccaaggtcttcatgatgccagtagccatatatgataaattatgttcagtgataacttagttatcagaaatcagctcagtggtcttccccgccatgattcacatttgatgagtttttaaaaatcaaatggctcagaaaataaaaacatccagtttgtggatgactatatttagatttctctagactctagtggaagacctttggaaaggccatgccaaccgtgcttgtactgctagaagcactttatgtttcctttttgrgtgaaatggatttatgtgagtgctttaaacaaatagcaatacttatagactgaaataaaatgaaacttcaaataaga

SEQ ID NO: 468 - DNA, 3649 bp, Homo sapiens
cagcctccggacctcgctgcagcgcggacccggcccgcccgcccggctgcgaggctcctggctgcacatgacgtcccggtgtttggctggcgcagcaggtcctccgggccaccggccaccttcccaagcagcaaaggtggaggcggctccagttacatggaggagatgtacttcgcctggttggaaaacccccagagtgtccacaagtcctgggacagcttcttcagggaagccagcgaggaagccttttctggctctgctcagccacggcccccttctgttgtccatgagagcaggtctgcagtctcaagtcggaccaagaccagcaaattggtggaggaccacctggctgtgcagtccctgatccgggcctaccagatccggggtcaccatgtggcccagctggaccccctgggcattctggatgcagacctggactcctttgtgccctcagacttgatcacaaccattgataaactggccttctatgaccttcaggaggctgaccttgataaggagttccagctgccgacaaccaccttcattgggggctctgaaaacaccctytctctgcgggagatcattcggcgcctggagaacacctactgccagcacattggcctggagttcatgttcatcaaygatgtggagcagtgccartggatccggcagaagtttgagacccctggtgtgatgcagttctccagcgaggagaagcggaccctgctggcccggctagtgcgctccatgaggtttgaagacttcctggcccggaaatggtcctcagagaagcggtttggcctggagggctgtgaagtgatgattcctgccctcaagaccatcatcgacaaatccagcgagatggggattgagaatgtcatcttggggatgccacacaggggaaggctgaacgtgctggccaacgtgatccgcaaggacctggagcagatcttctgccagtttgaccccaagctggaggcggcggaygagggctccggggatgtcaagtaccacctgggcatgtaccatgagaggatcaaccgcgtcaccaaccggaacmtcactctgtcgctggttgccaacccctcccacytggaggcagtggaccctgtggtgcaggggaagacaaaggcagagcagttctaccgtggagatgcccagggcaagaaggtcatgtccatcctggttcatggggacgccgcctttgctggccagggcgtggtatatgagaccttccacctgagcgacctgccctcctacacgaccaatggtaccgtgcacgtcgtcgtcaacaaccagattggattcaccacagacccccgaatggcccgctcctcaccatacccgaccgacgtggcccgggtggtcaatgcgcctatcttccatgtgaatgccgatgacccagaggctgtgatatatgtgtgcagtgtggcagccgaatggagaaacactttcaacaaagatgttgtcgtggacctggtctgttaccgccggcgtggccacaatgagatggacgagcccatgttcacccagccgctcatgtacaagcagatccacagacaggtgcctgtgctgaagaagtacgcagacaagctgattgccgagggcacagtcaccctgcaggagtttgaggaagaaattgccaaatacgaccggatctgtgaggaggcttatggcaggtccaaggataaaaagattctgcatataaagcactggttggactccccctggcctggcttcttcaacgtagatggggagcccaagagcatgacatgcccagccacggggatccctgaggacatsctcacccacatcggcagtgtggccagctctgtgcccctggaggactttaagatccacactggcctctstcgcattctgcggggccgtgcggacatgaccaagaaccggayggtggactgggcgttggcagagtacatggcctttggctccctgctgaaggaaggcatccacgtgcggctcagygggcaggatgtggagaggggcacattcagtcaccggcaccatgttctccatgaccaggaggttgaccgcaggacgtgtgtgcctatgaatcatctctggcctgaccaggccccgtacaccgtgtgcaacagctccctctcggagtacggagtcctgggctttgagctgggctatgccatggccagccccartgccctggtcctctgggaggcccagtttggggacttccacaacacggcccagtgcatcatcgaccagttcatcagcaccggccaggccaagtgggtgcggcataatggcattgtgctgctgctgccccatggcatggaaggcatgggcccagagcactcgtcagcgaggcccgaaaggttcctgcagatgagcaatgatgactcggatgcctaccctgcattcaccaaggacttcgaggtgagccagctctatgactgcaactggatcgtggtcaactgctccacaccggccaactacttccacgtgctgcgccggcagatcctgctgcccttccgcaagccgctgattatcttcacacctaaatctctkctgaggcacccagaggccaagtccagctttgaccaaatggtatccgggaccagcttccagcgggtgattcctgaagatggggcygcagcacgggcccctgagcaggtgcagcggctcatcttctgcacgggaaaggtgtactatracctggtgaaggagcggagcagccaggacctggaggagaaagtggccatcacgcgcctggagcagatctctccattccccttcgacctgatcaagcaggaggcagagaagtacccaggtgcggagctggcctggtgtcaggaggagcacaagaacatgggctactatgactacatcagcccacgcttcatgaccatcctgaggcgcgcacggcccatatggtatgttggccgggacccagcggctgcaccagccacaggaaacaggaacactcacctggtgtcactgaagaagtttctggatactgccttcaatctccaggcctttgagggcaagacattttagagctgggcaaaacctgtgtaggtctygctgtgggtttgctggggaccaagggggtgatgaaaaggggaggggcggagctcctgcccargagaggggctgtggggccccaggataaaacagacacagtgwcagggccaagagccagcactgctggccttggtgtcatgccagaatctaccaggactgagggagccagaggagtcctrtaggcaggctactgtgctggagcatcccccagctgctcccatcttgctggaatttcttgggcggcttctccacctgtatctcaagacagacacccgggggcctgtgtctgtggccgctcccatcccggcagccctggctgctgctcgccccaccctcgcttatctgtagattcaaagcgatgttctcttctgtgctcttagaagtagggagttcagcagtaacagccaggtgaagcgaacctgctgggtgatttgtttgcgctctgttttatggggcattcctgcgagatgtgtcagcttctgtrtgaaatgcagccacagctcatgtgtaccaaagtagaaaaccaaatcacagagaaataaaaacatgcttcagagagatttgctgttttcatttcatgttgtaa

SEQ ID NO: 469 - DNA, 3351 bp, Homo sapiens
gcgcgcgcaccccttccgcgcagccccctgacctgcagcctccggacctcgctgcagcgcggacccggcccgcccgcccgatccggggtcaccatgtggcccagctggaccccctgggcattctggatgcagacctggactcctttgtgccctcagacttgatcacaaccattgataaactggccttctatgaccttcaggaggctgaccttgataaggagttccagctgccgacaaccaccttcattgggggctctgaaaacaccctytctctgcgggagatcattcggcgcctggagaacacctactgccagcacattggcctggagttcatgttcatcaaygatgtggagcagtgccartggatccggcagaagtttgagacccctggtgtgatgcagttctccagcgaggagaagcggaccctgctggcccggctagtgcgctccatgaggtttgaagacttcctggcccggaaatggtcctcagagaagcggtttggcctggagggctgtgaagtgatgattcctgccctcaagaccatcatcgacaaatccagcgagatggggattgagaatgtcatcttggggatgccacacaggggaaggctgaacgtgctggccaacgtgatccgcaaggacctggagcagatcttctgccagtttgaccccaagctggaggcggcggaygagggctccggggatgtcaagtaccacctgggcatgtaccatgagaggatcaaccgcgtcaccaaccggaacmtcactctgtcgctggttgccaacccctcccacytggaggcagtggaccctgtggtgcaggggaagacaaaggcagagcagttctaccgtggagatgcccagggcaagaaggtcatgtccatcctggttcatggggacgccgcctttgctggccagggcgtggtatatgagaccttccacctgagcgacctgccctcctacacgaccaatggtaccgtgcacgtcgtcgtcaacaaccagattggattcaccacagacccccgaatggcccgctcctcaccatacccgaccgacgtggcccgggtggtcaatgcgcctatcttccatgtgaatgccgatgacccagaggctgtgatatatgtgtgcagtgtggcagccgaatggagaaacactttcaacaaagatgttgtcgtggacctggtctgttaccgccggcgtggccacaatgagatggacgagcccatgttcacccagccgctcatgtacaagcagatccacagacaggtgcctgtgctgaagaagtacgcagacaagctgattgccgagggcacagtcaccctgcaggagtttgaggaagaaattgccaaatacgaccggatctgtgaggaggcttatggcaggtccaaggataaaaagattctgcatataaagcactggttggactccccctggcctggcttcttcaacgtagatggggagcccaagagcatgacatgcccagccacggggatccctgaggacatsctcacccacatcggcagtgtggccagctctgtgcccctggaggactttaagatccacactggcctctstcgcattctgcggggccgtgcggacatgaccaagaaccggayggtggactgggcgttggcagagtacatggcctttggctccctgctgaaggaaggcatccacgtgcggctcagygggcaggatgtggagaggggcacattcagtcaccggcaccatgttctccatgaccaggaggttgaccgcaggacgtgtgtgcctatgaatcatctctggcctgaccaggccccgtacaccgtgtgcaacagctccctctcggagtacggagtcctgggctttgagctgggctatgccatggccagccccartgccctggtcctctgggaggcccagtttggggacttccacaacacggcccagtgcatcatcgaccagttcatcagcaccggccaggccaagtgggtgcggcataatggcattgtgctgctgctgccccatggcatggaaggcatgggcccagagcactcgtcagcgaggcccgaaaggttcctgcagatgagcaatgatgactcggatgcctaccctgcattcaccaaggacttcgaggtgagccagctctatgactgcaactggatcgtggtcaactgctccacaccggccaactacttccacgtgctgcgccggcagatcctgctgcccttccgcaagccgctgattatcttcacacctaaatctctkctgaggcacccagaggccaagtccagctttgaccaaatggtatccgggaccagcttccagcgggtgattcctgaagatggggcygcagcacgggcccctgagcaggtgcagcggctcatcttctgcacgggaaaggtgtactatracctggtgaaggagcggagcagccaggacctggaggagaaagtggccatcacgcgcctggagcagatctctccattccccttcgacctgatcaagcaggaggcagagaagtacccaggtgcggagctggcctggtgtcaggaggagcacaagaacatgggctactatgactacatcagcccacgcttcatgaccatcctgaggcgcgcacggcccatatggtatgttggccgggacccagcggctgcaccagccacaggaaacaggaacactcacctggtgtcactgaagaagtttctggatactgccttcaatctccaggcctttgagggcaagacattttagagctgggcaaaacctgtgtaggtctygctgtgggtttgctggggaccaagggggtgatgaaaaggggaggggcggagctcctgcccargagaggggctgtggggccccaggataaaacagacacagtgwcagggccaagagccagcactgctggccttggtgtcatgccagaatctaccaggactgagggagccagaggagtcctrtaggcaggctactgtgctggagcatcccccagctgctcccatcttgctggaatttcttgggcggcttctccacctgtatctcaagacagacacccgggggcctgtgtctgtggccgctcccatcccggcagccctggctgctgctcgccccaccctcgcttatctgtagattcaaagcgatgttctcttctgtgctcttagaagtagggagttcagcagtaacagccaggtgaagcgaacctgctgggtgatttgtttgcgctctgttttatggggcattcctgcgagatgtgtcagcttctgtrtgaaatgcagccacagctcatgtgtaccaaagtagaaaaccaaatcacagagaaataaaaacatgcttcagagagatttgctgttttcatttcatgttgtaa

SEQ ID NO: 470 - DNA, 3742 bp, Homo sapiens
ggtaattggcacggcgcgcgcgcaccccttccgcgcagccccctgacctgcagcctccggacctcgctgcagcgcggacccggcccgcccgcccgaatgagtcagctgaggctgctgccgtcccgtcttggggtacaggctgcgaggctcctggctgcacatgacgtcccggtgtttggctggcgcagcaggtcctccgggccaccggccaccttcccaagcagcaaaggtggaggcggctccagttacatggaggagatgtacttcgcctggttggaaaacccccagagtgtccacaagtcctgggacagcttcttcagggaagccagcgaggaagccttttctggctctgctcagccacggcccccttctgttgtccatgagagcaggtctgcagtctcaagtcggaccaagaccagcaaattggtggaggaccacctggctgtgcagtccctgatccgggcctaccagatccggggtcaccatgtggcccagctggaccccctgggcattctggatgcagacctggactcctttgtgccctcagacttgatcacaaccattgataaactggccttctatgaccttcaggaggctgaccttgataaggagttccagctgccgacaaccaccttcattgggggctctgaaaacaccctytctctgcgggagatcattcggcgcctggagaacacctactgccagcacattggcctggagttcatgttcatcaaygatgtggagcagtgccartggatccggcagaagtttgagacccctggtgtgatgcagttctccagcgaggagaagcggaccctgctggcccggctagtgcgctccatgaggtttgaagacttcctggcccggaaatggtcctcagagaagcggtttggcctggagggctgtgaagtgatgattcctgccctcaagaccatcatcgacaaatccagcgagatggggattgagaatgtcatcttggggatgccacacaggggaaggctgaacgtgctggccaacgtgatccgcaaggacctggagcagatcttctgccagtttgaccccaagctggaggcggcggaygagggctccggggatgtcaagtaccacctgggcatgtaccatgagaggatcaaccgcgtcaccaaccggaacmtcactctgtcgctggttgccaacccctcccacytggaggcagtggaccctgtggtgcaggggaagacaaaggcagagcagttctaccgtggagatgcccagggcaagaaggtcatgtccatcctggttcatggggacgccgcctttgctggccagggcgtggtatatgagaccttccacctgagcgacctgccctcctacacgaccaatggtaccgtgcacgtcgtcgtcaacaaccagattggattcaccacagacccccgaatggcccgctcctcaccatacccgaccgacgtggcccgggtggtcaatgcgcctatcttccatgtgaatgccgatgacccagaggctgtgatatatgtgtgcagtgtggcagccgaatggagaaacactttcaacaaagatgttgtcgtggacctggtctgttaccgccggcgtggccacaatgagatggacgagcccatgttcacccagccgctcatgtacaagcagatccacagacaggtgcctgtgctgaagaagtacgcagacaagctgattgccgagggcacagtcaccctgcaggagtttgaggaagaaattgccaaatacgaccggatctgtgaggaggcttatggcaggtccaaggataaaaagattctgcatataaagcactggttggactccccctggcctggcttcttcaacgtagatggggagcccaagagcatgacatgcccagccacggggatccctgaggacatsctcacccacatcggcagtgtggccagctctgtgcccctggaggactttaagatccacactggcctctstcgcattctgcggggccgtgcggacatgaccaagaaccggayggtggactgggcgttggcagagtacatggcctttggctccctgctgaaggaaggcatccacgtgcggctcagygggcaggatgtggagaggggcacattcagtcaccggcaccatgttctccatgaccaggaggttgaccgcaggacgtgtgtgcctatgaatcatctctggcctgaccaggccccgtacaccgtgtgcaacagctccctctcggagtacggagtcctgggctttgagctgggctatgccatggccagccccartgccctggtcctctgggaggcccagtttggggacttccacaacacggcccagtgcatcatcgaccagttcatcagcaccggccaggccaagtgggtgcggcataatggcattgtgctgctgctgccccatggcatggaaggcatgggcccagagcactcgtcagcgaggcccgaaaggttcctgcagatgagcaatgatgactcggatgcctaccctgcattcaccaaggacttcgaggtgagccagctctatgactgcaactggatcgtggtcaactgctccacaccggccaactacttccacgtgctgcgccggcagatcctgctgcccttccgcaagccgctgattatcttcacacctaaatctctkctgaggcacccagaggccaagtccagctttgaccaaatggtatccgggaccagcttccagcgggtgattcctgaagatggggcygcagcacgggcccctgagcaggtgcagcggctcatcttctgcacgggaaaggtgtactatracctggtgaaggagcggagcagccaggacctggaggagaaagtggccatcacgcgcctggagcagatctctccattccccttcgacctgatcaagcaggaggcagagaagtacccaggtgcggagctggcctggtgtcaggaggagcacaagaacatgggctactatgactacatcagcccacgcttcatgaccatcctgaggcgcgcacggcccatatggtatgttggccgggacccagcggctgcaccagccacaggaaacaggaacactcacctggtgtcactgaagaagtttctggatactgccttcaatctccaggcctttgagggcaagacattttagagctgggcaaaacctgtgtaggtctygctgtgggtttgctggggaccaagggggtgatgaaaaggggaggggcggagctcctgcccargagaggggctgtggggccccaggataaaacagacacagtgwcagggccaagagccagcactgctggccttggtgtcatgccagaatctaccaggactgagggagccagaggagtcctrtaggcaggctactgtgctggagcatcccccagctgctcccatcttgctggaatttcttgggcggcttctccacctgtatctcaagacagacacccgggggcctgtgtctgtggccgctcccatcccggcagccctggctgctgctcgccccaccctcgcttatctgtagattcaaagcgatgttctcttctgtgctcttagaagtagggagttcagcagtaacagccaggtgaagcgaacctgctgggtgatttgtttgcgctctgttttatggggcattcctgcgagatgtgtcagcttctgtrtgaaatgcagccacagctcatgtgtaccaaagtagaaaaccaaatcacagagaaataaaaacatgcttcagagagatttgctgttttcatttcatgttgtaa

SEQ ID NO: 471 - DNA, 2523 bp, Homo sapiens
atgtggctgaagctttttttcttgctcctctatttcctggtcctgttcgtcctggccaggttttttgaggccattgtgtggtatgaaactggcatctttgccacccagctggtggatccggtggcgctgagcttcaagaagctgaagaccattttggagtgccgggggttgggctactcagggtkgcccgagaagaaggatgtccgggagctggtggaaaatgttattcttttcctttcttcaggtgacttgatggagggtgagctctattctgctctcaaggaagaagaagcatccgaatcggtttctagtaccaatttcagtggtgaaatgcacttctatgagcttgtggaagacacaaaagatggcatctggctggttcaggtcatagcaaatgacagaagtcccttggtgggcaaaattcactgggagaaaatggttaaaaaggtgtcaagatttggaatacgtacaggcacatttaactgttccagtgatcccagatattgcaggagaagaggctgggtccgatccacactcattatgtctgttccacaaacaagtacttcaaaagggaaagtcatgcttaaagaatacagtggacgcaagattgaagtagagcacatttttaaatggataactgctcatgcrgcttctcggatcaaaaccatttataatgctgaacacttgaaagaagaatggaataaaagtgatcagtattggttaaaaatatacctatttgcaaaccttgaccagcccccagctttcttctctgcactaagtataaagtttactggaagagttgagtttatttttgttaatgtagaaaattgggacaacaagagttatatgacagatattggcatatataatatgccatcatacatacttagaactcctgaaggaatttacaggtatggaaaccacacaggcgaatttatatcccttcaggccatggattcatttttgcgctcattacaacccgaggtaaatgatctgtttgttttgagcttggttctagttaatcttatggcttggatggacttatttattacacaaggagctaccataaagcgatttgtggttctcataagcactttagggacatataattctctattaattatttcctggctacctgtgttgggctttttacagctaccttacttagatagcttttatgaatatagcttaaaattgttgagatattccaatacaaccacactggcttcatgggtaagggcagactggatgttttactcttcacacccagccctgtttctcagtacataccttggtcatggtttactaattgattactttgagaagaagagaaggcgcaacaacaacaatgatgaagtcaatgccaataacttagaatggttatcaagtctgtgggactggtacaccagctacctcttccacccgattgcttcttttcagaactttcctgtagaatctgattgggacgaagaccctgacttattcttggagcgcttagctttccctgacctttggcttcaccctctgataccaactgattatattaaaaacttaccaatgtggcgatttaaatgtcttggagtccagtctgaagaggaaatgtcggaggggtctcaagataytgaaaatgactcggaaagtgagaacacagacactttgagtagtgagaaggaagtatttgaagataagcaaagcgtacttcacaattctccaggaacagcaagtcactgtgatgctgaggcttgttcatgtgccaataaatattgtcagaccagcccatgtgaaaggaaggggaggtcatatggatcatataacactaatgaagatatggaacctgattggttaacttggcctgctgatatgctgcactgtactgaatgtgttgtttgcctakagaattttgaaaatggatgtttgctaatggggttgccttgtggtcatgtgtttcatcagaattgcattgtgatgtggttggctgggggccgacattgttgccctgtttgccggtggccttcttataaaaaaaagcagccatatgcacaacaccagcccttgtcaaatgatgtcccatcttaaccatgtgcaatttgtcctttataagctttgagtatcttacagcttgcctttttaatgttagtcacaatgtttttgtggtttgaagtttaktttaatgttagtgcagtgacgggaaatacacattatgctaatgttgatgacagaatttatttggttgccttgtgtgttaattkaatgcatacctaattgtaaaatttttttatttacaacattggaaattcagaagttaatgtttttttgtaagcacaaaagaagtattatagaaatttatcctagcaagactttacaagataggatcaaattctaatggaattgagccggtttcttatcctaaatgtttcctccctttttacaatctctgtccagcacctcttggttaaataatgtatgctgtgagacatgaaattaaaacagacctatgaaataaattattttaaaaccagaaga

SEQ ID NO: 472 - DNA, 3456 bp, Homo sapiens
cgctgatacacggttgtggagggtacggccgcggtctccggaggtggcgggggtgttggggacgggtgctgcgaccggcactgcccatccgagcgggacgggcgctgagtggccgggaggcagccgggtagccgcctggaggagcagtctcggggcctattattggttttttccctccgagaccgattccatctgcagagaccgcgacgccccatcctgggccgggccgcagtgcccgcccgcctgagaggcgccgcccgccagccggcccgagcgaacctggagccgccgccgtgcccgccgctcttctcgcggagcctgggcggtcggcggggcctggggcctgggcttcgggcgcggcgttgcggcggccgctcctccccgcgcagaacacgctgggccccgggcctggcccggccgagcgccgcgccctcctgacccgcggccgcgggagtccggcccccacggcccctcgggccccggcctgccgcccggatccccgcctcctgggcggatctgagttattttttggtctccccctcccccttgagatcgcggcaccggagggccgaccccgccacctgggtcagtgcccgccccgggggaagcgtccctcgttttgttcttccccgcgagctctccccgcgcccctctcctttctgtgcttaatggatgggggttttgagtttttcccctttatttttgtcggctcttgactgggaggcccggcgcgaggctctgcgtctctgcgtccctcgtcgccgcctcgcgcccgcgcggatcccgtcacctgcttccccgccggggatggccggccagtgacggcgccgggtggcccgcgcgtggacacggggccctcgcccaagctgccaccgagccgcggccccygccctcgacccttctctctcccgtattccgagctctctggaaagagaggaractmcagggaagatgtggctgaagctttttttcttgctcctctatttcctggtcctgttcgtcctggccaggttttttgaggccattgtgtggtatgaaactggcatctttgccacccagctggtggatccggtggcgctgagcttcaagaagctgaagaccattttggagtgccgggggttgggctactcagggtkgcccgagaagaaggatgtccgggagctggtggaaaagtcaggtgacttgatggagggtgagctctattctgctctcaaggaagaagaagcatccgaatcggtttctagtaccaatttcagtggtgaaatgcacttctatgagcttgtggaagacacaaaagatggcatctggctggttcaggtcatagcaaatgacagaagtcccttggtgggcaaaattcactgggagaaaatggttaaaaaggtgtcaagatttggaatacgtacaggcacatttaactgttccagtgatcccagatattgcaggagaagaggctgggtccgatccacactcattatgtctgttccacaaacaagtacttcaaaagggaaagtcatgcttaaagaatacagtggacgcaagattgaagtagagcacatttttaaatggataactgctcatgcrgcttctcggatcaaaaccatttataatgctgaacacttgaaagaagaatggaataaaagtgatcagtattggttaaaaatatacctatttgcaaaccttgaccagcccccagctttcttctctgcactaagtataaagtttactggaagagttgagtttatttttgttaatgtagaaaattgggacaacaagagttatatgacagatattggcatatataatatgccatcatacatacttagaactcctgaaggaatttacaggtatggaaaccacacaggcgaatttatatcccttcaggccatggattcatttttgcgctcattacaacccgaggtaaatgatctgtttgttttgagcttggttctagttaatcttatggcttggatggacttatttattacacaaggagctaccataaagcgatttgtggttctcataagcactttagggacatataattctctattaattatttcctggctacctgtgttgggctttttacagctaccttacttagatagcttttatgaatatagcttaaaattgttgagatattccaatacaaccacactggcttcatgggtaagggcagactggatgttttactcttcacacccagccctgtttctcagtacataccttggtcatggtttactaattgattactttgagaagaagagaaggcgcaacaacaacaatgatgaagtcaatgccaataacttagaatggttatcaagtctgtgggactggtacaccagctacctcttccacccgattgcttcttttcagaactttcctgtagaatctgattgggacgaagaccctgacttattcttggagcgcttagctttccctgacctttggcttcaccctctgataccaactgattatattaaaaacttaccaatgtggcgatttaaatgtcttggagtccagtctgaagaggaaatgtcggaggggtctcaagataytgaaaatgactcggaaagtgagaacacagacactttgagtagtgagaaggaagtatttgaagataagcaaagcgtacttcacaattctccaggaacagcaagtcactgtgatgctgaggcttgttcatgtgccaataaatattgtcagaccagcccatgtgaaaggaaggggaggtcatatggatcatataacactaatgaagatatggaacctgattggttaacttggcctgctgatatgctgcactgtactgaatgtgttgtttgcctakagaattttgaaaatggatgtttgctaatggggttgccttgtggtcatgtgtttcatcagaattgcattgtgatgtggttggctgggggccgacattgttgccctgtttgccggtggccttcttataaaaaaaagcagccatatgcacaacaccagcccttgtcaaatgatgtcccatcttaaccatgtgcaatttgtcctttataagctttgagtatcttacagcttgcctttttaatgttagtcacaatgtttttgtggtttgaagtttaktttaatgttagtgcagtgacgggaaatacacattatgctaatgttgatgacagaatttatttggttgccttgtgtgttaattkaatgcatacctaattgtaaaatttttttatttacaacattggaaattcagaagttaatgtttttttgtaagcacaaaagaagtattatagaaatttatcctagcaagactttacaagataggatcaaattctaatggaattgagccggtttcttatcctaaatgtttcctccctttttacaatctctgtccagcacctcttggttaaataatgtatgctgtgagacatgaaattaaaacagacctatgaaataaattattttaaaaccagaaga

SEQ ID NO: 473 - DNA, 570 bp, Homo sapiens
ctgacctctggccgctattcgaagggaagggagccccctataaaacagcctacagtggacagtctggtcggcagagccgcaggtcagtcgtgaagagggagctctattgccaccatgagtttctccggcaagtaccaactgcagagccaggaaaactttgaagccttcatgaaggcaatcggtctgccggaagagctcatccagaaggggaaggatatcaagggggtgtcggaaatcvtkcagaatgggaagcacttcaagttcaccatcaccrctgggtccaaagtgatccaaaacgaattcacggtgggggaggaatgtgagctggagacaatgacaggggagaaagtcaagacagtggttcagttggaaggtgacaataaactggtgacarctttcaaaaacatcaagtctgtgaccgaactcaacggcgacataatcaccaataccatgacattgggtgacattgtcttcaagagaatcagcaagagaatttaaasaagtctgcatttcatattattttagtgtgtaaaattaatgtaataaagtgaactttgttttaaaaaaaaa

SEQ ID NO: 474 - DNA, 2215 bp, Homo sapiens
ctgacctctggccgctattcgaagggaagggagccccctataaaacagcctacagtggacagtctggtcggcagagccgcaggtcagtcgtgaagagggagctctattgccaccatgagtttctccggcaagtaccaactgcagagccaggaaaactttgaagccttcatgaaggcaatcggtctgccggaagagctcatccagaaggggaaggatatcaagggggtgtcggaaatcvtkcagaatgggaagcacttcaagttcaccatcaccrctgggtccaaagtgatccaaaacgaattcacggtgggggaggaatgtgagctggagacaatgacaggggagaaagtcaaggtaggagggcatcccttctgctgtcagaactttccttggaacctggccctgggacctcattcctcaaggctcaaacctcacaattccacccacagataccatctctgaacccacctcccatgtgggagaagcagagagacaaaggcagctcttagggaagaatcttatagagaagctgctctcctcttcccagggactgtctggggggtgttccagcccctaaagtctgagctctcccatatggaggatatgggagaaccaggcatacagcaggattctaagtctcaggttctcccaggcccagtgctcctagcactaagagtcctctaagcagggcccaggagtggggcaagtgggagtttgtgaaaaacccttaactgagcccaaagtcaactggccttcactgaacctagagctggtggtgatagggagagacttyttgaaggaggtgctagcaataccagaataccagggccccagacaggtgctcagaccctgccttcaggggtggtcacaaagtctctggcttcagccaccccatctgtaaaataagaacagtcaacctccctagactgaaggcagtgcagggcagcatcacttctgctgggcacaactcatggtgtgcaatgacagctggggtgtgggctgtgtgagtggttggcagatggtggcagggggatcctggcaatgggggtgcccgtctcctcctccctctgaaacactccatgctctagcagccctcttctctcctccccgtggacagctctgttcattgggctgggcgtgtttgctttttatctcttctggtcactctttatttctgcctctccaattagaacattacaggtcaggatgattttaggaggataatattcttgatgtgctcatggtcaagggatttaactatgggccttttccaaattttctttttggaggcaaaatgtttaatgttgcccagggtctttggctccctgctgggttcctgtcrtctcttccaggatgtataagggcttggaaggaggccacaatatgaaaagttaacgctctgggaagaataatacatacctggttgggcgggtggctcatgcctacaatcccagcactttgggaggctgaagtgaaaggactgtttgagcctaggagttcaagaccagcctgggcaacatagcaagacctcatctcaattaaaaaaaaaaaaaaaagaagaatacataccaaagcaaaatatgtattctctactggtcaatatttgaattttgccactacctccctccattagcttgggagaattgagattttacttgatttgattttagcatttgtatttggggccacttaggtgttccatgctcatttctagatcacatgccatgaattaaagttctgacaaaagaagtcgtgacattttatttagttcttaaatgcacctcacttctatttggagccagagaactagaggcttgggatcataggaaccagagcattttggttgttatgagctgagacctgtgcaaaggaagcaacttcattagcaaggctcttgccccccaccaccccttcctcacaggtcacctctctgttccctgcagacagtggttcagttggaaggtgacaataaactggtgacarctttcaaaaacatcaagtctgtgaccgaactcaacggcgacataatcaccaatgtaagttggtggtgctctgagcgtgtggctcccagtgcttgaggggagaggggaggtgaagcatggggagcggctcacataccctaatgccacccctccaccctycaacccccaaacttctttcctgtggtcagtatctgccagcactwactgaggatccatcatgtcccaggcagttt

SEQ ID NO: 475 - DNA, 6190 bp, Homo sapiens
cggcggcggacgcggcgggctcggccacaggtaacccgcaggaccgaggccctggggccgccggagccagcgggagccagtccccgtcttcgcccctcgccccccaccgtgtcgccggccttggtccctgcggcgcggacgtccggcgcgggagagaaaggtcccgaagatggcatattcataaagacatcttctgatgattgtgaacatctttacctctgggtgccaggccgggccagtgacttcgtgttgagctgaaggaacttgtctaccgcttccctgaaaacctttctttcctaattcatgagccagcaagatgcggtcgctgcactttcagagcgccttctcgtagctgcgtacaaaggccaaacagagaatgtggttcagctcatcaacaagggcgccagggtagcggttaccaagcatggccggactcccctgcatcttgctgccaataagggccatcttcctgtggtccagatcttgctgaaggctggctgcgaccttgatgtccaggatgatggggaccagaccgccttgcaccgggccacagtggtggggaacacggagatcatcgcggcgctcatccacgaagggtgtgccctggacagacaagacaaggatgggaatacagccttgcatgaagcatcctggcatggtttcagcsagtcrgccaagctgctcrttaaagcaggagccaacgtgcttgccaagaacaaggcggggaacacagctctgcacctggcctgccagaacagccactcccagagcacgcgcgtcctcctgctggccgggtcccgcgctgacctcaaaaataatgcaggagacacctgtttgcacgttgctgcgcgctataatcacttgtccatcattaggctcctcctcactgctttctgttctgtccatgaaaagaaccaggctggagacacagcacttcacgttgctgctgccctaaatcacaagaaggtggccaaaatcttactggaagccggagcagataygaccattgttaacaatgcaggccagactccgctggagactgcccgmtaccacaataacccggaagttgctcttctccttactaaagctccccagggcagtgtctcagcaggagacacccccagcagtgaacaggctgtggccagaaaagaagaagccagagaagagttcctgtcagcctccccagaacccagagcaaaggatgacaggaggagaaagtcaaggcccaaggtgtcagcrttttctgaccccaccccaccagccgaccaacagcctggacaccagaagaacctgcatgctcataatcaccctaaaaagaggaacaggcatcggtgttcatccccacccccaccccatgagttcagggcgtatcagctctacacattgtaccggggcaaggatgggaaagtgatgcaggcaccaataaatggttgtcgatgtgaacctctaatcaacaagctggagaatcagttggaggctactgtggaggagataaaagcagagctgggatcggttcaggacaaaatgaatacaaagctggggcagatggagaataagacccagcaccaamtgcgtgttttggacaagctgatggttgagcgactttctgcagagaggacggagtgcctgaaccgcctgcaacagcactcagacacagagaagcatgagggggagaaacgacagatatccttggtggatgaattaaaaacctggtgyatgttaaagattcagaatctggagcagaagctttctggagattctagggcctgcagagctaaatccacaccatctacttgtgagtcctctacaggtgtggaccaattagtggtgactgcaggtccagcarcagcttccgacagctcccctccagtggttaggcccaaagagaaggccctcaactccactgctacccagagactccagcaggagctgtcrtcttctgactgtacaggctcccgactgagaaacgtcaaggtccagacagccttgctacccatgaatgaggcagccagatctgatcagcaggctgggccctgcgtcaacagaggcactcaaactaagaagtctgggaagagtgggccaacaaggcatcgtgcccagcaacyygcagccrgcagcacctgtgggcagccgccaccagccasaggcagcgagcagactggccctcacattcgggacacctcccaagctctggagcttacccagtatttttttgaggctgtttctacccagatggaaaagtggtatgaaaggaagattgaagaagcacgaagccaagccaatcagaaagcccagcaagataargctacattgaaggaacacattaaaagtttagaagaggaacttgccaaactaaggactagggtgcagaaggaaaattagcaccaataaaraggaaatatgaaaggattcttgaagatttccagttttgcaactgcataatagctatgcccaaggagtcaactattgtatatattgcagatttgcctttttaaaaaaatcactaattctacaatgtgccagatacatgtttcctatgcccaggaagttatgaagacttcaacaattaaactgaaaccaggggaagcttgcttagttttgggtttcattataaactcttagcctcagtccaggttaatctgaagtttgaaagctcagattaagcaagccatgccaagaaactggacgatgtgtaagcctagactctaaaattcaagatgtgtgaaataatataagtcaaaagcaagaaaaacgtaatcccgtctgaactcaagtagtcattcatataaatttgaacacacctgctgtgcctagacaagtgtctttctgtaagagctgtaactctgagatgtgctaaataaaccctctttctcaaattcgtaattctccaactgttgacattttaatcacatgaaaagttatcagatttttgaggagaaatattttcatgatgtcacaagatccaatatatcttatgataaaatttattgaaaagtcagtttatttaaataatgaataattggctaacagctctggaaacaatgagatcaaatgagaaagattcaaattgtttgttattttctgtattttcagtcaaaaaatcagttatatagtgattttaaagcagattaatggaaaaaaattcatgtaacaattacctgaaaatttataacctattcctaatcaaacccaattatatcagaatacctttctgaatttgagatttttgctctacattttataatgaataaggctattttttgaargtatttcattttgaattctgtcattaacctcaaaagctttctactgctttgcggtgaaggcaaaatattcgataactcaacttaggccccactgttccccaacttcatggaggccagaagactttactttgttccataatgaaatataaacacagaacaaagttgtaaaagtagcatggatatgttgaaactttggacaagcttcttgtcctttggaatatgggatttatattcatctcctcaatatcccatgtatgcacagaaacttcagttctatttctatagacacaggaacctagtgactattgaacgtaattgtaataaaatgctgctcattgagccaaagagaagaaatgatttattaacatggggacaccaagaaaaacaaagtatgcttttattccctttgtcaagctcagttttagggttttttctttttttkatagtgacaatccatagatatagacattcctaaaagaaaaataaataattcagtagatatatgtcactgttacctgaatatggaatgaatttgatgttttttattttgttgagacagggtcttgctctgtcacccagactggagtgcagtggcatgatcacacctcactgcagccttggcctctcaggctcgtgatcctcctgcctcaacctcscaagtagcttgggactacaggcgtgtgccaccagtcctggctaattttttgtagatataaggtctcatgatattgcccaggctgaatttgatgttatttcaagttgattttcatgtgtttgggagcttgtcttgttctcaactactacgcaggtagacagtcttcccccagagactcattagattgcaatatagaggcactttctcatttccctattgttcctaatacagaattgtagagctggagagtaccttcagttttctaaatctattctcaaacaggatatcactaacctctttagaatcattcctcagtatacatcaatttattgagaactgcctaatactcaagaaattaaatcctgagttcagtaggctgtgttccaagcaggaattattttcacttaccaaaatatctcctattacctcaaggtatccttgttgaggaatgctgaaaactaaattttaagtatcaagtctagaccatagagtgctttggtgggagtattttgattacctcctacccatcagaagcaggcagctaatattgtgaactgagtatttttgtcaaaagtcacagggaagagactacagaagaatgagaagggtcaaaaggacctagtgtggcttactacatggatcttgtctcttggaggtctgtcgtagaagaagaaacaaatagaggtgatgaagacacagaacaggctcagtcagcatcctcacccagagatggcaacatctattaagaccaatgcaataccttttcatcttcagcaaatgttgtttcatctgtttttgatccttggcattgtcaaaaacttaactgcaggtccagtgtatatttttccttatttttcccttttagctatctgctaaagtgagtaaatgccacaactgtacttttccaaagaaaaagaactattgacaacttatagcctgtcatgcaggtcatgtttcaaatcaaggctgaaattttcaacagctgtgggaaaaactaaaacacagaaatactgtacagtattagtgtttttttaaagaaattgttagtgcattattgagtatactaaatatctgtgattaaataaattagttctaacttttgattttgggagcccaaaataaagggagtgttgttttcatggttatgccttgtttgtggagtcaagtgttgatatacttgaggcatgttatgtgtcttctaattaatatttttatcaccttgaatttgtgtctcttccaagcattaaagatactatggatcttaaattccttattaaaaaaatgcaagtgtgaatactttgtttagcttacattttaatttattgtggttgaccacattttatggctcctgagtgccttcacccagctacactttaccttgtatctataaaagtgtaatttagagtaaatacattggctgtaaagtcgmgatcaggtgctctccaccaaaagcaaaacaaaactgctgaaatgtggcaaggtttctcagtgcaagcttaaatgtttaaactgttgaccatttggaaaatactggacaaaggggaaggacaaaacatcatttgcaatagttaaaggttatgcaaggcaaggcaacattatactttttgactaagttattaaaagttaaatgcatttcttctttgaagtgtggattataaaagccaatcaaagacaaaaccagtttgaaaaaccttttgtattctacaataccttttatgagtaagagtaaaacatacatttcttatttgtaattttatttaaggagaaatactctttccctttgatacgactataatattataaacagcaaggaatatgttctgctttctgcaattttagaaagtcattccattctgggtgacagaatgaggtaagactgtctctttaaaaaaaaaaamaactcacacctgtaatcctagcactctggccaccgaggcaggtggatygcttgagcccaggagttygagactagcctggcaacaaagtgagattccccctcctctctctgaaaagtaaaaaaaattagccggtcatggtggcayatgcctgtggtcccagctaaatgaaaatctgaagcaggtggatctcttgagcccaggagctcaaggttgcagtgagccatgttcgcgccaccacactccagcttgtgcaacagagaccctgtctcaaaaaaaagtcatctgtgtgtttcttgcaggcacatctatggcaatgcttgtaccatgaatttaaaacttctaacttgatggcacttttttattttttttga

SEQ ID NO: 476 - DNA, 5815 bp, Homo sapiens
cggcggcggacgcggcgggctcggccacaggtaacccgcaggaccgaggccctggggccgccggagccagcgggagccagtccccgtcttcgcccctcgccccccaccgtgtcgccggccttggtccctgcggcgcggacgtccggcgcgggagagaaaggtcccgaagatggcatattcataaagacatcttctgatgattgtgaacatctttacctctgggtgccaggccgggccagtgacttcgtgttgagctgaaggaacttgtctaccgcttccctgaaaacctttctttcctaattcatgagccagcaagatgcggtcgctgcactttcagagcgccttctcgtagctgcgtacaaaggccaaacagagaatgtggttcagctcatcaacaagggcgccagggtagcggttaccaagcatggccggactcccctgcatcttgctgccaataagggccatcttcctgtggtccagatcttgctgaaggctggctgcgaccttgatgtccaggatgatggggaccagaccgccttgcaccgggccacagtggtggggaacacggagatcatcgcggcgctcatccacgaagggtgtgccctggacagacaagacaaggatgggaatacagccttgcatgaagcatcctggcatggtttcagcsagtcrgccaagctgctcrttaaagcaggagccaacgtgcttgccaagaacaagggcagtgtctcagcaggagacacccccagcagtgaacaggctgtggccagaaaagaagaagccagagaagagttcctgtcagcctccccagaacccagagcaaaggatgacaggaggagaaagtcaaggcccaaggtgtcagcrttttctgaccccaccccaccagccgaccaacagcctggacaccagaagaacctgcatgctcataatcaccctaaaaagaggaacaggcatcggtgttcatccccacccccaccccatgagttcagggcgtatcagctctacacattgtaccggggcaaggatgggaaagtgatgcaggcaccaataaatggttgtcgatgtgaacctctaatcaacaagctggagaatcagttggaggctactgtggaggagataaaagcagagctgggatcggttcaggacaaaatgaatacaaagctggggcagatggagaataagacccagcaccaamtgcgtgttttggacaagctgatggttgagcgactttctgcagagaggacggagtgcctgaaccgcctgcaacagcactcagacacagagaagcatgagggggagaaacgacagatatccttggtggatgaattaaaaacctggtgyatgttaaagattcagaatctggagcagaagctttctggagattctagggcctgcagagctaaatccacaccatctacttgtgagtcctctacaggtgtggaccaattagtggtgactgcaggtccagcarcagcttccgacagctcccctccagtggttaggcccaaagagaaggccctcaactccactgctacccagagactccagcaggagctgtcrtcttctgactgtacaggctcccgactgagaaacgtcaaggtccagacagccttgctacccatgaatgaggcagccagatctgatcagcaggctgggccctgcgtcaacagaggcactcaaactaagaagtctgggaagagtgggccaacaaggcatcgtgcccagcaacyygcagccrgcagcacctgtgggcagccgccaccagccasaggcagcgagcagactggccctcacattcgggacacctcccaagctctggagcttacccagtatttttttgaggctgtttctacccagatggaaaagtggtatgaaaggaagattgaagaagcacgaagccaagccaatcagaaagcccagcaagataargctacattgaaggaacacattaaaagtttagaagaggaacttgccaaactaaggactagggtgcagaaggaaaattagcaccaataaaraggaaatatgaaaggattcttgaagatttccagttttgcaactgcataatagctatgcccaaggagtcaactattgtatatattgcagatttgcctttttaaaaaaatcactaattctacaatgtgccagatacatgtttcctatgcccaggaagttatgaagacttcaacaattaaactgaaaccaggggaagcttgcttagttttgggtttcattataaactcttagcctcagtccaggttaatctgaagtttgaaagctcagattaagcaagccatgccaagaaactggacgatgtgtaagcctagactctaaaattcaagatgtgtgaaataatataagtcaaaagcaagaaaaacgtaatcccgtctgaactcaagtagtcattcatataaatttgaacacacctgctgtgcctagacaagtgtctttctgtaagagctgtaactctgagatgtgctaaataaaccctctttctcaaattcgtaattctccaactgttgacattttaatcacatgaaaagttatcagatttttgaggagaaatattttcatgatgtcacaagatccaatatatcttatgataaaatttattgaaaagtcagtttatttaaataatgaataattggctaacagctctggaaacaatgagatcaaatgagaaagattcaaattgtttgttattttctgtattttcagtcaaaaaatcagttatatagtgattttaaagcagattaatggaaaaaaattcatgtaacaattacctgaaaatttataacctattcctaatcaaacccaattatatcagaatacctttctgaatttgagatttttgctctacattttataatgaataaggctattttttgaargtatttcattttgaattctgtcattaacctcaaaagctttctactgctttgcggtgaaggcaaaatattcgataactcaacttaggccccactgttccccaacttcatggaggccagaagactttactttgttccataatgaaatataaacacagaacaaagttgtaaaagtagcatggatatgttgaaactttggacaagcttcttgtcctttggaatatgggatttatattcatctcctcaatatcccatgtatgcacagaaacttcagttctatttctatagacacaggaacctagtgactattgaacgtaattgtaataaaatgctgctcattgagccaaagagaagaaatgatttattaacatggggacaccaagaaaaacaaagtatgcttttattccctttgtcaagctcagttttagggttttttctttttttkatagtgacaatccatagatatagacattcctaaaagaaaaataaataattcagtagatatatgtcactgttacctgaatatggaatgaatttgatgttttttattttgttgagacagggtcttgctctgtcacccagactggagtgcagtggcatgatcacacctcactgcagccttggcctctcaggctcgtgatcctcctgcctcaacctcscaagtagcttgggactacaggcgtgtgccaccagtcctggctaattttttgtagatataaggtctcatgatattgcccaggctgaatttgatgttatttcaagttgattttcatgtgtttgggagcttgtcttgttctcaactactacgcaggtagacagtcttcccccagagactcattagattgcaatatagaggcactttctcatttccctattgttcctaatacagaattgtagagctggagagtaccttcagttttctaaatctattctcaaacaggatatcactaacctctttagaatcattcctcagtatacatcaatttattgagaactgcctaatactcaagaaattaaatcctgagttcagtaggctgtgttccaagcaggaattattttcacttaccaaaatatctcctattacctcaaggtatccttgttgaggaatgctgaaaactaaattttaagtatcaagtctagaccatagagtgctttggtgggagtattttgattacctcctacccatcagaagcaggcagctaatattgtgaactgagtatttttgtcaaaagtcacagggaagagactacagaagaatgagaagggtcaaaaggacctagtgtggcttactacatggatcttgtctcttggaggtctgtcgtagaagaagaaacaaatagaggtgatgaagacacagaacaggctcagtcagcatcctcacccagagatggcaacatctattaagaccaatgcaataccttttcatcttcagcaaatgttgtttcatctgtttttgatccttggcattgtcaaaaacttaactgcaggtccagtgtatatttttccttatttttcccttttagctatctgctaaagtgagtaaatgccacaactgtacttttccaaagaaaaagaactattgacaacttatagcctgtcatgcaggtcatgtttcaaatcaaggctgaaattttcaacagctgtgggaaaaactaaaacacagaaatactgtacagtattagtgtttttttaaagaaattgttagtgcattattgagtatactaaatatctgtgattaaataaattagttctaacttttgattttgggagcccaaaataaagggagtgttgttttcatggttatgccttgtttgtggagtcaagtgttgatatacttgaggcatgttatgtgtcttctaattaatatttttatcaccttgaatttgtgtctcttccaagcattaaagatactatggatcttaaattccttattaaaaaaatgcaagtgtgaatactttgtttagcttacattttaatttattgtggttgaccacattttatggctcctgagtgccttcacccagctacactttaccttgtatctataaaagtgtaatttagagtaaatacattggctgtaaagtcgmgatcaggtgctctccaccaaaagcaaaacaaaactgctgaaatgtggcaaggtttctcagtgcaagcttaaatgtttaaactgttgaccatttggaaaatactggacaaaggggaaggacaaaacatcatttgcaatagttaaaggttatgcaaggcaaggcaacattatactttttgactaagttattaaaagttaaatgcatttcttctttgaagtgtggattataaaagccaatcaaagacaaaaccagtttgaaaaaccttttgtattctacaataccttttatgagtaagagtaaaacatacatttcttatttgtaattttatttaaggagaaatactctttccctttgatacgactataatattataaacagcaaggaatatgttctgctttctgcaattttagaaagtcattccattctgggtgacagaatgaggtaagactgtctctttaaaaaaaaaaamaactcacacctgtaatcctagcactctggccaccgaggcaggtggatygcttgagcccaggagttygagactagcctggcaacaaagtgagattccccctcctctctctgaaaagtaaaaaaaattagccggtcatggtggcayatgcctgtggtcccagctaaatgaaaatctgaagcaggtggatctcttgagcccaggagctcaaggttgcagtgagccatgttcgcgccaccacactccagcttgtgcaacagagaccctgtctcaaaaaaaagtcatctgtgtgtttcttgcaggcacatctatggcaatgcttgtaccatgaatttaaaacttctaacttgatggcacttttttattttttttga

SEQ ID NO: 477 - DNA, 6315 bp, Homo sapiens
acccgcaggagccgagagcgctgcctggcgcgcgggcggctggaggcacggcgctgggcggcgccgaggccctggggccgccggagccagcgggagccagtccccgtcttcgcccctcgccccccaccgtgtcgccggccttggtccctgcggcgcggacgtccggcgcgggagagaaaggtcccgaagatggcatattcataaagacatcttctgatgattgtgaacatctttacctctgggtgccaggccgggccagtgacttcgtgttgagctgaaggaacttgtctaccgcttccctgaaaacctttctttcctaattcatgagccagcaagatgcggtcgctgcactttcagagcgccttctcgtagctgcgtacaaaggccaaacagagaatgtggttcagctcatcaacaagggcgccagggtagcggttaccaagcatggccggactcccctgcatcttgctgccaataagggccatcttcctgtggtccagatcttgctgaaggctggctgcgaccttgatgtccaggatgatggggaccagaccgccttgcaccgggccacagtggtggggaacacggagatcatcgcggcgctcatccacgaagggtgtgccctggacagacaagacaaggatgggaatacagccttgcatgaagcatcctggcatggtttcagcsagtcrgccaagctgctcrttaaagcaggagccaacgtgcttgccaagaacaaggcggggaacacagctctgcacctggcctgccagaacagccactcccagagcacgcgcgtcctcctgctggccgggtcccgcgctgacctcaaaaataatgtgggagacacctgtttgcacgttgctgcgcgctataatcacttgtccatcattaggctcctcctcactgctttctgttctgtccatgaaaagaaccaggctggagacacagcacttcacgttgctgctgccctaaatcacaagaaggtggccaaaatcttactggaagccggagcagataygaccattgttaacaatgcaggccagactccgctggagactgcccgmtaccacaataacccggaagttgctcttctccttactaaagctccccaggtcttgcgcttcagtcgtgggcgaagcctgaggaaaaagagagagaggctcaaggaagagaggagagcccagtctgtgccaagagatgaggtggcccaaagcaagggcagtgtctcagcaggagacacccccagcagtgaacaggctgtggccagaaaagaagaagccagagaagagttcctgtcagcctccccagaacccagagcaaaggatgacaggaggagaaagtcaaggcccaaggtgtcagcrttttctgaccccaccccaccagccgaccaacagcctggacaccagaagaacctgcatgctcataatcaccctaaaaagaggaacaggcatcggtgttcatccccacccccaccccatgagttcagggcgtatcagctctacacattgtaccggggcaaggatgggaaagtgatgcaggcaccaataaatggttgtcgatgtgaacctctaatcaacaagctggagaatcagttggaggctactgtggaggagataaaagcagagctgggatcggttcaggacaaaatgaatacaaagctggggcagatggagaataagacccagcaccaamtgcgtgttttggacaagctgatggttgagcgactttctgcagagaggacggagtgcctgaaccgcctgcaacagcactcagacacagagaagcatgagggggagaaacgacagatatccttggtggatgaattaaaaacctggtgyatgttaaagattcagaatctggagcagaagctttctggagattctagggcctgcagagctaaatccacaccatctacttgtgagtcctctacaggtgtggaccaattagtggtgactgcaggtccagcarcagcttccgacagctcccctccagtggttaggcccaaagagaaggccctcaactccactgctacccagagactccagcaggagctgtcrtcttctgactgtacaggctcccgactgagaaacgtcaaggtccagacagccttgctacccatgaatgaggcagccagatctgatcagcaggctgggccctgcgtcaacagaggcactcaaactaagaagtctgggaagagtgggccaacaaggcatcgtgcccagcaacyygcagccrgcagcacctgtgggcagccgccaccagccasaggcagcgagcagactggccctcacattcgggacacctcccaagctctggagcttacccagtatttttttgaggctgtttctacccagatggaaaagtggtatgaaaggaagattgaagaagcacgaagccaagccaatcagaaagcccagcaagataargctacattgaaggaacacattaaaagtttagaagaggaacttgccaaactaaggactagggtgcagaaggaaaattagcaccaataaaraggaaatatgaaaggattcttgaagatttccagttttgcaactgcataatagctatgcccaaggagtcaactattgtatatattgcagatttgcctttttaaaaaaatcactaattctacaatgtgccagatacatgtttcctatgcccaggaagttatgaagacttcaacaattaaactgaaaccaggggaagcttgcttagttttgggtttcattataaactcttagcctcagtccaggttaatctgaagtttgaaagctcagattaagcaagccatgccaagaaactggacgatgtgtaagcctagactctaaaattcaagatgtgtgaaataatataagtcaaaagcaagaaaaacgtaatcccgtctgaactcaagtagtcattcatataaatttgaacacacctgctgtgcctagacaagtgtctttctgtaagagctgtaactctgagatgtgctaaataaaccctctttctcaaattcgtaattctccaactgttgacattttaatcacatgaaaagttatcagatttttgaggagaaatattttcatgatgtcacaagatccaatatatcttatgataaaatttattgaaaagtcagtttatttaaataatgaataattggctaacagctctggaaacaatgagatcaaatgagaaagattcaaattgtttgttattttctgtattttcagtcaaaaaatcagttatatagtgattttaaagcagattaatggaaaaaaattcatgtaacaattacctgaaaatttataacctattcctaatcaaacccaattatatcagaatacctttctgaatttgagatttttgctctacattttataatgaataaggctattttttgaargtatttcattttgaattctgtcattaacctcaaaagctttctactgctttgcggtgaaggcaaaatattcgataactcaacttaggccccactgttccccaacttcatggaggccagaagactttactttgttccataatgaaatataaacacagaacaaagttgtaaaagtagcatggatatgttgaaactttggacaagcttcttgtcctttggaatatgggatttatattcatctcctcaatatcccatgtatgcacagaaacttcagttctatttctatagacacaggaacctagtgactattgaacgtaattgtaataaaatgctgctcattgagccaaagagaagaaatgatttattaacatggggacaccaagaaaaacaaagtatgcttttattccctttgtcaagctcagttttagggttttttctttttttkatagtgacaatccatagatatagacattcctaaaagaaaaataaataattcagtagatatatgtcactgttacctgaatatggaatgaatttgatgttttttattttgttgagacagggtcttgctctgtcacccagactggagtgcagtggcatgatcacacctcactgcagccttggcctctcaggctcgtgatcctcctgcctcaacctcscaagtagcttgggactacaggcgtgtgccaccagtcctggctaattttttgtagatataaggtctcatgatattgcccaggctgaatttgatgttatttcaagttgattttcatgtgtttgggagcttgtcttgttctcaactactacgcaggtagacagtcttcccccagagactcattagattgcaatatagaggcactttctcatttccctattgttcctaatacagaattgtagagctggagagtaccttcagttttctaaatctattctcaaacaggatatcactaacctctttagaatcattcctcagtatacatcaatttattgagaactgcctaatactcaagaaattaaatcctgagttcagtaggctgtgttccaagcaggaattattttcacttaccaaaatatctcctattacctcaaggtatccttgttgaggaatgctgaaaactaaattttaagtatcaagtctagaccatagagtgctttggtgggagtattttgattacctcctacccatcagaagcaggcagctaatattgtgaactgagtatttttgtcaaaagtcacagggaagagactacagaagaatgagaagggtcaaaaggacctagtgtggcttactacatggatcttgtctcttggaggtctgtcgtagaagaagaaacaaatagaggtgatgaagacacagaacaggctcagtcagcatcctcacccagagatggcaacatctattaagaccaatgcaataccttttcatcttcagcaaatgttgtttcatctgtttttgatccttggcattgtcaaaaacttaactgcaggtccagtgtatatttttccttatttttcccttttagctatctgctaaagtgagtaaatgccacaactgtacttttccaaagaaaaagaactattgacaacttatagcctgtcatgcaggtcatgtttcaaatcaaggctgaaattttcaacagctgtgggaaaaactaaaacacagaaatactgtacagtattagtgtttttttaaagaaattgttagtgcattattgagtatactaaatatctgtgattaaataaattagttctaacttttgattttgggagcccaaaataaagggagtgttgttttcatggttatgccttgtttgtggagtcaagtgttgatatacttgaggcatgttatgtgtcttctaattaatatttttatcaccttgaatttgtgtctcttccaagcattaaagatactatggatcttaaattccttattaaaaaaatgcaagtgtgaatactttgtttagcttacattttaatttattgtggttgaccacattttatggctcctgagtgccttcacccagctacactttaccttgtatctataaaagtgtaatttagagtaaatacattggctgtaaagtcgmgatcaggtgctctccaccaaaagcaaaacaaaactgctgaaatgtggcaaggtttctcagtgcaagcttaaatgtttaaactgttgaccatttggaaaatactggacaaaggggaaggacaaaacatcatttgcaatagttaaaggttatgcaaggcaaggcaacattatactttttgactaagttattaaaagttaaatgcatttcttctttgaagtgtggattataaaagccaatcaaagacaaaaccagtttgaaaaaccttttgtattctacaataccttttatgagtaagagtaaaacatacatttcttatttgtaattttatttaaggagaaatactctttccctttgatacgactataatattataaacagcaaggaatatgttctgctttctgcaattttagaaagtcattccattctgggtgacagaatgaggtaagactgtctctttaaaaaaaaaaamaactcacacctgtaatcctagcactctggccaccgaggcaggtggatygcttgagcccaggagttygagactagcctggcaacaaagtgagattccccctcctctctctgaaaagtaaaaaaaattagccggtcatggtggcayatgcctgtggtcccagctaaatgaaaatctgaagcaggtggatctcttgagcccaggagctcaaggttgcagtgagccatgttcgcgccaccacactccagcttgtgcaacagagaccctgtctcaaaaaaaagtcatctgtgtgtttcttgcaggcacatctatggcaatgcttgtaccatgaatttaaaacttctaacttgatggcacttttttattttttttga

SEQ ID NO: 478 - DNA, 5803 bp, Homo sapiens
cttgttcygaaatcattgttcattttgcattcacagcatggccggactcccctgcatcttgctgccaataagggccatcttcctgtggtccagatcttgctgaaggctggctgcgaccttgatgtccaggatgatggggaccagaccgccttgcaccgggccacagtggtggggaacacggagatcatcgcggcgctcatccacgaagggtgtgccctggacagacaagacaaggatgggaatacagccttgcatgaagcatcctggcatggtttcagcsagtcrgccaagctgctcrttaaagcaggagccaacgtgcttgccaagaacaaggcggggaacacagctctgcacctggcctgccagaacagccactcccagagcacgcgcgtcctcctgctggccgggtcccgcgctgacctcaaaaataatgtgggagacacctgtttgcacgttgctgcgcgctataatcacttgtccatcattaggctcctcctcactgctttctgttctgtccatgaaaagaaccaggctggagacacagcacttcacgttgctgctgccctaaatcacaagaaggtggccaaaatcttactggaagccggagcagataygaccattgttaacaatgcaggccagactccgctggagactgcccgmtaccacaataacccggaagttgctcttctccttactaaagctccccagggcagtgtctcagcaggagacacccccagcagtgaacaggctgtggccagaaaagaagaagccagagaagagttcctgtcagcctccccagaacccagagcaaaggatgacaggaggagaaagtcaaggcccaaggtgtcagcrttttctgaccccaccccaccagccgaccaacagcctggacaccagaagaacctgcatgctcataatcaccctaaaaagaggaacaggcatcggtgttcatccccacccccaccccatgagttcagggcgtatcagctctacacattgtaccggggcaaggatgggaaagtgatgcaggcaccaataaatggttgtcgatgtgaacctctaatcaacaagctggagaatcagttggaggctactgtggaggagataaaagcagagctgggatcggttcaggacaaaatgaatacaaagctggggcagatggagaataagacccagcaccaamtgcgtgttttggacaagctgatggttgagcgactttctgcagagaggacggagtgcctgaaccgcctgcaacagcactcagacacagagaagcatgagggggagaaacgacagatatccttggtggatgaattaaaaacctggtgyatgttaaagattcagaatctggagcagaagctttctggagattctagggcctgcagagctaaatccacaccatctacttgtgagtcctctacaggtgtggaccaattagtggtgactgcaggtccagcarcagcttccgacagctcccctccagtggttaggcccaaagagaaggccctcaactccactgctacccagagactccagcaggagctgtcrtcttctgactgtacaggctcccgactgagaaacgtcaaggtccagacagccttgctacccatgaatgaggcagccagatctgatcagcaggctgggccctgcgtcaacagaggcactcaaactaagaagtctgggaagagtgggccaacaaggcatcgtgcccagcaacyygcagccrgcagcacctgtgggcagccgccaccagccasaggcagcgagcagactggccctcacattcgggacacctcccaagctctggagcttacccagtatttttttgaggctgtttctacccagatggaaaagtggtatgaaaggaagattgaagaagcacgaagccaagccaatcagaaagcccagcaagataargctacattgaaggaacacattaaaagtttagaagaggaacttgccaaactaaggactagggtgcagaaggaaaattagcaccaataaaraggaaatatgaaaggattcttgaagatttccagttttgcaactgcataatagctatgcccaaggagtcaactattgtatatattgcagatttgcctttttaaaaaaatcactaattctacaatgtgccagatacatgtttcctatgcccaggaagttatgaagacttcaacaattaaactgaaaccaggggaagcttgcttagttttgggtttcattataaactcttagcctcagtccaggttaatctgaagtttgaaagctcagattaagcaagccatgccaagaaactggacgatgtgtaagcctagactctaaaattcaagatgtgtgaaataatataagtcaaaagcaagaaaaacgtaatcccgtctgaactcaagtagtcattcatataaatttgaacacacctgctgtgcctagacaagtgtctttctgtaagagctgtaactctgagatgtgctaaataaaccctctttctcaaattcgtaattctccaactgttgacattttaatcacatgaaaagttatcagatttttgaggagaaatattttcatgatgtcacaagatccaatatatcttatgataaaatttattgaaaagtcagtttatttaaataatgaataattggctaacagctctggaaacaatgagatcaaatgagaaagattcaaattgtttgttattttctgtattttcagtcaaaaaatcagttatatagtgattttaaagcagattaatggaaaaaaattcatgtaacaattacctgaaaatttataacctattcctaatcaaacccaattatatcagaatacctttctgaatttgagatttttgctctacattttataatgaataaggctattttttgaargtatttcattttgaattctgtcattaacctcaaaagctttctactgctttgcggtgaaggcaaaatattcgataactcaacttaggccccactgttccccaacttcatggaggccagaagactttactttgttccataatgaaatataaacacagaacaaagttgtaaaagtagcatggatatgttgaaactttggacaagcttcttgtcctttggaatatgggatttatattcatctcctcaatatcccatgtatgcacagaaacttcagttctatttctatagacacaggaacctagtgactattgaacgtaattgtaataaaatgctgctcattgagccaaagagaagaaatgatttattaacatggggacaccaagaaaaacaaagtatgcttttattccctttgtcaagctcagttttagggttttttctttttttkatagtgacaatccatagatatagacattcctaaaagaaaaataaataattcagtagatatatgtcactgttacctgaatatggaatgaatttgatgttttttattttgttgagacagggtcttgctctgtcacccagactggagtgcagtggcatgatcacacctcactgcagccttggcctctcaggctcgtgatcctcctgcctcaacctcscaagtagcttgggactacaggcgtgtgccaccagtcctggctaattttttgtagatataaggtctcatgatattgcccaggctgaatttgatgttatttcaagttgattttcatgtgtttgggagcttgtcttgttctcaactactacgcaggtagacagtcttcccccagagactcattagattgcaatatagaggcactttctcatttccctattgttcctaatacagaattgtagagctggagagtaccttcagttttctaaatctattctcaaacaggatatcactaacctctttagaatcattcctcagtatacatcaatttattgagaactgcctaatactcaagaaattaaatcctgagttcagtaggctgtgttccaagcaggaattattttcacttaccaaaatatctcctattacctcaaggtatccttgttgaggaatgctgaaaactaaattttaagtatcaagtctagaccatagagtgctttggtgggagtattttgattacctcctacccatcagaagcaggcagctaatattgtgaactgagtatttttgtcaaaagtcacagggaagagactacagaagaatgagaagggtcaaaaggacctagtgtggcttactacatggatcttgtctcttggaggtctgtcgtagaagaagaaacaaatagaggtgatgaagacacagaacaggctcagtcagcatcctcacccagagatggcaacatctattaagaccaatgcaataccttttcatcttcagcaaatgttgtttcatctgtttttgatccttggcattgtcaaaaacttaactgcaggtccagtgtatatttttccttatttttcccttttagctatctgctaaagtgagtaaatgccacaactgtacttttccaaagaaaaagaactattgacaacttatagcctgtcatgcaggtcatgtttcaaatcaaggctgaaattttcaacagctgtgggaaaaactaaaacacagaaatactgtacagtattagtgtttttttaaagaaattgttagtgcattattgagtatactaaatatctgtgattaaataaattagttctaacttttgattttgggagcccaaaataaagggagtgttgttttcatggttatgccttgtttgtggagtcaagtgttgatatacttgaggcatgttatgtgtcttctaattaatatttttatcaccttgaatttgtgtctcttccaagcattaaagatactatggatcttaaattccttattaaaaaaatgcaagtgtgaatactttgtttagcttacattttaatttattgtggttgaccacattttatggctcctgagtgccttcacccagctacactttaccttgtatctataaaagtgtaatttagagtaaatacattggctgtaaagtcgmgatcaggtgctctccaccaaaagcaaaacaaaactgctgaaatgtggcaaggtttctcagtgcaagcttaaatgtttaaactgttgaccatttggaaaatactggacaaaggggaaggacaaaacatcatttgcaatagttaaaggttatgcaaggcaaggcaacattatactttttgactaagttattaaaagttaaatgcatttcttctttgaagtgtggattataaaagccaatcaaagacaaaaccagtttgaaaaaccttttgtattctacaataccttttatgagtaagagtaaaacatacatttcttatttgtaattttatttaaggagaaatactctttccctttgatacgactataatattataaacagcaaggaatatgttctgctttctgcaattttagaaagtcattccattctgggtgacagaatgaggtaagactgtctctttaaaaaaaaaaamaactcacacctgtaatcctagcactctggccaccgaggcaggtggatygcttgagcccaggagttygagactagcctggcaacaaagtgagattccccctcctctctctgaaaagtaaaaaaaattagccggtcatggtggcayatgcctgtggtcccagctaaatgaaaatctgaagcaggtggatctcttgagcccaggagctcaaggttgcagtgagccatgttcgcgccaccacactccagcttgtgcaacagagaccctgtctcaaaaaaaagtcatctgtgtgtttcttgcaggcacatctatggcaatgcttgtaccatgaatttaaaacttctaacttgatggcacttttttattttttttga

SEQ ID NO: 479 - DNA, 4546 bp, Homo sapiens
ggacccacgggacgggcaggagctggagctccgtgccgcctgtactcccgccttcatttcccatcgtgctgaggcgggtggcatggcggagaaggatgacaccggagtttgacgaagaggtggtttttgagaattctccactttaccaatacttacaggatctgggacacacagactttgaaatatgttcttctttgtcaccaaaaacagaaaaatgcacaacagagggacaacaaaagcctcctacaagagtcctaccaaaatacctgggatatagtaatcactcaatgaatataaactgcacttactggcatgctcaaggaatgggctattaagcaaggtatcctgttaaaagtggctgaaaccatcaaaagttggatttttttttctcagtgcaataagaaagatgacttacttcacaagttggatattggattccgactcgactcattacataccatcctgcaacaggaagtcctgttacaagaggatgtggagctgattgagctacttgatcccagtatcctgtctgcagggcaatctcaacaacaggaaaatggacaccttccaacactttgctccctggcaacccctaatatttgggatctctcaatgctatttgccttcattagcttgctcgttatgcttcccrcttggtggattgtgtcttcctggctggtatggggagtgattctatttgtgtatctggtcataagagctttgagattatggaggacagccaaactacaagtgaccctaaaaaaatacagcgttcatttggaagatatggccacaaacagccgagcttttactaacctcgtgagaaaagctttacgtctcattcaagaaaccgaagtgatttccagaggatttacacttttgcttgacagggtcagtgctgcttgcccatttaataaagctggacagcatccaagtcagcatctcatcggtcttcggaaagctgtctaccgaactctaagagccaacttccaagcagcaaggctagctaccctatatatgctgaaaaactaccccctgaactctgagagtgacaatgtaaccaactacatctgtgtggtgccttttaaagagctgggccttggacttagtgaagagcagatttcagaagaggaagcacataactttacagatggcttcagcctgcctgcattgaaggttttgttccaactctgggtggcacagagttcagagttcttcagacggttagccctattactttctacagccaattcacctcctgggcccttacttactccagcacttctgcctcatcgtatcttatctgatgtgactcaaggtctacctcatgctcattctgcctgtttggaagagcttaagcgcagctatgagttctatcggtactttgaaactcagcaccagtcagtaccgcagtgtttatccaaaactcaacagaagtcaagagaactgaataatgttcacacagcagtgcgtagcttgcagctccatctgaaagcattactgaatgaggtaataattcttgaagatgaacttgaaaagcttgtttgtactaaagaaacacaagaactagtgtcagaggcttatcccatcctagaacagaarttaaagttgattcagccccaygttcaagcaagcaacaattgctgggaagaggccatttctcagrtcgacaaactgctacgaagaaatacagataaaaaaggcaagcctgaaatagcatgtgaaaacccacattgtacagtagtacctttgaagcagcctactctacacattgcagacaaagatccaatcccagaggagcaggaattagaagcttatgtagatgatatagatattgatagtgatttcagaaaggatgatttttattacttgtctcaagaagacaaagagagacagaagcgtgagcatgaagaatccaagagggtgctccaagaattaaaatctgtgctgggatttaaagcttcagaggcagaaaggcagaagtggaagcaacttctatttagtgatcatgccrtgttgaaatccttgtctcctgtagacccagtggaacccataagtaattcagaaccatcaatgaattcagatatgggaaaagtcagtaaaaatgatactgaagaggaaagtaataaatccgccacaacagacaatgaaataagtaggactgagtatttatgtgaaaackctctagaaggtaaaaataaagataattcttcaaatgaagtcttcccccaaggagcagaagaaagaatgtgttaccaatgtgagagtgaagatgaaccacaagcagatggaagtggtctgaccactgcccctccaactcccagggactcattacagccctccattaagcagaggctggcacggctacagctstcaccagattttaccttcactgctggccttgctgcagaagtggctgctagatctctctcctttaccaccatgcaggaacagacttttggtgrtgaggaggaagaacaaataatagaagaaaataaaaatgagatagaagaaaagtaagaaccaagattcatatgaagtgatattagattgttccttttacaaaagtgtttagcttcaagactggaaagggaatatgagtgtaagtttactatatrtaaagctaagatgtggatttacaggaagaaccctggtttgaataactgatctgaaattmgtagttacctgtaaatggcagatcttttaggaaaataagagaaaggtaagggctcttttgaataaactgctgttttatttgtggcacaactgatcaatcttggaaattctttaagtatttttaataagaaatgaattatcatttcttgccagaatttgctaccttaaggtgattgggaaaattctgttgcaagaacattaacatttagtatgactcctttttactgtattcttgcagttaataactgcagctattatgttaataacaagttgtttgtattttatttttgtttataccagtcttaaagatccaggttctgaataaaaaaattaattgatacaattgatgtgtgctggggtttggaactaaaagtagtttcaacagtgcgtgggttatgacatttcttatgtttctttgttcatgtgtgtatttagtarttaattttaagatgtcctagtgatctttaaaagaaaaatattgtaccattttttagaattacactttcacctttctttttgcaattgaaagtgatgatgtcaaagtgggatttctgtactccaaggccccacccccaatttagcaagcagaaaaacgttccttgtatcactttaccttggataattgggtgccattaacacaaacaggtcacaatcytgctgttttctagccctgtccaccataatgagattcaggaaacatcctgtcagcctcctggaaagcatccttgtctccttagtatttcatttacaaactacctcttaacagagactgcttttcaaattggccaatcttacctgttttgtgttgtgattgcattttcaaagagtaattattttcagcatatacagttttgaaacctgtagctcctatgcaataacatagttctatagacattatttgggggaaatgtagtaataactcaatctatgttgctgtcctagaaaggaaattgcatgatgaatctagattgtctttagagtaaagaaacacattcaaattcctgtaacttatcactttcagtgagtaaatttactyataccaaaggggattttttttctttcaggaatctaaggaaatttactttttaacctgagaaaaaaacttggttctgctttatataaacagtagagattattgtactataagtgattttgcctttttgccaaaatcctggaactcatctataattaacctcttmggagcaataccttaggttgggccttgctttactacttagaaatagctaaatttcaattttaaaaatctttgtgtgttataactgttaaattattcaataatacttagggtttactttcttatttaaatcacttatttagtttaccgacttcatttttctttggatttagaagaagcaattatggaaaaacttggtaatctctctcaacctataaccttacacaggaagaattagagtttaataatttttaattcttttattgtatgttacttttattacaccagtttgggggaaaatcttcataaaattgtatcagttttattcagtgttctctaaggtgataccttttaattttgaaagactaaataattttaatcgagaatttccagtctttcagtctgatctatttaattcactacttgttacataatccagtgaaaactctacttgttgaaattatgacataaagatcttgcagctttatttgagtatttgttcttttgtgtagtttccatcttttaaaatatttaaaatattttcaagataaagtattatcttctctgcaaaaattcctggagtaattttctctcataatatttgaagtcagtggttctcrgttgtattagtggggtaactacatcaaaataaataaagtcttatttttaaaatgc

SEQ ID NO: 480 - DNA, 4003 bp, Homo sapiens
ggacccacgggacgggcaggagctggagctccgtgccgcctgtactcccgccttcatttcccatcgtgctgaggcgggtggcatggcggagaaggatgacaccggagtttgacgaagaggtggtttttgagaattctccactttaccaatacttacaggatctgggacacacagactttgaaatatgttcttctttgtcaccaaaaacagaaaaatgcacaacagagggacaacaaaagcctcctacaagagtcctaccaaaacaaggtatcctgttaaaagtggctgaaaccatcaaaagttggatttttttttctcagtgcaataagaaagatgacttacttcacaagttggatattggattccgactcgactcattacataccatcctgcaacaggaagtcctgttacaagaggatgtggagctgattgagctacttgatcccagtatcctgtctgcagggcaatctcaacaacaggaaaatggacaccttccaacactttgctccctggcaacccctaatatttgggatctctcaatgctatttgccttcattagcttgctcgttatgcttcccrcttggtggattgtgtcttcctggctggtatggggagtgattctatttgtgtatctggtcataagagctttgagattatggaggacagccaaactacaagtgaccctaaaaaaatacagcgttcatttggaagatatggccacaaacagccgagcttttactaacctcgtgagaaaagctttacgtctcattcaagaaaccgaagtgatttccagaggatttacactggtcagtgctgcttgcccatttaataaagctggacagcatccaagtcagcatctcatcggtcttcggaaagctgtctaccgaactctaagagccaacttccaagcagcaaggctagctaccctatatatgctgaaaaactaccccctgaactctgagagtgacaatgtaaccaactacatctgtgtggtgccttttaaagagctgggccttggacttagtgaagagcagatttcagaagaggaagcacataactttacagatggcttcagcctgcctgcattgaaggttttgttccaactctgggtggcacagagttcagagttcttcagacggttagccctattactttctacagccaattcacctcctgggcccttacttactccagcacttctgcctcatcgtatcttatctgatgtgactcaaggtctacctcatgctcattctgcctgtttggaagagcttaagcgcagctatgagttctatcggtactttgaaactcagcaccagtcagtaccgcagtgtttatccaaaactcaacagaagtcaagagaactgaataatgttcacacagcagtgcgtagcttgcagctccatctgaaagcattactgaatgaggtaataattcttgaagatgaacttgaaaagcttgtttgtactaaagaaacacaagaactagtgtcagaggcttatcccatcctagaacagaarttaaagttgattcagccccaygttcaagcaagcaacaattgctgggaagaggccatttctcagrtcgacaaactgctacgaagaaatacagataaaaaaggcaagcctgaaatagcatgtgaaaacccacattgtacagtagtacctttgaagcagcctactctacacattgcagacaaagatccaatcccagaggagcaggaattagaagcttatgtagatgatatagatattgatagtgatttcagaaaggatgatttttattacttgtctcaagaagacaaagagagacagaagcgtgagcatgaagaatccaagagggtgctccaagaattaaaatctgtgctgggatttaaagcttcagaggcagaaaggcagaagtggaagcaacttctatttagtgatcatggggtaaagtccgcatggaattagagggggaaagtctgcactggaacctgctgtggccattttttttctgttgttgctgcttctctagtggagttactgcagcttagggatggttcctggaagtggacacattttacaaaaacgttttttaaatacacgccagctcttcgagaagcacttttttccttccgtcatgcttcatactatattgtattgtactaacccctcatgctgggatgagcgactgcctagcaagcaacccactgcctactaacatcaagaggggctaaataaaactgcattttccttgcaaggacaacttctaccgtatgaatatatattatatttatgtattatattttgtacaatagttgatcttgaatgcagacttcatttgtatttttcgtggtactacaaaatgtgtagaagttatggcttttctttcattagggtcttgttaggtggttggcaagtaagttaaattgtatgttgcatttttttccatgctgttttaacttgtaaatatatatgtatacatrtggaagatattattattatctagattactttaagccttttatctgatgtattatcagtgaaaaccatgctgcttattccctaatacaatggttctcaaactttagtgtgtatcagaatcaagatgagggcttgtaaaatatagctggtccctactcccagagtttccatttcaggaggtctgggatcaggcccaagaatttgcatttttaacaaattcctaggtgataactgataatgttggttcagggaacacactttcagaaccactgctttaatattttaaataagataatatgtgaggtgtcataaaaaccttcatcaaatccctatctcatttcatttcttaggcattttctctcttataaagtttcctggatttataaattttcattgattttactagaaagttttatttagcttttatttatttattgttctttttaagaaaaaaactgagagtttgaattaaaagtttaaatcattgctaggtccttagttattttttttcttttttctttttttttatttgaagccrtgttgaaatccttgtctcctgtagacccagtggaacccataagtaattcagaaccatcaatgaattcagatatgggaaaagtcagtaaaaatgatactgaagaggaaagtaataaatccgccacaacagacaatgaaataagtaggactgagtatttatgtgaaaackctctagaaggtaaaaataaagataattcttcaaatgaagtcttcccccaaggagcagaagaaagaatgtgttaccaatgtgagagtgaagatgaaccacaagcagatggaagtggtctgaccactgcccctccaactcccagggactcattacagccctccattaagcagaggctggcacggctacagctstcaccagattttaccttcactgctggccttgctgcagaagtggctgctagatctctctcctttaccaccatgcaggaacagacttttggtgrtgaggaggaagaacaaataatagaagaaaataaaaatgagatagaagaaaagtaagaaccaagattcatatgaagtgatattagattgttccttttacaaaagtgtttagcttcaagactggaaagggaatatgagtgtaagtttactatatrtaaagctaagatgtggatttacaggaagaaccctggtttgaataactgatctgaaattmgtagttacctgtaaatggcagatcttttaggaaaataagagaaaggtaagggctcttttgaataaactgctgttttatttgtggcacaactgatcaatcttggaaattctttaagtatttttaataagaaatgaattatcatttcttgccagaatttgctaccttaaggtgattgggaaaattctgttgcaagaacattaacatttagtatgactcctttttactgtattcttgcagttaataactgcagctattatgttaataacaagttgtttgtattttatttttgtttataccagtcttaaagatccaggttctgaataaaaaaattaattgatac

SEQ ID NO: 481 - DNA, 4461 bp, Homo sapiens
ggacccacgggacgggcaggagctggagctccgtgccgcctgtactcccgccttcatttcccatcgtgctgaggcgggtggcatggcggagaaggatgacaccggagtttgacgaagaggtggtttttgagaattctccactttaccaatacttacaggatctgggacacacagactttgaaatatgttcttctttgtcaccaaaaacagaaaaatgcacaacagagggacaacaaaagcctcctacaagagtcctaccaaaacaaggtatcctgttaaaagtggctgaaaccatcaaaagttggatttttttttctcagtgcaataagaaagatgacttacttcacaagttggatattggattccgactcgactcattacataccatcctgcaacaggaagtcctgttacaagaggatgtggagctgattgagctacttgatcccagtatcctgtctgcagggcaatctcaacaacaggaaaatggacaccttccaacactttgctccctggcaacccctaatatttgggatctctcaatgctatttgccttcattagcttgctcgttatgcttcccrcttggtggattgtgtcttcctggctggtatggggagtgattctatttgtgtatctggtcataagagctttgagattatggaggacagccaaactacaagtgaccctaaaaaaatacagcgttcatttggaagatatggccacaaacagccgagcttttactaacctcgtgagaaaagctttacgtctcattcaagaaaccgaagtgatttccagaggatttacactggtcagtgctgcttgcccatttaataaagctggacagcatccaagtcagcatctcatcggtcttcggaaagctgtctaccgaactctaagagccaacttccaagcagcaaggctagctaccctatatatgctgaaaaactaccccctgaactctgagagtgacaatgtaaccaactacatctgtgtggtgccttttaaagagctgggccttggacttagtgaagagcagatttcagaagaggaagcacataactttacagatggcttcagcctgcctgcattgaaggttttgttccaactctgggtggcacagagttcagagttcttcagacggttagccctattactttctacagccaattcacctcctgggcccttacttactccagcacttctgcctcatcgtatcttatctgatgtgactcaaggtctacctcatgctcattctgcctgtttggaagagcttaagcgcagctatgagttctatcggtactttgaaactcagcaccagtcagtaccgcagtgtttatccaaaactcaacagaagtcaagagaactgaataatgttcacacagcagtgcgtagcttgcagctccatctgaaagcattactgaatgaggtaataattcttgaagatgaacttgaaaagcttgtttgtactaaagaaacacaagaactagtgtcagaggcttatcccatcctagaacagaarttaaagttgattcagccccaygttcaagcaagcaacaattgctgggaagaggccatttctcagrtcgacaaactgctacgaagaaatacagataaaaaaggcaagcctgaaatagcatgtgaaaacccacattgtacagtagtacctttgaagcagcctactctacacattgcagacaaagatccaatcccagaggagcaggaattagaagcttatgtagatgatatagatattgatagtgatttcagaaaggatgatttttattacttgtctcaagaagacaaagagagacagaagcgtgagcatgaagaatccaagagggtgctccaagaattaaaatctgtgctgggatttaaagcttcagaggcagaaaggcagaagtggaagcaacttctatttagtgatcatgccrtgttgaaatccttgtctcctgtagacccagtggaacccataagtaattcagaaccatcaatgaattcagatatgggaaaagtcagtaaaaatgatactgaagaggaaagtaataaatccgccacaacagacaatgaaataagtaggactgagtatttatgtgaaaackctctagaaggtaaaaataaagataattcttcaaatgaagtcttcccccaaggagcagaagaaagaatgtgttaccaatgtgagagtgaagatgaaccacaagcagatggaagtggtctgaccactgcccctccaactcccagggactcattacagccctccattaagcagaggctggcacggctacagctstcaccagattttaccttcactgctggccttgctgcagaagtggctgctagatctctctcctttaccaccatgcaggaacagacttttggtgrtgaggaggaagaacaaataatagaagaaaataaaaatgagatagaagaaaagtaagaaccaagattcatatgaagtgatattagattgttccttttacaaaagtgtttagcttcaagactggaaagggaatatgagtgtaagtttactatatrtaaagctaagatgtggatttacaggaagaaccctggtttgaataactgatctgaaattmgtagttacctgtaaatggcagatcttttaggaaaataagagaaaggtaagggctcttttgaataaactgctgttttatttgtggcacaactgatcaatcttggaaattctttaagtatttttaataagaaatgaattatcatttcttgccagaatttgctaccttaaggtgattgggaaaattctgttgcaagaacattaacatttagtatgactcctttttactgtattcttgcagttaataactgcagctattatgttaataacaagttgtttgtattttatttttgtttataccagtcttaaagatccaggttctgaataaaaaaattaattgatacaattgatgtgtgctggggtttggaactaaaagtagtttcaacagtgcgtgggttatgacatttcttatgtttctttgttcatgtgtgtatttagtarttaattttaagatgtcctagtgatctttaaaagaaaaatattgtaccattttttagaattacactttcacctttctttttgcaattgaaagtgatgatgtcaaagtgggatttctgtactccaaggccccacccccaatttagcaagcagaaaaacgttccttgtatcactttaccttggataattgggtgccattaacacaaacaggtcacaatcytgctgttttctagccctgtccaccataatgagattcaggaaacatcctgtcagcctcctggaaagcatccttgtctccttagtatttcatttacaaactacctcttaacagagactgcttttcaaattggccaatcttacctgttttgtgttgtgattgcattttcaaagagtaattattttcagcatatacagttttgaaacctgtagctcctatgcaataacatagttctatagacattatttgggggaaatgtagtaataactcaatctatgttgctgtcctagaaaggaaattgcatgatgaatctagattgtctttagagtaaagaaacacattcaaattcctgtaacttatcactttcagtgagtaaatttactyataccaaaggggattttttttctttcaggaatctaaggaaatttactttttaacctgagaaaaaaacttggttctgctttatataaacagtagagattattgtactataagtgattttgcctttttgccaaaatcctggaactcatctataattaacctcttmggagcaataccttaggttgggccttgctttactacttagaaatagctaaatttcaattttaaaaatctttgtgtgttataactgttaaattattcaataatacttagggtttactttcttatttaaatcacttatttagtttaccgacttcatttttctttggatttagaagaagcaattatggaaaaacttggtaatctctctcaacctataaccttacacaggaagaattagagtttaataatttttaattcttttattgtatgttacttttattacaccagtttgggggaaaatcttcataaaattgtatcagttttattcagtgttctctaaggtgataccttttaattttgaaagactaaataattttaatcgagaatttccagtctttcagtctgatctatttaattcactacttgttacataatccagtgaaaactctacttgttgaaattatgacataaagatcttgcagctttatttgagtatttgttcttttgtgtagtttccatcttttaaaatatttaaaatattttcaagataaagtattatcttctctgcaaaaattcctggagtaattttctctcataatatttgaagtcagtggttctcrgttgtattagtggggtaactacatcaaaataaataaagtcttatttttaaaatgc

SEQ ID NO: 482 - DNA, 4444 bp, Homo sapiens
ggacccacgggacgggcaggagctggagctccgtgccgcctgtactcccgccttcatttcccatcgtgctgaggcgggtggcatggcggagaaggatgacaccggagtttgacgaagaggtggtttttgagaattctccactttaccaatacttacaggatctgggacacacagactttgaaatatgttcttctttgtcaccaaaaacagaaaaatgcacaacagagggacaacaaaagcctcctacaagagtcctaccaaaatacctgggatatagtaatcactcaatgaatataaactgcacttactggcatgctcaaggaatgggctattaaggatattggattccgactcgactcattacataccatcctgcaacaggaagtcctgttacaagaggatgtggagctgattgagctacttgatcccagtatcctgtctgcagggcaatctcaacaacaggaaaatggacaccttccaacactttgctccctggcaacccctaatatttgggatctctcaatgctatttgccttcattagcttgctcgttatgcttcccrcttggtggattgtgtcttcctggctggtatggggagtgattctatttgtgtatctggtcataagagctttgagattatggaggacagccaaactacaagtgaccctaaaaaaatacagcgttcatttggaagatatggccacaaacagccgagcttttactaacctcgtgagaaaagctttacgtctcattcaagaaaccgaagtgatttccagaggatttacactggtcagtgctgcttgcccatttaataaagctggacagcatccaagtcagcatctcatcggtcttcggaaagctgtctaccgaactctaagagccaacttccaagcagcaaggctagctaccctatatatgctgaaaaactaccccctgaactctgagagtgacaatgtaaccaactacatctgtgtggtgccttttaaagagctgggccttggacttagtgaagagcagatttcagaagaggaagcacataactttacagatggcttcagcctgcctgcattgaaggttttgttccaactctgggtggcacagagttcagagttcttcagacggttagccctattactttctacagccaattcacctcctgggcccttacttactccagcacttctgcctcatcgtatcttatctgatgtgactcaaggtctacctcatgctcattctgcctgtttggaagagcttaagcgcagctatgagttctatcggtactttgaaactcagcaccagtcagtaccgcagtgtttatccaaaactcaacagaagtcaagagaactgaataatgttcacacagcagtgcgtagcttgcagctccatctgaaagcattactgaatgaggtaataattcttgaagatgaacttgaaaagcttgtttgtactaaagaaacacaagaactagtgtcagaggcttatcccatcctagaacagaarttaaagttgattcagccccaygttcaagcaagcaacaattgctgggaagaggccatttctcagrtcgacaaactgctacgaagaaatacagataaaaaaggcaagcctgaaatagcatgtgaaaacccacattgtacagtagtacctttgaagcagcctactctacacattgcagacaaagatccaatcccagaggagcaggaattagaagcttatgtagatgatatagatattgatagtgatttcagaaaggatgatttttattacttgtctcaagaagacaaagagagacagaagcgtgagcatgaagaatccaagagggtgctccaagaattaaaatctgtgctgggatttaaagcttcagaggcagaaaggcagaagtggaagcaacttctatttagtgatcatgccrtgttgaaatccttgtctcctgtagacccagtggaacccataagtaattcagaaccatcaatgaattcagatatgggaaaagtcagtaaaaatgatactgaagaggaaagtaataaatccgccacaacagacaatgaaataagtaggactgagtatttatgtgaaaackctctagaaggtaaaaataaagataattcttcaaatgaagtcttcccccaaggagcagaagaaagaatgtgttaccaatgtgagagtgaagatgaaccacaagcagatggaagtggtctgaccactgcccctccaactcccagggactcattacagccctccattaagcagaggctggcacggctacagctstcaccagattttaccttcactgctggccttgctgcagaagtggctgctagatctctctcctttaccaccatgcaggaacagacttttggtgrtgaggaggaagaacaaataatagaagaaaataaaaatgagatagaagaaaagtaagaaccaagattcatatgaagtgatattagattgttccttttacaaaagtgtttagcttcaagactggaaagggaatatgagtgtaagtttactatatrtaaagctaagatgtggatttacaggaagaaccctggtttgaataactgatctgaaattmgtagttacctgtaaatggcagatcttttaggaaaataagagaaaggtaagggctcttttgaataaactgctgttttatttgtggcacaactgatcaatcttggaaattctttaagtatttttaataagaaatgaattatcatttcttgccagaatttgctaccttaaggtgattgggaaaattctgttgcaagaacattaacatttagtatgactcctttttactgtattcttgcagttaataactgcagctattatgttaataacaagttgtttgtattttatttttgtttataccagtcttaaagatccaggttctgaataaaaaaattaattgatacaattgatgtgtgctggggtttggaactaaaagtagtttcaacagtgcgtgggttatgacatttcttatgtttctttgttcatgtgtgtatttagtarttaattttaagatgtcctagtgatctttaaaagaaaaatattgtaccattttttagaattacactttcacctttctttttgcaattgaaagtgatgatgtcaaagtgggatttctgtactccaaggccccacccccaatttagcaagcagaaaaacgttccttgtatcactttaccttggataattgggtgccattaacacaaacaggtcacaatcytgctgttttctagccctgtccaccataatgagattcaggaaacatcctgtcagcctcctggaaagcatccttgtctccttagtatttcatttacaaactacctcttaacagagactgcttttcaaattggccaatcttacctgttttgtgttgtgattgcattttcaaagagtaattattttcagcatatacagttttgaaacctgtagctcctatgcaataacatagttctatagacattatttgggggaaatgtagtaataactcaatctatgttgctgtcctagaaaggaaattgcatgatgaatctagattgtctttagagtaaagaaacacattcaaattcctgtaacttatcactttcagtgagtaaatttactyataccaaaggggattttttttctttcaggaatctaaggaaatttactttttaacctgagaaaaaaacttggttctgctttatataaacagtagagattattgtactataagtgattttgcctttttgccaaaatcctggaactcatctataattaacctcttmggagcaataccttaggttgggccttgctttactacttagaaatagctaaatttcaattttaaaaatctttgtgtgttataactgttaaattattcaataatacttagggtttactttcttatttaaatcacttatttagtttaccgacttcatttttctttggatttagaagaagcaattatggaaaaacttggtaatctctctcaacctataaccttacacaggaagaattagagtttaataatttttaattcttttattgtatgttacttttattacaccagtttgggggaaaatcttcataaaattgtatcagttttattcagtgttctctaaggtgataccttttaattttgaaagactaaataattttaatcgagaatttccagtctttcagtctgatctatttaattcactacttgttacataatccagtgaaaactctacttgttgaaattatgacataaagatcttgcagctttatttgagtatttgttcttttgtgtagtttccatcttttaaaatatttaaaatattttcaagataaagtattatcttctctgcaaaaattcctggagtaattttctctcataatatttgaagtcagtggttctcrgttgtattagtggggtaactacatcaaaataaataaagtcttatttttaaaatgc

SEQ ID NO: 483 - DNA, 3986 bp, Homo sapiens
ggacccacgggacgggcaggagctggagctccgtgccgcctgtactcccgccttcatttcccatcgtgctgaggcgggtggcatggcggagaaggatgacaccggagtttgacgaagaggtggtttttgagaattctccactttaccaatacttacaggatctgggacacacagactttgaaatatgttcttctttgtcaccaaaaacagaaaaatgcacaacagagggacaacaaaagcctcctacaagagtcctaccaaaatacctgggatatagtaatcactcaatgaatataaactgcacttactggcatgctcaaggaatgggctattaaggatattggattccgactcgactcattacataccatcctgcaacaggaagtcctgttacaagaggatgtggagctgattgagctacttgatcccagtatcctgtctgcagggcaatctcaacaacaggaaaatggacaccttccaacactttgctccctggcaacccctaatatttgggatctctcaatgctatttgccttcattagcttgctcgttatgcttcccrcttggtggattgtgtcttcctggctggtatggggagtgattctatttgtgtatctggtcataagagctttgagattatggaggacagccaaactacaagtgaccctaaaaaaatacagcgttcatttggaagatatggccacaaacagccgagcttttactaacctcgtgagaaaagctttacgtctcattcaagaaaccgaagtgatttccagaggatttacactggtcagtgctgcttgcccatttaataaagctggacagcatccaagtcagcatctcatcggtcttcggaaagctgtctaccgaactctaagagccaacttccaagcagcaaggctagctaccctatatatgctgaaaaactaccccctgaactctgagagtgacaatgtaaccaactacatctgtgtggtgccttttaaagagctgggccttggacttagtgaagagcagatttcagaagaggaagcacataactttacagatggcttcagcctgcctgcattgaaggttttgttccaactctgggtggcacagagttcagagttcttcagacggttagccctattactttctacagccaattcacctcctgggcccttacttactccagcacttctgcctcatcgtatcttatctgatgtgactcaaggtctacctcatgctcattctgcctgtttggaagagcttaagcgcagctatgagttctatcggtactttgaaactcagcaccagtcagtaccgcagtgtttatccaaaactcaacagaagtcaagagaactgaataatgttcacacagcagtgcgtagcttgcagctccatctgaaagcattactgaatgaggtaataattcttgaagatgaacttgaaaagcttgtttgtactaaagaaacacaagaactagtgtcagaggcttatcccatcctagaacagaarttaaagttgattcagccccaygttcaagcaagcaacaattgctgggaagaggccatttctcagrtcgacaaactgctacgaagaaatacagataaaaaaggcaagcctgaaatagcatgtgaaaacccacattgtacagtagtacctttgaagcagcctactctacacattgcagacaaagatccaatcccagaggagcaggaattagaagcttatgtagatgatatagatattgatagtgatttcagaaaggatgatttttattacttgtctcaagaagacaaagagagacagaagcgtgagcatgaagaatccaagagggtgctccaagaattaaaatctgtgctgggatttaaagcttcagaggcagaaaggcagaagtggaagcaacttctatttagtgatcatggggtaaagtccgcatggaattagagggggaaagtctgcactggaacctgctgtggccattttttttctgttgttgctgcttctctagtggagttactgcagcttagggatggttcctggaagtggacacattttacaaaaacgttttttaaatacacgccagctcttcgagaagcacttttttccttccgtcatgcttcatactatattgtattgtactaacccctcatgctgggatgagcgactgcctagcaagcaacccactgcctactaacatcaagaggggctaaataaaactgcattttccttgcaaggacaacttctaccgtatgaatatatattatatttatgtattatattttgtacaatagttgatcttgaatgcagacttcatttgtatttttcgtggtactacaaaatgtgtagaagttatggcttttctttcattagggtcttgttaggtggttggcaagtaagttaaattgtatgttgcatttttttccatgctgttttaacttgtaaatatatatgtatacatrtggaagatattattattatctagattactttaagccttttatctgatgtattatcagtgaaaaccatgctgcttattccctaatacaatggttctcaaactttagtgtgtatcagaatcaagatgagggcttgtaaaatatagctggtccctactcccagagtttccatttcaggaggtctgggatcaggcccaagaatttgcatttttaacaaattcctaggtgataactgataatgttggttcagggaacacactttcagaaccactgctttaatattttaaataagataatatgtgaggtgtcataaaaaccttcatcaaatccctatctcatttcatttcttaggcattttctctcttataaagtttcctggatttataaattttcattgattttactagaaagttttatttagcttttatttatttattgttctttttaagaaaaaaactgagagtttgaattaaaagtttaaatcattgctaggtccttagttattttttttcttttttctttttttttatttgaagccrtgttgaaatccttgtctcctgtagacccagtggaacccataagtaattcagaaccatcaatgaattcagatatgggaaaagtcagtaaaaatgatactgaagaggaaagtaataaatccgccacaacagacaatgaaataagtaggactgagtatttatgtgaaaackctctagaaggtaaaaataaagataattcttcaaatgaagtcttcccccaaggagcagaagaaagaatgtgttaccaatgtgagagtgaagatgaaccacaagcagatggaagtggtctgaccactgcccctccaactcccagggactcattacagccctccattaagcagaggctggcacggctacagctstcaccagattttaccttcactgctggccttgctgcagaagtggctgctagatctctctcctttaccaccatgcaggaacagacttttggtgrtgaggaggaagaacaaataatagaagaaaataaaaatgagatagaagaaaagtaagaaccaagattcatatgaagtgatattagattgttccttttacaaaagtgtttagcttcaagactggaaagggaatatgagtgtaagtttactatatrtaaagctaagatgtggatttacaggaagaaccctggtttgaataactgatctgaaattmgtagttacctgtaaatggcagatcttttaggaaaataagagaaaggtaagggctcttttgaataaactgctgttttatttgtggcacaactgatcaatcttggaaattctttaagtatttttaataagaaatgaattatcatttcttgccagaatttgctaccttaaggtgattgggaaaattctgttgcaagaacattaacatttagtatgactcctttttactgtattcttgcagttaataactgcagctattatgttaataacaagttgtttgtattttatttttgtttataccagtcttaaagatccaggttctgaataaaaaaattaattgatac

SEQ ID NO: 484 - DNA, 2680 bp, Homo sapiens
ggacccacgggacgggcaggagctggagctccgtgccgcctgtactcccgccttcatttcccatcgtgctgaggcgggtggcatggcggagaaggatgacaccggagtttgacgaagaggtggtttttgagaattctccactttaccaatacttacaggatctgggacacacagactttgaaatatgttcttctttgtcaccaaaaacagaaaaatgcacaacagagggacaacaaaagcctcctacaagagtcctaccaaaatacctgggatatagtaatcactcaatgaatataaactgcacttactggcatgctcaaggaatgggctattaagcaaggtatcctgttaaaagtggctgaaaccatcaaaagttggatttttttttctcagtgcaataagaaagatgacttacttcacaagttggatattggattccgactcgactcattacataccatcctgcaacaggaagtcctgttacaagaggatgtggagctgattgagctacttgatcccagtatcctgtctgcagggcaatctcaacaacaggaaaatggacaccttccaacactttgctccctggcaacccctaatatttgggatctctcaatgctatttgccttcattagcttgctcgttatgcttcccrcttggtggattgtgtcttcctggctggtatggggagtgattctatttgtgtatctggtcataagagctttgagattatggaggacagccaaactacaagtgaccctaaaaaaatacagcgttcatttggaagatatggccacaaacagccgagcttttactaacctcgtgagaaaagctttacgtctcattcaagaaaccgaagtgatttccagaggatttacactggtcagtgctgcttgcccatttaataaagctggacagcatccaagtcagcatctcatcggtcttcggaaagctgtctaccgaactctaagagccaacttccaagcagcaaggctagctaccctatatatgctgaaaaactaccccctgaactctgagagtgacaatgtaaccaactacatctgtgtggtgccttttaaagagctgggccttggacttagtgaagagcagatttcagaagaggaagcacataactttacagatggcttcagcctgcctgcattgaaggttttgttccaactctgggtggcacagagttcagagttcttcagacggttagccctattactttctacagccaattcacctcctgggcccttacttactccagcacttctgcctcatcgtatcttatctgatgtgactcaaggtctacctcatgctcattctgcctgtttggaagagcttaagcgcagctatgagttctatcggtactttgaaactcagcaccagtcagtaccgcagtgtttatccaaaactcaacagaagtcaagagaactgaataatgttcacacagcagtgcgtagcttgcagctccatctgaaagcattactgaatgaggtaataattcttgaagatgaacttgaaaagcttgtttgtactaaagaaacacaagaactagtgtcagaggcttatcccatcctagaacagaarttaaagttgattcagccccaygttcaagcaagcaacaattgctgggaagaggccatttctcagrtcgacaaactgctacgaagaaatacagataaaaaaggcaagcctgaaatagcatgtgaaaacccacattgtacagtagtacctttgaagcagcctactctacacattgcagacaaagatccaatcccagaggagcaggaattagaagcttatgtagatgatatagatattgatagtgatttcagaaaggatgatttttattacttgtctcaagaagacaaagagagacagaagcgtgagcatgaagaatccaagagggtgctccaagaattaaaatctgtgctgggatttaaagcttcagaggcagaaaggcagaagtggaagcaacttctatttagtgatcatggtaagcactgactttaaagtaacaggttatttcaatgtaggggattctttctttcttgaaccatgaatgttattttagctgaagaattcttggggttttataagggtccaccagtatgcatagtactttttcttctagatgctaaatcaatttgattaataaaagagtaggaatgtaaccacattggaaatatgaagtcatacttttttatgagttatttaattttttagtaaatttgttttagaatgggcagtgagttgaataatttgggatattttaaatgttattttcaaatttagtgaatttgagattctcaactctgttgtccatatgttaaaatatttaaaaatacctcagtgaagcacaaaattaataactgtgctcacattgaaaaaaatggcccaggcgcrgcggcacatgcttgtaatatcagcacgttgggaagctgaggcgggtggatcatttgaggtcaggagttcaagaccagcctggccaacatrgcgaaaccccatctctactaaaaatacaaaaattaacaaggcatggtggcgcgtgcctgtagtcccagctactcgagaggctgaggcaggagaatcacttgaacccgggaggcggaggtttcagtgagccaagatcacgccactgcactccagcctgggcaacagagggagactccatctc

SEQ ID NO: 485 - DNA, 4076 bp, Homo sapiens
ggacccacgggacgggcaggagctggagctccgtgccgcctgtactcccgccttcatttcccatcgtgctgaggcgggtggcatggcggagaaggatgacaccggagtttgacgaagaggtggtttttgagaattctccactttaccaatacttacaggatctgggacacacagactttgaaatatgttcttctttgtcaccaaaaacagaaaaatgcacaacagagggacaacaaaagcctcctacaagagtcctaccaaaatacctgggatatagtaatcactcaatgaatataaactgcacttactggcatgctcaaggaatgggctattaagcaaggtatcctgttaaaagtggctgaaaccatcaaaagttggatttttttttctcagtgcaataagaaagatgacttacttcacaagttggatattggattccgactcgactcattacataccatcctgcaacaggaagtcctgttacaagaggatgtggagctgattgagctacttgatcccagtatcctgtctgcagggcaatctcaacaacaggaaaatggacaccttccaacactttgctccctggcaacccctaatatttgggatctctcaatgctatttgccttcattagcttgctcgttatgcttcccrcttggtggattgtgtcttcctggctggtatggggagtgattctatttgtgtatctggtcataagagctttgagattatggaggacagccaaactacaagtgaccctaaaaaaatacagcgttcatttggaagatatggccacaaacagccgagcttttactaacctcgtgagaaaagctttacgtctcattcaagaaaccgaagtgatttccagaggatttacactggtcagtgctgcttgcccatttaataaagctggacagcatccaagtcagcatctcatcggtcttcggaaagctgtctaccgaactctaagagccaacttccaagcagcaaggctagctaccctatatatgctgaaaaactaccccctgaactctgagagtgacaatgtaaccaactacatctgtgtggtgccttttaaagagctgggccttggacttagtgaagagcagatttcagaagaggaagcacataactttacagatggcttcagcctgcctgcattgaaggttttgttccaactctgggtggcacagagttcagagttcttcagacggttagccctattactttctacagccaattcacctcctgggcccttacttactccagcacttctgcctcatcgtatcttatctgatgtgactcaaggtctacctcatgctcattctgcctgtttggaagagcttaagcgcagctatgagttctatcggtactttgaaactcagcaccagtcagtaccgcagtgtttatccaaaactcaacagaagtcaagagaactgaataatgttcacacagcagtgcgtagcttgcagctccatctgaaagcattactgaatgaggtaataattcttgaagatgaacttgaaaagcttgtttgtactaaagaaacacaagaactagtgtcagaggcttatcccatcctagaacagaarttaaagttgattcagccccaygttcaagcaagcaacaattgctgggaagaggccatttctcagrtcgacaaactgctacgaagaaatacagataaaaaaggcaagcctgaaatagcatgtgaaaacccacattgtacagtagtacctttgaagcagcctactctacacattgcagacaaagatccaatcccagaggagcaggaattagaagcttatgtagatgatatagatattgatagtgatttcagaaaggatgatttttattacttgtctcaagaagacaaagagagacagaagcgtgagcatgaagaatccaagagggtgctccaagaattaaaatctgtgctgggatttaaagcttcagaggcagaaaggcagaagtggaagcaacttctatttagtgatcatggggtaaagtccgcatggaattagagggggaaagtctgcactggaacctgctgtggccattttttttctgttgttgctgcttctctagtggagttactgcagcttagggatggttcctggaagtggacacattttacaaaaacgttttttaaatacacgccagctcttcgagaagcacttttttccttccgtcatgcttcatactatattgtattgtactaacccctcatgctgggatgagcgactgcctagcaagcaacccactgcctactaacatcaagaggggctaaataaaactgcattttccttgcaaggacaacttctaccgtatgaatatatattatatttatgtattatattttgtacaatagttgatcttgaatgcagacttcatttgtatttttcgtggtactacaaaatgtgtagaagttatggcttttctttcattagggtcttgttaggtggttggcaagtaagttaaattgtatgttgcatttttttccatgctgttttaacttgtaaatatatatgtatacatrtggaagatattattattatctagattactttaagccttttatctgatgtattatcagtgaaaaccatgctgcttattccctaatacaatggttctcaaactttagtgtgtatcagaatcaagatgagggcttgtaaaatatagctggtccctactcccagagtttccatttcaggaggtctgggatcaggcccaagaatttgcatttttaacaaattcctaggtgataactgataatgttggttcagggaacacactttcagaaccactgctttaatattttaaataagataatatgtgaggtgtcataaaaaccttcatcaaatccctatctcatttcatttcttaggcattttctctcttataaagtttcctggatttataaattttcattgattttactagaaagttttatttagcttttatttatttattgttctttttaagaaaaaaactgagagtttgaattaaaagtttaaatcattgctaggtccttagttattttttttcttttttctttttttttatttgaagccrtgttgaaatccttgtctcctgtagacccagtggaacccataagtaattcagaaccatcaatgaattcagatatgggaaaagtcagtaaaaatgatactgaagaggaaagtaataaatccgccacaacagacaatgaaataagtaggactgagtatttatgtgaaaackctctagaaggtaaaaataaagataattcttcaaatgaagtcttcccccaaggagcagaagaaagaatgtgttaccaatgtgagagtgaagatgaaccacaagcagatggaagtggtctgaccactgcccctccaactcccagggactcattacagccctccattaagcagaggctggcacggctacagctstcaccagattttaccttcactgctggccttgctgcagaagtggctgctagatctctctcctttaccaccatgcaggaacagacttttggtgrtgaggaggaagaacaaataatagaagaaaataaaaatgagatagaagaaaagtaagaaccaagattcatatgaagtgatattagattgttccttttacaaaagtgtttagcttcaagactggaaagggaatatgagtgtaagtttactatatrtaaagctaagatgtggatttacaggaagaaccctggtttgaataactgatctgaaattmgtagttacctgtaaatggcagatcttttaggaaaataagagaaaggtaagggctcttttgaataaactgctgttttatttgtggcacaactgatcaatcttggaaattctttaagtatttttaataagaaatgaattatcatttcttgccagaatttgctaccttaaggtgattgggaaaattctgttgcaagaacattaacatttagtatgactcctttttactgtattcttgcagttaataactgcagctattatgttaataacaagttgtttgtattttatttttgtttataccagtcttaaagatccaggttctgaataaaaaaattaattgatac

SEQ ID NO: 486 - DNA, 3868 bp, Homo sapiens
tctgtccccgcctcctggcctcctggctgaggggaagctgagtgggccacggcccatgtgtygcactcgcctcggctcccacacagccgcctctgctccagcaaggatgtggctcttccacactctgctctgcatagccagcctggccctgctggccgctttcaatgtggatgtggcccggccctggctcacgcccaagggaggtgcccctttcgtgctcagctcccttctgcaccaagaccccagcaccaaccagacctggctcctggtcaccagccccagaaccaagaggacaccagggcccctccatcgatgttcccttgtccaggatgaaatcctttgccatcctgtagagcatgtccccatccccaaggggaggcaccggggagtgaccgttgtccggagccaccacggtgttttgatatgcattcaagtgctggtccggcggcctcacagcctcagctcagaactcacaggcacctgtagcctcctgggccctgacctccgtccccaggctcaggccaacttcttcgaccttgaaaatctcctggatccagatgcacgtgtggacactggagactgctacagcaacaaagaaggcggtggagaagacgatgtgaacacagccaggcagcgccgggctctggagaaggaggaggaggaagacaaggaggaggaggaagacgaggaggaggaggaagctggcaccgagattgccatcatcctggatggctcaggaagcattgatcccccagactttcagagagccaaagacttcatctccaacatgatgaggaacttctatgaaaagtgttttgagtgcaactttgccttggtgcagtatggaggagtgatccagactgagtttgaccttcgggacagccaggatgtgatggcctccctcgccagagtccagaacatcactcaagtggggagtgtcaccaagactgcctcagccatgcaacacgtcttagacagcatcttcacctcaagccacggctccaggagaaaggcatccaaggtcatggtggtgctcaccgatggtggcatattcgaggaccccctcaaccttacgacagtcatcaactcccccaaaatgcagggtgttgagcgctttgccattggggtgggagaagaatttaagagtgctaggactgcgagggaactgaacctgatcgcctcagacccggatgagacccatgctttcaaggtgaccaactacatggcgctggatgggctgctgagcaaactgcggtacaacatcatcagcatggaaggcacggttggagacgcccttcactaccagctggcacagattggcttcagtgctcagatcctggatgagcggcaggtgctgctcggcgccgtcggggcctttgactggtccggaggggcgttgctctacgacacacgcagccgccggggccgcttcctgaaccagacagcggcggcggcggcagacgcggaggctgcgcagtacagctacctgggttacgctgtggccgtgctgcacaagacctgcagcctctcctacrtcgcgggggctccacrgtacaaacatcatggggccgtgtttgagctccagaaggagggcagagagkccagcttcctgccagtgctggagggagagcagatggggtcctattttggctctgagctgtgccctgtggacattgacatggatggaagcacggacttcttgctggtggctgctccattttaccacgttcatggagaagaaggcagagtctacgtgtaccgtctcagcgagcaggatggttctttctccttggcacgcatactgagtgggcaccccgggttcaccaatgcccgctttggctttgccatggcggctatgggggatctcagtcaggataagctcacagatgtggccatcggggcccccctggaaggttttggggcagatgatggtgccagcttcggcagtgtgtatatctacaayggacactgggacggcctctccgccagcccctcgcagcggatcagagcctccacggtggccccaggactccagtacttcggcatgtccatggctggtggctttgatattagtggcgacggccttgccgacatcaccgtgggcactctgggccaggcggttgtgttccgctcccggcctgtggttcgcctgaaggtctccatggccttcacccccagcgcactgcccatcggcttcaacggcgtcgtgaatgtccgtttatgttttgaaatcagctctgtaaccacagcctctgagtcaggcctccgygaggcacttctcaacttcacgctggatgtggatgtggggaagcagaggagacggctgcagtgttcagacgtaagaagctgtctgggctgcctgagggagtggagcagcggatcccagctttgtgaggacctcctgctcatgcccacagagggagagctctgtgaggaggactgcttctccaatgccagtgtcaaagtcagctaccagctccagacccctgagggacagacggaccatccccagcccatcctggaccgctacactgagccctttgccatcttccagctgccctatgagaaggcctgcaagaataagctgttttgtgtcgcagaattacagttggccaccrccgtctctcagcaggagttggtggtgggtctcacaaaggagctgaccctgaacattaacctaactaactccggggaagattcctacatgacaagcatggccttgaattaccccagaaacctgcagttgaagaggatgcaaaagcctccctctccaaacattcastgtgatgaccctcagccggttgcttctgtcctgatcatgaactgcaggattggtcaccccgtcctcaagaggtcatctgctcatgtttcagtcgtttggcagctagaggagaatgcctttccaaacaggacagcagacatcactgtgactgtcaccaattccaatgaaagayggtctttggccaacgagacccacacccttcaattcaggcatggcttcgttgcagttctgtccaaaccatccataatgtacgtgaacacaggccaggggctttctcaccacaaagaattcctcttccatgtacatggggagaacctctttggagcagaataccagttgcaaatttgcgtcccaaccaaattacgaggtctccaggttgyagcagtgaagaagctgacgaggactcaggcctccacggtgtgcacctggagtcaggagcgcgcttgtgcgtacagttcggttcagcatgtggaagaakggcattcagtgagctgtgtcatcgcttcagataaagaaaatgtcaccgtggctgcagagatctcctgggatcactctgaggagttactaaaagatgtaactgaactgcagatccttggtgaaatatctttcaacaaatctctatatgagggactkaatgcagagaaccacagaactaagatcactgtcgtcttcctgaaagatgagaagtaccattctttgcctatcatcattaaaggcagcgttggtggacttctggtgttgatcgtgattctggtcatcctgttcaagtgtggcttttttaaaagaaaatatcaacaactgaacttggagagcatcaggaaggcccagctgaaatcagagaatctgctcgaagaagagaattaggacctgctatccactgggagaggctatcagccagtcctgggacttggagacccagcatcctttgcattactttttccttcwggatgatctagagcagcatggagctgttggtagaatattagtttttaaccatacattgtcccaaaagtgtctgtgcattgtgcaaaaagtaaacttaggaaacatttggtattaaataaatttacactttwctttgcarta

SEQ ID NO: 487 - DNA, 2506 bp, Homo sapiens
ggcggtgcccttgcggcgcagctggggtcgcggccctgctcccsgcgctttcttaaggcccgcgggcggcgcaggagcggcactcgtggctgtggtggcttcggcagcggcttcagcagatcggcggcatcagcggtagcaccagcactagcagcatgttgagccgggcagtgtgcggcaccagcaggcagctggctccggytttggggtatctgggctccaggcagaagcacagcctccccgacctgccctacgactacggcgccctggaacctcacatcaacgckcagatcatgcagctgcaccacagcaagcaccacgcggcctacgtgaacaacctgaacgtcaccgaggagaagtaccaggaggcgttggccaagrgagatgttacagcccagayagctyttcagcctgcactgaagttcaatggtggtggtcatatcaatcatagcattttctggacaaacctcagccctaacggtggtggagaacccaaaggggagttgctggaagccatcaaacgtgactttggttcctttgacaagtttaaggagaagctgacggctgcatctgttggtgtccaaggctcaggttggggttggcttggtttcaataaggaacggggacacttacaaattgctgcttgtccaaatcaggatccactgcaaggaacaacaggccttattccactgctggggattgatgtgtgggagcacgcttactaccttcagtataaaaatgtcaggcctgattatctaaaagctatttggaatgtaatcaactgggagaatgtaactgaaagatacatggcttgcaaaaagtaaaccacgatcgttatgctgagtatgttaagctctttatgactgtttttgtagtggtatagagtactgcagaatacagtaagctgctctattgtagcatttcttgatgytgcttagtcacttatttcataaacaacttaatgttctgaataatttcttactaaacattttgttattgggcaagtgattgaaaatagtaaatgctttgtgtgattgaatctgaytggacattttcttcagagagctaaattacaattgtcatttataaaaccatcaaaaatattccatccatatactttsgggacttgtagggatgcctttctagtcctattctattgcagttatagaaaatctagtcttttgccccagttacttaaaaataaaatattaacactttcccaagggaaacactcggctttctatagaaaattgcactttttgtcragtaatcctctgcagtgatacttctggtagatgtcacccagtggtttttgttaggtcaaatgttcctgtatagtttttgcaaatagagctgtatactgtttaaatgtagcaggtgaactgaactggggtttgctcacctgcacagtaaaggcaaacttcaacagcaaaactgcaaaaaggtggtttttgcagtaggagaaaggaggatgtttatttgcagggcgccaagcaaggagaattgggcagctcatgcttgagacccaatctccatgatgacctacaagctagagtatttaaaggcagtggtaaatttcaggaaagcagaagttaaaggcaaaattgtaaatcagtcgagatcgggtgccttcagggtggtatggctgtataccaaaattgtaaatcactacatgaagcttatatattggtttggcctgaaaggtgaagtggggtaggcagggggcgggcttacaggttatggtggattcaaagactccytgatttgtgattggttaaggaagcaaagctttgtctaaaaacttggggtccgcagaaaggaacattaaggtctggccaggcccctcaggaagaaactgagagcaaagaatggaggtcagagtttagtccctggtgttcccccttatctgacgtctgtgtgaatccatttggtgggggtctgggtttctgaaaagtagctcaggggcacgtgttaaggatgtctctaggtgactctaacttccctggctattgtttgaaactgttatgaccttcttgcttatcagcttgctggtttccttctcggggcgagctgggtgcctggagttttcggtgaaggaaactcaagattctcctttatttctgtgcttgtgggaatccccctggcacaccccaaagaggggtccctgctccgtctcacagggatctttttgtatatttggcttagcatcatacatttgccatgttgtttcatcatctgcctaatttactgtttttgaatatttcatttgtttctaattgttactacagataatgctggggtgagcaacwctgtgtacataggtttatctcctattggaatattttctttatataggcgttttttttttttctttttttttggagacagagtcttgctctgttgcccaggctggagtgcagtggcgygacyggagctcactgcaacctccacttcccgggttcaagtgattgtcccacctcagcctcctgaatagctgggattayag

SEQ ID NO: 488 - DNA, 1403 bp, Homo sapiens
ggcggtgcccttgcggcgcagctggggtcgcggccctgctcccsgcgctttcttaaggcccgcgggcggcgcaggagcggcactcgtggctgtggtggcttcggcagcggcttcagcagatcggcggcatcagcggtagcaccagcactagcagcatgttgagccgggcagtgtgcggcaccagcaggcagctggctccggytttggggtatctgggctccaggcagaagcacagcctccccgacctgccctacgactacggcgccctggaacctcacatcaacgckcagatcatgcagctgcaccacagcaagcaccacgcggcctacgtgaacaacctgaacgtcaccgaggagaagtaccaggaggcgttggccaagrgagatgttacagcccagayagctyttcagcctgcactgaagttcaatggtggtggtcatatcaatcatagcattttctggacaaacctcagccctaacggtggtggagaacccaaaggggagttgctggaagccatcaaacgtgactttggttcctttgacaagtttaaggagaagctgacggctgcatctgttggtgtccaaggctcaggttggggttggcttggtttcaataaggaacggggacacttacaaattgctgcttgtccaaatcaggatccactgcaaggaacaacaggccttattccactgctggggattgatgtgtgggagcacgcttactaccttcagtataaaaatgtcaggcctgattatctaaaagctatttggaatgtaatcaactgggagaatgtaactgaaagatacatggcttgcaaaaagtaaaccacgatcgttatgctgagtatgttaagctctttatgactgtttttgtagtggtatagagtactgcagaatacagtaagctgctctattgtagcatttcttgatgytgcttagtcacttatttcataaacaacttaatgttctgaataatttcttactaaacattttgttattgggcaagtgattgaaaatagtaaatgctttgtgtgattgaatctgaytggacattttcttcagagagctaaattacaattgtcatttataaaaccatcaaaaatattccatccatatactttsgggacttgtagggatgcctttctagtcctattctattgcagttatagaaaatctagtcttttgccccagttacttaaaaataaaatattaacactttcccaagggaaacactcggctttctatagaaaattgcactttttgtcrataatcccagcactttgggaggccaaggcaggcagaacacttgaaggagttcaagaccagcgtggccaacgtggtgaaaccctgtctctactaaaaatacaaaaattgtttagctctgtttttcataatagaaataga

SEQ ID NO: 489 - DNA, 819 bp, Homo sapiens
ggcggtgcccttgcggcgcagctggggtcgcggccctgctcccsgcgctttcttaaggcccgcgggcggcgcaggagcggcactcgtggctgtggtggcttcggcagcggcttcagcagatcggcggcatcagcggtagcaccagcactagcagcatgttgagccgggcagtgtgcggcaccagcaggcagctggctccggytttggggtatctgggctccaggcagaagcacagcctccccgacctgccctacgactacggcgccctggaacctcacatcaacgckcagatcatgcagctgcaccacagcaagcaccacgcggcctacgtgaacaacctgaacgtcaccgaggagaagtaccaggaggcgttggccaagrgtaggttccaggctgagcggcgggaggcagtccccggcagaggcgaccccagggagccaggccccatacggacgggcctctccgtggaggagaactcgcttcgtatttgtaccggttccgagttttccaggcacgatagtctctcttttaaacacatggtctacctcattgtagaaggagtgcctcgatgggtttgaacacacttctgtcatctcagggaacttggggtcctgcgaaggagcttgccttactgttgtgagccacattccgttacacatattgccagcactggtgaattgtagggcctgaaaagaaagctctactgtgtcactcgttttttttgcaaattgaaattgttcttgttgtataatrygctttggggaaatgtttggtctctcaggtaggtgtgccagccgtttgcaggagggctgagagcgc

SEQ ID NO: 490 - DNA, 2875 bp, Homo sapiens
gtgagtcccttatcacaactgatcactccgtggggtcaccgctgctctggcgtctacctcccccaacaggttggggtttctaggagggcagctccagaggttgcagaacactccgctgcctctccagagccaggcacacagcaggcgctccataaatgttcgttggwcttttctccttgctcagcttcaatgtgttccggagtggggacggggtggctgaacctcgcaggtggcagagaggctcccctggggctgtggggctctacgtggatcygatggagccgctggtgacctgggtggtccccctcctcttcctcttcctgctgtccaggcagggcgctgcctgcagaaccagtgagtgctgttttaggacccgccatatccggatgcagactcaggctcggcctcgggccctagggacctgagatgctatcggatatccagtgatcgttacgagtgctcctggcagtatgagggtcccacagctggggtcagccacttcctgcggtgttgccttagctccgggcgctgctgctacttcgccgccggctcagccaccaggctgcagttctccgaccaggctggggtgtctgtgctgtacactgtcacactctgggtggaatcctgggccaggaaccagacagagaagtctcctgaggtvaccctgcagctctacaactcagttaaatatgagcctcctctgggagacatcaaggtgtccaagttggccgggcagctgcrtatggagtgggagaccccggataaccaggttggtgctgaggtgcagttccggcaccggacacccagcagcccatggaagttgggcgactgcggacctcaggatgatgatactgagtcctgcctctgccccctggagatgaatgtggcccaggaattccagctccgacgacygcarctggggagccaaggaagttcctggagcaagtggagcagccccgtgtgcgttccccctgaaaaccccccacagcctcaggtgagattctcggtggagcagctgggccaggatgggaggaggcggctgaccctgaaagagcagccaacccagctggagcttccagaaggctgtcaagggctggcgcctggcacggaggtcacttaccgactacagctccacatgctgtcctgcccgtgtaaggccaaggccaccaggaccctgcacctggggawgatgccctatctctcgggtgctgcctacaacgtggctgtcatctcctcgaaccaatttggtcctggcctgaaccagacgtggcacattcctgccgacacccacacagaaccagtggctctgaatatcagcgtcggaaccaacyggaccaccatgtattggccagcccgggctcagagcatyacgrattgcattgaatggcagcctgtgggcyaggacgsgggccttgccacctgcagcctgactgcgccgcaagacccggatccggctggaatggcaacctacagctggagtcgagagtctggggcaatggggcaggaaaagtgttacyacattaccatctttgcctctgcgcaccccgagaagctcaccttgtggtctacggtcctgtccacctaccactttgggggcaatgcctcagcagctgggacaccgcaccacgtctcggtgaagaatcatagcttggactctgtgtctgtggactgggcaccatccctgctgagcacctgtcccggcgtcctaaaggagtatgttgtccgctgccgagatgaagacagcaaacaggtgtcagagcatcccgtgcagcccacagagacccaagttaccctcagtggcctgcgggctggtgtagcctacacggtgcaggtgcgagcagacacarcgtggctgaggggtgtctggagccagycccagcgcttcagcatcgaagtgcaggtttctgattggctcatcttcttcgcctccctggggagcttcctgagcatccttctcgtgggcgtccttggctaccttggcctgaacagggccgcacggcacctgtgcccgccgctgcccacaccctgtgccagctccgccattgagttccctggagggaaggagacttggcagtggatcaacccagtggacttccaggaagaggcatccctgcaggaggccctggtggtagagatgtcctgggacaaaggcgagaggactgagcctctcgagaagacagagctacctgagggtgcccctgagctggccctggatacagagttgtccttggaggatggagacaggtgcaaggccaagatgtgatcgttgaggctcagagagggtgagtgactcgcccyaggctacgtagcacacacaggagtcacatttggacccaaataacccagagctcctccaggctccagtgcacctgcctcctcycygccccgtgcctgttgccacccatcctgcgggggaaccctagatgctgccatgaaatggaagctgctgcaccctgctgggcctggcatccgtggggcaggagcagaccctgccatttacctgttytggcgtagaatggactgggaatgggggcaaggggggctcagatggatccctggaccctgggctgggcatccacccccaggagcactggatggggagtcyggactcaagggctccctgcagcattgcggggtcttgtagcttggaggatccaggcatatagggaagggggctgtaaactwtgtgggaaaaatgacggtcctcccatcccaccccccaccccaccctcacccccctataaaatgggggtggtgataatgaccttacacagctgttcaaaatcatcgtaaatgagcctcctcttgggtatttttttcctgtttgaagcttgaatgtcctgctcaaaatctcaaaacacgagccttggaattc

SEQ ID NO: 491 - DNA, 2763 bp, Homo sapiens
gccttagggatgggctgtgacactttactttttttcttttttcttttttttcwgtcttttctccttgctcagcttcaatgtgttccggagtggggacggggtggctgaacctcgcaggtggcagagaggctcccctggggctgtggggctctacgtggatcygatggagccgctggtgacctgggtggtccccctcctcttcctcttcctgctgtccaggcagggcgctgcctgcagaaccagtgagtgctgttttaggacccgccatatccggatgcagactcaggctcggcctcgggccctagggacctgagatgctatcggatatccagtgatcgttacgagtgctcctggcagtatgagggtcccacagctggggtcagccacttcctgcggtgttgccttagctccgggcgctgctgctacttcgccgccggctcagccaccaggctgcagttctccgaccaggctggggtgtctgtgctgtacactgtcacactctgggtggaatcctgggccaggaaccagacagagaagtctcctgaggtgvccctgcagctctacaactcagttaaatatgagcctcctctgggagacatcaaggtgtccaagttggccgggcagctgcgratggagtgggagaccccggataaccaggttggtgctgaggtgcagttccggcaccggacacccagcagcccatggaagttgggcgactgcggacctcaggatgatgatactgagtcctgcctctgccccctggagatgaatgtggcccaggaattccagctccgacgacygcarctggggagccaaggaagttcctggagcaagtggagcagccccgtgtgcgttccccctgaaaaccccccacagcctcaggtgagattctcggtggagcagctgggccaggatgggaggaggcggctgaccctgaaagagcagccaacccagctggagcttccagaaggctgtcaagggctggcgcctggcacggaggtcacttaccgactacagctccacatgctgtcctgcccgtgtaaggccaaggccaccaggaccctgcacctggggawgatgccctatctctcgggtgctgcctacaacgtggctgtcatctcctcgaaccaatttggtcctggcctgaaccagacgtggcacattcctgccgacacccacacagaaccagtggctctgaatatcagcgtcggaaccaacyggaccaccatgtattggccagcccgggctcagagcatyacgrattgcattgaatggcagcctgtgggccyggacgsgggccttgccacctgcagcctgactgcgccgcaagacccggatccggctggaatggcaacctacagctggagtcgagagtctggggcaatggggcaggaaaagtgttacyacattaccatctttgcctctgcgcaccccgagaagctcaccttgtggtctacggtcctgtccacctaccactttgggggcaatgcctcagcagctgggacaccgcaccacgtctcggtgaagaatcatagcttggactctgtgtctgtggactgggcaccatccctgctgagcacctgtcccggcgtcctaaaggagtatgttgtccgctgccgagatgaagacagcaaacaggtgtcagagcatcccgtgcagcccacagagacccaagttaccctcagtggcctgcgggctggtgtagcctacacggtgcaggtgcgagcagacacagrgtggctgaggggtgtctggagccagcyccagcgcttcagcatcgaagtgcaggtttctgattggctcatcttcttcgcctccctggggagcttcctgagcatccttctcgtgggcgtccttggctaccttggcctgaacagggccgcacggcacctgtgcccgccgctgcccacaccctgtgccagctccgccattgagttccctggagggaaggagacttggcagtggatcaacccagtggacttccaggaagaggcatccctgcaggaggccctggtggtagagatgtcctgggacaaaggcgagaggactgagcctctcgagaagacagagctacctgagggtgcccctgagctggccctggatacagagttgtccttggaggatggagacaggtgcaaggccaagatgtgatcgttgaggctcagagagggtgagtgactcgcccyaggctacgtagcacacacaggagtcacatttggacccaaataacccagagctcctccaggctccagtgcacctgcctcctcycygccccgtgcctgttgccacccatcctgcgggggaaccctagatgctgccatgaaatggaagctgctgcaccctgctgggcctggcatccgtggggcaggagcagaccctgccatttacctgttcyggcgtagaatggactgggaatgggggcaaggggggctcagatggatccctggaccctgggctgggcatccacccccaggagcactggatggggagtcyggactcaagggctccctgcagcattgcggggtcttgtagcttggaggatccaggcatatagggaagggggctgtaaactwtgtgggaaaaatgacggtcctcccatcccaccccccaccccaccctcacccccctataaaatgggggtggtgataatgaccttacacagctgttcaaaatcatcgtaaatgagcctcctcttgggtatttttttcctgtttgaagcttgaatgtcctgctcaaaatctcaaaacacgagccttggaattc

SEQ ID NO: 492 - DNA, 2415 bp, Homo sapiens
gtgagtcccttatcacaactgatcactccgtggggtcaccgctgctctggcgtctacctcccccaacaggttggggtttctaggagggcagctccagaggttgcagaacactccgctgcctctccagagccaggcacacagcaggcgctccataaatgttcgttggwcttttctccttgctcagcttcaatgtgttccggagtggggacggggtggctgaacctcgcaggtggcagagaggctcccctggggctgtggggctctacgtggatcygatggagccgctggtgacctgggtggtccccctcctcttcctcttcctgctgtccaggcagggcgctgcctgcagaaccagtgagtgctgttttaggacccgccatatccggatgcagactcaggctcggcctcgggccctagggacctgagatgctatcggatatccagtgatcgttacgagtgctcctggcagtatgagggtcccacagctggggtcagccacttcctgcggtgttgccttagctccgggcgctgctgctacttcgccgccggctcagccaccaggctgcagttctccgaccaggctggggtgtctgtgctgtacactgtcacactctgggtggaatcctgggccaggaaccagacagagaagtctcctgaggtvaccctgcagctctacaactcagttaaatatgagcctcctctgggagacatcaaggtgtccaagttggccgggcagctgcrtatggagtgggagaccccggataaccaggttggtgctgaggtgcagttccggcaccggacacccagcagcccatggaagttgggcgactgcggacctcaggatgatgatactgagtcctgcctctgccccctggagatgaatgtggcccaggaattccagctccgacgacygcarctggggagccaaggaagttcctggagcaagtggagcagccccgtgtgcgttccccctgaaaaccccccacagcctcaggtgagattctcggtggagcagctgggccaggatgggaggaggcggctgaccctgaaagagcagccaacccagctggagcttccagaaggctgtcaagggctggcgcctggcacggaggtcacttaccgactacagctccacatgctgtcctgcccgtgtaaggccaaggccaccaggaccctgcacctggggawgatgccctatctctcgggtgctgcctacaacgtggctgtcatctcctcgaaccaatttggtcctggcctgaaccagacgtggcacattcctgccgacacccacacagaaccagtggctctgaatatcagcgtcggaaccaacyggaccaccatgtattggccagcccgggctcagagcatyacgrattgcattgaatggcagcctgtgggcyaggacgsgggccttgccacctgcagcctgactgcgccgcaagacccggatccggctggaatggcaacctacagctggagtcgagagtctggggcaatggggcaggaaaagtgttacyacattaccatctttgcctctgcgcaccccgagaagctcaccttgtggtctacggtcctgtccacctaccactttgggggcaatgcctcagcagctgggacaccgcaccacgtctcggtgaagaatcatagcttggactctgtgtctgtggactgggcaccatccctgctgagcacctgtcccggcgtcctaaaggagtatgttgtccgctgccgagatgaagacagcaaacaggtgtcagagcatcccgtgcagcccacagagacccaagttaccctcagtggcctgcgggctggtgtagcctacacggtgcaggtgcgagcagacacarcgtggctgaggggtgtctggagccagycccagcgcttcagcatcgaagtgcaggtttctgattggctcatcttcttcgcctccctggggagcttcctgagcatccttctcgtgggcgtccttggctaccttggcctgaacagggccgcacggcacctgtgcccgccgctgcccacaccctgtgccagctccgccattgagttccctggagggaaggagacttggcagtggatcaacccagtggacttccaggaagaggcatccctgcaggaggccctggtggtagagatgtcctgggacaaaggcgagaggactgagcctctcgagaagacagagctacctgagggtgcccctgagctggccctggatacagagttgtccttggaggatggagacaggtgcaaggccaaggtcctggggcccagtgggccagacggtcaggggtgcaaccctgcccgkggggtgggggggctagacatccatcgctcctgggatatcagggcctggaggcctgagggagaaacgaaaacatccactttgtcttacagacacgaagagcgactatctca

SEQ ID NO: 493 - DNA, 2615 bp, Homo sapiens
gccttagggatgggctgtgacactttactttttttcttttttcttttttttcwgtcttttctccttgctcagcttcaatgtgttccggagtggggacggggtggctgaacctcgcaggtggcagagaggctcccctggggctgtggggctctacgtggatcygatggagccgctggtgacctgggtggtccccctcctcttcctcttcctgctgtccaggcagggcgctgcctgcagaaccagtgagtgctgttttaggacccgccatatccggatgcagactcaggctcggcctcgggccctagggacctgagatgctatcggatatccagtgatcgttacgagtgctcctggcagtatgagggtcccacagctggggtcagccacttcctgcggtgttgccttagctccgggcgctgctgctacttcgccgccggctcagccaccaggctgcagttctccgaccaggctggggtgtctgtgctgtacactgtcacactctgggtggaatcctgggccaggaaccagacagagaagtctcctgaggtgvccctgcagctctacaactcagttaaatatgagcctcctctgggagacatcaaggtgtccaagttggccgggcagctgcgratggagtgggagaccccggataaccaggttggtgctgaggtgcagttccggcaccggacacccagcagcccatggaagttgggcgactgcggacctcaggatgatgatactgagtcctgcctctgccccctggagatgaatgtggcccaggaattccagctccgacgacygcarctggggagccaaggaagttcctggagcaagtggagcagccccgtgtgcgttccccctgaaaaccccccacagcctcaggtgagattctcggtggagcagctgggccaggatgggaggaggcggctgaccctgaaagagcagccaacccagctggagcttccagaaggctgtcaagggctggcgcctggcacggaggtcacttaccgactacagctccacatgctgtcctgcccgtgtaaggccaaggccaccaggaccctgcacctggggawgatgccctatctctcgggtgctgcctacaacgtggctgtcatctcctcgaaccaatttggtcctggcctgaaccagacgtggcacattcctgccgacacccacacagaaccagtggctctgaatatcagcgtcggaaccaacyggaccaccatgtattggccagcccgggctcagagcatyacgrattgcattgaatggcagcctgtgggccyggacgsgggccttgccacctgcagcctgactgcgccgcaagacccggatccggctggaatggcaacctacagctggagtcgagagtctggggcaatggggcaggaaaagtgttacyacattaccatctttgcctctgcgcaccccgagaagctcaccttgtggtctacggtcctgtccacctaccactttgggggcaatgcctcagcagctgggacaccgcaccacgtctcggtgaagaatcatagcttggactctgtgtctgtggactgggcaccatccctgctgagcacctgtcccggcgtcctaaaggagtatgttgtccgctgccgagatgaagacagcaaacaggtgtcagaagtgcaggtttctgattggctcatcttcttcgcctccctggggagcttcctgagcatccttctcgtgggcgtccttggctaccttggcctgaacagggccgcacggcacctgtgcccgccgctgcccacaccctgtgccagctccgccattgagttccctggagggaaggagacttggcagtggatcaacccagtggacttccaggaagaggcatccctgcaggaggccctggtggtagagatgtcctgggacaaaggcgagaggactgagcctctcgagaagacagagctacctgagggtgcccctgagctggccctggatacagagttgtccttggaggatggagacagatgtgatcgttgaggctcagagagggtgagtgactcgcccyaggctacgtagcacacacaggagtcacatttggacccaaataacccagagctcctccaggctccagtgcacctgcctcctcycygccccgtgcctgttgccacccatcctgcgggggaaccctagatgctgccatgaaatggaagctgctgcaccctgctgggcctggcatccgtggggcaggagcagaccctgccatttacctgttcyggcgtagaatggactgggaatgggggcaaggggggctcagatggatccctggaccctgggctgggcatccacccccaggagcactggatggggagtcyggactcaagggctccctgcagcattgcggggtcttgtagcttggaggatccaggcatatagggaagggggctgtaaactwtgtgggaaaaatgacggtcctcccatcccaccccccaccccaccctcacccccctataaaatgggggtggtgataatgaccttacacagctgttcaaaatcatcgtaaatgagcctcctcttgggtatttttttcctgtttgaagcttgaatgtcctgctcaaaatctcaaaacacgagccttggaattc

SEQ ID NO: 494 - DNA, 5855 bp, Homo sapiens
ggacgagtcgagcctcctgcggcgccgcgggctccagacagctgccgcagcgggaaccgcaagagcttggtggtaggaacgccctccccgaccctctcccggcccctgtcgccattgtcggtcccaacggcaggcagcagccccttggatagtcctcggaatttctcggctgcctctgccctaaatttcccctttgcccggagggcagacsgcagaagatggtccctcgcgtctctcccatcttccggctatggaaccaacacacccagctccaccctctcgtcaagctcatcctcccgggaacgtctccaccagcttcccttccagccgacgccggacgagctgcacttcctgtccaagcacttccgcagctcagagaatgtgcttgatgaggaaggcggccggtcaccccgcctccgaccccgctctcgcagtctcagcccgggccgtgcaacggggaccttcgacaatgagattgtcatgatgaatcaygtgtaccgggagaggttccccaaggccacagcacagatggagggccgtctgcaggagttcctgacggcctacgcgcccggcgcccggctggcgctggctgatggcgtcttgggcttcatccaccaccagatcgtcgagctggcccgagactgcttggccaagtctggcgagaacctcgtcacctcccgctacttcctagagatgcaggagaagctggagcggcttctgcaggatgcccatgagcgttcggacagtgaggaggtcagcttcatcgtccagcttgtccggaaactgctgatcatcatctcacggccagctcggctgctggagtgtctggagtttgaccctgaggaattttaccacctgctggaggcggctgagggccatgcgcgggagggccaaggcattaagactgaccttccacagtacatcattgggcagctgggcctggccaaggaccccctggaggagatggtgccactgagtcacctcgaagaagaacagcccccagcacctgagtccccagagagccgcgccctggtcggccagtcacggaggaagccatgcgaaagcgactttgagaccatcaaactcattagcaacggagcctatggggccgtctacctggtgcggcaccgtgacacacggcagcgctttgccatcaagaagatcaacaaacagaacttgatcctgcgtaaccagatccagcaggtctttgtggagcgtgacattctcacctttgccgagaacccctttgtggtcagcatgttctgctcctttgagacccggcgccacctatgtatggtcatggaatacgtggaaggcggcgactgcgccacgctcctgaagaacatgggcccgctgcccgtggacatggcccgcctgtacttcgccgagacggtgttggcgctggagtacctgcataactatggcatcgtgcaccgtgacctcaaaccagacaatctgctcatcacctcgcttggccacatcaagctcacggacttcggcctgtccaagatcggcctcatgagcatggccaccaacctctatgagggccacatcgagaaggacgcccgagagttcatygacaagcaggtgtgtgggacgccggagtacatagcccccgaggtgatcttccgccagggctatgggaagccagtggactggtgggccatgggcgtcgtcctctatgagtttctggtgggctgcgtgcctttctttggagatacccccgaggaactcttcggtcaggtggtcagcgatgagatcatgtggccagagggagatgaggcccttccagcagacgcccaggacctcatcaccaggttgctccggcagagcccgctggaccgtctgggcactggtggcacccacgaagtgaagcagcacccctttttcctggccctggactgggcagggcttctccgacacaaagccgagttcgtgccccagctcgaagcygaggatgataccagctactttgacacacgttcggaacgttaccgccatctgggctccgaggacgacgagaccaatgatgaagaatcgtccacagagatcccccagttctcctcctgctcccaccggttcagcaaggtctacagcagctctgagttcctggccgtccagcccactcctaccttcgctgaaaggagcttcagtgaagaccgggaggaggggtgggagcgcagcgaagtggactatggccgccggctgagtgctgacatccggctgaggtcctggacatcctctggatcctcctgtcagtcatcttcgtcccagcccgagcggggtcccagcccatctctcctgaatacyatcagcctggacacaatgcccaagtttgccttctcatcagaggatgagggggtaggcccaggccctgcaggccccaagaggcccgtcttcattctaggggagcctgaccccccaccagcggccaccccagtgatgcccaagccctcgagcctttctgccgacacagctgctctcagccacgcccgcctacggagcaatagcatcggcgcccgacactccacaccaaggcctctggatgccrgccggggccgccgccttgggggcccaagagacccagcccctgagaagtccagagcctcctccagcggtggcagtggtggcggcagtgggggccgcgtgcccaagtcagcctctgtctctgccctgtccctcatcatcacggcagatgatggcagcggcggccccctcatgagccccctttccccgcgctctctgtcctcgaacccgtcgtcccgtgaytcttcgccgagccgagacccgtcccccgtgtgtggcagcctgcggccccccatcgttatccacagctctggcaagaagtacggcttcagcctgcgggcgatccgcgtctacatgggtgatagcgacgtctacactgtgcaccacgtcgtctggagtgtggaggacggaagccccgcccaggaggcgggcctgcgggctggggacctcatcacccacatcaacggggagtcagtgctggggctggtgcacatggacgtcgtggagctgctgctgaagagcggcaacaagatatccctgcggaccacagccctggagaacacctccatcaaggtgggycccgcccggaagaatgtggccaagggccgcatggcacgcaggagcaagaggagccgtcggcgggagacccaggatcggcggaagtcacttttcaagaagatctccaagcagacctccgtgctgcacaccagccgcagcttctcctccggactccaccactcactgtcatccagtgagagcctccccggctcgcccacccacagcctctcccccagccccaccactccctgccgaagcccagcccctgatgtcccagcagataccactgcatccccacccagcgcatccccgagctccagcagccccgcctccccagctgctgctggccacacccgccccagctccctgcacggcctggctgccaagcttgggccaccccgccccaagactggccgccgcaagtccaccagcagcatcccgccctccccgctggcctgcccgcccatctccgcgcccccaccccgctcgccctcgcccctgcccgggcacccgcccgcacctgcccgatccccgcggctgcgccggggccagtcagctgacaagctgggcacaggggagcggctggatggggaggcggggcggcgcactcgtgggccagaggccgagctcgtggtcatgcggcggctgcacctgtccgagcgccgagactccttcaagaagcaggaggccgtgcaggaggttagcttcgatgagccgcaggaggaggccactgggctgcccacctcagtgccacagatcgccgtggagggcgaggaagccgtgccagtagctctcgggcccaccggaagagactgatcccctgccaggtctctccctggcatcaaagttacgcgttttcttgtgcaatgttttttccgtaaagtcatgcctggatggggactgagccaccagcctgacacccagaaggcgagaagccatctcggtccttgctggaaggtggagacatcgcttgtgttctggtgtcaatcagggggctggatggggcaagaatgggggacaagggtggctttgtaaatagcagcaaatccctgcaactaatttattactttttyttttttttttttttttttgagacagagtctcactctgttgcccgggctggagtgcagcggcgtgatctcagctcactgcaacctccgcctcccaagttcaagcgattgtcctgcctcagcttcccaagtggctgggattacaggcgcccaccactatgcccagctaattttttgtatttttagtacagacggggtttcaccatgttggtcaggctggtctcgaactcctgacctcatgatttgcctgcctttgcctcccaaagtgctgggattacaggcgtgagccactgggcccagcctaatttattactttttataagcgatagccgtactgagccgccccctgaaggcggctgccaggtcttgccccaggcacctgggactctgtttgcaggccctgccctctgggctgagaaggatgcactttggacaagtcatctgtgtttgtgttttccagtttttctgtactttttaagtgttttgtgttacctggtctcattcccctccccacacctacccatttgaggggatggagttgaagtcacctggtcacctgtaccggcccagttcggctacaacctggagtgtccgtaaacaattcctctcacccacaaaacaatgtaatcccagcgatggactggattctgaaggccacttcccaccatcatagctgccatgcccaggcagtgcctgctctatatatagagtctgcctccaatcctgctggcttcagcctggagaagggatatgggagctggagctttgatggatgaataggtgttcaccggatctgggcagaggggtcatccgctccccaggtgggcactgataaaggaaggtacaggcctcacctggaactgccaaggcagcctccagaaatgctcggctgtctcggggcacgctccagtatgccagtcctgcgggattacgtccagctacttccagaaacactcagtgtcccctcccctcaggctctgccttggcctggccttgtccagtctaccctggacaagatgccgtgtgtttgaggcccagcagagtaagcccttggccgtgatgtgtctgaaacacctgttaggggttccctccatatgtcagagcctctctgggatgaagttcaagccagaaaacccagtcgaggctcaagtttgaatttcagcttcactgtgtggctctgggaaaatggctttcccactctgtgcctcagtttccttgtgtttacaagactaatcccattgactgtttattaagcacctactgtgtgccaagcgcttttacgtggcttctccctcagccagccttgagaaggctggaggtggtgtcatcacctccattttacagacaaagcagctgagaccccagcgaggggcggagacctgtcccacgatcacccagcaggagtcgtggcagaacggagcatcagccagaccctgttgtgggcgttgtcatcaagggagcttgaatggagggtctggtgtcagatacagccgactccagccccagctcatcccccatgatgctgtgtgacccactgggcactctggtgagggagctttccagacatcaacagcccactctgcttccctttytgagtcccctgtccagcactgcctagtgttggagggtagaccaaggctgtgcatgattcaccccctccttccatcctggagctggcagtgaataaaagcccgtatttac

SEQ ID NO: 495 - DNA, 607 bp, Homo sapiens
tccctgcggcagacagggcggcacccgcggctcccctttcccgctgcgcgaccctcgctgccgggccgggcctgcgcgcaggtgcggagctgcgatccccgccccgaggcggagccagcccggcccccagcggcccagcccccgcgtctagtctgccgcaccagccaggcgtctgtccctgcgtccgtgtgtccgtccgtcrgtccgctcgcgccacgatcagggcttccgggggccaacaagggggcgtcggtaccccgccgcacagaggcggcctctgcctcggcatgaagtcccgcagggacaagctgcacatcccggcgctgaccctcgatctgtctccgagcagccagagcccgtccctgctgggtcccagcagcccctgcagcccctgtagcccctccttgggcctgcacccctggagctgccgcagcgggaaccgcaagagcttggtggtaggaacgccctccccgaccctctcccggcccctgtcgccattgtcggtcccaacgggcagcagccccttggatagtcctcggaatttctcggctgcctctgccctaaatttcccctttgcccggagccacatcccacgcatggacaggta

SEQ ID NO: 496 - DNA, 1893 bp, Homo sapiens
agcagggctcccgcgggcgtcactccggccatcgtccccacctccacctgggccgcccggcaggcaggcggtagaacgggcgtggcagacctccctgcaggcttgttgctgggcgaacgagaaggatgccatgctgacacactgacgtgctctgtctccttgcagacrgaggcccgggagccatgggtgactggggcttcctggagaagttgctggaccaggtccaggagcactcgaccgtggtgggtaagatctggctgacggtgctcttcatcttccgcatcctcatcctgggcctggccggcgagtcagtrtggggtgacgagcartcagatttcgagtgtaacacggcccagccaggctgcaccaacgtctgctatgaccaggccttccccatctcccacatccgctactgggtgctgcagttcctcttcgtcagcacacccaccctggtctacctgggccatgtcatttacctgtctcggcgagaagagcggctgcggcagaaggagggggagctgcgggcactgccggccaaggacccacaggtggagcgggcgctggcggccrtagagcktcagatggccaagatctcrgtggyagaagatggtcgcctgcgcatccgcggagcactgatgggcacctatgtcgccagtgtgctctgcaagagtgtgctagaggcaggcttcctctatggccagtggcgcctgtacggctggaccatggagcccgtgtttgtgtgccagcgagcaccctgcccctacctcgtggactgctttgtctctcgccccacggagaagaccatcttcatcatcttcatgttggtggttggactcatctccctggtgcttaacctgctggagttggtgcacctgctgtgtcgctgcctcagccgggggatgagggcacggcaaggccaagacgcacccccgacccagggcacctcctcagacccttacacggaccaggtcttcttctacctccccgtgggccagrggccctcatccccaccatgccccacctacaatgggctctcatccagtgagcagaactgggccaacctgaccacagaggagaggctggcgtcttccaggccccctctcttcctggacccaccccctcagaatggccaaaaayccccaagtcgtcccagcagctctgcttctaagaagcagtatgtatagaggcctgtggcttatgtcacccaacagaggggtcctgagaagtctggctgcctgggatgccccctgccccctcctggaaggctctgcagagatgactgggctggggaagcagrtgcttgctggccatggagcctcattgcaagttgttcttgaacacctgaggccttcctggtgcccaccaggcactacggcttcctctccagaatgtggctttgcctgagcacagacagagtcagcatggaatgctcttggccaagggtactgggggccctctggccttttgcagctgatccagaggaacccagagccaacttaccccaacctcaccctatggaacagtcacctgtgcrcaggttgtcctcaaaccctctcctcacaggaaaaggcggattgaggctgctgggtcagccttgatsgcacagacagagcttgtgccggatttggccctgtcaaggggactggtgccttgttttcatcactccttcctagttctactgttcaagcttctgaaataaacaggacttgatcacaagtaggtgtgtattgatgctatcatgatgtgctgggggttgggggatagagttatttkgcccaggcttcctttacttcttggtcctgtataatctctttggtctctataacccccgattccagccaacaccttgaaccctcaaactcataccttctgcctccaacagccctgatttct

SEQ ID NO: 497 - DNA, 1798 bp, Homo sapiens
agcagggctcccgcgggcgtcactccggccatcgtccccacctccacctgggccgcccggcaggcaggcgacrgaggcccgggagccatgggtgactggggcttcctggagaagttgctggaccaggtccaggagcactcgaccgtggtgggtaagatctggctgacggtgctcttcatcttccgcatcctcatcctgggcctggccggcgagtcagtrtggggtgacgagcartcagatttcgagtgtaacacggcccagccaggctgcaccaacgtctgctatgaccaggccttccccatctcccacatccgctactgggtgctgcagttcctcttcgtcagcacacccaccctggtctacctgggccatgtcatttacctgtctcggcgagaagagcggctgcggcagaaggagggggagctgcgggcactgccggccaaggacccacaggtggagcgggcgctggcggccrtagagcktcagatggccaagatctcrgtggyagaagatggtcgcctgcgcatccgcggagcactgatgggcacctatgtcgccagtgtgctctgcaagagtgtgctagaggcaggcttcctctatggccagtggcgcctgtacggctggaccatggagcccgtgtttgtgtgccagcgagcaccctgcccctacctcgtggactgctttgtctctcgccccacggagaagaccatcttcatcatcttcatgttggtggttggactcatctccctggtgcttaacctgctggagttggtgcacctgctgtgtcgctgcctcagccgggggatgagggcacggcaaggccaagacgcacccccgacccagggcacctcctcagacccttacacggaccaggtcttcttctacctccccgtgggccagrggccctcatccccaccatgccccacctacaatgggctctcatccagtgagcagaactgggccaacctgaccacagaggagaggctggcgtcttccaggccccctctcttcctggacccaccccctcagaatggccaaaaayccccaagtcgtcccagcagctctgcttctaagaagcagtatgtatagaggcctgtggcttatgtcacccaacagaggggtcctgagaagtctggctgcctgggatgccccctgccccctcctggaaggctctgcagagatgactgggctggggaagcagrtgcttgctggccatggagcctcattgcaagttgttcttgaacacctgaggccttcctggtgcccaccaggcactacggcttcctctccagaatgtggctttgcctgagcacagacagagtcagcatggaatgctcttggccaagggtactgggggccctctggccttttgcagctgatccagaggaacccagagccaacttaccccaacctcaccctatggaacagtcacctgtgcrcaggttgtcctcaaaccctctcctcacaggaaaaggcggattgaggctgctgggtcagccttgatsgcacagacagagcttgtgccggatttggccctgtcaaggggactggtgccttgttttcatcactccttcctagttctactgttcaagcttctgaaataaacaggacttgatcacaagtaggtgtgtattgatgctatcatgatgtgctgggggttgggggatagagttatttkgcccaggcttcctttacttcttggtcctgtataatctctttggtctctataacccccgattccagccaacaccttgaaccctcaaactcataccttctgcctccaacagccctgatttct

SEQ ID NO: 498 - DNA, 4661 bp, Homo sapiens
cctgctcctgctcctccgctcctcctgcgcggggtgctgaaacagcccggggaagtagagccgcctccggggagcccaaccagccgaacgccgccggcgtcmgcagccttgcgcggccacagcatgaccgctcgcggcctggcccttggcctcctcctgctgctactgtgtccagcgcaggtgttttcacagtcctgtgtttggtatggagagtgtggaattgcatatggggacaagaggtacaattgcgaatattctggcccaccaaaaccattgccaaaggatggatatgacttagtgcaggaactcygtccaggattcttctttggcaatgtcagtctctgttgtgatgttcggcagcttcagacactaaaagacaacctgcagctgcctctacrgtttctgtccagatgtccatcctgtttttataacctactgaacctgttttgtgagctgacaygtagccctygacagagtcagtttttgaatgttacagctactgaagattaygttgatcctgttacaaaccagaygaaaacaaatgtgaaagagttacaatactacgtcggacagagttttgccaatgcaatgtacaatgcctgccgggatgtggaggccccctcaagtaatgacaaggccctgggactcctgkrtgggaaggacgctgacgcctgtaatgccaccaactggattgaatacatgttcaataaggacaatggacaggcaccttttaccatcactcctgtgttttmagattttccagtccrtgggatggagcccatgaacaatgccaccaaaggctgtgacgagtctgkggatgaggtcacagcaycatgtagctgccaasactgctctattgtctrtgkccccaagccccagcccccacctcctcctgctccctggacgatccttggcttggacgccatgtatgtcatcakgtggatcacctacatggcgtttttgcttgtgttttttggagcattttttgcagtgtggtgctacagaaaacggtattttgtctccgagtacactcccatcgatagcaatatagctttttctgttaatgcaagtgacaaaggagaggcgtcytgctgtgaccctgtcagcgcagcatttgagggctgcttgaggcggctgttcacacgctgggggtctttctgcgtccgaaaccctggctgtgtcattttcttctcrctggtcttcattactgcgtgttcgtcaggcctggtgtttgtccgggtcacaaccaatccagytgacytctggtcagcccccagcagccagsctygcctggaaaaagagtactttgaccagcactttgggmctttcttcyrgacggagcagctcatcatccgggcccctctcactgacaaacacatttacyagccatacccttcgggagctgatgtaccctttggacctycgcttgacatacagatactgcaccaggttcttgacttacaaatagccatcgaaaacattactgcctcttatgacaatgagactgtgacacttcaagacatctgcttggcccctcttycacygtataacacgaactgcaccattttgagtgtgttaaattacttccagaacagccattccgtgctggaccacaagaaaggggacgacttctttgtgtatgccgattaccacaygcrctttctgtactgcgtaygggctcctkcctctctgaatgatacaagtttgctccatgacccttgtctgggtacgtttggtggaccagtgttcccgtggcttgtgttgggaggctatgatgatcaaaactacaataacgccactgcccttgtgattaccttccctgtcaataattactataatgatacagagaagctccagagggcccaggcctgggaaaaagagtttattaattttgtgaaaaactacaagaatcccaatctgaccatttccttcactgytgaaygaagtattgaagatgamctaaatygtgaaagtgacagtgatgtcttcaccgttgtaattagctatgccatcakgtttctatatatttccctagccttggggcacatsaaaagctgtcgcaggcttctggtggattsgaaggtctcactaggcatcgcgggcatcttgatcrtgctgagctcggtggcttgstccttggktgtcttcagctacattgggttgcccttgaccytcattgtgattgaagtcatccygttcctggtgstggctgttggagtggacaayatctycattctggtgcaggcctaccagagagatgaacgtcttcaaggggaaaccctggatcagcagctgggcagggtcctaggagaagtggctcccaktatgttcctgtcatccttttctragactgtagmatttttyttaggagcattgtccgtgatgccagccgtgcacaccttctctctctttgcgggattggyagtcttcattgactttcttctgcmgattacctgtttcgtgagtctcttggggttagacattaaasgtcaagagaaaaatcggctagacatcttttgctgtgtcagaggtgctgaagatggaacaagcgtccaggcctsagagagctgtttgtttcgcttcttcaaaaactcctattctccacttctgctaaaggactrgatgagaccaattgtgatagcaatatttgtgggtgttctgtcattcagcatcgcagtcctgaacaaagtagatrttggattggatcagtctctttcgatgccagatgactcctacatggtggwttatttcaaatccatcagtcagtacctgcatgcgggtccryctrtgtrstttgtcctggaggaagggcacgackacacttcttccaaggggcagaacatggtgtgcrgcrgcatgggctgcaacaatgattccctggtgcagcagatatttaacgcggygcmgcyggacaaytatacccraataggcttcgccccctgtcctggatcgacgattatttcractgggrgaagccacagtcytcttrctgtcgagtggacaaratcactgaccygttctgcaatgcttcagtggttgaccctgccygcgttcyctgcaggcctctgactccggaagrcaaacagaggcctcagkggggagacttcatkagattcctgcccatgttcctttcggataaccctaaccccaagtgtggraaagggggacargctgcctatagttctgcagttaacatcctccttggccatggcaccagggtcggagcyaygtacttcatgacctaccacaccgtgctgcagacctctgctgactttattgacgrtctgaagaaagcccgrcttayagccagtaatgtcaccgaaaccatgggcattaacggcagtgcctaccgagtatttccttacagtgtgttttatgtcytctrcgracagtacctgaccatcattgacgacactatcttcaacctcggtgtgtccctgggcgcgatatttctggtgaccatggkcctcctgggctgtgagctctggtctgcagtcatcatgtgtgccaccatcgccatggtcttggtcaawatgtttggkgttatytgrctctggggcatcagtctgaacyctgtatccttggtcarcctggtgatgagctgtggcatctccrtggagtctgcagccacataaccagagcgttcacggtgagcatraaaggcagccgcgtggagcgcgcggaagaggcacttgcccacatgggcagctccgtgttcagrggaatcacacttacvaaatttggagggattgtggtgttkgcttttgccaaatctcaaattttccagatattctacttcaggatgtatttggccatggtcttactgggrgccactcacgyattaatatttctycctgtcttactcagrtacatagggccatcagtaaataaagccaaaagttgtgccactgaagagcratacaaaggaacagagcgcgaacggcttctaaatttctagccctctcgcagggcatcctgactgaactgtgtctaagggtcggtcggtttaccactggacgggtgctgcatcggcaaggccaagttgaacaccggatggtgccaaccatcggttgtttggcagcagctttgaacgtagcgcctgtgaactcaggaatgcacagttyacttgggaagcagtattactagatctggaggcaaccacaggacactaaacttctcccagcctcttcaggaaagaaacctcattctttggcaagcaggaggtgacactagatggctgtgaatgtgatccgctcactgacactctgtaaaggccaatcaatgcactgtctgtctctccttttaggagtaagccatcccacaagttctataccatatttttagtgacagttgaggttgtagatacactttataacattttatagtttaaagagctttattaatgcaataaattaactttgtacacatttttatataaaaaaacagcaagtgatttcagaatgttgtaggcctcattagagcttggtctccaaaaatctgtttgaaaaaagcaacatgttcttcacagtgttcccctagaaaggaagagatttaattgccagttagatgtggcatgaaatgagggacaaagaaagcatctcgtaggtgtgtctactgggttttaacttatttttctttaataaaatacattgttttcctaa

SEQ ID NO: 499 - DNA, 4974 bp, Homo sapiens
tttcagctttcttgtcgatgcttgcacatctttagaagaacatattcataccgaagggctttttcggaaatcaggatctgtgattcgcctaaaagcactaaagaataaagtggatcatggtgaaggttgcctatcttctgcacctccttgtgatattgcgggacttcttaagcagttttttagggaactgccagagcccattctcccagctgatttgcatgaagcacttttgaaagctcaacagttaggcacagaggaaaagaataaagctatactgttgctctcctgtcttctggctgaccacacagttcatgtattaagatacttctttaactttctcaggaatgtttctcttagatccagtgagaataagatggatagcagcaatcttgcagtaatatttgcaccraatcttcttcagacaagtgaaggacatgaaaagatgtcttctaacrcagaaaagaaggtacgattacaggctgcagtagtacagactcttatcgattatgcatcagatattgggcgtgtaccagactttatcctggaaaagataccagccatgttgggtattgatggtctctgtgctactccatcactggaaggctttgaagaaggtgaatatgaaactcctggtgaatataagagaaagagaagacaacgtgtaggagattttgttagtggagcactaaataaatttaaacctaacagaacaccttctattacacctcaagaagaaagaattgcccagctatctgaatcaccagtgattcttacaccaaatgctaagtgtaaattgccatgccagtagattcttctcatggtttctcaagtaagaaaaggaagtccatcaagcacaattttaactttgagctgttgccaagtaatctcttcaatagcagttctataccagtatcagttcacatcgatacaagctcagaagggtcatctcagagttcactctctcctgtactcattggtggaaaccatttgatcactgcaggtgtgccaagrcgaagtaaaagaattgcaggcaaaaaartttgcagagtggaatcaggaaaagcaggctgcttttctcctaaaatcagccataaagaaaaggttcgaagatctctgcgtttgaaattcaatctagggaaaaatggcagagaartaaatggatgttctggtgtcaatagatatgaaagtgttggttggcgacttgcaaatcaacaaagtttaaaaaatcgaattgaatctgtaaaaacaggtttgctttttagcccagatgttgatgaaaagttaccaaagaaaggttcagaaaagatcagtaagtctgaggaaaccttactaactccagagcgactagttggaacaaattaccggatgtcttggacaggacctaataattcaagttttcaagaagtagatgcaaatgaagcttcttcaatggtggaaaatcttgaggtagaaaactctttggagcctgatattatggtagaaaagtcacctgctacttcatgtgaactcaccccttccaatttaaacaataagcataatagcaacataacaagtagccctcttagcggggatgaaaataacatgaccaaagagactttggtgaaagttcaaaaagcgttttctgaatctggaagtaatcttcacgcattgatgaatcagaggcagtcatcagtaactaatgtggggaaagtaaaattaactgaaccatcttatttagaagatagcccagaggaaaatctatttgaaactaatgatttgactatagtagaatcaaaggagaaatatgaacaccacactggtaaaggtgaaaaatgtttttcagagagggacttttcaccccttcaaactcaaacatttaatagagaaacaactataaaatgttattcaactcagatgaagatggaacatgaaaaagacattcattcaaatatgccaaaagattatttaagcaagcaagaattctccagtgatgaagaaataaagaaacagcagtccccaaaggataaactaaataataaattaaaagagaatgagaatatgatggaaggtaacttaccgaagtgtgcagcacatagcaaggacgaggctagatcctctttctcacagcagagtacatgtgttgtaacaaacttgtcaaaacctaggcctatgagaattgctaaacagcagtcattggaaacatgtgagaaaacagtttctgaaagttcacaaatgacagaacatagaaaggtttctgatcacatacagtggtttaacaagctttctttaaatgaaccaaatagaataaaagtcaagtcacctcttaagtttcagcgtactcctgttcgtcagtccgtcagaagaattaattctttgttggagtatagcagacarcctacagggcataagttggcgagtcttggtgatacagcttctcctttggtcaaatcagtgagctgtgacggtgctctttcctcttgtrtagaaagtgcatcaaaagattcctctgtttcatgtatcaaatcaggtcctaaagaacagaagtccatgtcatgtgaagagtcaaatattggtgcaatttcaaagtcaagcatggagttaccctcgaaatctttcttaaagatgaggaagcacccagattcagtgaatgcttctcttaggtctactacagtttataaacagaagatcttatytgatggccaagttaaggttcccttggatgatctgactaatcatgatatagtaaaaccagttgtaaataacaayatgggcatttcttctgggataaataacagggtccttaggagaccatcagaaagaggaagggcctggtacaaaggttctccaaaacatcctatcggaaaaactcaattactaccaacaagtaaacctgtagatttgtaattggtaaatgttatacttgtcattaatgtaaataaagtgagtaattggtatgacttgcaggatgatgtacatgttagtttgtagctcaggatgattgttaagcaatagatttgctctattgaaaatgtttcatttttttcactgtacaagcaacttagatttttatttgtacaaattacttctttgtttttcttaatgatggcaatttttaaactttaattttattgtgatctcttaaagcagaggttagactttacctttctgactctgtcgtccaggctggagtgcagtggcgcaatctcactgcaagctccacttcctgggttcatgccattttcctgcctcagcctcccgagtagctgggactacaggtgcccgccaccacgcccagctaattttttgtatttttagtagagacggtttcaccgtgttagccaggatggtctcgatctcctgacsttgtgatccgcccgcctcagcctcccaaagtgctgggattacaggcatgagccaccaygcccggctagactttacctttctaaagaaattgtttactggatttataagaagttaatttttgaaaatgacatatttttgtgtgatagaaagaatggagcaagttgtgcctatttcctccaagtcagataaggtttctaaaataaataaatttctagcatataaagggtagagataaactctgcaaatcttatgtctggaattatattaatgtttattgtccttgccaaaattcctagaaattaatttccttcaatagcatcctaaaactctatttttatttggggcagagtaatttcatttatagtgccagtaggtgtaccttgtgttcactcgaactaagaacaatggttaaggcagaataatgactaaaatatgttcatatattatgatgtggaaataattgataacttttaagccatactatgtttttaaagataatttgcacaaacacgtttgtgtctgttctgtccaatatagatttggcaattatttaaagagggataatcttgaaaaaaattaaccaaggtgatttcttatatgtagatgctcgattttggaatttgaaatagtagatgcacctctttaccttttttacttggataaaaacctatgatgattttgtcctgtgtgtaaatgttatttatttagcatagacattaaagataactctctggaaaatgacttgactaaggctctcatgaaattcaaagtgccatttagaacatgcaccaaattgtcaagtaaatctgtctaaatttatattttaaattattacaaattacacatctttgaggaaagagtattatgaacaatagaacatattctctaggttgtagaggaaggaataagcagacagaatcaaccactaaaggtagtttttcagattggttgttagaatgtcatgtttagatgttggagcagattagagcagcattcatgccactcggagcaaccagacttacagcataagtatgtacgaggaatttcaaatcatcagatgtttgcttggctaggttctactttgtttatttgatatcaaataggtttgtagatgtttatggcatttctaattgtaagtagagacaaaatattcatatagtcagatatatgttgtctgctttaaacaatttttaaattttaaaaatgcattaacgtctttttatatccatcaagggaaggatgaaatgttgaatttgaagactaattcagtaagaagtcctaggggtttaactgtacatactacctgaactggcttttctgagagatgaatcaataatgaaacatgtctgttttaaaaactaccacatgtgactcctatttttgttagctgaaagctgcwatacggagtattacagaatgtgaaggtgactagcttgaaggtagggtaactagagagccagaaaagttttgttttaaacttgatttaatgcgtttttattttttcttatacaaaatagagataatgttgctaacttcatggaatatttgaggaaatgatatgaaagtgtctggacgtgcagtaacctcatggsttcttctcactgtcttataaatgtaaataaagatctaata

SEQ ID NO: 500 - DNA, 1960 bp, Homo sapiens
gtttttgctgttcgatctggtggagctactggcgtggtagttaaaggcccagatgataggaatcccatctcatttagaatggatgacaaaggagaagtgaagtgcattaagttttccttagaaaataagatattggctgttcagaggacctcaaagactgtggatttttgtaattttatccctgataattcccagctggaatacacacaggagtgcaagactaagaatgccaacattctaggattctgctggactagttcaactgaaattgtcttcataacagatcaaggaatcgaattttaccaggtattaccagagaaacggagtctgaaactcttgaagagccacaatctcaatgtgaattggtacatgtactgccccgagagcgccgtgatcttgctgtctaccacrgtcctggagaatgtcctgcagccttttcactttagggctggcactatgtcgaagctgcccaaatttgagattgaattaccagctgcgcctaagtcaactaaacccagcctttccgaaagagacatcgcaatggctaccatatacgggcagctgtatgttctcttcttgaggcatcattctcggacctccaacagcacaggagcggaggtggtcctctatcatctaccacgagaaggtgcctgtaaaaagatgcacatattgaagttaaataggacgggaaagtttgccctgaacgtggtggacaacctggtagtcgtgcatcatcaggatacagagacatcggtaatattcgatatcaagttacggggagagtttgacggctccgttaccttccaccaccccgtgcttccygctcgatcgatccagccctatcagatccccatcacaggtcctgctgccgtgaccagccagtctcctgttccatgtaaactatgtggattcttcatcttggattgtctttcaacctgacatcattatcagcgcaagccaaggttacctctggaacctccaagtgaaacttgagcccatagtaaatctcttaccagacaaaggaagactcatggactttctcctccagagaaaggaatgcaagatggtcatcctgtctgtctgttcacagatgttaagtgagtcagacagagcatcgctgcccgtgatagccactgtttttgataaactcaaccatgagtataaaaagtacctggatgccgascagagttatgcgatggcrgtggaagcagggcagarccgaagcagcccgctcctcaagaggccggtgcggacccaggcggtgctggaccagtcagatgtgtacacccatgtcctgtcagccttygtggaaggagatgcctcataaatttgtgatagccgtgctgatggaatacattcgttctcttaaccagtttcagattgcagtacagcattayctacatgaacttgttatcaaaacccttgtccagcacaacctcttttatatgctgcatcagttcctgcagtaccacgtcctcagcgactccaaacctttggcttgtctgctgttatccctagagagtttctatcctcctgctcatcagctatctctggacatgctgaagcgactttcaacagcaaatgatgaaatagtagaagttctcctttccaaacaccaagtgttagctgccttaaggtttatccggggcattggtggccatgacaacatttctgcacgaaaatttttagatgctgcaaagcagactgaagacaacatgcttttctatacaatattccgcttttttgaacagcgaaaccagcgtttgcgagggagccccaatttcacaccaggggaacactgtgaagaacatgttgcttttttcaaacagatttttggagaccaagctctaatgaggcctacaacattctgaaatcacttgctgtttttttatataaaaatgtgtacaaagttaatttattgcattaataaagctctttaaactataaaatgttataaagt

SEQ ID NO: 501 - DNA, 2275 bp, Homo sapiens
cgcagccagacgctgcccgtttaagcgcagagggccgcgggtcacgtggtgggcggggtgggggcgtggcaccaggaagcggcgtccgcgccgggcccagagccgcagccgcagccgccgctacagtccgggccgggctccaccgcgcatcctgctccactctggcgaccgcccccggggcccccgccgcgggcgcggcgcccgccatgggcgaggaggactactatctggagctgtgcgagcggccggtgcagttcgagaaggcgaaccctgtcaactgcgtcttcttcgatgaggccaacaagcaggtttttgctgttcgatctggtggagctactggcgtggtagttaaaggcccagatgataggaatcccatctcatttagaatggatgacaaaggagaagtgaagtgcattaagttttccttagaaaataagatattggctgttcagaggacctcaaagactgtggatttttgtaattttatccctgataattcccagctggaatacacacaggagtgcaagactaagaatgccaacattctaggattctgctggactagttcaactgaaattgtcttcataacagatcaaggaatcgaattttaccaggtattaccagagaaacggagtctgaaactcttgaagagccacaatctcaatgtgaattggtacatgtactgccccgagagcgccgtgatcttgctgtctaccacrgtcctggagaatgtcctgcagccttttcactttagggctggcactatgtcgaagctgcccaaatttgagattgaattaccagctgcgcctaagtcaactaaacccagcctttccgaaagagacatcgcaatggctaccatatacgggcagctgtatgttctcttcttgaggcatcattctcggacctccaacagcacaggagcggaggtggtcctctatcatctaccacgagaaggtgcctgtaaaaagatgcacatattgaagttaaataggacgggaaagtttgccctgaacgtggtggacaacctggtagtcgtgcatcatcaggatacagagacatcggtaatattcgatatcaagttacggggagagtttgacggctccgttaccttccaccaccccgtgcttccygctcgatcgatccagccctatcagatccccatcacaggtcctgctgccgtgaccagccagtctcctgttccatgtaaactctatgtggattcttcatcttggattgtctttcaacctgacatcattatcagcgcaagccaaggttacctctggaacctccaagtgaaacttgagcccatagtaaatctcttaccagacaaaggaagactcatggactttctcctccagagaaaggaatgcaagatggtcatcctgtctgtctgttcacagatgttaagtgagtcagacagagcatcgctgcccgtgatagccactgtttttgataaactcaaccatgagtataaaaagtacctggatgccgascagagttatgcgatggcrgtggaagcagggcagarccgaagcagcccgctcctcaagaggccggtgcggacccaggcggtgctggaccagtcagatgtgtacacccatgtcctgtcagccttygtggaaaagaaggagatgcctcataaatttgtgatagccgtgctgatggaatacattcgttctcttaaccagtttcagattgcagtacagcattayctacatgaacttgttatcaaaacccttgtccagcacaacctcttttatatgctgcatcagttcctgcagtaccacgtcctcagcgactccaaacctttggcttgtctgctgttatccctagagagtttctatcctcctgctcatcagctatctctggacatgctgaagcgactttcaacagcaaatgatgaaatagtagaagttctcctttccaaacaccaagtgttagctgccttaaggtttatccggggcattggtggccatgacaacatttctgcacgaaaatttttagatgctgcaaagcagactgaagacaacatgcttttctatacaatattccgcttttttgaacagcgaaaccagcgtttgcgagggagccccaatttcacaccaggggaacactgtgaagaacatgttgcttttttcaaacagatttttggagaccaagctctaatgaggcctacaacattctgaaatcacttgctgtttttttatataaaaatgtgtacaaagttaatttattgcattaataaagctctttaaactataaaatgttataaagt

SEQ ID NO: 502 - DNA, 2269 bp, Homo sapiens
cgcagccagacgctgcccgtttaagcgcagagggccgcgggtcacgtggtgggcggggtgggggcgtggcaccaggaagcggcgtccgcgccgggcccagagccgcagccgcagccgccgctacagtccgggccgggctccaccgcgcatcctgctccactctggcgaccgcccccggggcccccgccgcgggcgcggcgcccgccatgggcgaggaggactactatctggagctgtgcgagcggccggtgcagttcgagaaggcgaaccctgtcaactgcgtcttcttcgatgaggccaacaagcaggtttttgctgttcgatctggtggagctactggcgtggtagttaaaggcccagatgataggaatcccatctcatttagaatggatgacaaaggagaagtgaagtgcattaagttttccttagaaaataagatattggctgttcagaggacctcaaagactgtggatttttgtaattttatccctgataattcccagctggaatacacacaggagtgcaagactaagaatgccaacattctaggattctgctggactagttcaactgaaattgtcttcataacagatcaaggaatcgaattttaccaggtattaccagagaaacggagtctgaaactcttgaagagccacaatctcaatgtgaattggtacatgtactgccccgagagcgccgtgatcttgctgtctaccacrgtcctggagaatgtcctgcagccttttcactttagggctggcactatgtcgaagctgcccaaatttgagattgaattaccagctgcgcctaagtcaactaaacccagcctttccgaaagagacatcgcaatggctaccatatacgggcagctgtatgttctcttcttgaggcatcattctcggacctccaacagcacaggagcggaggtggtcctctatcatctaccacgagaaggtgcctgtaaaaagatgcacatattgaagttaaataggacgggaaagtttgccctgaacgtggtggacaacctggtagtcgtgcatcatcaggatacagagacatcggtaatattcgatatcaagttacggggagagtttgacggctccgttaccttccaccaccccgtgcttccygctcgatcgatccagccctatcagatccccatcacaggtcctgctgccgtgaccagccagtctcctgttccatgtaaactctattcttcatcttggattgtctttcaacctgacatcattatcagcgcaagccaaggttacctctggaacctccaagtgaaacttgagcccatagtaaatctcttaccagacaaaggaagactcatggactttctcctccagagaaaggaatgcaagatggtcatcctgtctgtctgttcacagatgttaagtgagtcagacagagcatcgctgcccgtgatagccactgtttttgataaactcaaccatgagtataaaaagtacctggatgccgascagagttatgcgatggcrgtggaagcagggcagarccgaagcagcccgctcctcaagaggccggtgcggacccaggcggtgctggaccagtcagatgtgtacacccatgtcctgtcagccttygtggaaaagaaggagatgcctcataaatttgtgatagccgtgctgatggaatacattcgttctcttaaccagtttcagattgcagtacagcattayctacatgaacttgttatcaaaacccttgtccagcacaacctcttttatatgctgcatcagttcctgcagtaccacgtcctcagcgactccaaacctttggcttgtctgctgttatccctagagagtttctatcctcctgctcatcagctatctctggacatgctgaagcgactttcaacagcaaatgatgaaatagtagaagttctcctttccaaacaccaagtgttagctgccttaaggtttatccggggcattggtggccatgacaacatttctgcacgaaaatttttagatgctgcaaagcagactgaagacaacatgcttttctatacaatattccgcttttttgaacagcgaaaccagcgtttgcgagggagccccaatttcacaccaggggaacactgtgaagaacatgttgcttttttcaaacagatttttggagaccaagctctaatgaggcctacaacattctgaaatcacttgctgtttttttatataaaaatgtgtacaaagttaatttattgcattaataaagctctttaaactataaaatgttataaagt

SEQ ID NO: 503 - DNA, 7344 bp, Homo sapiens
tctgcatcctactgctattttcattttatmgatggaatactttgaagcacgaaaaatcattatatcttgaaataatttttaaaataatccaataacaaactcagaactactgaagaataataaagaatatgcygagtttctacattgcaaaggaaagaaatttacagattttgatgaagttcgccttgagattgaagcagaaacagatcgcgtgactggaatgaataaaggcatttcctccatacccattaatttacgagtctattccccacacgtgttaaatctaacccttattgatctacctggaataactaaagtgcctgtgggagatcagccaccagatatcgagtatcagatcagagaaatgattatgcagttcatcacgagggagaactgtctgattttagctgttactccagccaacactgatcttgcaaactcagatgcgctgaagctagctaaagaagttgatcctcaaggtctgagaaccattggagttatcaccaaactggaccttatggatgaaggaacggatgccagggatgttctagagaacaaactgttgcctcttcgcaggggttacgtgggggtggtaaacagaagccagaaggacatagatgggaagaaggacataaaggcagccatgctggcagagaggaagtttttcctttcccacccggcttacagacatatcgctgaccgaatgggaaccccacacctgcagaaggtccttaatcagcaacttaccaaccacattcgggataccctaccaaacttcaggaacaaactacagggacagttgctctccatagaacatgaagtagaagcctacaaaaatttcaaaccagaagacccaacaaggaagaccaaagcattgctgcagatggttcagcaatttgctgtggactttgagaagagaattgaagggtcaggggatcaagtagataccctggaactctcaggtggtgctaaaatcaatcgtatttttcatgaacgctttccttttgagatagtaaagatggagttcaatgagaaagaattgcgaagagaaataagctatgcaatcaaaaacatacatggtatcaggacagggttgtttactccagacatggcatttgaagcgatagtcaagaaacagattgtaaagttgaaagggccttccttgaagagtgtggatctggtaatacaagaattaatcaacactgtgaagaagtgtaccaaaaaactggcaaacttccccagactctgcgaggaaacggaaaggattgttgctaaccacattcgtgagcgagaagggaagacaaaggaccaggtattgctattgattgacattcaagtctcttacatcaacaccaaccatgaagacttcattggcttcgcaaatgctcagcagaggagcagtcaggttcacaagaaaaccacagttggaaatcaggtgattcgcaaggggtggctcaccatcagcaacattggcatcatgaaaggcggctcgaagggatactggttcgtccttactgcggaaagcttgtcctggtataaagatgatgaggaaaaagaaaagaagtacatgcttcccttggacaacctgaaagttcgggatgtggaaaagagctttatgtctagcaagcacatctttgcactctttaatacagagcaaaggaatgtatacaaagactatcgcttccttgagctggcatgtgattcccaggaggatgtygacagctggaaggcatctctactaagagctggggtctatcctgacaaatctgtagctgaaaatgatgagaatggacaagcagaaaacttttccatggacccacaattggagaggcaagtggagaccattcgcaacctcgtagactcctacatgtccattatcaacaaatgtatccgagatctaattccaaaaacaataatgcaccttatgatcaataacgttaaagatttcataaattccgagctcctagcacagttgtattcttcagaggaccaaaataccctgatggaggaatctgctgagcaggctcagcgccgggatgagatgcttcgaatgtatcaagcactgaaagaagcccttgggataattggggacatcagcacrgccaccgtgtccactccggcaccccctccagtggatgactcctggatacagcactctcgcaggtcacctcctccaagccccacaacccaaaggaggccaacactaagtgctcccctcgcaaggcccacatccggccgaggaccagctcctgccattccctctcctggcccccactctggggctcctccagtcccattccgtccaggcccattacctcctttccccagcagcagtgactccttcggagcccctccacaagttccatctaggcctacragggccccgcccagtgtcccaagccggagaccacccccatcaccaactcgtcccactataatccgcccactagaatcctccctgttagactaaacgaagtgtctggcatggcaattaatcactaatgaattatgcraaagcaacatatttgataaccrttgcagtaaatcatgagtagtcgcatgtgtggacatcagtaggcaagtaaccagttttactaatgcattcatcgctcatcttcattgctcatggtatgtcaaacctttggggtttgactcagaaactgctaaccttttagaggctttatatgttgtactgaccaaggtaggtttgtatagcagccctatactttggggatcatttgcctaccatgrcatatatttgaaattgctttggacaagttttctaggctatctaccaggtagctcattaaacgtaattcttcagatatgagatagtgggcttagacctaagccatacatatttcttttcccacattctgtttaggatgacagtaattctgttgtctaccattaatgctactacctactccataattgcctatttagctcctcttttcttcctttttatttcataagactgctargaagtgattttttaaaattaggactccttaagaataaacttttccagaagcacgaggtagtttgcaaaggaaaagtctgcactgtttgctctaaagagcttctcctcattccaatgtgttttgcttcatgctagaagcatatgcaacagtgaataaaagcttctttttttgttaatcagtcaataaatttggctaattagtttcagagttcaaggaagaagcaaaatatcacatctctagaagtgttgggaaaaatataatttctttctttacttatattcacctcatggtaggttatattgaaggctgacatggagaatgtttacttttctatttggcatagctaactacactttgatactaactccagttttactattattattttggttggaaaaaaaattcactctttacgtgctaatttgtaatcttgttttgtaagaatttatcctacccttgaaacaggctcagtgtaactgtatatccattctaggctttcttaataaatcttgaggctatgggataatcacatttaaagaatggttcctgaaatgaagtcagtagaaatggcatgggataagagcagagctcacacttttacagttgcagtatttcaaagtccctatccaggtcactccagaaaagggtattgaaacgttgaaatctaaagcaaatttgcaatttcttaagatttctaaaatttaccagaacagtttagcctgggggttaatagttaagtcttgaggctaagttttggactaccaaggaccagatgattcacatgtaggaaacagccagaagccaactggaattttgtgtgctaactgttcccagacagcagagcaagtattcactgagtaggggtgtcccatgacactatttcatattctacagaagtaaatcaggtttcaccaactgaaatgtctccctttgaaagtagcaaacatgatttgtatgttaacttaactttaatttcctgtgtagtttacacccagagcagatactcataaagtataaagtaaaaacttttaaccattattaaacagagaacttgccatgttgagtgccattgtattgaacttattctaaaggcttatgctaacccatttataattggtaaaaatcagaaaatacaagatttacataaaggtcatttcaacttttaaggttaccagtgattgtataaaaacatcacaatcctaaatcctctcgtatctcaccccaaaccccaaactgggggaaaaaaagttaactctttgtgaatggaaccaatgtgcaagatacatactgcatttttaaaatagtgtctcagctaaatggaaaactgttaagcaaacatccatagtaaaacaaataatcttcagtgagatctttttataaaacttcttgtttttaggattccctttgcttcttcctttgaattctctaaaataggcagctaacggattatatacttcagggtttggctttgtgctaaatgtggttttgtgttttgctgtatttcaaaattttccttctgttaaaggaaaatattgtgaataaccactggtgtgttcttagatcagcacaaaccatgtcaaaaaaaattggagatttttttccaattttccttccactgatcttaggcagtaataaacaatggcatttgtcatctttggcacttgcttttagattatagtcccacagttgcactgccccaattgtctacctttgtgggtacatttttgttctttactcctaagttatttctcatagaacccagcctactctagaatttcagcagtgacattggagaatatttttaatttgctgcagtactatgtcatattattagtatgaatctcatttcccaaagggtttgtattctgctaaaaggagatgccaatgttgaatgaagtctgaaactctagtatgtgcatagtttgacgtgcagcatgcacaccaggccttaagatgggaatgtagcttaatgattttctgtttcccataccatttctaatcttttgtgtaattttctcttaactgattgctctgatattgtaaacacaatagatgtagctctatcatgtctagcataatttaaaaaatcagtgtttttaggatttgggaaaataaactgtaaatgtttatttgataggtaaatatagttttattgtcacatgctaaatattgcatgcatattgactaattggaataaccatttactcaattatggacagcttattgaaatagtattgatttagaaaaagtatattgcatttctaaaaaacatctaccaaggttactcgtctgaatattgcttttagccgtgttttataacatagacgagcagtagggtctgtttattagcaaatttcctatttgttccaatacaaactcactttattctaaagtatattaatgaaaccagttcctgtgatgtaactgtaagccttctcgacttagacttaaaaagtggtcacatagattaattttgtgactttttagtatagactgtagccataattctcaaatatgaaatgggacctaataccagtatgtgataaatgttgatgttttctgtgtacaaacacattttctatgcatgtgtctctgtgtatatggcatatacctagtaagtatgtttctgtaagtatgtgtattttatgtccatttgagtaggtaggtaggttttaaaaatactagttaaaatgccacaagcatgagtgtgattgtatgtgcactgtgtgtatatatataaatatatgtatatgtatggttgtaaatatctatgtatacatgtacttagtatgtgtggtatcaggatattttttaaactgtgataatacaacagatagctttgaatgatctgccataacatgtggtaacaatagttcatttctcataacatatatgaggtatacaaaattttctaactccagattgtagtcattttgagaggtacaaagctcataattaccatgacaacatggtaatgtccatagacatttgtatctgaatccacaagaagatctgaatctaagaaggaattacctttgacaatatttttcggtaagaagtaaaacctctggagacctatctttaagatctctaattggaattataaattatttttggattgctgagctgaatcttaaaaagccaagttgatatacatagtcatttttcctctatggtagaagtaaaaaaaaaaaaaaaggacatagcaacattaaagtagtggatttttctgagtaaatttgctgaaaatataagagagaagctatctaataccttggaggtaggtcatccactttttcaggtaaacatttttcatttggcaaatggcataattatttgaaagtgacaggaatctcctcagaatgaagaataaagcctamtaggtctctaactgttgaactcatgaaagaagatagtgtatgagacttaagccatgagttttgtatcatttcaattagaagactactagctgtgagctcagagtttaatgtaaatgaatctagatgattttgaagaaatgattattcgttcaccagatcactcattgtacattctaaaaagctcaaatgagtcttctagatactcttactcatcctgtctggttgctatgtttaaaattatgtggtgctgtgtaggtgaaactttaagaatatttttgaagsatatgtaatatatgcactgctatttktgtgtgtgtgtgtgtctttgtatatatgtaagaatgtgtgtatgtgtgagagcaagagagaggaaactcaaagaggagtgtttgtcttaagacctgttcatactggtatattggtgagacttctcacttctggttggaggtttcacatatggctcaactcaagtcattaatctctttttaatttttactcttgaattccytaaacttcgctcattatgaaatgttttaaaattatgacaaaaattactctgtctaaccacttgccttgtctgctaccagtttgttaaaaattattccccccaaccagtaattccaccagtactacttgatttgtgttatatttcctatgtacatgtacagcctttgttttgcttgcttgtctatttttactttcccttttttgggtcaaatttttcttttgctttgtttgaagaaggaatatacagaagtaaaatcttgtcttctctgctgattctttaattaatatgagccggatactttccactgtcttcttggcactttcaggatttcttaatgctgatatatggactcttagaatggaatttttgaagaaaaatctcaaagcctgtatcgttcttgaaggtcacatgtacctattgtgaaaatgtgaagctgtatttctgaagctgaaataaattataacatttgaag

SEQ ID NO: 504 - DNA, 7697 bp, Homo sapiens
gcgcaggcgcgctgcgggtcgttagctgtcagagccaagcggcgggctggcggcgggctccgacgtctgcgccaggacctggctggctgagcccggcgcagcagcagcagccagggcagcgcggcccctactccctgtcaggtcgtagaggcgagcagggaccagctggtcgccggcccctcgggcaagatggggaaccgggagatggaggagctgatcccgctggtgaaccgtctgcaggacgcgttttcggcgctgggacagagctgcctgctggagctgccgcagatcgccgtggtgggcggccagagcgccggcaagagctcggtgctcgagaacttcgtgggcagggactttctccctcgagggtcgggcattgtaacaagacgacctcttgtgctgcagcttgttacttctaaagcagaatatgcygagtttctacattgcaaaggaaagaaatttacagattttgatgaagttcgccttgagattgaagcagaaacagatcgcgtgactggaatgaataaaggcatttcctccatacccattaatttacgagtctattccccacacgcattgaaggtgtatgtaagactcctttatcctttccacacagtgttaaatctaacccttattgatctacctggaataactaaagtgcctgtgggagatcagccaccagatatcgagtatcagatcagagaaatgattatgcagttcatcacgagggagaactgtctgattttagctgttactccagccaacactgatcttgcaaactcagatgcgctgaagctagctaaagaagttgatcctcaagtttatgatgcaggtctgagaaccattggagttatcaccaaactggaccttatggatgaaggaacggatgccagggatgttctagagaacaaactgttgcctcttcgcaggggttacgtgggggtggtaaacagaagccagaaggacatagatgggaagaaggacataaaggcagccatgctggcagagaggaagtttttcctttcccacccggcttacagacatatcgctgaccgaatgggaaccccacacctgcagaaggtccttaatcagcaacttaccaaccacattcgggataccctaccaaacttcaggaacaaactacagggacagttgctctccatagaacatgaagtagaagcctacaaaaatttcaaaccagaagacccaacaaggaagaccaaagcattgctgcagatggttcagcaatttgctgtggactttgagaagagaattgaagggtcaggggatcaagtagataccctggaactctcaggtggtgctaaaatcaatcgtatttttcatgaacgctttccttttgagatagtaaagatggagttcaatgagaaagaattgcgaagagaaataagctatgcaatcaaaaacatacatggtatcaggacagggttgtttactccagacatggcatttgaagcgatagtcaagaaacagattgtaaagttgaaagggccttccttgaagagtgtggatctggtaatacaagaattaatcaacactgtgaagaagtgtaccaaaaaactggcaaacttccccagactctgcgaggaaacggaaaggattgttgctaaccacattcgtgagcgagaagggaagacaaaggaccaggtattgctattgattgacattcaagtctcttacatcaacaccaaccatgaagacttcattggcttcgcaaatgctcagcagaggagcagtcaggttcacaagaaaaccacagttggaaatcaggtgattcgcaaggggtggctcaccatcagcaacattggcatcatgaaaggcggctcgaagggatactggttcgtccttactgcggaaagcttgtcctggtataaagatgatgaggaaaaagaaaagaagtacatgcttcccttggacaacctgaaagttcgggatgtggaaaagagctttatgtctagcaagcacatctttgcactctttaatacagagcaaaggaatgtatacaaagactatcgcttccttgagctggcatgtgattcccaggaggatgtygacagctggaaggcatctctactaagagctggggtctatcctgacaaatctgtagctgaaaatgatgagaatggacaagcagaaaacttttccatggacccacaattggagaggcaagtggagaccattcgcaacctcgtagactcctacatgtccattatcaacaaatgtatccgagatctaattccaaaaacaataatgcaccttatgatcaataacgttaaagatttcataaattccgagctcctagcacagttgtattcttcagaggaccaaaataccctgatggaggaatctgctgagcaggctcagcgccgggatgagatgcttcgaatgtatcaagcactgaaagaagcccttgggataattggggacatcagcacrgccaccgtgtccactccggcaccccctccagtggatgactcctggatacagcactctcgcaggtcacctcctccaagccccacaacccaaaggaggccaacactaagtgctcccctcgcaaggcccacatccggccgaggaccagctcctgccattccctctcctggcccccactctggggctcctccagtcccattccgtccaggcccattacctcctttccccagcagcagtgactccttcggagcccctccacaagttccatctaggcctacragggccccgcccagtgtcccaagccggagaccacccccatcaccaactcgtcccactataatccgcccactagaatcctccctgttagactaaacgaagtgtctggcatggcaattaatcactaatgaattatgcraaagcaacatatttgataaccrttgcagtaaatcatgagtagtcgcatgtgtggacatcagtaggcaagtaaccagttttactaatgcattcatcgctcatcttcattgctcatggtatgtcaaacctttggggtttgactcagaaactgctaaccttttagaggctttatatgttgtactgaccaaggtaggtttgtatagcagccctatactttggggatcatttgcctaccatgrcatatatttgaaattgctttggacaagttttctaggctatctaccaggtagctcattaaacgtaattcttcagatatgagatagtgggcttagacctaagccatacatatttcttttcccacattctgtttaggatgacagtaattctgttgtctaccattaatgctactacctactccataattgcctatttagctcctcttttcttcctttttatttcataagactgctargaagtgattttttaaaattaggactccttaagaataaacttttccagaagcacgaggtagtttgcaaaggaaaagtctgcactgtttgctctaaagagcttctcctcattccaatgtgttttgcttcatgctagaagcatatgcaacagtgaataaaagcttctttttttgttaatcagtcaataaatttggctaattagtttcagagttcaaggaagaagcaaaatatcacatctctagaagtgttgggaaaaatataatttctttctttacttatattcacctcatggtaggttatattgaaggctgacatggagaatgtttacttttctatttggcatagctaactacactttgatactaactccagttttactattattattttggttggaaaaaaaattcactctttacgtgctaatttgtaatcttgttttgtaagaatttatcctacccttgaaacaggctcagtgtaactgtatatccattctaggctttcttaataaatcttgaggctatgggataatcacatttaaagaatggttcctgaaatgaagtcagtagaaatggcatgggataagagcagagctcacacttttacagttgcagtatttcaaagtccctatccaggtcactccagaaaagggtattgaaacgttgaaatctaaagcaaatttgcaatttcttaagatttctaaaatttaccagaacagtttagcctgggggttaatagttaagtcttgaggctaagttttggactaccaaggaccagatgattcacatgtaggaaacagccagaagccaactggaattttgtgtgctaactgttcccagacagcagagcaagtattcactgagtaggggtgtcccatgacactatttcatattctacagaagtaaatcaggtttcaccaactgaaatgtctccctttgaaagtagcaaacatgatttgtatgttaacttaactttaatttcctgtgtagtttacacccagagcagatactcataaagtataaagtaaaaacttttaaccattattaaacagagaacttgccatgttgagtgccattgtattgaacttattctaaaggcttatgctaacccatttataattggtaaaaatcagaaaatacaagatttacataaaggtcatttcaacttttaaggttaccagtgattgtataaaaacatcacaatcctaaatcctctcgtatctcaccccaaaccccaaactgggggaaaaaaagttaactctttgtgaatggaaccaatgtgcaagatacatactgcatttttaaaatagtgtctcagctaaatggaaaactgttaagcaaacatccatagtaaaacaaataatcttcagtgagatctttttataaaacttcttgtttttaggattccctttgcttcttcctttgaattctctaaaataggcagctaacggattatatacttcagggtttggctttgtgctaaatgtggttttgtgttttgctgtatttcaaaattttccttctgttaaaggaaaatattgtgaataaccactggtgtgttcttagatcagcacaaaccatgtcaaaaaaaattggagatttttttccaattttccttccactgatcttaggcagtaataaacaatggcatttgtcatctttggcacttgcttttagattatagtcccacagttgcactgccccaattgtctacctttgtgggtacatttttgttctttactcctaagttatttctcatagaacccagcctactctagaatttcagcagtgacattggagaatatttttaatttgctgcagtactatgtcatattattagtatgaatctcatttcccaaagggtttgtattctgctaaaaggagatgccaatgttgaatgaagtctgaaactctagtatgtgcatagtttgacgtgcagcatgcacaccaggccttaagatgggaatgtagcttaatgattttctgtttcccataccatttctaatcttttgtgtaattttctcttaactgattgctctgatattgtaaacacaatagatgtagctctatcatgtctagcataatttaaaaaatcagtgtttttaggatttgggaaaataaactgtaaatgtttatttgataggtaaatatagttttattgtcacatgctaaatattgcatgcatattgactaattggaataaccatttactcaattatggacagcttattgaaatagtattgatttagaaaaagtatattgcatttctaaaaaacatctaccaaggttactcgtctgaatattgcttttagccgtgttttataacatagacgagcagtagggtctgtttattagcaaatttcctatttgttccaatacaaactcactttattctaaagtatattaatgaaaccagttcctgtgatgtaactgtaagccttctcgacttagacttaaaaagtggtcacatagattaattttgtgactttttagtatagactgtagccataattctcaaatatgaaatgggacctaataccagtatgtgataaatgttgatgttttctgtgtacaaacacattttctatgcatgtgtctctgtgtatatggcatatacctagtaagtatgtttctgtaagtatgtgtattttatgtccatttgagtaggtaggtaggttttaaaaatactagttaaaatgccacaagcatgagtgtgattgtatgtgcactgtgtgtatatatataaatatatgtatatgtatggttgtaaatatctatgtatacatgtacttagtatgtgtggtatcaggatattttttaaactgtgataatacaacagatagctttgaatgatctgccataacatgtggtaacaatagttcatttctcataacatatatgaggtatacaaaattttctaactccagattgtagtcattttgagaggtacaaagctcataattaccatgacaacatggtaatgtccatagacatttgtatctgaatccacaagaagatctgaatctaagaaggaattacctttgacaatatttttcggtaagaagtaaaacctctggagacctatctttaagatctctaattggaattataaattatttttggattgctgagctgaatcttaaaaagccaagttgatatacatagtcatttttcctctatggtagaagtaaaaaaaaaaaaaaaggacatagcaacattaaagtagtggatttttctgagtaaatttgctgaaaatataagagagaagctatctaataccttggaggtaggtcatccactttttcaggtaaacatttttcatttggcaaatggcataattatttgaaagtgacaggaatctcctcagaatgaagaataaagcctamtaggtctctaactgttgaactcatgaaagaagatagtgtatgagacttaagccatgagttttgtatcatttcaattagaagactactagctgtgagctcagagtttaatgtaaatgaatctagatgattttgaagaaatgattattcgttcaccagatcactcattgtacattctaaaaagctcaaatgagtcttctagatactcttactcatcctgtctggttgctatgtttaaaattatgtggtgctgtgtaggtgaaactttaagaatatttttgaagsatatgtaatatatgcactgctatttktgtgtgtgtgtgtgtctttgtatatatgtaagaatgtgtgtatgtgtgagagcaagagagaggaaactcaaagaggagtgtttgtcttaagacctgttcatactggtatattggtgagacttctcacttctggttggaggtttcacatatggctcaactcaagtcattaatctctttttaatttttactcttgaattccytaaacttcgctcattatgaaatgttttaaaattatgacaaaaattactctgtctaaccacttgccttgtctgctaccagtttgttaaaaattattccccccaaccagtaattccaccagtactacttgatttgtgttatatttcctatgtacatgtacagcctttgttttgcttgcttgtctatttttactttcccttttttgggtcaaatttttcttttgctttgtttgaagaaggaatatacagaagtaaaatcttgtcttctctgctgattctttaattaatatgagccggatactttccactgtcttcttggcactttcaggatttcttaatgctgatatatggactcttagaatggaatttttgaagaaaaatctcaaagcctgtatcgttcttgaaggtcacatgtacctattgtgaaaatgtgaagctgtatttctgaagctgaaataaattataacatttgaag

SEQ ID NO: 505 - DNA, 2320 bp, Homo sapiens
agagccaagcggcgggctggcggcgggctccgacgtctgcgccaggacctggctggctgagcccggcgcagcagcagcagccagggcagcgcggcccctactccctgtcaggtcgtagaggcgagcagggaccagctggtcgccggcccctcgggcaagatggggaaccgggagatggaggagctgatcccgctggtgaaccgtctgcaggacgcgttttcggcgctgggacagagctgcctgctggagctgccgcagatcgccgtggtgggcggccagagcgccggcaagagctcggtgctcgagaacttcgtgggcagggactttctccctcgagggtcgggcattgtaacaagacgacctcttgtgctgcagcttgttacttctaaagcagaatatgcygagtttctacattgcaaaggaaagaaatttacagattttgatgaagttcgccttgagattgaagcagaaacagatcgcgtgactggaatgaataaaggcatttcctccatacccattaatttacgagtctattccccacacgtgttaaatctaacccttattgatctacctggaataactaaagtgcctgtgggagatcagccaccagatatcgagtatcagatcagagaaatgattatgcagttcatcacgagggagaactgtctgattttagctgttactccagccaacactgatcttgcaaactcagatgcgctgaagctagctaaagaagttgatcctcaaggtctgagaaccattggagttatcaccaaactggaccttatggatgaaggaacggatgccagggatgttctagagaacaaactgttgcctcttcgcaggggttacgtgggggtggtaaacagaagccagaaggacatagatgggaagaaggacataaaggcagccatgctggcagagaggaagtttttcctttcccacccggcttacagacatatcgctgaccgaatgggaaccccacacctgcagaaggtccttaatcagcaacttaccaaccacattcgggataccctaccaaacttcaggaacaaactacagggacagttgctctccatagaacatgaagtagaagcctacaaaaatttcaaaccagaagacccaacaaggaagaccaaagcattgctgcagatggttcagcaatttgctgtggactttgagaagagaattgaagggtcaggggatcaagtagataccctggaactctcaggtggtgctaaaatcaatcgtatttttcatgaacgctttccttttgagatagtaaagatggagttcaatgagaaagaattgcgaagagaaataagctatgcaatcaaaaacatacatggtatcaggacagggttgtttactccagacatggcatttgaagcgatagtcaagaaacagattgtaaagttgaaagggccttccttgaagagtgtggatctggtaatacaagaattaatcaacactgtgaagaagtgtaccaaaaaactggcaaacttccccagactctgcgaggaaacggaaaggattgttgctaaccacattcgtgagcgagaagggaagacaaaggaccaggtattgctattgattgacattcaagtctcttacatcaacaccaaccatgaagacttcattggcttcgcaaatgctcagcagaggagcagtcaggttcacaagaaaaccacagttggaaatcaggtgattcgcaaggggtggctcaccatcagcaacattggcatcatgaaaggcggctcgaagggatactggttcgtccttactgcggaaagcttgtcctggtataaagatgatgagaacatttagtcttggcgaggataaccaacttaccaaagtcacacagctagttggtggcaaagcagaaatttgaacccaggctgttgagctccagagcctatgctttcaaccacaaataaaggcaagaatcccagagatgcctggagttgtccaagccaacctcatcccacagaggacttatgaagatgaattccaggcatctcagcattgacatgttcctgggtgttagcagcagagacactgaagactctggagtagctactgctgttggagtgtggcattagtctggctctgtgagtcctgaaaataagcccattggaaggtataggatgctctctgtagggaaggaagaagctttgaaggcttggtgagctcttggttattggctcatctcctctcctccagactcaggataattctttacaaaatcactgcccttgtagcttccttatgagtacttgattacaacaaatggaaaataaatatgcacagttataatatt

SEQ ID NO: 506 - DNA, 7584 bp, Homo sapiens
ccgacgtctgcgccaggacctggctggctgagcccggcgcagcagcagcagccagggcagcgcggcccctactccctgtcaggtcgtagaggcgagcagggaccagctggtcgccggcccctcgggcaagatggggaaccgggagatggaggagctgatcccgctggtgaaccgtctgcaggacgcgttttcggcgctgggacagagctgcctgctggagctgccgcagatcgccgtggtgggcggccagagcgccggcaagagctcggtgctcgagaacttcgtgggcagggactttctccctcgagggtcgggcattgtaacaagacgacctcttgtgctgcagcttgttacttctaaagcagaatatgcygagtttctacattgcaaaggaaagaaatttacagattttgatgaagttcgccttgagattgaagcagaaacagatcgcgtgactggaatgaataaaggcatttcctccatacccattaatttacgagtctattccccacacgtgttaaatctaacccttattgatctacctggaataactaaagtgcctgtgggagatcagccaccagatatcgagtatcagatcagagaaatgattatgcagttcatcacgagggagaactgtctgattttagctgttactccagccaacactgatcttgcaaactcagatgcgctgaagctagctaaagaagttgatcctcaaggtctgagaaccattggagttatcaccaaactggaccttatggatgaaggaacggatgccagggatgttctagagaacaaactgttgcctcttcgcaggggttacgtgggggtggtaaacagaagccagaaggacatagatgggaagaaggacataaaggcagccatgctggcagagaggaagtttttcctttcccacccggcttacagacatatcgctgaccgaatgggaaccccacacctgcagaaggtccttaatcagcaacttaccaaccacattcgggataccctaccaaacttcaggaacaaactacagggacagttgctctccatagaacatgaagtagaagcctacaaaaatttcaaaccagaagacccaacaaggaagaccaaagcattgctgcagatggttcagcaatttgctgtggactttgagaagagaattgaagggtcaggggatcaagtagataccctggaactctcaggtggtgctaaaatcaatcgtatttttcatgaacgctttccttttgagatagtaaagatggagttcaatgagaaagaattgcgaagagaaataagctatgcaatcaaaaacatacatggtatcaggacagggttgtttactccagacatggcatttgaagcgatagtcaagaaacagattgtaaagttgaaagggccttccttgaagagtgtggatctggtaatacaagaattaatcaacactgtgaagaagtgtaccaaaaaactggcaaacttccccagactctgcgaggaaacggaaaggattgttgctaaccacattcgtgagcgagaagggaagacaaaggaccaggtattgctattgattgacattcaagtctcttacatcaacaccaaccatgaagacttcattggcttcgcaaatgctcagcagaggagcagtcaggttcacaagaaaaccacagttggaaatcaggtgattcgcaaggggtggctcaccatcagcaacattggcatcatgaaaggcggctcgaagggatactggttcgtccttactgcggaaagcttgtcctggtataaagatgatgaggaaaaagaaaagaagtacatgcttcccttggacaacctgaaagttcgggatgtggaaaagagctttatgtctagcaagcacatctttgcactctttaatacagagcaaaggaatgtatacaaagactatcgcttccttgagctggcatgtgattcccaggaggatgtygacagctggaaggcatctctactaagagctggggtctatcctgacaaatctgtagctgaaaatgatgagaatggacaagcagaaaacttttccatggacccacaattggagaggcaagtggagaccattcgcaacctcgtagactcctacatgtccattatcaacaaatgtatccgagatctaattccaaaaacaataatgcaccttatgatcaataacgttaaagatttcataaattccgagctcctagcacagttgtattcttcagaggaccaaaataccctgatggaggaatctgctgagcaggctcagcgccgggatgagatgcttcgaatgtatcaagcactgaaagaagcccttgggataattggggacatcagcacrgccaccgtgtccactccggcaccccctccagtggatgactcctggatacagcactctcgcaggtcacctcctccaagccccacaacccaaaggaggccaacactaagtgctcccctcgcaaggcccacatccggccgaggaccagctcctgccattccctctcctggcccccactctggggctcctccagtcccattccgtccaggcccattacctcctttccccagcagcagtgactccttcggagcccctccacaagttccatctaggcctacragggccccgcccagtgtcccaagccggagaccacccccatcaccaactcgtcccactataatccgcccactagaatcctccctgttagactaaacgaagtgtctggcatggcaattaatcactaatgaattatgcraaagcaacatatttgataaccrttgcagtaaatcatgagtagtcgcatgtgtggacatcagtaggcaagtaaccagttttactaatgcattcatcgctcatcttcattgctcatggtatgtcaaacctttggggtttgactcagaaactgctaaccttttagaggctttatatgttgtactgaccaaggtaggtttgtatagcagccctatactttggggatcatttgcctaccatgrcatatatttgaaattgctttggacaagttttctaggctatctaccaggtagctcattaaacgtaattcttcagatatgagatagtgggcttagacctaagccatacatatttcttttcccacattctgtttaggatgacagtaattctgttgtctaccattaatgctactacctactccataattgcctatttagctcctcttttcttcctttttatttcataagactgctargaagtgattttttaaaattaggactccttaagaataaacttttccagaagcacgaggtagtttgcaaaggaaaagtctgcactgtttgctctaaagagcttctcctcattccaatgtgttttgcttcatgctagaagcatatgcaacagtgaataaaagcttctttttttgttaatcagtcaataaatttggctaattagtttcagagttcaaggaagaagcaaaatatcacatctctagaagtgttgggaaaaatataatttctttctttacttatattcacctcatggtaggttatattgaaggctgacatggagaatgtttacttttctatttggcatagctaactacactttgatactaactccagttttactattattattttggttggaaaaaaaattcactctttacgtgctaatttgtaatcttgttttgtaagaatttatcctacccttgaaacaggctcagtgtaactgtatatccattctaggctttcttaataaatcttgaggctatgggataatcacatttaaagaatggttcctgaaatgaagtcagtagaaatggcatgggataagagcagagctcacacttttacagttgcagtatttcaaagtccctatccaggtcactccagaaaagggtattgaaacgttgaaatctaaagcaaatttgcaatttcttaagatttctaaaatttaccagaacagtttagcctgggggttaatagttaagtcttgaggctaagttttggactaccaaggaccagatgattcacatgtaggaaacagccagaagccaactggaattttgtgtgctaactgttcccagacagcagagcaagtattcactgagtaggggtgtcccatgacactatttcatattctacagaagtaaatcaggtttcaccaactgaaatgtctccctttgaaagtagcaaacatgatttgtatgttaacttaactttaatttcctgtgtagtttacacccagagcagatactcataaagtataaagtaaaaacttttaaccattattaaacagagaacttgccatgttgagtgccattgtattgaacttattctaaaggcttatgctaacccatttataattggtaaaaatcagaaaatacaagatttacataaaggtcatttcaacttttaaggttaccagtgattgtataaaaacatcacaatcctaaatcctctcgtatctcaccccaaaccccaaactgggggaaaaaaagttaactctttgtgaatggaaccaatgtgcaagatacatactgcatttttaaaatagtgtctcagctaaatggaaaactgttaagcaaacatccatagtaaaacaaataatcttcagtgagatctttttataaaacttcttgtttttaggattccctttgcttcttcctttgaattctctaaaataggcagctaacggattatatacttcagggtttggctttgtgctaaatgtggttttgtgttttgctgtatttcaaaattttccttctgttaaaggaaaatattgtgaataaccactggtgtgttcttagatcagcacaaaccatgtcaaaaaaaattggagatttttttccaattttccttccactgatcttaggcagtaataaacaatggcatttgtcatctttggcacttgcttttagattatagtcccacagttgcactgccccaattgtctacctttgtgggtacatttttgttctttactcctaagttatttctcatagaacccagcctactctagaatttcagcagtgacattggagaatatttttaatttgctgcagtactatgtcatattattagtatgaatctcatttcccaaagggtttgtattctgctaaaaggagatgccaatgttgaatgaagtctgaaactctagtatgtgcatagtttgacgtgcagcatgcacaccaggccttaagatgggaatgtagcttaatgattttctgtttcccataccatttctaatcttttgtgtaattttctcttaactgattgctctgatattgtaaacacaatagatgtagctctatcatgtctagcataatttaaaaaatcagtgtttttaggatttgggaaaataaactgtaaatgtttatttgataggtaaatatagttttattgtcacatgctaaatattgcatgcatattgactaattggaataaccatttactcaattatggacagcttattgaaatagtattgatttagaaaaagtatattgcatttctaaaaaacatctaccaaggttactcgtctgaatattgcttttagccgtgttttataacatagacgagcagtagggtctgtttattagcaaatttcctatttgttccaatacaaactcactttattctaaagtatattaatgaaaccagttcctgtgatgtaactgtaagccttctcgacttagacttaaaaagtggtcacatagattaattttgtgactttttagtatagactgtagccataattctcaaatatgaaatgggacctaataccagtatgtgataaatgttgatgttttctgtgtacaaacacattttctatgcatgtgtctctgtgtatatggcatatacctagtaagtatgtttctgtaagtatgtgtattttatgtccatttgagtaggtaggtaggttttaaaaatactagttaaaatgccacaagcatgagtgtgattgtatgtgcactgtgtgtatatatataaatatatgtatatgtatggttgtaaatatctatgtatacatgtacttagtatgtgtggtatcaggatattttttaaactgtgataatacaacagatagctttgaatgatctgccataacatgtggtaacaatagttcatttctcataacatatatgaggtatacaaaattttctaactccagattgtagtcattttgagaggtacaaagctcataattaccatgacaacatggtaatgtccatagacatttgtatctgaatccacaagaagatctgaatctaagaaggaattacctttgacaatatttttcggtaagaagtaaaacctctggagacctatctttaagatctctaattggaattataaattatttttggattgctgagctgaatcttaaaaagccaagttgatatacatagtcatttttcctctatggtagaagtaaaaaaaaaaaaaaaggacatagcaacattaaagtagtggatttttctgagtaaatttgctgaaaatataagagagaagctatctaataccttggaggtaggtcatccactttttcaggtaaacatttttcatttggcaaatggcataattatttgaaagtgacaggaatctcctcagaatgaagaataaagcctamtaggtctctaactgttgaactcatgaaagaagatagtgtatgagacttaagccatgagttttgtatcatttcaattagaagactactagctgtgagctcagagtttaatgtaaatgaatctagatgattttgaagaaatgattattcgttcaccagatcactcattgtacattctaaaaagctcaaatgagtcttctagatactcttactcatcctgtctggttgctatgtttaaaattatgtggtgctgtgtaggtgaaactttaagaatatttttgaagsatatgtaatatatgcactgctatttktgtgtgtgtgtgtgtctttgtatatatgtaagaatgtgtgtatgtgtgagagcaagagagaggaaactcaaagaggagtgtttgtcttaagacctgttcatactggtatattggtgagacttctcacttctggttggaggtttcacatatggctcaactcaagtcattaatctctttttaatttttactcttgaattccytaaacttcgctcattatgaaatgttttaaaattatgacaaaaattactctgtctaaccacttgccttgtctgctaccagtttgttaaaaattattccccccaaccagtaattccaccagtactacttgatttgtgttatatttcctatgtacatgtacagcctttgttttgcttgcttgtctatttttactttcccttttttgggtcaaatttttcttttgctttgtttgaagaaggaatatacagaagtaaaatcttgtcttctctgctgattctttaattaatatgagccggatactttccactgtcttcttggcactttcaggatttcttaatgctgatatatggactcttagaatggaatttttgaagaaaaatctcaaagcctgtatcgttcttgaaggtcacatgtacctattgtgaaaatgtgaagctgtatttctgaagctgaaataaattataacatttgaag

SEQ ID NO: 507 - DNA, 5959 bp, Homo sapiens
tcagggaaccaatcttccgccttcaaggcaaattgtacgagctaagttctgtgattcgcaaggggtggctcaccatcagcaacattggcatcatgaaaggcggctcgaagggatactggttcgtccttactgcggaaagcttgtcctggtataaagatgatgaggaaaaagaaaagaagtacatgcttcccttggacaacctgaaagttcgggatgtggaaaagagctttatgtctagcaagcacatctttgcactctttaatacagagcaaaggaatgtatacaaagactatcgcttccttgagctggcatgtgattcccaggaggatgtygacagctggaaggcatctctactaagagctggggtctatcctgacaaatctgtagctgaaaatgatgagaatggacaagcagaaaacttttccatggacccacaattggagaggcaagtggagaccattcgcaacctcgtagactcctacatgtccattatcaacaaatgtatccgagatctaattccaaaaacaataatgcaccttatgatcaataacgttaaagatttcataaattccgagctcctagcacagttgtattcttcagaggaccaaaataccctgatggaggaatctgctgagcaggctcagcgccgggatgagatgcttcgaatgtatcaagcactgaaagaagcccttgggataattggggacatcagcacrgccaccgtgtccactccggcaccccctccagtggatgactcctggatacagcactctcgcaggtcacctcctccaagccccacaacccaaaggaggccaacactaagtgctcccctcgcaaggcccacatccggccgaggaccagctcctgccattccctctcctggcccccactctggggctcctccagtcccattccgtccaggcccattacctcctttccccagcagcagtgactccttcggagcccctccacaagttccatctaggcctacragggccccgcccagtgtcccaagccggagaccacccccatcaccaactcgtcccactataatccgcccactagaatcctccctgttagactaaacgaagtgtctggcatggcaattaatcactaatgaattatgcraaagcaacatatttgataaccrttgcagtaaatcatgagtagtcgcatgtgtggacatcagtaggcaagtaaccagttttactaatgcattcatcgctcatcttcattgctcatggtatgtcaaacctttggggtttgactcagaaactgctaaccttttagaggctttatatgttgtactgaccaaggtaggtttgtatagcagccctatactttggggatcatttgcctaccatgrcatatatttgaaattgctttggacaagttttctaggctatctaccaggtagctcattaaacgtaattcttcagatatgagatagtgggcttagacctaagccatacatatttcttttcccacattctgtttaggatgacagtaattctgttgtctaccattaatgctactacctactccataattgcctatttagctcctcttttcttcctttttatttcataagactgctargaagtgattttttaaaattaggactccttaagaataaacttttccagaagcacgaggtagtttgcaaaggaaaagtctgcactgtttgctctaaagagcttctcctcattccaatgtgttttgcttcatgctagaagcatatgcaacagtgaataaaagcttctttttttgttaatcagtcaataaatttggctaattagtttcagagttcaaggaagaagcaaaatatcacatctctagaagtgttgggaaaaatataatttctttctttacttatattcacctcatggtaggttatattgaaggctgacatggagaatgtttacttttctatttggcatagctaactacactttgatactaactccagttttactattattattttggttggaaaaaaaattcactctttacgtgctaatttgtaatcttgttttgtaagaatttatcctacccttgaaacaggctcagtgtaactgtatatccattctaggctttcttaataaatcttgaggctatgggataatcacatttaaagaatggttcctgaaatgaagtcagtagaaatggcatgggataagagcagagctcacacttttacagttgcagtatttcaaagtccctatccaggtcactccagaaaagggtattgaaacgttgaaatctaaagcaaatttgcaatttcttaagatttctaaaatttaccagaacagtttagcctgggggttaatagttaagtcttgaggctaagttttggactaccaaggaccagatgattcacatgtaggaaacagccagaagccaactggaattttgtgtgctaactgttcccagacagcagagcaagtattcactgagtaggggtgtcccatgacactatttcatattctacagaagtaaatcaggtttcaccaactgaaatgtctccctttgaaagtagcaaacatgatttgtatgttaacttaactttaatttcctgtgtagtttacacccagagcagatactcataaagtataaagtaaaaacttttaaccattattaaacagagaacttgccatgttgagtgccattgtattgaacttattctaaaggcttatgctaacccatttataattggtaaaaatcagaaaatacaagatttacataaaggtcatttcaacttttaaggttaccagtgattgtataaaaacatcacaatcctaaatcctctcgtatctcaccccaaaccccaaactgggggaaaaaaagttaactctttgtgaatggaaccaatgtgcaagatacatactgcatttttaaaatagtgtctcagctaaatggaaaactgttaagcaaacatccatagtaaaacaaataatcttcagtgagatctttttataaaacttcttgtttttaggattccctttgcttcttcctttgaattctctaaaataggcagctaacggattatatacttcagggtttggctttgtgctaaatgtggttttgtgttttgctgtatttcaaaattttccttctgttaaaggaaaatattgtgaataaccactggtgtgttcttagatcagcacaaaccatgtcaaaaaaaattggagatttttttccaattttccttccactgatcttaggcagtaataaacaatggcatttgtcatctttggcacttgcttttagattatagtcccacagttgcactgccccaattgtctacctttgtgggtacatttttgttctttactcctaagttatttctcatagaacccagcctactctagaatttcagcagtgacattggagaatatttttaatttgctgcagtactatgtcatattattagtatgaatctcatttcccaaagggtttgtattctgctaaaaggagatgccaatgttgaatgaagtctgaaactctagtatgtgcatagtttgacgtgcagcatgcacaccaggccttaagatgggaatgtagcttaatgattttctgtttcccataccatttctaatcttttgtgtaattttctcttaactgattgctctgatattgtaaacacaatagatgtagctctatcatgtctagcataatttaaaaaatcagtgtttttaggatttgggaaaataaactgtaaatgtttatttgataggtaaatatagttttattgtcacatgctaaatattgcatgcatattgactaattggaataaccatttactcaattatggacagcttattgaaatagtattgatttagaaaaagtatattgcatttctaaaaaacatctaccaaggttactcgtctgaatattgcttttagccgtgttttataacatagacgagcagtagggtctgtttattagcaaatttcctatttgttccaatacaaactcactttattctaaagtatattaatgaaaccagttcctgtgatgtaactgtaagccttctcgacttagacttaaaaagtggtcacatagattaattttgtgactttttagtatagactgtagccataattctcaaatatgaaatgggacctaataccagtatgtgataaatgttgatgttttctgtgtacaaacacattttctatgcatgtgtctctgtgtatatggcatatacctagtaagtatgtttctgtaagtatgtgtattttatgtccatttgagtaggtaggtaggttttaaaaatactagttaaaatgccacaagcatgagtgtgattgtatgtgcactgtgtgtatatatataaatatatgtatatgtatggttgtaaatatctatgtatacatgtacttagtatgtgtggtatcaggatattttttaaactgtgataatacaacagatagctttgaatgatctgccataacatgtggtaacaatagttcatttctcataacatatatgaggtatacaaaattttctaactccagattgtagtcattttgagaggtacaaagctcataattaccatgacaacatggtaatgtccatagacatttgtatctgaatccacaagaagatctgaatctaagaaggaattacctttgacaatatttttcggtaagaagtaaaacctctggagacctatctttaagatctctaattggaattataaattatttttggattgctgagctgaatcttaaaaagccaagttgatatacatagtcatttttcctctatggtagaagtaaaaaaaaaaaaaaaggacatagcaacattaaagtagtggatttttctgagtaaatttgctgaaaatataagagagaagctatctaataccttggaggtaggtcatccactttttcaggtaaacatttttcatttggcaaatggcataattatttgaaagtgacaggaatctcctcagaatgaagaataaagcctamtaggtctctaactgttgaactcatgaaagaagatagtgtatgagacttaagccatgagttttgtatcatttcaattagaagactactagctgtgagctcagagtttaatgtaaatgaatctagatgattttgaagaaatgattattcgttcaccagatcactcattgtacattctaaaaagctcaaatgagtcttctagatactcttactcatcctgtctggttgctatgtttaaaattatgtggtgctgtgtaggtgaaactttaagaatatttttgaagsatatgtaatatatgcactgctatttktgtgtgtgtgtgtgtctttgtatatatgtaagaatgtgtgtatgtgtgagagcaagagagaggaaactcaaagaggagtgtttgtcttaagacctgttcatactggtatattggtgagacttctcacttctggttggaggtttcacatatggctcaactcaagtcattaatctctttttaatttttactcttgaattccytaaacttcgctcattatgaaatgttttaaaattatgacaaaaattactctgtctaaccacttgccttgtctgctaccagtttgttaaaaattattccccccaaccagtaattccaccagtactacttgatttgtgttatatttcctatgtacatgtacagcctttgttttgcttgcttgtctatttttactttcccttttttgggtcaaatttttcttttgctttgtttgaagaaggaatatacagaagtaaaatcttgtcttctctgctgattctttaattaatatgagccggatactttccactgtcttcttggcactttcaggatttcttaatgctgatatatggactcttagaatggaatttttgaagaaaaatctcaaagcctgtatcgttcttgaaggtcacatgtacctattgtgaaaatgtgaagctgtatttctgaagctgaaataaattataacatttgaag

SEQ ID NO: 508 - DNA, 6747 bp, Homo sapiens
atgccagacaaccagaaccccataaatgtctgctctggagaaaccaggaaggaagcayggcctgaggcactcgaggggctctcaacaccagcctcaaatggcagatgcgaaagccatggagttgagctgcagcgaagcacctctttacggagggccggaggacagggcccaagttgtctggatggactcttccccagctcagggaagcagcttcttattgaggtagtaagtgacttggtggctttgttctggggtcacccagcaggggccttcttccggatccctgcagattccctgtggcttttgggtcctgtggaaggaaatcctgtcctccagacactgcccttctctcttggtggccctccatcccccactgcacgaagagatagagagatggtccagcaggaaggtgctgtcatcataatcttcagtaaatttggaggtttggggaacatgtctcagagtttgaaacttaacatttttaagctgcctgtgaccagagcagagaggcaaattcagaagtttggaatgtttggaaggcacgtttgttttgtgacgatagtgatggtgtccgtatgtaaagtgtggaaggaaatccacctggcagggcagatgatgatctatgcgaagtttgacaaaaatgtgtatcttcctgaagatgctgagttttactttacttatgacggatctcatcagcgacatgtcatgattgcagagcgcatcgaggataacgttctccagtccagcgtcccaggccatgggcttcaggagacggtgacggtatctgtgtgcctctgctcggaaggttactctccggtgaccatgggctctggctcagtgacctacgtggacaacatggcttgcakgctggctcgtctgctggtgacgcaggccaatcgcctcacagccygcagccaccagaccctgctgaccccatttgccttgacggcaggagcactgcctgccttggatgaggagctcgtgctggctctgacccatctggaattgcctctagagtggactgtgttgggaagttcttcacttgaagtatcttctcacagagaatctcttctacacctggctatgagatggggcctggctaaactttcccagttcttcttgtgtctcccggggggagtccaggccttggctttacccaacgaagagggtgccacaccattagacttagctttacgtgaaggacactccaagctggtrgaagacgtcacaaattttcagggcagayggtccccaagcttctcccgagtgcagctcagtgaagaagcctccttgcattacattcactcatcggaaacgctgaccctgaccctgaaccacacagccgagcatttgttggaggcagatattaaactcttccggaaatacttttgggatmgagcctttcttgtcaaggcctttgagcmagaagccaggccagaggaaagaacagctatgccctccagcggtgcagaaactgaagaagggttgagaaccaccaagcttgatgctggggctagggaggaaaaatatgacaaggcgcttgttcctaagccaccaatgttaatagctgatcgctccttcgatatcctaaaaaaatccaagccgccctcgacattgcttgctgcaggccggctttcagacatgctgaatggaggtgatgaagtctacgctaactgtatggtgattgatcaggttggtgatttggatatcagctatattaatatagagggaatcactgccactaccagccctgaatccagaggttgcactctgtggcctcagagcagcaaacacacccttcctacagaaaccagtcccagtgtgtacccacttagtgaaaatgtcgaagggacagcacacactgaagcccagcagtccttcatgtcaccatcaagttcgtgtgcttccaacttgaatctttcttttggttggcatggatttgaaaaggaacaaagtcatctaaagaaaagaagttctagccttgatgccttggacgccgacagtgaaggggaagggcattctgagccatcccacatctgttacactccagggtctcagagctcctcaagaactgggattcctagtggggatgaattggactcttttgagactaacactgaaccggattttaatatctccagggctgaatcccttcctctatcaagtaatctacagtygaaggaatcactgctttctggagttcgctcacgttcttattcttgctcrtcacccaaaatttctttaggaaaaactcgtttggtgcgtgaattaacagtatgcagttcaagtgaagagcaaaragcttacagcttatcggagccaccaagagaaaacagaattcaggaagaagaatgggataaatacatcatacctgccaaatcagagtctgaaaaatataaagtgagtcgaactttcagtttcctcatgaataggatgactagccctcggaataaatcaaagacaaaaagcaaggatgccaaagataaagagaagctgaatcgacatcagtttgccccaggaacattctytggggttctgcagtgtttggtttgtgataaaacactcctggggaaagagtcactgcagtgttctaactgtaatgcaaatgtgcacaaaggttgtaaagatgctgcgcctgcatgcaccaagaaattccaagagaaatataacaagaacaaaccacagaccatccttggaaattcttcatttagagacatcccacagcctggtctctccttgcacccttcttcctccgtgcctgttggattgccgactggaaggagggagactgtgggacaggtccatccattgtccagaagtgttccaggyaccaccttggaaagcttcaggaggtcagccacatccttggagtctgagagtgacmataacagctgcagaagcaggtctcattctgatgagctgctacagtccatgggctcttctccctctacagagtctttcataatggaagatgttgtggattcttctctgtggagtgacctcagcagtgatgcccaggagtttgaagcagaatcttggagtcttgtggtggatccctcattttgtaataggcaggagaaggatgtcatcaaaagacaggatgtcatttttgagctaatgcaaacagagatgcatcacatccagaccctgttcatcatgtctgagatcttcaggaaaggcatgaaagaggagctgcagctggaccacagcaccgtggataaaattttcccctgtttagatgagttgcttgaaatccacaggcatttcttctacagtatgaaggaacgaaggcaggaatcctgtgctggcagcgacaggaattttgtgatcgaccgaattggagatattttggtacaacagttttcagaagaaaatgcaagtaaaatgaagaaaatatatggagaattctgttgccatcataaagaagctgttaacctctttaaagaactccagcagaataaaaagtttcagaattttattaaggcaactccgaaatagtaatcttttggctcgacgccgaggaattccagaatgcattctgttggtcactcagcgtattacaaaataycctgtcttggtggaaaggatattgcagtacacaaaggaaagaactgaggaacataaagacttacgcaaagcgctttgcttaattaaagacatgattgcaacagtggatttaaaagtcaatgaatatgagaaaaaccaaaaatggcttgagatcctaaataagattgaaaacaaaacatacacgaagctcaaaaatggacatgtgtttaggaagcaggcactgatgagtgaagaaaggactctgttatatgatggccttgtttactggaaaactgcyacaggtcgtttcaaagatatcctagctctacttctaactgatgtgctgctctttttacaagaaaaagaccagaaatacatctttgcagccgttgatcagaagccatcagttatttcccttcaaaagcttattgctagagaagttgctaatgaggagagaggaatgtttctgatcagtgcttcatctgctggtcctgagatgtatgaaattcacaccaattccaaggaggaacgcaataactggatgagacggatccagcaggctgtagaaagttgtcctgaagaaaaagggggaaggacaagtgaatctgatgaagacaagaggaaagctgaagccagagtggccaaaattcagcaatgtcaagaaatactcactaaccaagaccaacaaatttgtgcgtatttggaggagaagctgcatatctatgctgaacttggagaactgagcggatttgaggacgtccatctagagccccacctccttattaaacctgacccaggcgagcctccccaggcagcctcattactggcagcagcactgaaagaagcattagtcacaggagggagagaaggaagaggctgttcggatgtggatcccgggatccagggtgtggtaaccgacttggccgtctctgatgcaggggagaaggtggaatgtagaaattttccaggttcttcacaatcagagattatacaagccatacagaatttaacccgtctcttatacagccttcaggccgccttgamcattcaggacagccacattgagatccacaggctggttctccagcagcaggagggcctgtctctcggccactctatcctccgaggcggccccttgcaggaccagaagtctcgcgacgcggacaggcagcatgaggagctggccaatgtgcaccagcttcagcaccagctccagcaggagcagcggcgctggctgcgcaggtgtgagcagcagcagcrggcgcaggcgaccagggagagctggctgcaggagcgggagcgggagtgccagtcgcaggaggagmtgctgctgcggagccggggcgagctgkacctccagctccaggagtaccagcacagcctggagcggctgagggagggccagcgcctggtggagagggagcaggcgaggatgcgggcccagcagagcctgctgggccactggaagcacggccggcagaggagcctgcccgcggtgctccttccgggtggccccgaggtaatggaacttaatcgatctgagagtttatgtcatgaaaactcattcttcatcaatgaagctttagtacaaatgtcatttaacactttcaacaaactgaatccatcagttatccatcaggatgccacttaccctacaactcaatctcattctgacttggtgaggactagtgaacatcaagtagacctcaaggtggacccttctcagccttcgaatgtcagtcacaaactgtggacagccgctggttccggccatcagatacttcctttccawgaaagcagcaaggattcttgtaaaaatggctccagtatgacaaagtgcagttgtacgttgacatctccccygggactgtggactggaaccacatctactttgaaagatttggacaccycccacactgagtccccaaccccccatgactcaaattcacaccgccctcaactgcaggcgtttataacagaagcaaagctaaatctaccgacaaggacaatgaccagacaagatggggaaactggagatggagccaaagaaaatattgtttacctctaattgtgttgtcatttttccaaacaaaacaaaacactggcacttttgggagaaactttttgtctccattccttatgtatgtgtgattgtctgtgtccaaattgctttaagaayaatatttaatatttcctggaagctcatttttttggcatgagtctaattaaattattgaaagccaccctgtttgtataatctttaacttatcaaatctaatttcagatttctggaggagaaactaacttgaataagcaggactattttaaaagttgttttgacgctagagtaaaattccatgtcacattttctacccaatcatctggatttcaagattccttttaagatctcaatgaagcaatttggatttaaagagtggtattcacaaggggtgaactttcacagtcagggcagttgcctcagtgcccacataggcagaggaggatgtgggaaagggyttttctcagctagtttttgtgtgctcatttcttctgggagcattaaaagtggtgatctgttacagtcactattcaactgggcacgtgttgtgattggtcagtcactgagccagggatacagtccggacttgcttagtacctaagcctaatgctggtggggtttcaagacatggttcagcmtcatcttttaacaaggcccagaggcccagagcccscatcaagtcattttgatgtaaatagtgaactttgttagagccctcacttctatcaatcagctgtcctgtccctgccagcacctggagcaccaactaccactccctggaaagaacccttccctgcagttttttaaggacaaaactgcccactcctcattaagtttgctgcctggatacacttttccacaaaggaaaactggcatatcctgccttccgagtagtatgggtctctgtgtgagaaaccaggagatattttcatcttgttcggaaatacttgtatgtattttggtgtcaataaatatcttgtacctcattattttactttgtaattttaacattatgtgtaggaccatagtaaaacattcatttcacacagacatctaatctcacctcgtgaaaagtgaaaataaaggaaaactattagattcatccaaaaatgcaacacctactgggagtgagatgtgatagg

SEQ ID NO: 509 - DNA, 3631 bp, Homo sapiens
agctaatgcaaacagagatgcatcacatccagaccctgttcatcatgtctgagatcttcaggaaaggcatgaaagaggagctgcagctggaccacagcaccgtggataaaattttcccctgtttagatgagttgcttgaaatccacaggcatttcttctacagtatgaaggaacgaaggcaggaatcctgtgctggcagcgacaggaattttgtgatcgaccgaattggagatattttggtacaacagttttcagaagaaaatgcaagtaaaatgaagaaaatatatggagaattctgttgccatcataaagaagctgttaacctctttaaagaactccagcagaataaaaagtttcagaattttattaagctccgaaatagtaatcttttggctcgacgccgaggaattccagaatgcattctgttggtcactcagcgtattacaaaataycctgtcttggtggaaaggatattgcagtacacaaaggaaagaactgaggaacataaagacttacgcaaagcgctttgcttaattaaagacatgattgcaacagtggatttaaaagtcaatgaatatgagaaaaaccaaaaatggcttgagatcctaaataagattgaaaacaaaacatacacgaagctcaaaaatggacatgtgtttaggaagcaggcactgatgagtgaagaaaggactctgttatatgatggccttgtttactggaaaactgcyacaggtcgtttcaaagatatcctagctctacttctaactgatgtgctgctctttttacaagaaaaagaccagaaatacatctttgcagccgttgatcagaagccatcagttatttcccttcaaaagcttattgctagagaagttgctaatgaggagagaggaatgtttctgatcagtgcttcatctgctggtcctgagatgtatgaaattcacaccaattccaaggaggaacgcaataactggatgagacggatccagcaggctgtagaaagttgtcctgaagaaaaagggggaaggacaagtgaatctgatgaagacaagaggaaagctgaagccagagtggccaaaattcagcaatgtcaagaaatactcactaaccaagaccaacaaatttgtgcgtatttggaggagaagctgcatatctatgctgaacttggagaactgagcggatttgaggacgtccatctagagccccacctccttattaaacctgacccaggcgagcctccccaggcagcctcattactggcagcagcactgaaagaagcattagtcacaggagggagagaaggaagaggctgttcggatgtggatcccgggatccagggtgtggtaaccgacttggccgtctctgatgcaggggagaaggtggaatgtagaaattttccaggttcttcacaatcagagattatacaagccatacagaatttaacccgtctcttatacagccttcaggccgccttgamcattcaggacagccacattgagatccacaggctggttctccagcagcaggagggcctgtctctcggccactctatcctccgaggcggccccttgcaggaccagaagtctcgcgacgcggacaggcagcatgaggagctggccaatgtgcaccagcttcagcaccagctccagcaggagcagcggcgctggctgcgcaggtgtgagcagcagcagcrggcgcaggcgaccagggagagctggctgcaggagcgggagcgggagtgccagtcgcaggaggagmtgctgctgcggagccggggcgagctgkacctccagctccaggagtaccagcacagcctggagcggctgagggagggccagcgcctggtggagagggagcaggcgaggatgcgggcccagcagagcctgctgggccactggaagcacggccggcagaggagcctgcccgcggtgctccttccgggtggccccgaggtaatggaacttaatcgatctgagagtttatgtcatgaaaactcattcttcatcaatgaagctttagtacaaatgtcatttaacactttcaacaaactgaatccatcagttatccatcaggatgccacttaccctacaactcaatctcattctgacttggtgaggactagtgaacatcaagtagacctcaaggtggacccttctcagccttcgaatgtcagtcacaaactgtggacagccgctggttccggccatcagatacttcctttccawgaaagcagcaaggattcttgtaaaaatggctccagtatgacaaagtgcagttgtacgttgacatctccccygggactgtggactggaaccacatctactttgaaagatttggacaccycccacactgagtccccaaccccccatgactcaaattcacaccgccctcaactgcaggcgtttataacagaagcaaagctaaatctaccgacaaggacaatgaccagacaagatggggaaactggagatggagccaaagaaaatattgtttacctctaattgtgttgtcatttttccaaacaaaacaaaacactggcacttttgggagaaactttttgtctccattccttatgtatgtgtgattgtctgtgtccaaattgctttaagaayaatatttaatatttcctggaagctcatttttttggcatgagtctaattaaattattgaaagccaccctgtttgtataatctttaacttatcaaatctaatttcagatttctggaggagaaactaacttgaataagcaggactattttaaaagttgttttgacgctagagtaaaattccatgtcacattttctacccaatcatctggatttcaagattccttttaagatctcaatgaagcaatttggatttaaagagtggtattcacaaggggtgaactttcacagtcagggcagttgcctcagtgcccacataggcagaggaggatgtgggaaagggyttttctcagctagtttttgtgtgctcatttcttctgggagcattaaaagtggtgatctgttacagtcactattcaactgggcacgtgttgtgattggtcagtcactgagccagggatacagtccggacttgcttagtacctaagcctaatgctggtggggtttcaagacatggttcagcmtcatcttttaacaaggcccagaggcccagagcccscatcaagtcattttgatgtaaatagtgaactttgttagagccctcacttctatcaatcagctgtcctgtccctgccagcacctggagcaccaactaccactccctggaaagaacccttccctgcagttttttaaggacaaaactgcccactcctcattaagtttgctgcctggatacacttttccacaaaggaaaactggcatatcctgccttccgagtagtatgggtctctgtgtgagaaaccaggagatattttcatcttgttcggaaatacttgtatgtattttggtgtcaataaatatcttgtacctcattattttactttgtaattttaacattatgtgtaggaccatagtaaaacattcatttcacacagacatctaatctcacctcgtgaaaagtgaaaataaaggaaaactattagattcatccaaaaatgcaacacctactgggagtgagatgtgatagg

SEQ ID NO: 510 - DNA, 3685 bp, Homo sapiens
agctaatgcaaacagagatgcatcacatccagaccctgttcatcatgtctgagatcttcaggaaaggcatgaaagaggagctgcagctggaccacagcaccgtggataaaattttcccctgtttagatgagttgcttgaaatccacaggcatttcttctacagtatgaaggaacgaaggcaggaatcctgtgctggcagcgacaggaattttgtgatcgaccgaattggagatattttggtacaacagttttcagaagaaaatgcaagtaaaatgaagaaaatatatggagaattctgttgccatcataaagaagctgttaacctctttaaagaactccagcagaataaaaagtttcagaattttattaagctccgaaatagtaatcttttggctcgacgccgaggaattccagaatgcattctgttggtcactcagcgtattacaaaataycctgtcttggtggaaaggatattgcagtacacaaaggaaagaactgaggaacataaagacttacgcaaagcgctttgcttaattaaagacatgattgcaacagtggatttaaaagtcaatgaatatgagaaaaaccaaaaatggcttgagatcctaaataagattgaaaacaaaacatacacgaagctcaaaaatggacatgtgtttaggaagcaggcactgatgagtgaagaaaggactctgttatatgatggccttgtttactggaaaactgcyacaggtcgtttcaaagatatcctagctctacttctaactgatgtgctgctctttttacaagaaaaagaccagaaatacatctttgcagccgttgatcagaagccatcagttatttcccttcaaaagcttattgctagagaagttgctaatgaggagagaggaatgtttctgatcagtgcttcatctgctggtcctgagatgtatgaaattcacaccaattccaaggaggaacgcaataactggatgagacggatccagcaggctgtagaaagttgtcctgaagaaaaagggggaaggacaagtgaatctgatgaagacaagaggaaagctgaagccagagtggccaaaattcagcaatgtcaagaaatactcactaaccaagaccaacaaatttgtgcgtatttggaggagaagctgcatatctatgctgaacttggagaactgagcggatttgaggacgtccatctagagccccacctccttattaaacctgacccaggcgagcctccccaggcagcctcattactggcagcagcactgaaagaagctgagagcctacaagttgcagtgaaggcctcacagatgggcgccgtgagtcaatcatgtgaggacagttgtggagactctgtcttggcggacacactcagttctcatgatgtaccaggatcaccgactgcctcattagtcacaggagggagagaaggaagaggctgttcggatgtggatcccgggatccagggtgtggtaaccgacttggccgtctctgatgcaggggagaaggtggaatgtagaaattttccaggttcttcacaatcagagattatacaagccatacagaatttaacccgtctcttatacagccttcaggccgccttgamcattcaggacagccacattgagatccacaggctggttctccagcagcaggagggcctgtctctcggccactctatcctccgaggcggccccttgcaggaccagaagtctcgcgacgcggacaggcagcatgaggagctggccaatgtgcaccagcttcagcaccagctccagcaggagcagcggcgctggctgcgcaggtgtgagcagcagcagcrggcgcaggcgaccagggagagctggctgcaggagcgggagcgggagtgccagtcgcaggaggagmtgctgctgcggagccggggcgagctgkacctccagctccaggagtaccagcacagcctggagcggctgagggagggccagcgcctggtggagagggagcaggcgaggatgcgggcccagcagagcctgctgggccactggaagcacggccggcagaggagcctgcccgcggtgctccttccgggtggccccgaggtaatggaacttaatcgatctgagagtttatgtcatgaaaactcattcttcatcaatgaagctttagtacaaatgtcatttaacactttcaacaaactgaatccatcagttatccatcaggatgccacttaccctacaactcaatctcattctgacttggtgaggactagtgaacatcaagtagacctcaaggtggacccttctcagccttcgaatgtcagtcacaaactgtggacagccgctggttccggccatcagatacttcctttccawgaaagcagcaaggattcttgtaaaaatgatttggacaccycccacactgagtccccaaccccccatgactcaaattcacaccgccctcaactgcaggcgtttataacagaagcaaagctaaatctaccgacaaggacaatgaccagacaagatggggaaactggagatggagccaaagaaaatattgtttacctctaattgtgttgtcatttttccaaacaaaacaaaacactggcacttttgggagaaactttttgtctccattccttatgtatgtgtgattgtctgtgtccaaattgctttaagaayaatatttaatatttcctggaagctcatttttttggcatgagtctaattaaattattgaaagccaccctgtttgtataatctttaacttatcaaatctaatttcagatttctggaggagaaactaacttgaataagcaggactattttaaaagttgttttgacgctagagtaaaattccatgtcacattttctacccaatcatctggatttcaagattccttttaagatctcaatgaagcaatttggatttaaagagtggtattcacaaggggtgaactttcacagtcagggcagttgcctcagtgcccacataggcagaggaggatgtgggaaagggyttttctcagctagtttttgtgtgctcatttcttctgggagcattaaaagtggtgatctgttacagtcactattcaactgggcacgtgttgtgattggtcagtcactgagccagggatacagtccggacttgcttagtacctaagcctaatgctggtggggtttcaagacatggttcagcmtcatcttttaacaaggcccagaggcccagagcccscatcaagtcattttgatgtaaatagtgaactttgttagagccctcacttctatcaatcagctgtcctgtccctgccagcacctggagcaccaactaccactccctggaaagaacccttccctgcagttttttaaggacaaaactgcccactcctcattaagtttgctgcctggatacacttttccacaaaggaaaactggcatatcctgccttccgagtagtatgggtctctgtgtgagaaaccaggagatattttcatcttgttcggaaatacttgtatgtattttggtgtcaataaatatcttgtacctcattattttactttgtaattttaacattatgtgtaggaccatagtaaaacattcatttcacacagacatctaatctcacctcgtgaaaagtgaaaataaaggaaaactattagattcatccaaaaatgcaacacctactgggagtgagatgtgatagg

SEQ ID NO: 511 - DNA, 3117 bp, Homo sapiens
gtttttctaaacagcctgacactgaggggaggcagtgagactgtaagcagtctgggttgggcagaaggcagaaaaccagcagagtcacagaggagatggccaactgccaaatagccatcttgtaccagagattccagagagtggtctttggaatttcccaactcctttgcttcagtgccctgatctctgaactaacaaaccagaaagaagtggcagcatggacttatcattacagcacaaaagcatactcatggaatatttcccrtaaatactgccagaatcgctacacagacttagtggccatccagaataaaaatgaaattgattacctcaataaggtcctaccctactacagctcctactactggattgggatccgaaagaacaataagacatggacatgggtgggaaccaaaaaggctctcaccaacgaggctgagaactgggctgataatgaacctaacaacaaaaggaacaacgaggactgcgtggagatatacatcaagagtccrtcagcccctggcaagtggaatgatgagcactgcttgaagaaaaagcacgcattgtgttacacagcctcctgccaggacatgtcctgcagcaaacaaggagagtgcctcgagaccatcrggaactacacctgctcctgttaccctggattctatgggccagaatgtgaatacgtgagagagtgtggagaacttgagctccctcaacacrtgctcatgaactgcagccaycctctgggaaacttctcttttaactcgcagtgcagcttccactkcactgacgggtaccaagtaaatgggcccagcaagctggaatgcttggcttctggaatctggacaaataagcctccacagtgtttagctgcccagtgcccacccctgaagattcctgaacgaggaaacatgayctgccttcattctgcaaaagcattccagcatcagtctagctgcagcttcagttgtgaagagggatttgcattagttggacyggaagtggtgcaatgcacagcctcgggggtatggacagccccagccccagtgtgtaaagctatttygtgtgagccgctggagagtcctgtccacggaagcatggattgctctccatccttgagagcgtttcagtatgacaccaactgtagcttccgctgtgctgaaggtttcatgctgagaggagccgatatagttcggtgtgataacttgggacagtggacagcaccagccccagtctgtcaagctttgcagtgccaggatctcccagttccaaatgaggcccrggtgaactgctcccaccccttcggtgcctttaggtaccagtcagtctgcagcttcacctgcaatgaaggcttgctcctggtgggagcaagtgtgctacagtgcttggctactggaaactggaattytgttcctccagaatgccaagccattccctgcacacctttgctaagccctcagaatggaacaatgacctgtgttcaacctcttggaagttccagttataaatccacatgtcaattcatctgtgacragggatattctttgtctggaccagaaagattggattgtactcgatcgggacgctggacagactccccaccaatgtgtgaagccatcaagtgcccagaactctttgccccagagcagggcagcctggattgttctgacacycgtggagaattcaatgttggctccacytgycatttctcttgtracaayggctttaagctggaggggcccaataatgtggaatgcacaactkctggaagatggtcagctactccrccaacctgcaaagkcatagcatcacttcctactccagggktgcaatgtccagccctcaccactcctgggcagggaaccatgtactgtaggcatcatccgggramctttggttttaataccacttgttactttggctgcarcgctggattcacactcataggagacagcactctcagctgcagaccttcaggacaatggacagcagtaactccagcatgcagagctgtgaaatgctcagaactacatgttaataagccaatagcgatgaactgctccaacctctggggaaacttcagttatggatcaatctgctctttccattgtctagagggccagttacttaatggctctgcacaaacagcatgccaagagaatggccactggtcamctaccgtgccaacctgccaagcaggaccattgacyatccaggaagccctgacttactttggtggagcggtggcttctacrataggtctgataatgggtgggacgctcctggctttgctaagaaagcgtttcagacaaaaagatgatgggaaatgccccttgaatcctcacagccacctaggaacatatggagtttttacaaacgctgcatttgacccgagtccttaagagacctgtccttttcctggtctcctcattcagcctccatatgatcctgttgtgaacatcaagtttcctgctacactggacttaactataatgcatttgctgcaggtttccataaacacccatgaatcaaagacatggaattaccttagattagctctggaccagcctgttggacccgctctggaccaaccctgtttcctgagtttgggattgtggtacaatctcaaattctcaacctaccaccccttcctgtcccacctcttctcttcctgtaacacaagccacagaagccwggagcaaatgtttctgcagtagtctctgtgctttgactcacctgttacttgaaataccagtgaaccaaagagactggagcatctgactcacaagaagaccagactgtggagaaataaaaatacctctttattttttgattgaaggaaggttttctccactttgttggaaagcaggtggcatctctaattggaagaaattcctgtagcatcttctggagtctccagtggttgctgttgatgaggcctcttggacctctgctctgaggcttccagagagtcctctggatggcaccagaggctgcagaaggccaagaatcaagctagaaggccacatgtcaccgtggaccttcctgccaccagtcactgtccctcaaatgacccaaasaccaatattcaaatgcgtaattaaaagaattttcccc

SEQ ID NO: 512 - DNA, 3183 bp, Homo sapiens
gtttttctaaacagcctgacactgaggggaggcagtgagactgtaagcagtctgggttgggcagaaggcagaaaaccagcagagtcacagaggagatggccaactgccaaatagccatcttgtaccagagattccagagagtggtctttggaatttcccaactcctttgcttcagtgccctgatctctgaactaacaaaccagaaagaagtggcagcatggacttatcattacagcacaaaagcatactcatggaatatttcccrtaaatactgccagaatcgctacacagacttagtggccatccagaataaaaatgaaattgattacctcaataaggtcctaccctactacagctcctactactggattgggatccgaaagaacaataagacatggacatgggtgggaaccaaaaaggctctcaccaacgaggctgagaactgggctgataatgaacctaacaacaaaaggaacaacgaggactgcgtggagatatacatcaagagtccrtcagcccctggcaagtggaatgatgagcactgcttgaagaaaaagcacgcattgtgttacacagcctcctgccaggacatgtcctgcagcaaacaaggagagtgcctcgagaccatcrggaactacacctgctcctgttaccctggattctatgggccagaatgtgaatacgtgagagagtgtggagaacttgagctccctcaacacrtgctcatgaactgcagccaycctctgggaaacttctcttttaactcgcagtgcagcttccactkcactgacgggtaccaagtaaatgggcccagcaagctggaatgcttggcttctggaatctggacaaataagcctccacagtgtttagctgcccagtgcccacccctgaagattcctgaacgaggaaacatgayctgccttcattctgcaaaagcattccagcatcagtctagctgcagcttcagttgtgaagagggatttgcattagttggacyggaagtggtgcaatgcacagcctcgggggtatggacagccccagccccagtgtgtaaagctgtgcagtgtcagcacctggaagcccccartgaaggaaccatggactgtgttcatccgctcactgcttttgcctatggctccagctgtaaatttgagtgccagcccggctacagagtgaggggcttggacrtgctccgctgcattgactctggacactggtctgcacccttgccaacctgtgaggctatttygtgtgagccgctggagagtcctgtccacggaagcatggattgctctccatccttgagagcgtttcagtatgacaccaactgtagcttccgctgtgctgaaggtttcatgctgagaggagccgatatagttcggtgtgataacttgggacagtggacagcaccagccccagtctgtcaagctttgcagtgccaggatctcccagttccaaatgaggcccrggtgaactgctcccaccccttcggtgcctttaggtaccagtcagtctgcagcttcacctgcaatgaaggcttgctcctggtgggagcaagtgtgctacagtgcttggctactggaaactggaattytgttcctccagaatgccaagccattccctgcacacctttgctaagccctcagaatggaacaatgacctgtgttcaacctcttggaagttccagttataaatccacatgtcaattcatctgtgacragggatattctttgtctggaccagaaagattggattgtactcgatcgggacgctggacagactccccaccaatgtgtgaagccatcaagtgcccagaactctttgccccagagcagggcagcctggattgttctgacacycgtggagaattcaatgttggctccacytgycatttctcttgtracaayggctttaagctggaggggcccaataatgtggaatgcacaactkctggaagatggtcagctactccrccaacctgcaaagkcatagcatcacttcctactccagggktgcaatgtccagccctcaccactcctgggcagggaaccatgtactgtaggcatcatccgggramctttggttttaataccacttgttactttggctgcarcgctggattcacactcataggagacagcactctcagctgcagaccttcaggacaatggacagcagtaactccagcatgcagagctgtgaaatgctcagaactacatgttaataagccaatagcgatgaactgctccaacctctggggaaacttcagttatggatcaatctgctctttccattgtctagagggccagttacttaatggctctgcacaaacagcatgccaagagaatggccactggtcamctaccgtgccaacctgccaagatgatgggaaatgccccttgaatcctcacagccacctaggaacatatggagtttttacaaacgctgcatttgacccgagtccttaagagacctgtccttttcctggtctcctcattcagcctccatatgatcctgttgtgaacatcaagtttcctgctacactggacttaactataatgcatttgctgcaggtttccataaacacccatgaatcaaagacatggaattaccttagattagctctggaccagcctgttggacccgctctggaccaaccctgtttcctgagtttgggattgtggtacaatctcaaattctcaacctaccaccccttcctgtcccacctcttctcttcctgtaacacaagccacagaagccwggagcaaatgtttctgcagtagtctctgtgctttgactcacctgttacttgaaataccagtgaaccaaagagactggagcatctgactcacaagaagaccagactgtggagaaataaaaatacctctttattttttgattgaaggaaggttttctccactttgttggaaagcaggtggcatctctaattggaagaaattcctgtagcatcttctggagtctccagtggttgctgttgatgaggcctcttggacctctgctctgaggcttccagagagtcctctggatggcaccagaggctgcagaaggccaagaatcaagctagaaggccacatgtcaccgtggaccttcctgccaccagtcactgtccctcaaatgacccaaasaccaatattcaaatgcgtaattaaaagaattttcccc

SEQ ID NO: 513 - DNA, 3199 bp, Homo sapiens
gtttttctaaacagcctgacactgaggggaggcagtgagactgtaagcagtctgggttgggcagaaggcagaaaaccagcagagtcacagaggagatggccaactgccaaatagccatcttgtaccagagattccagagagtggtctttggaatttcccaactcctttgcttcagtgccctgatctctgaactaacaaaccagaaagaagtggcagcatggacttatcattacagcacaaaagcatactcatggaatatttcccrtaaatactgccagaatcgctacacagacttagtggccatccagaataaaaatgaaattgattacctcaataaggtcctaccctactacagctcctactactggattgggatccgaaagaacaataagacatggacatgggtgggaaccaaaaaggctctcaccaacgaggctgagaactgggctgataatgaacctaacaacaaaaggaacaacgaggactgcgtggagatatacatcaagagtccrtcagcccctggcaagtggaatgatgagcactgcttgaagaaaaagcacgcattgtgttacacagcctcctgccaggacatgtcctgcagcaaacaaggagagtgcctcgagaccatcrggaactacacctgctcctgttaccctggattctatgggccagaatgtgaatacgtgagagagtgtggagaacttgagctccctcaacacrtgctcatgaactgcagccaycctctgggaaacttctcttttaactcgcagtgcagcttccactkcactgacgggtaccaagtaaatgggcccagcaagctggaatgcttggcttctggaatctggacaaataagcctccacagtgtttagctgcccagtgcccacccctgaagattcctgaacgaggaaacatgayctgccttcattctgcaaaagcattccagcatcagtctagctgcagcttcagttgtgaagagggatttgcattagttggacyggaagtggtgcaatgcacagcctcgggggtatggacagccccagccccagtgtgtaaagctgtgcagtgtcagcacctggaagcccccartgaaggaaccatggactgtgttcatccgctcactgcttttgcctatggctccagctgtaaatttgagtgccagcccggctacagagtgaggggcttggacrtgctccgctgcattgactctggacactggtctgcacccttgccaacctgtgaggctatttygtgtgagccgctggagagtcctgtccacggaagcatggattgctctccatccttgagagcgtttcagtatgacaccaactgtagcttccgctgtgctgaaggtttcatgctgagaggagccgatatagttcggtgtgataacttgggacagtggacagcaccagccccagtctgtcaagctttgcagtgccaggatctcccagttccaaatgaggcccrggtgaactgctcccaccccttcggtgcctttaggtaccagtcagtctgcagcttcacctgcaatgaaggcttgctcctggtgggagcaagtgtgctacagtgcttggctactggaaactggaattytgttcctccagaatgccaagccattccctgcacacctttgctaagccctcagaatggaacaatgacctgtgttcaacctcttggaagttccagttataaatccacatgtcaattcatctgtgacragggatattctttgtctggaccagaaagattggattgtactcgatcgggacgctggacagactccccaccaatgtgtgaagccatcaagtgcccagaactctttgccccagagcagggcagcctggattgttctgacacycgtggagaattcaatgttggctccacytgycatttctcttgtracaayggctttaagctggaggggcccaataatgtggaatgcacaactkctggaagatggtcagctactccrccaacctgcaaagkcatagcatcacttcctactccagggktgcaatgtccagccctcaccactcctgggcagggaaccatgtactgtaggcatcatccgggramctttggttttaataccacttgttactttggctgcarcgctggattcacactcataggagacagcactctcagctgcagaccttcaggacaatggacagcagtaactccagcatgcagagctgtgaaatgctcagaactacatgttaataagccaatagcgatgaactgctccaacctctggggaaacttcagttatggatcaatctgctctttccattgtctagagggccagttacttaatggctctgcacaaacagcatgccaagagaatggccactggtcamctaccgtgccaacctgccaagcaggaccattgacyatccaggaagccctgacttactttggtggagcggtggcttctacrataggtctgataatgggtgggacgctcctggctttgctaagaaagcgtttcagacaaaaagatgatgggaaatgccccttgaatcctcacagccacctaggaacatatggagtttttacaaacgctgcatttgacccgagtccttaaggtttccataaacacccatgaatcaaagacatggaattaccttagattagctctggaccagcctgttggacccgctctggaccaaccctgtttcctgagtttgggattgtggtacaatctcaaattctcaacctaccaccccttcctgtcccacctcttctcttcctgtaacacaagccacagaagccwggagcaaatgtttctgcagtagtctctgtgctttgactcacctgttacttgaaataccagtgaaccaaagagactggagcatctgactcacaagaagaccagactgtggagaaataaaaatacctctttattttttgattgaaggaaggttttctccactttgttggaaagcaggtggcatctctaattggaagaaattcctgtagcatcttctggagtctccagtggttgctgttgatgaggcctcttggacctctgctctgaggcttccagagagtcctctggatggcaccagaggctgcagaaggccaagaatcaagctagaaggccacatgtcaccgtggaccttcctgccaccagtcactgtccctcaaatgacccaaasaccaatattcaaatgcgtaattaaaagaattttcccc

SEQ ID NO: 514 - DNA, 3303 bp, Homo sapiens
gtttttctaaacagcctgacactgaggggaggcagtgagactgtaagcagtctgggttgggcagaaggcagaaaaccagcagagtcacagaggagatggccaactgccaaatagccatcttgtaccagagattccagagagtggtctttggaatttcccaactcctttgcttcagtgccctgatctctgaactaacaaaccagaaagaagtggcagcatggacttatcattacagcacaaaagcatactcatggaatatttcccrtaaatactgccagaatcgctacacagacttagtggccatccagaataaaaatgaaattgattacctcaataaggtcctaccctactacagctcctactactggattgggatccgaaagaacaataagacatggacatgggtgggaaccaaaaaggctctcaccaacgaggctgagaactgggctgataatgaacctaacaacaaaaggaacaacgaggactgcgtggagatatacatcaagagtccrtcagcccctggcaagtggaatgatgagcactgcttgaagaaaaagcacgcattgtgttacacagcctcctgccaggacatgtcctgcagcaaacaaggagagtgcctcgagaccatcrggaactacacctgctcctgttaccctggattctatgggccagaatgtgaatacgtgagagagtgtggagaacttgagctccctcaacacrtgctcatgaactgcagccaycctctgggaaacttctcttttaactcgcagtgcagcttccactkcactgacgggtaccaagtaaatgggcccagcaagctggaatgcttggcttctggaatctggacaaataagcctccacagtgtttagctgcccagtgcccacccctgaagattcctgaacgaggaaacatgayctgccttcattctgcaaaagcattccagcatcagtctagctgcagcttcagttgtgaagagggatttgcattagttggacyggaagtggtgcaatgcacagcctcgggggtatggacagccccagccccagtgtgtaaagctgtgcagtgtcagcacctggaagcccccartgaaggaaccatggactgtgttcatccgctcactgcttttgcctatggctccagctgtaaatttgagtgccagcccggctacagagtgaggggcttggacrtgctccgctgcattgactctggacactggtctgcacccttgccaacctgtgaggctatttygtgtgagccgctggagagtcctgtccacggaagcatggattgctctccatccttgagagcgtttcagtatgacaccaactgtagcttccgctgtgctgaaggtttcatgctgagaggagccgatatagttcggtgtgataacttgggacagtggacagcaccagccccagtctgtcaagctttgcagtgccaggatctcccagttccaaatgaggcccrggtgaactgctcccaccccttcggtgcctttaggtaccagtcagtctgcagcttcacctgcaatgaaggcttgctcctggtgggagcaagtgtgctacagtgcttggctactggaaactggaattytgttcctccagaatgccaagccattccctgcacacctttgctaagccctcagaatggaacaatgacctgtgttcaacctcttggaagttccagttataaatccacatgtcaattcatctgtgacragggatattctttgtctggaccagaaagattggattgtactcgatcgggacgctggacagactccccaccaatgtgtgaagccatcaagtgcccagaactctttgccccagagcagggcagcctggattgttctgacacycgtggagaattcaatgttggctccacytgycatttctcttgtracaayggctttaagctggaggggcccaataatgtggaatgcacaactkctggaagatggtcagctactccrccaacctgcaaagkcatagcatcacttcctactccagggktgcaatgtccagccctcaccactcctgggcagggaaccatgtactgtaggcatcatccgggramctttggttttaataccacttgttactttggctgcarcgctggattcacactcataggagacagcactctcagctgcagaccttcaggacaatggacagcagtaactccagcatgcagagctgtgaaatgctcagaactacatgttaataagccaatagcgatgaactgctccaacctctggggaaacttcagttatggatcaatctgctctttccattgtctagagggccagttacttaatggctctgcacaaacagcatgccaagagaatggccactggtcamctaccgtgccaacctgccaagcaggaccattgacyatccaggaagccctgacttactttggtggagcggtggcttctacrataggtctgataatgggtgggacgctcctggctttgctaagaaagcgtttcagacaaaaagatgatgggaaatgccccttgaatcctcacagccacctaggaacatatggagtttttacaaacgctgcatttgacccgagtccttaagagacctgtccttttcctggtctcctcattcagcctccatatgatcctgttgtgaacatcaagtttcctgctacactggacttaactataatgcatttgctgcaggtttccataaacacccatgaatcaaagacatggaattaccttagattagctctggaccagcctgttggacccgctctggaccaaccctgtttcctgagtttgggattgtggtacaatctcaaattctcaacctaccaccccttcctgtcccacctcttctcttcctgtaacacaagccacagaagccwggagcaaatgtttctgcagtagtctctgtgctttgactcacctgttacttgaaataccagtgaaccaaagagactggagcatctgactcacaagaagaccagactgtggagaaataaaaatacctctttattttttgattgaaggaaggttttctccactttgttggaaagcaggtggcatctctaattggaagaaattcctgtagcatcttctggagtctccagtggttgctgttgatgaggcctcttggacctctgctctgaggcttccagagagtcctctggatggcaccagaggctgcagaaggccaagaatcaagctagaaggccacatgtcaccgtggaccttcctgccaccagtcactgtccctcaaatgacccaaasaccaatattcaaatgcgtaattaaaagaattttcccc

SEQ ID NO: 515 - DNA, 7009 bp, Homo sapiens
gaaaaagcggagggagtgagagycagaggctgctgctgccgtttgcaagaactgcaggggaggaggacgctgccacccacagcctctagagctcattgcagctgggacagcccggagtgtggttagcagctcggcaagcgctgcccaggtcctggggtggtggcagccagcgggagcaggaaaggaagcatgttcccaggctgcccacgcctctgggtcctggtggtcttgrgcaccagctgggtaggctgggggagccaagggacagaagcggcacagctaaggcagttctacgtggctgctcagggcatcagttggagctaccgacctgagcccacaaactcaagtttgaatctttctgtaacttcctttaagaaaattgtctacagagagtatgaaccatattttaagaaagaaaaaccacartctaccatttcaggacttcttgggcctactttatatgctgaagtcggagacatcataaaagttcactttaaaaataaggcasataagcccttgagcatccatcctcaaggaattaggtacagtaaattatcagaaggtgcttcttaccttgaccacacattccctgcrgagaagatggacgacgctgtggctccaggccgakaatacacctatgaatggagtatcagtgaggacagtggacccacccatgatgaccctccatgcctcacacacatctattactcccatgaaaatctgatcgaggatttcaactckgggctgattggscccctgcttatctgtaaaaaagggaccctaactgagggtgggacacagaagacgtttgacaagcaaatcgtgctactatttgctgtgtttgatgaaagcaagagctggagccagtcatcatccctaatgtacacagtcaatggatatgtgaatgggacaatgccagatataacagtttgtgyccatgaccacatcagctggcatytgctgggaatgagctcggggccagaattattctccattcatttcaayggccaggtcctggagcagaaccatcataaggtctcagccatcacccttgtcagtgctacatccactaccgcaaatatgactgtgggcccagagggaaagtggatcatatcttctctcaccccaaaacatttgcaagctgggatgcaggcttacattgacattaaaaactgcccaaagaaaaccrsgaatcttaagwaaataactcgtgagcagaggcggcacatgaagaggtgggaatacttcattgctgcagaggaagtcatttgggactatgcacctgtaataccagcgaatatggacaaaaaatacaggtctcagcatttggataatttctcaaaccaaattggaaaacattataagaaagttatgtacacacagtacgaagatgagtccttcaccaaacatacagtgaatcccaataygaargaagatgggattttgggtcctattatcagagcccaggtcagagacacactcaaaatcgtgttcaaaaatatggccagccgcccctatagcatttaccctcatggagtgaccttctcgccttatgaagatgaagtcaaytcttctttcacctcaggcaggaacaacaccatgatcagagcagttcaaccaggggaaacctatacttataagtggaacatcttagagtttgatgaacccacagaaaatgatgcccagkgcttaacaagaccatactacagtgacgtggacatcatgaragacatcgcctctgggctaataggactacttctaatctgtaagagcagatccctggacaggyraggaatacagagggcagcagacatcgaacagcaggctgtgtttgctgtgtttgatgagaacaaaagctggtmccttgaggacaacatcaacaagttttgtgaaaatcctgatgargtgaaacgtgatgaccccaagttttatgaatcaaacatcatgagcactatcaatggctatgtgcctgagagcataactactcttggattctgctttgatgacactgtccagtggcacttcygtagtgtggggacccagaatgaaattttgaccatccacttcactgggcactcattcatctatggaaagaggcatgaggacacyttgacmctcttccccatgcgtggagaatctgtgacggtcacaatggataatgttggaacttggatgttaacttccatgaattctagtccaagaagcaaaaagctgaggctgaaattcagggatgttaaatgtatcccagatgatgatgaagactcatatgagatttttgaacctccagaatctacagtcatggctacacggaaaatgcatgatcgtttagaacctgaagatgaagagagtgatgctgactatgattaccagaacagactggctgcagcattaggaatyaggtcattcygaaactcatcattgaaycaggaagaagaagagttcaatcttactgccctagctctggagaatggcactgarttcgtttcttcraacacagatataattgttggttcaaattattcttccccaagkaatattagtaagttcactgtcaataaccttgcagaacctcagaaagccccttctcacyaacaagccaccacagctggttccycactgagacacctcattggcaagamctcagttctcaattcttccacagcagagcattccagcccatattctgaagaccctatagaggatcctctacagccagatgtcacagggatacgtctactttcacttggtgctggagaattcaraagtcaagaacatgctaagcrtaagggacccaaggtagaaagagatcaagcagcaaagcacaggttctcctggatgaaattactagcacataaagttgggagacacctaagccaagacactggttctccttccggaatgaggccctgggaggaccttcctagccaagacwctggttctccttccagaatgaggccctggraggaccctcctagtgatctgttactcttaaaacaaagtaactcatctaagattttggttgggagatggcatttggcttctgagaaaggtagctatgaaataatccaagatactgatgaagacacagctgttarcaattggctgatcagcccccagaatgcctcacktgcttggggagaaagcacccctcttgccaacaagcctggaaagcagagtggccacccaaagtttcctagagttagacataaatctctacaagtaagacaggatggaggaaagagtagactgaagaaaagccagtttctcattaagacaygaaaaaagaaaaaagagaagcacacacaccatgctcctttatctccgaggacctttcaccctctaagaagtgaagcctacaacacattttcagaaagaagacttaagcattcgttggtgcttcataaatccaatgaaacatctcttcccacagacctcaatcagacrttgccctctatggattttggctggatagcctcacttcctgaccataatcagaattcctcaaatgacactggtcaggcaagctgtcctccaggtctttatcagacagtgcccccagaggaacactatcaaacattccccattcaagaccctgatcaaatgcactctacttcagaccccagtcasagatcctcttctccagagctcagtgaaatgcttgagtatgacygaagtcacaagtccttccccacmgatataagtcaaatgtccccttcctcagaacatgaagtctggcagacagtcatctctccagacctcagccaggtgacyctctctccagaactcagccagacaaacctctctccagacctcagccacacgactctctctccagaactcattcagagaaacctttccccagccctcggtcagatgcccatttctccagacctcagccatacaaccctttctccagacctcagccatacaaccctttctttagacctcagccagacaaacctctctccagaactcagtcagacaaacctttcyccagccctcggtcagatgcccctttctccagacctcagccatacaaccmtttctctagacttcagccagacaaacctctctccagaactcagccatatgactctctctccagaactcagtcagacaaacctttccccagccctyggtcagatgcccatttctccagacctcagccrtacaaccctttctctagacttcagccagacaaacctctctccagaactcagtcaaacaaacctttccccagccctcggtcagatgcccctttctccagaccccagccatacaacyctttctctagacctcagccagacaaacctctctccagaactcagtcagacaaacctttccccagacctcagtgagatgcccctctttgcagatytcagtcaaattccccttaccycagacctcgaccagatgacactttctccagaccttggtgagacagatctttccccaaactttggtcagatgtccctttccccagacctcagccaggtgactctctctccagacatcagtgacaccacccttctcccggatctcagccagatatcacctcctccagaccttgatcagatattctacccttctgaatctagtcagtcattgcttcttcaagaatttaatgagtcttttccttatccagaccttggtcagatgccatctccttcatctcctactctcaatgatacttttctatcaaaggaatttaatccactggttatagtgggcctcagtaaagatggtacagattacattgagatcattccaaaggaagmggtccagagcagtgaagatgactatgctgaaattgattatgtgccctatgatgacccctacaaaactgatgttaggacaaacatcaactcctccagagatcctgacaacattgcagcatggtacctccgcagcaacaatggaaacagaagaaattattacattgctgctgaagaaatatcctgggattattcagaatttgtacaaagggaaacagatattgaagactctgatgatattccagaagataccacatataagaaagtagtttttcgaaagtacctcgacagcacttttaccaaacgtgatcctygaggggagtatgaagagcatctcggaattcttggtcctattatcagagctgaagtggatgatgttatccaagttcgttttaaaaatttagcatccagaccgtattctctacatgcccatggrctttcctatgaaaaatcatcagagggaaagasttatgaagatgactctcctgaatggtttaaggaagataatgctgttcagccaaatagcagttatacctacgtatggcatgccactgagcgatcagggccagaaagtcctggctctgcctgtcgggcttgggcctrctactcagctgtgaacccagaaaaagatattcactcaggcttgataggtcccctcstaatctgccaaaaaggaatactacataaggacagcaacatgcctrtggacatgagagaatttgtcttactatttatgacctttgatgaaaagaagagctggtactatgaaaagaagtcccgaagttcttggagactcacatcctcagaaatgaaaaaatcccatgagtttcacgccattaatgggatgatctacagcttgcctggcctgaaaatrtatgagcaagagtgggtgaggttacacctgctgaacataggcggctcccaagacattcacrtggttcactttcacggccagaccttgctggaaaatggcaataaacagcaccagttaggggtctggccccttctgcctggttcatttaaaactcttgaaatgaaggcatcaaaacctggctggtgrctcctaaacacagaggttggagaaaaccagagagcagggatgcaaacgccatttcttatcatggacagagactgtaggatgccaatgggactaagcactggtatcatatctgattcacagatcaaggcttcagagtttctgggttactgggagcccagattagcaagattaaacaatggtggatcttataatgcttggagtgtagaaaaacttgcagcagaatttgcctctaaaccttggatccaggtggacatgcaaaaggaagtcataatcacagggatccagacccaaggtgccaaacactacctgaagtcctgctataccacagagttctatgtagcttacagttccaaccagatcaactggcagatcttcaaagggaacagcacaaggaatgtgatgtattttaatggcaattcagatgcctctacaataaaagagaatcagtttgacccacctattgtggctagatatattaggatctctccaactcgagcctataacagacctacccttcgattggaactgcaaggttgtgaggtaaatggatgttccacacccctgggtatggaaaatggaaagatagaaaacaagcaaatcacagcttcttcgtttaagaaatcttggtggggagattactgggaacccttccgtgccygtctraatgcccagggacgtgtgaatgcctggcaagccaaggcaaacaacaataagcagtggctagaaattgatctactcaagatcaagaagataacggcaattataacacagggctgcaagtctctgtcctctgaaaygtatgtaaagagctataccatccactacagtgagcagggagtggaatggaaaccatacaggctgaaatcctccatggtggacaagatttttgaaggaaatactaataccaaaggacatgtgaagaactttttcaaccccccaatcatttccaggtttatccgtgtcattcctaaaacatggaatcaaagtattgcacttcgcctggaactctttggctgtgrtatttactagaattgaacattcaaaaacccctggaagagactctttaagacctcaaaccatttagaatgggcaatgtattttacgctgtgttaaatgttaacagttttccactatttctctttcttttctattagtgaataaaattttatacaag

SEQ ID NO: 516 - DNA, 1790 bp, Homo sapiens
agacagagggagcagtgaatagcaatagggtgtttccaccatggtcttcactcaggccccggctgaaatcatgggccacctccrgatacgcagcctcctggcccggcagtgcctggcagagtttctgggtgtgtttgtactcatgctcctcacccaaggagctgtggcccaggctgtcaccagtggagaaaccaaaggcaacttcttcaccatgtttctggctggctctctggccgttacgatagccatctacgtgggtggtaacgtctcaggggcccacctgaatccagccttctccctggccatgtgcatcgttggacgcctcccctgggtcaagctccccatttacatcttggtgcagttgctgtctgctttctgtgcttcgggagccacctatgttctctacyaygatgccctacagaactatacaggtgggaacctgacagtgactggccccaaggagacagcctccatttttgccacctatcctgccccctatctgtccctgaacaatggcttcctggatcaggttctgggcacygggatgctgattgtggggctcttggccatcctggacagacggaacaagggagtccctgcgggtctggagcctgtggtggtggggatgctgatcctggccctcgggttatccatgggtgccaactgcgggattccactcaaccctgcccgggacctgggcccacgtctcttcacctacgtggctggctggggtcctgaagtcttcagtgctggtaatggctggtggtgggtgcctgtggtggcccctctggtgggggccaccgttggcacagccacttaccagctgttggtggctctgcaccaccctgagggcccagagccagctcaggatctggtgtctgctcaacacaaagcctcagagttggaaactcctgcctcagctcagatgctggagtgtaagctatgattaggacaaccctcacttcactcatggaccctggagccagccactgaccccgcctgggaacaacagwcattcttcctctttgttaatgtgccagaacctgggaggcttctctgtttatctgtttggcatcccttcctcctaaactaagaaggatcctggacagggagaagtggaggaggataaggtaccaggactcaggcttctcatcccctcctcccgcaaagcggttttctgaccctcagggcctctcggaatgtagttgctcgaggtaaccgctagagggtgcgcacctggatgctggatggggacggctgcgggcatctgcagggtggagggggccaccatccagtgtagggcacaaccctggggactgccctccatagcctgtcccgactgccgactcctagctctcatcgcctcggcgcctcccaccttcaccctctcggggatgcctccccaagagggtagttaggggtggggaagccgcctccacccagggggcgtggtgggggcggagggaaggagggcggcggggcacagagacagagagcaaggctgtgaaactgaggcaccgttcctagacatctcggtgctgtgtcgttcattcaaggagagttgagatacagtgaaatgagccagggcgaggagggagggtgaaggaacggagggcgggcggctccgaggagcgagagtcgggctgagggcaacctggcgccagggaaaattctggttattcaccacttctacagctctcctgccgctccctgcagaggatgctcgttttgcagagaaggcagtgttcctctattcccttcttccgaattaaaaataccccctcagagcg

SEQ ID NO: 517 - DNA, 2265 bp, Homo sapiens
agacagagggagcagtgaatagcaatagggtgtttccaccatggtcttcactcaggccccggctgaaatcatgggccacctccrgatacgcagcctcctggcccggcagtgcctggcagagtttctgggtgtgtttgtactcatgctcctcacccaaggagctgtggcccaggctgtcaccagtggagaaaccaaaggcaacttcttcaccatgtttctggctggctctctggccgttacgatagccatctacgtgggtggtaacgtctcaggggcccacctgaatccagccttctccctggccatgtgcatcgttggacgcctcccctgggtcaagctccccatttacatcttggtgcagttgctgtctgctttctgtgcttcgggagccacctatgttctctacyaygatgccctacagaactatacaggtgggaacctgacagtgactggccccaaggagacagcctccatttttgccacctatcctgccccctatctgtccctgaacaatggcttcctggatcaggttctgggcacygggatgctgattgtggggctcttggccatcctggacagacggaacaagggagtccctgcgggtctggagcctgtggtggtggggatgctgatcctggccctcgggttatccatgggtgccaactgcgggattccactcaaccctgcccgggacctgggcccacgtctcttcacctacgtggctggctggggtcctgaagtcttcaggtgggagacagactctcctggtgctggcctccactcaccttcctctgctaagggctctgtccctgggtccacagcactctgcctttaaaatagctctcttggcttcttaggacagtgttctttctccaagtcatattctccccctttctcccttgcttccctcccaacttttcactgaaacagtaagatttagaggttgtgttcttaggcatgccacattacttccatgcacattagtgacttcatcagcaaaattaatatattcagataattccctaaggcaagaggctggaccaagctctcctggggttccctcttctaaatactatgctttggtgacaaggcaatcctcttcctggtgtctaccaccctgggaacaactttagggcactctcttgttactgccccccgtccttggagaggggaaggctaagggagtcactcctgataccttcccactgtccttcttttgcagtgctggtaatggctggtggtgggtgcctgtggtggcccctctggtgggggccaccgttggcacagccacttaccagctgttggtggctctgcaccaccctgagggcccagagccagctcaggatctggtgtctgctcaacacaaagcctcagagttggaaactcctgcctcagctcagatgctggagtgtaagctatgattaggacaaccctcacttcactcatggaccctggagccagccactgaccccgcctgggaacaacagwcattcttcctctttgttaatgtgccagaacctgggaggcttctctgtttatctgtttggcatcccttcctcctaaactaagaaggatcctggacagggagaagtggaggaggataaggtaccaggactcaggcttctcatcccctcctcccgcaaagcggttttctgaccctcagggcctctcggaatgtagttgctcgaggtaaccgctagagggtgcgcacctggatgctggatggggacggctgcgggcatctgcagggtggagggggccaccatccagtgtagggcacaaccctggggactgccctccatagcctgtcccgactgccgactcctagctctcatcgcctcggcgcctcccaccttcaccctctcggggatgcctccccaagagggtagttaggggtggggaagccgcctccacccagggggcgtggtgggggcggagggaaggagggcggcggggcacagagacagagagcaaggctgtgaaactgaggcaccgttcctagacatctcggtgctgtgtcgttcattcaaggagagttgagatacagtgaaatgagccagggcgaggagggagggtgaaggaacggagggcgggcggctccgaggagcgagagtcgggctgagggcaacctggcgccagggaaaattctggttattcaccacttctacagctctcctgccgctccctgcagaggatgctcgttttgcagagaaggcagtgttcctctattcccttcttccgaattaaaaataccccctcagagcg

SEQ ID NO: 518 - DNA, 1651 bp, Homo sapiens
cagtgaatagcaatagggtgtttccaccatggtcttcactcaggccccggctgaaatcatgggccacctccrgatacgcagcctcctggcccggcagtgcctggcagagtttctgggtgtgtttgtactcatggggcccacctgaatccagccttctccctggccatgtgcatcgttggacgcctcccctgggtcaagctccccatttacatcttggtgcagttgctgtctgctttctgtgcttcgggagccacctatgttctctacyaygatgccctacagaactatacaggtgggaacctgacagtgactggccccaaggagacagcctccatttttgccacctatcctgccccctatctgtccctgaacaatggcttcctggatcaggttctgggcacygggatgctgattgtggggctcttggccatcctggacagacggaacaagggagtccctgcgggtctggagcctgtggtggtggggatgctgatcctggccctcgggttatccatgggtgccaactgcgggattccactcaaccctgcccgggacctgggcccacgtctcttcacctacgtggctggctggggtcctgaagtcttcagtgctggtaatggctggtggtgggtgcctgtggtggcccctctggtgggggccaccgttggcacagccacttaccagctgttggtggctctgcaccaccctgagggcccagagccagctcaggatctggtgtctgctcaacacaaagcctcagagttggaaactcctgcctcagctcagatgctggagtgtaagctatgattaggacaaccctcacttcactcatggaccctggagccagccactgaccccgcctgggaacaacagwcattcttcctctttgttaatgtgccagaacctgggaggcttctctgtttatctgtttggcatcccttcctcctaaactaagaaggatcctggacagggagaagtggaggaggataaggtaccaggactcaggcttctcatcccctcctcccgcaaagcggttttctgaccctcagggcctctcggaatgtagttgctcgaggtaaccgctagagggtgcgcacctggatgctggatggggacggctgcgggcatctgcagggtggagggggccaccatccagtgtagggcacaaccctggggactgccctccatagcctgtcccgactgccgactcctagctctcatcgcctcggcgcctcccaccttcaccctctcggggatgcctccccaagagggtagttaggggtggggaagccgcctccacccagggggcgtggtgggggcggagggaaggagggcggcggggcacagagacagagagcaaggctgtgaaactgaggcaccgttcctagacatctcggtgctgtgtcgttcattcaaggagagttgagatacagtgaaatgagccagggcgaggagggagggtgaaggaacggagggcgggcggctccgaggagcgagagtcgggctgagggcaacctggcgccagggaaaattctggttattcaccacttctacagctctcctgccgctccctgcagaggatgctcgttttgcagagaaggcagtgttcctctattcccttcttccgaattaaaaataccccctcagagcg

SEQ ID NO: 519 - DNA, 4726 bp, Homo sapiens
ccgaaactgacacaaagtagcgggccgaggccccgggggagcggggccgcagctgggggggcgggagcccgtggggagccgagccgagcgccccccgccccagcccccggcatgggcagtacggggccgccggggcgggcgccgagcgctgagcgctgagggtctcccatgggattgctgggatcttgctgggtgagatggcagtgtgygcaaaaaagcgccccccagaagaagaaaggagggcgcgggsyaatgaccgagaatacaatgagaaattccagtatgcgagtaactgcatcaagacctccaagtacaatattctcaccttcctgcctgtcaacctctttgagcagttccaggaagttgccaacacttacttcctgttcctcctcattctgcagttgatcccccagatctcttccctgtcctggttcaccaccattgtgcctttggttcttgtcctcaccatcacagctgttaaagatgccactgatgactatttccgccacaagagcgataaccaggtgaataaccgccagtctcrggtgctgatcaayggaatcctccagcaggagcagtggatgaatgtctgtgttggtgatattatcaagctagaaaataaccagtttgtggcggctgtagactggaccttaagcagtggaattcttgtctcctgttcaggtgaagtgatctgtgaacctcccaacaacaaactggacaaattcagcggaaccctstactggaaggaaaataagttccctctgagcaaccagaacatgctgctgcggggctgtgtgctgcgaaacaccgagtggtgcttcgggctggtcatctttgcaggtcccgacactaagctgatgcaaaacagcggcagaacaaagttcaaaagaacgagtatcgatcgcctaatgaataccctggtgctctggatttttggattcctggtttgcatgggggtgatcctggccattggcaatgccatctgggagcacgaggtggggatgcgtttccaggtctacctgccgtgggatgaggcagtggacagtgccttcttctctggcttcctctccttctggtcctacatcatcatcctcaacaccgttgtgcccatttcactctatgtcagtgtggaggtcatccgtctgggccacagctacttcatcaactgggataagaagatgttctgcatgaagaagcggacgcctgcagaagcccgcaccaccaccctaaaygaggagctgggccaggtggagtacatcttctccgacaagacgggcaccctcacccagaacatcatggttttcaacaagtgctccatcaatggccacagctatggtgatgtgtttgacgtcctgggacacaaagctgaattgggagagaggcctgaacctgttgacttctccttcaatcctctggctgacaagaagttcttattttgggaccccagcctgctggaggctgtcaagatcggggacccccacacgcatgagttcttccgcctcctttccctgtgtcatactgtcatgtcagaagaaaagaacgaaggagagctgtactacaaagctcagtccccagatgagggggccctggtcaccgcagccaggaactttggttttgttttccgctctcgcacccccaaaacaatcaccgtccatgagatgggcacagccatcacctaccagctgctggccatcctggacttcaacaacatccgcaagcggatgtcggtcatagkgcggaatccagaggggaagatccgactctactgcaaaggggctgacactatcctactggacagactgcaccactccactcaagagctgctcaacaccaccatggaccaccttaatgagtacgcaggggaagggctgaggaccctggtgctggcctacaaggatctggatgaagagtactaygaggagtgggctgagcgacgcctccaggccagcctggcccaggacagccgggaggacaggctggctagcatctatgaggaggttgagaacaacatgatgctgctgggtgcaacggccattgaggacaaacttcagcaaggggttccagagaccattgccctcctgacactggccaacatcaagatttgggtgctaaccggagacaagcaagagacggctgtgaacatcggctattcctgcaagatgctgacggatgacatgactgaggttttcatagtcactggccatactgtcctggaggtgcgggaggagctcaggaaagcccgggagaagatgatggactcatcccgctcygtaggcaacggcttcacctatcaggacaagctttcttcttccaagctaacttctgtcctggaggccgttgctggggagtacgccctggtcataaatggtcacagcctggcccacgcactggaggcagacatggagctggagtttctggagacagcgtgtgcctgcaaagctgtcatctgctgccgggtgacccccttgcagaaggcacaggtggtagaactggtcaagaagtacaagaaggctgtgacgcttgccattggagacggagccaatgatgtcagcatgatcaaaacggctcacattggtgtggggatcagtgggcaggaagggatccaggctgtcttggcctccgattactccttctcccagttcaagttcctgcagcgcctcctgctggtgcatgggcgctggtcctacctgcgaatgtgcaagtttctttgctatttcttctacaaaaactttgctttcaccatggtccacttctggtttggcttcttctgtggcttctcagcccagaccgtctatgaccagtatttcatcaccctgtataacatcgtgtacacctccctgccagtcctggctatgggggtctttgatcaggatgtccccgagcagcggagcatggagtaccctaagctgtatgagccgggccagctgaaccttctcttcaacaagcgggagttcttcatctgcatcgcccagggcatctacacctccgtgctcatgttcttcattccctatggggtgtttgctgatgccacccgggatgatggcactcagctggctgactaccagtcctttgcagtcactgtggccacatccttggtcattgtggttagcgtgcagattgggctcgacacaggctactggacggccatcaaccacttcttcatctggggaagccttgctgtttactttgccatcctctttgccatgcacagcaatgggctcttcgacatgtttcccaaccagttccggtttgtggggaatgcccagaacaccttggcccagcccacggtgtggctgaccattgtgctcaccacrgtcgtctgcatcatgcccgtggttgccttccgattcctcaggctcaacctgaagccggatctctccgacacggtccgctacacacagctcgtgaggaagaagcagaaggcccagcaccgctgcatgcggcgggttggccgcactggctcccggcgctccggctatgccttctcccatcaggagggcttcggggagctcatcatgtctggcaagaacatgcggctgagctctctcgcgctctccagcttcaccacccgctccagctccagctggattgagagcctgcgcaggaagaagagtgacagtgccagtagccccagtggcggtgccgacaagcccctcaagggctgaaggccgaggatggatgccctgtgccagtgaccagagcacccagggctggccagtcactgagggaacagygtctcggaactgctggtcctcattccttgcttcccgtccccccggtagactctgtcctgctggtcccaccacacatggctgggacatctgttcccagctgtaggcccttccaccagctggggagctagagggagcaggyccaagggcagagcagaggctgaggcacggggagccagccccactcggggaccagaagtggaaccaaaaacaagaaaaaactgtgagagattgtgtctgcccctgccctgcctgggacccacagggagactataatctccttatttttttactcctactccccagaggggccctagtgcctctgttcctgaattacataagaatgtaccatgccgggaagccagagacctgcaggggcctcggcccctcacatcgtgtatgtctctccttgatttgtgttgtgtccagtttggttttgtctttttttatttggcaagtggaggaggcttttatgtgacttttatgttgtggttggtgtcttaactctcctgggaaaaggaggctggcacacactgggatgccgcagcctggccggctgtggggtggtttgggaggatccatgtcggctctgcctgcagtgaccagtgctctgtggggcagaggagctgaccagggagggaggtacccatgagcagagggtagtgggagagtgtaaaggagggtttggtcctgtctgcttcctcaccttgagagtaaagtgctgccctctgcccccaacacacacacatatcaattcctggattccttagtcctgctggccttgggctggagcctaggaaagtggcccccaaatccttagtgagctaaagctgggtctgaaatttggtcagtggggaggggtagttttcttttcttttttctttttctttttttctttttttttttgagatggagtctcactcttgtcacctaggcaagagtgcaatggcacaatctcagctcactgcaacctccacctcctgggttcaagcgat

SEQ ID NO: 520 - DNA, 1143 bp, Homo sapiens
atgacggtccccaaggagatgcccgagaagtgggcccgggcccaggcgcctccctcttggagccgaaagaagccctcttgggggacagaagaagaaaggagggcgcgggsyaatgaccgagaatacaatgagaaattccagtatgcgagtaactgcatcaagacctccaagtacaatattctcaccttcctgcctgtcaacctctttgagcagttccaggaagttgccaacacttacttcctgttcctcctcattctgcagttgatcccccagatctcttccctgtcctggttcaccaccattgtgcctttggttcttgtcctcaccatcacagctgttaaagatgccactgatgactatttccgccacaagagcgataaccaggtgaataaccgccagtctcrggtgctgatcaayggaatcctccagcaggagcagtggatgaatgtctgtgttggtgatattatcaagctagaaaataaccagtttgtggcggcggatctcctcctcctttccagcagtgagccccatgggctgtgttacatagagacagcagaacttgatggcgagaccaacatgaaagtacgtcaggcgattccagtcacctcagaattgggagacatcagtaagcttgccaagtttgacggtgaagtgatctgtgaacctcccaacaacaaactggacaaattcagcggaaccctstactggaaggaaaataagttccctctgagcaaccagaacatgctgctgcggggctgtgtgctgcgaaacaccgagtggtgcttcgggctggtcatctttgcaggtcccgacactaagctgatgcaaaacagcggcagaacaaagttcaaaagaacgagtatcgatcgcctaatgaataccctggtgctctggatttttggattcctggtttgcatgggggtgatcctggccattggcaatgccatctgggagcacgaggtggggatgcgtttccaggtctacctgccgtgggatgaggcagtggacagtgccttcttctctggcttcctctccttctggtcctacatcatcatcctcaacaccgttgtgcccatttcactctatgtcagtcctgagtgtggaggtcatccgtctgggccacagctacttcatcaactggga

SEQ ID NO: 521 - DNA, 4753 bp, Homo sapiens
ccgaaactgacacaaagtagcgggccgaggccccgggggagcggggccgcagctgggggggcgggagcccgtggggagccgagccgagcgccccccgccccagcccccggcatgggcagtacggggccgccggggcgggcgccgagcgctgagcgctgagggtctcccatgggattgctgggatcttgctgggtgagatggcagtgtgygcaaaaaagcgccccccagaagaagaaaggagggcgcgggsyaatgaccgagaatacaatgagaaattccagtatgcgagtaactgcatcaagacctccaagtacaatattctcaccttcctgcctgtcaacctctttgagcagttccaggaagttgccaacacttacttcctgttcctcctcattctgcagttgatcccccagatctcttccctgtcctggttcaccaccattgtgcctttggttcttgtcctcaccatcacagctgttaaagatgccactgatgactatttccgccacaagagcgataaccaggtgaataaccgccagtctcrggtgctgatcaayggaatcctccagcaggagcagtggatgaatgtctgtgttggtgatattatcaagctagaaaataaccagtttgtggcggctgtagactggaccttaagcagtggaattcttgtctcctgttcaggtgaagtgatctgtgaacctcccaacaacaaactggacaaattcagcggaaccctstactggaaggaaaataagttccctctgagcaaccagaacatgctgctgcggggctgtgtgctgcgaaacaccgagtggtgcttcgggctggtcatctttgcaggtcccgacactaagctgatgcaaaacagcggcagaacaaagttcaaaagaacgagtatcgatcgcctaatgaataccctggtgctctggatttttggattcctggtttgcatgggggtgatcctggccattggcaatgccatctgggagcacgaggtggggatgcgtttccaggtctacctgccgtgggatgaggcagtggacagtgccttcttctctggcttcctctccttctggtcctacatcatcatcctcaacaccgttgtgcccatttcactctatgtcagtgtggaggtcatccgtctgggccacagctacttcatcaactgggataagaagatgttctgcatgaagaagcggacgcctgcagaagcccgcaccaccaccctaaaygaggagctgggccaggtggagtacatcttctccgacaagacgggcaccctcacccagaacatcatggttttcaacaagtgctccatcaatggccacagctatggtgatgtgtttgacgtcctgggacacaaagctgaattgggagagaggcctgaacctgttgacttctccttcaatcctctggctgacaagaagttcttattttgggaccccagcctgctggaggctgtcaagatcggggacccccacacgcatgagttcttccgcctcctttccctgtgtcatactgtcatgtcagaagaaaagaacgaaggagagctgtactacaaagctcagtccccagatgagggggccctggtcaccgcagccaggaactttggttttgttttccgctctcgcacccccaaaacaatcaccgtccatgagatgggcacagccatcacctaccagctgctggccatcctggacttcaacaacatccgcaagcggatgtcggtcatagkgcggaatccagaggggaagatccgactctactgcaaaggggctgacactatcctactggacagactgcaccactccactcaagagctgctcaacaccaccatggaccaccttaatgtgggtgagtacgcaggggaagggctgaggaccctggtgctggcctacaaggatctggatgaagagtactaygaggagtgggctgagcgacgcctccaggccagcctggcccaggacagccgggaggacaggctggctagcatctatgaggaggttgagaacaacatgatggaatccttgtggtattttcagctgctgggtgcaacggccattgaggacaaacttcagcaaggggttccagagaccattgccctcctgacactggccaacatcaagatttgggtgctaaccggagacaagcaagagacggctgtgaacatcggctattcctgcaagatgctgacggatgacatgactgaggttttcatagtcactggccatactgtcctggaggtgcgggaggagctcaggaaagcccgggagaagatgatggactcatcccgctcygtaggcaacggcttcacctatcaggacaagctttcttcttccaagctaacttctgtcctggaggccgttgctggggagtacgccctggtcataaatggtcacagcctggcccacgcactggaggcagacatggagctggagtttctggagacagcgtgtgcctgcaaagctgtcatctgctgccgggtgacccccttgcagaaggcacaggtggtagaactggtcaagaagtacaagaaggctgtgacgcttgccattggagacggagccaatgatgtcagcatgatcaaaacggctcacattggtgtggggatcagtgggcaggaagggatccaggctgtcttggcctccgattactccttctcccagttcaagttcctgcagcgcctcctgctggtgcatgggcgctggtcctacctgcgaatgtgcaagtttctttgctatttcttctacaaaaactttgctttcaccatggtccacttctggtttggcttcttctgtggcttctcagcccagaccgtctatgaccagtatttcatcaccctgtataacatcgtgtacacctccctgccagtcctggctatgggggtctttgatcaggatgtccccgagcagcggagcatggagtaccctaagctgtatgagccgggccagctgaaccttctcttcaacaagcgggagttcttcatctgcatcgcccagggcatctacacctccgtgctcatgttcttcattccctatggggtgtttgctgatgccacccgggatgatggcactcagctggctgactaccagtcctttgcagtcactgtggccacatccttggtcattgtggttagcgtgcagattgggctcgacacaggctactggacggccatcaaccacttcttcatctggggaagccttgctgtttactttgccatcctctttgccatgcacagcaatgggctcttcgacatgtttcccaaccagttccggtttgtggggaatgcccagaacaccttggcccagcccacggtgtggctgaccattgtgctcaccacrgtcgtctgcatcatgcccgtggttgccttccgattcctcaggctcaacctgaagccggatctctccgacacggtccgctacacacagctcgtgaggaagaagcagaaggcccagcaccgctgcatgcggcgggttggccgcactggctcccggcgctccggctatgccttctcccatcaggagggcttcggggagctcatcatgtctggcaagaacatgcggctgagctctctcgcgctctccagcttcaccacccgctccagctccagctggattgagagcctgcgcaggaagaagagtgacagtgccagtagccccagtggcggtgccgacaagcccctcaagggctgaaggccgaggatggatgccctgtgccagtgaccagagcacccagggctggccagtcactgagggaacagygtctcggaactgctggtcctcattccttgcttcccgtccccccggtagactctgtcctgctggtcccaccacacatggctgggacatctgttcccagctgtaggcccttccaccagctggggagctagagggagcaggyccaagggcagagcagaggctgaggcacggggagccagccccactcggggaccagaagtggaaccaaaaacaagaaaaaactgtgagagattgtgtctgcccctgccctgcctgggacccacagggagactataatctccttatttttttactcctactccccagaggggccctagtgcctctgttcctgaattacataagaatgtaccatgccgggaagccagagacctgcaggggcctcggcccctcacatcgtgtatgtctctccttgatttgtgttgtgtccagtttggttttgtctttttttatttggcaagtggaggaggcttttatgtgacttttatgttgtggttggtgtcttaactctcctgggaaaaggaggctggcacacactgggatgccgcagcctggccggctgtggggtggtttgggaggatccatgtcggctctgcctgcagtgaccagtgctctgtggggcagaggagctgaccagggagggaggtacccatgagcagagggtagtgggagagtgtaaaggagggtttggtcctgtctgcttcctcaccttgagagtaaagtgctgccctctgcccccaacacacacacatatcaattcctggattccttagtcctgctggccttgggctggagcctaggaaagtggcccccaaatccttagtgagctaaagctgggtctgaaatttggtcagtggggaggggtagttttcttttcttttttctttttctttttttctttttttttttgagatggagtctcactcttgtcacctaggcaagagtgcaatggcacaatctcagctcactgcaacctccacctcctgggttcaagcgat

SEQ ID NO: 522 - DNA, 2751 bp, Homo sapiens
attcgccgctggactttgacagtggtcaaaggctctgctcagttctctgtgcctgtctccctccagcactgccgaggttctctgccgaggccaaccagaaataccccttggaagctggaatcctgcaacaatggcccagggtgtcctctggatcctactcggattgctactgtggtcagacccagggacagcctccctgcccctgctcatggactctgtcatccaggccctggctgagctggagcagaaagtgccagctgccaagrccagacacacagcttctgcgtggctgatgtcagctccaaactctggcccccacaatcgcctctaccacttcctgctgggggcatggagcctcaatgctacagagttggatccctgcccactaagcccagagctgttaggcctgaccaaggaggtggcccracatgacgtacgagaagggaaggaatatggggtggtgctggcacctgatggctcgaccgtggctgtggagcctctgctggcrgggctggaggcagggctgcaagggcgcagggtcatwaatttgcccttggacagcatggctgccccttgggagactggagatacctttccagatgttgtggccattgctccagatgtaagagccacctcctccccaggactcagggatggctctccagatgtcaccactgcagatattggagccaacactccagatgctacaaaaggctgtccagatgtccaagcttccttgccagatgccaaagccaagtccccaccgaccatggtggacagcctcctggcagtcaccctggctggaaacctgggcctgaccttcctccgaggttcccagacccagagccatccagacctgggaactgagggctgctgggaccagctctctgcccctcggamctttacgcttttggaccccaaggcatctctgttaaccawggccttcctcaatggcgccctggatggggtcatccttggagactacctgagccggactcctgagccccggccatccctcagccacttgctgagccagtactatggggctggggtggccagagacccmgggttccgcagcaacttccgacggcagaacggtgctgctctgacttcagcctccatsctggcccagcaggtgtggggaacccttgtccttctacagaggctggagccagtacacctccagcttcagtgcatgagccaagaacagctggcccaggtggctrccaatgctaccaaggaattcactgaggccttcctgggatgcccggccatccacccccgctgccgctggggagcggcgccttatcrgggccgcccgaagctgctgcagctgccgctgggattcttgtacgtgcatcacacctacgtgcctgcaccaccctgcacggacttcacgcgctgcgcagccaacatgcgctccatgcagcgctaccaccaggacacgcaaggctggggagacatcggctacagtttcgtggtgggctcggacggctacgtgtacgagggacgcggctggyactgggtgggcgcccacacgctcggccacaactccyggggcttcggcgtggccatagtgggcaactacaccgcggcgctgcccaccgaggccgctctgcgcacggtgcgcgacacgctcccgagttgtgcggtgcgcgccggcctcctgcggccagactacgcgctgctgggccaccgccagctggtgcgcaccgactgccccggcgacgcgctcttcgacctgctgcgcacctggccgcacttcaccgcggtgagtcttcgcagcctgcactacacggcccgccgcccctccgtctacacaagctccacgaggcccctgccccctgcctgtaacagctgtgcccgcacagcctcagccaggcccccaacttcccggcggcacgtctattcaggaaacctaggyccagcctttgcgggtcactctgcgggcaacatccctgatcctgtgacttctgcctatgcagcctcagctcagccccagacccagccagcctgtcctttycccagctcctaatacctctacctttccagccaaggcatggaccctgacacctgccaacagcccctctgccctcacaacctcagcctggccttcatgacttctctacscaagtcacaacctgtcaggctgcaccacctcatcctggcccgccgaaccttgacctcacccctgcccctacccgaaggccctctgtccacacaacatgaacctaggctgtgaccttttgccttcacaacctctgtccagtccttaatcctgtgttgcaattctctgtccagacaatctcaactctgaggttgcttgtttcgtccctgactccttaacccctgatgacaactcttatgccagcacaactttgacctgatgacctcatcccagcccttgatcgccatcactaaaacaattttagaatcacacctggacaatctcgtgctacctacatactgccactccatttcattaagctattgactagcacatccatctcggcctatagttggctttgtcctcactctctcactttgggccactgtcccctccctgatccagggttccaccaccaggagggcagacccagccacataccacaaccacccccaagcctcacactcccttgtctttttccagactgttaagccaagacctgccaggagtgtctctaagagatccaggagggagccacccccaaggaccctgccagccacagacctccaataaagacagcatgg

SEQ ID NO: 523 - DNA, 1876 bp, Homo sapiens
attcgccgctggactttgacagtggtcaaaggctctgctcagttctctgtgcctgtctccctccagcactgccgaggttctctgccgaggccaaccagaaataccccttggaagctggaatcctgcaacaatggcccagggtgtcctctggatcctactcggattgctactgtggtcagacccagggacagcctccctgcccctgctcatggactctgtcatccaggccctggctgagctggagcagaaagtgccagctgccaagrccagacacacagcttctgcgtggctgatgtcagctccaaactctggcccccacaatcgcctctaccacttcctgctgggggcatggagcctcaatgctacagagttggatccctgcccactaagcccagagctgttaggcctgaccaaggaggtggcccracatgacgtacgagaagggaaggaatatggggtggtgctggcacctgatggctcgaccgtggctgtggagcctctgctggcrgggctggaggcagggctgcaagggcgcagggtcatwaatttgcccttggacagcatggctgccccttgggagactggagatacctttccagatgttgtggccattgctccagatgtaagagccacctcctccccaggactcagggatggctctccagatgtcaccactgcagatattggagccaacactccagatgctacaaaaggctgtccagatgtccaagcttccttgccagatgccaaagccaagtccccaccgaccatggtggacagcctcctggcagtcaccctggctggaaacctgggcctgaccttcctccgaggttcccagacccagagccatccagacctgggaactgagggctgctgggaccagctctctgcccctcggamctttacgcttttggaccccaaggcatctctgttaaccawggccttcctcaatggcgccctggatggggtcatccttggagactacctgagccggactcctgagccccggccatccctcagccacttgctgagccagtactatggggctggggtggccagagacccmgggttccgcagcaacttccgacggcagaacggtgctgctctgacttcagcctccatsctggcccagcaggtgtggggaacccttgtccttctacagaggctggagccagtacacctccagcttcagtgcatgagccaagaacagctggcccaggtggctrccaatgctaccaaggaattcactgaggccttcctgggatgcccggccatccacccccgctgccgctggggagcggcgccttatcrgggccgcccgaagctgctgcagctgccgctgggattcttgtacgtgcatcacacctacgtgcctgcaccaccctgcacggacttcacgcgctgcgcagccaacatgcgctccatgcagcgctaccaccaggacacgcaaggctggggagacatcggctacagtttcgtggtgggctcggacggctacgtgtacgagggacgcggctggyactgggtgggcgcccacacgctcggccacaactccyggggcttcggcgtggccatagtgggcaactacaccgcggcgctgcccaccgaggccgctctgcgcacggtgcgcgacacgctcccgagttgtgcggtgcgcgccggcctcctgcggccagactacgcgctgctgggccaccgccagctggtgcgcaccgactgccccggcgacgcgctcttcgacctgctgcgcacctggccgcacttcaccgcgactgttaagccaagacctgccaggagtgtctctaagagatccaggagggagccacccccaaggaccctgccagccacagacctccaataaagacagcatggaaac

SEQ ID NO: 524 - DNA, 1449 bp, Homo sapiens
cctctttccaaaatggacaagtccctcttgctggaactccccatcctgctctgctgctttagggcattatctggatcactttcaatgagaaatgatgcagtgatagaaattrttcrgtgtaggatgtgccacctccagttcccaggagaaaagtgctccagaggaagaggaatatgcacagcaacaacagaagaggsctgcatggttggaaggatgttcaaaagggatggtaatccctggttaaccttcatgggctgcctaaagaactgtgctgatgtgaaaggcataaggtggagtgtctatttggtgaacttcaggtgctgcaggagccatgacctgtgcaatgaagacctttagaagttaatggttcttctgtgactccaatttctgggtgaggttgttgcctcagcctcttcacaatgactttctaaaaaaaatcacacacacacacacacacacyacagaagaggattgcaaacacatggctccatcttctgcacacgaaaggaaagtccctctccttttctacagtctctgtcacrccccttaaaataagtaaataaataaccttgagagaaagaacaagatcaatatatcctgcaggttgctacaaacccttgtgctttcactgtatagccagttcattcagaaaaggaggaaagggtagtttaatttcaaaaaagaatcccttcctctttcctctgctgctttccttccttctgtggcagggtattttaatatatttttcaaatttttttcctttctgtgttatccttcttatcccactccaaagaaagcacataactgtggcctgaagggatggggagtagcaacataaaaagaagtggctcaagtcttcttggagtttgttcatgaatgctgatcccagggtgaggagaagattgggacatagaaaggaaactgcatcagaaacatgaacagagaaagattgtctrccttctagaatcagatctgtttggggctgggggttggagaataaaagcaggagaagtctatgggattctagaaatagtacctgcatccagcttccctgccaaactcacaaggagacatcaacctctagacagggaacagcttcaggatacttccaggagacagagccaccagcagcaaaacaaatattcccatgcctggagcatggcatagaggaagctgagaaatgtggggtctgaggaagccatttgagtctggccactagacatctcatcagccacttgtgtgaagagatgccccatgaccccagatgcctctcccacccttacctccatctcacacacttgagcttkccactctgtataattctaacatcctggagaaaaatggcagtttgaccgaacctgttcacaagggtagaggctgatttctaacgaaacttgtagaatgaagcctggaaagagtgatgaattatattatattatataaaaataa

SEQ ID NO: 525 - DNA, 1485 bp, Homo sapiens
cctctttccaaaatggacaagtccctcttgctggaactccccatcctgctctgctgctttagggcattatctggatcactttcaatgagaaatgatgcagtcaatgaaatagttgctgtgaaaaacaattttcctgtgatagaaattrttcrgtgtaggatgtgccacctccagttcccaggagaaaagtgctccagaggaagaggaatatgcacagcaacaacagaagaggsctgcatggttggaaggatgttcaaaagggatggtaatccctggttaaccttcatgggctgcctaaagaactgtgctgatgtgaaaggcataaggtggagtgtctatttggtgaacttcaggtgctgcaggagccatgacctgtgcaatgaagacctttagaagttaatggttcttctgtgactccaatttctgggtgaggttgttgcctcagcctcttcacaatgactttctaaaaaaaatcacacacacacacacacacacyacagaagaggattgcaaacacatggctccatcttctgcacacgaaaggaaagtccctctccttttctacagtctctgtcacrccccttaaaataagtaaataaataaccttgagagaaagaacaagatcaatatatcctgcaggttgctacaaacccttgtgctttcactgtatagccagttcattcagaaaaggaggaaagggtagtttaatttcaaaaaagaatcccttcctctttcctctgctgctttccttccttctgtggcagggtattttaatatatttttcaaatttttttcctttctgtgttatccttcttatcccactccaaagaaagcacataactgtggcctgaagggatggggagtagcaacataaaaagaagtggctcaagtcttcttggagtttgttcatgaatgctgatcccagggtgaggagaagattgggacatagaaaggaaactgcatcagaaacatgaacagagaaagattgtctrccttctagaatcagatctgtttggggctgggggttggagaataaaagcaggagaagtctatgggattctagaaatagtacctgcatccagcttccctgccaaactcacaaggagacatcaacctctagacagggaacagcttcaggatacttccaggagacagagccaccagcagcaaaacaaatattcccatgcctggagcatggcatagaggaagctgagaaatgtggggtctgaggaagccatttgagtctggccactagacatctcatcagccacttgtgtgaagagatgccccatgaccccagatgcctctcccacccttacctccatctcacacacttgagcttkccactctgtataattctaacatcctggagaaaaatggcagtttgaccgaacctgttcacaagggtagaggctgatttctaacgaaacttgtagaatgaagcctggaaagagtgatgaattatattatattatataaaaataa

SEQ ID NO: 526 - DNA, 345 bp, Homo sapiens
  misc_feature (241)..(241): n is a, c, g, or t
cctctttccaaaatggacaagtccctcttgctggaactccccatcctgctctgctgctttagggcattatctggatcactttcaatgagaaatgatgcagtgatagaaattrttcrgtgtaggatgtgccacctccagttcccaggagaaaagtgctccagaggaagaggaatatgcacagcaacaacagaagaggsctgcatggttggaaggatgttcaaaagtaagttgtgggttgggnaaaagaagaacgggcagaggacgtatacagggaygtatcagccacaggggaaaggagagatcttactttacttttactataggcagtctcatacctgggatggc

SEQ ID NO: 527 - DNA, 4680 bp, Homo sapiens
gagctgaggaggagctgaaaatgcagatttagcatcaagcacagacctacactcgctctttctctccggtacacacagctccccacattckcacccctgcccgcgcgccgggccgcctgactgcacggcttcccctccagccagatgctggagaacacacactgattcgctgctttccaagaccctgttcagtctctttctctatacaaagatttttttaaaaactatatataagaattctttatttgcaccctccctccgagtcccctgctccgccagcctgcgcgcctcctagcaccacttttcactcccaaagaaggatgaagggtggttgtgtctcccagtggaaggcggccgccgggttcctcttctgtgtcatggtttttgcatctgctgagcgaccggtcttcacgaatcattttcttgtggagttgcataaagggggagaggacaaagctcgccaagttgcagcagaacacggctttggagtccgaaagcttccctttgctgaaggtctgtaccacttttatcacaatggccttgcaaaggccaagagaagacgcagcctacaccacaagcagcagctggagagagaccccagggtaaagatggctttgcagcaggaaggatttgaccgaaaaaagcgaggttacagagacatcaatgagatcgacatcaacatgaacgatcctctttttacaaagcagtggtatctgatcaatactgggcaagctgatggcactcctggccttgatttgaatgtggctgaagcctgggagctgggatacacagggaaaggtgttaccattggaattatggatgatgggattgactatctccacccggacctggcctccaactataatgccgaagcaagttacgacttcagcagcaacgacccctatccttaccctcggtacacagatgactggtttaacagccacgggacccgatgtgcaggagaagtttctgctgccgccaacaacaatatctgtggagttggagtagcatacaactccaaggttgcaggcatccggatgctggaccagccattcatgacagacatcatcgaggcctcctccatcagtcatatgccacagctgattgacatctacagcgccagctggggccccacagacaacggcaagacagtggatgggccccgggagctcacgctgcaggccatggcygatggcgtgaacaagggccgcggcggcaaaggcagcatctacgtgtgggcctccggggacggcggcagctatgacgactgcaactgcgacggctacgcctccagcatgtggaccatctccatcaactcagccatcaacgacggcaggactgccctgtacgacgagagctgctcttccaccttggcttccaccttcagcaacgggaggaaaaggaaccccgaggccggtgtggcaaccacagatttgtacggcaactgcactctgaggcattctgggacatctgcagctgcccccgaggcagctggtgtgtttgcactggctctggaggctaacctgggtctgacctggcgggacatgcagcatctgactgtgctcacctccaaacggaaccagcttcacgacgaggtccatcagtggcggcgcaatggggtcggcctggaatttaatcacctctttggctacggggtccttgatgcaggtgccatggtgaaaatggctaaagactggaaaaccgtgcctgagagattccactgtgtgggaggctccgtgcaggaccctgagaaaataccatccactggcaagttggtgctgacactcacaaccgacgcctgtgaggggaaggaaaattttgtccgctacctggagcatgtccaggctgtcatcacggtcaacgcaaccagaagaggagacctgaacatcaacatgacttcccctatgggcaccaagtccattttgctgagccggcgtccaagggatgacgactccaaggtgggctttgacaagtggcctttcatgaccactcacacrtggggggaagacgcccgaggcacctggaccctggagctgggatttgtcggcagcgccccgcagaagggggtgctgaaggagtggaccctgatgctgcatggcactcagagtgccccgtacatcgaccaggtggtgcgggattaccagtccaagttggccatgtccaagaaagaggagctggaggaagagctggacgaagccgtggagagaagcctgaaaagcatccttaacaagaactagcgctgcacatccgcytttcccaccgccctccctccccagctccgcctctgtcctcgctccacgtttcaggcaggcacctagcaattccatcacccgtacaggcaattccgtyttyttaatctgaagcttcactcactgtcaatgattattttcattacaatggaaacaatcttttttactytatgccccaaatatagcgttcccaacaacatccatgtcctatgtgtgactctaaattctttatttctgtcattcaaatgggtgatatcctgaaaaaaaaaaaaaaaaaaaaaactgggacagctttcccctcatttttttttttgtttctgagaaaagaacgtattttaaaagccacatagagtgactccaagaacaattgtccatggtctcaaacaaggggctgttacataacaagaaaatcaaagctgaggacagggtgtgagcgccacatctctgaaagcacaggagacactgtgctataaatcctttggggagcgatgttttgaatttagtgagatttaccagggatgtagattaaggtgatgtgattcaaaagatgccattcatagagagccctagttactgcatggggaaagagatccaggaagcatgagtgctggatattttactaccaatgccaagataattcactctactcagccggcgtggcaaatataaaacttacagagcgtggctgtgctctcaccagctgctgctctgagttatgttaaaatccgctagagcagcccaaatttttctcagtttgtatagagttcatcccagccccaattttctggggctcctcacatagctacccaaaaaagaatgtcccttttcctaagtcactttgaggtgtctcaatctgatctgastgagaggcgacaggagtatttttttttttttacagctttacacacacagatgtgggctttgatttccaagtaatataatggaagagaaatctcatactcccccacagtttgatgtcattaatgtgttgggaaaaaggcctctgtcccggaagagtcatgggaggtgaaaggggcacgtttgaagatgcgagcgctatcttcacatagttctccagttgtatggagcctcttctgccaagagagggccatgcaattcatcccrgaggaacctgaggcctgaaggaggtgagagaagacctctgtgaggaaagcacacagtcaccttctcggcaactaagcagtccctgagaccatttaacatgcaacccgaaggttatggtcaatccyaaaagtcaccactccattcccaactagacattaccaaagtgacctacccagagattgcttctcatccccagtcccaatgcacatccattcccaagaaatgctttgtcttcagcctctccaggcaccatctcccttcctgtgggagcagagagcttagcctggagcacctttccttcaagccagcaacacagagcactargttcaattccctgaargtggccactttaagagagaaatctgaaaaccccatttgctttcttttctcccatattggcatggatttctgtcttctctaacaccttgtgaccttctctatatcatgctttaaagtgtaataatatgattttttaaaagaaatttattacttgttgcaaaggtctttttaaaccagtttagatttcaagaaaaaataaatggaaatcatcgaaaattcatttcacattaatggtctaaaaataaaccaaaggacattatgtgtgcatgtgtgtataagtgcacacagaaatatatatacatatgtagactatatacatgtgtgtatatatgtgtatatatacatacacttgtataaatgtatatacacatatacctataatgtgtgtatgtgtatttattgaagaaacagataccatactcatttctaaaagaatattcagagaatatcaagatgattctggctgaaaaaggccagtggaaattcaggtgaaaatgttcatcaattcccattgcatcacctctgtaatttttcagctctctgtataaacattaaatgtcttatatagcagcaaaaatataaaatagttgtccatattttcacaggtgtggtgtaatttataaaattagaaagcaacttatcagctacttaagagaaatggcaagttttgatatgagtatacaatatataaaaatatatatagtgctatatatataaatatttggtctctatttcattttttgcatcagtattaatactaaaatatgtctcgctagtgatgtttttatgatatccctgatcctaactgaagagacagttatttatagtcatttattttaaaaaatgaaaataagtgaataataattaggttaacattgttgctccctgtgacaaaattttataagcaaatttcaaaagacatgttgtaaattaggaggctcaacaataaaacattaygctccagaaa

SEQ ID NO: 528 - DNA, 4746 bp, Homo sapiens
gagctgaggaggagctgaaaatgcagatttagcatcaagcacagacctacactcgctctttctctccggtacacacagctccccacattckcacccctgcccgcgcgccgggccgcctgactgcacggcttcccctccagccagatgctggagaacacacactgattcgctgctttccaagaccctgttcagtctctttctctatacaaagatttttttaaaaactatatataagaattctttatttgcaccctccctccgagtcccctgctccgccagcctgcgcgcctcctagcaccacttttcactcccaaagaaggatgaagggtggttgtgtctcccagtggaaggcggccgccgggttcctcttctgtgtcatggtttttgcatctgctgagcgaccggtcttcacgaatcattttcttgtggagttgcataaagggggagaggacaaagctcgccaagttgcagcagaacacggctttggagtccgaaagcttccctttgctgaaggtctgtaccacttttatcacaatggccttgcaaaggccaagagaagacgcagcctacaccacaagcagcagctggagagagaccccagggtaaagatggctttgcagcaggaaggatttgaccgaaaaaagcgaggttacagagacatcaatgagatcgacatcaacatgaacgatcctctttttacaaagcagtggtatctgatcaatactgggcaagctgatggcactcctggccttgatttgaatgtggctgaagcctgggagctgggatacacagggaaaggtgttaccattggaattatggatgatgggattgactatctccacccggacctggcctccaactataatgccgaagcaagttacgacttcagcagcaacgacccctatccttaccctcggtacacagatgactggtttaacagccacgggacccgatgtgcaggagaagtttctgctgccgccaacaacaatatctgtggagttggagtagcatacaactccaaggttgcaggcatccggatgctggaccagccattcatgacagacatcatcgaggcctcctccatcagtcatatgccacagctgattgacatctacagcgccagctggggccccacagacaacggcaagacagtggatgggccccgggagctcacgctgcaggccatggcygatggcgtgaacaagggccgcggcggcaaaggcagcatctacgtgtgggcctccggggacggcggcagctatgacgactgcaactgcgacggctacgcctccagcatgtggaccatctccatcaactcagccatcaacgacggcaggactgccctgtacgacgagagctgctcttccaccttggcttccaccttcagcaacgggaggaaaaggaaccccgaggccggtgtggcaaccacagatttgtacggcaactgcactctgaggcattctgggacatctgcagctgcccccgaggcagctggtgtgtttgcactggctctggaggctaacctgggtctgacctggcgggacatgcagcatctgactgtgctcacctccaaacggaaccagcttcacgacgaggtccatcagtggcggcgcaatggggtcggcctggaatttaatcacctctttggctacggggtccttgatgcaggtgccatggtgaaaatggctaaagactggaaaaccgtgcctgagagattccactgtgtgggaggctccgtgcaggaccctgagaaaataccatccactggcaagttggtgctgacactcacaaccgacgcctgtgaggggaaggaaaattttgtccgctacctggagcatgtccaggctgtcatcacggtcaacgcaaccagaagaggagacctgaacatcaacatgacttcccctatgggcaccaagtccattttgctgagccggcgtccaagggatgacgactccaaggtgggctttgacaagtggcctttcatgaccactcacacrtggggggaagacgcccgaggcacctggaccctggagctgggatttgtcggcagcgccccgcagaagggggtgctgaaggagtggaccctgatgctgcatggcactcagagtgccccgtacatcgaccaggtggtgcgggattaccagtccaagttggccatgtccaagaaagaggagctggaggaagagctggacgaagccgtggagagaagcctgaaaagcatccttaacaagaactagcgctgcacatccgcytttcccaccgccctccctccccagctccgcctctgtcctcgctccacgtttcaggcaggcacctagcaattccatcacccgtacaggcaattccgtyttyttaatctgaagcttcactcactgtcaatgattattttcattacaatggaaacaatcttttttactytatgccccaaatatagcgttcccaacaacatccatgtcctatgtgtgactctaaattctttatttctgtcattcaaatgggtgatatcctgaaaaaaaaaaaaaaaaaaaaaactgggacagctttcccctcatttttttttttgtttctgagaaaagaacgtattttaaaagccacatagagtgactccaagaacaattgtccatggtctcaaacaaggggctgttacataacaagaaaatcaaagctgaggacagggtgtgagcgccacatctctgaaagcacaggagacactgtgctataaatcctttggggagcgatgttttgaatttagtgagatttaccagggatgtagattaaggtgatgtgattcaaaagatgccattcatagagagccctagttactgcatggggaaagagatccaggaagcatgagtgctggatattttactaccaatgccaagataattcactctactcagccggcgtggcaaatataaaacttacagagcgtggctgtgctctcaccagctgctgctctgagttatgttaaaatccgctagagcagcccaaatttttctcagtttgtatagagttcatcccagccccaattttctggggctcctcacatagctacccaaaagagaaaaaaaattaagacaagcctggcaacacacctggwgaagagtagtttactagcttttcaaacaagaatgtcccttttcctaagtcactttgaggtgtctcaatctgatctgastgagaggcgacaggagtatttttttttttttacagctttacacacacagatgtgggctttgatttccaagtaatataatggaagagaaatctcatactcccccacagtttgatgtcattaatgtgttgggaaaaaggcctctgtcccggaagagtcatgggaggtgaaaggggcacgtttgaagatgcgagcgctatcttcacatagttctccagttgtatggagcctcttctgccaagagagggccatgcaattcatcccrgaggaacctgaggcctgaaggaggtgagagaagacctctgtgaggaaagcacacagtcaccttctcggcaactaagcagtccctgagaccatttaacatgcaacccgaaggttatggtcaatccyaaaagtcaccactccattcccaactagacattaccaaagtgacctacccagagattgcttctcatccccagtcccaatgcacatccattcccaagaaatgctttgtcttcagcctctccaggcaccatctcccttcctgtgggagcagagagcttagcctggagcacctttccttcaagccagcaacacagagcactargttcaattccctgaargtggccactttaagagagaaatctgaaaaccccatttgctttcttttctcccatattggcatggatttctgtcttctctaacaccttgtgaccttctctatatcatgctttaaagtgtaataatatgattttttaaaagaaatttattacttgttgcaaaggtctttttaaaccagtttagatttcaagaaaaaataaatggaaatcatcgaaaattcatttcacattaatggtctaaaaataaaccaaaggacattatgtgtgcatgtgtgtataagtgcacacagaaatatatatacatatgtagactatatacatgtgtgtatatatgtgtatatatacatacacttgtataaatgtatatacacatatacctataatgtgtgtatgtgtatttattgaagaaacagataccatactcatttctaaaagaatattcagagaatatcaagatgattctggctgaaaaaggccagtggaaattcaggtgaaaatgttcatcaattcccattgcatcacctctgtaatttttcagctctctgtataaacattaaatgtcttatatagcagcaaaaatataaaatagttgtccatattttcacaggtgtggtgtaatttataaaattagaaagcaacttatcagctacttaagagaaatggcaagttttgatatgagtatacaatatataaaaatatatatagtgctatatatataaatatttggtctctatttcattttttgcatcagtattaatactaaaatatgtctcgctagtgatgtttttatgatatccctgatcctaactgaagagacagttatttatagtcatttattttaaaaaatgaaaataagtgaataataattaggttaacattgttgctccctgtgacaaaattttataagcaaatttcaaaagacatgttgtaaattaggaggctcaacaataaaacattaygctccagaaa

SEQ ID NO: 529 - DNA, 10372 bp, Homo sapiens
gcacgctgggacctgcagaagcactctttgctaattgtgatcggcgatatcggtacagagagtcagctgagggccgtgcgggcccaccttgaacaagggattctctcctggaacattgacctgtcatcctttgacttgaaccaacagttgagactcttcattacccggcacctagctcacttctcctcagaggtcaaaggccagaggaccctttgccaccagagtgagatcctagagaccatcatcctggtaaatcccagtgcagacagcatcagctctgaggtwcatcatcttctkagcagctcatcagcttataaactactaatcttgagtgggcaaagtttagagcctgggggagacctcatcctacagagtggcacctactcatatgaaaacttkgcccaggtccttcacaaccccgagatttcccaattgctcagcaatagagaccctgggatacaggccttccttaccgtgtcctgcttaggggaaggtgattggagccacctgggattatccagttcccaagagaccctgcacctccggctaaaccctgagcccactctgcccaccatggacggcgtggctgagttctccgagtatgtctctgagactgtggacgtgccatccccatttgacctactagagccccccacctcagggggcttcctcaagctctccaagccttgttgctacatcttcccaggtggtcgtggggactctgccctctttgctgtcaatggtttcaacatcctggtggatggtggctctgatcgcaagtcctgtttktggaagctggtacggcacttggaccgcattgactcggtgctactcacacacattggggcagacaacctgccaggcatcaatggactactgcagcgcaaagtggcagagctagaggaggagcagtcccagggctctagcagttacagcgactgggtgaagaaccttatctctcctgagcttggagttgtctttttcaacgtgcctgagaagctgcggcttcctgatgcctcccggaaagccaagcgtagcattgaggaggcctgcctcactctgcagcacttaaaccgcctgggcatccaggctgagcctctatatcgtgtggtcagcaataccattgagccactgaccctcttccacaaaatgggtgtgggccggctggacatgtatgtcctcaaccctgtcaaggacagcaaggagatgcagttcctcatgcaaaagtgggcaggcaatagtaaagccaagacaggcatcgtgctgcccaatgggaaggaggctgagatctccgtgccctaccttacctctatcactgctctggtggtctggctaccagccaatcccactgagaagattgtgcgtgtgctttttccaggaaatgctccccaaaacaagatcttggagggcctagaaaagcttcggcatctggacttcctgcgttaccctgtggccacgcagaaggacctggcttctggggctgtgcctaccaacctcaagcccagcaaaatcaaacagcgggctgatagcaaggagagcctcaaagccactaccaagacggccgtgagcaagttgkccamacgggaggaggtggtagaagagggagccaaggaggcacgttcagagctgkccaaggagttakccaagacagagaagaaggcamaagagtcatctgagaagcccccagagaagcctgccaagcctgagagggtgaagacagagtcaagtgaggcactgaaggcagagaagcgaaagctgatcaaagacaaggtagggaaaaagcaccttaaagaaaagatatcaaagctggaagaaaaaaaagacaaggagaaaaaagagatcaaaaaggagaggaaagagctcargaaggatgaaggaaggaaggaggagaagaaggatgccaagaaggaggagaagaggaaagataccaaacctgagctcaagaagatttccaagccagacctaaagccctttactcctgaggtacgtaagaccctctataaagccaaggtccctggaagagtcmaaatagacaggagccgtgctatccgtggggagaaggagctgtcttctgagccccagacacccccagcccagaagggaactgtaccactcccaaccatcagtgggcacagggagctggtcctatcctcaccagaggacctcacacaggactttgaggagatgaagcgtgaggagagggctttgctggctgaacaaagggacacaggactaggagataagccattccctctagacactgcagaggagggacccccaagtacagctatccagggaacaccaccctctgttccagggctgggacaagaagaacatgtgatgaaggagaaagagcttgtcccagaggtccctgaggaacaaggcagcaaggacagaggcctagactctggggctgaaacagaggaagagaaagatacctgggaggaaaagaagcagagggaagcagagaggctcccagacagaacagaagccagagaggaaagtgaacctgaagtaaaggaggatgtgatagaaaaggctgagttagaagaaatggaggaggtacacccttcagatgaggaggaagaggacgcgacaaaagctgagggtttttaccaaaaacatatgcaggaacccttgaaggtaactccaaggagccgggaggcttttgggggtcgggaattgggactccagggcaaggcccctgagaaggagacctcgttattcctaagcagcctgaccacacctgcaggagccactgagcatgtctcttacatccaggatgagacaatccctggctactcagagactgagcagaccatctcagatgaggagatccatgatgagccggaggagcgcccagctccacccagatttcatacaagtacatatgacctgccygggcctgaaggtgctggcccattcgaagccagccaacctgccgatagtgctgttcctgctacctctggcaaagtctatggaacgccagagactgaactcacctaccccactaacatagtggctgcccctttggctgaagaggaacatgtgtcctcggccrcttcaatcactgagtgtgacaaactttcttcctttgccacatcagtggctgaggaccaatctgtggcctcacttacagctccccagacagaggagacaggcaagagctccctgctgcttgacacagtcacaagcatcccttcctcccgtactgaagctacgcagggcttggactatgtgccatcagctggtaccatctcacccacctcctcactggaagaagacaagggcttcaaatcaccaccmtgtgaggacttctctgtgactggggagtcagagaagagaggagagatcatagggaaaggcttgtctggagagagagctgtggaagaggaagaggaggagacagcaaacgtagagatgtctgagaaactttgcagtcaatatggaactccagtgtttagtgcccctgggcatgccctacatccaggagaaccagcccttggagaagcagaggagcggtgccttagcccagatgacagcacagtgaagatggcttctcctccaccatctggcccacccagtgccacccacacaccctttcatcagtccccagtggaagaaaagtctgagccccaagacttymmggaggcagactcctggggagacactaagcgcacaccaggtgtgggcaaagaagatgctgctgaggagacagtcaagccagggcctgaagagggcacactagagaaggaagagaaagttcctcctcccaggagcccccaggcccaggaagcacctgtcarcattgatgagggrcttacaggctgtaccattcaactgttgccagcacaggataaagcaatagtctttgagaytatggaggcaggagagcccacaggcccaattctgggagcagaagcccttcccggaggtttgaggactttaccccaagaacctggcaaacctcagaaagatgaggtgctcagatatcctgaccgaagcctctctcctgaagatgcagaatccctctctgtcctcagcgtgccctccccagacactgccaaccaagagcctacccccaagtctycctgtggcctgacagaacagtacctacacaaagaccrktggccagaggtatctccagaagacacccagtcactttctctgtcagaagagagtcccagcaaggagacctccctggatgtctcttctaagcagctctctccagaaagccttggcaccctccagtttggggaactaaaccttgggaaggaagaaatggggcatctgatgcaggccgagrayacctctcaccacacagctcccatgtctgttccagagccccatgcagccacagcgtcacctcccacagatgggacaactcgatactctgcacagacagacatcacagatgacagccttgacaggaagtcacctgccagctcattctctcactctacaccttcaggaaatgggaagtacttacctggggcgatcacaagccctgatgaacacattctgacacctgatagctccttctccaagagtcctgagtctttgmcaggccctgccttggaggacattgccataaagtgggaagataaagttccagggttgaaagacagaacctcagaacagaagaaggaacctgagccaaaggatgaagttttacagcagaaagacaaaactctggagcacaaggaggtggtagagccgaaggatacagccatctatcagaaagatgaggctctgcatgtaaagaatgaggctgtgaaacagcaggataaggctttagaacaaaagggcagagacttagagcaaaaagacacagccctagaacagaaggacaaggccctggaaccaaaagacaaagacttagaagaaaaagacaaggccctggaacagaaggataagattccagaagagaaagacaaagccttagaacaaaagratacagccctggaacagaaggacaagrccctggaaccaaaagataaagacttggaacaaaaggacagggtcctagaacagaaggagaagatcccagaagagaaagacaaagccttagatcaaaaagtcagaagtgttgaacataaggctccggaggacacggtcgctgaaatgaaggacagagacctagaacagacagacaaagcccctgaacagaaacaccaggcccaggaacaaaaggataaagtctcagaaaagaaggatcaggccttagaacamaaatactgggctttgggacagaaggatgaagccctggaacaaaacattcaggctctggaagagaaccaccaaactcaggagcaggagagcctagtgcaggaggataaaaccaggaaaccaaagatgctagaggaaaaatccccagaaaaggtcaasgccatggaagagaagttagaagctcttctggagaagaccaaagctstgggcctggaagagagcytagtgcaggagggcagggccagagagcaggaagaaaagtactggagggggcaggatgtggtccaggagtgkcaagaaacatctcctaccagagaggagccggctggagaacagaaagagcttrccccggcatgggaggacacatctcctgagcaggmcaatmggtattggaggggcagagaggatgtgbccttggaacaggacacatactggagggagctaagctgtgagcggaaggtctggttccctcacgagctggatgkccagggggcccgcccacactacactgargaacgggaaagcactttcctagakgagggcccagatgatgagcaagaagtacccctgcgggaacacgcaacccggagcccctgggcctcagacttcaaggatttccaggaatcctcaccacagaaggggctagaggtggagcgctggcttgctgaatcaccagttgggttgccaccagaggaagaggacaaactgacccgctctccctttgagatcatctcccctccagcttccccacctgagatggttggacaaagggttccttcagccccaggacaagagagtcctatcccagaccctaagctcatgscacacatgaagaatgaacccactactccctcatggctggctgacatcccaccctgggtgcccaaggacagacccctcccccctgcacccctctccccagctcctggtccccccacacctgccccggmatcccatactcctgcacccttctcttggggcacasccgagtatgacagtgtggtggctgcagtrcaggagggggcagctgagttggaaggtgggccatactcccccctggggaaggactaccgcaaggytgaaggggaaagggaagaagaaggtagggctgaggctcctgacaaaagctcacacagctcaaaggtaccagaggccagsaaaagccatgccaccacggagcctgagcagactgagccggagcagagagagcccacaccctatcctgatgagagaagctttcagtatgcagacatctatgagcagatgatgcttactgggcttggccctgcatgccccactagagagcctccacttggagcagctggggattggcccccatgcctctcaaccaaggaggcagctgccggccgaaacacatctgcagagaaggagctttcatctcctatctcacccaagagcctccagtctgacactccaaccttcagctatgcagccctggcaggacccactgtacccccaaggmcagagccagggccaagtatggagcccagmctcaccccacctgcagttcccccccgtgctcctatcctgagcaaaggcccaagcccccctcttaatggtaacatcctgagctgcagcccagataggaggtccccatcccccaaggaatcaggccggagtcactgggatgacagcactagtgactcagaactggagaagggggctcgggaacagscmgaaaaagaggcccaatccccaagtcctcctcaccccattcctatggggtcccccacattatggccagaaactgaggcacatgttagccctcccttggactcacacctggggcctgcccgacccagtctggacttccctgcttcagcctttggcttctcctcattgcagccagctcccccacagmtgccctctccagctgaaccccgctcggcaccctgtggctcccttgccttctctggggatcgagctctggctctggctccaggaccccccaccagaacccggyatgatgaatacctggaagtgaccaaggcccccagcctggattcctcactgccccagctcccatcacccagttctcctggggcccctctcctctccaatctgccacgacctgcctcaccagccctgtctgagggctcctcctctgaggctaccacgcctgtgatttcaagtgtggcrgagcgcttctctccaagccttgaggctgcagaacaggagtctggagagctggacccaggaatggaaccagctgcccacagcctctgggacctcactcctctgagcccagcacccccagcttcactggacttggccctagctccagctccaagcctgcctggagwcatgggtgatggcatcctgccgtgccacctggagtgctcagaggcagccacggagaagccaagccycttccaggttccctctgaggattgtgcagccaatggcccaactgaaaccagccctaaccccccaggccctgccccagccaaggctgaaaatgaagaggctgcggcttgccctgcctgggaacgtggggcctggcctgaaggagctgagaggagctcccggcctgacayattgctctcccctgagcagccagtgtgtcctgcagggggctccgggggcccacccagcagtgcctctcctgaggtcgaagctgggccccagggatgtgccactgagcctcggccccatcgtggggagctctccccatccttcctgaacccacctctgcccccatccatagatgatagggacctctcaactgaggaagttcggctagtaggaagaggggggcggcgccgggtaggggggccagggaccactgggggcccatgccctgtgactgatgagacaccccctacatcagccagtgactcaggctcctcacagtcagattctgatgtcccgccagaaactgaggagtgtccgtccatcacagctgaggcagccctcgactcagatgaagatggagacttcctacctgtggacaaagctgggggtgtcagtggtactcaccaccccaggcctggccatgacccacctcctctcccacagccagacccccgcccatcccctccccgccctgatgtgtgcatggctgacccygaggggctcagctcagagtctgggagagtagagaggctacgggagaaggaaaaggttcaggggcgagtagggcgyagggccccaggyaaggmcaagccagygtcccctgcacggcgtctggatcttcggggaaaacgctcacccacccctggtaaagggyctgcagatcgagyatcccgggccccacctcgaycacgcagcaccacaagccaggtcaccccagcagaggaaaaggatggacacagccccatgtccaaaggmctagtcaatggactcaaggcaggaccaatggccttgagttccaagggcagctctggtgcccctgtatatgtggatctcgcctacatcccgaatcattgsagtggcaagactgctgacctwgacttcttccgtcgagtgcgtgcatcctactatgtggtcagtgggaatgaccctgccaatggcgagccaagccgggctgtgctggatgccctgctggagggcaaggcccagtggggggagaatcttcaggtgactctgatccctactcatgacacggaggtgactcgtgagtggtaccaacaaactcatgagcagcagcaacaactgaatgtcctggtcctggctagcagcagcaccgtggtgatgcaggatgagtccttccctgcctgcaagattgagttctgaaagagccgccctcccttccccaaggatccactcccccagctcctttagagaatggctactgctgagtcctttggggttgagggagatgggagctagggggaggggagggagatgtcttgttgtggggacttgggctgggctaaatgggaggggttgtccctccccatcatccattcctgtgaggtgtctcaaaccaaagttaacagggagaggatgggggaggggacamattagaataggatagcatctgatgcctgagaaccctctcctagcactgtcaaatgctggtattgaatggggactgaggatgggtctcagagagcaacctcctccctcgtagagggagattatatccccaactccagggacctctttatctcaatctatttatttggcatcctgggarggatttccaatagtaatttatgtgacctggggcaggataccgtcagtgaggtgcccagagctgcaccctttcctccatttcccatcccccatctcctcaaccaccagggtctgagttctagcagggtcctgggggtatcccactgctatactgttctactgcttccctcagtatctgaatgtctcaatttaaaacttgaagctctttagaccaatagactggtgagaggagaaaggagcttatcccccagaccctgctttataccattcacatcccagggctgtgtccagacagcacaaaacggcaaggagagcccaagccccaatgccagaattcttccaaactccctgactctttgaagtttttactcaccccatttcaattatcctgatcccttctcatcccctgcttggcttctctgcatgtggtcatctgctgtggcttggtgtttaatgggttaaaaataagccactgcctgacatcccaacatttgacaccccagcaatgtgtgactcccccaacattccactatgccatcctgcagctgaaatgggaacactggctgcctctccaaacccgctcttggacagaggatctgggaggtggaagccaggccagaggacttggggaaaatgagatggaggaaggaaaaagggagaagctgagccacagsttaactcctacagagtgaaatgaaaacgggctgaaaataccaccccaggagaggacctcgccccaagcaagccagtgagcagccctgccagactactgccagactgagaaacccagaagctggtagtcatgtgggcttgccttctctgccaaacgactgggaaaccaaaatgagcccaccttgtgttcttcctagctccaccctccccgtgctgctgtgttctgctcctccccacgcttccctgctatagttcccagctgctgtaacggagccacctccaactctaacaataaaccaagttcattgca

SEQ ID NO: 530 - DNA, 10471 bp, Homo sapiens
atggagacaactccggggctggggctccgaagtcccggcgcaccgctggctcagaaccccgcggagctgctgtgcgaggccggagccgcggtggcggctgcacgctgggacctgcagaagcactctttgctaattgtgatcggcgatatcggtacagagagtcagctgagggccgtgcgggcccaccttgaacaagggattctctcctggaacattgacctgtcatcctttgacttgaaccaacagttgagactcttcattacccggcacctagctcacttctcctcagaggtcaaaggccagaggaccctttgccaccagagtgagatcctagagaccatcatcctggtaaatcccagtgcagacagcatcagctctgaggtwcatcatcttctkagcagctcatcagcttataaactactaatcttgagtgggcaaagtttagagcctgggggagacctcatcctacagagtggcacctactcatatgaaaacttkgcccaggtccttcacaaccccgagatttcccaattgctcagcaatagagaccctgggatacaggccttccttaccgtgtcctgcttaggggaaggtgattggagccacctgggattatccagttcccaagagaccctgcacctccggctaaaccctgagcccactctgcccaccatggacggcgtggctgagttctccgagtatgtctctgagactgtggacgtgccatccccatttgacctactagagccccccacctcagggggcttcctcaagctctccaagccttgttgctacatcttcccaggtggtcgtggggactctgccctctttgctgtcaatggtttcaacatcctggtggatggtggctctgatcgcaagtcctgtttktggaagctggtacggcacttggaccgcattgactcggtgctactcacacacattggggcagacaacctgccaggcatcaatggactactgcagcgcaaagtggcagagctagaggaggagcagtcccagggctctagcagttacagcgactgggtgaagaaccttatctctcctgagcttggagttgtctttttcaacgtgcctgagaagctgcggcttcctgatgcctcccggaaagccaagcgtagcattgaggaggcctgcctcactctgcagcacttaaaccgcctgggcatccaggctgagcctctatatcgtgtggtcagcaataccattgagccactgaccctcttccacaaaatgggtgtgggccggctggacatgtatgtcctcaaccctgtcaaggacagcaaggagatgcagttcctcatgcaaaagtgggcaggcaatagtaaagccaagacaggcatcgtgctgcccaatgggaaggaggctgagatctccgtgccctaccttacctctatcactgctctggtggtctggctaccagccaatcccactgagaagattgtgcgtgtgctttttccaggaaatgctccccaaaacaagatcttggagggcctagaaaagcttcggcatctggacttcctgcgttaccctgtggccacgcagaaggacctggcttctggggctgtgcctaccaacctcaagcccagcaaaatcaaacagcgggctgatagcaaggagagcctcaaagccactaccaagacggccgtgagcaagttgkccamacgggaggaggtggtagaagagggagccaaggaggcacgttcagagctgkccaaggagttakccaagacagagaagaaggcamaagagtcatctgagaagcccccagagaagcctgccaagcctgagagggtgaagacagagtcaagtgaggcactgaaggcagagaagcgaaagctgatcaaagacaaggtagggaaaaagcaccttaaagaaaagatatcaaagctggaagaaaaaaaagacaaggagaaaaaagagatcaaaaaggagaggaaagagctcargaaggatgaaggaaggaaggaggagaagaaggatgccaagaaggaggagaagaggaaagataccaaacctgagctcaagaagatttccaagccagacctaaagccctttactcctgaggtacgtaagaccctctataaagccaaggtccctggaagagtcmaaatagacaggagccgtgctatccgtggggagaaggagctgtcttctgagccccagacacccccagcccagaagggaactgtaccactcccaaccatcagtgggcacagggagctggtcctatcctcaccagaggacctcacacaggactttgaggagatgaagcgtgaggagagggctttgctggctgaacaaagggacacaggactaggagataagccattccctctagacactgcagaggagggacccccaagtacagctatccagggaacaccaccctctgttccagggctgggacaagaagaacatgtgatgaaggagaaagagcttgtcccagaggtccctgaggaacaaggcagcaaggacagaggcctagactctggggctgaaacagaggaagagaaagatacctgggaggaaaagaagcagagggaagcagagaggctcccagacagaacagaagccagagaggaaagtgaacctgaagtaaaggaggatgtgatagaaaaggctgagttagaagaaatggaggaggtacacccttcagatgaggaggaagaggacgcgacaaaagctgagggtttttaccaaaaacatatgcaggaacccttgaaggtaactccaaggagccgggaggcttttgggggtcgggaattgggactccagggcaaggcccctgagaaggagacctcgttattcctaagcagcctgaccacacctgcaggagccactgagcatgtctcttacatccaggatgagacaatccctggctactcagagactgagcagaccatctcagatgaggagatccatgatgagccggaggagcgcccagctccacccagatttcatacaagtacatatgacctgccygggcctgaaggtgctggcccattcgaagccagccaacctgccgatagtgctgttcctgctacctctggcaaagtctatggaacgccagagactgaactcacctaccccactaacatagtggctgcccctttggctgaagaggaacatgtgtcctcggccrcttcaatcactgagtgtgacaaactttcttcctttgccacatcagtggctgaggaccaatctgtggcctcacttacagctccccagacagaggagacaggcaagagctccctgctgcttgacacagtcacaagcatcccttcctcccgtactgaagctacgcagggcttggactatgtgccatcagctggtaccatctcacccacctcctcactggaagaagacaagggcttcaaatcaccaccmtgtgaggacttctctgtgactggggagtcagagaagagaggagagatcatagggaaaggcttgtctggagagagagctgtggaagaggaagaggaggagacagcaaacgtagagatgtctgagaaactttgcagtcaatatggaactccagtgtttagtgcccctgggcatgccctacatccaggagaaccagcccttggagaagcagaggagcggtgccttagcccagatgacagcacagtgaagatggcttctcctccaccatctggcccacccagtgccacccacacaccctttcatcagtccccagtggaagaaaagtctgagccccaagacttymmggaggcagactcctggggagacactaagcgcacaccaggtgtgggcaaagaagatgctgctgaggagacagtcaagccagggcctgaagagggcacactagagaaggaagagaaagttcctcctcccaggagcccccaggcccaggaagcacctgtcarcattgatgagggrcttacaggctgtaccattcaactgttgccagcacaggataaagcaatagtctttgagaytatggaggcaggagagcccacaggcccaattctgggagcagaagcccttcccggaggtttgaggactttaccccaagaacctggcaaacctcagaaagatgaggtgctcagatatcctgaccgaagcctctctcctgaagatgcagaatccctctctgtcctcagcgtgccctccccagacactgccaaccaagagcctacccccaagtctycctgtggcctgacagaacagtacctacacaaagaccrktggccagaggtatctccagaagacacccagtcactttctctgtcagaagagagtcccagcaaggagacctccctggatgtctcttctaagcagctctctccagaaagccttggcaccctccagtttggggaactaaaccttgggaaggaagaaatggggcatctgatgcaggccgagrayacctctcaccacacagctcccatgtctgttccagagccccatgcagccacagcgtcacctcccacagatgggacaactcgatactctgcacagacagacatcacagatgacagccttgacaggaagtcacctgccagctcattctctcactctacaccttcaggaaatgggaagtacttacctggggcgatcacaagccctgatgaacacattctgacacctgatagctccttctccaagagtcctgagtctttgmcaggccctgccttggaggacattgccataaagtgggaagataaagttccagggttgaaagacagaacctcagaacagaagaaggaacctgagccaaaggatgaagttttacagcagaaagacaaaactctggagcacaaggaggtggtagagccgaaggatacagccatctatcagaaagatgaggctctgcatgtaaagaatgaggctgtgaaacagcaggataaggctttagaacaaaagggcagagacttagagcaaaaagacacagccctagaacagaaggacaaggccctggaaccaaaagacaaagacttagaagaaaaagacaaggccctggaacagaaggataagattccagaagagaaagacaaagccttagaacaaaagratacagccctggaacagaaggacaagrccctggaaccaaaagataaagacttggaacaaaaggacagggtcctagaacagaaggagaagatcccagaagagaaagacaaagccttagatcaaaaagtcagaagtgttgaacataaggctccggaggacacggtcgctgaaatgaaggacagagacctagaacagacagacaaagcccctgaacagaaacaccaggcccaggaacaaaaggataaagtctcagaaaagaaggatcaggccttagaacamaaatactgggctttgggacagaaggatgaagccctggaacaaaacattcaggctctggaagagaaccaccaaactcaggagcaggagagcctagtgcaggaggataaaaccaggaaaccaaagatgctagaggaaaaatccccagaaaaggtcaasgccatggaagagaagttagaagctcttctggagaagaccaaagctstgggcctggaagagagcytagtgcaggagggcagggccagagagcaggaagaaaagtactggagggggcaggatgtggtccaggagtgkcaagaaacatctcctaccagagaggagccggctggagaacagaaagagcttrccccggcatgggaggacacatctcctgagcaggmcaatmggtattggaggggcagagaggatgtgbccttggaacaggacacatactggagggagctaagctgtgagcggaaggtctggttccctcacgagctggatgkccagggggcccgcccacactacactgargaacgggaaagcactttcctagakgagggcccagatgatgagcaagaagtacccctgcgggaacacgcaacccggagcccctgggcctcagacttcaaggatttccaggaatcctcaccacagaaggggctagaggtggagcgctggcttgctgaatcaccagttgggttgccaccagaggaagaggacaaactgacccgctctccctttgagatcatctcccctccagcttccccacctgagatggttggacaaagggttccttcagccccaggacaagagagtcctatcccagaccctaagctcatgscacacatgaagaatgaacccactactccctcatggctggctgacatcccaccctgggtgcccaaggacagacccctcccccctgcacccctctccccagctcctggtccccccacacctgccccggmatcccatactcctgcacccttctcttggggcacasccgagtatgacagtgtggtggctgcagtrcaggagggggcagctgagttggaaggtgggccatactcccccctggggaaggactaccgcaaggytgaaggggaaagggaagaagaaggtagggctgaggctcctgacaaaagctcacacagctcaaaggtaccagaggccagsaaaagccatgccaccacggagcctgagcagactgagccggagcagagagagcccacaccctatcctgatgagagaagctttcagtatgcagacatctatgagcagatgatgcttactgggcttggccctgcatgccccactagagagcctccacttggagcagctggggattggcccccatgcctctcaaccaaggaggcagctgccggccgaaacacatctgcagagaaggagctttcatctcctatctcacccaagagcctccagtctgacactccaaccttcagctatgcagccctggcaggacccactgtacccccaaggmcagagccagggccaagtatggagcccagmctcaccccacctgcagttcccccccgtgctcctatcctgagcaaaggcccaagcccccctcttaatggtaacatcctgagctgcagcccagataggaggtccccatcccccaaggaatcaggccggagtcactgggatgacagcactagtgactcagaactggagaagggggctcgggaacagscmgaaaaagaggcccaatccccaagtcctcctcaccccattcctatggggtcccccacattatggccagaaactgaggcacatgttagccctcccttggactcacacctggggcctgcccgacccagtctggacttccctgcttcagcctttggcttctcctcattgcagccagctcccccacagmtgccctctccagctgaaccccgctcggcaccctgtggctcccttgccttctctggggatcgagctctggctctggctccaggaccccccaccagaacccggyatgatgaatacctggaagtgaccaaggcccccagcctggattcctcactgccccagctcccatcacccagttctcctggggcccctctcctctccaatctgccacgacctgcctcaccagccctgtctgagggctcctcctctgaggctaccacgcctgtgatttcaagtgtggcrgagcgcttctctccaagccttgaggctgcagaacaggagtctggagagctggacccaggaatggaaccagctgcccacagcctctgggacctcactcctctgagcccagcacccccagcttcactggacttggccctagctccagctccaagcctgcctggagwcatgggtgatggcatcctgccgtgccacctggagtgctcagaggcagccacggagaagccaagccycttccaggttccctctgaggattgtgcagccaatggcccaactgaaaccagccctaaccccccaggccctgccccagccaaggctgaaaatgaagaggctgcggcttgccctgcctgggaacgtggggcctggcctgaaggagctgagaggagctcccggcctgacayattgctctcccctgagcagccagtgtgtcctgcagggggctccgggggcccacccagcagtgcctctcctgaggtcgaagctgggccccagggatgtgccactgagcctcggccccatcgtggggagctctccccatccttcctgaacccacctctgcccccatccatagatgatagggacctctcaactgaggaagttcggctagtaggaagaggggggcggcgccgggtaggggggccagggaccactgggggcccatgccctgtgactgatgagacaccccctacatcagccagtgactcaggctcctcacagtcagattctgatgtcccgccagaaactgaggagtgtccgtccatcacagctgaggcagccctcgactcagatgaagatggagacttcctacctgtggacaaagctgggggtgtcagtggtactcaccaccccaggcctggccatgacccacctcctctcccacagccagacccccgcccatcccctccccgccctgatgtgtgcatggctgacccygaggggctcagctcagagtctgggagagtagagaggctacgggagaaggaaaaggttcaggggcgagtagggcgyagggccccaggyaaggmcaagccagygtcccctgcacggcgtctggatcttcggggaaaacgctcacccacccctggtaaagggyctgcagatcgagyatcccgggccccacctcgaycacgcagcaccacaagccaggtcaccccagcagaggaaaaggatggacacagccccatgtccaaaggmctagtcaatggactcaaggcaggaccaatggccttgagttccaagggcagctctggtgcccctgtatatgtggatctcgcctacatcccgaatcattgsagtggcaagactgctgacctwgacttcttccgtcgagtgcgtgcatcctactatgtggtcagtgggaatgaccctgccaatggcgagccaagccgggctgtgctggatgccctgctggagggcaaggcccagtggggggagaatcttcaggtgactctgatccctactcatgacacggaggtgactcgtgagtggtaccaacaaactcatgagcagcagcaacaactgaatgtcctggtcctggctagcagcagcaccgtggtgatgcaggatgagtccttccctgcctgcaagattgagttctgaaagagccgccctcccttccccaaggatccactcccccagctcctttagagaatggctactgctgagtcctttggggttgagggagatgggagctagggggaggggagggagatgtcttgttgtggggacttgggctgggctaaatgggaggggttgtccctccccatcatccattcctgtgaggtgtctcaaaccaaagttaacagggagaggatgggggaggggacamattagaataggatagcatctgatgcctgagaaccctctcctagcactgtcaaatgctggtattgaatggggactgaggatgggtctcagagagcaacctcctccctcgtagagggagattatatccccaactccagggacctctttatctcaatctatttatttggcatcctgggarggatttccaatagtaatttatgtgacctggggcaggataccgtcagtgaggtgcccagagctgcaccctttcctccatttcccatcccccatctcctcaaccaccagggtctgagttctagcagggtcctgggggtatcccactgctatactgttctactgcttccctcagtatctgaatgtctcaatttaaaacttgaagctctttagaccaatagactggtgagaggagaaaggagcttatcccccagaccctgctttataccattcacatcccagggctgtgtccagacagcacaaaacggcaaggagagcccaagccccaatgccagaattcttccaaactccctgactctttgaagtttttactcaccccatttcaattatcctgatcccttctcatcccctgcttggcttctctgcatgtggtcatctgctgtggcttggtgtttaatgggttaaaaataagccactgcctgacatcccaacatttgacaccccagcaatgtgtgactcccccaacattccactatgccatcctgcagctgaaatgggaacactggctgcctctccaaacccgctcttggacagaggatctgggaggtggaagccaggccagaggacttggggaaaatgagatggaggaaggaaaaagggagaagctgagccacagsttaactcctacagagtgaaatgaaaacgggctgaaaataccaccccaggagaggacctcgccccaagcaagccagtgagcagccctgccagactactgccagactgagaaacccagaagctggtagtcatgtgggcttgccttctctgccaaacgactgggaaaccaaaatgagcccaccttgtgttcttcctagctccaccctccccgtgctgctgtgttctgctcctccccacgcttccctgctatagttcccagctgctgtaacggagccacctccaactctaacaataaaccaagttcattgca

SEQ ID NO: 531 - DNA, 10475 bp, Homo sapiens
atggagacaactccggggctggggctccgaagtcccggcgcaccgctggctcagaaccccgcggagctgctgtgcgaggccggagccgcggtggcggctgcacgctgggacctgcagaagcactctttgctaattgtgatcggcgatatcggtacagagagtcagctgagggccgtgcgggcccaccttgaacaagggattctctcctggaacattgacctgtcatcctttgacttgaaccaacagttgagactcttcattacccggcacctagctcacttctcctcagaggtcaaaggccagaggaccctttgccaccagagtgagatcctagagaccatcatcctggtaaatcccagtgcagacagcatcagctctgaggtwcatcatcttctkagcagctcatcagcttataaactactaatcttgagtgggcaaagtttagagcctgggggagacctcatcctacagagtggcacctactcatatgaaaacttkgcccaggtccttcacaaccccgagatttcccaattgctcagcaatagagaccctgggatacaggccttccttaccgtgtcctgcttaggggaaggtgattggagccacctgggattatccagttcccaagagaccctgcacctccggctaaaccctgagcccactctgcccaccatggacggcgtggctgagttctccgagtatgtctctgagactgtggacgtgccatccccatttgacctactagagccccccacctcagggggcttcctcaagctctccaagccttgttgctacatcttcccaggtggtcgtggggactctgccctctttgctgtcaatggtttcaacatcctggtggatggtggctctgatcgcaagtcctgtttktggaagctggtacggcacttggaccgcattgactcggtgctactcacacacattggggcagacaacctgccaggcatcaatggactactgcagcgcaaagtggcagagctagaggaggagcagtcccagggctctagcagttacagcgactgggtgaagaaccttatctctcctgagcttggagttgtctttttcaacgtgcctgagaagctgcggcttcctgatgcctcccggaaagccaagcgtagcattgaggaggcctgcctcactctgcagcacttaaaccgcctgggcatccaggctgagcctctatatcgtgtggtcagcaataccattgagccactgaccctcttccacaaaatgggtgtgggccggctggacatgtatgtcctcaaccctgtcaaggacagcaaggagatgcagttcctcatgcaaaagtgggcaggcaatagtaaagccaagacaggcatcgtgctgcccaatgggaaggaggctgagatctccgtgccctaccttacctctatcactgctctggtggtctggctaccagccaatcccactgagaagattgtgcgtgtgctttttccaggaaatgctccccaaaacaagatcttggagggcctagaaaagcttcggcatctggacttcctgcgttaccctgtggccacgcagaaggacctggcttctggggctgtgcctaccaacctcaagcccagcaaaatcaaacagcgggctgatagcaaggagagcctcaaagccactaccaagacggccgtgagcaagttgkccamacgggaggaggtggtagaagagggagccaaggaggcacgttcagagctgkccaaggagttakccaagacagagaagaaggcamaagagtcatctgagaagcccccagagaagcctgccaagcctgagagggtgaagacagagtcaagtgaggcactgaaggcagagaagcgaaagctgatcaaagacaaggtagggaaaaagcaccttaaagaaaagatatcaaagctggaagaaaaaaaagacaaggagaaaaaagagatcaaaaaggagaggaaagagctcargaaggatgaaggaaggaaggaggagaagaaggatgccaagaaggaggagaagaggaaagataccaaacctgagctcaagaagatttccaagccagacctaaagccctttactcctgaggtacgtaagaccctctataaagccaaggtccctggaagagtcmaaatagacaggagccgtgctatccgtggggagaaggagctgtcttctgagccccagacacccccagcccagaagggaactgtaccactcccaaccatcagtgggcacagggagctggtcctatcctcaccagaggacctcacacaggactttgaggagatgaagcgtgaggagagggctttgctggctgaacaaagggacacaggactaggagataagccattccctctagacactgcagaggagggacccccaagtacagctatccagggaacaccaccctctgttccagggctgggacaagaagaacatgtgatgaaggagaaagagcttgtcccagaggtccctgaggaacaaggcagcaaggacagaggcctagactctggggctgaaacagaggaagagaaagatacctgggaggaaaagaagcagagggaagcagagaggctcccagacagaacagaagccagagaggaaagtgaacctgaagtaaaggaggatgtgatagaaaaggctgagttagaagaaatggaggaggtacacccttcagatgaggaggaagaggacgcgacaaaagctgagggtttttaccaaaaacatatgcaggaacccttgaaggtaactccaaggagccgggaggcttttgggggtcgggaattgggactccagggcaaggcccctgagaaggagacctcgttattcctaagcagcctgaccacacctgcaggagccactgagcatgtctcttacatccaggatgagacaatccctggctactcagagactgagcagaccatctcagatgaggagatccatgatgagccggaggagcgcccagctccacccagatttcatacaagtacatatgacctgccygggcctgaaggtgctggcccattcgaagccagccaacctgccgatagtgctgttcctgctacctctggcaaagtctatggaacgccagagactgaactcacctaccccactaacatagtggctgcccctttggctgaagaggaacatgtgtcctcggccrcttcaatcactgagtgtgacaaactttcttcctttgccacatcagtggctgaggaccaatctgtggcctcacttacagctccccagacagaggagacaggcaagagctccctgctgcttgacacagtcacaagcatcccttcctcccgtactgaagctacgcagggcttggactatgtgccatcagctggtaccatctcacccacctcctcactggaagaagacaagggcttcaaatcaccaccmtgtgaggacttctctgtgactggggagtcagagaagagaggagagatcatagggaaaggcttgtctggagagagagctgtggaagaggaagaggaggagacagcaaacgtagagatgtctgagaaactttgcagtcaatatggaactccagtgtttagtgcccctgggcatgccctacatccaggagaaccagcccttggagaagcagaggagcggtgccttagcccagatgacagcacagtgaagatggcttctcctccaccatctggcccacccagtgccacccacacaccctttcatcagtccccagtggaagaaaagtctgagccccaagacttymmggaggcagactcctggggagacactaagcgcacaccaggtgtgggcaaagaagatgctgctgaggagacagtcaagccagggcctgaagagggcacactagagaaggaagagaaagttcctcctcccaggagcccccaggcccaggaagcacctgtcarcattgatgagggrcttacaggctgtaccattcaactgttgccagcacaggataaagcaatagtctttgagaytatggaggcaggagagcccacaggcccaattctgggagcagaagcccttcccggaggtttgaggactttaccccaagaacctggcaaacctcagaaagatgaggtgctcagatatcctgaccgaagcctctctcctgaagatgcagaatccctctctgtcctcagcgtgccctccccagacactgccaaccaagagcctacccccaagtctycctgtggcctgacagaacagtacctacacaaagaccrktggccagaggtatctccagaagacacccagtcactttctctgtcagaagagagtcccagcaaggagacctccctggatgtctcttctaagcagctctctccagaaagccttggcaccctccagtttggggaactaaaccttgggaaggaagaaatggggcatctgatgcaggccgagrayacctctcaccacacagctcccatgtctgttccagagccccatgcagccacagcgtcacctcccacagatgggacaactcgatactctgcacagacagacatcacagatgacagccttgacaggaagtcacctgccagctcattctctcactctacaccttcaggaaatgggaagtacttacctggggcgatcacaagccctgatgaacacattctgacacctgatagctccttctccaagagtcctgagtctttgmcaggccctgccttggaggacattgccataaagtgggaagataaagttccagggttgaaagacagaacctcagaacagaagaaggaacctgagccaaaggatgaagttttacagcagaaagacaaaactctggagcacaaggaggtggtagagccgaaggatacagccatctatcagaaagatgaggctctgcatgtaaagaatgaggctgtgaaacagcaggataaggctttagaacaaaagggcagagacttagagcaaaaagacacagccctagaacagaaggacaaggccctggaaccaaaagacaaagacttagaagaaaaagacaaggccctggaacagaaggataagattccagaagagaaagacaaagccttagaacaaaagratacagccctggaacagaaggacaagrccctggaaccaaaagataaagacttggaacaaaaggacagggtcctagaacagaaggagaagatcccagaagagaaagacaaagccttagatcaaaaagtcagaagtgttgaacataaggctccggaggacacggtcgctgaaatgaaggacagagacctagaacagacagacaaagcccctgaacagaaacaccaggcccaggaacaaaaggataaagtctcagaaaagaaggatcaggccttagaacamaaatactgggctttgggacagaaggatgaagccctggaacaaaacattcaggctctggaagagaaccaccaaactcaggagcaggagagcctagtgcaggaggataaaaccaggaaaccaaagatgctagaggaaaaatccccagaaaaggtcaasgccatggaagagaagttagaagctcttctggagaagaccaaagctstgggcctggaagagagcytagtgcaggagggcagggccagagagcaggaagaaaagtactggagggggcaggatgtggtccaggagtgkcaagaaacatctcctaccagagaggagccggctggagaacagaaagagcttrccccggcatgggaggacacatctcctgagcaggmcaatmggtattggaggggcagagaggatgtgbccttggaacaggacacatactggagggagctaagctgtgagcggaaggtctggttccctcacgagctggatgkccagggggcccgcccacactacactgargaacgggaaagcactttcctagakgagggcccagatgatgagcaagaagtacccctgcgggaacacgcaacccggagcccctgggcctcagacttcaaggatttccaggaatcctcaccacagaaggggctagaggtggagcgctggcttgctgaatcaccagttgggttgccaccagaggaagaggacaaactgacccgctctccctttgagatcatctcccctccagcttccccacctgagatggttggacaaagggttccttcagccccaggacaagagagtcctatcccagaccctaagctcatgscacacatgaagaatgaacccactactccctcatggctggctgacatcccaccctgggtgcccaaggacagacccctcccccctgcacccctctccccagctcctggtccccccacacctgccccggmatcccatactcctgcacccttctcttggggcacasccgagtatgacagtgtggtggctgcagtrcaggagggggcagctgagttggaaggtgggccatactcccccctggggaaggactaccgcaaggytgaaggggaaagggaagaagaaggtagggctgaggctcctgacaaaagctcacacagctcaaaggtaccagaggccagsaaaagccatgccaccacggagcctgagcagactgagccggagcagagagagcccacaccctatcctgatgagagaagctttcagtatgcagacatctatgagcagatgatgcttactgggcttggccctgcatgccccactagagagcctccacttggagcagctggggattggcccccatgcctctcaaccaaggaggcagctgccggccgaaacacatctgcagagaaggagctttcatctcctatctcacccaagagcctccagtctgacactccaaccttcagctatgcagccctggcaggacccactgtacccccaaggmcagagccagggccaagtatggagcccagmctcaccccacctgcagttcccccccgtgctcctatcctgagcaaaggcccaagcccccctcttaatggtaacatcctgagctgcagcccagataggaggtccccatcccccaaggaatcaggccggagtcactgggatgacagcactagtgactcagaactggagaagggggctcgggaacagscmgaaaaagaggcccaatccccaagtcctcctcaccccattcctatggggtcccccacattatggccagaaactgaggcacatgttagccctcccttggactcacacctggggcctgcccgacccagtctggacttccctgcttcagcctttggcttctcctcattgcagccagctcccccacagmtgccctctccagctgaaccccgctcggcaccctgtggctcccttgccttctctggggatcgagctctggctctggctccaggaccccccaccagaacccggyatgatgaatacctggaagtgaccaaggcccccagcctggattcctcactgccccagctcccatcacccagttctcctggggcccctctcctctccaatctgccacgacctgcctcaccagccctgtctgagggctcctcctctgaggctaccacgcctgtgatttcaagtgtggcrgagcgcttctctccaagccttgaggctgcagaacaggagtctggagagctggacccaggaatggaaccagctgcccacagcctctgggacctcactcctctgagcccagcacccccagcttcactggacttggccctagctccagctccaagcctgcctggagwcatgggtgatggcatcctgccgtgccacctggagtgctcagaggcagccacggagaagccaagccycttccaggttccctctgaggattgtgcagccaatggcccaactgaaaccagccctaaccccccaggccctgccccagccaaggctgaaaatgaagaggctgcggcttgccctgcctgggaacgtggggcctggcctgaaggagctgagaggagctcccggcctgacayattgctctcccctgagcagccagtgtgtcctgcagggggctccgggggcccacccagcagtgcctctcctgaggtcgaagctgggccccagggatgtgccactgagcctcggccccatcgtggggagctctccccatccttcctgaacccacctctgcccccatccatagatgatagggacctctcaactgaggaagttcggctagtaggaagaggggggcggcgccgggtaggggggccagggaccactgggggcccatgccctgtgactgatgagacaccccctacatcagccagtgactcaggctcctcacagtcagattctgatgtcccgccagaaactgaggagtgtccgtccatcacagctgaggcagccctcgactcagatgaagatggagacttcctacctgtggacaaagctgggggtgtcagtggtactcaccaccccaggcctggccatgacccacctcctctcccacagccagacccccgcccatcccctccccgccctgatgtgtgcatggctgacccygaggggctcagctcagagtctgggagagtagagaggctacgggagaaggaaaaggttcaggggcgagtagggcgyagggccccaggyaaggmcaagccagygtcccctgcacggcgtctggatcttcggggaaaacgctcacccacccctggtaaagggyctgcagatcgagyatcccgggccccacctcgaycacgcagcaccacaagccaggtcaccccagcagaggaaaaggatggacacagccccatgtccaaaggmctagtcaatggactcaaggcaggaccaatggccttgagttccaagggcagctctggtgcccctgtatatgtggatctcgcctacatcccgaatcattgsagtggcaagactgctgacctwgacttcttccgtcgagtgcgtgcatcctactatgtggtcagtgggaatgaccctgccaatggcgagccaagccgggctgtgctggatgccctgctggagggcaaggcccagtggggggagaatcttcaggtgagtgactctgatccctactcatgacacggaggtgactcgtgagtggtaccaacaaactcatgagcagcagcaacaactgaatgtcctggtcctggctagcagcagcaccgtggtgatgcaggatgagtccttccctgcctgcaagattgagttctgaaagagccgccctcccttccccaaggatccactcccccagctcctttagagaatggctactgctgagtcctttggggttgagggagatgggagctagggggaggggagggagatgtcttgttgtggggacttgggctgggctaaatgggaggggttgtccctccccatcatccattcctgtgaggtgtctcaaaccaaagttaacagggagaggatgggggaggggacamattagaataggatagcatctgatgcctgagaaccctctcctagcactgtcaaatgctggtattgaatggggactgaggatgggtctcagagagcaacctcctccctcgtagagggagattatatccccaactccagggacctctttatctcaatctatttatttggcatcctgggarggatttccaatagtaatttatgtgacctggggcaggataccgtcagtgaggtgcccagagctgcaccctttcctccatttcccatcccccatctcctcaaccaccagggtctgagttctagcagggtcctgggggtatcccactgctatactgttctactgcttccctcagtatctgaatgtctcaatttaaaacttgaagctctttagaccaatagactggtgagaggagaaaggagcttatcccccagaccctgctttataccattcacatcccagggctgtgtccagacagcacaaaacggcaaggagagcccaagccccaatgccagaattcttccaaactccctgactctttgaagtttttactcaccccatttcaattatcctgatcccttctcatcccctgcttggcttctctgcatgtggtcatctgctgtggcttggtgtttaatgggttaaaaataagccactgcctgacatcccaacatttgacaccccagcaatgtgtgactcccccaacattccactatgccatcctgcagctgaaatgggaacactggctgcctctccaaacccgctcttggacagaggatctgggaggtggaagccaggccagaggacttggggaaaatgagatggaggaaggaaaaagggagaagctgagccacagsttaactcctacagagtgaaatgaaaacgggctgaaaataccaccccaggagaggacctcgccccaagcaagccagtgagcagccctgccagactactgccagactgagaaacccagaagctggtagtcatgtgggcttgccttctctgccaaacgactgggaaaccaaaatgagcccaccttgtgttcttcctagctccaccctccccgtgctgctgtgttctgctcctccccacgcttccctgctatagttcccagctgctgtaacggagccacctccaactctaacaataaaccaagttcattgca

SEQ ID NO: 532 - DNA, 10240 bp, Homo sapiens
ttccctgaagctgccggctgaggccggagctgccgcctccatgagaggcttcctcctacaccccagggccagaggaccctttgccaccagagtgagatcctagagaccatcatcctggtaaatcccagtgcagacagcatcagctctgaggtwcatcatcttctkagcagctcatcagcttataaactactaatcttgagtgggcaaagtttagagcctgggggagacctcatcctacagagtggcacctactcatatgaaaacttkgcccaggtccttcacaaccccgagatttcccaattgctcagcaatagagaccctgggatacaggccttccttaccgtgtcctgcttaggggaaggtgattggagccacctgggattatccagttcccaagagaccctgcacctccggctaaaccctgagcccactctgcccaccatggacggcgtggctgagttctccgagtatgtctctgagactgtggacgtgccatccccatttgacctactagagccccccacctcagggggcttcctcaagctctccaagccttgttgctacatcttcccaggtggtcgtggggactctgccctctttgctgtcaatggtttcaacatcctggtggatggtggctctgatcgcaagtcctgtttktggaagctggtacggcacttggaccgcattgactcggtgctactcacacacattggggcagacaacctgccaggcatcaatggactactgcagcgcaaagtggcagagctagaggaggagcagtcccagggctctagcagttacagcgactgggtgaagaaccttatctctcctgagcttggagttgtctttttcaacgtgcctgagaagctgcggcttcctgatgcctcccggaaagccaagcgtagcattgaggaggcctgcctcactctgcagcacttaaaccgcctgggcatccaggctgagcctctatatcgtgtggtcagcaataccattgagccactgaccctcttccacaaaatgggtgtgggccggctggacatgtatgtcctcaaccctgtcaaggacagcaaggagatgcagttcctcatgcaaaagtgggcaggcaatagtaaagccaagacaggcatcgtgctgcccaatgggaaggaggctgagatctccgtgccctaccttacctctatcactgctctggtggtctggctaccagccaatcccactgagaagattgtgcgtgtgctttttccaggaaatgctccccaaaacaagatcttggagggcctagaaaagcttcggcatctggacttcctgcgttaccctgtggccacgcagaaggacctggcttctggggctgtgcctaccaacctcaagcccagcaaaatcaaacagcgggctgatagcaaggagagcctcaaagccactaccaagacggccgtgagcaagttgkccamacgggaggaggtggtagaagagggagccaaggaggcacgttcagagctgkccaaggagttakccaagacagagaagaaggcamaagagtcatctgagaagcccccagagaagcctgccaagcctgagagggtgaagacagagtcaagtgaggcactgaaggcagagaagcgaaagctgatcaaagacaaggtagggaaaaagcaccttaaagaaaagatatcaaagctggaagaaaaaaaagacaaggagaaaaaagagatcaaaaaggagaggaaagagctcargaaggatgaaggaaggaaggaggagaagaaggatgccaagaaggaggagaagaggaaagataccaaacctgagctcaagaagatttccaagccagacctaaagccctttactcctgaggtacgtaagaccctctataaagccaaggtccctggaagagtcmaaatagacaggagccgtgctatccgtggggagaaggagctgtcttctgagccccagacacccccagcccagaagggaactgtaccactcccaaccatcagtgggcacagggagctggtcctatcctcaccagaggacctcacacaggactttgaggagatgaagcgtgaggagagggctttgctggctgaacaaagggacacaggactaggagataagccattccctctagacactgcagaggagggacccccaagtacagctatccagggaacaccaccctctgttccagggctgggacaagaagaacatgtgatgaaggagaaagagcttgtcccagaggtccctgaggaacaaggcagcaaggacagaggcctagactctggggctgaaacagaggaagagaaagatacctgggaggaaaagaagcagagggaagcagagaggctcccagacagaacagaagccagagaggaaagtgaacctgaagtaaaggaggatgtgatagaaaaggctgagttagaagaaatggaggaggtacacccttcagatgaggaggaagaggacgcgacaaaagctgagggtttttaccaaaaacatatgcaggaacccttgaaggtaactccaaggagccgggaggcttttgggggtcgggaattgggactccagggcaaggcccctgagaaggagacctcgttattcctaagcagcctgaccacacctgcaggagccactgagcatgtctcttacatccaggatgagacaatccctggctactcagagactgagcagaccatctcagatgaggagatccatgatgagccggaggagcgcccagctccacccagatttcatacaagtacatatgacctgccygggcctgaaggtgctggcccattcgaagccagccaacctgccgatagtgctgttcctgctacctctggcaaagtctatggaacgccagagactgaactcacctaccccactaacatagtggctgcccctttggctgaagaggaacatgtgtcctcggccrcttcaatcactgagtgtgacaaactttcttcctttgccacatcagtggctgaggaccaatctgtggcctcacttacagctccccagacagaggagacaggcaagagctccctgctgcttgacacagtcacaagcatcccttcctcccgtactgaagctacgcagggcttggactatgtgccatcagctggtaccatctcacccacctcctcactggaagaagacaagggcttcaaatcaccaccmtgtgaggacttctctgtgactggggagtcagagaagagaggagagatcatagggaaaggcttgtctggagagagagctgtggaagaggaagaggaggagacagcaaacgtagagatgtctgagaaactttgcagtcaatatggaactccagtgtttagtgcccctgggcatgccctacatccaggagaaccagcccttggagaagcagaggagcggtgccttagcccagatgacagcacagtgaagatggcttctcctccaccatctggcccacccagtgccacccacacaccctttcatcagtccccagtggaagaaaagtctgagccccaagacttymmggaggcagactcctggggagacactaagcgcacaccaggtgtgggcaaagaagatgctgctgaggagacagtcaagccagggcctgaagagggcacactagagaaggaagagaaagttcctcctcccaggagcccccaggcccaggaagcacctgtcarcattgatgagggrcttacaggctgtaccattcaactgttgccagcacaggataaagcaatagtctttgagaytatggaggcaggagagcccacaggcccaattctgggagcagaagcccttcccggaggtttgaggactttaccccaagaacctggcaaacctcagaaagatgaggtgctcagatatcctgaccgaagcctctctcctgaagatgcagaatccctctctgtcctcagcgtgccctccccagacactgccaaccaagagcctacccccaagtctycctgtggcctgacagaacagtacctacacaaagaccrktggccagaggtatctccagaagacacccagtcactttctctgtcagaagagagtcccagcaaggagacctccctggatgtctcttctaagcagctctctccagaaagccttggcaccctccagtttggggaactaaaccttgggaaggaagaaatggggcatctgatgcaggccgagrayacctctcaccacacagctcccatgtctgttccagagccccatgcagccacagcgtcacctcccacagatgggacaactcgatactctgcacagacagacatcacagatgacagccttgacaggaagtcacctgccagctcattctctcactctacaccttcaggaaatgggaagtacttacctggggcgatcacaagccctgatgaacacattctgacacctgatagctccttctccaagagtcctgagtctttgmcaggccctgccttggaggacattgccataaagtgggaagataaagttccagggttgaaagacagaacctcagaacagaagaaggaacctgagccaaaggatgaagttttacagcagaaagacaaaactctggagcacaaggaggtggtagagccgaaggatacagccatctatcagaaagatgaggctctgcatgtaaagaatgaggctgtgaaacagcaggataaggctttagaacaaaagggcagagacttagagcaaaaagacacagccctagaacagaaggacaaggccctggaaccaaaagacaaagacttagaagaaaaagacaaggccctggaacagaaggataagattccagaagagaaagacaaagccttagaacaaaagratacagccctggaacagaaggacaagrccctggaaccaaaagataaagacttggaacaaaaggacagggtcctagaacagaaggagaagatcccagaagagaaagacaaagccttagatcaaaaagtcagaagtgttgaacataaggctccggaggacacggtcgctgaaatgaaggacagagacctagaacagacagacaaagcccctgaacagaaacaccaggcccaggaacaaaaggataaagtctcagaaaagaaggatcaggccttagaacamaaatactgggctttgggacagaaggatgaagccctggaacaaaacattcaggctctggaagagaaccaccaaactcaggagcaggagagcctagtgcaggaggataaaaccaggaaaccaaagatgctagaggaaaaatccccagaaaaggtcaasgccatggaagagaagttagaagctcttctggagaagaccaaagctstgggcctggaagagagcytagtgcaggagggcagggccagagagcaggaagaaaagtactggagggggcaggatgtggtccaggagtgkcaagaaacatctcctaccagagaggagccggctggagaacagaaagagcttrccccggcatgggaggacacatctcctgagcaggmcaatmggtattggaggggcagagaggatgtgbccttggaacaggacacatactggagggagctaagctgtgagcggaaggtctggttccctcacgagctggatgkccagggggcccgcccacactacactgargaacgggaaagcactttcctagakgagggcccagatgatgagcaagaagtacccctgcgggaacacgcaacccggagcccctgggcctcagacttcaaggatttccaggaatcctcaccacagaaggggctagaggtggagcgctggcttgctgaatcaccagttgggttgccaccagaggaagaggacaaactgacccgctctccctttgagatcatctcccctccagcttccccacctgagatggttggacaaagggttccttcagccccaggacaagagagtcctatcccagaccctaagctcatgscacacatgaagaatgaacccactactccctcatggctggctgacatcccaccctgggtgcccaaggacagacccctcccccctgcacccctctccccagctcctggtccccccacacctgccccggmatcccatactcctgcacccttctcttggggcacasccgagtatgacagtgtggtggctgcagtrcaggagggggcagctgagttggaaggtgggccatactcccccctggggaaggactaccgcaaggytgaaggggaaagggaagaagaaggtagggctgaggctcctgacaaaagctcacacagctcaaaggtaccagaggccagsaaaagccatgccaccacggagcctgagcagactgagccggagcagagagagcccacaccctatcctgatgagagaagctttcagtatgcagacatctatgagcagatgatgcttactgggcttggccctgcatgccccactagagagcctccacttggagcagctggggattggcccccatgcctctcaaccaaggaggcagctgccggccgaaacacatctgcagagaaggagctttcatctcctatctcacccaagagcctccagtctgacactccaaccttcagctatgcagccctggcaggacccactgtacccccaaggmcagagccagggccaagtatggagcccagmctcaccccacctgcagttcccccccgtgctcctatcctgagcaaaggcccaagcccccctcttaatggtaacatcctgagctgcagcccagataggaggtccccatcccccaaggaatcaggccggagtcactgggatgacagcactagtgactcagaactggagaagggggctcgggaacagscmgaaaaagaggcccaatccccaagtcctcctcaccccattcctatggggtcccccacattatggccagaaactgaggcacatgttagccctcccttggactcacacctggggcctgcccgacccagtctggacttccctgcttcagcctttggcttctcctcattgcagccagctcccccacagmtgccctctccagctgaaccccgctcggcaccctgtggctcccttgccttctctggggatcgagctctggctctggctccaggaccccccaccagaacccggyatgatgaatacctggaagtgaccaaggcccccagcctggattcctcactgccccagctcccatcacccagttctcctggggcccctctcctctccaatctgccacgacctgcctcaccagccctgtctgagggctcctcctctgaggctaccacgcctgtgatttcaagtgtggcrgagcgcttctctccaagccttgaggctgcagaacaggagtctggagagctggacccaggaatggaaccagctgcccacagcctctgggacctcactcctctgagcccagcacccccagcttcactggacttggccctagctccagctccaagcctgcctggagwcatgggtgatggcatcctgccgtgccacctggagtgctcagaggcagccacggagaagccaagccycttccaggttccctctgaggattgtgcagccaatggcccaactgaaaccagccctaaccccccaggccctgccccagccaaggctgaaaatgaagaggctgcggcttgccctgcctgggaacgtggggcctggcctgaaggagctgagaggagctcccggcctgacayattgctctcccctgagcagccagtgtgtcctgcagggggctccgggggcccacccagcagtgcctctcctgaggtcgaagctgggccccagggatgtgccactgagcctcggccccatcgtggggagctctccccatccttcctgaacccacctctgcccccatccatagatgatagggacctctcaactgaggaagttcggctagtaggaagaggggggcggcgccgggtaggggggccagggaccactgggggcccatgccctgtgactgatgagacaccccctacatcagccagtgactcaggctcctcacagtcagattctgatgtcccgccagaaactgaggagtgtccgtccatcacagctgaggcagccctcgactcagatgaagatggagacttcctacctgtggacaaagctgggggtgtcagtggtactcaccaccccaggcctggccatgacccacctcctctcccacagccagacccccgcccatcccctccccgccctgatgtgtgcatggctgacccygaggggctcagctcagagtctgggagagtagagaggctacgggagaaggaaaaggttcaggggcgagtagggcgyagggccccaggyaaggmcaagccagygtcccctgcacggcgtctggatcttcggggaaaacgctcacccacccctggtaaagggyctgcagatcgagyatcccgggccccacctcgaycacgcagcaccacaagccaggtcaccccagcagaggaaaaggatggacacagccccatgtccaaaggmctagtcaatggactcaaggcaggaccaatggccttgagttccaagggcagctctggtgcccctgtatatgtggatctcgcctacatcccgaatcattgsagtggcaagactgctgacctwgacttcttccgtcgagtgcgtgcatcctactatgtggtcagtgggaatgaccctgccaatggcgagccaagccgggctgtgctggatgccctgctggagggcaaggcccagtggggggagaatcttcaggtgactctgatccctactcatgacacggaggtgactcgtgagtggtaccaacaaactcatgagcagcagcaacaactgaatgtcctggtcctggctagcagcagcaccgtggtgatgcaggatgagtccttccctgcctgcaagattgagttctgaaagagccgccctcccttccccaaggatccactcccccagctcctttagagaatggctactgctgagtcctttggggttgagggagatgggagctagggggaggggagggagatgtcttgttgtggggacttgggctgggctaaatgggaggggttgtccctccccatcatccattcctgtgaggtgtctcaaaccaaagttaacagggagaggatgggggaggggacamattagaataggatagcatctgatgcctgagaaccctctcctagcactgtcaaatgctggtattgaatggggactgaggatgggtctcagagagcaacctcctccctcgtagagggagattatatccccaactccagggacctctttatctcaatctatttatttggcatcctgggarggatttccaatagtaatttatgtgacctggggcaggataccgtcagtgaggtgcccagagctgcaccctttcctccatttcccatcccccatctcctcaaccaccagggtctgagttctagcagggtcctgggggtatcccactgctatactgttctactgcttccctcagtatctgaatgtctcaatttaaaacttgaagctctttagaccaatagactggtgagaggagaaaggagcttatcccccagaccctgctttataccattcacatcccagggctgtgtccagacagcacaaaacggcaaggagagcccaagccccaatgccagaattcttccaaactccctgactctttgaagtttttactcaccccatttcaattatcctgatcccttctcatcccctgcttggcttctctgcatgtggtcatctgctgtggcttggtgtttaatgggttaaaaataagccactgcctgacatcccaacatttgacaccccagcaatgtgtgactcccccaacattccactatgccatcctgcagctgaaatgggaacactggctgcctctccaaacccgctcttggacagaggatctgggaggtggaagccaggccagaggacttggggaaaatgagatggaggaaggaaaaagggagaagctgagccacagsttaactcctacagagtgaaatgaaaacgggctgaaaataccaccccaggagaggacctcgccccaagcaagccagtgagcagccctgccagactactgccagactgagaaacccagaagctggtagtcatgtgggcttgccttctctgccaaacgactgggaaaccaaaatgagcccaccttgtgttcttcctagctccaccctccccgtgctgctgtgttctgctcctccccacgcttccctgctatagttcccagctgctgtaacggagccacctccaactctaacaataaaccaagttcattgca

SEQ ID NO: 533 - DNA, 6270 bp, Homo sapiens
cgttgtttggcgtgtttttttttttttttgttttttgtcactgcctgcctgggtcctgcccgaggtctccatcctcggtttccctgtccttgccccgggccctgggagtgctctggaaggctgcgcagtattggaggggacagaatgaccttccggccttgagtccctggggagcagatggaccctactggaagtcagttggattcagatttctctcagcaagatactccttgcctgataattgaagattctcagcctgaaagccaggttctagaggatgattctggttctcacttcagtatgctatctcgacaccttcctaatctccagacgcacaaagaaaatcctgtgttggatgttgtgtccaatcctgaacaaacagctggagaagaacgaggagacggtaatagtgggttcaatgaacatttgaaagaaaacaaggttgcagaccctgtggattcttctaacttggacacatgtggttccatcagtcaggtcattgagcagttacctcagccaaacaggacaagcagtgttctgggaatgtcagtggaatctgctcctgctgtggaggaagagaagggagaagagttggaacagaaggagaaagagaaggaagaagatacttcaggcaatactacacattcccttggtgctgaagatactgcctcatcacagttgggttttggggttctggaactctcccagagccaggatgttgaggaaaatactgtgccatatgaagtggacaaagagcagctacaatcagtaaccaccaactctggttataccaggctgtctgatgtggatgctaatactgcaattaagcatgaagaacagtccaacgaagatatccccatagcagaacagtccagcaaggacatccctgtgacagcacagcccagtaaggatgtacatgttgtaaaagagcaaaatccaccacctgcaaggtcagaggacatgccttttagccccaaagcatctgttgctgctatggaagcaaaagaacagttgtctgcacaagaacttatggaaagtggactgcagattcagaagtcaccagagcctgaggttttgtcaactcaggaagacttgtttgaccagagcaataaaacagtatcttctgatggttgctctactccttcaagggaggaaggtgggtgttctttggcttccactcctgccaccactctgcatctcctgcagctctctggtcagaggtcccttgttcaggasagtctttccacgaattcttcagatcttgttgctccttctcctgatgctttccgatctactccttttatcgttcctagcagtcccacagagcaagaagggagacaagataagccaatggacacgtcagtgttatctgaagaaggaggagagccttttcagaagaaacttcaaagtrgtgaaccagtggarttagaaaacccccctctcctgcctgagtccactgtatcaccacaagcctcaacaccaatatctcagagcacaccagtcttccctcctgggtcacttcctatcccatcccagcctcagttttctcatgacatttttattccttccccaagtctggaagaacaatcaaatgatgggaagaaagatggagatatgcatagttcatctttgacagttgagtgttctaaaacttcagagattgaaccaaagaattcccctgaggatcttgggctatctttgacaggggattcttgcaagttgatgctttctacaagtgaatatagtcagtccccaaagatggagagcttgagttctcacagaattgatgaagatggagaaaacacacagattgaggatacggaacccatgtctccagttctcaattctaaatttgttcctgctgaaaatgatagtatcctgatgaatccagcacaggatggtgaagtacaactgagtcagaatgatgacaaaacaaagggagatgatacagacaccagggatgacattagtattttagccactggttgcaagggcagagaagaaacggtagcagaagatgtttgtattgatctcacttgtgattcggggagtcaggcagttccgtcaccagctactcgatctgaggcactttctagtgtgttagatcaggaggaagctatggaaattaaagaacaccatccagaggaggggtcttcagggtctgaggtggaagaaatccctgagacaccttgtgaaagtcaaggagaggaactcaaagaagaaaatatggagagtgttccgttgcacctttctctkactgaaactcagtcccragggttgtgtcttcaaaaggaaatgccaaaaaaagaatgctcagaagctatggaagttgaaaccagtgtgattagtattgattcccctcaaaagttggcaatacttgaccaagaattggaacataaggaacaggaagcttgggaagaagctacttcagaggactccagtgttgtcattgtagatgtgaaagagccatctcccagagttgatgtttcttgtgaacctttggagggagtggagaagtgctcagattcccagtcatgggaggatattgctccagaaatagaaccatgtgctgagaatagattagacaccaaggaagaaaagagtgtagaatatgaaggagatctgaaatcagggactgcagaaacagaacctgtagagcaagaytcttcacagccttccttacctttagtgagagcagatgatcctttaagacttgaccaggagttgcagcagccccaaactcaggagaaaacaagtaattcattaacagaagactcaaaaatggctaatgcaaagcagctaagctcagatgcagaggcccagaagctggggaagccctctgcccatgcctcacaaagcttctgtgaaagttctagtgaaaccccatttcatttcactttgcytaaagaaggtgatatcatcccaccattgactggtgcaaccccacctcttattgggcacctaaaattggagcccaagagacacagtactcctattggtattagcaactatccagaaagcaccatagcaaccagtgatgtcatgtctgaaagcatggtggagacccatgatcccatacttgggagtggaaaaggggattctggggctgccccagacgtggatgataaattatgtctaagaatgaaactggttagtcctgagactgaggcgagtgaagagtctttgcagttcaacctggaaaagcctgcaactggtgaaagaaaaaatggatctactgctgttgctgagtctgttgccagtccccagaagaccatgtctgtgttgagctgtatctgtgaagccaggcaagagaatgaggctcgaagtgaggatccccccaccacacccatcagggggaacttgctccactttccaagttctcaaggagaagaggagaaagaaaaattggagggtgaccatacaatcaggcagagtcaacagcctatgaagcccattagtcctgtcaaggaccctgtttctcctgcttcccagaagatggtcatacaagggccatccagtcctcaaggagaggcaatggtgacagatgtgctagaagaccagaaagaaggacggagtactaatmaggaaaatcctagtaaggccttgattgaaaggcccagccaaaataacataggaatccaaaccatggagtgttccttgagggtcccagaaactgtttcagcagcaacccagactrtaaagaatgtgtgtgagcaggggaccagtacagtggaccagaactttggaaagcaagatgccacagttcagactgagagggggagtggtgagaaaccagtcagtgctcctggggatgatacagagtcgctccatagccagggagaagaagagtttgatatgcctcagcctccacatggccatgtcttacatcgtcacatgagaacaatccgggaagtacgcacrcttgtcactcgtgtcattacagatgtgtattatgtggatggaacagaagtagaaagaaaagtaactgaggagactgaagagccaattgtagagtgtcaggagtgtgaaactgaagtttccccttcacagactgggggctcctcaggtgacctgggggatatcagctccttctcctccaaggcatccagcttacaccgcacatcaagtgggacaagtctctcagctatgcacagcagtggaagctcagggaaaggagccggaccactcagagggaaaaccagcgggacagaacccgcagattttgccttacccagctcccgaggaggcccaggaaaactgagtcctagaaaaggggtcagtcagacagggacgccagtgtgtgaggaggatggtgatgcaggccttggcatcagacagggagggaaggctccagtcacgcctcgtgggcgtgggcgaaggggccgcccaccttctcggaccactggaaccagagaaacagctgtgcctggccccttgggcatagaggacatttcacctaacttgtcaccagatgataaatccttcagccgtgtygtgccccragtgccagactccaccagacgaacagatgtgggtgctggtgctttgcgtcgtagtgactctccagaaattcctttccaggctgctgctggcccttctgatggcttagatgcctcctctccaggaaatagctttgtagggctccgtgttgtagccaagtggtcatccaatggctacttttactctgggaaaatcacacgagatgtyggagctgggaagtataaattgctctttgatgatgggtacgaatgtgatgtgttgggcaaagacattctgttatgtgaccccatcccgctggacactgaagtgacggccctctcggaggatgagtatttcagtgcaggagtggtgaaaggacataggaaggagtctggggaactgtactacagcattgaaaaagaaggccaaagaaagtggtataagcgaatggctgtcatcctgtccttggagcaaggaaacagactgagagagcagtatgggcttggcccctatgaagcagtaacacctcttacaaaggcagcagatatcagcttagacaatttggtggaagggaagcggaaacggcgcagtaacgtcagctccccagccacccctactgcctccagtagcagcagcacaacccctacccgaaagatcacagaaagtcctcgtgcctccatgggagttctctcaggcaaaagaaaacttatcacttctgaagaggaacggtcccctgccaagcgaggtcgcaagtcwgccacagtaaaacctggtgcagtaggggcaggagagtttgtgagcccctgtgagagtggagacaacaccggtgaaccctctgccctggaagagcagagagggcctttgcctctcaacaagaccttgtttctgggctacgcatttctccttaccatggccacaaccagtgacaagttggccagccgctccaaactgccagatggtcctacaggaagcagtgaagaagaggaggaatttttggaaattcctcctttcaacaagcagtatacagaatcccagcttcgagcaggagctggctatatccttgaagatttcaatgaagcccagtgtaacacagcttaccagtgtcttctaattgcggatcagcattgtcgaacccggaagtacttcctgtgccttgccagtgggattccttgtgtgtctcatgtctgggtccatgatagttgccatgccaaccagctccagaactaccgtaattatctgttgccagctgggtacagccttgaggagcaaagaattctggactggcaaccccgtgaaaatcctttccagaatctgaaggtactcttggtatcagaccaacagcagaacttcctggagctctggtctgagatcctcatgactggtggtgcagcctctgtgaagcagcaccattcaagtgcccataacaaagatattgctttaggggtatttgatgtggtggtgacggacccctcatgcccagcctcggtgctgaagtgtgctgaagcattgcagctgcctgtggtgtcacaagagtgggtgatccagtgcctcattgttggggagagaattggattcaagcagcatccaaaatataaacacgattatgtttctcactaaagatacttggtcttactggttttattccctgctatcgtggagattgtgttttaaccaggttttaaatgtgtcttgtgtgtaactggattccttgcatggatcttgtatatagttttatttgctkaacttttatgataaaataaatgttgaatctctttggttgtagtaactggg

SEQ ID NO: 534 - DNA, 2380 bp, Homo sapiens
tcaaacagggtttgaagggtgttccatggtgcctaccatctaccctctggaaacactgcataatgccctttccctacgtcaagtgagtgaattcttgagtagagtctgccagcgccacactgatgcccaggcacaggcatctgcagccctctttgattccatgcacagcagccaggcctcagataacccattttctccaccacgtactcttcattcacctcccctgcaactccagcagcgctctgagaagcccccttggttagagacaaggttttgccatgttggccaggctggtttagagctcctgacctcaagtgatctgcctgcctcggcctcccaaagtgctgggattacaggcgtgagccaccrcacccagccagacagcagtggcccttctagcactgtgtccagtgctggtccttcttcccctactacagtagatggtaactcccaatttggcttcagtgatcaaccctccctaaattcacacgtggctgaagaacatcaaggccttgggctgctccaggagacccctgggagtggagcacaagagctctccatagaaggggagcaagagctttttgaaccaaatcagtccccacaggtgccacctatggaaaccagccagccatacgaggaggtcagccagccatgtcaggaggtccctgacatcagccagccatgccaggacatttctgaggcgctcagccagccatgtcagaaggtccctgacatcagccagcaatgccaggagaaccatgacaatggtaaccacacatgccaggaggtccctcacatcagccagccatgccagaagtccagccaactgtgccagaaagtctctgaggaagtttgccagctatgtctggagaactccgaggaggtcagccagccatgccagggggtctctgtggaggttggcaagctggtccataagttccatgtaggggttggtagcttggtccaggaaacccttgtagaagttggcagcccagctgaagagatccctgaggaggtcatccagccataccaggagttctctgtggaggttggcaggctggcccaggagacttctgcgatcaatctgttatctcagggcatccctgagattgataaaccatcccaagagttccctgaggagattgatctgcaggcccaggaggtccctgaggagataaattagaagtcctgggtggtccctgaagtgattgatcagctgcctggagagggtattcctcaagcccagcatccatctggtgatccaaaccctcagagccagtctctagcccatgaccagcactcaccccttccaccagcaacatgtgattaattttctcattagtggtatcacactataccagccatttgagccagcaaccttttctgttggctaactcactggccagctctcaccagcggtgtctggggaagtagttctctttgtatgaagcatacctgtgccagagctgtggttgaggaggagccagttttaggttcraagaagccattggctcctcacttagccattagacttgaataggatttccttggggtgggttggtctgtcattacccagccttctctgagcatcctaggaaatcacagattgttaaaggaaatgccgcttcactgctgaagacaccatctggcgacagcaaatgcaaaagaggggactctagggtcttcacttttctggggaaatgttcacgacttctcaaggtacgcttagaccatatgtgcattcaggggactcttgtctttgccagcactcctcaggtgagcccgggatggctatctgaaatgtctggaaaatagagtcccttccccaaacatctgacatggccactaaatctttagacttgccttatagatccttccatatcatccccaagtgccccttctgcctcagtcctgttcctctgggcaatagctctagggaaaagtaggtattagactgctgtgcaaaattcagagcaactacttaaaatgctctagaggattcttagccagtctgtgaaagtgggcctcctctgtggtggggctgtttggcttaggagatgctgtagtagtagagataatcaggttctattttaagcaatcagcagagatcaatattgtacagatacaagcaaaggtttaataaatatatatatatatatttatttctgtagttgtgccagggacagactggccaaagaccaaacactgcagggtccccaagaaatttgtccttatatcattgtgtctgagggccagatatgattatgaagctttttccaaagatccagggatgggaatgggagtgggtaggaggggtaatgcggtcattggagtcgggggctggaacattatgagtgctcaataaatataaactaatgag

SEQ ID NO: 535 - DNA, 1393 bp, Homo sapiens
ggctgggcagggcgcaccacttgcagctgcagcccttgccttgagtcagtgcgcygctctccagcccgcttgaacgctccccgcagccaccgccacccattggaatggccaacaggggacctgcatatggcctgagccgggaggtgcagcagaagattgagaaacaatatgatgcagatctggagcagatcctgatccagtggatcaccacccagtgccgaaaggatgtgggccggccccagcctggacgcgagaacttccagaactggctcaaggatggcacggtgctatgtgagctcattaaygcactgtaccccgaggggcaggccccagtaaagaagatccaggcctccaccatggccttcaagcagatggagcagatctctcagttcctgcaagcagctgagcgctatggcattaacaccactgacatcttccaaactgtggacctctgggaaggaaagaacatggcctgtgtgcagcggacgctgatgaatctgggtgggctggcagtagcccgagatgatgggctcttctctggggatcccaactggttccctaagaaatccaaggagaatcctcggaacttctcggataaccagctgcaagagggcaagaacgtgatcgggttacagatgggcaccaaccgcggggcgtctcaggcaggcatgactggctacgggatgccacgccagatcctctgatcccaccccaggccttgcccctgccctcccacgaatggttaatatatatgtagatatatattttagcagtgacattcccagagagccccagagctctcaagctcctttctgtcagggtggggggttcagcctgtcctgtcacctctgaggtgcctgctggcatcctctcccccatgcttactaatacattcccttccccatagccatcaaaactggaccaactggcctcttcctttcccctgggaccaaaatttaggggcctcagtccctcaccgccatgccctggcctattctgtctctccttcttccccctggcctgttctgtctctgagctctgtgtcctccgttcattccatggctgggagtcactgatgctgcctctgccttctgatgctggactggccttgcttctacaagtatgcttctcccacagctgtggctgcaggaacttaatttatagggaggagcctgtggcagctgctgccccagccacagctgcactgactgtgctcaccacacatctggggcagccttccctggcaggggccctcgtggcttctcattttccattcccttcactgtggctaaggggtggggtgaggggatggagagggagggctgcctaccatggtytggggcttgaggaagatgagtttgttgatttaaataaagaatttgtcatttttgaa

SEQ ID NO: 536 - DNA, 1109 bp, Homo sapiens
atgtccgccttttctttggctttggctttggtgagctccccgcagccaccgccacccattggaatggccaacaggggacctgcatatggcctgagccgggaggtgcagcagaagattgagaaacaatatgatgcagatctggagcagatcctgatccagtggatcaccacccagtgccgaaaggatgtgggccggccccagcctggacgcgagaacttccagaactggctcaaggatggcacggtgctatgtgagctcattaaygcactgtaccccgaggggcaggccccagtaaagaagatccaggcctccaccatggccttcaagcagatggagcagatctctcagttcctgcaagcagctgagcgctatggcattaacaccactgacatcttccaaactgtggacctctgggaaggaaagaacatggcctgtgtgcagcggacgctgatgaatctgggtgggctggcagtagcccgagatgatgggctcttctctggggatcccaactggttccctaagaaatccaaggagaatcctcggaacttctcggataaccagctgcaagagggcaagaacgtgatcgggttacagatgggcaccaaccgcggggcgtctcaggcaggcatgactggctacgggatgccacgccagatcctctgatcccaccccaggccttgcccctgccctcccacgaatggttaatatatatgtagatatatattttagcagtgacattcccagagagccccagagctctcaagctcctttctgtcagggctcccccatgcttactaatacattcccttccccatagccatcaaaactggaccaactggcctcttcctttcccctgggaccaaaatttaggggcctcagtccctcaccgccatgccctggcctattctgtctctccttcttccccctggcctgttctgtctctgagctctccttccctggcaggggccctcgtggcttctcattttccattcccttcactgtggctaaggggtggggtgaggggatggagagggagggctgcctaccatggtytggggcttgaggaagatgagtttgttgatttaaataaagaatttgtcatttttgaa

SEQ ID NO: 537 - DNA, 1677 bp, Homo sapiens
ggctgggcagggcgcaccacttgcagctgcagcccttgccttgagtcagtgcgcygctctccagcccgcttgaacgctccccgcagccaccgccacccattggaatggccaacaggggacctgcatatggcctgagccgggaggtgcagcagaagattgagaaacaatatgatgcagatctggagcagatcctgatccagtggatcaccacccagtgccgaaaggatgtgggccggccccagcctggacgcgagaacttccagaactggctcaaggatggcacggtgctatgtgagctcattaaygcactgtaccccgaggggcaggccccagtaaagaagatccaggcctccaccatggccttcaagcagatggagcagatctctcagttcctgcaagcagctgagcgctatggcattaacaccactgacatcttccaaactgtggacctctgggaaggtgggacagggcgaggggctgggtcctgtcatccaggaggccagagattgggctgggccctcttgaccaggcagaaggggctgttttctggctccctgcagagaaagaggggtgtgtttgtgttccatggagcacttggtcatattggaggctggaatggagaagggtatggaaatgaacagtagaaataattaggaagccaggcctgctgacttagcgatagaggcggaaccctggtatctaggacactgcggaggctgacacattcccattctccttcccaggaaagaacatggcctgtgtgcagcggacgctgatgaatctgggtgggctggcagtagcccgagatgatgggctcttctctggggatcccaactggttccctaagaaatccaaggagaatcctcggaacttctcggataaccagctgcaagagggcaagaacgtgatcgggttacagatgggcaccaaccgcggggcgtctcaggcaggcatgactggctacgggatgccacgccagatcctctgatcccaccccaggccttgcccctgccctcccacgaatggttaatatatatgtagatatatattttagcagtgacattcccagagagccccagagctctcaagctcctttctgtcagggtggggggttcagcctgtcctgtcacctctgaggtgcctgctggcatcctctcccccatgcttactaatacattcccttccccatagccatcaaaactggaccaactggcctcttcctttcccctgggaccaaaatttaggggcctcagtccctcaccgccatgccctggcctattctgtctctccttcttccccctggcctgttctgtctctgagctctgtgtcctccgttcattccatggctgggagtcactgatgctgcctctgccttctgatgctggactggccttgcttctacaagtatgcttctcccacagctgtggctgcaggaacttaatttatagggaggagcctgtggcagctgctgccccagccacagctgcactgactgtgctcaccacacatctggggcagccttccctggcaggggccctcgtggcttctcattttccattcccttcactgtggctaaggggtggggtgaggggatggagagggagggctgcctaccatggtytggggcttgaggaagatgagtttgttgatttaaataaagaatttgtcatttttgaa

SEQ ID NO: 538 - DNA, 4047 bp, Homo sapiens
agagtggagccgagcggtgcggagcagatctggtggttctccggagagcagcttcctygggtgttacatgagccaagccctcactgtacagaagagtgagagctgaaacctgttccctgagctgatcagaaggacatcccttggcccctccatctgggctccygtggataggaggggctgggtgagcaggccagctgggctatggtgtggtgcctcggcctggccgtcctcagcctggtcatcagccagggggctgacggtcgagggaagcctgaggtggtatcggtggtgggccgggctgrggagagtgtggtgctgggctgtgacctgctgcccccggccggccggccccccctgcatgtcatcgagtggctgcgctttggattcctgcttcccatcttcatccagttcggcctctactctccccgaattgaccctgattacgtgggacgagtccggctgcagaagggggcctctctccagattgagggtctccgggtggaagaccagggctggtacgagtgccgcgtgttcttcctggaccagcacatccctgaagacgattttgctaacggctcctgggtgcatctgacagtcaattcaccccctcaattccaggagacacctcctgctgtgttggaagtgcaggaactggagcctgtgaccctgcgttgtgtggcccgtggcagccccctgcctcatgtgacgtggaagctccgaggaaaggaccttggccagggccagggccaggtgcaagtgcagaacgggacgctgcggatccgccgggtagagcgaggcagctctggggtctacacctgccaagcctccagcactgagggcagcgccacccacgccacccagctgctagtgctaggacccccagtcatcgtggtgccccccaagaacagcacagtcaatgcctcccaggatgyttcattggcctgccaygctgaggcataccctgctaacctcacctacagctggttccaggacaacatcaatgtcttccacattagccgcctgcagccccgggtgcggatcctggtggacgggagcctgcggctgctggccacccagcctgatgatgccggctgctacacctgtgtrcccagcaatggcctcctgcatccaccctcagcctctgcctacctcactgtgctctacccagcccaggtgacagctatgcctcctgagacacccctgcccataggcatgccgggggtgatccgctgcccggttcgtgccaaccccccactgctctttgtcagctggaccaaggatggaaaggccctgcagctggacaagttccctggctggtcccagggcacagaaggctcactgatcatcgccctggggaacgaggatgccctgggagaatactcctgcaccccctacaacagtcttggtaccgccgggccctctcctgtgacccgcgtgctgctcaaggctcccccagcttttatagagcggcccaaggaagaatatttccaagaagtagggcgggagctgctcatcccctgctccgcccaaggggaccctcctcctgttgtctcttggaccaaggtgggccgggggctgcaaggccaggcccaggtggacagcaacagcagcctcatcctgcgaccattgaccaaggaggcccacgggcactgggaatgcagtgccagcaatgctgtggcccgagtggccacctccacgaacgtctacgtgctgggcactagccctcatgttgtcaccaatgtgtccgtggtggctttgcccaagggtgccaatgtctcctgggagcctggctttgatggtggttatctgcagagattcagtgtctggtacaccccactggccaagcgtcctgaccgaatgcaccatgactgggtgtccttggcagtgcctgtgggggctgctcacctcctagtgccagggctgcagccccacacccagtaccagttcagcgtgctagctcagaacaagctggggagtggtcccttcagcgaaatcgtcttgtctgctccggaagggcttcctaccacgccagctgcacccgggcttcccccaacagagataccgcctcccctgtcccctccgcggggtctggtggcagtgaggacaccccggggggtactcctgcattgggatcccccagagctggtccctaagagactggatggctacgtcttggaaggccggcaaggctcccagggctgggaggtgctggacccggctgtggcaggcacagaaacagagctgctggtgccaggcctcatcaaggatgttctctacgagttccgcctcgtggccttcgcgggcagcttcgtcagcgaccccagcaacacggccaacgtctccacttccggtctggaggtctacccttcgcgcacgcagctgccgggcctcctgcctcagcccgtgctggccggcgtggtgggcggagtctgctttytgggagtggccgtccttgtgagcatcctggccggctgcctcctgaaccsgcgcagggctgcccgccgccgccgcaagcgcctccgccaagatccacctcttatcttctctccgaccgggaagtcagytgcmccctctgctctgggctcaggcagtcctgacagcgtggcgaagctgaagctccagggatccccagtccccagcctgcgccagagtctgctctggggggatcctgccggaactcccagcccccacccggatcctccatctagccggggacccttacctctggagcccatttgccggggcccagacgggcgctttgtkatggggcccactgtggcggccccccaggaaaggtcaggccgggagcaggcagaacctcggactccagcccagcgtctggcccggtcctttgactgtagcagcagcagccccagtggggcaccycagcccctctgcattgaagacatcagccctgtggcaccccctccagcagccccacycagtcccttgccaggtcctggacccctgctccagtacctgagcctgcccttcttccgagagatgaatgtggatggggactggcccccgcttgaggagcccagccctgytgcacccccagattacatggatacccggcgctgtcccacctcatctttccttcgttctccagaaacccctcctgtatcccccagggaatcacttcctggggctgtggtaggggctggggccactgcagagcccccttacacagccctggctgactggacactgagggagcggctgctgccaggccttctccctgctgcccctcgaggcagcctcaccagccagagcagygggcgaggcagcgcttcgttcctgcggcccccctccacagccccctctgcaggaggcagctacctcagccctgctccaggagacaccagcagctgggccagtggccctgagagatggccccgaagggagcatgtggtgacagtcagcaagaggaggaacacatctgtggacgagaactatgagtgggactcagaattccctggggacatggaattgctggagactttgcacctgggcttggccagctcccggctcagacctgaagctgagmcagagctaggtgtgaagactccagaggagggctgcctcctgaacactgcccatgttactggccctgaggcccgctgtgctgcccttcgggaggaattcctggccttccgccgccgccgagatgctactagggctcggctaccagcctatcgacagccagtcccccaccccgaacaggccactctgctgtgaacrtccctratgtgaggctgtgaaaaggcatatggacctgcaaaggaggcccccaaccagacagacctagtttcaaacgagggcactgcccctgcctgcccctttggtgcccaggcacagaccctgatagtgggtttgggtcaccttggtatggaatgtatgtgctgaccccctaggtgagtctggggattggaacagggatcttaggtctgcctctctctctctctctctctctctctctctctctstgtgtgtgtgtgtgtgtgtgaagttttttacaggtgaataaacaaagtttgaaagatg

SEQ ID NO: 539 - DNA, 2715 bp, Homo sapiens
gccctttcctggcggctgggtctttaacaccgcccagcgcacatgtcgggggaggcctggcagctgcagctgggagcgcacagacggctgccccgcctgagcgaggcgggcgccgccgcgatgctgcgaggcggacggcgcgggyagcttggctggcacagctgggctgcggrgccgggcagcctgctggcttggctgatactggcatctgcgggcgccgcaccctgccccgatgcctgctgcccccacggctcctcgggactgcgatgcacccgggatggggccctggatagcctccaccacctgcccggcgcagagaacctgactgagctctacatcgagaaccagcagcatctgcagcatctggagctcgtgatctgaggrgcctgggggagcygagaaacctcaccatcgtgaagagtggtctccgtttygtggcgccagatgccttccatttcactcctcggctcagtcgcctgaatctctccttcaacgctctggagtctctctcctggaaaactgtgcagggcctctccttacaggaactggtcctgtcggggaaccctctgcactgttcttgtgccctgcgctggctacagcgctgggagkaggagggactgggcggagtgcctgaacagaagctgyagtgtcatgggcaagggcccctggcccacatgcccaatgccagctgtggtgtgcccacgctgaaggtccaggtgcccaatgcctcggtggatgtgggggacgacgtgctgcygcggtgccaggtggaggggcggggcctggagcaggccggctggatcctcacagagctggagcagtcagccacggtgatgaaatctgggggtctgccatccctggggctgaccctggccaatgtcaccagtgacctcaacaggaagaacgtgacgtgctgggcagagaacgatgtgggccgggcagaggtctctgttcaggtcaacgtctccttcccggccagtgtgcagctgcacacggcggtggagatgcaccactggtgcatccccttctctgtggatgggcagccggcaccgtctctgcgctggctcttcaatggctccgtgctcaatgagaccagcttcatcttcactgagttcctggagccggcagccaatgagaccgtgcggcacgggtgtctgcgcctcaaccagcccacccacgtcaacaacggcaactrmacrctgctggctgccaaccccttcggccaggcctccgcctccatcatggctgccttcatggacaaccctttcgagttcaaccccgaggaccccatccctgccctgtgtccctacagacactaacagcacatctggagacccggtggagaagaaggacgaaacaccttttggggtctcggtggctgtgggcctggccgtctttgcctgcctcttcctttctacgctgctccttgtgctcaacaaatgtggacggagaaacaagtttgggatcaaccgcccggctgtgctggctccagaggatgggctggccatgtccctgcatttcatgacattgggtggcagctccctgtcccccaccgagggcaaaggctctgggctccaaggccacatcatcgagaacccacaatacttcagtgatgcctgtgttcaccacatcaagcgccgggacatcgtgctcaagtgggagctgggggagggcgcctttsggaaggtcttccttgctgagtgccacaacctcctgcctgagcaggacaagatgctggtggctgtcaaggcactgaaggaggcgtccgagagtgctcggcaggacttccarcgtgaggctgagctgctcaccatgctgcagcaccagcacatcgtgcgcttcttysgcgtctgcaccgagggccgccccctgctcrtggtctttgagtatatgcggcacggggacctcaaccgcttcctcygatccyatggacctgatgccaagctgctggctgktggggaggatktggctccaggycccctgggtctggggcagctgctggcygtggctagccaggtcgctgcggggatggtgtacctggcgggtctgcattttgtgcacygggacctggccacaygcaactgtctagtgggccagggactggtggtcaagattggtgattttggcatgagcaggatatctacagcaccgactattaccgtgtgggrggccgcaccatgctgcccattcgctggatgccgcccgagagcatcctgtaccgtaagttcaccaccgagagcgacgtgtggagcttcrgcgtygtgctctgggagatcttcacctacggcaagcagccctggtaccagctctccaacacggaggcaatcgactgcatcacgcagggacgtgagttggagcggccacgtgcctgcccaccagaggtctasrccatcatgyggggctgctggcagcgggagccccagcaacgccacagcatcaaggatgtgcacgcccsgctgcaagccctggcccaggcacctcctgtctacctggatgtcctgggctagggggccggcccaggggctgggagtggttagycggaatactggggcctgccctcagcatcccccatagctcccagcagccccagggtgatctcaaagtatctaattcaccctcagcatgtgggaagggacaggtgggggctgggagtagaggatgttcctgcttctctaggcaaggtcccgtcatagcaattatatttattatcccttg

SEQ ID NO: 540 - DNA, 2717 bp, Homo sapiens
gccctttcctggcggctgggtctttaacaccgcccagcgcacatgtcgggggaggcctggcagctgcagctgggagcgcacagacggctgccccgcctgagcgaggcgggcgccgccgcgatgctgcgaggcggacggcgcgggyagcttggctggcacagctgggctgcggrgccgggcagcctgctggcttggctgatactggcatctgcgggcgccgcaccctgccccgatgcctgctgcccccacggctcctcgggactgcgatgcacccgggatggggccctggatagcctccaccacctgcccggcgcagagaacctgactgagctctacatcgagaaccagcagcatctgcagcatctggagctcgtgatctgaggrgcctgggggagcygagaaacctcaccatcgtgaagagtggtctccgtttygtggcgccagatgccttccatttcactcctcggctcagtcgcctgaatctctccttcaacgctctggagtctctctcctggaaaactgtgcagggcctctccttacaggaactggtcctgtcggggaaccctctgcactgttcttgtgccctgcgctggctacagcgctgggagkaggagggactgggcggagtgcctgaacagaagctgyagtgtcatgggcaagggcccctggcccacatgcccaatgccagctgtggtgtgcccacgctgaaggtccaggtgcccaatgcctcggtggatgtgggggacgacgtgctgcygcggtgccaggtggaggggcggggcctggagcaggccggctggatcctcacagagctggagcagtcagccacggtgatgaaatctgggggtctgccatccctggggctgaccctggccaatgtcaccagtgacctcaacaggaagaacgtgacgtgctgggcagagaacgatgtgggccgggcagaggtctctgttcaggtcaacgtctccttcccggccagtgtgcagctgcacacggcggtggagatgcaccactggtgcatccccttctctgtggatgggcagccggcaccgtctctgcgctggctcttcaatggctccgtgctcaatgagaccagcttcatcttcactgagttcctggagccggcagccaatgagaccgtgcggcacgggtgtctgcgcctcaaccagcccacccacgtcaacaacggcaactrmacrctgctggctgccaaccccttcggccaggcctccgcctccatcatggctgccttcatggacaaccctttcgagttcaaccccgaggaccccatccctgtctccttctcgccggtggacactaacagcacatctggagacccggtggagaagaaggacgaaacaccttttggggtctcggtggctgtgggcctggccgtctttgcctgcctcttcctttctacgctgctccttgtgctcaacaaatgtggacggagaaacaagtttgggatcaaccgcccggctgtgctggctccagaggatgggctggccatgtccctgcatttcatgacattgggtggcagctccctgtcccccaccgagggcaaaggctctgggctccaaggccacatcatcgagaacccacaatacttcagtgatgcctgtgttcaccacatcaagcgccgggacatcgtgctcaagtgggagctgggggagggcgcctttsggaaggtcttccttgctgagtgccacaacctcctgcctgagcaggacaagatgctggtggctgtcaaggcactgaaggaggcgtccgagagtgctcggcaggacttccarcgtgaggctgagctgctcaccatgctgcagcaccagcacatcgtgcgcttcttysgcgtctgcaccgagggccgccccctgctcrtggtctttgagtatatgcggcacggggacctcaaccgcttcctcygatccyatggacctgatgccaagctgctggctgktggggaggatktggctccaggycccctgggtctggggcagctgctggcygtggctagccaggtcgctgcggggatggtgtacctggcgggtctgcattttgtgcacygggacctggccacaygcaactgtctagtgggccagggactggtggtcaagattggtgattttggcatgagcaggatatctacagcaccgactattaccgtgtgggrggccgcaccatgctgcccattcgctggatgccgcccgagagcatcctgtaccgtaagttcaccaccgagagcgacgtgtggagcttcrgcgtygtgctctgggagatcttcacctacggcaagcagccctggtaccagctctccaacacggaggcaatcgactgcatcacgcagggacgtgagttggagcggccacgtgcctgcccaccagaggtctasrccatcatgyggggctgctggcagcgggagccccagcaacgccacagcatcaaggatgtgcacgcccsgctgcaagccctggcccaggcacctcctgtctacctggatgtcctgggctagggggccggcccaggggctgggagtggttagycggaatactggggcctgccctcagcatcccccatagctcccagcagccccagggtgatctcaaagtatctaattcaccctcagcatgtgggaagggacaggtgggggctgggagtagaggatgttcctgcttctctaggcaaggtcccgtcatagcaattatatttattatcccttg

SEQ ID NO: 541 - DNA, 4056 bp, Homo sapiens
atggcagtgcctagtctgtggccctggggagcatgcctrcctgtgatcttcctctccttgggatttggcctggatacagtagaggtgtgccccagcctggatattcgctcagaggtggcagagcttcgtcagctggagaactgcagcgtggtggagggccacctgcagatcctgctcatgttcacagccaccggggaggacttccgcggcctcagcttccctcgcctcacccaggtcaccgactacctgctgctcttccgtgtctayggactggagagcctgcgcgacctcttccccaacctagcagtcatccgcgggacgcgcctcttcctgggctatgcactggtcatctttgagatgccacatctgcgtgacgtggcactgcctgcacttggggccgtgctgcgtggggctgtgcgtgtggagaagaaccaggagctctgccacctctccaccattgactggggactgctgcagccagcacctggcgccaaccacatcgtgggcaacaagctgggcgaggagtgtgctgacgtgtgccctggtgtgctgggtgctgctggtgagccctgtgccaagaccaccttcagcgggcacactgactacagatgctggacctccagccactgccagagagtgtgcccctgcccccatgggatggcttgcacagcgaggggcgagtgctgccacaccgaatgcctggggggctgcagccagccagaagaccctcrtgcctgtgtagcttgccgccacctctacttccagggtgcctgcctgtgggcctgcccgccaggcacctaccagtatgagtcctggcgctgtgtcacagctgagcgctgtgccagcctgcactcygtgcccggccgtgcctccaccttcggcatacaccagggcagttgcctggcccagtgcccttctggcttcacccgtaatagcagcagcatattctgccacaagtgcgaggggctgtgccctaaagagtgcaaggtaggcaccaagaccatcgactccatccaggcggcacaggatcttgtgggctgcacgcatgtggagggaagcctcatcctcaaccttcgccagggctacaacctggagccacagctgcagcacagcctggggctggtagaaaccattactggcttcctcaaaatcaagcactcctttgccctcgtgtccctgggctttttcaagaacctcaaactaatccggggagacgccatggtggatgggaactacactctctacgtgctggacaaccagaacctacaacagctagggtcctgggtggccgcggggctcaccattcccgtgggcaagatctacttcgccttcaacccgcgcctctgcttggaacacatctaccgactggaggaggtgacaggcacgcgaggtcggcagaacaaggctgagatcaacccccgcaccaacggagaccgcgccgcctgccagactcgcaccctgcgcttcgtgtccaacgtgacggaggcagaccgcatcctgctacgctgggagcgctatgagccactggaggcccgcgacctgctcagcttcatcgtgtactacaaggagtccccattccagaacgccacagagcacgtgggtccagatgcttgtggaacccagagctggaacctgctggatgtggagctgcccctaagccgcacccaggagccaggggtgaccctagcctccctcaagccttggacacagtacgcagtgtttgtgcgggccatcacgctaaccactgaggaggacagccctcatcaaggagcccagagtcccatcgtctacctccgaacgctgcctgcagctcccacggtgccccaagacgtcatctccacgtccaactcctcctcccacctcctggtgcgctggaagccaccgacccagcgcaatgggaacctcacctactacctggtgctgtggcagcggctggcagaggacggcgacctctacctcaatgactactgccaccgcggcttgcggctgcccaccagcaacaacgatccgcgcttcgacggcgaagacggggatcctgaggccgagatggagtccgactgctgcccttgccagcacccacctcctggtcaggttctgcccccgctggaggcgcaagaggcctcgttccagaagaagtttgaaaactttctacacaacgcgatcaccatccccatatccccttggaaggtgacgtccatcaacaagagcccccaaagggactcagggcggcaccgccgggcagctgggcccctccggctggggggcaacagctcggatttcgagatccaggaggacaaggtgccccgtgagcgagcggtgctgagcggcctgcgccacttcacggaataccggatcgacatccatgcctgcaaccacgcggcgcacaccgtgggctgcagcgccgccaccttcgtctttgcgcgcaccatgccccacagagaggctgatggtattccaggaaaggtggcctgggaggcctccagcaagaacagtgtccttctgcgctggctcgagccaccagaccccaacggactcatcctcaagtacgaaatcaagtaccgccgcttgggagagccagctgttctgcgttactctcaggaggccacagtgctgtgtgtgtcccgtcttcgatatgcgaagtttgggggagtccacctggccctgctgccccctggaaactactctgccagggttagggcaacctcactggctggcaatggctcttggacagacagtgttgccttctacatccttggcccagaggaggaggatgctggggggctgcatgtcctcctcactgccacccctgtggggctcacgctgctcatcgttcttgctgcccttggtttcttctacggcaagaagagaaacagaaccctgtatgcttctgtgaatccagagtacttcagcgcctctgatagtaggtctgggagtgggtggacaggtggtgtgggaaagggagacaggagaggagcagagacagmcttccagaagaccttcttgcagaagatagccttgggacaagagcccttcagaagaggagaagagaagttgggggtgtatgtccctgatgaatgggaggtgcctcgggagcagatctcgataatccgggaactgggccagggctcttttgggatggtatatgaggggctggcacgaggacttgaggctggagaggagtccacacccgtggccctgaagacggtgaatgagctggccagcccacgggaatgcattgagttcctcaaggaagcttctgtcatgaaagccttcaagtgtcaccatgtggtgcgtctcctgggtgtggtatctcagggccagccaactctggtcatcatggagttaatgacccgtggggacctcaagagccatcttcgatctttgcggcctgaggcagagaacaaccctgggctcccacagccagcattgggggaaatgatccaaatggctggtgagattgcagacggcatggcctaccttgctgccaacaagtttgtgcaccgagatctagcagcccgcaactgcatggtgtcccaggacttcaccgtcaagatcggggacttcgggatgactcgggacgtgtatgagacagactattaccgcaagggtgggaaggggctgctgcccgtgcgctggatggcccccgagtccctcaaagatgggatcttcaccacccactcggatgtctggtcctttggcgtggtactctgggagattgtgaccctggcagaacaaccctaccagggcctgtccaatgagcaggtgctgaagttcgtcatggatggcggggtcctggaggagctggagggctgtccccttcagctgcaggagctgatgagccgctgctggcagccgaacccacgcctgcgcccatctttcacacacattctggacagcatacaggaggagctgcggccctccttccgcctcctctccttctactacagcccggaatgccsgggggcccggggctccctgcctaccaccgatgcagagcctgactcctcacccactccaagagactgcagccctcaaaatgggggtccagggcactga

SEQ ID NO: 542 - DNA, 3894 bp, Homo sapiens
atggcagtgcctagtctgtggccctggggagcatgcctrcctgtgatcttcctctccttgggatttggcctggatacagtagaggtgtgccccagcctggatattcgctcagaggtggcagagcttcgtcagctggagaactgcagcgtggtggagggccacctgcagatcctgctcatgttcacagccaccggggaggacttccgcggcctcagcttccctcgcctcacccaggtcaccgactacctgctgctcttccgtgtctayggactggagagcctgcgcgacctcttccccaacctagcagtcatccgcgggacgcgcctcttcctgggctatgcactggtcatctttgagatgccacatctgcgtgacgtggcactgcctgcacttggggccgtgctgcgtggggctgtgcgtgtggagaagaaccaggagctctgccacctctccaccattgactggggactgctgcagccagcacctggcgccaaccacatcgtgggcaacaagctgggcgaggagtgtgctgacgtgtgccctggtgtgctgggtgctgctggtgagccctgtgccaagaccaccttcagcgggcacactgactacagatgctggacctccagccactgccagagagtgtgcccctgcccccatgggatggcttgcacagcgaggggcgagtgctgccacaccgaatgcctggggggctgcagccagccagaagaccctcrtgcctgtgtagcttgccgccacctctacttccagggtgcctgcctgtgggcctgcccgccaggcacctaccagtatgagtcctggcgctgtgtcacagctgagcgctgtgccagcctgcactcygtgcccggccgtgcctccaccttcggcatacaccagggcagttgcctggcccagtgcccttctggcttcacccgtaatagcagcagcatattctgccacaagtgcgaggggctgtgccctaaagagtgcaaggtaggcaccaagaccatcgactccatccaggcggcacaggatcttgtgggctgcacgcatgtggagggaagcctcatcctcaaccttcgccagggctacaacctggagccacagctgcagcacagcctggggctggtagaaaccattactggcttcctcaaaatcaagcactcctttgccctcgtgtccctgggctttttcaagaacctcaaactaatccggggagacgccatggtggatgggaactacactctctacgtgctggacaaccagaacctacaacagctagggtcctgggtggccgcggggctcaccattcccgtgggcaagatctacttcgccttcaacccgcgcctctgcttggaacacatctaccgactggaggaggtgacaggcacgcgaggtcggcagaacaaggctgagatcaacccccgcaccaacggagaccgcgccgcctgccagactcgcaccctgcgcttcgtgtccaacgtgacggaggcagaccgcatcctgctacgctgggagcgctatgagccactggaggcccgcgacctgctcagcttcatcgtgtactacaaggagtccccattccagaacgccacagagcacgtgggtccagatgcttgtggaacccagagctggaacctgctggatgtggagctgcccctaagccgcacccaggagccaggggtgaccctagcctccctcaagccttggacacagtacgcagtgtttgtgcgggccatcacgctaaccactgaggaggacagccctcatcaaggagcccagagtcccatcgtctacctccgaacgctgcctgcagctcccacggtgccccaagacgtcatctccacgtccaactcctcctcccacctcctggtgcgctggaagccaccgacccagcgcaatgggaacctcacctactacctggtgctgtggcagcggctggcagaggacggcgacctctacctcaatgactactgccaccgcggcttgcggctgcccaccagcaacaacgatccgcgcttcgacggcgaagacggggatcctgaggccgagatggagtccgactgctgcccttgccagcacccacctcctggtcaggttctgcccccgctggaggcgcaagaggcctcgttccagaagaagtttgaaaactttctacacaacgcgatcaccatccccatatccccttggaaggtgacgtccatcaacaagagcccccaaagggactcagggcggcaccgccgggcagctgggcccctccggctggggggcaacagctcggatttcgagatccaggaggacaaggtgccccgtgagcgagcggtgctgagcggcctgcgccacttcacggaataccggatcgacatccatgcctgcaaccacgcggcgcacaccgtgggctgcagcgccgccaccttcgtctttgcgcgcaccatgccccacagagaggctgatggtattccaggaaaggtggcctgggaggcctccagcaagaacagtgtccttctgcgctggctcgagccaccagaccccaacggactcatcctcaagtacgaaatcaagtaccgccgcttgggagaggaggccacagtgctgtgtgtgtcccgtcttcgatatgcgaagtttgggggagtccacctggccctgctgccccctggaaactactctgccagggttagggcaacctcactggctggcaatggctcttggacagacagtgttgccttctacatccttggcccagaggaggaggatgctggggggctgcatgtcctcctcactgccacccctgtggggctcacgctgctcatcgttcttgctgcccttggtttcttctacggcaagaagagaaacagaaccctgtatgcttctgtgaatccagagtacttcagcgcctctgatatgtatgtccctgatgaatgggaggtgcctcgggagcagatctcgataatccgggaactgggccagggctcttttgggatggtatatgaggggctggcacgaggacttgaggctggagaggagtccacacccgtggccctgaagacggtgaatgagctggccagcccacgggaatgcattgagttcctcaaggaagcttctgtcatgaaagccttcaagtgtcaccatgtggtgcgtctcctgggtgtggtatctcagggccagccaactctggtcatcatggagttaatgacccgtggggacctcaagagccatcttcgatctttgcggcctgaggcagagaacaaccctgggctcccacagccagcattgggggaaatgatccaaatggctggtgagattgcagacggcatggcctaccttgctgccaacaagtttgtgcaccgagatctagcagcccgcaactgcatggtgtcccaggacttcaccgtcaagatcggggacttcgggatgactcgggacgtgtatgagacagactattaccgcaagggtgggaaggggctgctgcccgtgcgctggatggcccccgagtccctcaaagatgggatcttcaccacccactcggatgtctggtcctttggcgtggtactctgggagattgtgaccctggcagaacaaccctaccagggcctgtccaatgagcaggtgctgaagttcgtcatggatggcggggtcctggaggagctggagggctgtccccttcagctgcaggagctgatgagccgctgctggcagccgaacccacgcctgcgcccatctttcacacacattctggacagcatacaggaggagctgcggccctccttccgcctcctctccttctactacagcccggaatgccsgggggcccggggctccctgcctaccaccgatgcagagcctgactcctcacccactccaagagactgcagccctcaaaatgggggtccagggcactga

SEQ ID NO: 543 - DNA, 7557 bp, Homo sapiens
cgacccggccccacgcccgcccgccacccgcgcgcgcccgtccgcccgtggcctcgcgtccgccgctgcgccgtgagcgccgctggtcggagggaagagctcgccggggcgccgggccaggacggggcggcaggcgccttcgcggaccgagcctgacggagccggaggctgggagccgcggcggcctggggaagtgtttggattgtgagctatttcagaactgttctcaggactcattattttaacatttgggagaaacacagccagaagaacactgatatttgcatttaatggggaacaaaagatgaagaaggaaaaggaatatattcactaaggattctatctgcttactgctacagacctatgtgttaaggaattcttctcctcctccttgcgtagaagttgatcagcactgtggtcagactgcatttatcttgtcattgccagaagaaatcttggacagaatgtaacagtacgtctctctctgattgcgatggaaggtgataaactgatactcctttattaaagttacatcgcactcaccacagaaaaccattctttaaagtgaatagaaaccaagcccttgtgaacacttctattgaacatgactcatggagaagagcttggctctgatgtgcaccaggattctattgttttaacttacctagaaggattactaatgcatcaggcagcagggggatcaggtactgccrttgacaaaaagtctgctgggcataatgaagaggatcagaactttaacatttctggcagtgcatttcccacctgtcaaagtaatggtccagttctcaatacacatacatatcagggrtctggcatgctgcacctcaaaaaagccagactgttgcagtcttctgaggactggaatgcagcaaagcggaagaggctgtctgattctatcatgaatttaaacgtaaagaaggaagctttgctagctggcatggttgacagtgtgcctaaaggcaaacaggatagcacattactggcctctttgcttcagtcattcagctctaggctgcagactgttgctctgtcacaacaaatcaggcagagcctcaaggagcaaggatatgccctcagtcatgattctttaaaagtggagaaggatttaaggtgctatggtgttgcatcaagtcacttaaaaactttgttgaagaaaagtaaagttaaagatcaaaagcctgatacgaatcttcctgatgtgactaaaaacctcatcagagataggtttgcagagtctcctcatcatgttggacaaagtggaacaaaggtcatgagtgaacygttgtcatgtgctgcaagattacaggctgttgcaagcatggtggaaaaaagggctagtcctgccacctcacctaaacctagtgttgcttgtagccagttagcattacttctgtcaagcgaagcccatttgcagcagtattctcgagaacacgctttaaaaacgcaaaatgcaaatcaagcagcaagtgaaagacttgctgctatggccagattgcaagaaaatggccagaaggatgttggcagttwccagctcccaaaaggaatgtcaagccatcttaatggtcaggcaagaacatcatcaagcaaactgatggctagcaaaagtagtgctacagtgtttcaaaatccaatgggtatcattccttcttcccctaaaaatgcaggttataagaactcactggaaagaaacaatataaaacaagctgctaacaatagtttgcttttacatcttcttaaaagccagactatacctaagccaatgaatggacacagtcacagtgagagaggaagcatttttgaggaaagtagtacacctacaactattgatgaatattcagataacaatcctagttttacagatgacagcagtggtgatgaaagttcttattccaactgtgttcccatagacttgtcttgcaaacacsgarctgaaaaatcagaatctgaccaacctgtttccctggataacttcactcaatccttgctaaacacttgggatccaaaagtcccagatgtagatatcaaagaagatcaagatacctcaaagaattctaagctaaactcacaccagaaagtaacacttcttcaattgctacttggccataagaatgaagaaaatgtagaaaaaaacaccagccctcagggagtacacaatgatgtgagcaagttcaatacacaaaattatgcaaggacttctgtgatagaaagccccagtacaaatcggactactccagtgagcactccacctttacttacatcaagcaaagcagggtctcccatcartctctctcaacactctctggtcatcaaatggaattccccaccatatgtctgcagtactcagtctgaaaagctaacaaatactgcatctaaccactcaatggaccttacaaaaagcaaagacccaccaggagagaaaccagcccaaaatgaaggtgcacagaactctgcaacgtttagtgccagtaagctgttacaaaatttagcacaatgtggaatgcagtcatccatgtcagtggaagagcagagacccagcaaacagctgttaactggaaacacagataaaccgataggtatgattgatagattaaatagccctttgctctcaaataaaacaaatgcagttgaagaaaataaagcatttagtagtcaaccaacaggtcctgaaccagggctttctggttctgaaatagaaaatctgcttgaaagacgtactgtcctccagttgctcctggggaaccccaacaaagggaagagtgaaaaaaaagagaaaactcccttaagagatgaaagtactcaggarcactcagagagagctttaagtgaacaaatactgatggtgaaaataaaatctgagccttgtgatgacttacaaattcctaacacaaatgtgcacttgagccatgatgctaagagtgccccattcttgggtatggctcctgctgtgcagagaagcgcacctgccttaccagtgtccgaagactttaaatcggagcctgtttcacctcaggatttytctttctccaagaatggtctgctaagtcgattgctaagacaaaatcaagatagttacctggcagatgattcagacaggagtcacagaaataatgaaatggcacttctagaatcaaagaatctttgcatggtccctaagaaaaggaagctttatactgagccattagaaaatccatttaaaaagatgaaaaacaacattgttgatgctgcaaacaatcacagtgccccagaagtactgtatgggtccttgcttaaccaggaagagctgaaatttagcagaaatgatcttgaatttaaatatcctgctggtcatggctcagccagcgaaagtgaacacaggagttgggccagagagagcaaaagctttaatgttctgaaacagctgcttctctcagaaaactgtgtgcgagatttgtccccrcacagaagtaactctgtggctgacagtaaaaagaaaggacacaaaaataatgtgaccaacagcaaacctgaatttagcatttcttctttaaatggactgatgtacagttccactcagcccagyagttgcatggataacaggacattttcatacccaggtgtagtaaaaactcctgtgagtcctactttccctgagcacttgggctgtgcaggktctagaccagaatctgggcttttgaatgggtgttccatgcccagtgagaaaggacccattaagtgggttatcactgatgcggagaagaatgagtatgaaaaagactctccaagattgaccaaaaccaacccaatactatattacatgcttcaaaaaggaggcaattctgttrccagtcgagaaacacaagacaaggacatttggagggaggcttcatctgctgaaagtgtctcacaggtcacagccaaagaagagttacttccyactgcagaaacgaaagcttctttctttaatttaagaagcccttacaatagccatatgggaaataatgcttctcgcccacacagcgcaaatggagaagttkatggacttctgggaagcgtgctaacgataaagaaagaatcagaataaaatgtacctgccatccagttttggatctttttaaaactaatgagtatgaacttgagatctgtataaataagagcatgatttgaaaaaaagcatggtataattgaaacttttttcattttgaaaagtattggttactggtgatgttgaaatatgcatactaatttttgcttaacattagatgtcatgaggaaactactgaactagcaattggttgtttaacacttctgtatgcrtcagataacaactgtgagtagcctatgaatgaaattcttttataaatattaggcataaattaaaatgtaaaactccattcatagtggattaatgcattttgctgcctttattagggtactttattttgcttttcagaagtcagcctacataacacatttttaaagtctaaactgttaaacaactctttaaaggataattatccaataaaaaaaaacctagtgctgattcacagcttattatccaattcaaaaataaattagaaaaatatatgcttacatttttcacttttgctaaaaaraaaaaaaaaggtgtttatttttaactcttggaagaggttttgtggttcccaatgtgtctgtcccaccctgatccttttcaatatatatttctttaaaccttgtgctacttagtaaaaattgattacaattgagggaagtttgatagatcctttaaaaaaaaggcagatttccattttttgtattttaactactttactaaattaatactcctccttttacagaattagaaaagttaacatttatctttaggtggtttcctgaaaagttgaatatttaagaaattgtttttaacagaagcaaaatggcttttctttggacagttttcaccatctcttgtaaaagttaattctcaccattcctgtggtacctgcgagtgttatgaccaggattccttaaacctgaactcagaccacttgcattagaaccatctggagcacttgttttaaaatgcagattcataggcagcatctcagatctacagaacaagaatctctgctaagtggacctggaatcytccatctgcatcttaacatgctctctaggtgtttcttgtgtttgagaaccatgacttatgactttcctcagaacatgagactgtaaaacaaaaacaaaaaactatgtgatgcctctattttccccaatacagtcacacatcagctcaaaatttgcaatattgtagttcatatattaccgttatgtctttggaaatcgggttcagaacmctttttatgacaaaaattgggtggaggggataactttcatatctggctcaacatctcaggaaaatctgtgattatttgtgtgttctaatgagtaacatctacttagttagccttagggatggaaaaacagggccacttaccaaactcaggtgattccaggatggtttggaaacttctcctgaatgcatccttaacctttattaaaaccattgtcctaagaacaatgccaacaaagcttacaacatttagtttaaacccaagaaggrcactaaactcagattgactaaataaaaagtacaaagggcacatatrcgtgacagaattgtacwcaatcactccattggatcttttactttaaagtagtgatgaaaagtacatrttgatactgtcttagaagaaattaatatattagtgaagccacatggggtttcagttgygaaacaggtctgtttttatgttcagtttgtacaatccacaattcattcaccagatattttgttcttaattgtgaaccaggttagcaaatgacctatcaaaaattattctataatcactactagttaggatattgatttaaaattgttctacttgaagtggtttctaagatttttatattaaaaataggtgtgatttcctaatatgatctaaaaccctaaatggttatttttcctcagaatgatttgtaaatagctactggaaatattatacagtaataggagtgggtattatgcaacatcatggagaagtgaaggcataggcttattctgacataaaattccactggccagttgaatatattctattccatgtccatactmtgacaatcttattgtcaacactatataaataagcttttaaacaagtcatttttcttgatcgttgtggaaggtttggagccttagaggtatgtcagaaaaaatatgttggtattctcccttgggtagggggaaatgacctttttacaagagagtgaaatttaggtcagggaaaagaccaagggccagcattgctacttttgtgtgtgtgtgtgtgggttttgttttgtttttttggttggctggttgttttcgttrttrttaacaaaggaatgagaatatgtaatacttaaataaacatgaccacraagaatgctgttctgatttactagagaatgttcccaatttgaatttarggtgattttaaagaacagtgagaaagggcatacatccacagattcactttgtttatgcatatgtagatacaaggatgcacatatacacattttcaaggactattttagatatctagacaatttcttctaataaagtcatttgtgaaagggtactacagcttattgacatcagtaaggtagcattcattacctgtttattctctgctgcatcttacagaagagtaaactggtgagagtatatattttawatatatatatatatatatataatatgtatatatatatatattgacttgttacatgaagatgttaaaatcggtttttaaaggtgatgtaaatagtgatttccttaatgaaaaatacatattttgtattgttctaatgcaacagaaaagccttttaatctctttggttcctgtatattccatgtataagtgtaaatataatcagacaggtttaaaagttgtgcatgtatgtatacagttgcaagtctggacaaatgtatagaataaaccttttatttaagttgtgattacctgctgcatgaaaagtgcatgggggaccctgtgcatctgtgcatttggcaaaatgtcttaacaaatcagatcagatgttcatcctaacatgacagtattccatttctggacatgacgtctgtggtttaagctttgtgaaagaatgtgctttgattcgaagggtcttaaagaatttttttaatcgtcaaccacttttaaacataaagaattcacacaactactttcatgaattttttaatcccattgcaaacattattccaagagtatcccagtattagcaatactggaatataggcacattaccattcatagtaagaattctggtgtttacacaaccaaatttgatgcgatctgctcagtaatataatttgccatttttattagaaatttaatttcttcatgtgatgtcatgaaactgtacatactgcagtgtgaatttttttgttttgttttttaatcttttagtgtttacttcctgcagtgaatttgaataaatgagaaaaaatgcattgtc

SEQ ID NO: 544 - DNA, 1468 bp, Homo sapiens
ccacctcctggcgcccgcagggctcaagctgcgaatgaaagcctttgggggccggacgcggtggctgaggcctgtaatccaagcactttgggaggtctaaggaggacgatcgctagagtcctggagttcgagaccagtctgggcaacatagcgagaccccctcccccaatctgtaatttaaaaacaaaaaagctgcggggactgctggcccagggcatgacagcgcgggcgggcggtgtagagggcgtggcygcgagctcagggtgtgcctgggagcgagycctgygcggggcgggacgtagcgcccgcgcggtgggggtgtggccgcgagcttgggctgtgcgcggagggcgtggcctgtgcggggcgggacttattgcccgcgcggtgagggagcgtggtctcgcgcaagccggcgtgcggtccsgcggcgctgcagttgtgtccagccggtcacggggcggctatggcggccacgttcttcggagaggtggtgaaggcgccgtgccgagctgggactgaggacgaagaggaggaggaggaggggcggagggagacgcccgaggacagggaggtgcgtcyscagctggcgcggaagagggaagtgcggctccttcgaagacaaacaaaaacatctttggaagtttctttgctagaaaaatatccgtgctccaagtttataattgctataggaaataatgcagtagcatttctgtcatcatttgttatgaattcaggagtctgggaggaagttggttgtgcyaaactctggaatgaatggtgtagaacaacagacactacacatctgtcctccacagaggctttttgtgtgttttatcatctaaaatccaatccctcggtttttctctgtcagtgcagttgctatgttgcagaagatcaacagtatcagtggctggaaaaggtttttggctcttgtccaaggaagaacatgcagataactrttctcacrtgtcgacatgttaccgattataaaacctcagaatccaccggcagccttccttctcctttcctgagagccctaaaaacacagaatttcaaagactcggcgtgttgtccattgctagaacaaccgaatatagtacacgaccttcctgcagcagttctaagctactgtcaagtatggaaaatcccrgcaattctgtacttgtgttatactgatgtgatgaaattagacctaatcacagtggaagcttttaagcctatactttctaccagaagcttgaagggtttggttaagaatattccccaaagcactgagatactaaagaaattsatgacaacaaatgagattcagagtaacatttatacatgatcttaaacattgttttgtagtgtatattacttgtccattcctttaaggggagcagcctgcactcttttgtagattacttttgggggatatattttgagaatgatgaaacggaataaaattgtaaaaaaytaattg

SEQ ID NO: 545 - DNA, 6871 bp, Homo sapiens
cccggatgggccgttagtcggggctcagccgcggagtgagcgagggagacgggaggagccgaacccggcgccatccgccgccatcctcccccgccccaccgccatcccgtcccggggagcccctaggcccgggtcccggatccccgcgcacccggccaggctctggcacgttttgggggaggtgcctgcaggacccaacatactcaatgagcttccagcgcaatgtccgatcgctcggggccgactgccaagggaaaggatggaaagaagtattcctcgctcaacctgtttgatacgtataagggcaagtccttagagatccaraaacccgctgttgcccctcgccatggcctgcagagtctcgggaaagttgccattgcccggcgtatgcsacctccagccaaccttccaagcctgaaagccgagaacaaaggcaatgaccccaatgtctcactagtgccaaaagwcggaacaggatgggcaagcaaacaggagcagtccgaccccaagagttccgatgcctcaaccgctcagccgcyggaatcgcagccactgccggcttcacagacgcctgcctccaaccagccgaaacgacccccagcagcccccgagaacactcctttggttccaagcggggtaaagtcctgggcacaagccagcgtcacccatggagcacatggagatggtggaagggcatcaagcctactgtcacgattctctcgagaggaatttccgaccctgcaggcggctggcgaccaggacaaggctgccaaggaaagggagtctgccgaacagtcgtctgggcccggaccaagcctccgcccccaaaattctacaacttggagggacggaggtggkcgtggccctgatgagctggagggcccggactccaaacttcatcatggtcatgatccccggggtgggctacagccttcaggcccaccccagttccctccctaccgcggaatgatgccgcctttcatgtatcccccatatctcccgttccctccgccctatggaccccaggggccttaccgataccccactcctgatgggcccagccgttttccccgtgtggcgggcccccgaggctcagggccaccaatgcrcttagtagagcctgtgggtcgtccctctattctcaaagaggataatctcaaagagtttgatcagttggatcaggagaatgatgatggttgggcaggggcccatgaagaggttgactacactgaaaagctcaagttcagcgatgaggaagatgggcgagactctgatgaggagggwgctgagggccacagggattcccaatcagcttctggtgaggaacggccccctgaagcagatggcaaaaagggcaactcccccaacagcgaaccgcccactcctaagacggcctgggcagaaacctctcggcctccagagacagagccgggacctcctgccccaaagcctcccctacccccacctcaccggggccccgccrggaactggggcccccctggggactacccagatcgtgggggtcctccctgcaagcccccagcacctgaagatgaggatgaggcatggcggcagcgacgaaagcagtcgtcatctgagatttccctggcagtggagcgggcccggcgacggcgagaagaagaggagcggcgcatgcaagaagagcgccgggcagcctgtgctgagaagctcaagcgactcgatgaaaagtttggggcacctgacaagcggctcaaagcagagcctgctgccccacctgctgccccttctaccccagcyccaccacctgcagtccctaaagaactccctgcacctccagctccacctccagcatcagccccaacaccagagamagaacctgaagagccagcacaggcccctcctgcccaatctactcctactccaggtgtggctgcggctcccactctggtgagtggtggtggcagtaccagtagcaccagcagtggcagcttcgaagccagcccagtggaaccacaactgccctcaaaagagggtcctgaaccaccagaagaggttcctcctcctaccacacccccagttccaaaggtggaacccaagggtgatgggattggtcccacccgccagccccctagtcagggcttgggctaccccaaatatcagaagtcgttgcctcctcgtttccagcggcagcagcaggagcagctcctgaagcagcagcagcagcaccagtggcagcagcatcaacagggctctgcccctcctaccccagtgcccccatcaccaccacagcctgtgaccctgggggctgtgccagctccamaggctccacccccgccccccaaggccctgtacccaggtgctctgggccggcccccacccatgcccccaatgaactttgatccccgatggatgatgattcctccttatgtggacccccggctcctccagggtcgtccccctctagasttctaccctcctggtgtgcatccctctggcctagttccccgagagcgttcagacagtsggggctcaagctcagagccatttgaccgtcatgcacctgctatgttacgggaacggggcactccaccggtggatccaaagttggcctgggtrggagatgtcttcaccgccacacccgctgaaccccgcccacttacctcacctctgcgccaggctgcggatgaggatgacaaggggatgaggagcgagactcctccagtacctcccccaccaccctatctggccagttatccaggctttcctgagaatgrrrcccctgggcccccaatctctcgctttcctctggaggaaccagggccccgtccactcccctggcccccaggcagtgatgaagtggccaagatacaaactccaccacccaagaaggagccccctaaggaggagactgcacagctgacggggccagaagcaggccgaaagcctgcccgcggagtcgggagtggaggccagggccccccmccaccacgcagagagagtcgcacagagacccgctggggccctcgtccagggagcagtcgtcgtggaatscctccagaggagccaggggccccaccccgccgggctgggcctataaagaaacctccaccacctacaaaagtagaagagctgcctcccaagcccctcgaacagggggatgaaacccccaaacccccaaagccagacccactcaagataaccaaggggaagctagggggccccaaggagaccccacccaatggaaatctttcccctgccccaaggcttcggagggactattcgtatgaaagagtgggtcctacctcttgccggggtcggggccgaggcgagtattttgccagagggaggggttttcgggggacctatgggggacgagggcggggrgsccgaagccgggaattccgcagttaccgagagtttcgaggagatgatgggcgtggaggtgggacagggggaccaaaccaccctcctgctccccgaggccgcactgccagcgagacacggagcgagggttcagagtatgaggaaatccccaagcggygccggcagcggggctcagaaacaggcagcgagacccatgagagtgatctggctccttcagacaaggaggctcccacacccaaggagggaacactcacccaggtccctctcgctcccccaccaccaggagccccaccttcaccagcsccagcccgcttcactgcccggggtsggcgagtcttcactcccagaggggtgccatctcgccggggccgaggaggagggaggccccctcctcaagtttgcccaggctggagccctccagccaagtctctggctcccaagaaacctcccacaggccctttgccaccaagtaaggagcctttgaaagagaagttgatcccagggcctctgtcccctgtggcgcgcggaggcagcaatggaggtagcaatgtgggcatggaagatggggagcgaccccgaaggaggcgacatgggagggctcagcagcaggataaaccgcctcgtttccggaggctgaagcaggaacgggagaatgccgcaagggggtctgagggcaagccctccctaacccttccagcctccrctcctgsacctgaggaggccctcacaacagtcacagtggccccagcacctcgccgggcagctgccaagtctcctgatctgtcaaaccagaactcagaccaagccaatgaggaatgggagactgcatcagagagcagtgacttcaccagtgagcgccgaggggacaaagaggcacccccaccagtactgctgacacccaaggctgtgggaactcctgggggaggtggaggtggagccgtaccaggtatttcagccatgtcccgyggagatctgagccagagagccaaggatttgagtaaacggagcttctcaagtcagcggccaggcatggaacggcagaatcggcgccctggcccagggggcaaggctggcarcagtggcagcagcagtggaggagscrgtgggggtcctggaggaaggaccgggccaggacgaggcgacaagaggagctggccctctcccaagaaccgaagtcgtcctccagaggagcgtcccccggggcttcccctgcctcccccacctcccagcagttctgctgtcttccgcctggaccaagttatccacagcaaccctgctggcatccaacaggctctggcccagcttagtagccgtcaagggagtgtaactgcaccagggggtcatccaaggcacaagcctgggcytccccaagcccctcagggcccctctcctaggcccccaacccgatacgagccccagagggtcaacagcggcctcagttctgacccccactttgaggagccggggccaatggtgagaggggtggrtgggactcctcgggactctgccggggttagtccctttccccctaaacgtcgggagcrgcctcccagaaaaccagagctgctacaggaggaatctttgccacctcctcatagctctggattcttgggctctaagcctgagggcccaggccctcaggcagagtccagagatacaggcacagaggccctgacccctcacatctggaaccgtttacatactgccactagccgaaagagttaccggcccagctccatggagccttggatggagcccctgagtccttttgaggatgtggctggcacagaaatgagtcagtctgacagtggggtggacctgagtggggattctcaggtgtcatcaggtccctgcagccagcgaagttcccctgatggaggactcaagggggcagcagagggaccccccaagaggcctggaggctcctcacccctgaatgctgttccttgtgagggtccacctggctctgaacctcctaggagaccaccacctgccccccacgatggggacagaaaggagctgccccgggagcagcctctrccccctggccccattggcacagaacgatcacagcrtacagaccgagscacagagcctggccccattcggccatcccatcgacctggtcccccagtccagtttggcactagtgrcaaggactcagacttacgcctartggtaggagacagcttgaaagcagagaaggagctaacagcatcagtcactgargccattcctgtatcacgagactgggagctgcttcccagtgctgctgcctctgctgagccacaatccaagaacctggattctgggcactgtgtcccggagcccagctcctcaggccagcgcctgtatcctgaggttttctatggcagtgctgggccttccagttctcagatctctgggggagccatggactctcarttacatccaaacagtggaggcttccgccctgggacaccctcactgcacccttacagatcacagcccctatacctacccccsrgcccagcccctccctcagcactgctctctgggktagctctcaagggccagtttctggatttctccacaatgcaagctacagagctggggaagttgccggctggaggagttctctaccctccaccttccttcctctactctccggctttctgccccagtcctttgcctgacacatcgttgcttcaggtacgccaggatctgccatccccttcggatttttattctactcctctgcagcctggtggccaaagtggmtttctcccttcaggggctcctgcccagcagatgcttctacccatggtagactcacagctgcctgtggtgaactttggctccctgccgccagcaccacctcctgccccacctyccctttctctgttacctgtgggccctgcyctgcagccccccagcctggctgtgcggcccccacctgctcctgctactcgggtgctgccttcacctgccaggcccttccccgctagcttggggcgagcagagctgcatccagtggaactaaagccrttccaggattatcaaaaactgagcagcaaccttgggggacctggatcatcayggactcccccaactggaaggtcctyctctggcctcaattcccgtctsaaggccacgccttccacctacagtggagtcttccgcacccagcgcgtcgacctttaccagcaggcctccccaccagatgccctgcgctggatacctaagccttgggagcggacagggcygccacctcgagaagggccctcccgacgggcagaggagcctgggtcccgaggggacaaggagcctgggttgcccccaccccgctgagggagttcctcttgccccctacccccggggcttgtatatagattataaatatataagggggaaaggggtgggcggggaggggttsyggggctggggcctcacttcccctcctcccccttcccctggtcccctgtccctggggctgtttgttaaaaaagagtaataaaaggattta

SEQ ID NO: 546 - DNA, 1978 bp, Homo sapiens
cccggatgggccgttagtcggggctcagccgcggagtgagcgagggagacgggaggagccgaacccggcgccatccgccgccatcctcccccgccccaccgccatcccgtcccggggagcccctaggcccgggtcccggatccccgcgcacccggccaggctctggcacgttttgggggaggtgcctgcaggacccaacatactcaatgagcttccagcgcaatgtccgatcgctcggggccgactgccaagggaaaggatggaaagaagtattcctcgctcaacctgtttgatacgtataagggcaagtccttagagatccaraaacccgctgttgcccctcgccatggcctgcagagtctcgggaaagttgccattgcccggcgtatgcsacctccagccaaccttccaagcctgaaagccgagaacaaaggcaatgaccccaatgtctcactagtgccaaaagwcggaacaggatgggcaagcaaacaggagcagtccgaccccaagagttccgatgcctcaaccgctcagccgcyggaatcgcagccactgccggcttcacagacgcctgcctccaaccagccgaaacgacccccagcagcccccgagaacactcctttggttccaagcggggtaaagtcctgggcacaagccagcgtcacccatggagcacatggagatggtggaagggcatcaagcctactgtcacgattctctcgagaggaatttccgaccctgcaggcggctggcgaccaggacaaggctgccaaggaaagggagtctgccgaacagtcgtctgggcccggaccaagcctccgcccccaaaattctacaacttggagggacggaggtggkcgtggccctgatgagctggagggcccggactccaaacttcatcatggtcatgatccccggggtgggctacagccttcaggcccaccccagttccctccctaccgcggaatgatgccgcctttcatgtatcccccatatctcccgttccctccgccctatggaccccaggggccttaccgataccccactcctgatgggcccagccgttttccccgtgtggcgggcccccgaggctcagggccaccaatgcrcttagtagagcctgtgggtcgtccctctattctcaaagaggataatctcaaagagtttgatcagttggatcaggagaatgatgatggttgggcaggggcccatgaagaggttgactacactgaaaagctcaagttcagcgatgaggaagatgggcgagactctgatgaggagggwgctgagggccacagggattcccaatcagcttctggtgaggaacggccccctgaagcagatggcaaaaagggcaactcccccaacagcgaaccgcccactcctaagacggcctgggcagaaacctctcggcctccagagacagagccgggacctcctgccccaaagcctcccctacccccacctcaccggggccccgccrggaactggggcccccctggggactacccagatcgtgggggtcctccctgcaagcccccagcacctgaagatgaggatgaggcatggcggcagcgacgaaagcagtcgtcatctgagatttccctggcagtggagcgggcccggcgacggcgagaagaagaggagcggcgcatgcaagaagagcgccgggcagcctgtgctgagaagctcaagcgactcgatgaaaagtttggggcacctgacaagcggctcaaagcagagcctgctgccccacctgctgccccttctaccccagcyccaccacctgcagtccctaaagaactccctgcacctccagctccacctccagcatcagcctcccaaagtgctgggattacaggcgtgagccactgcacctggccctgttgcaatcctgtattttttagtagagacagggtttcaccatgttggccaggctggtctcgaactcctgacctcaggtgatctgcccgcctct

SEQ ID NO: 547 - DNA, 6700 bp, Homo sapiens
atgtccgatcgctcggggccgactgccaagggaaaggatggaaagaagtattcctcgctcaacctgtttgatacgtataagggcaagtccttagagatccaraaacccgctggcattttcgaccctctctccgtcttgttctccagttgcccctcgccatggcctgcagagtctcgggaaagttgccattgcccggcgtatgcsacctccagccaaccttccaagcctgaaagccgagaacaaaggcaatgaccccaatgtctcactagtgccaaaagwcggaacaggatgggcaagcaaacaggagcagtccgaccccaagagttccgatgcctcaaccgctcagccgcyggaatcgcagccactgccggcttcacagacgcctgcctccaaccagccgaaacgacccccagcagcccccgagaacactcctttggttccaagcggggtaaagtcctgggcacaagccagcgtcacccatggagcacatggagatggtggaagggcatcaagcctactgtcacgattctctcgagaggaatttccgaccctgcaggcggctggcgaccaggacaaggctgccaaggaaagggagtctgccgaacagtcgtctgggcccggaccaagcctccgcccccaaaattctacaacttggagggacggaggtggkcgtggccctgatgagctggagggcccggactccaaacttcatcatggtcatgatccccggggtgggctacagccttcaggcccaccccagttccctccctaccgcggaatgatgccgcctttcatgtatcccccatatctcccgttccctccgccctatggaccccaggggccttaccgataccccactcctgatgggcccagccgttttccccgtgtggcgggcccccgaggctcagggccaccaatgcrcttagtagagcctgtgggtcgtccctctattctcaaagaggataatctcaaagagtttgatcagttggatcaggagaatgatgatggttgggcaggggcccatgaagaggttgactacactgaaaagctcaagttcagcgatgaggaagatgggcgagactctgatgaggagggwgctgagggccacagggattcccaatcagcttctggtgaggaacggccccctgaagcagatggcaaaaagggcaactcccccaacagcgaaccgcccactcctaagacggcctgggcagaaacctctcggcctccagagacagagccgggacctcctgccccaaagcctcccctacccccacctcaccggggccccgccrggaactggggcccccctggggactacccagatcgtgggggtcctccctgcaagcccccagcacctgaagatgaggatgaggcatggcggcagcgacgaaagcagtcgtcatctgagatttccctggcagtggagcgggcccggcgacggcgagaagaagaggagcggcgcatgcaagaagagcgccgggcagcctgtgctgagaagctcaagcgactcgatgaaaagtttggggcacctgacaagcggctcaaagcagagcctgctgccccacctgctgccccttctaccccagcyccaccacctgcagtccctaaagaactccctgcacctccagctccacctccagcatcagccccaacaccagagamagaacctgaagagccagcacaggcccctcctgcccaatctactcctactccaggtgtggctgcggctcccactctggtgagtggtggtggcagtaccagtagcaccagcagtggcagcttcgaagccagcccagtggaaccacaactgccctcaaaagagggtcctgaaccaccagaagaggttcctcctcctaccacacccccagttccaaaggtggaacccaagggtgatgggattggtcccacccgccagccccctagtcagggcttgggctaccccaaatatcagaagtcgttgcctcctcgtttccagcggcagcagcaggagcagctcctgaagcagcagcagcagcaccagtggcagcagcatcaacagggctctgcccctcctaccccagtgcccccatcaccaccacagcctgtgaccctgggggctgtgccagctccamaggctccacccccgccccccaaggccctgtacccaggtgctctgggccggcccccacccatgcccccaatgaactttgatccccgatggatgatgattcctccttatgtggacccccggctcctccagggtcgtccccctctagasttctaccctcctggtgtgcatccctctggcctagttccccgagagcgttcagacagtsggggctcaagctcagagccatttgaccgtcatgcacctgctatgttacgggaacggggcactccaccggtggatccaaagttggcctgggtrggagatgtcttcaccgccacacccgctgaaccccgcccacttacctcacctctgcgccaggctgcggatgaggatgacaaggggatgaggagcgagactcctccagtacctcccccaccaccctatctggccagttatccaggctttcctgagaatgrrrcccctgggcccccaatctctcgctttcctctggaggaaccagggccccgtccactcccctggcccccaggcagtgatgaagtggccaagatacaaactccaccacccaagaaggagccccctaaggaggagactgcacagctgacggggccagaagcaggccgaaagcctgcccgcggagtcgggagtggaggccagggccccccmccaccacgcagagagagtcgcacagagacccgctggggccctcgtccagggagcagtcgtcgtggaatscctccagaggagccaggggccccaccccgccgggctgggcctataaagaaacctccaccacctacaaaagtagaagagctgcctcccaagcccctcgaacagggggatgaaacccccaaacccccaaagccagacccactcaagataaccaaggggaagctagggggccccaaggagaccccacccaatggaaatctttcccctgccccaaggcttcggagggactattcgtatgaaagagtgggtcctacctcttgccggggtcggggccgaggcgagtattttgccagagggaggggttttcgggggacctatgggggacgagggcggggrgsccgaagccgggaattccgcagttaccgagagtttcgaggagatgatgggcgtggaggtgggacagggggaccaaaccaccctcctgctccccgaggccgcactgccagcgagacacggagcgagggttcagagtatgaggaaatccccaagcggygccggcagcggggctcagaaacaggcagcgagacccatgagagtgatctggctccttcagacaaggaggctcccacacccaaggagggaacactcacccaggtccctctcgctcccccaccaccaggagccccaccttcaccagcsccagcccgcttcactgcccggggtsggcgagtcttcactcccagaggggtgccatctcgccggggccgaggaggagggaggccccctcctcaagtttgcccaggctggagccctccagccaagtctctggctcccaagaaacctcccacaggccctttgccaccaagtaaggagcctttgaaagagaagttgatcccagggcctctgtcccctgtggcgcgcggaggcagcaatggaggtagcaatgtgggcatggaagatggggagcgaccccgaaggaggcgacatgggagggctcagcagcaggataaaccgcctcgtttccggaggctgaagcaggaacgggagaatgccgcaagggggtctgagggcaagccctccctaacccttccagcctccrctcctgsacctgaggaggccctcacaacagtcacagtggccccagcacctcgccgggcagctgccaagtctcctgatctgtcaaaccagaactcagaccaagccaatgaggaatgggagactgcatcagagagcagtgacttcaccagtgagcgccgaggggacaaagaggcacccccaccagtactgctgacacccaaggctgtgggaactcctgggggaggtggaggtggagccgtaccaggtatttcagccatgtcccgyggagatctgagccagagagccaaggatttgagtaaacggagcttctcaagtcagcggccaggcatggaacggcagaatcggcgccctggcccagggggcaaggctggcarcagtggcagcagcagtggaggagscrgtgggggtcctggaggaaggaccgggccaggacgaggcgacaagaggagctggccctctcccaagaaccgaagtcgtcctccagaggagcgtcccccggggcttcccctgcctcccccacctcccagcagttctgctgtcttccgcctggaccaagttatccacagcaaccctgctggcatccaacaggctctggcccagcttagtagccgtcaagggagtgtaactgcaccagggggtcatccaaggcacaagcctgggcytccccaagcccctcagggcccctctcctaggcccccaacccgatacgagccccagagggtcaacagcggcctcagttctgacccccactttgaggagccggggccaatggtgagaggggtggrtgggactcctcgggactctgccggggttagtccctttccccctaaacgtcgggagcrgcctcccagaaaaccagagctgctacaggaggaatctttgccacctcctcatagctctggattcttgggctctaagcctgagggcccaggccctcaggcagagtccagagatacaggcacagaggccctgacccctcacatctggaaccgtttacatactgccactagccgaaagagttaccggcccagctccatggagccttggatggagcccctgagtccttttgaggatgtggctggcacagaaatgagtcagtctgacagtggggtggacctgagtggggattctcaggtgtcatcaggtccctgcagccagcgaagttcccctgatggaggactcaagggggcagcagagggaccccccaagaggcctggaggctcctcacccctgaatgctgttccttgtgagggtccacctggctctgaacctcctaggagaccaccacctgccccccacgatggggacagaaaggagctgccccgggagcagcctctrccccctggccccattggcacagaacgatcacagcrtacagaccgagscacagagcctggccccattcggccatcccatcgacctggtcccccagtccagtttggcactagtgrcaaggactcagacttacgcctartggtaggagacagcttgaaagcagagaaggagctaacagcatcagtcactgargccattcctgtatcacgagactgggagctgcttcccagtgctgctgcctctgctgagccacaatccaagaacctggattctgggcactgtgtcccggagcccagctcctcaggccagcgcctgtatcctgaggttttctatggcagtgctgggccttccagttctcagatctctgggggagccatggactctcarttacatccaaacagtggaggcttccgccctgggacaccctcactgcacccttacagatcacagcccctatacctacccccsrgcccagcccctccctcagcactgctctctgggktagctctcaagggccagtttctggatttctccacaatgcaagctacagagctggggaagttgccggctggaggagttctctaccctccaccttccttcctctactctccggctttctgccccagtcctttgcctgacacatcgttgcttcaggtacgccaggatctgccatccccttcggatttttattctactcctctgcagcctggtggccaaagtggmtttctcccttcaggggctcctgcccagcagatgcttctacccatggtagactcacagctgcctgtggtgaactttggctccctgccgccagcaccacctcctgccccacctyccctttctctgttacctgtgggccctgcyctgcagccccccagcctggctgtgcggcccccacctgctcctgctactcgggtgctgccttcacctgccaggcccttccccgctagcttggggcgagcagagctgcatccagtggaactaaagccrttccaggattatcaaaaactgagcagcaaccttgggggacctggatcatcayggactcccccaactggaagacgcccttcttcccttaggtcctyctctggcctcaattcccgtctsaaggccacgccttccacctacagtggagtcttccgcacccagcgcgtcgacctttaccagcaggcctccccaccagatgccctgcgctggatacctaagccttgggagcggacagggcygccacctcgagaagggccctcccgacgggcagaggagcctgggtcccgaggggacaaggagcctgggttgcccccaccccgctgagggagttcctcttgccccctacccccggggcttgtatatagattataaatatataagggggaaaggggtgggcggggaggggttsyggggctggggcctcacttcccctcctcccccttcccctggtcccctgtccctggggctgtttgttaaaaaagagtaataaaaggattt

SEQ ID NO: 548 - DNA, 6833 bp, Homo sapiens
cccggatgggccgttagtcggggctcagccgcggagtgagcgagggagacgggaggagccgaacccggcgccatccgccgccatcctcccccgccccaccgccatcccgtcccggggagcccctaggcccgggtcccggatccccgcgcacccggccaggctctggcacgttttgggggaggtgcctgcaggacccaacatactcaatgagcttccagcgcaatgtccgatcgctcggggccgactgccaagggaaaggatggaaagaagtattcctcgctcaacctgtttgatacgtataagggcaagtccttagagatccaraaacccgctgttgcccctcgccatggcctgcagagtctcgggaaagttgccattgcccggcgtatgcsacctccagccaaccttccaagcctgaaagccgagaacaaaggcaatgaccccaatgtctcactagtgccaaaagwcggaacaggatgggcaagcaaacaggagcagtccgaccccaagagttccgatgcctcaaccgctcagccgcyggaatcgcagccactgccggcttcacagacgcctgcctccaaccagccgaaacgacccccagcagcccccgagaacactcctttggttccaagcggggtaaagtcctgggcacaagccagcgtcacccatggagcacatggagatggtggaagggcatcaagcctactgtcacgattctctcgagaggaatttccgaccctgcaggcggctggcgaccaggacaaggctgccaaggaaagggagtctgccgaacagtcgtctgggcccggaccaagcctccgcccccaaaattctacaacttggagggacggaggtggkcgtggccctgatgagctggagggcccggactccaaacttcatcatggtcatgatccccggggtgggctacagccttcaggcccaccccagttccctccctaccgcggaatgatgccgcctttcatgtatcccccatatctcccgttccctccgccctatggaccccaggggccttaccgataccccactcctgatgggcccagccgttttccccgtgtggcgggcccccgaggctcagggccaccaatgcrcttagtagagcctgtgggtcgtccctctattctcaaagaggataatctcaaagagtttgatcagttggatcaggagaatgatgatggttgggcaggggcccatgaagaggttgactacactgaaaagctcaagttcagcgatgaggaagatgggcgagactctgatgaggagggwgctgagggccacagggattcccaatcagcttctggtgaggaacggccccctgaagcagatggcaaaaagggcaactcccccaacagcgaaccgcccactcctaagacggcctgggcagaaacctctcggcctccagagacagagccgggacctcctgccccaaagcctcccctacccccacctcaccggggatcgtgggggtcctccctgcaagcccccagcacctgaagatgaggatgaggcatggcggcagcgacgaaagcagtcgtcatctgagatttccctggcagtggagcgggcccggcgacggcgagaagaagaggagcggcgcatgcaagaagagcgccgggcagcctgtgctgagaagctcaagcgactcgatgaaaagtttggggcacctgacaagcggctcaaagcagagcctgctgccccacctgctgccccttctaccccagcyccaccacctgcagtccctaaagaactccctgcacctccagctccacctccagcatcagccccaacaccagagamagaacctgaagagccagcacaggcccctcctgcccaatctactcctactccaggtgtggctgcggctcccactctggtgagtggtggtggcagtaccagtagcaccagcagtggcagcttcgaagccagcccagtggaaccacaactgccctcaaaagagggtcctgaaccaccagaagaggttcctcctcctaccacacccccagttccaaaggtggaacccaagggtgatgggattggtcccacccgccagccccctagtcagggcttgggctaccccaaatatcagaagtcgttgcctcctcgtttccagcggcagcagcaggagcagctcctgaagcagcagcagcagcaccagtggcagcagcatcaacagggctctgcccctcctaccccagtgcccccatcaccaccacagcctgtgaccctgggggctgtgccagctccamaggctccacccccgccccccaaggccctgtacccaggtgctctgggccggcccccacccatgcccccaatgaactttgatccccgatggatgatgattcctccttatgtggacccccggctcctccagggtcgtccccctctagasttctaccctcctggtgtgcatccctctggcctagttccccgagagcgttcagacagtsggggctcaagctcagagccatttgaccgtcatgcacctgctatgttacgggaacggggcactccaccggtggatccaaagttggcctgggtrggagatgtcttcaccgccacacccgctgaaccccgcccacttacctcacctctgcgccaggctgcggatgaggatgacaaggggatgaggagcgagactcctccagtacctcccccaccaccctatctggccagttatccaggctttcctgagaatgrrrcccctgggcccccaatctctcgctttcctctggaggaaccagggccccgtccactcccctggcccccaggcagtgatgaagtggccaagatacaaactccaccacccaagaaggagccccctaaggaggagactgcacagctgacggggccagaagcaggccgaaagcctgcccgcggagtcgggagtggaggccagggccccccmccaccacgcagagagagtcgcacagagacccgctggggccctcgtccagggagcagtcgtcgtggaatscctccagaggagccaggggccccaccccgccgggctgggcctataaagaaacctccaccacctacaaaagtagaagagctgcctcccaagcccctcgaacagggggatgaaacccccaaacccccaaagccagacccactcaagataaccaaggggaagctagggggccccaaggagaccccacccaatggaaatctttcccctgccccaaggcttcggagggactattcgtatgaaagagtgggtcctacctcttgccggggtcggggccgaggcgagtattttgccagagggaggggttttcgggggacctatgggggacgagggcggggrgsccgaagccgggaattccgcagttaccgagagtttcgaggagatgatgggcgtggaggtgggacagggggaccaaaccaccctcctgctccccgaggccgcactgccagcgagacacggagcgagggttcagagtatgaggaaatccccaagcggygccggcagcggggctcagaaacaggcagcgagacccatgagagtgatctggctccttcagacaaggaggctcccacacccaaggagggaacactcacccaggtccctctcgctcccccaccaccaggagccccaccttcaccagcsccagcccgcttcactgcccggggtsggcgagtcttcactcccagaggggtgccatctcgccggggccgaggaggagggaggccccctcctcaagtttgcccaggctggagccctccagccaagtctctggctcccaagaaacctcccacaggccctttgccaccaagtaaggagcctttgaaagagaagttgatcccagggcctctgtcccctgtggcgcgcggaggcagcaatggaggtagcaatgtgggcatggaagatggggagcgaccccgaaggaggcgacatgggagggctcagcagcaggataaaccgcctcgtttccggaggctgaagcaggaacgggagaatgccgcaagggggtctgagggcaagccctccctaacccttccagcctccrctcctgsacctgaggaggccctcacaacagtcacagtggccccagcacctcgccgggcagctgccaagtctcctgatctgtcaaaccagaactcagaccaagccaatgaggaatgggagactgcatcagagagcagtgacttcaccagtgagcgccgaggggacaaagaggcacccccaccagtactgctgacacccaaggctgtgggaactcctgggggaggtggaggtggagccgtaccaggtatttcagccatgtcccgyggagatctgagccagagagccaaggatttgagtaaacggagcttctcaagtcagcggccaggcatggaacggcagaatcggcgccctggcccagggggcaaggctggcarcagtggcagcagcagtggaggagscrgtgggggtcctggaggaaggaccgggccaggacgaggcgacaagaggagctggccctctcccaagaaccgaagtcgtcctccagaggagcgtcccccggggcttcccctgcctcccccacctcccagcagttctgctgtcttccgcctggaccaagttatccacagcaaccctgctggcatccaacaggctctggcccagcttagtagccgtcaagggagtgtaactgcaccagggggtcatccaaggcacaagcctgggcytccccaagcccctcagggcccctctcctaggcccccaacccgatacgagccccagagggtcaacagcggcctcagttctgacccccactttgaggagccggggccaatggtgagaggggtggrtgggactcctcgggactctgccggggttagtccctttccccctaaacgtcgggagcrgcctcccagaaaaccagagctgctacaggaggaatctttgccacctcctcatagctctggattcttgggctctaagcctgagggcccaggccctcaggcagagtccagagatacaggcacagaggccctgacccctcacatctggaaccgtttacatactgccactagccgaaagagttaccggcccagctccatggagccttggatggagcccctgagtccttttgaggatgtggctggcacagaaatgagtcagtctgacagtggggtggacctgagtggggattctcaggtgtcatcaggtccctgcagccagcgaagttcccctgatggaggactcaagggggcagcagagggaccccccaagaggcctggaggctcctcacccctgaatgctgttccttgtgagggtccacctggctctgaacctcctaggagaccaccacctgccccccacgatggggacagaaaggagctgccccgggagcagcctctrccccctggccccattggcacagaacgatcacagcrtacagaccgagscacagagcctggccccattcggccatcccatcgacctggtcccccagtccagtttggcactagtgrcaaggactcagacttacgcctartggtaggagacagcttgaaagcagagaaggagctaacagcatcagtcactgargccattcctgtatcacgagactgggagctgcttcccagtgctgctgcctctgctgagccacaatccaagaacctggattctgggcactgtgtcccggagcccagctcctcaggccagcgcctgtatcctgaggttttctatggcagtgctgggccttccagttctcagatctctgggggagccatggactctcarttacatccaaacagtggaggcttccgccctgggacaccctcactgcacccttacagatcacagcccctatacctacccccsrgcccagcccctccctcagcactgctctctgggktagctctcaagggccagtttctggatttctccacaatgcaagctacagagctggggaagttgccggctggaggagttctctaccctccaccttccttcctctactctccggctttctgccccagtcctttgcctgacacatcgttgcttcaggtacgccaggatctgccatccccttcggatttttattctactcctctgcagcctggtggccaaagtggmtttctcccttcaggggctcctgcccagcagatgcttctacccatggtagactcacagctgcctgtggtgaactttggctccctgccgccagcaccacctcctgccccacctyccctttctctgttacctgtgggccctgcyctgcagccccccagcctggctgtgcggcccccacctgctcctgctactcgggtgctgccttcacctgccaggcccttccccgctagcttggggcgagcagagctgcatccagtggaactaaagccrttccaggattatcaaaaactgagcagcaaccttgggggacctggatcatcayggactcccccaactggaaggtcctyctctggcctcaattcccgtctsaaggccacgccttccacctacagtggagtcttccgcacccagcgcgtcgacctttaccagcaggcctccccaccagatgccctgcgctggatacctaagccttgggagcggacagggcygccacctcgagaagggccctcccgacgggcagaggagcctgggtcccgaggggacaaggagcctgggttgcccccaccccgctgagggagttcctcttgccccctacccccggggcttgtatatagattataaatatataagggggaaaggggtgggcggggaggggttsyggggctggggcctcacttcccctcctcccccttcccctggtcccctgtccctggggctgtttgttaaaaaagagtaataaaaggattta

SEQ ID NO: 549 - DNA, 6683 bp, Homo sapiens
atgtccgatcgctcggggccgactgccaagggaaaggatggaaagaagtattcctcgctcaacctgtttgatacgtataagggcaagtccttagagatccaraaacccgctggcattttcgaccctctctccgtcttgttctccagttgcccctcgccatggcctgcagagtctcgggaaagttgccattgcccggcgtatgcsacctccagccaaccttccaagcctgaaagccgagaacaaaggcaatgaccccaatgtctcactagtgccaaaagwcggaacaggatgggcaagcaaacaggagcagtccgaccccaagagttccgatgcctcaaccgctcagccgcyggaatcgcagccactgccggcttcacagacgcctgcctccaaccagccgaaacgacccccagcagcccccgagaacactcctttggttccaagcggggtaaagtcctgggcacaagccagcgtcacccatggagcacatggagatggtggaagggcatcaagcctactgtcacgattctctcgagaggaatttccgaccctgcaggcggctggcgaccaggacaaggctgccaaggaaagggagtctgccgaacagtcgtctgggcccggaccaagcctccgcccccaaaattctacaacttggagggacggaggtggkcgtggccctgatgagctggagggcccggactccaaacttcatcatggtcatgatccccggggtgggctacagccttcaggcccaccccagttccctccctaccgcggaatgatgccgcctttcatgtatcccccatatctcccgttccctccgccctatggaccccaggggccttaccgataccccactcctgatgggcccagccgttttccccgtgtggcgggcccccgaggctcagggccaccaatgcrcttagtagagcctgtgggtcgtccctctattctcaaagaggataatctcaaagagtttgatcagttggatcaggagaatgatgatggttgggcaggggcccatgaagaggttgactacactgaaaagctcaagttcagcgatgaggaagatgggcgagactctgatgaggagggwgctgagggccacagggattcccaatcagcttctggtgaggaacggccccctgaagcagatggcaaaaagggcaactcccccaacagcgaaccgcccactcctaagacggcctgggcagaaacctctcggcctccagagacagagccgggacctcctgccccaaagcctcccctacccccacctcaccggggccccgccrggaactggggcccccctggggactacccagatcgtgggggtcctccctgcaagcccccagcacctgaagatgaggatgaggcatggcggcagcgacgaaagcagtcgtcatctgagatttccctggcagtggagcgggcccggcgacggcgagaagaagaggagcggcgcatgcaagaagagcgccgggcagcctgtgctgagaagctcaagcgactcgatgaaaagtttggggcacctgacaagcggctcaaagcagagcctgctgccccacctgctgccccttctaccccagcyccaccacctgcagtccctaaagaactccctgcacctccagctccacctccagcatcagccccaacaccagagamagaacctgaagagccagcacaggcccctcctgcccaatctactcctactccaggtgtggctgcggctcccactctggtgagtggtggtggcagtaccagtagcaccagcagtggcagcttcgaagccagcccagtggaaccacaactgccctcaaaagagggtcctgaaccaccagaagaggttcctcctcctaccacacccccagttccaaaggtggaacccaagggtgatgggattggtcccacccgccagccccctagtcagggcttgggctaccccaaatatcagaagtcgttgcctcctcgtttccagcggcagcagcaggagcagctcctgaagcagcagcagcagcaccagtggcagcagcatcaacagggctctgcccctcctaccccagtgcccccatcaccaccacagcctgtgaccctgggggctgtgccagctccamaggctccacccccgccccccaaggccctgtacccaggtgctctgggccggcccccacccatgcccccaatgaactttgatccccgatggatgatgattcctccttatgtggacccccggctcctccagggtcgtccccctctagasttctaccctcctggtgtgcatccctctggcctagttccccgagagcgttcagacagtsggggctcaagctcagagccatttgaccgtcatgcacctgctatgttacgggaacggggcactccaccggtggatccaaagttggcctgggtrggagatgtcttcaccgccacacccgctgaaccccgcccacttacctcacctctgcgccaggctgcggatgaggatgacaaggggatgaggagcgagactcctccagtacctcccccaccaccctatctggccagttatccaggctttcctgagaatgrrrcccctgggcccccaatctctcgctttcctctggaggaaccagggccccgtccactcccctggcccccaggcagtgatgaagtggccaagatacaaactccaccacccaagaaggagccccctaaggaggagactgcacagctgacggggccagaagcaggccgaaagcctgcccgcggagtcgggagtggaggccagggccccccmccaccacgcagagagagtcgcacagagacccgctggggccctcgtccagggagcagtcgtcgtggaatscctccagaggagccaggggccccaccccgccgggctgggcctataaagaaacctccaccacctacaaaagtagaagagctgcctcccaagcccctcgaacagggggatgaaacccccaaacccccaaagccagacccactcaagataaccaaggggaagctagggggccccaaggagaccccacccaatggaaatctttcccctgccccaaggcttcggagggactattcgtatgaaagagtgggtcctacctcttgccggggtcggggccgaggcgagtattttgccagagggaggggttttcgggggacctatgggggacgagggcggggrgsccgaagccgggaattccgcagttaccgagagtttcgaggagatgatgggcgtggaggtgggacagggggaccaaaccaccctcctgctccccgaggccgcactgccagcgagacacggagcgagggttcagagtatgaggaaatccccaagcggygccggcagcggggctcagaaacaggcagcgagacccatgagagtgatctggctccttcagacaaggaggctcccacacccaaggagggaacactcacccaggtccctctcgctcccccaccaccaggagccccaccttcaccagcsccagcccgcttcactgcccggggtsggcgagtcttcactcccagaggggtgccatctcgccggggccgaggaggagggaggccccctcctcaagtttgcccaggctggagccctccagccaagtctctggctcccaagaaacctcccacaggccctttgccaccaagtaaggagcctttgaaagagaagttgatcccagggcctctgtcccctgtggcgcgcggaggcagcaatggaggtagcaatgtgggcatggaagatggggagcgaccccgaaggaggcgacatgggagggctcagcagcaggataaaccgcctcgtttccggaggctgaagcaggaacgggagaatgccgcaagggggtctgagggcaagccctccctaacccttccagcctccrctcctgsacctgaggaggccctcacaacagtcacagtggccccagcacctcgccgggcagctgccaagtctcctgatctgtcaaaccagaactcagaccaagccaatgaggaatgggagactgcatcagagagcagtgacttcaccagtgagcgccgaggggacaaagaggcacccccaccagtactgctgacacccaaggctgtgggaactcctgggggaggtggaggtggagccgtaccaggtatttcagccatgtcccgyggagatctgagccagagagccaaggatttgagtaaacggagcttctcaagtcagcggccaggcatggaacggcagaatcggcgccctggcccagggggcaaggctggcarcagtggcagcagcagtggaggagscrgtgggggtcctggaggaaggaccgggccaggacgaggcgacaagaggagctggccctctcccaagaaccgaagtcgtcctccagaggagcgtcccccggggcttcccctgcctcccccacctcccagcagttctgctgtcttccgcctggaccaagttatccacagcaaccctgctggcatccaacaggctctggcccagcttagtagccgtcaagggagtgtaactgcaccagggggtcatccaaggcacaagcctgggcytccccaagcccctcagggcccctctcctaggcccccaacccgatacgagccccagagggtcaacagcggcctcagttctgacccccactttgaggagccggggccaatggtgagaggggtggrtgggactcctcgggactctgccggggttagtccctttccccctaaacgtcgggagcrgcctcccagaaaaccagagctgctacaggaggaatctttgccacctcctcatagctctggattcttgggctctaagcctgagggcccaggccctcaggcagagtccagagatacaggcacagaggccctgacccctcacatctggaaccgtttacatactgccactagccgaaagagttaccggcccagctccatggagccttggatggagcccctgagtccttttgaggatgtggctggcacagaaatgagtcagtctgacagtggggtggacctgagtggggattctcaggtgtcatcaggtccctgcagccagcgaagttcccctgatggaggactcaagggggcagcagagggaccccccaagaggcctggaggctcctcacccctgaatgctgttccttgtgagggtccacctggctctgaacctcctaggagaccaccacctgccccccacgatggggacagaaaggagctgccccgggagcagcctctrccccctggccccattggcacagaacgatcacagcrtacagaccgagscacagagcctggccccattcggccatcccatcgacctggtcccccagtccagtttggcactagtgrcaaggactcagacttacgcctartggtaggagacagcttgaaagcagagaaggagctaacagcatcagtcactgargccattcctgtatcacgagactgggagctgcttcccagtgctgctgcctctgctgagccacaatccaagaacctggattctgggcactgtgtcccggagcccagctcctcaggccagcgcctgtatcctgaggttttctatggcagtgctgggccttccagttctcagatctctgggggagccatggactctcarttacatccaaacagtggaggcttccgccctgggacaccctcactgcacccttacagatcacagcccctatacctacccccsrgcccagcccctccctcagcactgctctctgggktagctctcaagggccagtttctggatttctccacaatgcaagctacagagctggggaagttgccggctggaggagttctctaccctccaccttccttcctctactctccggctttctgccccagtcctttgcctgacacatcgttgcttcaggtacgccaggatctgccatccccttcggatttttattctactcctctgcagcctggtggccaaagtggmtttctcccttcaggggctcctgcccagcagatgcttctacccatggtagactcacagctgcctgtggtgaactttggctccctgccgccagcaccacctcctgccccacctyccctttctctgttacctgtgggccctgcyctgcagccccccagcctggctgtgcggcccccacctgctcctgctactcgggtgctgccttcacctgccaggcccttccccgctagcttggggcgagcagagctgcatccagtggaactaaagccrttccaggattatcaaaaactgagcagcaaccttgggggacctggatcatcayggactcccccaactggaaggtcctyctctggcctcaattcccgtctsaaggccacgccttccacctacagtggagtcttccgcacccagcgcgtcgacctttaccagcaggcctccccaccagatgccctgcgctggatacctaagccttgggagcggacagggcygccacctcgagaagggccctcccgacgggcagaggagcctgggtcccgaggggacaaggagcctgggttgcccccaccccgctgagggagttcctcttgccccctacccccggggcttgtatatagattataaatatataagggggaaaggggtgggcggggaggggttsyggggctggggcctcacttcccctcctcccccttcccctggtcccctgtccctggggctgtttgttaaaaaagagtaataaaaggattta

SEQ ID NO: 550 - DNA, 3804 bp, Homo sapiens
gctcctaaatcccctcctgatattgatattgatattgaactgtgggacaayaagacgataacaagtgggctgaaaaactacctcaggtgccttgcagaaccactgatgacttacaagttgcacaaagattttatcattgctgttaaatctgatgatcaaaactacagggtggaggctgtacatgcattggtgcacaaattgccggagaaaaacagagagatgctggacatcttaataaagcatctggtcaaagtatcactacacagccaacaaaatctcatgactgtctcaaatcttggtgtcatatttggcccaactctaatgagagcacaggaagaaactgtggctgctatgatgaatattaaatttcagaatattgtgrtagaaattctgatagagcactatgaaaagatttttcatactgctccagacccaagcattcctcttcctcagcctcagtctcgatctggatcccgaaggacacgagcaatctgcctctctacagggtctaggaagcccagagggaggtatactccatgcctggccgaacctgatagtgactcctatagcagcagcccagacagcacacctatggggagcattgagtcactctcttctcattcctctgaacaaaatagcactacaaagtcagcttcctgccagcccagggagaaatctggagggattccttggattgcaaccccrtcatcttccaatggacagaaaagccttggtctgtggacaactagtcctgaatcaagttccagagaagatgcaaccaagacagatgcagaatcagactgccagagtgttgcttcrgtcactagcccaggagacrtttccccacccatagacctagtcaagaaagagccttatgggctttcaggactgaaaagagcttctgcttcttctctcagatccatctctgcagctgaaggaaacaagagctacagtggatctattcaaagcttaacttctgtaggttccaaggagacacccaaagcttcaccaaacccagacctgcctccgaaaatgtgcaggagattaagactagacactgcctcaagcaatggctatcagcggcctggctcagtagtggcagcaaaagctcaactgtttgaaaatgttggttcacctaaaccagtttcttctgggcgccaagccaaagccatgtactcctgtaaagcagagcacagtcatgagctttccttcccacaaggagcaatattttctaatgtgtacccatcagtggaaccaggatggttaaaggcaacttatgaaggcaaaacaggactagttccagaaaattatgttgtcttcctctaatactatttagtggatggcagtatcttcatggtatccatggtaacgaataaatgctatgattttatctgacacagatacacggggatcagcccactaagtgaaaacagtcaatttctatcaagttcttcaccagcagactatgtagctccttattaatggaaaaaaagatttaaattgttggccattcttttttggttggtttcttattttaaaatatcttacttgtgaaaaatgtgtttttggataatatgtaactctccacwatgtcgcttccgtagcaattgtagagtttcaaatactgtgttaaatactgtatcccagaaatttggaaaccagaaatctgctatatggattttgagatctgtcctttactgcctggcattctctgaggatctctgaaattgttacttaaaaatgtaatttaaattgttcatttattgttttttttttcttagaaatatactgcttttatatatgattgttttgctggtcctaaacatttcaaggatgtaagtctttgttttaatataactttatttgttttccaagtagatgataatattcaaaagcawtaatgtatatgatatctataaaggaagcaaaattaagtcatacactgattccactgtaaacaatctgtccagaattccagacaccttcagcaaactttttctgtaaaggcctgatagcaaatatttttgtggtgggttgaatttggcttatgggttatagtttgctgacacctagtttagagggtgtgtaaaactatcttcataactttgagatttttataaaattttacatgaaaatatactgataaattatatgcacayattttctaccagtagcattatagtggcatcatagaagaatatttaccaatgatggggaaactgtaaaactacagtatcaaggcatacaacttaaattccacttggaagattgtaaagtgtcaaagtattttaatgataatttaatttgggcttttgaaatgttcttctacaaatgaaaaagatgtttaaaaacgttacaagggaagctatgccttctgaagtctrtccttagttgaaacagaaaataaacacmaaggtacaagatccttaaattattttgaaccacagaggttgaaattgttttgtgatcttcagcagaaataaaatcttgaatttgtagagcatagtaataggtatttactgtccacttatatatatcagcatctggtcatgcacgaaccattaattctatatttctatttcaataattctaatatattatttctataaatgtaatatctgtatgtggcaaagagcctttcttctcaagatcctgaaaagctggttacctgccctttgagtgccacagtcctgaactgcttgttcttgacatcttgcatattacttcagagttccccactgtgcagactctcaggtattaactgtaaaaaactctttacatgccattattatctgtaatctctatctcttctactttaaattaatgtttctagaattaataggttaaatacacatacacacacacaactatgcctcagaaaagttaggcttttacaaataaaaagaataagattagaattaacaagtagagagaataacggtaggcagagtcagaatcaggaataaatatcagtgaatcaaaagaatgaaaaatattatgtaataaaaattakcaatgtaatgtaaacgtttgataaaagagtatctttttcttttatctcttactgttgacctctgtgcactgtaataaggtgtgttgctggatcttcttggtcgaggtccttggtgaccttagtagtaataacagcattgctgacaccctaattgccctctgctggaacagaaggtagttttccagtgtaccagtcccttagtctatacagcacccttggtttaagcacacttgccatcatctggtatcctgctagactagaatctcttaaaagcaaattggttttctttcaaagaccaacttgactccaaagagagattcagaatcctacttctcctgctgctgcataaagaatctcaaccttcattttatttgaacacggaccaaagtgttcctgcttctgagttgtctgtaagctaattctgyagatgttccattcagatttaaagcttttttactgcataggatgtggataggaagcctaactattgtatctgatggcaaggcatatgttgcagccacagtactggctatggtccctttgctgaaacaagctacagaagcactgattcaagttgtgcttgtgcttgaacttttaatcttctagatttgtgaggatggctctttttccttcataatggattacaatgtaagcaagtcatggccatatactggagacgggctaaagctgcttttcccttaaagtaagtttcctacagataaggtatttatgagcactgagaaagtcaggacatgtactctaaatcacwcagaatgttaattccacaggaa

SEQ ID NO: 551 - DNA, 6092 bp, Homo sapiens
tgccgttgggggtgggggtgccctgctgccccatatatacagcccctgagaccaggtctggctccacagctctgtcctgctctgtgtctttccctgctgctctcaggtyccctgcaggccttggcccctttcctcatctgtagacacacttgagtagcccaggcacagccatgggagmttcggagatggcagtctttggggctgccgccccctacctgcgcaagtcagagaaggagcggctagaagygcagaccaggccttttgacctcaagaaggatgtcttcrtgcctgatgacaaacaggagtttgtcaaggccaagatcgtgtctcgagagggtggcaaagtcactgccgagacygagtatggcaagacagtgaccgtgaaggaggaccaggtgatgcagcagaacccacccaagttcgacaaaatcgaggacatggccatgctgaccttcctgcatgagcccgcggtgctctacaacctcaaggakcgctacggctcctggatgatctacacctactcgggcctcttctgtgtcaccgtcaacccttacaagtggctgccggtgtacactcctgaggtggtggctgcctacyrgggcaagaagaggagcgaggccccgccccacatcttctccatctccgacaacgcctrtcagtacatgctgacagacagagaaaaccagtccatcctgatcaccggagaatccggagcagggaagacagtcaacaccaagaggtcatccagtamtttgrtgttattgcarccattggggaccgcagcaagamggaccagagcccyggcaagggcaccctggaggaccagatcatccaggccaaccctgctctggaggcctttggcaatgccaagaccgtccggaacgacaactcctcccgctyygggamattcattcgrattcattttggggcaacaggaaagttggcatctgcagacatygagacctatcttctggaaaaatccagagttattttccagctgaaagcagagagagattatcacattttctaccaaatcctgtctaacaaaaagcctgagctgctggacatgctgctgatcaccaacaacccctacgattatgcattcatctcccaaggagagaccaccgtggcctccattgatgacgctgaggagctcatggccactgataaygcttttgatgtgctgggcttcacttcagaggagaaaaactccatytatargctgacaggygrcatcatgcactttggaaacatgaarttcaagrtgaagcagcgggaggagcaggcggagrcarayggcactgaagaggctgacaagtctgcctacctcatggggctgaactcagccgacctgctcaaggggctgtgccaccctcykgkgaaartgggcaatgagtacgtcaccaaggggcagaatgtccagcaggtgatatatgccactggggcactggccaaggcagtgtatgagaggatgttcaactggatggtgacgcgcatcaatgccaccctggagaccaagcagccacgccagtacttcataggagtcctggacatcgctggcttcsagatcttcgatttcaacagctttgagcagctctgcatcaacttcaccaacgagaagctgcagcagttcttcaaccaccacatgtttgtgctggagcaggrggagtacaagsaggagggcatcgagtggacattcattgactttggcatggacctgcaggcctgcattgacctcatcgagaagcccatgggcatcatgtycatcctggaaraggagtgcatgttccccaaggccaccgacatgaccttcaaggccaagctgtttgacaaccacctgggcaaatccgccaacttccagaagccacgcmatatcaaggggaagcctgaagcccacttctccctgatccactatgccgrcatcgtggawtacaayatcattggctggctgcagaagaacaaggatcctcscaargagactgtcgrgggcttgtatcagaagtcttccctcaagsygctcagcaccctgtttgccaactatgctggggctgatgcgcctattgagaagggcaaaggcaaggccaagaaaggctcgtcctttcagactgtgtcagctctgcacagggaaaatctgaacaagctgatgrccaacttgcgtccacccatccccactttgtacgttgtatcatccctaatgagacaaagtctccaggggsgatggacaaccccctggtcatgcaccagctgcgctgcaatrgtgtgctggagggcatccgcatctgcaggakaggcttccccaaccgcatcctctacgrggacttccggcagaggtatcgcatcctgaacccagcggccatccctgagggacagttcatkyatagcaggaagggggcagagaagctgctcagctccctggacattgatcacaaccagtacaagtttggccacaccaaggtgktcstcaaggccgrgctgctggggctgctggaggaaatgagggacrbgaggctgagcrgcatcatcacgcgtrtccaggcccagtcccgaggtgtgctcgcagaatggagtacaaaaagctgctggaacgtagagactccctgctggtaatccagtggaacattcgggccttcatgggggrcaagaattggccctggatgaagctctacttcaagatcaagccgctgctgaagagtgcagaaagagaraaggagatggcctccatgayggaggagttcacacgcsssaaagaggcgctagagaagtccgaggctcgcsryarggagctggaggagaagatggtgtccctgctgcaggagaagaatgacctgcagctccaagtgcaggcggaacaagacaacctggcagatgctgaggagcgctgtgatcagstgatcaaaaacaagattcagctggaggccaaygtgaaggagatgaacgaraggctggaggrtgaggagragatgaatgctgagrtcactgccaagaagcgcaagctsbaagatgagtgctcagarctcaaaagggacatcgatgatctggagctgacactggccaaagtggagaaggagaaacacgcaacagagaacaaggtgaaaaacctgacagaggagatggctgggctggatgagatcattyccaagctgaccaaggagaagaaagctctgcaagaggcccaccaacaggctctggatgaccttcaggccgaggaggacaaggtcaacaccctgactaaggccaaagtcaagctggagcagcaagtggatgatctggaaggatccctggagcaagagaagaaggtgcgcatggacctggagcgagcraagcggaagctggagggcgacctgaagctgacccaggagagcatcatggacctggagaatgacaagcagcagctggatgagcggctgaaaaaaaaagactttgagctgaatgctctcaacgcaaggattgaggatgaacaggccctcggcagccagctgcagaagaagctcaaggagcttcaggcacgcatcgaggagctggaggaggagctggaggccgagcgcaccgccagggctaaggtggagaagctgcgctcagacctgtctcgggagctggaggagatcagcgagcggctggaagaggccggcggggccacgtccgtgcagatcgagatgaacaagaagcgcgaggccgagttccagaagatgcggcgggacctggaggaggccacgctgcagcacgaggccactgccgcggccctgcgcaagaagcacgccgacagcgtggccgagctgggcgagcagatcgacaacctgcagcgggtgaagcagaagctggagaaggagaagagcgagttcaagctggagctggatgacgtcacctccaacatggagcagatcatcaaggccaaggctaacctggagaagatgtgccggaccttggaagaccagatgaatgagcaccggagcaaggcggaggagacccagcgttctgtcaacgacctcaccagccagcgggccaagttgcaaaccgagaatggtgagctgtcccggcagctggatgagaaggaggcactratctcccagctgacccgaggcaagctcacctacacccagcagctggaggacctcaagaggcagctggaggaggaggttaaggcgaagaacgccctggcccacgcactgcagtcggcccggcatgactgcgacctgctgcgggagcagtacgaggaggagacggaggccaaggccgagctgcagcgcgtcctttccaaggccaactcggaggtggcccagtggaggaccaagtatgagacggacgccattcagcggactgaggagctcgaggaggccaagaagaagctggcccagcggctgcaggaagctgaggaggccgtggaggctgttaatgccaagtgctcctcgctrgagaagaccaagcaccggctacagaatgagatcgaggacttgatggtggacgtagagcgctccaatgctgctgctgcagccctggacaagaagcagaggaacttcgacaagatcctggccgagtggaagcagaagtatgaggagtcgcagtcggagctggagtcctcgcagaaggaggctcgctccctcagcacagagctcttcaaactcyagaacgcctatgaggagtcsctggaacatctggagaccttcaagcgggagaacaaaaacctgcaggaggagatctccgacttgactgagcagttgggttccagcggaaagacyatccatgagctggagaaggtccgaaagcagctggaggccgagaagatggagctgcagtcagccctggaggaggccgaggcctccctggagcacgaggarggcaagatcctccgggcccagctggagttcaaccagatcaaggcagagatcgaycggaagctggcagagaaggacgaggagatggaacaggccaagcgcaaccacctgcgggtggtggactcgctgcagacctccctggacgcagagacacgcagccgcaacgaggccctgagggtgaagaagaagatggaaggagacctcaatgagatggagatccagctcagccacgccaaccgcatggccgccgaggcccagaagcaagtcaagagcctccagagcttgttgaaggacacccagattcagctggacgatgcagtccgtgccaacgacgacctgaaggagaacatcgccatmgtggagcggcgcaacaacctgctgcaggctgagctggaggagttgcgtgccgtggtggagcagacagagcggtcccggaagctggcrgagcaggagctgattgagactagtgagcgggtgcagctgctgcattcccagaacaccagcctcatcaaccagaagaagaagatggatgctgacctgtcccagctccagactgaagtggaggaggcagtgcaggagtgcaggaatgctgaggagaaggccaagaaggccatcacggatgccgccatgatggcagaggagctgaagaaggagcaggacaccagcgcccacctggagcgcatgaagaagaacatggaacagaccattaaggacctgcagcaccggctggacgaagccgagcagatcgccctcaagggcggcaagaagcagctgcagaagctggaagcgcgggtgcgggagctggagaatgagctggaggccgagcagaagcgcaacgcygagtcggtgaagggcatgaggaagagcgagcggcgsatcaaggagctcacctaccagacggaggaggacaggaaaaacctgctgcggctgcaggacctggtagacaagctgcagctaaaggtcaaggcctacaagcgccaggccgaggaggcggaggagcaagccaacaccaacctgtccaagttccgcaaggtgcagcacgagctggatgaggcagaggagcgggcggacatcgccgagtcccaggtcaacaagctgcgggccaagagccgtgacattggcacgaagggcttgaatgaggagtagctttgmcacatcttgatctgctcagccctggaggtgccagcaaagccccatgctggagcctgtgtaacagctccttgggaggaagcagaataaagcaattttccttgaagccragat

SEQ ID NO: 552 - DNA, 3186 bp, Homo sapiens
tgccgttgggggtgggggtgccctgctgccccatatatacagcccctgagaccaggtctggctccacagctctgtcctgctctgtgtctttccctgctgctctcaggtyccctgcaggccttggcccctttcctcatctgtagacacacttgagtagcccaggcacagccatgggagmttcggagatggcagtctttggggctgccgccccctacctgcgcaagtcagagaaggagcggctagaagygcagaccaggccttttgacctcaagaaggatgtcttcrtgcctgatgacaaacaggagtttgtcaaggccaagatcgtgtctcgagagggtggcaaagtcactgccgagacygagtatggcaagacagtgaccgtgaaggaggaccaggtgatgcagcagaacccacccaagttcgacaaaatcgaggacatggccatgctgaccttcctgcatgagcccgcggtgctctacaacctcaaggakcgctacggctcctggatgatctacacctactcgggcctcttctgtgtcaccgtcaacccttacaagtggctgccggtgtacactcctgaggtggtggctgcctacyrgggcaagaagaggagcgaggccccgccccacatcttctccatctccgacaacgcctrtcagtacatgctgacagacagagaaaaccagtccatcctgatcaccggagaatccggagcagggaagacagtcaacaccaagaggtcatccagtamtttgrtgttattgcarccattggggaccgcagcaagamggaccagagcccyggcaagggcaccctggaggaccagatcatccaggccaaccctgctctggaggcctttggcaatgccaagaccgtccggaacgacaactcctcccgctyygggamattcattcgrattcattttggggcaacaggaaagttggcatctgcagacatygagacctatcttctggaaaaatccagagttattttccagctgaaagcagagagagattatcacattttctaccaaatcctgtctaacaaaaagcctgagctgctggacatgctgctgatcaccaacaacccctacgattatgcattcatctcccaaggagagaccaccgtggcctccattgatgacgctgaggagctcatggccactgataaygcttttgatgtgctgggcttcacttcagaggagaaaaactccatytatargctgacaggygrcatcatgcactttggaaacatgaarttcaagrtgaagcagcgggaggagcaggcggagrcarayggcactgaagaggctgacaagtctgcctacctcatggggctgaactcagccgacctgctcaaggggctgtgccaccctcykgkgaaartgggcaatgagtacgtcaccaaggggcagaatgtccagcaggtgatatatgccactggggcactggccaaggcagtgtatgagaggatgttcaactggatggtgacgcgcatcaatgccaccctggagaccaagcagccacgccagtacttcataggagtcctggacatcgctggcttcsagatcttcgatttcaacagctttgagcagctctgcatcaacttcaccaacgagaagctgcagcagttcttcaaccaccacatgtttgtgctggagcaggrggagtacaagsaggagggcatcgagtggacattcattgactttggcatggacctgcaggcctgcattgacctcatcgagaagcccatgggcatcatgtycatcctggaaraggagtgcatgttccccaaggccaccgacatgaccttcaaggccaagctgtttgacaaccacctgggcaaatccgccaacttccagaagccacgcmatatcaaggggaagcctgaagcccacttctccctgatccactatgccgrcatcgtggawtacaayatcattggctggctgcagaagaacaaggatcctcscaargagactgtcgrgggcttgtatcagaagtcttccctcaagsygctcagcaccctgtttgccaactatgctggggctgatgcgcctattgagaagggcaaaggcaaggccaagaaaggctcgtcctttcagactgtgtcagctctgcacagggaaaatctgaacaagctgatgrccaacttgcgtccacccatccccactttgtacgttgtatcatccctaatgagacaaagtctccaggggsgatggacaaccccctggtcatgcaccagctgcgctgcaatrgtgtgctggagggcatccgcatctgcaggakaggcttccccaaccgcatcctctacgrggacttccggcagaggtgggtgaaaaacctgacagaggagatggctgggctggatgagatcattyccaagctgaccaaggagaagaaagctctgcaagaggcccaccaacaggctctggatgaccttcaggccgaggaggacaaggtcaacaccctgactaaggccaaagtcaagctggagcagcaagtggatgatctggaaggatccctggagcaagagaagaaggtgcgcatggacctggagcgagcraagcggaagctggagggcgacctgaagctgacccaggagagcatcatggacctggagaatgacaagcagcagctggatgagcggctgaaaaaaaaagactttgagctgaatgctctcaacgcaaggattgaggatgaacaggccctcggcagccagctgcagaagaagctcaaggagcttcagacggaggaggacaggaaaaacctgctgcggctgcaggacctggtagacaagctgcagctaaaggtcaaggcctacaagcgccaggccgaggaggcggaggagcaagccaacaccaacctgtccaagttccgcaaggtgcagcacgagctggatgaggcagaggagcgggcggacatcgccgagtcccaggtcaacaagctgcgggccaagagccgtgacattggcacgaagagatgcggtttcaccatgttggccaggctggrcttgaactcctgaccttgtgatccactcycctcagcctcccaaaggcttgaatgaggagtagctttgmcacatcttgatctgctcagccctggaggtgccagcaaagccccatgctggagcctgtgtaacagctccttgggaggaagcagaataaagcaattttccttgaagccr

SEQ ID NO: 553 - DNA, 6167 bp, Homo sapiens
tgccgttgggggtgggggtgccctgctgccccatatatacagcccctgagaccaggtctggctccacagctctgtcctgctctgtgtctttccctgctgctctcaggtyccctgcaggccttggcccctttcctcatctgtagacacacttgagtagcccaggcacagccatgggagmttcggagatggcagtctttggggctgccgccccctacctgcgcaagtcagagaaggagcggctagaagygcagaccaggccttttgacctcaagaaggatgtcttcrtgcctgatgacaaacaggagtttgtcaaggccaagatcgtgtctcgagagggtggcaaagtcactgccgagacygagtatggcaagacagtgaccgtgaaggaggaccaggtgatgcagcagaacccacccaagttcgacaaaatcgaggacatggccatgctgaccttcctgcatgagcccgcggtgctctacaacctcaaggakcgctacggctcctggatgatctacacctactcgggcctcttctgtgtcaccgtcaacccttacaagtggctgccggtgtacactcctgaggtggtggctgcctacyrgggcaagaagaggagcgaggccccgccccacatcttctccatctccgacaacgcctrtcagtacatgctgacagacagagaaaaccagtccatcctgatcaccggagaatccggagcagggaagacagtcaacaccaagaggtcatccagtamtttgrtgttattgcarccattggggaccgcagcaagamggaccagagcccyggcaagggcaccctggaggaccagatcatccaggccaaccctgctctggaggcctttggcaatgccaagaccgtccggaacgacaactcctcccgctyygggamattcattcgrattcattttggggcaacaggaaagttggcatctgcagacatygagacctatcttctggaaaaatccagagttattttccagctgaaagcagagagagattatcacattttctaccaaatcctgtctaacaaaaagcctgagctgctggacatgctgctgatcaccaacaacccctacgattatgcattcatctcccaaggagagaccaccgtggcctccattgatgacgctgaggagctcatggccactgataaygcttttgatgtgctgggcttcacttcagaggagaaaaactccatytatargctgacaggygrcatcatgcactttggaaacatgaarttcaagrtgaagcagcgggaggagcaggcggagrcarayggcactgaagaggctgacaagtctgcctacctcatggggctgaactcagccgacctgctcaaggggctgtgccaccctcykgkgaaartgggcaatgagtacgtcaccaaggggcagaatgtccagcaggtgatatatgccactggggcactggccaaggcagtgtatgagaggatgttcaactggatggtgacgcgcatcaatgccaccctggagaccaagcagccacgccagtacttcataggagtcctggacatcgctggcttcsagatcttcgatttcaacagctttgagcagctctgcatcaacttcaccaacgagaagctgcagcagttcttcaaccaccacatgtttgtgctggagcaggrggagtacaagsaggagggcatcgagtggacattcattgactttggcatggacctgcaggcctgcattgacctcatcgagaagcccatgggcatcatgtycatcctggaaraggagtgcatgttccccaaggccaccgacatgaccttcaaggccaagctgtttgacaaccacctgggcaaatccgccaacttccagaagccacgcmatatcaaggggaagcctgaagcccacttctccctgatccactatgccgrcatcgtggawtacaayatcattggctggctgcagaagaacaaggatcctcscaargagactgtcgrgggcttgtatcagaagtcttccctcaagsygctcagcaccctgtttgccaactatgctggggctgatgcgcctattgagaagggcaaaggcaaggccaagaaaggctcgtcctttcagactgtgtcagctctgcacagggaaaatctgaacaagctgatgrccaacttgcgtccacccatccccactttgtacgttgtatcatccctaatgagacaaagtctccaggggsgatggacaaccccctggtcatgcaccagctgcgctgcaatrgtgtgctggagggcatccgcatctgcaggakaggcttccccaaccgcatcctctacgrggacttccggcagaggtatcgcatcctgaacccagcggccatccctgagggacagttcatkyatagcaggaagggggcagagaagctgctcagctccctggacattgatcacaaccagtacaagtttggccacaccaaggtgktcstcaaggccgrgctgctggggctgctggaggaaatgagggacrbgaggctgagcrgcatcatcacgcgtrtccaggcccagtcccgaggtgtgctcgcagaatggagtacaaaaagctgctggaacgtagagactccctgctggtaatccagtggaacattcgggccttcatgggggrcaagaattggccctggatgaagctctacttcaagatcaagccgctgctgaagagtgcagaaagagaraaggagatggcctccatgayggaggagttcacacgcsssaaagaggcgctagagaagtccgaggctcgcsryarggagctggaggagaagatggtgtccctgctgcaggagaagaatgacctgcagctccaagtgcaggcggaacaagacaacctggcagatgctgaggagcgctgtgatcagstgatcaaaaacaagattcagctggaggccaaygtgaaggagatgaacgaraggctggaggrtgaggagragatgaatgctgagrtcactgccaagaagcgcaagctsbaagatgagtgctcagarctcaaaagggacatcgatgatctggagctgacactggccaaagtggagaaggagaaacacgcaacagagaacaaggtgaaaaacctgacagaggagatggctgggctggatgagatcattyccaagctgaccaaggagaagaaagctctgcaagaggcccaccaacaggctctggatgaccttcaggccgaggaggacaaggtcaacaccctgactaaggccaaagtcaagctggagcagcaagtggatgatctggaaggatccctggagcaagagaagaaggtgcgcatggacctggagcgagcraagcggaagctggagggcgacctgaagctgacccaggagagcatcatggacctggagaatgacaagcagcagctggatgagcggctgaaaaaaaaagactttgagctgaatgctctcaacgcaaggattgaggatgaacaggccctcggcagccagctgcagaagaagctcaaggagcttcaggcacgcatcgaggagctggaggaggagctggaggccgagcgcaccgccagggctaaggtggagaagctgcgctcagacctgtctcgggagctggaggagatcagcgagcggctggaagaggccggcggggccacgtccgtgcagatcgagatgaacaagaagcgcgaggccgagttccagaagatgcggcgggacctggaggaggccacgctgcagcacgaggccactgccgcggccctgcgcaagaagcacgccgacagcgtggccgagctgggcgagcagatcgacaacctgcagcgggtgaagcagaagctggagaaggagaagagcgagttcaagctggagctggatgacgtcacctccaacatggagcagatcatcaaggccaaggcagctaacctggagaagatgtgccggaccttggaagaccagatgaatgagcaccggagcaaggcggaggagacccagcgttctgtcaacgacctcaccagccagcgggccaagttgcaaaccgagaatggtgagctgtcccggcagctggatgagaaggaggcactratctcccagctgacccgaggcaagctcacctacacccagcagctggaggacctcaagaggcagctggaggaggaggttaaggcgaagaacgccctggcccacgcactgcagtcggcccggcatgactgcgacctgctgcgggagcagtacgaggaggagacggaggccaaggccgagctgcagcgcgtcctttccaaggccaactcggaggtggcccagtggaggaccaagtatgagacggacgccattcagcggactgaggagctcgaggaggccaagaagaagctggcccagcggctgcaggaagctgaggaggccgtggaggctgttaatgccaagtgctcctcgctrgagaagaccaagcaccggctacagaatgagatcgaggacttgatggtggacgtagagcgctccaatgctgctgctgcagccctggacaagaagcagaggaacttcgacaagatcctggccgagtggaagcagaagtatgaggagtcgcagtcggagctggagtcctcgcagaaggaggctcgctccctcagcacagagctcttcaaactcyagaacgcctatgaggagtcsctggaacatctggagaccttcaagcgggagaacaaaaacctgcaggaggagatctccgacttgactgagcagttgggttccagcggaaagacyatccatgagctggagaaggtccgaaagcagctggaggccgagaagatggagctgcagtcagccctggaggaggccgaggcctccctggagcacgaggarggcaagatcctccgggcccagctggagttcaaccagatcaaggcagagatcgaycggaagctggcagagaaggacgaggagatggaacaggccaagcgcaaccacctgcgggtggtggactcgctgcagacctccctggacgcagagacacgcagccgcaacgaggccctgagggtgaagaagaagatggaaggagacctcaatgagatggagatccagctcagccacgccaaccgcatggccgccgaggcccagaagcaagtcaagagcctccagagcttgttgaaggacacccagattcagctggacgatgcagtccgtgccaacgacgacctgaaggagaacatcgccatmgtggagcggcgcaacaacctgctgcaggctgagctggaggagttgcgtgccgtggtggagcagacagagcggtcccggaagctggcrgagcaggagctgattgagactagtgagcgggtgcagctgctgcattcccagaacaccagcctcatcaaccagaagaagaagatggatgctgacctgtcccagctccagactgaagtggaggaggcagtgcaggagtgcaggaatgctgaggagaaggccaagaaggccatcacggatgccgccatgatggcagaggagctgaagaaggagcaggacaccagcgcccacctggagcgcatgaagaagaacatggaacagaccattaaggacctgcagcaccggctggacgaagccgagcagatcgccctcaagggcggcaagaagcagctgcagaagctggaagcgcgggtgcgggagctggagaatgagctggaggccgagcagaagcgcaacgcygagtcggtgaagggcatgaggaagagcgagcggcgsatcaaggagctcacctaccagacggaggaggacaggaaaaacctgctgcggctgcaggacctggtagacaagctgcagctaaaggtcaaggcctacaagcgccaggccgaggaggcggaggagcaagccaacaccaacctgtccaagttccgcaaggtgcagcacgagctggatgaggcagaggagcgggcggacatcgccgagtcccaggtcaacaagctgcgggccaagagccgtgacattggcacgaagagatgcggtttcaccatgttggccaggctggtrttgaactcctgaccttgtgatccactcgyctcagcctcccaaaggcttgaatgaggagtagctttgmcacatcttgatctgctcagccctggaggtgccagcaaagccccatgctggagcctgtgtaacagctccttgggaggaagcagaataaagcaattttccttgaagccr

SEQ ID NO: 554 - DNA, 1204 bp, Homo sapiens
ttaaggttagagaagggggacacaaatgtcttcaggcttaggtccctgggggctcccagtcctgcccctgttcctctactcacatcccagctcctcccagtttcttttcggacctcctcctctccccttccttctctattccaggctgggttgggctctaagcaaggggagggattagagcctccttcctctctgcccctccccatgggtctctagggggctggtgcaggcagcagcagaggcactctgggcagctgggtgagggcccatctgggcaaggcccccakcgcctgccttctctcccggggccctgtgggcaagcctcctgcttcactttcaggtttctcgaagtgccttcttgctcctgtctgtttccccatcctgccagatttctgtttctcttgctgggcttttggcagtagggggctgtgttggtgggccctacgaagatgctcagtgctcgagatcgccgggaccggcaccctgaggagggggtagttgcagagctccagggcttcgcggtggacaaggccttcctcacctcccacaagggcatcctgctggaaaccgagctggccctgaccctcatcatcttcatytgcttcacggcctccatctctgcctacatggccgcggcgctactggagttcttcatcacacttgccttcctcttcctctatgccacccagtactaccagcgcttcgaccgaattaactggccctgtctggacttcctgcgctgtgtcagtgccatcatcatcttcctggtggtctcctttgcagctgtgacctcccgggayggagctgccattgctgcttttgtttttggcatcatcctggtttccatctttgcctatgatgccttcaagatctaccggactgagatggcacccggggccagccagggggaccagcagtgactctggggctacctggctcctaggcccagccagccagagaggacagtggagcccagacacgtctccttgggattcactagcccccagcccgccaaaccccaccccagccctacacagcagtctggcctgagacgtcactggggacttatctgtggagcctggtgctccaggatgtggcttctcatgaagctctggccagaggaggggaacttattgggggagggggggtggaggggaggaatctggacctctaagtcattcccaaattaaaatattcaaattct

SEQ ID NO: 555 - DNA, 3519 bp, Homo sapiens
atacaacttatacaggaatcttgataatatcgcctcatcctttttcatattttcccccatgtttttgctatgcacataagctaaactgaaataaatagatataagacattcttttagtacaccttcactgctgatgtttttgctgtaatttttctagactagtgaggtttcagaaaaagggactgagttttaatatcaaataagcaattttccttatatatatatttttggtcactttctccagcattgctgtctttttctctccagcctttggcccttcttatcaggatgaaaacgcttctgtttggtgtctggarcctgctggccttgatcctttgcccaggggtcccggaagagttgtttgaggtttctatttggccaagtcaggccctggtggagtttggacagtccctagtggtcaactgcagcactacttgcccagacccaggacccagtggaattgagaccttcttaaagaaaactcaggtgggcaaagggcctcagtggaaagagtttcttctggaggatgtcacagagaattccatcctgcagtgcttcttctcttgtgcagggattcaaaaggacacaagccttggcatcactgtgtattygccaccagagcaagtgatcctggagctgcagcctgcctgggtggctytggacgaagccttcacagtgaagtgtcatgtacccagtgtagcacccttggagagtctcacccttgcccttctccagggtaaccaagaactgcatagaaagaactttacgagcttggctgtggcctcccaaagagctgaagtcatcatcagtgtcagagcccaaaaggagaatgacagatgcaattcttcctgccatgcagaactggacttgagtttgcaaggtgggaggctctttcaaggcagctcacccatcagaatagtccggatctttgaattctctcagagtccccacatctgggtctcttcccttttggaggctgggatggcggagactgtgagctgcgaggtggctagggtgtttccagccaaagaagttatgttccacatgttcctggaagaccaagagctgagctccttcctttcctgggagggggacacagcatgggccaatgctaccattcggaccatggaggctggtgatcaggaactgtcttgctttgcatctctgggtgcaatggaacagaagacaagaaagctagtgcatagctacaataagtggcctggctcttcctttttcatacgggttctctgctgctgaaaacacagagtaacgggttggtgattcggctgtagacatccctgctgccctttgctgggtatgctctcaagtgaacatgagtcttcatctttctctggcttccctccaccaatcctggagctaaaagaatcatacccattggcagggaccyacattaatgtgacctgctcagggcatgtattaacatcacccagccctactcttcggcttcagggagccccagacctccctgctggggagcctgcctggcttctacttactgccagggaggaagatgatggctgaaatttctcctgcgkggcctctttggtggtgcagggtcagcggttgatgaaaaccactgtgatccagctccatatcctatgcaagccacagttagaggaatccagttgccctggcaaacagacctggctggaagggatggaaaacacgctcgcctgcgtcccaaagggaaacccagctccagcyttggtgtgtacctggaatggggtggtctttgaccttgaagtgccacagaaggcaacctagaaccacactggaacctaccgctacacagccactaaccagctgggctctgtcagcaaagacattgctgtcattgttcaaggactggatgaaggaataagctctaccctctttgtcattattaccgttgcccttggagtgggtgtcatcaccatagcactgtatttgagctatcggccctgcaaagtggacaggaggaaattgctctataggcagaaagaggaggacaaagaggaggaaagccagtttgctgttcaggaagagaaaagtacaactcatataattgacaartgrttgattgaatgagacttctgctactgtggtttcccagggagggaagaagggatagaggagaaaggaagaaacacaatggcaggctgcattcccctttgtgtacgtctgtcctgtaaaacggtgtttcaggcccccatgccccatgtcctgtgtgtccaatatgtccacaagctcaccattctctctctctctctcttttcttttctttttctttttctttttttttttttttgagatggagtcttgctgttgtcgcctaggctggagtgcaatgatgcgatcctggctcactgcaactgcagcctcccgggttcaggtgattctcctgcctcagcctccctggcagctgggattacaggtgcacaccaccatgcctgtctaatttttgtacttttcgtagagatggggtttcaccatgttggctgggctggtctcaaactcctgacctcaagtgatccggccaccttggcctcccaaagtgctgggattacaggtgtgagccaccgcgcccagccacctttctctttagagctcactctagtcattaagaatctcagtctcaatgtttgatttgtaagaaggcctcttgctccttgccaggtgcttcatcagtccactcttagatacaaaaaaaagatcctgctgtttctttatggtttccactgcccttttctcttaaatatcatactaaagtcaggcacatcttagaaatgcaactcatatttcatggttttctgattactaactgggaactaaatttgtagtccagggacaggactttgaagggagtaagtatcaaatatggggctaggaatcagagctctgttcccatctccactttcccttgctcccctgacctgggcttctggagggccagctcccagagctgagcttgttgacatcattaaggatcagtggcaagcttcaactcagtaaccatctgttgtgggtcttgggggagtatacagatggtaagaaattccactttgggccagacaagcatcctatctagcccagtgttctgtctctgaagtagaaggtagagttcttccatgaaattggcctcataggttaagagctccaaacatctctgaattccttttcatagagtgatcaactgtgagttcgcatttgtcagttttttttttgtacccatgtgggtgtctaggttagagttgcaatgtttactctcccttttcatcaataaggacatattttcttctgtctgtaagcaatttccttgaagcttcaagaagaatcctcttgtgaaaatgttcatatgattttatgattctgcttccttccctgtccttgggaaagagtatattcaccctcagagaaggcgtgaggaatcaccaaaccagatcttttctcccaaatcagtcaagaaatgttcactggaatgttgctatggtaaaaataaaagtggttttatgatgtcca

SEQ ID NO: 556 - DNA, 5064 bp, Homo sapiens
cggagctgccaggcgggagcggcgtaggcgcggggtcgccggccagcgtgaaccgggacatggagccgcccggcgggagcctggggcccggccgcgggacccgggacaagaagaagggccggagcccagatgagctgccctcggcgggcggcgacggcggcaaatctaagaaatttctggagagatttaccagcatgagaattaagaaggagaaggaaaagcccaattctgctcatagaaattcttctgcatcatatggggatgatcccacagcacagtcattgcaagatgtttcagatgaacaagtgctggttctctttgaacagatgctgctggatatgaacctgaatgaggagaaacagcaacctttgagggagaaggacatcatcatcaagagggagatggtgtcccaatacttgtayacctccaaggctggcatgagccagaaggagagctctaagtctgccatgatgtatattcaggagttgaggtcaggcttgcgggatatgcctctgctcagctgcctggagtcccttcgtgtgtctctcaacaacaaccctgtcagttgggtgcaaacatttggtgctgaaggcttggcctccttattggacattcttaaacgacttcatgatgagaaagaagagactgctgggagttacgatagccggaacaagcatgagatcattcgctgcttgaaagcttttatgaacaacaagtttggaatcaagaccatgttggagacagaagaaggaatcctactgctggtcagagccatggatcctgctgttcccaacatgatgattgatgcagctaagctgctttctgctctttgtattctaccgcagccagaggacatgaatgaaagggttttggaggcaatgacagaaagagctgagatggatgaagtggaacgtttccagccgctgctggatggattaaaaagtggaaccactattgcactgaaggcatgttggatgcctacagctgatcaatgctctcatcacaccagcggaggaacttgacttccgagttcacatcagaagtgaactgatgcgtttggggctacatcaggtgttgcaggaccttcgagagattgaaaatgaagatatgagagtgcaactaaatgtgtttgatgaacaaggggaagaggattcctatgacctgaagggacggctggatgacattcgcatggagatggaatacctatttcccttttccactgactttaatgaagtctttcagattctcttaaacacagtgaaggattcaaaggcagagccacacttcctttccatcctgcagcacttactcttggtccgaaatgactatgaggccagacctcagtactataagttgattgaagaatgtatttcccagatagttctgcacaagaacggggctgatcctgacttcaagtgccggcacctccagattgagattgagggattaattgatcaaatgattgataagacaaaggtggagaaatctgaagccaaagctgcagagctggaaaagaagttggactcagagttaacagcccgacatgagctacaggtggaaatgaaaaagatggaaagtgactttgagcagaagcttcaagatcttcagggagaaaaagatgcactgcattctgaaaagcagcaaattgccacagagaaacaggacctggaagcagaggtgtcccagctcacaggagaggttgccaagctgacaaaggaactggaagatgccaagaaagaaatggcttccctctctgcggcagctattactgtacctccttctgttcctagtcgtgctcctgttccccctgcccctcctttacctggtgactctggcactattattccaccaccacctgctcctggggatagtaccaytcctcctcctcctcctcctcctcctcctcctccacctcctttgcctgggggtgtttgcatctcctcacccccttctttacctggaggtactgctatctctccaccccctcctttgtctggggatgctaccatccctccaccccctcctttgcctgagggtgttggcatcccttcaccctcttctttgcctggaggtastgccatccccccacctcctcctttgcctgggagtgctagaatccccccaccaccacctcctttgcctgggagtgctggaattccccccccacctcctcccttgcctggagaagcaggaatgccacctcctcctccccctcttcctggtggtcctggaatccctccacctcctccatttcccggaggcmctggcattcctccacctccacccggaatgggtatgcctccacctcccccatttggatttggagttcctgcagccccagttctgccatttggattaacccccaaaaagctttataagccagwrgtgcagctccggaggccaaactggtccaagcttgtggctgaggacctctcccaggactgcttctggacaaaggtgaaggaggaccgctttgagaacaatgaacttttcgccaaacttacccttaccttctctgcccagaccaagaccaagaaggatcaagaaggtggagaagaaaagaaatctgtgcaaaagaaaaaagtaaaagagttaaaggtgttggattcaaagacagcccagaatctctcaatctttttgggttccttccgcatgccctatcaagagattaagaatgtcatcctggaggtgaatgaggctgttctgactgagtctatgatccagaacctcattaagcaaatgccagagccagagcagttaaaaatgctttctgaactgaaggatgaatatgatgacctggctgagtcagagcagtttggcgtggtgatgggcactgtgccccgactgcggcctcgcctcaatgccattctcttcaagctacaattcagcgagcaagtggagaatatcaagccagagattgtgtctgtcactgctgcatgtgaggagttacgtaagagtgagagcttttccaatctcctagagattaccttgcttgttggaaattacatgaatgctggctccagaaatgctggtgcttttggcttcaatatcagcttcctctgtaagcttcgagacaccaagtccacagatcagaagatgacgttgttacacttcttggctgagttgtgtgagaatgactatcccgatgtcctcaagtttccagacgagcttgcccatgtggagaaagccagccgagtttctgctgaaaacttgcaaaagaacctagatcagatgaagamacaaatttctgatgtggaacgtgatgttcagaatttcccagctgccacagatgaaaaagacaagtttgttgaaaaaatgaccagctttgtgaaggatgcacaggaacagtataacaagctgcggatgatgcattctaacatggagaccctctataaggagctgggcgagtacttcctctttgaccccaagaagttgtctgttgaagaatttttcatggatcttcacaattttcggaatatgtttttgcaagcagtcaaggagaaccagaagcggcgggagacagaagaaaagatgaggcgagcaaaactagccaaggagaaggcagagaaggagcggctagagaagcagcagaagagagagcaactcatagacatgaatgcagagggygatgagacaggtgtgatggacagtcttctagaagccctgcagtcaggggcagcattccgacggaagagagggccccgtcaagacaacctcttgtgcccctgggaagtagaggaggaggaggagacctttaaattgccaacaggaaggccgggtgtgcagtcacatctctgctagcttcggagctgaccaaggatgatgccatggctgctgttcctgccaaggtgtccaagaacagtgaracattccccacaatccttgaggaagccaaggagttggttggccgtgcaagctaatgtgggtcctgtgaccgcggcagctcctcagcggagccgcagactgtcctgccctgcagcatgtgcctaaaggctcaaggggatattcctctggggtggccactcccaccaccctgaccctgtctttctctctggcctgctgctctctcaacatcacatacagcttcagctgcctggaggccagaaggaaagggcagtgcaggggaggcctgagcccgacttagccagccctggctgttgtattaccaaagcagggtccatgtttgctgccttaaccctgtctcctctctgttactcagagggcctcatctcagacaaggcccagcctgctttttctcagccctgactttctaatgggctttcccccctaggtcagtcttgctggatttgtgcttttcttttgtggtttctctggccctgagaatagcatggggcttgtaaacctttgggctagatccctcctttcattgctgttgtctctgctcttccctctcctggctgtggttatttattattagtggtgtggcactgggagctgctcctaaggaagcagggagcaaatcccacctttaccccaccttcctgggaaaggcctccaaagcaaaggatctggaccagtttccctgctgtgctgtggcccaggccagagcctgtgggcaggcaggcagggcatagcgacagtgtgggacctgcccccagcttctgccacgctttatgcccttgcctctctggacgctctgcaccaaccccaggctactgagccaccttccctcctcatgccttccctgagctttggtgcatctcatctggactatgggttgtactgtgaccatcccaacacctcaccctctgtctacaaggaaatgggaggtggagcctcctggctgagaaattgttttgcaaatggatctatttttgtatgaaaaaaaaaatttttttaaagaaaactgttccttccccctttcccctccataatgtaagaagctttggtggcaggttacagagttctgggatttcttctcacaggcccaatcctgaatrtgcccctggaccttctggacccttgagtccaaggcagatcctctctcccagggaatccgacacaggaggaaccccttctctggttgagctgggccaggcctaa

SEQ ID NO: 557 - DNA, 4950 bp, Homo sapiens
cggagctgccaggcgggagcggcgtaggcgcggggtcgccggccagcgtgaaccgggacatggagccgcccggcgggagcctggggcccggccgcgggacccgggacaagaagaagggccggagcccagatgagctgccctcggcgggcggcgacggcggcaaatctaagaaatttctggagagatttaccagcatgagaattaagaaggagaaggaaaagcccaattctgctcatagaaattcttctgcatcatatggggatgatcccacagcacagtcattgcaagatgtttcagatgaacaagtgctggttctctttgaacagatgctgctggatatgaacctgaatgaggagaaacagcaacctttgagggagaaggacatcatcatcaagagggagatggtgtcccaatacttgtayacctccaaggctggcatgagccagaaggagagctctaagtctgccatgatgtatattcaggagttgaggtcaggcttgcgggatatgcctctgctcagctgcctggagtcccttcgtgtgtctctcaacaacaaccctgtcagttgggtgcaaacatttggtgctgaaggcttggcctccttattggacattcttaaacgacttcatgatgagaaagaagagactgctgggagttacgatagccggaacaagcatgagatcattcgctgcttgaaagcttttatgaacaacaagtttggaatcaagaccatgttggagacagaagaaggaatcctactgctggtcagagccatggatcctgctgttcccaacatgatgattgatgcagctaagctgctttctgctctttgtattctaccgcagccagaggacatgaatgaaagggttttggaggcaatgacagaaagagctgagatggatgaagtggaacgtttccagccgctgctggatggattaaaaagtggaaccactattgcactgaaggttggatgcctacagctgatcaatgctctcatcacaccagcggaggaacttgacttccgagttcacatcagaagtgaactgatgcgtttggggctacatcaggtgttgcaggaccttcgagagattgaaaatgaagatatgagagtgcaactaaatgtgtttgatgaacaaggggaagaggattcctatgacctgaagggacggctggatgacattcgcatggagatggatgactttaatgaagtctttcagattctcttaaacacagtgaaggattcaaaggcagagccacacttcctttccatcctgcagcacttactcttggtccgaaatgactatgaggccagacctcagtactataagttgattgaagaatgtatttcccagatagttctgcacaagaacggggctgatcctgacttcaagtgccggcacctccagattgagattgagggattaattgatcaaatgattgataagacaaaggtggagaaatctgaagccaaagctgcagagctggaaaagaagttggactcagagttaacagcccgacatgagctacaggtggaaatgaaaaagatggaaagtgactttgagcagaagcttcaagatcttcagggagaaaaagatgcactgcattctgaaaagcagcaaattgccacagagaaacaggacctggaagcagaggtgtcccagctcacaggagaggttgccaagctgacaaaggaactggaagatgccaagaaagaaatggcttccctctctgcggcagctattactgtacctccttctgttcctagtcgtgctcctgttccccctgcccctcctttacctggtgactctggcactattattccaccaccacctgctcctggggatagtaccaytcctcctcctcctcctcctcctcctcctcctccacctcctttgcctggaggtactgctatctctccaccccctcctttgtctggggatgctaccatccctccaccccctcctttgcctgagggtgttggcatcccttcaccctcttctttgcctggaggtastgccatccccccacctcctcctttgcctgggagtgctagaatccccccaccaccacctcctttgcctgggagtgctggaattccccccccacctcctcccttgcctggagaagcaggaatgccacctcctcctccccctcttcctggtggtcctggaatccctccacctcctccatttcccggaggcmctggcattcctccacctccacccggaatgggtatgcctccacctcccccatttggatttggagttcctgcagccccagttctgccatttggattaacccccaaaaagctttataagccagwrgtgcagctccggaggccaaactggtccaagcttgtggctgaggacctctcccaggactgcttctggacaaaggtgaaggaggaccgctttgagaacaatgaacttttcgccaaacttacccttaccttctctgcccagaccaagaccaagaaggatcaagaaggtggagaagaaaagaaatctgtgcaaaagaaaaaagtaaaagagttaaaggtgttggattcaaagacagcccagaatctctcaatctttttgggttccttccgcatgccctatcaagagattaagaatgtcatcctggaggtgaatgaggctgttctgactgagtctatgatccagaacctcattaagcaaatgccagagccagagcagttaaaaatgctttctgaactgaaggatgaatatgatgacctggctgagtcagagcagtttggcgtggtgatgggcactgtgccccgactgcggcctcgcctcaatgccattctcttcaagctacaattcagcgagcaagtggagaatatcaagccagagattgtgtctgtcactgctgcatgtgaggagttacgtaagagtgagagcttttccaatctcctagagattaccttgcttgttggaaattacatgaatgctggctccagaaatgctggtgcttttggcttcaatatcagcttcctctgtaagcttcgagacaccaagtccacagatcagaagatgacgttgttacacttcttggctgagttgtgtgagaatgactatcccgatgtcctcaagtttccagacgagcttgcccatgtggagaaagccagccgagtttctgctgaaaacttgcaaaagaacctagatcagatgaagamacaaatttctgatgtggaacgtgatgttcagaatttcccagctgccacagatgaaaaagacaagtttgttgaaaaaatgaccatctttgtgaaggatgcacaggaacagtataacaagctgcggatgatgcattctaacatggagaccctctataaggagctgggcgagtacttcctctttgaccccaagaagttgtctgttgaagaatttttcatggatcttcacaattttcggaatatgtttttgcaagcagtcaaggagaaccagaagcggcgggagacagaagaaaagatgaggcgagcaaaactagccaaggagaaggcagagaaggagcggctagagaagcagcagaagagagagcaactcatagacatgaatgcagagggygatgagacaggtgtgatggacagtcttctagaagccctgcagtcaggggcagcattccgacggaagagagggccccgtcaagccaacaggaaggccgggtgtgcagtcacatctctgctagcttcggagctgaccaaggatgatgccatggctgctgttcctgccaaggtgtccaagaacagtgaracattccccacaatccttgaggaagccaaggagttggttggccgtgcaagctaatgtgggtcctgtgaccgcggcagctcctcagcggagccgcagactgtcctgccctgcagcatgtgcctaaaggctcaaggggatattcctctggggtggccactcccaccaccctgaccctgtctttctctctggcctgctgctctctcaacatcacatacagcttcagctgcctggaggccagaaggaaagggcagtgcaggggaggcctgagcccgacttagccagccctggctgttgtattaccaaagcagggtccatgtttgctgccttaaccctgtctcctctctgttactcagagggcctcatctcagacaaggcccagcctgctttttctcagccctgactttctaatgggctttcccccctaggtcagtcttgctggatttgtgcttttcttttgtggtttctctggccctgagaatagcatggggcttgtaaacctttgggctagatccctcctttcattgctgttgtctctgctcttccctctcctggctgtggttatttattattagtggtgtggcactgggagctgctcctaaggaagcagggagcaaatcccacctttaccccaccttcctgggaaaggcctccaaagcaaaggatctggaccagtttccctgctgtgctgtggcccaggccagagcctgtgggcaggcaggcagggcatagcgacagtgtgggacctgcccccagcttctgccacgctttatgcccttgcctctctggacgctctgcaccaaccccaggctactgagccaccttccctcctcatgccttccctgagctttggtgcatctcatctggactatgggttgtactgtgaccatcccaacacctcaccctctgtctacaaggaaatgggaggtggagcctcctggctgagaaattgttttgcaaatggatctatttttgtatgaaaaaaaaaatttttttaaagaaaactgttccttccccctttcccctccataatgtaagaagctttggtggcaggttacagagttctgggatttcttctcacaggcccaatcctgaatrtgcccctggaccttctggacccttgagtccaaggcagatcctctctcccagggaatccgacacaggaggaaccccttctctggttgagctgggccaggcctaa

SEQ ID NO: 558 - DNA, 1195 bp, Homo sapiens
aggggaaaggggaagtttgggaggaaggcttctgagaagactggtgggagagaaggagagcctgcagacagaggcctccagcttggaggaaaagctttcrgactgctgaaggcccagcaggaagagaggctggatgagatcaacaagcaattcctagacgatcccaaatatagcagtgatgaggatctgccctccaaactggaaggcttcaaaggtgagggggaaactgtaggcggtggagacagggctgggggtaggagggttaggatttccacaagaacaaggcaggaacagcagagataaaaagtttacttttgtggtagcaaaaggggaacctgcctttattgccctcctgccacactgcggtccctttcccgggcctgcctctctcagcatcccctctagctccttacamcctagcggggcccctcaactccccaaccccacttcctctgcctgcccctcctcctccttccacgttgtctcctccacctagcagttggttggcaaccccttcctcagtcccckgctgaaaaccctcsagtcagcgcttatcccttctgctctctcccctcacccagagaaatacatggagtttgaccttaatggaaatggcgatattggtgagaaaygggtgatttgcgggggcagggtggtgtgcaggcctaagaagacagaggtctctcctacatgctccattcctcatgatttgggagggggcccacctaccacagtgggaggaaggagaatggggatgcggaagtgggagaggagagagagggtctccccaccttytccccatccccatcctctgcccccagatatcatgtccctgaaacgaatgctggagaaacttggagtccccaagactcacctagagctaaagaaattaattggagaggtgtccagtggctccggggagacgttcagctaccctgactttctcaggatgatgctgggcaagagatctgccatcctaaaaatgatcctgatgtatgaggaaaaagcgagagaaaaggaaaagccaacaggccccccagccaagaaagctatctctgagttgccctgatttgaagggaaaagggatgatgggattgaaggggcttctaatgacccagatayggaaacagaagacaaaattgtaagccagagtcaacaaattaaataaattaccccctcctccagatcaagtcag

SEQ ID NO: 559 - DNA, 691 bp, Homo sapiens
aggggaaaggggaagtttgggaggaaggcttctgagaagactggtgggagagaaggagagcctgcagacagaggcctccagcttggtctgtctccccacctctaccagcatctgctgagctatgagccaaaccagggatttacagggaggaaaagctttcrgactgctgaaggcccagcaggaagagaggctggatgagatcaacaagcaattcctagacgatcccaaatatagcagtgatgaggatctgccctccaaactggaaggcttcaaagagaaatacatggagtttgaccttaatggaaatggcgatattgatatcatgtccctgaaacgaatgctggagaaacttggagtccccaagactcacctagagctaaagaaattaattggagaggtgtccagtggctccggggagacgttcagctaccctgactttctcaggatgatgctgggcaagagatctgccatcctaaaaatgatcctgatgtatgaggaaaaagcgagagaaaaggaaaagccaacaggccccccagccaagaaagctatctctgagttgccctgatttgaagggaaaagggatgatgggattgaaggggcttctaatgacccagatayggaaacagaagacaaaattgtaagccagagtcaacaaattaaataaattaccccctcctccagatcaagtcag

SEQ ID NO: 560 - DNA, 997 bp, Homo sapiens
aggggaaaggggaagtttgggaggaaggcttctgagaagactggtgggagagaaggagagcctgcagacagaggcctccagcttggaggaaaagctttcrgactgctgaaggcccagcaggaagagaggctggatgagatcaacaagcaattcctagacgatcccaaatatagcagtgatgaggatctgccctccaaactggaaggcttcaaaggtgagggggaaactgtaggcggtggagacagggctgggggtaggagggttaggatttccacaagaacaaggcaggaacagcagagataaaaagtttacttttgtggtagcaaaaggggaacctgcctttattgccctcctgccacactgcggtccctttcccgggcctgcctctctcagcatcccctctagctccttacamcctagcggggcccctcaactccccaaccccacttcctctgcctgcccctcctcctccttccacgttgtctcctccacctagcagttggttggcaaccccttcctcagtcccckgctgaaaaccctcsagtcagcgcttatcccttctgctctctcccctcacccagagaaatacatggagtttgaccttaatggaaatggcgatattgatatcatgtccctgaaacgaatgctggagaaacttggagtccccaagactcacctagagctaaagaaattaattggagaggtgtccagtggctccggggagacgttcagctaccctgactttctcaggatgatgctgggcaagagatctgccatcctaaaaatgatcctgatgtatgaggaaaaagcgagagaaaaggaaaagccaacaggccccccagccaagaaagctatctctgagttgccctgatttgaagggaaaagggatgatgggattgaaggggcttctaatgacccagatayggaaacagaagacaaaattgtaagccagagtcaacaaattaaataaattaccccctcctccagatcaagtcag

SEQ ID NO: 561 - DNA, 629 bp, Homo sapiens
aggggaaaggggaagtttgggaggaaggcttctgagaagactggtgggagagaaggagagcctgcagacagaggcctccagcttggtctgtctccccacctctaccagcatctgctgagctatgagccaaaccagggatttacaggcaattcctagacgatcccaaatatagcagtgatgaggatctgccctccaaactggaaggcttcaaagagaaatacatggagtttgaccttaatggaaatggcgatattgatatcatgtccctgaaacgaatgctggagaaacttggagtccccaagactcacctagagctaaagaaattaattggagaggtgtccagtggctccggggagacgttcagctaccctgactttctcaggatgatgctgggcaagagatctgccatcctaaaaatgatcctgatgtatgaggaaaaagcgagagaaaaggaaaagccaacaggccccccagccaagaaagctatctctgagttgccctgatttgaagggaaaagggatgatgggattgaaggggcttctaatgacccagatayggaaacagaagacaaaattgtaagccagagtcaacaaattaaataaattaccccctcctccagatcaagtcag

SEQ ID NO: 562 - DNA, 1363 bp, Homo sapiens
gaggaaaagctttcrgactgctgaaggcccagcaggaagagaggctggatgagatcaacaagcaattcctagacgatcccaaatatagcagtgatgaggatctgccctccaaactggaaggcttcaaaggtgagggggaaactgtaggcggtggagacagggctgggggtaggagggttaggatttccacaagaacaaggcaggaacagcagagataaaaagtttacttttgtggtagcaaaaggggaacctgcctttattgccctcctgccacactgcggtccctttcccgggcctgcctctctcagcatcccctctagctccttacamcctagcggggcccctcaactccccaaccccacttcctctgcctgcccctcctcctccttccacgttgtctcctccacctagcagttggttggcaaccccttcctcagtcccccagagaaatacatggagtttgaccttaatggaaatggcgatattggtgagaaaygggtgatttgcgggggcagggtggtgtgcaggcctaagaagacagaggtctctcctacatgctccattcctcatgatttgggagggggcccacctaccacagtgggaggaaggagaatggggatgcggaagtgggagaggagagagagggtctccccaccttytccccatccccatcctctgcccccagatatcatgtccctgaaacgaatgctggagaaacttggagtccccaagactcacctagagctaaagaaattaattggagaggtgtccagtggctccggggagacgttcagctaccctgactttctcaggatgatgctgggcaagagatctgccatcctaaaaatgtgagtgtcaatttccaacctcccctgtacttacctgttttctcctcccccatccctacccttgtccacaggctcaacatttctacacgttgcccatcatcccttcttccatccttagagggacccttccaaggtcccgaccccatccctatccatagtcctggtccccagaaactccaacccctgcccttcctcttcccccttccaccctcacatccccatccccttctagcctttcctagcaccctatgatttattcccttgagaggagtgttccctgatccctgtgcctcttcccatctcaaccaggatcctgatgtatgaggaaaaagcgagagaaaaggaaaagccaacaggccccccagccaagaaagctatctctgagttgccctgatttgaagggaaaagggatgatgggattgaaggggcttctaatgacccagatayggaaacagaagacaaaattgtaagccagagtcaacaaattaaataaattaccccctcctccagatcaa

SEQ ID NO: 563 - DNA, 984 bp, Homo sapiens
aggggaaaggggaagtttgggaggaaggcttctgagaagactggtgggagagaaggagagcctgcagacagaggcctccagcttggaggaaaagctttcrgactgctgaaggcccagcaggaagagaggctggatgagatcaacaagcaattcctagacgatcccaaatatagcagtgatgaggatctgccctccaaactggaaggcttcaaaggtgagggggaaactgtaggcggtggagacagggctgggggtaggagggttaggatttccacaagaacaaggcaggaacagcagagataaaaagtttacttttgtggtagcaaaaggggaacctgcctttattgccctcctgccacactgcggtccctttcccgggcctgcctctctcagcatcccctctagctccttacamcctagcggggcccctcaactccccaaccccacttcctctgcctgcccctcctcctccttccacgttgtctcctccacctagcagttggttggcaaccccttcctcagtcccckgctgaaaaccctcsagtcagcgcttatcccttctgctctctcccctcacccagagaaatacatggagtttgaccttaatggaaatggcgatattggtgagaaaygggtgatttgcgggggcagggtggtgtgcaggcctaagaagacagaggtctctcctacatgctccattcctcatgatttgggagggggcccacctaccacagtgggaggaaggagaatggggatgcggaagtgggagaggagagagagggtctccccaccttytccccatccccatcctctgcccccagatatcatgtccctgaaacgaatgctggagaaacttggagtccccaagactcacctagagctaaagaaattaattggagaggtgtccagtggctccggggagacgttcagctaccctgactttctcaggatgatgctgggcaagagatctgccatcctaaaaat

SEQ ID NO: 564 - DNA, 1132 bp, Homo sapiens
aggggaaaggggaagtttgggaggaaggcttctgagaagactggtgggagagaaggagagcctgcagacagaggcctccagcttggtctgtctccccacctctaccagcatctgctgagctatgagccaaaccagggatttacagggaggaaaagctttcrgactgctgaaggcccagcaggaagagaggctggatgagatcaacaaggtagaaggaagaactaagggggcagagccagggggatggggcgtggatggggagggcctaccctggctcttattttcccctccatagcaattcctagacgatcccaaatatagcagtgatgaggatctgccctccaaactggaaggcttcaaaggtgagggggaaactgtaggcggtggagacagggctgggggtaggagggttaggatttccacaagaacaaggcaggaacagcagagataaaaagtttacttttgtggtagcaaaaggggaacctgcctttattgccctcctgccacactgcggtccctttcccgggcctgcctctctcagcatcccctctagctccttacamcctagcggggcccctcaactccccaaccccacttcctctgcctgcccctcctcctccttccacgttgtctcctccacctagcagttggttggcaaccccttcctcagtcccckgctgaaaaccctcsagtcagcgcttatcccttctgctctctcccctcacccagagaaatacatggagtttgaccttaatggaaatggcgatattggtgagaaaygggtgatttgcgggggcagggtggtgtgcaggcctaagaagacagaggtctctcctacatgctccattcctcatgatttgggagggggcccacctaccacagtgggaggaaggagaatggggatgcggaagtgggagaggagagagagggtctccccaccttytccccatccccatcctctgcccccagatatcatgtccctgaaacgaatgctggagaaacttggagtccccaagactcacctagagctaaagaaattaattggagaggtgtccagtggctccggggagacgttcagctaccctgactttctcaggatgatgctgggcaagagatctgccatcctaaaaat

SEQ ID NO: 565 - DNA, 712 bp, Homo sapiens
ccccaaacctgccaccgacggccacttccgtttccccgatagtatttggggatctcgaagcgatacttccggctccccccaggtccccaagctttacttttgtggggcacgacgagaaagtccgcagccccaaacattcccagaggtccacttgggccagtggtactttatcgcaggggcagctcccaccaaggaggagttggcaacttttgaccctgtggacaacattgtcttcaatatggctgctggctctgccccgatgcagctccaccttcgtgctaccatccgcatgaaagaygggctctgtgtgccccggaaatggatctaccacctgactgaagggagcacagatctcagaactgaaggccgccctgacatgaagactgagctcttttccagctcatgcccaggtggaatcatgctgaatgagacaggccagggttaccagcgctttctcctctacaatcgctcaccacatcctcccgaaaagtgtgtggaggaattcaagtccctgacttcctgcctggactccaaagccttcttattgactcctaggaatcaagaggcctgtgagctgtccaataactgacctgtaacttcatctaagtccccagatgggtacaatgggagctgagttgttggagggagaagctggagacttccagctccagctcccactcaagataataaagataatttttcaatcctcatc

SEQ ID NO: 566 - DNA, 719 bp, Homo sapiens
ccccaaacctgccaccgacggccacttccgtttccccgatagtatttggggatctcgaagcgatacttccggctccccccaggtccccaagctttacttttgtggggcacgacgagaaagtccgcagccccaaacattcccagaggtccacttgggccagtggtactttatcgcaggggcagctcccaccaaggaggagttggcaacttttgaccctgtggacaacattgtcttcaatatggctgctggctctgccccgatgcagctccaccttcgtgctaccatccgcatgtgagtggaaagaygggctctgtgtgccccggaaatggatctaccacctgactgaagggagcacagatctcagaactgaaggccgccctgacatgaagactgagctcttttccagctcatgcccaggtggaatcatgctgaatgagacaggccagggttaccagcgctttctcctctacaatcgctcaccacatcctcccgaaaagtgtgtggaggaattcaagtccctgacttcctgcctggactccaaagccttcttattgactcctaggaatcaagaggcctgtgagctgtccaataactgacctgtaacttcatctaagtccccagatgggtacaatgggagctgagttgttggagggagaagctggagacttccagctccagctcccactcaagataataaagataatttttcaatcctcatc

SEQ ID NO: 567 - DNA, 765 bp, Homo sapiens
gcagagtggactgagcagccagtaggggagagagcagttaaggcacacagagcaccagctccctcctgcctgaagatgttccaccaaatttgggcagctctgctctacttctatggtattatccttaactccatctaccagtgccctgagcacagtcaactgacaactctgggcgtggatgggaaggagttcccagaggtccacttgggccagtggtactttatcgcaggggcagctcccaccaaggaggagttggcaacttttgaccctgtggacaacattgtcttcaatatggctgctggctctgccccgatgcagctccaccttcgtgctaccatccgcatgaaagaygggctctgtgtgccccggaaatggatctaccacctgactgaagggagcacagatctcagaactgaaggccgccctgacatgaagactgagctcttttccagctcatgcccaggtggaatcatgctgaatgagacaggccagggttaccagcgctttctcctctacaatcgctcaccacatcctcccgaaaagtgtgtggaggaattcaagtccctgacttcctgcctggactccaaagccttcttattgactcctaggaatcaagaggcctgtgagctgtccaataactgacctgtaacttcatctaagtccccagatgggtacaatgggagctgagttgttggagggagaagctggagacttccagctccagctcccactcaagataataaagataatttttcaatcctcatc

SEQ ID NO: 568 - DNA, 772 bp, Homo sapiens
gcagagtggactgagcagccagtaggggagagagcagttaaggcacacagagcaccagctccctcctgcctgaagatgttccaccaaatttgggcagctctgctctacttctatggtattatccttaactccatctaccagtgccctgagcacagtcaactgacaactctgggcgtggatgggaaggagttcccagaggtccacttgggccagtggtactttatcgcaggggcagctcccaccaaggaggagttggcaacttttgaccctgtggacaacattgtcttcaatatggctgctggctctgccccgatgcagctccaccttcgtgctaccatccgcatgtgagtggaaagaygggctctgtgtgccccggaaatggatctaccacctgactgaagggagcacagatctcagaactgaaggccgccctgacatgaagactgagctcttttccagctcatgcccaggtggaatcatgctgaatgagacaggccagggttaccagcgctttctcctctacaatcgctcaccacatcctcccgaaaagtgtgtggaggaattcaagtccctgacttcctgcctggactccaaagccttcttattgactcctaggaatcaagaggcctgtgagctgtccaataactgacctgtaacttcatctaagtccccagatgggtacaatgggagctgagttgttggagggagaagctggagacttccagctccagctcccactcaagataataaagataatttttcaatcctcatc

SEQ ID NO: 569 - DNA, 2182 bp, Homo sapiens
ggaaaagtagcctaaagtcagtmtaactaaagggtggaacgaggtgggacaaggtccggaattgctgctcagtgatgtgtgtgtgcctgccgctggtggagctgagactgctcatctcagaaggatggggatgcttgatttcctggccaggttgtcccagcacagtggggattggccctgttgtatgacgaagacagcacatggtggcagagatagatactaacccatggactttccaagggagggaataggtctttggagggtatgcaagacaaaggtagacactggataaagaacccggtagtgcccaggtattaccccatctgggccattactcccacactcaggaaccagacgttgtgggtgaggacatgctgtccctcctgccaagtaataacttccttcccagccaggatcctgccccaagtaggaatatagctctgcatttacagcagctcctgctcagaccttgtcaaaaccaccctgcagcttaggattaaggagcatggtcacaggaaggtggggtttcagggcatcccctcaggaactgcccatctccccagaattccaaaatgaaggtccatatgcttgtaggtgtgctggtcatggtgggcttcacagtaggaaagggtaagtggggcccaggggcagggagggaggaaggggtaactgagtccaggaagggggtggagcgtggccatggataatcgggcttcctactggcccagggtatttgagagtgacccagtgcctccatccctccttctgcctccccagttcctgttcccgacatccggacgtgccacttctgcctcgtagaagacccttctgtaggatgcatttcaggctcagagaagtgtaccatcagcagctcatccctgtgcatggtgatcaccatctattatgatgtcaaggttcgcttcatcgttcgaggctgtggacagtacatttcctaccgctgccaagaaaaacgcaacacctactttgcagagtactggtatcaggcycagtgctgtcagtacrattattgcaactcctggtcaagcccccaactccagagctctctgccggagccccatgacaggcccctggccctgcctctgtctgactmccagattcagtggttctaccaggccctgaacctctccctgcccctccccaatttccatgcygsgacggagcctgatggcctggaccccatggtcacactgtccctgaacctgggcttgtcttttgctgagctgygccgcatgtacttgttcctcaatagttcaggacttttggttcttccccaggctggactcttgacacctcacccttcctgaattccacagtgcaaatatctttctgtaacaccctcagcatcctgcactgccctctctgaaaacacccacattctttggtcactgtgatttcttaggcctccgtctgttgtaccactagcatctatatgacttttgtgtaattttctctcttgaactctggtgctgtttttttgtttgtttgagacaaagtctygctctgtcacccagggtggagtgcagtggcatgatctctgctcactacaacctccacctcccgggttccagcgattctcctgcctcagcctcccgagtagctgggactacaggcgtgcaccaccacgcctggctaattttttgtatttttagtagagacggggtttcaccatgttggtcaggctggtctcgaactcctgacctcgtaatctgccctcctcgacctcccaaagtgccgggattacaggtgtgagccacygtgcctgkctgagctctggtgctgttcttccccctagaaaagaatctctagtgtggattctgcccagacaggctgacctgagaaaggcacagtggttcctccattccttccccatcatctgagtgttccagtatcccccatccctctcaatccagtcacctgcctattgacatctagctctgtttcccctgtcttgtccatgtctctaagacccagtaccagactgaactagcagcaagaaggacgaggaggccgggcatggtggctcacgccggtaatcccagmactttgggaggccgaggtgggcggatcacttgagattgggagtttgagaccagcctggccaacatggtaaaacccgctctctattaaaaatwgaaaaatcagctgggtgtggtggcacacc

SEQ ID NO: 570 - DNA, 1587 bp, Homo sapiens
ggaaaagtagcctaaagtcagtmtaactaaagggtggaacgaggtgggacaaggtccggaattgctgctcagtgatgtgtgtgtgcctgccgctggtggagctgagactgctcatctcagaaggatggggatgcttgatttcctggccaggttgtcccagcacagtggggattggccctgttgtatgacgaagacagcacatggtggcagagatagatactaacccatggactttccaagggagggaataggtctttggagggtatgcaagacaaaggtagacactggataaagaacccggtagtgcccaggtattaccccatctgggccattactcccacactcaggaaccagacgttgtgggtgaggacatgctgtccctcctgccaagtaataacttccttcccagccaggatcctgccccaagtaggaatatagctctgcatttacagcagctcctgctcagaccttgtcaaaaccaccctgcagcttaggattaaggagcatggtcacaggaaggtggggtttcagggcatcccctcaggaactgcccatctccccagaattccaaaatgaaggtccatatgcttgtaggtgtgctggtcatggtgggcttcacagtaggaaagggtaagtggggcccaggggcagggagggaggaaggggtaactgagtccaggaagggggtggagcgtggccatggataatcgggcttcctactggcccagggtatttgagagtgacccagtgcctccatccctccttctgcctccccagttcctgttcccgacatccggacgtgccacttctgcctcgtagaagacccttctgtaggatgcatttcaggctcagagaagtgtaccatcagcagctcatccctgtgcatggtgatcaccatctattatgatgtcaaggttcgcttcatcgttcgaggctgtggacagtacatttcctaccgctgccaagaaaaacgcaacacctactttgcagagtactggtatcaggcycagtgctgtcagtacrattattgcaactcctggtcaagcccccaactccagagctctctgccggagccccatgacaggcccctggccctgcctctgtctgactmccagattcagtggttctaccaggccctgaacctctccctgcccctccccaatttccatgcygsgacggagcctgatggcctggaccccatggtcacactgtccctgaacctgggcttgtcttttgctgagctgygccgcatgtacttgttcctcaatagttcaggacttttggttcttccccaggctggactcttgacacctcacccttcctgaattccacagtgcaaatatctttctgtaacaccctcagcatcctgcactgccctctctgaaaacacccacattctttggtcactgtgatttcttaggcctccgtctgttgtaccactagcatctatatgacttttgtgtaattttctctcttgaactctggtgctgtttttttgtttgtttgagacaaagtctygcttgcactccagcctgggtgacacagtgagactccgtctccaaaaaaaaggatgaggaatagaattct

SEQ ID NO: 571 - DNA, 2364 bp, Homo sapiens
gggcaatacagttttgtgctcactgggtgaagaggctgacttagggcggggaaaggaggragccaggctggatctctttccgcagctctcctcacgttcccctctagtcccggcgmggcgctgctgcccaggggactggcctatcctcggccaatccgctgggtccttattgcctgttgggcccctagtgcgaatcagtcccgccagagacccttgacgggcatactgtttcctccgggctcctgcctcatgaggggagaggtgcggcttggctccgtgcgtagggacttgggtggggtggggtgggcggtgtgagaactggaacgtcccaktgcgctaacctgaggtggtgccagccattctgctcgtccctttgcacttctccatttccycttaggctctaagtgtgaccttcgaaccctggtcagagtaatggtgaggggcagkcgtgacgttatttcattacacggcttctcggcattccacaggtttccctccgcctcctgagggcctttcctaacccacagagtggattcctggctccagaaaatgggcttggagcgggggccacgttgaggaaggcgaagggcattgtgggggcgttatgtaaaagtaggaccccaaccgacagatcctagtgctcgcgccacctgggcgcgcggagctttgctcgtttactattgaaaaagttccagcgcgggaaactgaacccggagctttgcgcacgcccgagccctcaagtaatgtgggttgtggtttttgttgttgttgtcgccacgcatgcgtcttcgtgccgtgtggctwtttgattgtgtcaactcttctgattagaatggcgccattttgcggtacggaagctacacagcaacacgtataggagactctccccgagatcttctagggagtgacccatctatttttgtttrggaagaggaaactccgaaatgggatcgcggaagamttaaagggccaggctgatttttttttcctactggtctctgaggctgtggttgctacagggtcaccacgagcttggcttacttgtctcatccttcccttgcctggtatcattttctcagttctcccaaaagccatgtcccggcccttgctcatcaccttcaccccagccactgaccccagcgacctctggaaggatgggcagcagcagccacagcccgagaagccagagtccaccctggatggggctgcagccckagctttctatgaggccctgattggggatgagagcagcgctcctgastcccagagatctcagactgaacctgccagagaaagaaagagaaagaaaagaagaataatgaaggcaccagcagcagaagcagtggcagaaggagcatcaggaagacatggacaagggagatcccttgaggctgaggataagatgactcaccggatactgagggcagyccaggagggggacytgccagaacttaggagactgctggaaccgcatgaggcaggaggagctggggggaatatcaacgcccgggatgccttctggtggaccccactgatgtgtgctgctcgagcgggccagggggcagctgtgagctatctcctgggccgtggggctgcctgggtgggggtctgtgagctgagtggcagggatgcggctcagctcgctgaagaagctggcttccctgaggtagcccgcatggtcagggagagccatggagagacaaggagcccggaaaaccggkctcctactccctccctccagtactgcgagaactgtgacacccacttccaagattccaaccaccgcacatccactgytcacctgctgtcactgtcgcagggtcctcagcctcccaaccttccacttggggtgcccatctccagcccgggcttcaaactgctgctgagggggggctgggagccaggaatggggctgggaccccggggtgagggccgtgccaatcccatccccactgtcctcaagagrgaccaggaaggactaggctacagatcagcaccccagccccgagtgacacatttcccagcttgggatacmcgagctgtggctgggagggagagaccccctcgggtggccacactgagctggagggaggagagaaggagggaggagaaagacagggcttgggagcgggatctaaggacttacatgaacctcgagttctgactttggtaaagtctgaccctagtctgctgctgaagtctgaacttgggyctctgacctgggccctttgacttccccttcctgggatctgcycagatgcagatcctgaagtttttggtcaataggctctgtcttcgtgagagacgggctgagagtcagaaataaatcaaccatttgtggtttattcacttttctggaagcta

SEQ ID NO: 572 - DNA, 1810 bp, Homo sapiens
ggcccgggagtctgggcaatacagttttgtgctcactgggtgaagaggctgacttagggcggggaaaggaggragccaggctggatctctttccgcagctctcctcacgttcccctctagtcccggcgmggcgctgctgcccaggggactggcctatcctcggccaatccgctgggtccttattgcctgttgggcccctagtgcgaatcagtcccgccagagacccttgacgggcatactgtttcctccgggctcctgcctcatgaggggagagaatggcgccattttgcggtacggaagctacacagcaacacgtataggagactctccccgagatcttctagggagtgacccatctatttttgtttrggaagaggaaactccgaaatgggatcgcggaagamttaaagggccaggctgatttttttttcctactgcaggtctctgaggctgtggttgctacagggtcaccacgagcttggcttacttgtctcatccttcccttgcctggtatcattttctcagttctcccaaaagccatgtcccggcccttgctcatcaccttcaccccagccactgaccccagcgacctctggaaggatgggcagcagcagccacagcccgagaagccagagtccaccctggatggggctgcagccckagctttctatgaggccctgattggggatgagagcagcgctcctgastcccagagatctcagactgaacctgccagagaaagaaagagaaagaaaagaagaataatgaaggcaccagcagcagaagcagtggcagaaggagcatcaggaagacatggacaagggagatcccttgaggctgaggataagatgactcaccggatactgagggcagyccaggagggggacytgccagaacttaggagactgctggaaccgcatgaggcaggaggagctggggggaatatcaacgcccgggatgccttctggtggaccccactgatgtgtgctgctcgagcgggccagggggcagctgtgagctatctcctgggccgtggggctgcctgggtgggggtctgtgagctgagtggcagggatgcggctcagctcgctgaagaagctggcttccctgaggtagcccgcatggtcagggagagccatggagagacaaggagcccggaaaaccggkctcctactccctccctccagtactgcgagaactgtgacacccacttccaagattccaaccaccgcacatccactgytcacctgctgtcactgtcgcagggtcctcagcctcccaaccttccacttggggtgcccatctccagcccgggcttcaaactgctgctgagggggggctgggagccaggaatggggctgggaccccggggtgagggccgtgccaatcccatccccactgtcctcaagagrgaccaggaaggactaggctacagatcagcaccccagccccgagtgacacatttcccagcttgggatacmcgagctgtggctgggagggagagaccccctcgggtggccacactgagctggagggaggagagaaggagggaggagaaagacagggcttgggagcgggatctaaggacttacatgaacctcgagttctgactttggtaaagtctgaccctagtctgctgctgaagtctgaacttgggyctctgacctgggccctttgacttccccttcctgggatctgcycagatgcagatcctgaagtttttggtcaataggctctgtcttcgtgagagacgggctgagagtcagaaataaatcaaccatttgtggtttattcacttttctggaagcta

SEQ ID NO: 573 - DNA, 2367 bp, Homo sapiens
gggcaatacagttttgtgctcactgggtgaagaggctgacttagggcggggaaaggaggragccaggctggatctctttccgcagctctcctcacgttcccctctagtcccggcgmggcgctgctgcccaggggactggcctatcctcggccaatccgctgggtccttattgcctgttgggcccctagtgcgaatcagtcccgccagagacccttgacgggcatactgtttcctccgggctcctgcctcatgaggggagaggtgcggcttggctccgtgcgtagggacttgggtggggtggggtgggcggtgtgagaactggaacgtcccaktgcgctaacctgaggtggtgccagccattctgctcgtccctttgcacttctccatttccycttaggctctaagtgtgaccttcgaaccctggtcagagtaatggtgaggggcagkcgtgacgttatttcattacacggcttctcggcattccacaggtttccctccgcctcctgagggcctttcctaacccacagagtggattcctggctccagaaaatgggcttggagcgggggccacgttgaggaaggcgaagggcattgtgggggcgttatgtaaaagtaggaccccaaccgacagatcctagtgctcgcgccacctgggcgcgcggagctttgctcgtttactattgaaaaagttccagcgcgggaaactgaacccggagctttgcgcacgcccgagccctcaagtaatgtgggttgtggtttttgttgttgttgtcgccacgcatgcgtcttcgtgccgtgtggctwtttgattgtgtcaactcttctgattagaatggcgccattttgcggtacggaagctacacagcaacacgtataggagactctccccgagatcttctagggagtgacccatctatttttgtttrggaagaggaaactccgaaatgggatcgcggaagamttaaagggccaggctgatttttttttcctactgcaggtctctgaggctgtggttgctacagggtcaccacgagcttggcttacttgtctcatccttcccttgcctggtatcattttctcagttctcccaaaagccatgtcccggcccttgctcatcaccttcaccccagccactgaccccagcgacctctggaaggatgggcagcagcagccacagcccgagaagccagagtccaccctggatggggctgcagccckagctttctatgaggccctgattggggatgagagcagcgctcctgastcccagagatctcagactgaacctgccagagaaagaaagagaaagaaaagaagaataatgaaggcaccagcagcagaagcagtggcagaaggagcatcaggaagacatggacaagggagatcccttgaggctgaggataagatgactcaccggatactgagggcagyccaggagggggacytgccagaacttaggagactgctggaaccgcatgaggcaggaggagctggggggaatatcaacgcccgggatgccttctggtggaccccactgatgtgtgctgctcgagcgggccagggggcagctgtgagctatctcctgggccgtggggctgcctgggtgggggtctgtgagctgagtggcagggatgcggctcagctcgctgaagaagctggcttccctgaggtagcccgcatggtcagggagagccatggagagacaaggagcccggaaaaccggkctcctactccctccctccagtactgcgagaactgtgacacccacttccaagattccaaccaccgcacatccactgytcacctgctgtcactgtcgcagggtcctcagcctcccaaccttccacttggggtgcccatctccagcccgggcttcaaactgctgctgagggggggctgggagccaggaatggggctgggaccccggggtgagggccgtgccaatcccatccccactgtcctcaagagrgaccaggaaggactaggctacagatcagcaccccagccccgagtgacacatttcccagcttgggatacmcgagctgtggctgggagggagagaccccctcgggtggccacactgagctggagggaggagagaaggagggaggagaaagacagggcttgggagcgggatctaaggacttacatgaacctcgagttctgactttggtaaagtctgaccctagtctgctgctgaagtctgaacttgggyctctgacctgggccctttgacttccccttcctgggatctgcycagatgcagatcctgaagtttttggtcaataggctctgtcttcgtgagagacgggctgagagtcagaaataaatcaaccatttgtggtttattcacttttctggaagcta

SEQ ID NO: 574 - DNA, 1807 bp, Homo sapiens
ggcccgggagtctgggcaatacagttttgtgctcactgggtgaagaggctgacttagggcggggaaaggaggragccaggctggatctctttccgcagctctcctcacgttcccctctagtcccggcgmggcgctgctgcccaggggactggcctatcctcggccaatccgctgggtccttattgcctgttgggcccctagtgcgaatcagtcccgccagagacccttgacgggcatactgtttcctccgggctcctgcctcatgaggggagagaatggcgccattttgcggtacggaagctacacagcaacacgtataggagactctccccgagatcttctagggagtgacccatctatttttgtttrggaagaggaaactccgaaatgggatcgcggaagamttaaagggccaggctgatttttttttcctactggtctctgaggctgtggttgctacagggtcaccacgagcttggcttacttgtctcatccttcccttgcctggtatcattttctcagttctcccaaaagccatgtcccggcccttgctcatcaccttcaccccagccactgaccccagcgacctctggaaggatgggcagcagcagccacagcccgagaagccagagtccaccctggatggggctgcagccckagctttctatgaggccctgattggggatgagagcagcgctcctgastcccagagatctcagactgaacctgccagagaaagaaagagaaagaaaagaagaataatgaaggcaccagcagcagaagcagtggcagaaggagcatcaggaagacatggacaagggagatcccttgaggctgaggataagatgactcaccggatactgagggcagyccaggagggggacytgccagaacttaggagactgctggaaccgcatgaggcaggaggagctggggggaatatcaacgcccgggatgccttctggtggaccccactgatgtgtgctgctcgagcgggccagggggcagctgtgagctatctcctgggccgtggggctgcctgggtgggggtctgtgagctgagtggcagggatgcggctcagctcgctgaagaagctggcttccctgaggtagcccgcatggtcagggagagccatggagagacaaggagcccggaaaaccggkctcctactccctccctccagtactgcgagaactgtgacacccacttccaagattccaaccaccgcacatccactgytcacctgctgtcactgtcgcagggtcctcagcctcccaaccttccacttggggtgcccatctccagcccgggcttcaaactgctgctgagggggggctgggagccaggaatggggctgggaccccggggtgagggccgtgccaatcccatccccactgtcctcaagagrgaccaggaaggactaggctacagatcagcaccccagccccgagtgacacatttcccagcttgggatacmcgagctgtggctgggagggagagaccccctcgggtggccacactgagctggagggaggagagaaggagggaggagaaagacagggcttgggagcgggatctaaggacttacatgaacctcgagttctgactttggtaaagtctgaccctagtctgctgctgaagtctgaacttgggyctctgacctgggccctttgacttccccttcctgggatctgcycagatgcagatcctgaagtttttggtcaataggctctgtcttcgtgagagacgggctgagagtcagaaataaatcaaccatttgtggtttattcacttttctggaagcta

SEQ ID NO: 575 - DNA, 1059 bp, Homo sapiens
aatgcccttcgccttcctcaacgtggcccccgctccaagcccattttctggagccaggaatccactctgtgggttaggaaaggccctcaggaggcggagggaaacctgtggaatgccgagaagccgtgtaatgaaataacgtcacgmctgcccctcaccattactctgaccagggttcgaaggtcacacttagagcctaagrggaaatggagaagtgcaaagggacgagcagaatggctggcaccacctcagctgacgtgaagatgagcagctcagaggaggtgtcctggatttcctggttctgtgggctccgtggcaatgaattctttgtgaagtggatgaagactacatccaggacaaatttaatcttactggactcaatgagcaggtccctcactatygacaagctctagacatgatcttggacctggagcctgatgaagaactggaagacaaccccaaccagagtgacctgattgagcaggcagccgagatgctttatggattgatccacgcccgctacatccttaccaaccgtggcatcgcccagatgttggaaaagtaccagcaaggagactttggttactgtcctcgtgtgtactgtgagaaccagccaatgcttcccattggcctttcagacatcccaggtgaagccatggtgaagctctactgccccaagtgcatggatgtgtacacacccaagtcatcaagacaccatcacacggatggcgcctacttcggcactggtttccctcacatgctcttcatggtgcatcccgagtaccggcccaagagacctgccaaccagtttgtgcccaggctctacggtttcaagatccatccgatggcctaccagctgcagctccaagccgccagcaacttcaagagcccagtcaagacgattcgctgattccctcccccacctgtcctgcagtctttgawttttcctttcttttttgccaccctttcaggaaccctgtatggtttttagtttaaattaaaggagtcgttatygtggtgggaatatgaaataaagtagaagaaaaggccatgagctag

SEQ ID NO: 576 - DNA, 1136 bp, Homo sapiens
gcttctcgttgtgccccgcccgcaagcgccctcctccgggccttcgtgacagccaggtcgtgcgcgggtcatcctgggattggtagttcgctttctctcatttagccagtttctttctctaccggggactccgtgtcccggcatccaccgcggcacctgacccttggcgcttgcgtgttgccctcttccccaccctccctaatttccactccccccaccccacttcgcctgccgcggtcgggtccgcggcctgcgctgtagcggtcgccgccgttccctggaagtagcaacttccctaccccaccccagtcctggtccccgtccagccgctgacgtgaagatgagcagctcagaggaggtgtcctggatttcctggttctgtgggctccgtggcaatgaattctttgtgaagtggatgaagactacatccaggacaaatttaatcttactggactcaatgagcaggtccctcactatygacaagctctagacatgatcttggacctggagcctgatgaagaactggaagacaaccccaaccagagtgacctgattgagcaggcagccgagatgctttatggattgatccacgcccgctacatccttaccaaccgtggcatcgcccagatgttggaaaagtaccagcaaggagactttggttactgtcctcgtgtgtactgtgagaaccagccaatgcttcccattggcctttcagacatcccaggtgaagccatggtgaagctctactgccccaagtgcatggatgtgtacacacccaagtcatcaagacaccatcacacggatggcgcctacttcggcactggtttccctcacatgctcttcatggtgcatcccgagtaccggcccaagagacctgccaaccagtttgtgcccaggctctacggtttcaagatccatccgatggcctaccagctgcagctccaagccgccagcaacttcaagagcccagtcaagacgattcgctgattccctcccccacctgtcctgcagtctttgawttttcctttcttttttgccaccctttcaggaaccctgtatggtttttagtttaaattaaaggagtcgttatygtggtgggaatatgaaataaagtagaagaaaaggccatgagctag

SEQ ID NO: 577 - DNA, 1484 bp, Homo sapiens
gcttctcgttgtgccccgcccgcaagcgccctcctccgggccttcgtgacagccaggtcgtgcgcgggtcatcctgggattggtagttcgctttctctcatttagccagtttctttctctaccggggactccgtgtcccggcatccaccgcggcacctgacccttggcgcttgcgtgttgccctcttccccaccctccctaatttccactccccccaccccacttcgcctgccgcggtcgggtccgcggcctgcgctgtagcggtcgccgccgttccctggaagtagcaacttccctaccccaccccagtcctggtccccgtccagccgctgacgtgaagatgagcagctcagaggaggtgtcctggatttcctggttctgtgggctccgtggcaatgaattctttgtgaagtggatgaagactacatccaggacaaatttaatcttactggactcaatgagcaggtccctcactatygacaagctctagacatgatcttggacctggagcctgatgaagaactggaagacaaccccaaccagagtgacctgattgagcaggcagccgagatgctttatggattgatccacgcccgctacatccttaccaaccgtggcatcgcccagatggtgaggcctctctgctcctacctgcctccttctgagcagtaagagacacaggttcctgcagcaagaagtcatgtttaagccctgtttaaggaagctagctgagaagaggggaagaaccccagaacttgggcctgggaattgaattctgattgggggtcatcctgaagggattgttttcagggagggagacagaccttgaatcagagagttgtgatagactgcctcttcctcaaggaacaaacaacaaatggctctgatggtttgtagcctgcctaattggaagaaaggcaacacagaagtttgagagcccarctagtccagagaaggggcctctggacagaggtgggaggagtgggggacagagtggtatgggttgggctgcgaagggagttgcctcttctttacatctacctgccaaccccttccattgtattcacctcagttggaaaagtaccagcaaggagactttggttactgtcctcgtgtgtactgtgagaaccagccaatgcttcccattggtgagtgttgaagaagggaaaggaaagcaccgtgtggcagtcttatgggaaggagttggggctcaacacattggagcctgagtcctgaggggaggttaggtaggaatagggggatacctggcctgctgagtctggctgtctcccaggcctttcagacatcccaggtgaagccatggtgaagctctactgccccaagtgcatggatgtgtacacacccaagtcatcaagacaccatcacacggatggcgcctacttcggcactggtttccctcacatgctcttcatggtgcatcccgagtaccggcccaagagacctgccaaccagtttgtgcccag

SEQ ID NO: 578 - DNA, 1282 bp, Homo sapiens
gcttctcgttgtgccccgcccgcaagcgccctcctccgggccttcgtgacagccaggtcgtgcgcgggtcatcctgggattggtagttcgctttctctcatttagccagtttctttctctaccggggactccgtgtcccggcatccaccgcggcacctgacccttggcgcttgcgtgttgccctcttccccaccctccctaatttccactccccccaccccacttcgcctgccgcggtcgggtccgcggcctgcgctgtagcggtcgccgccgttccctggaagtagcaacttccctaccccaccccagtcctggtccccgtccagccgctgacgtgaagatgagcagctcagaggaggtgtcctggatttcctggttctgtgggctccgtggcaatgaattctttgtgaagtggatgaagactacatccaggacaaatttaatcttactggactcaatgagcaggtccctcactatygacaagctctagacatgatcttggacctggagcctgatgaagaactggaagacaaccccaaccagagtgacctgattgagcaggcagccgagatgctttatggattgatccacgcccgctacatccttaccaaccgtggcatcgcccagatgttggaaaagtaccagcaaggagactttggttactgtcctcgtgtgtactgtgagaaccagccaatgcttcccattggtgagtgttgaagaagggaaaggaaagcaccgtgtggcagtcttatgggaaggagttggggctcaacacattggagcctgagtcctgaggggaggttaggtaggaatagggggatacctggcctgctgagtctggctgtctcccaggcctttcagacatcccaggtgaagccatggtgaagctctactgccccaagtgcatggatgtgtacacacccaagtcatcaagacaccatcacacggatggcgcctacttcggcactggtttccctcacatgctcttcatggtgcatcccgagtaccggcccaagagacctgccaaccagtttgtgcccaggctctacggtttcaagatccatccgatggcctaccagctgcagctccaagccgccagcaacttcaagagcccagtcaagacgattcgctgattccctcccccacctgtcctgcagtctttgawttttcctttcttttttgccaccctttcaggaaccctgtatggtttttagtttaaattaaaggagtcgttatygtggtgggaatatgaaataaagtagaagaaaaggccatgagctag

SEQ ID NO: 579 - DNA, 1652 bp, Homo sapiens
ccacgcccggctaatttttggtatttgtagtagaaacggggtttcaccatgttagccaggctgggtgcgaactcctgacctcaggtagtccacccgccttggcctcccaaagtgctgggattacaggcgtgagccaccgcagtccggccctaatatagtttttaaattcattcattccaaggcttttgggaggcgctcagtggcgtgcagtttcctctcgaatttctttcttcccgcagtctttctgggcgggcgtctcccgtctgtttcttcccatcttcccccttatcatcctgggactggataattcttgaatagtctgggaggtagcagggaacccgagttcggagcctcgaccagaacctccagacgggaaattggagcaggtggtgtcgttccaggacgctgaggaccacctcctcccctaacgcacagcccaacgatcctaaaagtaaaaaccctgagtttctgagtcaagactgagctggtggggtggggaccgagtaggcgtggatggggagcccagcgggtccccagcggagaaaatgggtgagacgcctggggccgcggtctccagaattcgcctgggagggagagtggcgctacggcgccgccttcctggggagccgcttcgggctccggatgtccgctggggcccgacgcttgggtcccgacgcgcggttcgcactttccaggtttcttccccagggaacagagcttgagcsgggggccacccccccgtcctaccggagttctgaggtgcggtcaggcgcggagagcggacgcccagcgccagattctgtgggctccggagttcaggcccactgagccgcagctgagcacaggcggggcaggaaaaaggatgaggtgagggaaggcgctgggttcctggaaccccaagggagcactgagctgagtaagtttgttcctgtcaattgggaaccccctcaaccacttccaytccccaaatacctgygctgctaccgatgcctcttggagaccaaggagttagggtgccttctgggatctgacatctgcctcaccccagctggcagcagctgcatcactctccacaaaaagaacagcagcggttctgacgtcatggtgagtgactgccgaagtaaggagcagatgagtgattgttcaaatacccgaacttctccggtgtctggcttctggatattctctcaatactgcttcctggatttctgcaatgaccctcaaaacagagggctctatactccttagtgtgactgcagcaaactttggtgtaaaattccaccagtttccagccaccttcctgacttctatctgggcttggccaggacttctagtccctcayaccagccctccttgcctccctccagccactggaccccagccttggctcttcctcttggttgacgcccttcagcacacttactgctactctgtacccccagccctactgcccaccaggtttcctctcttgtcccctagtccctggatgtttctcccaaataaatttgtgtgtaaactgtttggtatgtctctttcttctggtggaggtgaaggctgagggaggtgcacctgcctaactgccctaccatgggtcaggtaagggacccccagctctgctgagctgtcctcttgtcctgccttggtatgtgatt

SEQ ID NO: 580 - DNA, 851 bp, Homo sapiens
atgcagaccttcccagttgctggggcgctggaccctgctatactggacacaagcagcccccaagccctctacacggtcctcttaatagtgctggtcatgatgagcttggtgtttggtaagtttgttcctgtcaattgggaaccccctcaaccacttccaytccccaaatacctgygctgctaccgatgcctcttggagaccaaggagttagggtgccttctgggatctgacatctgcctcaccccagctggcagcagctgcatcactctccacaaaaagaacagcagcggttctgacgtcatggtgagtgactgccgaagtaaggagcagatgagtgattgttcaaatacccgaacttctccggtgtctggcttctggatattctctcaatactgcttcctggatttctgcaatgaccctcaaaacagagggctctatactccttagtgtgactgcagcaaactttggtgtaaaattccaccagtttccagccaccttcctgacttctatctgggcttggccaggacttctagtccctcayaccagccctccttgcctccctccagccactggaccccagccttggctcttcctcttggttgacgcccttcagcacacttactgctactctgtacccccagccctactgcccaccaggtttcctctcttgtcccctagtccctggatgtttctcccaaataaatttgtgtgtaaactgtttggtatgtctctttcttctggtggaggtgaaggctgagggaggtgcacctgcctaactgccctaccatgggtcaggtaagggacccccagctctgctgagctgtcctcttgtcctgccttggtatgtgatt

SEQ ID NO: 581 - protein, 485 aa, Homo sapiens
MRKRAPQSEMAPAGVSLRATILCLLAWAGLAAGDRVYIHPFHLVIHNESTCEQLAKANAGKPKDPTFIPAPIQAKTSPVDEKALQDQLVLVAAKLDTEDKLRAAMVGMLANFLGFRIYGMHSELWGVVHGATVLSPTAVFGTLASLYLGALDHTADRLQAILGVPWKDKNCTSRLDAHKVLSALQAVQGLLVAQGRADSQAQLLLSTVVGVFTAPGLHLKQPFVQGLALYTPVVLPRSLDFTELDVAAEKIDRFMQAVTGWKTGCSLMGASVDSTLAFNTYVHFQGKMKGFSLLAEPQEFWVDNSTSVSVPMLSGMGTFQHWSDIQDNFSVTQVPFTESACLLLIQPHYASDLDKVEGLTFQQNSLNWMKKLSPRTIHLTMPQLVLQGSYDLQDLLAQAELPAILHTELNLQKLSNDRIRVGEVLNSIFFELEADEREPTESTQQLNKPEVLEVTLNRPFLFAVYDQSATALHFLGRVANPLSTA

SEQ ID NO: 582 - protein, 485 aa, Homo sapiens; identical to SEQ ID NO: 581

SEQ ID NO: 583 - protein, 926 aa, Homo sapiens
MDMFPLTWVFLALYFSRHQVRGQPDPPCGGRLNSKDAGYITSPGYPQDYPSHQNCEWIVYAPEPNQKIVLNFNPHFEIEKHDCKYDFIEIRDGDSESADLLGKHCGNIAPPTIISSGSMLYIKFTSDYARQGAGFSLRYEIFKTGSEDCSKNFTSPNGTIESPGFPEKYPHNLDCTFTILAKPKMEIILQFLIFDLEHDPLQVGEGDCKYDWLDIWDGIPHVGPLIGKYCGTKTPSELRSSTGILSLTFHTDMAVAKDGFSARYYLVHQEPLENFQCNVPLGMESGRIANEQISASSTYSDGRWTPQQSRLHGDDNGWTPNLDSNKEYLQVDLRFLTMLTAIATQGAISRETQNGYYVKSYKLEVSTNGEDWMVYRHGKNHKVFQANNDATEVVLNKLHAPLLTRFVRIRPQTWHSGIALRLELFGCRVTDAPCSNMLGMLSGLIADSQISASSTQEYLWSPSAARLVSSRSGWFPRIPQAQPGEEWLQVDLGTPKTVKGVIIQGARGGDSITAVEARAFVRKFKVSYSLNGKDWEYIQDPRTQQPKLFEGNMHYDTPDIRRFDPIPAQYVRVYPERWSPAGIGMRLEVLGCDWTDSKPTVETLGPTVKSEETTTPYPTEEEATECGENCSFEDDKDLQLPSGFNCNFDFLEEPCGWMYDHAKWLRTTWASSSSPNDRTFPDDRNFLRLQSDSQREGQYARLISPPVHLPRSPVCMEFQYQATGGRGVALQVVREASQESKLLWVIREDQGGEWKHGRIILPSYDMEYQIVFEGVIGKGRSGEIAIDDIRISTDVPLENCMEPISAFAVDIPEIHEREGYEDEIDDEYEVDWSNSSSATSGSGAPSTDKEKSWLYTLDPILITIIAMSSLGVLLGATCAGLLLYCTCSYSGLSSRSCTTLENYNFELYDGLKHKVKMNHQKCCSEA

SEQ ID NO: 584 - protein, 969 aa, Homo sapiens
MRSQAVSCSGFQAEQSTGTLGAGSGWPGRGQATPLTHPVCAGREGGLVQPPPPATRTNSGKEQDGAEDPPCGGRLNSKDAGYITSPGYPQDYPSHQNCEWIVYAPEPNQKIVLNFNPHFEIEKHDCKYDFIEIRDGDSESADLLGKHCGNIAPPTIISSGSMLYIKFTSDYARQGAGFSLRYEIFKTGSEDCSKNFTSPNGTIESPGFPEKYPHNLDCTFTILAKPKMEIILQFLIFDLEHDPLQVGEGDCKYDWLDIWDGIPHVGPLIGKYCGTKTPSELRSSTGILSLTFHTDMAVAKDGFSARYYLVHQEPLENFQCNVPLGMESGRIANEQISASSTYSDGRWTPQQSRLHGDDNGWTPNLDSNKEYLQVDLRFLTMLTAIATQGAISRETQNGYYVKSYKLEVSTNGEDWMVYRHGKNHKVFQANNDATEVVLNKLHAPLLTRFVRIRPQTWHSGIALRLELFGCRVTDAPCSNMLGMLSGLIADSQISASSTQEYLWSPSAARLVSSRSGWFPRIPQAQPGEEWLQVDLGTPKTVKGVIIQGARGGDSITAVEARAFVRKFKVSYSLNGKDWEYIQDPRTQQPKLFEGNMHYDTPDIRRFDPIPAQYVRVYPERWSPAGIGMRLEVLGCDWTDSKPTVETLGPTVKSEETTTPYPTEEEATECGENCSFEDDKDLQLPSGFNCNFDFLEEPCGWMYDHAKWLRTTWASSSSPNDRTFPDDRNFLRLQSDSQREGQYARLISPPVHLPRSPVCMEFQYQATGGRGVALQVVREASQESKLLWVIREDQGGEWKHGRIILPSYDMEYQIVFEGVIGKGRSGEIAIDDIRISTDVPLENCMEPISAFAVDIPEIHEREGYEDEIDDEYEVDWSNSSSATSGSGAPSTDKEKSWLYTLDPILITIIAMSSLGVLLGATCAGLLLYCTCSYSGLSSRSCTTLENYNFELYDGLKHKVKMNHQKCCSEA

SEQ ID NO: 585 - protein, 901 aa, Homo sapiens
MDMFPLTWVFLALYFSRHQVRGQPDPPCGGRLNSKDAGYITSPGYPQDYPSHQNCEWIVYAPEPNQKIVLNFNPHFEIEKHDCKYDFIEIRDGDSESADLLGKHCGNIAPPTIISSGSMLYIKFTSDYARQGAGFSLRYEIFKTGSEDCSKNFTSPNGTIESPGFPEKYPHNLDCTFTILAKPKMEIILQFLIFDLEHDPLQVGEGDCKYDWLDIWDGIPHVGPLIGKYCGTKTPSELRSSTGILSLTFHTDMAVAKDGFSARYYLVHQEPLENFQCNVPLGMESGRIANEQISASSTYSDGRWTPQQSRLHGDDNGWTPNLDSNKEYLQVDLRFLTMLTAIATQGAISRETQNGYYVKSYKLEVSTNGEDWMVYRHGKNHKVFQANNDATEVVLNKLHAPLLTRFVRIRPQTWHSGIALRLELFGCRVTDAPCSNMLGMLSGLIADSQISASSTQEYLWSPSAARLVSSRSGWFPRIPQAQPGEEWLQVDLGTPKTVKGVIIQGARGGDSITAVEARAFVRKFKVSYSLNGKDWEYIQDPRTQQPKLFEGNMHYDTPDIRRFDPIPAQYVRVYPERWSPAGIGMRLEVLGCDWTDSKPTVETLGPTVKSEETTTPYPTEEEATECGENCSFEDDKDLQLPSGFNCNFDFLEEPCGWMYDHAKWLRTTWASSSSPNDRTFPDDRNFLRLQSDSQREGQYARLISPPVHLPRSPVCMEFQYQATGGRGVALQVVREASQESKLLWVIREDQGGEWKHGRIILPSYDMEYQIVFEGVIGKGRSGEIAIDDIRISTDVPLENCMEPISAFAGGTLLPGTEPTVDTVPMQPIPAYWYYVMAAGGAVLVLVSVALALVLHYHRFRYAAKKTDHSITYKTSHYTNGAPLAVEPTLTIKLEQDRGSHC

SEQ ID NO: 586 - protein, 555 aa, Homo sapiens
MDMFPLTWVFLALYFSRHQVRGQPDPPCGGRLNSKDAGYITSPGYPQDYPSHQNCEWIVYAPEPNQKIVLNFNPHFEIEKHDCKYDFIEIRDGDSESADLLGKHCGNIAPPTIISSGSMLYIKFTSDYARQGAGFSLRYEIFKTGSEDCSKNFTSPNGTIESPGFPEKYPHNLDCTFTILAKPKMEIILQFLIFDLEHDPLQVGEGDCKYDWLDIWDGIPHVGPLIGKYCGTKTPSELRSSTGILSLTFHTDMAVAKDGFSARYYLVHQEPLENFQCNVPLGMESGRIANEQISASSTYSDGRWTPQQSRLHGDDNGWTPNLDSNKEYLQVDLRFLTMLTAIATQGAISRETQNGYYVKSYKLEVSTNGEDWMVYRHGKNHKVFQANNDATEVVLNKLHAPLLTRFVRIRPQTWHSGIALRLELFGCRVTDAPCSNMLGMLSGLIADSQISASSTQEYLWSPSAARLVSSRSGWFPRIPQAQPGEEWLQVDLGTPKTVKGVIIQGARGGDSITAVEARAFVRKFKVSYSLNGKDWEYIQDPRTQQPKVGCSWRPL

SEQ ID NO: 587 - protein, 808 aa, Homo sapiens
MLYIKFTSDYARQGAGFSLRYEIFKTGSEDCSKNFTSPNGTIESPGFPEKYPHNLDCTFTILAKPKMEIILQFLIFDLEHDPLQVGEGDCKYDWLDIWDGIPHVGPLIGKYCGTKTPSELRSSTGILSLTFHTDMAVAKDGFSARYYLVHQEPLENFQCNVPLGMESGRIANEQISASSTYSDGRWTPQQSRLHGDDNGWTPNLDSNKEYLQVDLRFLTMLTAIATQGAISRETQNGYYVKSYKLEVSTNGEDWMVYRHGKNHKVFQANNDATEVVLNKLHAPLLTRFVRIRPQTWHSGIALRLELFGCRVTDAPCSNMLGMLSGLIADSQISASSTQEYLWSPSAARLVSSRSGWFPRIPQAQPGEEWLQVDLGTPKTVKGVIIQGARGGDSITAVEARAFVRKFKVSYSLNGKDWEYIQDPRTQQPKLFEGNMHYDTPDIRRFDPIPAQYVRVYPERWSPAGIGMRLEVLGCDWTDSKPTVETLGPTVKSEETTTPYPTEEEATECGENCSFEDDKDLQLPSGFNCNFDFLEEPCGWMYDHAKWLRTTWASSSSPNDRTFPDDRNFLRLQSDSQREGQYARLISPPVHLPRSPVCMEFQYQATGGRGVALQVVREASQESKLLWVIREDQGGEWKHGRIILPSYDMEYQIVFEGVIGKGRSGEIAIDDIRISTDVPLENCMEPISAFAVDIPEIHEREGYEDEIDDEYEVDWSNSSSATSGSGAPSTDKEKSWLYTLDPILITIIAMSSLGVLLGATCAGLLLYCTCSYSGLSSRSCTTLENYNFELYDGLKHKVKMNHQKCCSEA

SEQ ID NO: 588 - protein, 909 aa, Homo sapiens
MDMFPLTWVFLALYFSRHQVRGQPDPPCGGRLNSKDAGYITSPGYPQDYPSHQNCEWIVYAPEPNQKIVLNFNPHFEIEKHDCKYDFIEIRDGDSESADLLGKHCGNIAPPTIISSGSMLYIKFTSDYARQGAGFSLRYEIFKTGSEDCSKNFTSPNGTIESPGFPEKYPHNLDCTFTILAKPKMEIILQFLIFDLEHDPLQVGEGDCKYDWLDIWDGIPHVGPLIGKYCGTKTPSELRSSTGILSLTFHTDMAVAKDGFSARYYLVHQEPLENFQCNVPLGMESGRIANEQISASSTYSDGRWTPQQSRLHGDDNGWTPNLDSNKEYLQVDLRFLTMLTAIATQGAISRETQNGYYVKSYKLEVSTNGEDWMVYRHGKNHKVFQANNDATEVVLNKLHAPLLTRFVRIRPQTWHSGIALRLELFGCRVTDAPCSNMLGMLSGLIADSQISASSTQEYLWSPSAARLVSSRSGWFPRIPQAQPGEEWLQVDLGTPKTVKGVIIQGARGGDSITAVEARAFVRKFKVSYSLNGKDWEYIQDPRTQQPKLFEGNMHYDTPDIRRFDPIPAQYVRVYPERWSPAGIGMRLEVLGCDWTDSKPTVETLGPTVKSEETTTPYPTEEEATECGENCSFEDDKDLQLPSGFNCNFDFLEEPCGWMYDHAKWLRTTWASSSSPNDRTFPDDRNFLRLQSDSQREGQYARLISPPVHLPRSPVCMEFQYQATGGRGVALQVVREASQESKLLWVIREDQGGEWKHGRIILPSYDMEYQIVFEGVIGKGRSGEIAIDDIRISTDVPLENCMEPISAFADEYEVDWSNSSSATSGSGAPSTDKEKSWLYTLDPILITIIAMSSLGVLLGATCAGLLLYCTCSYSGLSSRSCTTLENYNFELYDGLKHKVKMNHQKCCSEA

SEQ ID NO: 589 - protein, 99 aa, Homo sapiens
MDMFPLTWVFLALYFSRHQVRGQPDPPCGGRLNSKDAGYITSPGYPQDYPSHQNCEWIVYAPEPNQKIVLNFNPHFEIEKHDCNLLSAWKISLTSRSFA

SEQ ID NO: 590 - protein, 164 aa, Homo sapiens
MSEPAGDVRQNPCGSKACRRLFGPVDSEQLSRDCDALMAGCIQEARERWNFDFVTETPLEGDFAWERVRGLGLPKLYLPTGPRRGRDELGGGRRPGTSPALLQGTAEEDHVDLSLSCTLVPRSGEQAEGSPGGPGDSQGRKRRQTSMTDFYHSKRRLIFSKRKP

SEQ ID NO: 591 - protein, 164 aa, Homo sapiens; identical to SEQ ID NO: 590

SEQ ID NO: 592 - protein, 164 aa, Homo sapiens; identical to SEQ ID NO: 590

SEQ ID NO: 593 - protein, 227 aa, Homo sapiens
MVGDRRPLKTPVRSPDFSEPQFPQQCIRAMWGVFRRQTTHSSNPPLPGQQSCCNHRDFFCSGAMSEPAGDVRQNPCGSKACRRLFGPVDSEQLSRDCDALMAGCIQEARERWNFDFVTETPLEGDFAWERVRGLGLPKLYLPTGPRRGRDELGGGRRPGTSPALLQGTAEEDHVDLSLSCTLVPRSGEQAEGSPGGPGDSQGRKRRQTSMTDFYHSKRRLIFSKRKP

SEQ ID NO: 594 - protein, 698 aa, Homo sapiens [sequence omitted]

SEQ ID NO: 595 - protein, 581 aa, Homo sapiens [sequence omitted]

SEQ ID NO: 596 - protein, 683 aa, Homo sapiens
MERAAPSRRVPLPLLLLGGLALLAAGVDADVLLEACCADGHRMATHQKDCSLPYATESKECRMVQEQCCHSQLEELHCATGISLANEQDRCATPHGDNASLEATFVKRCCHCCLLGRAAQAQGQSCEYSLMVGYQCGQVFRACCVKSQETGDLDVGGLQETDKIIEVEEEQEDPYLNDRCRGGGPCKQQCRDTGDEVVCSCFVGYQLLSDGVSCEDVNECITGSHSCRLGESCINTVGSFRCQRDSSCGTGYELTEDNSCKDIDECESGIHNCLPDFICQNTLGSFRCRPKLQCKSGFIQDALGNCIDINECLSISAPCPIGHTCINTEGSYTCQKNVPNCGRGYHLNEEGTRCVDVDECAPPAEPCGKGHRCVNSPGSFRCECKTGYYFDGISRMCVDVNECQRYPGRLCGHKCENTLGSYLCSCSVGFRLSVDGRSCEDINECSSSPCSQECANVYGSYQCYCRRGYQLSDVDGVTCEDIDECALPTGGHICSYRCINIPGSFQCSCPSSGYRLAPNGRNCQDIDECVTGIHNCSINETCFNIQGGFRCLAFECPENYRRSAATRCERLPCHENRECSKLPLRITYYHLSFPTNIQAPAVVFRMGPSSAVPGDSMQLAITGGNEEGFFTTRKVSPHSGVVALTKPVPEPRDLLLTVKMDLSRHGTVSSFVAKLFIFVSAEL

SEQ ID NO: 597 - protein, 566 aa, Homo sapiens
MERAAPSRRVPLPLLLLGGLALLAAGVDADVLLEACCADGHRMATHQKDCSLPYATESKECRMVQEQCCHSQLEELHCATGISLANEQDRCATPHGDNASLEATFVKRCCHCCLLGRAAQAQGQSCEYSLMVGYQCGQVFRACCVKSQETGDLDVGGLQETDKIIEVEEEQEDPYLNDRCRGGGPCKQQCRDTGDEVVCSCFVGYQLLSDGVSCEDVNECITGSHSCRLGESCINTVGSFRCQRDSSCGTGYELTEDNSCKDIDECESGIHNCLPDFICQNTLGSFRCRPKLQCKSGFIQDALGNCIDINECLSISAPCPIGHTCINTEGSYTCQKNVPNCGRGYHLNEEGTRCVDVDECAPPAEPCGKGHRCVNSPGSFRCECKTGYYFDGISRMCVDVNECQRYPGRLCGHKCENTLGSYLCSCSVGFRLSVDGRSCEDINECSSSPCSQECANVYGSYQCYCRRGYQLSDVDGVTCEDIDECALPTGGHICSYRCINIPGSFQCSCPSSGYRLAPNGRNCQDIDECVTGIHNCSINETCFNIQGGFRCLAFECPENYRRSAAT

SEQ ID NO: 598 - protein, 703 aa, Homo sapiens
MERAAPSRRVPLPLLLLGGLALLAAGVDADVLLEACCADGHRMATHQKDCSLPYATESKECRMVQEQCCHSQLEELHCATGISLANEQDRCATPHGDNASLEATFVKRCCHCCLLGRAAQAQGQSCEYSLMVGYQCGQVFRACCVKSQETGDLDVGGLQETDKIIEVEEEQEDPYLNDRCRGGGPCKQQCRDTGDEVVCSCFVGYQLLSDGVSCEDVNECITGSHSCRLGESCINTVGSFRCQRDSSCGTGYELTEDNSCKDIDECESGIHNCLPDFICQNTLGSFRCRPKLQCKSGFIQDALGNCIDINECLSISAPCPIGHTCINTEGSYTCQKNVPNCGRGYHLNEEGTRCVDVDECAPPAEPCGKGHRCVNSPGSFRCECKTGYYFDGISRMCVDVNECQRYPGRLCGHKCENTLGSYLCSCSVGFRLSVDGRSCEDINECSSSPCSQECANVYGSYQCYCRRGYQLSDVDGVTCEDIDECALPTGGHICSYRCINIPGSFQCSCPSSGYRLAPNGRNCQDIDECVTGIHNCSINETCFNIQGGFRCLAFECPENYRRSAATLQQEKTDTVRCIKSCRPNDVTCVFDPVHTISHTVISLPTFREFTRPEEIIFLRAITPPHPASQANIIFDITEGNLRDSFDIIKRYMDGMTVGVVRQVRPIVGPFHAVLKLEMNYVVGGVVSHRNVVNVHIFVSEYWF

SEQ ID NO: 599 - protein, 601 aa, Homo sapiens
MERAAPSRRVPLPLLLLGGLALLAAGVDADVLLEACCADGHRMATHQKDCSLPYATESKECRMVQEQCCHSQLEELHCATGISLANEQDRCATPHGDNASLEATFVKRCCHCCLLGRAAQAQGQSCEYSLMVGYQCGQVFRACCVKSQETGDLDVGGLQETDKIIEVEEEQEDPYLNDRCRGGGPCKQQCRDTGDEVVCSCFVGYQLLSDGVSCEDVNECITGSHSCRLGESCINTVGSFRCQRDSSCGTGYELTEDNSCKDIDECESGIHNCLPDFICQNTLGSFRCRPKLQCKSGFIQDALGNCIDINECLSISAPCPIGHTCINTEGSYTCQKNVPNCGRGYHLNEEGTRCVDVDECAPPAEPCGKGHRCVNSPGSFRCECKTGYYFDGISRMCVDVNECQRYPGRLCGHKCENTLGSYLCSCSVGFRLSVDGRSCEDINECSSSPCSQECANVYGSYQCYCRRGYQLSDVDGVTCEDIDECALPTGGHICSYRCINIPGSFQCSCPSSGYRLAPNGRNCQDIDECVTGIHNCSINETCFNIQGGFRCLAFECPENYRRSAATQKSKKGRQNTPAGSSKEDCRVLPWKQGLEDTHLDA

SEQ ID NO: 600 - protein, 437 aa, Homo sapiens [sequence omitted]

SEQ ID NO: 601 - protein, 664 aa, Homo sapiens [sequence omitted]

SEQ ID NO: 602 - protein, 690 aa, Homo sapiens [sequence omitted]

SEQ ID NO: 603 - protein, 328 aa, Homo sapiens [sequence omitted]

SEQ ID NO: 604 - protein, 840 aa, Homo sapiens
MVSVFRSEEMCLSQLFLQVEAAYCCVAELGELGLVQFKDLNMNVNSFQRKFVNEVRRCESLERILRFLEDEMQNEIVVQLLEKSPLTPLPREMITLETVLEKLEGELQEANQNQQALKQSFLELTELKYLLKKTQDFFETETNLADDFFTEDTSGLLELKAVPAYMTGKLGFIAGVINRERMASFERLLWRICRGNVYLKFSEMDAPLEDPVTKEEIQKNIFIIFYQGEQLRQKIKKICDGFRATVYPCPEPAVERREMLESVNVRLEDLITVITQTESHRQRLLQEAAANWHSWLIKVQKMKAVYHILNMCNIDVTQQCVIAEIWFPVADATRIKRALEQGMELSGSSMAPIMTTVQSKTAPPTFNRTNKFTAGFQNIVDAYGVGSYREINPAPYTIITFPFLFAVMFGDCGHGTVMLLAALWMILNERRLLSQKTDNEIWNTFFHGRYLILLMGIFSIYTGLIYNDCFSKSLNIFGSSWSVQPMFRNGTWNTHVMEESLYLQLDPAIPGVYFGNPYPFGIDPIWNLASNKLTFLNSYKMKMSVILGIVQMVFGVILSLFNHIYFRRTLNIILQFIPEMIFILCLFGYLVFMIIFKWCCFDVHVSQHAPSILIHFINMFLFNYSDSSNAPLYKHQQEVQSFFVVMALISVPWMLLIKPFILRASHRKSQLQASRIQEDATENIEGDSSSPSSRSGQRTSADTHGALDDHGEEFNFGDVFVHQAIHTIEYCLGCISNTASYLRLWALSLAHAQLSEVLWTMVMNSGLQTRGWGGIVGVFIIFAVFAVLTVAILLIMEGLSAFLHALRLHWVEFQNKFYVGDGYKFSPFSFKHILDGTAEE

SEQ ID NO: 605 - protein, 840 aa, Homo sapiens; identical to SEQ ID NO: 604

SEQ ID NO: 606 - protein, 680 aa, Homo sapiens
MVSVFRSEEMCLSQLFLQVEAAYCCVAELGELGLVQFKDLNMNVNSFQRKFVNEVRRCESLERILRFLEDEMQNEIVVQLLEKSPLTPLPREMITLETVLEKLEGELQEANQNQQALKQSFLELTELKYLLKKTQDFFETETNLADDFFTEDTSGLLELKAVPAYMTGKLGFIAGVINRERMASFERLLWRICRGNVYLKFSEMDAPLEDPVTKEEIQKNIFIIFYQGEQLRQKIKKICDGFRATVYPCPEPAVERREMLESVNVRLEDLITVITQTESHRQRLLQEAAANWHSWLIKVQKMKAVYHILNMCNIDVTQQCVIAEIWFPVADATRIKRALEQGMELSGSSMAPIMTTVQSKTAPPTFNRTNKFTAGFQNIVDAYGVGSYREINPAPYTIITFPFLFAVMFGDCGHGTVMLLAALWMILNERRLLSQKTDNEIWNTFFHGRYLILIHFINMFLFNYSDSSNAPLYKHQQEVQSFFVVMALISVPWMLLIKPFILRASHRKSQLQASRIQEDATENIEGDSSSPSSRSGQRTSADTHGALDDHGEEFNFGDVFVHQAIHTIEYCLGCISNTASYLRLWALSLAHAQLSEVLWTMVMNSGLQTRGWGGIVGVFIIFAVFAVLTVAILLIMEGLSAFLHALRLHWVEFQNKFYVGDGYKFSPFSFKHILDGTAEE

SEQ ID NO: 607 - protein, 840 aa, Homo sapiens; identical to SEQ ID NO: 604

SEQ ID NO: 608 - protein, 840 aa, Homo sapiens; identical to SEQ ID NO: 604

SEQ ID NO: 609 - protein, 840 aa, Homo sapiens; identical to SEQ ID NO: 604

SEQ ID NO: 610 - protein, 798 aa, Homo sapiens [sequence omitted]

SEQ ID NO: 611 - protein, 135 aa, Homo sapiens
MNLRKSGTLGHPGSVDETTYERLAEESLDSLAEFFEDLADKPYTFEDYDVSFGSGVLTGKLGRDLATYVINKQTPNKQIWLSSPSSGLKRYDWTEKNWVYSHDCVSLHDVLAAELTKALKTKLDLSSLAYSGEDA

SEQ ID NO: 612 - protein, 1940 aa, Homo sapiens
MTDAQMADFGAAAQYLRKSEKERLEAQTRPFDIRTECFVPDDKEEFVKAKILSREGGKVIAETENGKTVTVKEDQVLQQNPPKFDKIEDMAMLTFLHEPAVLFNLKERYAAWMIYTYSGLFCVTVNPYKWLPVYNAEVVAAYRGKKRSEAPPHIFSISDNAYQYMLTDRENQSILITGESGAGKTVNTKRVIQYFASIAAIGDRGKKDNANANKGTLEDQIIQANPALEAFGNAKTVRNDNSSRFGKFIRIHFGATGKLASADIETYLLEKSRVIFQLKAERNYHIFYQILSNKKPELLDMLLVTNNPYDYAFVSQGEVSVASIDDSEELMATDSAFDVLGFTSEEKAGVYKLTGAIMHYGNMKFKQKQREEQAEPDGTEDADKSAYLMGLNSADLLKGLCHPRVKVGNEYVTKGQSVQQVYYSIGALAKAVYEKMFNWMVTRINATLETKQPRQYFIGVLDIAGFEIFDFNSFEQLCINFTNEKLQQFFNHHMFVLEQEEYKKEGIEWTFIDFGMDLQACIDLIEKPMGIMSILEEECMFPKATDMTFKAKLYDNHLGKSNNFQKPRNIKGKQEAHFSLIHYAGTVDYNILGWLEKNKDPLNETVVALYQKSSLKLMATLFSSYATADTGDSGKSKGGKKKGSSFQTVSALHRENLNKLMTNLRTTHPHFVRCIIPNERKAPGVMDNPLVMHQLRCNGVLEGIRICRKGFPNRILYGDFRQRYRILNPVAIPEGQFIDSRKGTEKLLSSLDIDHNQYKFGHTKVFFKAGLLGLLEEMRDERLSRIITRMQAQARGQLMRIEFKKIVERRDALLVIQWNIRAFMGVKNWPWMKLYFKIKPLLKSAETEKEMATMKEEFGRIKETLEKSEARRKELEEKMVSLLQEKNDLQLQVQAEQDNLNDAEERCDQLIKNKIQLEAKVKEMNERLEDEEEMNAELTAKKRKLEDECSELKKDIDDLELTLAKVEKEKHATENKVKNLTEEMAGLDEIIAKLTKEKKALQEAHQQALDDLQVEEDKVNSLSKSKVKLEQQVDDLEGSLEQEKKVRMDLERAKRKLEGDLKLTQESIMDLENDKLQLEEKLKKKEFDINQQNSKIEDEQVLALQLQKKLKENQARIEELEEELEAERTARAKVEKLRSDLSRELEEISERLEEAGGATSVQIEMNKKREAEFQKMRRDLEEATLQHEATAAALRKKHADSVAELGEQIDNLQRVKQKLEKEKSEFKLELDDVTSNMEQIIKAKAANLEKVSRTLEDQANEYRVKLEEAQRSLNDFTTQRAKLQTENGELARQLEEKEALISQLTRGKLSYTQQMEDLKRQLEEEGKAKNALAHALQSARHDCDLLREQYEEETEAKAELQRVLSKANSEVAQWRTKYETDAIQRTEELEEAKKKLAQRLQDAEEAVEAVNAKCSSLEKTKHRLQNEIEDLMVDVERSNAAAAALDKKQRNFDKILAEWKQKYEESQSELESSQKEARSLSTELFKLKNAYEESLEHLETFKRENKNLQEEISDLTEQLGEGGKNVHELEKVRKQLEVEKLELQSALEEAEASLEHEEGKILRAQLEFNQIKAEIERKLAEKDEEMEQAKRNHQRVVDSLQTSLDAETRSRNEVLRVKKKMEGDLNEMEIQLSHANRMAAEAQKQVKSLQSLLKDTQIQLDDAVRANDDLKENIAIVERRNNLLQAELEELRAVVEQTERSRKLAEQELIETSERVQLLHSQNTSLINQKKKMESDLTQLQSEVEEAVQECRNAEEKAKKAITDAAMMAEELKKEQDTSAHLERMKKNMEQTIKDLQHRLDEAEQIALKGGKKQLQKLEARVRELEGELEAEQKRNAESVKGMRKSERRIKELTYQTEEDKKNLLRLQDLVDKLQLKVKAYKRQAEEAEEQANTNLSKFRKVQHELDEAEERADIAESQVNKLRAKSRDIGAKQKMHDEE

SEQ ID NO: 613 - protein, 36 aa, Homo sapiens
MTAVGLECSPPCEIIVRATLICLRMLYSTTHNCSIF

SEQ ID NO: 614 - protein, 1368 aa, Homo sapiens [sequence omitted]

SEQ ID NO: 615 - protein, 1367 aa, Homo sapiens
MKSGSGGGSPTSLWGLLFLSAALSLWPTSGEICGPGIDIRNDYQQLKRLENCTVIEGYLHILLISKAEDYRSYRFPKLTVITEYLLLFRVAGLESLGDLFPNLTVIRGWKLFYNYALVIFEMTNLKDIGLYNLRNITRGAIRIEKNADLCYLSTVDWSLILDAVSNNYIVGNKPPKECGDLCPGTMEEKPMCEKTTINNEYNYRCWTTNRCQKMCPSTCGKRACTENNECCHPECLGSCSAPDNDTACVACRHYYYAGVCVPACPPNTYRFEGWRCVDRDFCANILSAESSDSEGFVIHDGECMQECPSGFIRNGSQSMYCIPCEGPCPKVCEEEKKTKTIDSVTSAQMLQGCTIFKGNLLINIRRGNNIASELENFMGLIEVVTGYVKIRHSHALVSLSFLKNLRLILGEEQLEGNYSFYVLDNQNLQQLWDWDHRNLTIKAGKMYFAFNPKLCVSEIYRMEEVTGTKGRQSKGDINTRNNGERASCESDVLHFTSTTTSKNRIIITWHRYRPPDYRDLISFTVYYKEAPFKNVTEYDGQDACGSNSWNMVDVDLPPNKDVEPGILLHGLKPWTQYAVYVKAVTLTMVENDHIRGAKSEILYIRTNASVPSIPLDVLSASNSSSQLIVKWNPPSLPNGNLSYYIVRWQRQPQDGYLYRHNYCSKDKIPIRKYADGTIDIEEVTENPKTEVCGGEKGPCCACPKTEAEKQAEKEEAEYRKVFENFLHNSIFVPRPERKRRDVMQVANTTMSSRSRNTTAADTYNITDPEELETEYPFFESRVDNKERTVISNLRPFTLYRIDIHSCNHEAEKLGCSASNFVFARTMPAEGADDIPGPVTWEPRPENSIFLKWPEPENPNGLILMYEIKYGSQVEDQRECVSRQEYRKYGGAKLNRLNPGNYTARIQATSLSGNGSWTDPVFFYVQAKTGYENFIHLIIALPVAVLLIVGGLVIMLYVFHRKRNNSRLGNGVLYASVNPEYFSAADVYVPDEWEVAREKITMSRELGQGSFGMVYEGVAKGVVKDEPETRVAIKTVNEAASMRERIEFLNEASVMKEFNCHHVVRLLGVVSQGQPTLVIMELMTRGDLKSYLRSLRPEMENNPVLAPPSLSKMIQMAGEIADGMAYLNANKFVHRDLAARNCMVAEDFTVKIGDFGMTRDIYETDYYRKGGKGLLPVRWMSPESLKDGVFTTYSDVWSFGVVLWEIATLAEQPYQGLSNEQVLRFVMEGGLLDKPDNCPDMLFELMRMCWQYNPKMRPSFLEIISSIKEEMEPGFREVSFYYSEENKLPEPEELDLEPENMESVPLDPSASSSSLPLPDRHSGHKAENGPGPGVLVLRASFDERQPYAHMNGGRKNERALPLPQSSTC

SEQ ID NO: 616 - protein, 189 aa, Homo sapiens
VWPLCENMPSGKANKLGDVVRARNRKTIQVGNTDAEGRLILADALCYVHTFNPKVILNATTLTGVIDVALGSGATGVFTNSSWLWNKLFEASIETGDRVWRMPLFKHCTRQVVDCQLADVNNIGKYRSAGACTSAAFLKEFVTHPKWAHLDIAGVMTNKDEVPYLWKGMTGRPTRTLIEFLLRFSQDNA

SEQ ID NO: 617 - protein, 158 aa, Homo sapiens
MADEALFLLLHNEMVSGVYKSAEQGEVENGRCITKLENMGFRVGQGLIERFTKDTARFKDELDIMKFICKDFWTTVFKKQIDNLRTNHQGIYVLQDNKFRLLTQMSAGKQYLEHASKYLAFTCGLIRGGLSNLGIKSIVTAEVSSMPACKFQVMIQKL

SEQ ID NO: 618 - protein, 180 aa, Homo sapiens
MSLSWVNSVGLNVPASVRYSHTDINVPDFPDYCCIEIFDGTKSSKEDGEARKGFSYLVTATTAVGVTYAAKNVISQFVSSISASADESAVSKIAIKLFDIPEGKNMAFKWRGKSLFVCHRTKKEIDQEPAVEERLHSSCCTPIANEDFGDASGRIWKGPAPLELGAPSYGFTSEDTVIVG

SEQ ID NO: 619 - protein, 301 aa, Homo sapiens
MKSGPGIQAAIDLTAGAAGGTACVLTGQPFDTIKVKMQTFPDLYKGLTDCFLKTYAQVGLRGFYKGTGPALMAYVAENSVLFMCYGFCQQFVRKVAGMDKQAKLSDLQTAAAGSFASAFAALALCPTELVKCRLQTMYEMEMSGKIAKSHNTIWSVVKGILKKDGPLGFYHGLSSTLLQEVPGYFFFFGGYELSRSFFASGRSKDELGPVHLMLSGGVAGICLWLVVFPVDCIKSRIQVLSMYGKQAGFIGTLLSVVRNEGIVALYSGLKATMIRAIPANGALFVAYEYSRKMMMKQLEAY

SEQ ID NO: 620 - protein, 548 aa, Homo sapiens [sequence omitted]

SEQ ID NO: 621 - protein, 1030 aa, Homo sapiens [sequence omitted]

SEQ ID NO: 622 - protein, 433 aa, Homo sapiens [sequence omitted]

SEQ ID NO: 623 - protein, 1019 aa, Homo sapiens
MGLGKTIQAIGITYFYKEEWPLLIVVPSSLRYPWTEEIEKWIPELSPEEINVIQNKTDVRRMSTSKVTVLGYGLLTADAKTLIDALNNQNFKVVIVDESHYMKSRNATRSRILLPIVQKARRAILLTGTPALGRPEELFMQIEALFPQKFGRWTDYAKRYCNAHIRYFGKRPQWDCRGASNLNELHQLLSDIMIRRLKTEVLTQLPPKVRQRIPFDLPSAAAKELNTSFEEWEKIMRTPNSGAMETVMGLITRMFKQTAIAKAGAVKDYIKMMLQNDSLKFLVFAHHLSMLQACTEAVIENKTRYIRIDGSVSSSERIHLVNQFQKDPDTRVAILSIQAAGQGLTFTAASHVVFAELYWDPGHIKQAEDRAHRIGQCSSVNIHYLIANGTLDTLMWGMLNRKAQVTGSTLNGRKEKIQAEEGDKEKWDFLQFAEAWTPNDSSEELRKEALFTHFEKEKQHDIRSFFVPQPKKRQLMTSCDESKRFREENTVVSSDPTKTAARDIIDYESDVEPETKRLKLAASEDHCSPSEETPSQSKQIRTPLVESVQEAKAQLTTPAFPVEGWQCSLCTYINNSELPYCEMCETPQGSAVMQIDSLNHIQDKNEKDDSQKDTSKKVQTISDCEKQALAQSEPGQLADSKEETPKIEKEDGLTSQPGNEQWKSSDTLPVYDTLMFCASRNTDRIHIYTKDGKQMSCNFIPLDIKLDLWEDLPASFQLKQYRSLILRFVREWSSLTAMKQRIIRKSGQLFCSPILALEEITKQQTKQNCTKRYITKEDVAVASMDKVKNVGGHVRLITKESRPRDPFTKKLLEDGACVPFLNPYTVQADLTVKPSTSKGYLQAVDNEGNPLCLRCQQPTCQTKQACKANSWDSRFCSLKCQEEFWIRSNNSYLRAKVFETEHGVCQLCNVNAQELFLRLRDAPKSQRKNLLYATWTSKLPLEQLNEMIRNPGEGHFWQVDHIKPVYGGGGQCSLDNLQTLCTVCHKERTARQAKERSQVRRQSLASKHGSDITRFLVKK

SEQ ID NO: 624 - protein, 458 aa, Homo sapiens
MVADEMGLGKTIQAIGITYFYKEEWPLLIVVPSSLRYPWTEEIEKWIPELSPEEINVIQNKTDVRRMSTSKVTVLGYGLLTADAKTLIDALNNQNFKVVIVDESHYMKSRNATRSRILLPIVQKARRAILLTGTPALGRPEELFMQIEALFPQKFGRWTDYAKRYCNAHIRYFGKRPQWDCRGASNLNELHQLLSDIMIRRLKTEVLTQLPPKVRQRIPFDLPSAAAKELNTSFEEWEKIMRTPNSGAMETVMGLITRMFKQTAIAKAGAVKDYIKMMLQNDSLKFLVFAHHLSMLQACTEAVIENKTRYIRIDGSVSSSERIHLVNQFQKDPDTRVAILSIQAAGQGLTFTAASHVVFAELYWDPGHIKQAEDRAHRIGQCSSVNIHYLIANGTLDTLMWGMLNRKAQVTGSTLNGRKEKIQAEEGDKEKWDFLQFAEAWTPNDSSEELRKEALFTH

SEQ ID NO: 625 - protein, 1019 aa, Homo sapiens; identical to SEQ ID NO: 623

SEQ ID NO: 626 - protein, 20 aa, Homo sapiens
MLSNFKCEDSKFETIEKPQS

SEQ ID NO: 627 - protein, 180 aa, Homo sapiens [sequence omitted]

SEQ ID NO: 628 - protein, 194 aa, Homo sapiens
MAKSSQRKQRDCVNQCKSKPGLSTSIPLRMSSYTFKRPVTRITPHPGNEVRYHQWEESLEKPQQVCWQRRLQGLQAYSSAGELSSTLDLANTLQKLVPSYTGGSLLEDLASGLEHSCPMPHLACSSDAVEIIPAEGVGISQLLCKQFLVTEEDIRKQEGKVKTVRERLAIALIADGLANEAEKVRDQEGCPEKR

SEQ ID NO: 629 - protein, 469 aa, Homo sapiens [sequence omitted]

SEQ ID NO: 630 - protein, 429 aa, Homo sapiens
MPPDHFYRRLWEREAVLVRRQDHTYYQGLFSTADLDSMLRNEEVQFGQHLDAARYINGRRETLNPPGRALPAAAWSLYQAGCSLRLLCPQAFSTTVWQFLAVLQEQFGSMAGSNVYLTPPNSQGFAPHYDDIEAFVLQLEGRKLWRVYRPRAPTEELALTSSPNFSQDDLGEPVLQTVLEPGDLLYFPRGFIHQAECQDGVHSLHLTLSTYQRNTWGDFLEAILPLAVQAAMEENVEFRRGLPRDFMDYMGAQHSDSKDPRRTAFMEKVRVLVARLGHFAPVDAVADQRAKDFIHDSLPPVLTDRERALSVYGLPIRWEAGEPVNVGAQLTTETEVHMLQDGIARLVGEGGHLFLYYTVENSRVYHLEEPKCLEIYPQQADAMELLLGSYPEFVRVGDLPCDSVEDQLSLATTLYDKGLLLTKMPLALN

SEQ ID NO: 631 - protein, 144 aa, Homo sapiens [sequence omitted]

SEQ ID NO: 632 - protein, 95 aa, Homo sapiens [sequence omitted]

SEQ ID NO: 633 - protein, 178 aa, Homo sapiens [sequence omitted]

SEQ ID NO: 634 - protein, 107 aa, Homo sapiens
MQRLPAATRATLILSLAFASLHSACSAEASSSNSSSLTAHHPDPGTLEQCLNVDFCPQAARCCRTGVDEYGWIAAAVGWSLWFLTLILLCVDKLMKLTPDEPKDLQA

SEQ ID NO: 635 - protein, 256 aa, Homo sapiens
MWLLLTLSFLLASTAAQDGDKLLEGDECAPHSQPWQVALYERGRFNCGASLISPHWVLSAAHCQSRFMRVRLGEHNLRKRDGPEQLRTTSRVIPHPRYEARSHRNDIMLLRLVQPARLNPQVRPAVLPTRCPHPGEACVVSGWGLVSHNEPGTAGSPRSQVSLPDTLHCANISIISDTSCDKSYPGRLTNTMVCAGAEGRGAESCEGDSGGPLVCGGILQGIVSWGDVPCDNTTKPGVYTKVCHYLEWIRETMKRN

SEQ ID NO: 636 - protein, 247 aa, Homo sapiens
MWLLLTLSFLLASTAAQDGDKLLEGDECAPHSQPWQVALYERGRFNCGASLISPHWVLSAAHCQSRFMRVRLGEHNLRKRDGPEQLRTTSRVIPHPRYEARSHRNDIMLLRLVQPARLNPQVRPAVLPTRCPHPGEACVVSGWGLVPLSSPVSLPDTLHCANISIISDTSCDKSYPGRLTNTMVCAGAEGRGAESCEGDSGGPLVCGGILQGIVSWGDVPCDNTTKPGVYTKVCHYLEWIRETMKRN

SEQ ID NO: 637 - protein, 121 aa, Homo sapiens
MWLLLTLSFLLASTAAQDGDKLLEGDECAPHSQPWQVALYERGRFNCGASLISPHWVLSAAHCQSRFMRVRLGEHNLRKRDGPEQLRTTSRVIPHPRYEARSHRNDIMLLRLVQPARLNPQ

SEQ ID NO: 638 - protein, 161 aa, Homo sapiens
MWLLLTLSFLLASTAAQDGDKLLEGDECAPHSQPWQVALYERGRFNCGASLISPHWVLSAAHCQSRFMRVRLGEHNLRKRDGPEQLRTTSRVIPHPRYEARSHRNDIMLLRLVQPARLNPQVRPAVLPTRCPHPGEACVVSGWGLVSHNEPGTAGSPRSQG

SEQ ID NO: 639 - protein, 171 aa, Homo sapiens
MWLLLTLSFLLASTAAQDGDKLLEGDECAPHSQPWQVALYERGRFNCGASLISPHWVLSAAHCQSRFMRVRLGEHNLRKRDGPEQLRTTSRVIPHPRYEARSHRNDIMLLRLVQPARLNPQGDSGGPLVCGGILQGIVSWGDVPCDNTTKPGVYTKVCHYLEWIRETMKRN

SEQ ID NO: 640 - protein, 400 aa, Homo sapiens
MRVVIRVCFGGPEKMQVQLPGTDQLPAAGFLPLVSDQGRPCAIQGAEQESSSFSHHPASGNTLQLASHLTEAFSCSGSHGPLQLGMLILASSHPRTKGTEGNGVMKQDWGEKGEGLLSSREKRRPSETLLAPTESSAPANEQQQRSPETVSPSFLEERNTIGGRITPRVLTLALDATRCAHLPHVTSQPPHYSKECECFKTTNHQTTAERTPSLIGLSSLFLSELSGLAPSRLKTERPFTGIAFNSPHFRDGGRGRRIKPPPPPAVDTGGSSRSPHPRASLLTPTRHHQNKSYQIAKDSECGATLLINYVQRKCGAAEERATRRRPQQNQGQGSALAKHNTLPAPPQTLALKPQRTTPLARDGRLGVPVRRRLHPALRARVSECTSAPTTHPPTHTRMRP

SEQ ID NO: 641 - protein, 86 aa, Homo sapiens
MADGRTARPGHVTRERALRASPHPYPPSFFFFPFLLGPALSLPFIPSSHAPRCTALGAFKRNRKCRELRQSRGDHREQGVLFRSSG

SEQ ID NO: 642 - protein, 222 aa, Homo sapiens [sequence omitted]

SEQ ID NO: 643 - protein, 105 aa, Homo sapiens
MKCQMSFVFLSPVYERRPGEIKVSINTTMVYDFLHSMRKCSDINQTHKAISSLKMPITPILYSLAPCQRQHKEMSIHTQENFARAFEHQQFHKAINLGYELSVKD

SEQ ID NO: 644 - protein, 310 aa, Homo sapiens [sequence omitted]

SEQ ID NO: 645 - protein, 213 aa, Homo sapiens [sequence omitted]

SEQ ID NO: 646 - protein, 203 aa, Homo sapiens [sequence omitted]

SEQ ID NO: 647 - protein, 79 aa, Homo sapiens
MGVHNLFTVTQFILIGLSYFSNEHYLLFVALAIICQVFLVRSGDILLAIGTVIKLHTTHVLFFGKCVHLRHIVFISYYT

SEQ ID NO: 648 - protein, 1035 aa, Homo sapiens
MGGPAAPRGAGRLRALLLALVVAGIPAGAYNLDPQRPVHFQGPADSFFGYAVLEHFHDNTRWVLVGAPKADSKYSPSVKSPGAVFKCRVHTNPDRRCTELDMARGKNRGTSCGKTCREDRDDEWMGVSLARQPKADGRVLACAHRWKNIYYEADHILPHGFCYIIPSNLQAKGRTLIPCYEEYKKKYGEEHGSCQAGIAGFFTEELVVMGAPGSFYWAGTIKVLNLTDNTYLKLNDEVIMNRRYTYLGYAVTAGHFSHPSTIDVVGGAPQDKGIGKVYIFRADRRSGTLIKIFQASGKKMGSYFGSSLCAVDLNGDGLSDLLVGAPMFSEIRDEGQVTVYINRGNGALEEQLALTGDGAYNAHFGESIASLDDLDNDGFPDVAIGAPKEDDFAGAVYIYHGDAGGIVPQYSMKLSGQKINPVLRMFGQSISGGIDMDGNGYPDVTVGAFMSDSVVLLRARPVITVDVSIFLPGSINITAPQCHDGQQPVNCLNVTTCFSFHGKHVPGEIGLNYVLMADVAKKEKGQMPRVYFVLLGETMGQVTEKLQLTYMEETCRHYVAHVKRRVQDVISPIVFEAAYSLSEHVTGEEERELPPLTPVLRWKKGQKIAQKNQTVFERNCRSEDCAADLQLQGKLLLSSMDEKTLYLALGAVKNISLNISISNLGDDAYDANVSFNVSRELFFINMWQKEEMGISCELLESDFLKCSVGFPFMRSKSKYEFSVIFDTSHLSGEEEVLSFIVTAQSGNTERSESLHDNTLVLMVPLMHEVDTSITGIMSPTSFVYGESVDAANFIQLDDLECHFQPINITLQVYNTGPSTLPGSSVSISFPNRLSSGGAEMFHVQEMVVGQEKGNCSFQKNPTPCIIPQEQENIFHTIFAFFTKSGRKVLDCEKPGISCLTAHCNFSALAKEESRTIDIYMLLNTEILKKDSSSVIQFMSRAKVKVDPALRVVEIAHGNPEEVTVVFEALHNLEPRGYVVGWIIAISLLVGILIFLLLAVLLWKMGFFRRRYKEIIEAEKNRKENEDSWDWVQKNQ

SEQ ID NO: 649 - protein, 307 aa, Homo sapiens
MNHSVVTEFIILGLTKKPELQGIIFLFFLIVYLVAFLGNMLIIIAKIYNNTLHTPMYVFLLTLAVVDIICTTSIIPKMLGTMLTSENTISYAGCMSQLFLFTWSLGAEMVLFTTMAYDRYVAICFPLHYSTVMNHHMCVALLSMVMAIAVTNSWVHTALIMRLTFCGPNTIDHFFCEIPPLLALSCSPVRINEVMVYVADITLAIGDFILTCISYGFIIVAILRIRTVEGKRKAFSTCSSHLTVVTLYYSPVIYTYIRPASSYTFERDKVVAALYTLVTPTLNPMVYSFQNREMQAGIRKVFAFLKH

SEQ ID NO: 650 - protein, 43 aa, Homo sapiens
MPEKVHVERRSWKLAFQADIAQLMSLVINTFYSNKEIFLQGLI

SEQ ID NO: 651 - protein, 1068 aa, Homo sapiens [sequence omitted]

SEQ ID NO: 652 - protein, 624 aa, Homo sapiens [sequence omitted]

SEQ ID NO: 653 - protein, 129 aa, Homo sapiens
MTSHHCVGPGNHISWSGHEKEHRLDYCPEVTFPLTKGFPLGYTLLFNFASYPFLLPSKIKTLLRNKDSFLNILCPACLLLIRRCNIEYSSTGLNFLNTFTVSLIVTVIPLLQNVPVPLGNNVGKMQVYE

SEQ ID NO: 654 - protein, 368 aa, Homo sapiens
MLSIQDDAFINPHLAKIFERVRQSADFMPLKQMMKTLNNDLGPNWRDKLEYFEERPFAAASIGQVHLARMKGGREVAMKIQYPGVAQSINSDVNNLMAVLNMSNMLPEGLFPEHLIDVLRRELALECDYQREAACARKFRDLLKGHPFFYVPEIVDELCSPHVLTTELVSGFPLDQAEGLSQEIRNEICYNILVLCLRELFEFHFMQTDPNWSNFFYDPQQHKVALLDFGATREYDRSFTDLYIQIIRAAADRDRETVRAKSIEMKFLTGYEVKVMEDAHLDAILILGEAFASDEPFDFGTQSTTEKIHNLIPVMLRHRLVPPPEETYSLHRKMGGSFLICSKLKARFPCKAMFEEAYSNYCKRQAQQ

SEQ ID NO: 655 - protein, 647 aa, Homo sapiens
MAAILGDTIMVAKGLVKLTQAAVETHLQHLGIGGELIMAARALQSTAVEQIGMFLGKVQGQDKHEEYFAENFGGPEGEFHFSVPHAAGASTDFSSASAPDQSAPPSLGHAHSEGPAPAYVASGPFREAGFPGQASSPLGRANGRLFANPRDSFSAMGFQRRFFHQDQSPVGGLTAEDIEKARQAKARPENKQHKQTLSEHARERKVPVTRIGRLANFGGLAVGLGFGALAEVAKKSLRSEDPSGKKAVLGSSPFLSEANAERIVRTLCKVRGAALKLGQMLSIQDDAFINPHLAKIFERVRQSADFMPLKQMMKTLNNDLGPNWRDKLEYFEERPFAAASIGQVHLARMKGGREVAMKIQYPGVAQSINSDVNNLMAVLNMSNMLPEGLFPEHLIDVLRRELALECDYQREAACARKFRDLLKGHPFFYVPEIVDELCSPHVLTTELVSGFPLDQAEGLSQEIRNEICYNILVLCLRELFEFHFMQTDPNWSNFFYDPQQHKVALLDFGATREYDRSFTDLYIQIIRAAADRDRETVRAKSIEMKFLTGYEVKVMEDAHLDAILILGEAFASDEPFDFGTQSTTEKIHNLIPVMLRHRLVPPPEETYSLHRKMGGSFLICSKLKARFPCKAMFEEAYSNYCKRQAQQ

SEQ ID NO: 656 - protein, 242 aa, Homo sapiens
MAAILGDTIMVAKGLVKLTQAAVETHLQHLGIGGELIMAARALQSTAVEQIGMFLGKVQGQDKHEEYFAENFGGPEGEFHFSVPHAAGASTDFSSASAPDQSAPPSLGHAHSEGPAPAYVASGPFREAGFPGQASSPLGRANGRLFANPRDSFSAMGFQRRFFHQDQSPVGGLTAEDIEKARQAKARPENKQHKQTLSEHARERKVPVTRIGRLANFGGPCQWRAVCLKVAREQFEGGPDGG

SEQ ID NO: 657 - protein, 144 aa, Homo sapiens
MKNILLRTSAAQKGSSTSQSRMQPEPPQTSLQPPLPTSQRPHPWVMPTARAQLLPTWPVDPLEKPGSPARPPPLWAGPTGGSLQTPETHSLPWAFSEGSSTRTNPLLGASQPRTLRRPGRLRLAPRTSSTNRRSASMPGSGRCL

SEQ ID NO: 658 - protein, 647 aa, Homo sapiens; identical to SEQ ID NO: 655

SEQ ID NO: 659 - protein, 437 aa, Homo sapiens [sequence omitted]

SEQ ID NO: 660 - protein, 339 aa, Homo sapiens
MTDRSPFETDMLTLTRYVMEKGRQAKGTGELTQLLNSMLTAIKAISSAVRKAGLAHLYGIAGSVNVTGDEVKKLDVLSNSLVINMLQSSYSTCVLVSEENKDAIITAKEKRGKYVVCFDPLDGSSNIDCLASIGTIFAIYRKTSEDEPSEKDALQCGRNIVAAGYALYGSATLVALSTGQGVDLFMLDPALGEFVLVEKDVKIKKKGKIYSLNEGYAKYFDAATTEYVQKKKFPEDGSAPYGARYVGSMVADVHRTLVYGGIFLYPANQKSPKGKLRLLYECNPVAYIIEQAGGLATTGTQPVLDVKPEAIHQRVPLILGSPEDVQEYLTCVQKNQAGS

SEQ ID NO: 661 - protein, 202 aa, Homo sapiens
MAAGSRTSLLLAFGLLCLSWLQEGSAFPTIPLSRLFDNAMLRARRLYQLAYDTYQEFNPQTSLCFSESIPTPSNRVKTQQKSNLELLRISLLLIQSWLEPVQLLRSVFANSLVYGASDSNVYRHLKDLEEGIQTLMWRLEDGSPRTGQIFNQSYSKFDTKSHNDDALLKNYGLLYCFRKDMDKVETFLRIVQCRSVEGSCGF

SEQ ID NO: 662 - protein, 202 aa, Homo sapiens
MATGSRTSLLLAFGLLCLPWLQEGSAFPTIPLSRLFDNAMLRAHRLHQLAFDTYQEFNPQTSLCFSESIPTPSNREETQQKSNLELLRISLLLIQSWLEPVQFLRSVFANSLVYGASDSNVYDLLKDLEEGIQTLMGRLEDGSPRTGQIFKQTYSKFDTNSHNDDALLKNYGLLYCFRKDMDKVETFLRIVQCRSVEGSCGF

SEQ ID NO: 663 - protein, 178 aa, Homo sapiens
MLRAHRLHQLAFDTYQEFEEAYIPKEQKYSFLQNPQTSLCFSESIPTPSNREETQQKSNLELLRISLLLIQSWLEPVQFLRSVFANSLVYGASDSNVYDLLKDLEEGIQTLMGRLEDGSPRTGQIFKQTYSKFDTNSHNDDALLKNYGLLYCFRKDMDKVETFLRIVQCRSVEGSCGF

SEQ ID NO: 664 - protein, 32 aa, Homo sapiens
MTHCSRTTGCSTASGRTWTRSRHSCAWCSAAL

SEQ ID NO: 665 - protein, 122 aa, Homo sapiens
MAPGSRTSLLLAFALLCLPWLQEAGAVQTVPLSRLFDHAMLQAHRAHQLAIDTYQEFRLEDGSRRTGQILKQTYSKFDTNSHNHDALLKNYGLLYCFRKDMDKVETFLRMVQCRSVEGSCGF

SEQ ID NO: 666 - protein, 222 aa, Homo sapiens
MAAGSRTSLLLAFALLCLPWLQEAGAVQTVPLSRLFKEAMLQAHRAHQLAIDTYQEFISSWGMEAYITKEQKYSFLHDSQTSFCFSDSIPTSSNMEETQQKSNLELLHISLLLIESRLEPVRFLRSTFTNNLVYDTSDSDDYHLLKDLEEGIQMLMGRLEDGSHLTGQTLKQTYSKFDTNSHNHDALLKNYGLLHCFRKDMDKVETFLRMVQCRSVEGSCGF

SEQ ID NO: 667 - protein, 137 aa, Homo sapiens [sequence omitted]

SEQ ID NO: 668 - protein, 178 aa, Homo sapiens
MATGSRTSLLLAFGLLCLPWLQEGSAFPTIPLSRLFDNAMLRAHRLHQLAFDTYQEFEEAYIPKEQKYSFLQNPQTSLCFSESIPTPSNREETQQKSNLELLRISLLLIQSWLEPVQFLRSVFANSLVYGASDSNVYDLLKDLEEGIQTLMGAGRWQPPDWADLQADLQQVRHKLTQR

SEQ ID NO: 669 - protein, 122 aa, Homo sapiens
MATGSRTSLLLAFGLLCLPWLQEGSAFPTIPLSRLFDNAMLRAHRLHQLAFDTYQEFRLEDGSPRTGQIFKQTYSKFDTNSHNDDALLKNYGLLYCFRKDMDKVETFLRIVQCRSVEGSCGF

SEQ ID NO: 670 - protein, 213 aa, Homo sapiens
MATGSRTSLLLAFGLLCLPWLQEGSAFPTIPLSRLFDNAMLRAHRLHQLAFDTYQEFEEAYIPKEQKYSFLQNPQTSLCFSESIPTPSNREETQQKSNLELLRISLLLIQSWLEPVQFLRSVFANSLVYGASDSNVYDLLKDLEEGIQTLMGVRVAPGVPNPGAPLTLRAVLEKHCCPLFSSQALTQENSPYSSFPLVNPPGLSLHPEGEGGK

SEQ ID NO: 671 - protein, 177 aa, Homo sapiens
MATGSRTSLLLAFGLLCLPWLQEGSAFPTIPLSRLFDNAMLRAHRLHQLAFDTYQEFNLELLRISLLLIQSWLEPVQFLRSVFANSLVYGASDSNVYDLLKDLEEGIQTLMGRLEDGSPRTGQIFKQTYSKFDTNSHNDDALLKNYGLLYCFRKDMDKVETFLRIVQCRSVEGSCGF

SEQ ID NO: 672 - protein, 222 aa, Homo sapiens; identical to SEQ ID NO: 666

SEQ ID NO: 673 - protein, 217 aa, Homo sapiens
MAPGSRTSLLLAFALLCLPWLQEAGAVQTVPLSRLFDHAMLQAHRAHQLAIDTYQEFEETYIPKDQKYSFLHDSQTSFCFSDSIPTPSNMEETQQKSNLELLRISLLLIESWLEPVRFLRSMFANNLVYDTSDSDDYHLLKDLEEGIQTLMGRLEDGSRRTGQILKQTYSKFDTNSHNHDALLKNYGLLYCFRKDMDKVETFLRMVQCRSVEGSCGF

SEQ ID NO: 674 - protein, 139 aa, Homo sapiens
MAADSIPTSSNMEETQQKSNLELLHISLLLIESRLEPVRFLRSTFTNNLVYDTSDSDDYHLLKDLEEGIQMLMGRLEDGSHLTGQTLKQTYSKFDTNSHNHDALLKNYGLLHCFRKDMDKVETFLRMVQCRSVEGSCGF

SEQ ID NO: 675 - protein, 128 aa, Homo sapiens
MEETQQKSNLELLHISLLLIESRLEPVRFLRSTFTNNLVYDTSDSDDYHLLKDLEEGIQMLMGRLEDGSHLTGQTLKQTYSKFDTNSHNHDALLKNYGLLHCFRKDMDKVETFLRMVQCRSVEGSCGF

SEQ ID NO: 676 - protein, 217 aa, Homo sapiens
MATGSRTSLLLAFGLLCLPWLQEGSAFPTIPLSRLFDNAMLRAHRLHQLAFDTYQEFEEAYIPKEQKYSFLQNPQTSLCFSESIPTPSNREETQQKSNLELLRISLLLIQSWLEPVQFLRSVFANSLVYGASDSNVYDLLKDLEEGIQTLMGRLEDGSPRTGQIFKQTYSKFDTNSHNDDALLKNYGLLYCFRKDMDKVETFLRIVQCRSVEGSCGF

SEQ ID NO: 677 - protein, 256 aa, Homo sapiens
MAPGSRTSLLLAFALLCLPWLQEAGAVQTVPLSRLFDHAMLQAHRAHQLAIDTYQEFEETYIPKDQKYSFLHDSQTSFCFSDSIPTPSNMEETQQKSNLELLRISLLLIESWLEPVRFLRSMFANNLVYDTSDSDDYHLLKDLEEGIQTLMGVRVAPGVTNPGTPLASRAGGEKYCCPLFSSKALTQENSPYSSFRLVNPPGLSLHPEGEGGKWINERGREQCPSAWPLLLFLHFAEAGRRQPPDWADPQADLQQV

SEQ ID NO: 678 - protein, 46 aa, Homo sapiens
MTHCSRTTGCSTASGRTWTRSRHSCAWCSAALWRAAVASRGPRGIL

SEQ ID NO: 679 - protein, 122 aa, Homo sapiens; identical to SEQ ID NO: 665

SEQ ID NO: 680 - protein, 177 aa, Homo sapiens; identical to SEQ ID NO: 671

SEQ ID NO: 681 - protein, 245 aa, Homo sapiens
MAAGSRTSLLLAFGLLCLSWLQEGSAFPTIPLSRLFDNAMLRARRLYQLAYDTYQEFEEAYILKEQKYSFLQNPQTSLCFSESIPTPSNRVKTQQKSNLELLRISLLLIQSWLEPVQLLRSVFANSLVYGASDSNVYRHLKDLEEGIQTLIGWKMAAPGLGRSSISPTASLTQNRTTMTHCSRTTGCSTASGRTWTRSRHSCASCSAALWRAAVASSCPGGIPVTPPQCLSWSWKVLLQCPPALS

SEQ ID NO: 682 - protein, 239 aa, Homo sapiens
MATGSRTSLLLAFGLLCLPWLQEGSAFPTIPLSRLFDNAMLRAHRLHQLAFDTYQEFEEAYIPKEQKYSFLQNPQTSLCFSESIPTPSNREETQQKSNLELLRISLLLIQSWLEPVQFLRSVFANSLVYGASDSNVYDLLKDLEEGIQTLMGRLEDGSPRTGQIFKQTYSKFDTNSHNDDALLKNYGLLYCFRKDMDKVETFLRIVQCRSVEGSCGLEVATPVPTSLVLIKLSCIILSD

SEQ ID NO: 683 - protein, 46 aa, Homo sapiens
MTHCSRTTGCSTASGRTWTRSRHSCAWCSAALWRAAVASRCPSSIL

SEQ ID NO: 684 - protein, 256 aa, Homo sapiens; identical to SEQ ID NO: 677

SEQ ID NO: 685 - protein, 217 aa, Homo sapiens; identical to SEQ ID NO: 673

SEQ ID NO: 686 - protein, 122 aa, Homo sapiens; identical to SEQ ID NO: 665

SEQ ID NO: 687 - protein, 122 aa, Homo sapiens; identical to SEQ ID NO: 669

SEQ ID NO: 688 - protein, 256 aa, Homo sapiens
MAAGSRTSLLLAFGLLCLSWLQEGSAFPTIPLSRLFDNAMLRARRLYQLAYDTYQEFEEAYILKEQKYSFLQNPQTSLCFSESIPTPSNRVKTQQKSNLELLRISLLLIQSWLEPVQLLRSVFANSLVYGASDSNVYRHLKDLEEGIQTLMWVRVAPGIPNPGAPLASRDWGEKHCCPLFSSQALTQENSPYSSFPLVNPPGLSLQPGGEGGKWMNERGREQCPSAWPLLLFLHFAEAGRWQPPDWADLQSVLQQV

SEQ ID NO: 689 - protein, 202 aa, Homo sapiens; identical to SEQ ID NO: 662

SEQ ID NO: 690 - protein, 91 aa, Homo sapiens
MAAPGLGRSSSRPTASSTQTHTTMTHYSRTTGCSTASGRTWTRSRHSCASCSAALWRAAVASSCPGGIPVTPPQCLSWPWKLPLQCPPALS

SEQ ID NO: 691 - protein, 199 aa, Homo sapiens
MAAGSRTSLLLAFALLCLPWLQEAGAVQTVPLSRLFKEAMLQAHRAHQLAIDTYQEFISSWGMDSIPTSSNMEETQQKSNLELLHISLLLIESRLEPVRFLRSTFTNNLVYDTSDSDDYHLLKDLEEGIQMLMGRLEDGSHLTGQTLKQTYSKFDTNSHNHDALLKNYGLLHCFRKDMDKVETFLRMVQCRSVEGSCGF

SEQ ID NO: 692 - protein, 178 aa, Homo sapiens
MLRAHRLHQLAFDTYQEFEEAYILKEQKYSFLQNPQTSLCFSESIPTPSNRVKTQQKSNLELLRISLLLIQSWLEPVQLLRSVFANSLVYGASDSNVYRHLKDLEEGIQTLMWRLEDGSPRTGQIFNQSYSKFDTKSHNDDALLKNYGLLYCFRKDMDKVETFLRIVQCRSVEGSCGF

SEQ ID NO: 693 - protein, 217 aa, Homo sapiens; identical to SEQ ID NO: 673

SEQ ID NO: 694 - protein, 199 aa, Homo sapiens; identical to SEQ ID NO: 691

SEQ ID NO: 695 - protein, 167 aa, Homo sapiens [sequence omitted]

SEQ ID NO: 696 - protein, 217 aa, Homo sapiens
MAAGSRTSLLLAFGLLCLSWLQEGSAFPTIPLSRLFDNAMLRARRLYQLAYDTYQEFEEAYILKEQKYSFLQNPQTSLCFSESIPTPSNRVKTQQKSNLELLRISLLLIQSWLEPVQLLRSVFANSLVYGASDSNVYRHLKDLEEGIQTLMWRLEDGSPRTGQIFNQSYSKFDTKSHNDDALLKNYGLLYCFRKDMDKVETFLRIVQCRSVEGSCGF

SEQ ID NO: 697 - protein, 105 aa, Homo sapiens
MEHTLTCVPKGNPAPALVCTWNGVVFDLEVPQKATQNHTGTYRCTATNQLGSVSKDIAVIVQGLDEGISSTLFVIITVALGVGVITIALYLSYRPCKVDRRQIAL

SEQ ID NO: 698 - protein, 377 aa, Homo sapiens
MDGTEIAVSPRSLHSELMCPICLDMLKNTMTTKECLHRFCSDCIVTALRSGNKECPTCRKKLVSKRSLRPDPNFDALISKIYPSREEYEAHQDRVLIRLSRLHNQQALSSSIEEGLRMQAMHRAQRVRRPIPGSDQTTTMSGGEGEPGEGEGDGEDVSSDSAPDSAPGPAPKRPRGGGAGGSSVGTGGGGTGGVGGGAGSEDSGDRGGTLGGGTLGPPSPPGAPSPPEPGGEIELVFRPHPLLVEKGEYCQTRYVKTTGNATVDHLSKYLALRIALERRQQQEAGEPGGPGGGASDTGGPDGCGGEGGGAGGGDGPEEPALPSLEGVSEKQYTIYIAPGGGAFTTLNGSLTLELVNEKFWKVSRPLELCYAPTKDPK

SEQ ID NO: 699 - protein, 377 aa, Homo sapiens; identical to SEQ ID NO: 698

SEQ ID NO: 700 - protein, 494 aa, Homo sapiens
ILELDQFKGQQGQKRFQDLMGHGSDYSLSEVLWVRANLFSDVQFKMSHTKITLFTNEDNPHGNESAKASQARTKAGDLRDTGIFLDLMHLKKPGGFDISLFYRDIISIAEDEDLRVHFEESSKLEDLLQKVHAKETRKRALSRLKLKLNKDIVISVGIYNLVQKALKPPPIKLYREINEPVKTKTRTFNTSTDDLLLPSDTKWSQIYGSRQIILEKEETEELKRFDDPGLMLMGFKPLVLLKKRHYLRPSLSVYPEESLVIGSSTLFSALLIKCLEKEVAALCRYTPRRNIPPYFVALVTQEEVLDDQKIQVTPPGFQLVFLPFADDKRKMPFTEKVTATPEQVDKMKAIIEKLRFTYRSDSFENPVLQQHFRNLEALALDLMEPEQAVDLTLPKVEAINRRLGSLVDEFKELVHPPDYNPEGKVTKRKHDNEGSGSKRPKVEYSEEELKTHISKGTLGKFTVPMLKEACRAYGLKSGLKKQELLEALTKHFQD

SEQ ID NO: 701 - protein, 187 aa, Homo sapiens
MHHCAQHHSSGSESLPEKAADRKQKVRVAPEGTDFMCNRARRSPRLSTLSRTVEVVLKGNWEATESLGGAGYTGGQQVCQRETEKKTGGKSSPGVRTKLNIFFDKERNIKIANYGFSSTFAKRDNTEKGTFDGTLPYAGPELFLGHGYQCPAINVWSLGIIVCKMVAGALPFYEQNCKDILKKKKLK

SEQ ID NO: 702 - protein, 334 aa, Homo sapiens
MLQDTKDIMKEKRKHRKEKKDNPNRGNVNPRKIKTRKEEWEKIKMGQEFVESKEKLGPFGYPPTLVYQNGSIGCVENVDASSYPPPSQSDSASSPSPSFSEDNLPPPPAEFSYPVDNQRGSGLAGPKRSSVVSPSHPPPAPPLGSPPSSKPGFAPPPAPPPPPPPMIGIPPPPPPIGFGSPGTPPPPSSPSFPPHPDFAAPPPLPPPPAADYPTLPPPPLSQPTRGAPPPPPPPPPGPPPPPFTGADGQPAVPPPLSDTTKPKSSLPAISDAHSDLLSAICQGFQLRRVEEQQEQEKWDVVGNDVATILSRRIAVEYSDSEDDSSEFDGDDWSN

SEQ ID NO: 703 - protein, 334 aa, Homo sapiens; identical to SEQ ID NO: 702

SEQ ID NO: 704 - protein, 334 aa, Homo sapiens; identical to SEQ ID NO: 702

SEQ ID NO: 705 - protein, 76 aa, Homo sapiens
MASKGLQDLKQQVEGTAQEAVSAAGAAAQQVVDQATEAGQKAMDQLAKTTQETIDKTANQASDTFSGIGKKFGLLK

SEQ ID NO: 706 - protein, 329 aa, Homo sapiens
  misc_feature (329)..(329): Xaa can be any naturally occurring amino acid
MMEDAIVSTSTPGSPETKNVDRDSTSPLTPELKEDSTALVMNSTTESNTVFSSVSLDAATEVSRAEVTYYDPTFMPASAQSTKSPDISPEASSSHSNSPPLTISTHKTIATQTGPSGVTSLGQLTLDTSTIATSAGTPSARTQDFVDSETTSVMNNDLNDVLKTSPFSAEEANSLSSQAPLLVTTSPSPVTSTLQEHSTSSLVSVTSVPTPTLAKITDMDTNLEPVTRSPQNLRNTLATSEATTDTHTMHPSINTAVANVGTTSSPNEFYFTVSPDSDPYKATSAVVITSTSGDSIVSTSMPRSSAMKKIESETTFSLIFRLRETSTSX

SEQ ID NO: 707 - protein, 166 aa, Homo sapiens
MLLILLSVALLAFSSAQDLDEDVSQEDVPLVISDGGDSEQFIDEERQGPPLGGQQSQPSAGDGNQNDGPQQGPPQQGGQQQQGPPPPQGKPQGPPQQGGHPPPPQGRPQGPPQQGGHPRPPRGRPQGPPQQGGHQQGPPPPPPGKPQGPPPQGGRPQGPPQGQSPQ

SEQ ID NO: 708 - protein, 748 aa, Homo sapiens
MTLMNTLNKDKYNFNCNRWLDANEDDNEIVREMTAEGPTVRRIMGMARYHVTVCTGELEGAGTDANVYLCLFGDVGDTGERLLYNCRNNTDLFEKGNADEFTIESVTMRNVRRVRIRHDGKGSGSGWYLDRVLVREEGQPESDNVEFPCLRWLDKDKDDGQLVRELLPSDSSATLKNFRYHISLKTGDVSGASTDSRVYIKLYGDKSDTIKQVLLVSDNNLKDYFERGRVDEFTLETLNIGNINRLVIGHDSTGMHASWFLGSVQIRVPRQGKQYTFPANRWLDKNQADGRLEVELYPSEVVEIQKLVHYEVEIWTGDVGGAGTSARVYMQIYGEKGKTEVLFLSSRSKVFERASKDTFQLEAADVGEVYKLRLGHTGEGFGPSWFVDTVWLRHLVVREEVIEQHKFEAHRWLARGKEDNELVVELVPAGKPGPERNTYEVQVVTGNVPKAGTDANVYLTIYGEEYGDTGERPLKKSDKSNKFEQGQTDTFTIYAIDLGALTKIRIRHDNTGNRAGWFLDRIDITDMNNEITYYFPCQRWLAVEEDDGQLSRELLPVDESYVLPQSEEGGGGGDNNPLDNLALEQKDKSTTFSVTIKTGVKKNAGTDANVFITLFGTQDDTGMTLLKSSKTNSDKFERDSIEIFTVETLDLGDLWKVRLGHDNTGKAPGWFVDWVEVDAPSLGKCMTFPCGRWLAKNEDDGSIIRDLFHAELQTRLYTPCRNHTRQGQPFSGAPSPATPTQPQFFLQD

SEQ ID NO: 709 - protein, 177 aa, Homo sapiens
MRERPRLGEDSSLISLFLQVVAFLAMVMGTHTYSHWPSCCPSKGQDTSEELLRWSTVPVPPLEPARPNRHPESCRASEDGPLNSRAISPWRYELDRDLNRLPQDLYHARCLCPHCVSLQTGSHMDPRGNSELLYHNQTVFYRRPCHGEKGTHKGYCLERRLYRVSLACVCVRPRVMG

SEQ ID NO: 710 - protein, 557 aa, Homo sapiens [sequence omitted]

SEQ ID NO: 711 - protein, 559 aa, Homo sapiens [sequence omitted]

SEQ ID NO: 712 - protein, 394 aa, Homo sapiens [sequence omitted]

SEQ ID NO: 713 - protein, 99 aa, Homo sapiens
MAAAAASRGVGAKLGLREIRIHLCQRSPGSQGVRDFIEKRYVELKKANPDLPILIRECSDVQPKLWARYAFGQETNVPLNNFSADQVTRALENVLSGKA

SEQ ID NO: 714 - protein, 95 aa, Homo sapiens [sequence omitted]

SEQ ID NO: 715 - protein, 286 aa, Homo sapiens [sequence omitted]

SEQ ID NO: 716 - protein, 148 aa, Homo sapiens
MAEVEQKKKRTFRKFTYRGVDLDQLLDMSYEQLEQPMQLYSARQRRRLNRGLRRKQHSLLKRLRKAKKEAPPMEKQEVVKTHLRDMIILPEMVGSMVGVYNGKTFNQVEIKPEMIGHYLGEFSITYKPVKHGRPGIGATHSSRFIPLK

SEQ ID NO: 717 - protein, 270 aa, Homo sapiens
MDWKTLQALLSGVNKYSTAFGRIWLSVVFVFRVLVYVVAAERVWGDEQKDFDCNTKQPGCTNVCYDNYFPISNIRLWALQLIFVTCPSLLVILHVAYREERERRHRQKHGDQCAKLYDNAGKKHGGLWWTYLFSLIFKLIIEFLFLYLLHTLWHGFNMPRLVQCANVAPCPNIVDCYIARPTEKKIFTYFMVGASAVCIVLTICELCYLICHRVLRGLHKDKPRGGCSPSSSASRASTCRCHHKLVEAGEVDPDPGNNKLQASAPNLTPI

SEQ ID NO: 718 - protein, 81 aa, Homo sapiens
MLPVRRKKLLLLLSVTKRTLYFLKQLGANWLPDKASVPTHVRKPALHLRVYSVTIILTRPFLDLWPNPQVIVPSLNISSRL

SEQ ID NO: 719 - protein, 2901 aa, Homo sapiens
MHLHQVLTGAVNPGDNCYSVGSVGDVPFTAYGSGCDIVILANDFECVQIIPGAKHGNIQVSCVECSNQQGRIAASYGNAVCIFEPLGINSHKRNCQLKCQWLKTGQFFLSSVTYNLAWDPQDNRLLTATDSIQLWAPPGDDILEEEEEIDNTVPPVLNDWKCVWQCKTSVSVHLMEWSPDGEYFATAGKDDCLLKVWYPMTGWKSSIIPQDHHEVKRRQSSTQFSFVYLAHPRAVTGFSWRKTSKYMPRGSVCNVLLTSCHDGVCRLWAETLLPEDCLLGEQICETTTSSIASSLSHAGRHKDRIQHALETIHHLKNLRKGQRRSSVLVTHAELMPDQTAMHEVQRHISHHANALCHFHIAASINPATDIPNVLVGTAFNVDDGNGGFVVHWLNNKEFHFTSSTEVFMHQLRKLSDKQVDHENDDADREDEEHSQEDRERGLHMKLDHDLSLDRESEAGTGSSEHEDGEREGSPRTYSRLSVPMPLPTVLLDRKIETLLTEWNKNPDMLFTIHPVDGTFLVWHVKYLDEYNPGIFRQVQVSFSSRIPVAFPSGDASSLSKNIMMYACINATKDSHHTLLHQEGMSVGSPHGSQPHSRSHSTHMNILAPTVMMISKHIDGSLNQWAVTFADKSAFTTVLTVSHKFRYCGHRFHLNDLACHSVLPLLLTSSHHNALLTPELDCQWDSDNKLSRLMDPVKHIKGSSKQPLRNAATRTFHDPNAIYSELILWRVDPIGPLSYTGGVSELARINSLHTSAFSNVAWLPTLIPSYCLGTYCNSASACFVASDGKNLRLYQAVVDARKLLDELSDPESSKLIGEVFNIVSQQSTARPGCIIELDAITNQCGSNTQLLHVFQEDFIIGYKPHKEDMEKKETEIFFQPSQGYRPPPFSEKFFLVVIEKDSNNNSILHMWHLHLKSVQACLAKASEGASSESLLSVPGQKNVDSSPETSPSVSPMPHSSSIANLQTASKLILSSRLVYSQPLDLPESVEVIRATPSAGHLSSSSIYPVCLAPYLVVTTCSDNKVRFWKCCMEANPECNKSDEKEIYHWKRWPLMNDEGEDNSSTVSIVGRPVAVSCSYTGRLAVAYKQPIHHNGFVSKEFSMHVCIFECESTGGSEWVLEQTIHLDDLVKVGSVLDSRVSVDSNLFVYSKSDALLSKDRYLIPNIKHLVHLDWVSKEDGSHILTVGVGANIFMYGRLSGIVTEQTNSKDGVAVITLPLGGSIKQGVKSRWVLLRSIDLVSSVDGTPSLPVSLSWVRDGILVVGMDCEMHVYAQWKHAVKFGDTEADSSNAEEAAMQDHSTFKSNMLARKSVVEGTAISDDVFCSPTVIQDGGLFEAAHVLSPTLPQYHPTQLLELMDLGKVRRAKAILSHLVKCIAGEVAIVRDPDAGEGTKRHLSRTISVSGSTAKETVTVGKDGTRDYTEIDSIPPLPLYALLAADQDTSYRISEESTKIPQSYEDQTVSQPEDQYSELFQIQDIPTDDIDLEPEKRENKSKVINLSQYGPAYFGQEHARVLSSHLMHSSLPGLTRLEQMFLVALADTVATTSTELDESRDKSCSGRDTLDECGLRYLLAMRLHTCLLTSLPPLYRVQLLHQGVSTCHFAWAFHSEAEEELINMIPAIQRGDPQWSELRAMGIGWWVRNINTLRRCIEKVAKASFQRNNDALDAALFYLSMKKKAVVWGLFRSQHDEKMTTFFSHNFNEDRWRKAALKNAFSLLGKQRFEQSAAFFLLAGSLKDAIEVCLEKMEDIQLAMVIARLYESEFETSSTYISILNQKILGCQKDGSGFSCKRLHPDPFLRSLAYWVMKDYTRALDTLLEQTPKEDDEHQVIIKSCNPVAFSFYNYLRTHPLLIRRNLASPEGTLATLGLKTEKNFVDKINLIERKLFFTTANAHFKVGCPVLALEVLSKIPKVTKTSALSAKKDQPDFISHRMDDVPSHSKALSDGNGSSGIEWSNVTSSQYDWSQPIVKVDEEPLNLDWGEDHDSALDEEEDDAVGLVMKSTDAREKDKQSDQKASDPNMLLTPQEEDDPEGDTEVDVIAEQLKFRACLKILMTELRTLATGYEVDGGKLRFQLYNWLEKEIAALHEICNHESVIKEYSSKTYSKVESDLLDQEEMVDKPDIGSYERHQIERRRLQAKREHAERRKSWLQKNQDLLRVFLSYCSLHGAQGGGLASVRMELKFLLQESQQETTVKQLQSPLPLPTTLPLLSASIASTKTVIANPVLYLNNHIHDILYTIVQMKTPPHPSIEDVKVHTLHSLAASLSASIYQALCDSHSYSQTEGNQFTGMAYQGLLLSDRRRLRTESIEEHATPNSSPAQWPGVSSLINLLSSAQDEDQPKLNILLCEAVVAVYLSLLIHALATNSSSELFRLAAHPLNNRMWAAVFGGGVKLVVKPRRQSENISAPPVLSEDIDKHRRRFNMRMLVPGRPVKDATPPPVPAERPSYKEKFIPPELSMWDYFVAKPFLPLSDSGVIYDSDESIHSDEEDDAFFSDTQIQEHQDPNSYSWALLHLTMVKLALHNVKNFFPIAGLEFSELPVTSPLGIAVIKNLENWEQILQEKMDQFEGPPPNYINTYPTDLSVGAGPAILRNKAMLEPENTPFKSRDSSAFPVKRLWHFLVKQEVLQETFIRYIFTKKRKQSEVEADLGYPGGKAKVIHKESDMIMAFSVNKANCNEIVLASTHDVQELDVTSLLACQSYIWIGEEYDRESKSSDDVDYRGSTTTLYQPSATSYSASQVHPPSSLPWLGTGQTSTGASVLMKRNLHNVKRMTSHPVHQYYLTGAQDGSVRMFEWTRPQQLVCFRQAGNARVTRLYFNSQGNKCGVADGEGFLSIWQVNQTASNPKPYMSWQCHSKATSDFAFITSSSLVATSGHSNDNRFHVPRSWCHGTAVCTQTATPNLGG

SEQ ID NO: 720 - protein, 3036 aa, Homo sapiens
MHLHQVLTGAVNPGDNCYSVGSVGDVPFTAYGSGCDIVILANDFECVQIIPGAKHGNIQVSCVECSNQQGRIAASYGNAVCIFEPLGINSHKRNCQLKCQWLKTGQFFLSSVTYNLAWDPQDNRLLTATDSIQLWAPPGDDILEEEEEIDNTVPPVLNDWKCVWQCKTSVSVHLMEWSPDGEYFATAGKDDCLLKVWYPMTGWKSSIIPQDHHEVKRRQSSTQFSFVYLAHPRAVTGFSWRKTSKYMPRGSVCNVLLTSCHDGVCRLWAETLLPEDCLLGEQICETTTSSIASSLSHAGRHKDRIQHALETIHHLKNLRKGQRRSSVLVTHAELMPDQTAMHEVQRHISHHANALCHFHIAASINPATDIPNVLVGTAFNVDDGNGGFVVHWLNNKEFHFTSSTEVFMHQLRKLSDKQVDHENDDADREDEEHSQEDRERGLHMKLDHDLSLDRESEAGTGSSEHEDGEREGSPRTYSRLSVPMPLPTVLLDRKIETLLTEWNKNPDMLFTIHPVDGTFLVWHVKYLDEYNPGIFRQVQVSFSSRIPVAFPSGDASSLSKNIMMYACINATKDSHHTLLHQEGMSVGSPHGSQPHSRSHSTHMNILAPTVMMISKHIDGSLNQWAVTFADKSAFTTVLTVSHKFRYCGHRFHLNDLACHSVLPLLLTSSHHNALLTPELDCQWDSDNKLSRLMDPVKHIKGSSKQPLRNAATRTFHDPNAIYSELILWRVDPIGPLSYTGGVSELARINSLHTSAFSNVAWLPTLIPSYCLGTYCNSASACFVASDGKNLRLYQAVVDARKLLDELSDPESSKLIGEVFNIVSQQSTARPGCIIELDAITNQCGSNTQLLHVFQEDFIIGYKPHKEDMEKKETEIFFQPSQGYRPPPFSEKFFLVVIEKDSNNNSILHMWHLHLKSVQACLAKASEGASSESLLSVPGQKNVDSSPETSPSVSPMPHSSSIANLQTASKLILSSRLVYSQPLDLPESVEVIRATPSAGHLSSSSIYPVCLAPYLVVTTCSDNKVRFWKCCMEANPECNKSDEKEIYHWKRWPLMNDEGEDNSSTVSIVGRPVAVSCSYTGRLAVAYKQPIHHNGFVSKEFSMHVCIFECESTGGSEWVLEQTIHLDDLVKVGSVLDSRVSVDSNLFVYSKSDALLSKDRYLIPNIKHLVHLDWVSKEDGSHILTVGVGANIFMYGRLSGIVTEQTNSKDGVAVITLPLGGSIKQGVKSRWVLLRSIDLVSSVDGTPSLPVSLSWVRDGILVVGMDCEMHVYAQWKHAVKFGDTEADSSNAEEAAMQDHSTFKSNMLARKSVVEGTAISDDVFCSPTVIQDGGLFEAAHVLSPTLPQYHPTQLLELMDLGKVRRAKAILSHLVKCIAGEVAIVRDPDAGEGTKRHLSRTISVSGSTAKETVTVGKDGTRDYTEIDSIPPLPLYALLAADQDTSYRISEESTKIPQSYEDQTVSQPEDQYSELFQIQDIPTDDIDLEPEKRENKSKVINLSQYGPAYFGQEHARVLSSHLMHSSLPGLTRLEQMFLVALADTVATTSTELDESRDKSCSGRDTLDECGLRYLLAMRLHTCLLTSLPPLYRVQLLHQGVSTCHFAWAFHSEAEEELINMIPAIQRGDPQWSELRAMGIGWWVRNINTLRRCIEKVAKASFQRNNDALDAALFYLSMKKKAVVWGLFRSQHDEKMTTFFSHNFNEDRWRKAALKNAFSLLGKQRFEQSAAFFLLAGSLKDAIEVCLEKMEDIQLAMVIARLYESEFETSSTYISILNQKILGCQKDGSGFSCKRLHPDPFLRSLAYWVMKDYTRALDTLLEQTPKEDDEHQVIIKSCNPVAFSFYNYLRTHPLLIRRNLASPEGTLATLGLKTEKNFVDKINLIERKLFFTTANAHFKVGCPVLALEVLSKIPKVTKTSALSAKKDQPDFISHRMDDVPSHSKALSDGNGSSGIEWSNVTSSQYDWSQPIVKVDEEPLNLDWGEDHDSALDEEEDDAVGLVMKSTDAREKDKQSDQKASDPNMLLTPQEEDDPEGDTEVDVIAEQLKFRACLKILMTELRTLATGYEVDGGKLRFQLYNWLEKEIAALHEICNHESVIKEYSSKTYSKVESDLLDQEEMVDKPDIGSYERHQIERRRLQAKREHAERRKSWLQKNQDLLRVFLSYCSLHGAQGGGLASVRMELKFLLQESQQETTVKQLQSPLPLPTTLPLLSASIASTKTVIANPVLYLNNHIHDILYTIVQMKTPPHPSIEDVKVHTLHSLAASLSASIYQALCDSHSYSQTEGNQFTGMAYQGLLLSDRRRLRTESIEEHATPNSSPAQWPGVSSLINLLSSAQDEDQPKLNILLCEAVVAVYLSLLIHALATNSSSELFRLAAHPLNNRMWAAVFGGGVKLVVKPRRQSENISAPPVLSEDIDKHRRRFNMRMLVPGRPVKDATPPPVPAERPSYKEKFIPPELSMWDYFVAKPFLPLSDSGVIYDSDESIHSDEEDDAFFSDTQIQEHQDPNSYSWALLHLTMVKLALHNVKNFFPIAGLEFSELPVTSPLGIAVIKNLENWEQILQEKMDQFEGPPPNYINTYPTDLSVGAGPAILRNKAMLEPENTPFKSRDSSAFPVKRLWHFLVKQEVLQETFIRYIFTKKRKQSEVEADLGYPGGKAKVIHKESDMIMAFSVNKANCNEIVLASTHDVQELDVTSLLACQSYIWIGEEYDRESKSSDDVDYRGSTTTLYQPSATSYSASQVHPPSSLPWLGTGQTSTGASVLMKRNLHNVKRMTSHPVHQYYLTGAQDGSVRMFEWTRPQQLVCFRQAGNARVTRLYFNSQGNKCGVADGEGFLSIWQVNQTASNPKPYMSWQCHSKATSDFAFITSSSLVATSGHSNDNRNVCLWDTLISPGNSLIHGFTCHDHGATVLQYAPKQQLLISGGRKGHVCIFDIRQRQLIHTFQAHDSAIKALALDPYEEYFTTGSAEGNIKVWRLTGHGLIHSFKSEHAKQSIFRNIGAGVMQIDIIQGNRLFSCGADGTLKTRVLPNAFNIPNRILDIL

SEQ ID NO: 721 - protein, 100 aa, Homo sapiens
MHLHQVLTGAVNPGDNCYSVGSVGDVPFTAYGSGCDIVILANDFECVQIIPGAKHGNIQVSCVECSNQQGRIAASYGNAVCIFEPLGINSHKRNCVSINQ

SEQ ID NO: 722 - protein, 3036 aa, Homo sapiens; identical to SEQ ID NO: 720

SEQ ID NO: 723 - protein, 3058 aa, Homo sapiens
MHLHQVLTGAVNPGDNCYSVGSVGDVPFTAYGSGCDIVILANDFECVQIIPGAKHGNIQVSCVECSNQQGRIAASYGNAVCIFEPLGINSHKRNCQLKCQWLKTGQFFLSSVTYNLAWDPQDNRLLTATDSIQLWAPPGDDILEEEEEIDNTVPPVLNDWKCVWQCKTSVSVHLMEWSPDGEYFATAGKDDCLLKVWYPMTGWKSSIIPQDHHEVKRRQSSTQFSFVYLAHPRAVTGFSWRKTSKYMPRGSVCNVLLTSCHDGVCRLWAETLLPEDCLLGEQICETTTSSIASSLSHAGRHKDRIQHALETIHHLKNLRKGQRRSSVLVTHAELMPDQTAMHEVQRHISHHANALCHFHIAASINPATDIPNVLVGTAFNVDDGNGGFVVHWLNNKEFHFTSSTEVFMHQLRKLSDKQVDHENDDADREDEEHSQEDRERGLHMKLDHDLSLDRESEAGTGSSEHEDGEREGSPRTYSRLSVPMPLPTVLLDRKIETLLTEWNKNPDMLFTIHPVDGTFLVWHVKYLDEYNPGIFRQVQVSFSSRIPVAFPSGDASSLSKNIMMYACINATKDSHHTLLHQEGMSVGSPHGSQPHSRSHSTHMNILAPTVMMISKHIDGSLNQWAVTFADKSAFTTVLTVSHKFRYCGHRFHLNDLACHSVLPLLLTSSHHNALLTPELDCQWDSDNKLSRLMDPVKHIKGSSKQPLRNAATRTFHDPNAIYSELILWRVDPIGPLSYTGGVSELARINSLHTSAFSNVAWLPTLIPSYCLGTYCNSASACFVASDGKNLRLYQAVVDARKLLDELSDPESSKLIGEVFNIVSQQSTARPGCIIELDAITNQCGSNTQLLHVFQEDFIIGYKPHKEDMEKKETEIFFQPSQGYRPPPFSEKFFLVVIEKDSNNNSILHMWHLHLKSVQACLAKASEGASSESLLSVPGQKNVDSSPETSPSVSPMPHSSSIANLQTASKLILSSRLVYSQPLDLPESVEVIRATPSAGHLSSSSIYPVCLAPYLVVTTCSDNKVRFWKCCMEANPECNKSDEKEIYHWKRWPLMNDEGEDNSSTVSIVGRPVAVSCSYTGRLAVAYKQPIHHNGFVSKEFSMHVCIFECESTGGSEWVLEQTIHLDDLVKVGSVLDSRVSVDSNLFVYSKSDALLSKDRYLIPNIKHLVHLDWVSKEDGSHILTVGVGANIFMYGRLSGIVTEQTNSKDGVAVITLPLGGSIKQGVKSRWVLLRSIDLVSSVDGTPSLPVSLSWVRDGILVVGMDCEMHVYAQWKHAVKFGDTEADSSNAEEAAMQDHSTFKSNMLARKSVVEGTAISDDVFCSPTVIQDGGLFEAAHVLSPTLPQYHPTQLLELMDLGKVRRAKAILSHLVKCIAGEVAIVRDPDAGEGTKRHLSRTISVSGSTAKETVTVGKDGTRDYTEIDSIPPLPLYALLAADQDTSYRISEESTKIPQSYEDQTVSQPEDQYSELFQIQDIPTDDIDLEPEKRENKSKVINLSQYGPAYFGQEHARVLSSHLMHSSLPGLTRLEQMFLVALADTVATTSTELDESRDKSCSGRDTLDECGLRYLLAMRLHTCLLTSLPPLYRVQLLHQGVSTCHFAWAFHSEAEEELINMIPAIQRGDPQWSELRAMGIGWWVRNINTLRRCIEKVAKASFQRNNDALDAALFYLSMKKKAVVWGLFRSQHDEKMTTFFSHNFNEDRWRKAALKNAFSLLGKQRFEQSAAFFLLAGSLKDAIEVCLEKMEDIQLAMVIARLYESEFETSSTYISILNQKILGCQKDGSGFSCKRLHPDPFLRSLAYWVMKDYTRALDTLLEQTPKEDDEHQVIIKSCNPVAFSFYNYLRTHPLLIRRNLASPEGTLATLGLKTEKNFVDKINLIERKLFFTTANAHFKVGCPVLALEVLSKIPKVTKTSALSAKKDQPDFISHRMDDVPSHSKALSDGNGSSGIEWSNVTSSQYDWSQPIVKVDEEPLNLDWGEDHDSALDEEEDDAVGLVMKSTDAREKDKQSDQKASDPNMLLTPQEEDDPEGDTEVDVIAEQLKFRACLKILMTELRTLATGYEVDGGKLRFQLYNWLEKEIAALHEICNHESVIKEYSSKTYSKVESDLLDQEEMVDKPDIGSYERHQIERRRLQAKREHAERRKSWLQKNQDLLRVFLSYCSLHGAQGGGLASVRMELKFLLQESQQETTVKQLQSPLPLPTTLPLLSASIASTKTVIANPVLYLNNHIHDILYTIVQMKTPPHPSIEDVKVHTLHSLAASLSASIYQALCDSHSYSSQTEGNQFTGMAYQGLLLSDRRRLRTESIEEHATPNSSPAQWPGVSSLINLLSSAQDEDQPKLNILLCEAVVAVYLSLLIHALATNSSSELFRLAAHPLNNRMWAAVFGGGVKLVVKPRRQSENISAPPVLSEDIDKHRRRFNMRMLVPGRPVKDATPPPVPAERPSYKEKFIPPELSMWDYFVAKPFLPLSDSGVIYDSDESIHSDEEDDAFFSDTQIQEHQDPNSYSWALLHLTMVKLALHNVKNFFPIAGLEFSELPVTSPLGIAVIKNLENWEQILQEKMDQFEGPPPNYINTYPTDLSVGAGPAILRNKAMLEPENTPFKSRDSSAFPVKRLWHFLVKQEVLQETFIRYIFTKKRKQSESIEEHVEQVNQNCIAEDCHIKVEADLGYPGGKAKVIHKESDMIMAFSVNKANCNEIVLASTHDVQELDVTSLLACQSYIWIGEEYDRESKSSDDVDYRGSTTTLYQPSATSYSASQVHPPSSLPWLGTGQTSTGASVLMKRNLHNVKRMTSHPVHQYYLTGAQDGSVRMFEWTRPQQLVCFRQAGNARVTRLYFNSQGNKCGVADGEGFLSIWQVNQTASNPKPYMSWQCHSKATSDFAFITSSSLVATSGHSNDNRNVCLWDTLISPGNSLIHGFTCHDHGATVLQYAPKQQLLISGGRKGHVCIFDIRQRQLIHTFQAHDSAIKALALDPYEEYFTTGSAEGNIKVWRLTGHGLIHSFKSEHAKQSIFRNIGAGVMQIDIIQGNRLFSCGADGTLKTRVLPNAFNIPNRILDIL

SEQ ID NO: 724 - protein, 303 aa, Homo sapiens [sequence omitted]

SEQ ID NO: 725 - protein, 62 aa, Homo sapiens
MERTSLAMETAEVLEPSSAWHRSASGLIGLAAVIVSTVPWTWEDLTAQPMVFMMITAYTVIT

SEQ ID NO: 726 - protein, 127 aa, Homo sapiens [sequence omitted]

SEQ ID NO: 727 - protein, 228 aa, Homo sapiens
VTSIITWAGDLGQLCLGWGKFAWAYHHIGRLAEAQTYLDKVENICKKFANASRYRMECPEMNCEEGWALAKCGGKNYEQAKACFEKALEVGPENPEFSTGYVITAYCLDGFNTTDSNETFSLHPLKWAVSLNPKDAHIKVILALKLQDEGQEAEGEKHTEKALISMSSQTYVFLYAAQFYQRRGNIDKALLLLKMALQGTPTSAFLHHQIGLCCRKQTKKAKGRIEKL

SEQ ID NO: 728 - protein, 39 aa, Homo sapiens
LWSQRQVGSPDELRSSPRILEEQEPHHQLLAQGDFRPPH

SEQ ID NO: 729 - protein, 677 aa, Homo sapiens
MLSSTDFTFASWELVVRVDHPNEEQQKDVTLRVSGDLHVGGVMLKLVEQINISQDWSDFALWWEQKHCWLLKTHWTLDKYGVQADAKLLFTPQHKMLRLRLPNLKMVRLRVSFSAVVFKAVSDICKILNIRRSEELSLLKPSGDYFKKKKKKDKNNKEPIIEDILNLESSPTASGSSVSPGLYSKTMTPIYDPINGTPASSTMTWFSDSPLTEQNCSILAFSQPPQSPEALADMYQPRSLVDKAKLNAGWLDSSRSLMEQGIQEDEQLLLRFKYYSFFDLNPKYDAVRINQLYEQARWAILLEEIDCTEEEMLIFAALQYHISKLSLSAETQDFAGESEVDEIEAALSNLEVTLEGGKADSLLEDITDIPKLADNLKLFRPKKLLPKAFKQYWFIFKDTSIAYFKNKELEQGEPLEKLNLRGCEVVPDVNVAGRKFGIKLLIPVADGMNEMYLRCDHENQYAQWMAACMLASKGKTMADSSYQPEVLNILSFLRMKNRNSASQVASSLENMDMNPECFVSPRCAKRHKSKQLAARILEAHQNVAQMPLVEAKLRFIQAWQSLPEFGLTYYLVRFKGSKKDDILGVSYNRLIKIDAATGIPVTTWRFTNIKQWNVNWETRQVVIEFDQNVFTAFTCLSADCKIVHEYIGGYIFLSTRSKDQNETLDEDLFHKLTGGQD

SEQ ID NO: 730 - protein, 230 aa, Homo sapiens
MNEMYLRCDHENQYAQWMAACMLASKGKTMADSSYQPEVLNILSFLRMKNRNSASQVASSLENMDMNPECFVSPRCAKRHKSKQLAARILEAHQNVAQMPLVEAKLRFIQAWQSLPEFGLTYYLVRFKGSKKDDILGVSYNRLIKIDAATGIPVTTWRFTNIKQWNVNWETRQVVIEFDQNVFTAFTCLSADCKIVHEYIGGYIFLSTRSKDQNETLDEDLFHKLTGGQD

SEQ ID NO: 731 - protein, 974 aa, Homo sapiens [sequence omitted]

SEQ ID NO: 732 - protein, 268 aa, Homo sapiens
MSKGEDPNNPRSIKRISQGGRDNHLAIAKCDLTQLKKKQSEVSNGSRETISMKTCCQHGDRGYWSTGYYWRGGPDDNLIEGGGTKFVCKPGARNITVIFHPLLRFIQEIEHALGLGPAKQCPLREFLTVYIKNIFLNQVLAEINKEIEGVTKTSDPLKILANADTMKVLGVQRPLLQSTIIVEKTVQDLLNLMHDLSAYSDQFLNMVCVKLQEYKDTCTAAYRGIVQSEEKLVISASWAKDDDIMQTLSELAKSFQDMADRCLLVLHL

SEQ ID NO: 733 - protein, 830 aa, Homo sapiens [sequence omitted]

SEQ ID NO: 734 - protein, 847 aa, Homo sapiens
MEPWKQCAQWLIHCKVLPTNHRVTWDSAQVFDLAQTLRDGVLLCQLLNNLRAHSINLKEINLRPQMSQFLCLKNIRTFLTACCETFGMRKSELFEAFDLFDVRDFGKVIETLSRLSRTPIALATGIRPFPTEESINDEDIYKGLPDLIDETLVEDEEDLYDCVYGEDEGGEVYEDLMKAEEAHQPKCPENDIRSCCLAEIKQTEEKYTETLESIEKYFMAPLKRFLTAAEFDSVFINIPELVKLHRNLMQEIHDSIVNKNDQNLYQVFINYKERLVIYGQYCSGVESAISSLDYISKSKEDVKLKLEECSKRANNGKFTLRDLLVVPMQRVLKYHLLLQELVKHTTDPTEKANLKLALDAMKDLAQYVNEVKRDNETLREIKQFQLSIENLNQPVLLFGRPQGDGEIRITTLDKHTKQERHIFLFDLAVIVCKRKGDNYEMKEIIDLQQYKIANNPTTDKENKKWSYGFYLIHTQGQNGLEFYCKTKDLKKKWLEQFEMALSNIRPDYADSNFHDFKMHTFTRVTSCKVCQMLLRGTFYQGYLCFKCGARAHKECLGRVDNCGRVNSGEQGTLKLPEKRTNGLRRTPKQVDPGLPKMQVIRNYSGTPPPALHEGPPLQLQAGDTVELLKGDAHSLFWQGRNLASGEVGFFPSDAVKPCPCVPKPVDYSCQPWYAGAMERLQAETELINRVNSTYLVRHRTKESGEYAISIKYNNEAKHIKILTRDGFFHIAENRKFKSLMELVEYYKHHSLKEGFRTLDTTLQFPYKEPEHSAGQRGNRAGNSLLSPKVLGIAIARYDFCARDMRELSLLKGDVVKIYTKMSANGWWRGEVNGRVGWFPSTYVEEDE

SEQ ID NO: 735 - protein, 287 aa, Homo sapiens
MPIFTFLSEQGTLKLPEKRTNGLRRTPKQVDPGLPKMQVIRNYSGTPPPALHEGPPLQLQAGDTVELLKGDAHSLFWQGRNLASGEVGFFPSDAVKPCPCVPKPVDYSCQPWYAGAMERLQAETELINRVNSTYLVRHRTKESGEYAISIKYNNEAKHIKILTRDGFFHIAENRKFKSLMELVEYYKHHSLKEGFRTLDTTLQFPYKEPEHSAGQRGNRAGNSLLSPKVLGIAIARYDFCARDMRELSLLKGDVVKIYTKMSANGWWRGEVNGRVGWFPSTYVEEDE

SEQ ID NO: 736 - protein, 493 aa, Homo sapiens
MDKFWWHAAWGLCLVPLSLAQIDLNITCRFAGVFHVEKNGRYSISRTEAADLCKAFNSTLPTMAQMEKALSIGFETCRYGFIEGHVVIPRIHPNSICAANNTGVYILTSNTSQYDTYCFNASAPPEEDCTSVTDLPNAFDGPITITIVNRDGTRYVQKGEYRTNPEDIYPSNPTDDDVSSGSSSERSSTSGGYIFYTFSTVHPIPDEDSPWITDSTDRIPATNMDSSHSITLQPTANPNTGLVEDLDRTGPLSMTTQQSNSQSFSTSHEGLEEDKDHPTTSTLTSSNRNDVTGGRRDPNHSEGSTTLLEGYTSHYPHTKESRTFIPVTSAKTGSFGVTAVTVGDSNSNVNRSLSGDQDTFHPSGGSHTTHGSESDGHSHGSQEGGANTTSGPIRTPQIPEWLIILASLLALALILAVCIAVNSRRRCGQKKKLVINSGNGAVEDRKPSGLNGEASKSQEMVHLVNKESSETPDQFMTADETRNLQNVDMKIGV

SEQ ID NO: 737 - protein, 425 aa, Homo sapiens
MDKFWWHAAWGLCLVPLSLAQIDLNITCRFAGVFHVEKNGRYSISRTEAADLCKAFNSTLPTMAQMEKALSIGFETCRYGFIEGHVVIPRIHPNSICAANNTGVYILTSNTSQYDTYCFNASAPPEEDCTSVTDLPNAFDGPITITIVNRDGTRYVQKGEYRTNPEDIYPSNPTDDDVSSGSSSERSSTSGGYIFYTFSTVHPIPDEDSPWITDSTDRIPATNMDSSHSITLQPTANPNTGLVEDLDRTGPLSMTTQQSNSQSFSTSHEGLEEDKDHPTTSTLTSSRDQDTFHPSGGSHTTHGSESDGHSHGSQEGGANTTSGPIRTPQIPEWLIILASLLALALILAVCIAVNSRRRCGQKKKLVINSGNGAVEDRKPSGLNGEASKSQEMVHLVNKESSETPDQFMTADETRNLQNVDMKIGV

SEQ ID NO: 738 - protein, 395 aa, Homo sapiens
MDKFWWHAAWGLCLVPLSLAQIDLNITCRFAGVFHVEKNGRYSISRTEAADLCKAFNSTLPTMAQMEKALSIGFETCRYGFIEGHVVIPRIHPNSICAANNTGVYILTSNTSQYDTYCFNASAPPEEDCTSVTDLPNAFDGPITITIVNRDGTRYVQKGEYRTNPEDIYPSNPTDDDVSSGSSSERSSTSGGYIFYTFSTVHPIPDEDSPWITDSTDRIPATNMDSSHSITLQPTANPNTGLVEDLDRTGPLSMTTRDQDTFHPSGGSHTTHGSESDGHSHGSQEGGANTTSGPIRTPQIPEWLIILASLLALALILAVCIAVNSRRRCGQKKKLVINSGNGAVEDRKPSGLNGEASKSQEMVHLVNKESSETPDQFMTADETRNLQNVDMKIGV

SEQ ID NO: 739 - protein, 535 aa, Homo sapiens
MDKFWWHAAWGLCLVPLSLAQIDLNITCRFAGVFHVEKNGRYSISRTEAADLCKAFNSTLPTMAQMEKALSIGFETCRYGFIEGHVVIPRIHPNSICAANNTGVYILTSNTSQYDTYCFNASAPPEEDCTSVTDLPNAFDGPITITIVNRDGTRYVQKGEYRTNPEDIYPSNPTDDDVSSGSSSERSSTSGGYIFYTFSTVHPIPDEDSPWITDSTDRIPATSTSSNTISAGWEPNEENEDERDRHLSFSGSGIDDDEDFISSTNMDSSHSITLQPTANPNTGLVEDLDRTGPLSMTTQQSNSQSFSTSHEGLEEDKDHPTTSTLTSSNRNDVTGGRRDPNHSEGSTTLLEGYTSHYPHTKESRTFIPVTSAKTGSFGVTAVTVGDSNSNVNRSLSGDQDTFHPSGGSHTTHGSESDGHSHGSQEGGANTTSGPIRTPQIPEWLIILASLLALALILAVCIAVNSRRRCGQKKKLVINSGNGAVEDRKPSGLNGEASKSQEMVHLVNKESSETPDQFMTADETRNLQNVDMKIGV

SEQ ID NO: 740 - protein, 691 aa, Homo sapiens
MDKFWWHAAWGLCLVPLSLAQIDLNITCRFAGVFHVEKNGRYSISRTEAADLCKAFNSTLPTMAQMEKALSIGFETCRYGFIEGHVVIPRIHPNSICAANNTGVYILTSNTSQYDTYCFNASAPPEEDCTSVTDLPNAFDGPITITIVNRDGTRYVQKGEYRTNPEDIYPSNPTDDDVSSGSSSERSSTSGGYIFYTFSTVHPIPDEDSPWITDSTDRIPATTLMSTSATATETATKRQETWDWFSWLFLPSESKNHLHTTTQMAAGWEPNEENEDERDRHLSFSGSGIDDDEDFISSTISTTPRAFDHTKQNQDWTQWNPSHSNPEVLLQTTTRMTDVDRNGTTAYEGNWNPEAHPPLIHHEHHEEEETPHSTSTTASAHTSHPMQGRTTPSPEDSSWTDFFNPISHPMGRGHQAGRRMDMDSSHSITLQPTANPNTGLVEDLDRTGPLSMTTQQSNSQSFSTSHEGLEEDKDHPTTSTLTSSNRNDVTGGRRDPNHSEGSTTLLEGYTSHYPHTKESRTFIPVTSAKTGSFGVTAVTVGDSNSNVNRSLSGDQDTFHPSGGSHTTHGSESDGHSHGSQEGGANTTSGPIRTPQIPEWLIILASLLALALILAVCIAVNSRRRCGQKKKLVINSGNGAVEDRKPSGLNGEASKSQEMVHLVNKESSETPDQFMTADETRNLQNVDMKIGV

SEQ ID NO: 741 - protein, 668 aa, Homo sapiens
MDKFWWHAAWGLCLVPLSLAQIDLNITCRFAGVFHVEKNGRYSISRTEAADLCKAFNSTLPTMAQMEKALSIGFETCRYGFIEGHVVIPRIHPNSICAANNTGVYILTSNTSQYDTYCFNASAPPEEDCTSVTDLPNAFDGPITITIVNRDGTRYVQKGEYRTNPEDIYPSNPTDDDVSSGSSSERSSTSGALMSTSATATETATKRQETWDWFSWLFLPSESKNHLHTTTQMAGTSSNTISAGWEPNEENEDERDRHLSFSGSGIDDDEDFISSTISTTPRAFDHTKQNQDWTQWNPSHSNPEVLLQTTTRMTDVDRNGTTAYEGNWNPEAHPPLIHHEHHEEEETPHSTSTTASAHTSHPMQGRTTPSPEDSSWTDFFNPISHPMGRGHQAGRRMDMDSSHSITLQPTANPNTGLVEDLDRTGPLSMTTQQSNSQSFSTSHEGLEEDKDHPTTSTLTSSNRNDVTGGRRDPNHSEGSTTLLEGYTSHYPHTKESRTFIPVTSAKTGSFGVTAVTVGDSNSNVNRSLSGDQDTFHPSGGSHTTHGSESDGHSHGSQEGGANTTSGPIRTPQIPEWLIILASLLALALILAVCIAVNSRRRCGQKKKLVINSGNGAVEDRKPSGLNGEASKSQEMVHLVNKESSETPDQFMTADETRNLQNVDMKIGV

SEQ ID NO: 742 - protein, 139 aa, Homo sapiens
MDKFWWHAAWGLCLVPLSLAQIDLNITCRFAGVFHVEKNGRYSISRTEAADLCKAFNSTLPTMAQMEKALSIGFETCSLHCSQQSKKVWAEEKASDQQWQWSCGGQKAKWTQRRGQQVSGNGAFGEQGVVRNSRPVYDS

SEQ ID NO: 743 - protein, 742 aa, Homo sapiens [sequence omitted]

SEQ ID NO: 744 - protein, 742 aa, Homo sapiens [sequence omitted]

SEQ ID NO: 745 - protein, 361 aa, Homo sapiens
MDKFWWHAAWGLCLVPLSLAQIDLNITCRFAGVFHVEKNGRYSISRTEAADLCKAFNSTLPTMAQMEKALSIGFETCRYGFIEGHVVIPRIHPNSICAANNTGVYILTSNTSQYDTYCFNASAPPEEDCTSVTDLPNAFDGPITITIVNRDGTRYVQKGEYRTNPEDIYPSNPTDDDVSSGSSSERSSTSGGYIFYTFSTVHPIPDEDSPWITDSTDRIPATRDQDTFHPSGGSHTTHGSESDGHSHGSQEGGANTTSGPIRTPQIPEWLIILASLLALALILAVCIAVNSRRRCGQKKKLVINSGNGAVEDRKPSGLNGEASKSQEMVHLVNKESSETPDQFMTADETRNLQNVDMKIGV

SEQ ID NO: 746 - protein, 503 aa, Homo sapiens
MALRAKAEVCVAAPWLSLQRARALGTRAARAPRTVLPFEAMPQHPGNRWLRLLQIWREQGYEHLHLEMHQTFQELGPIFRYNLGGPRMVCVMLPEDVEKLQQVDSLHPCRMILEPWVAYRQHRGHKCGVFLLNGPEWRFNRLRLNPDVLSPKAVQRFLPMVDAVARDFSQALKKKVLQNARGSLTLDVQPSIFHYTIEASNLALFGERLGLVGHSPSSASLNFLHALEVMFKSTVQLMFMPRSLSRWISPKVWKEHFEAWDCIFQYGDNCIQKIYQELAFNRPQHYTGIVAELLLKAELSLEAIKANSMELTAGSVDTTAFPLLMTLFELARNPDVQQILRQESLAAAASISEHPQKATTELPLLRAALKETLRLYPVGLFLERVVSSDLVLQNYHIPAGTLVQVFLYSLGRNAALFPRPERYNPQRWLDIRGSGRNFHHVPFGFGMRQCLGRRLAEAEMLLLLHHVLKHFLVETLTQEDIKMVYSFILRPGTSPLLTFRAIN

SEQ ID NO: 747 - protein, 212 aa, Homo sapiens
MVSRMVSTMLSGLLFWLASGWTPAFAYSPRTPDRVSEADIQRLLHGVMEQLGIARPRVEYPAHQAMNLVGPQSIEGGAHEGLQHLGPFGNIPNIVAELTGDNIPKDFSEDQGYPDPPNPCPVGKTADDGCLENTPDTAEFSREFQLHQHLFDPEHDYPGLGKWNKKLLYEKMKGGERRKRRSVNPYLQGQRLDNVVAKKSVPHFSDEDKDPE

SEQ ID NO: 748 - protein, 211 aa, Homo sapiens
MVSRMVSTMLSGLLFWLASGWTPAFAYSPRTPDRVSEADIQRLLHGVMEQLGIARPRVEYPAHQAMNLVGPQSIEGGAHEGLQHLGPFGNIPNIVAELTGDNIPKDFSEDQGYPDPPNPCPVGKTDDGCLENTPDTAEFSREFQLHQHLFDPEHDYPGLGKWNKKLLYEKMKGGERRKRRSVNPYLQGQRLDNVVAKKSVPHFSDEDKDPE

SEQ ID NO: 749 - protein, 212 aa, Homo sapiens; identical to SEQ ID NO: 747

SEQ ID NO: 750 - protein, 99 aa, Homo sapiens
MAEPSSARRPVPLIESELYFLIARYLSAGPCRRAAQVLVQELEQYQLLPKRLDWEGNEHNRSYEELVSIGHVCSPGFPCTAPRPRPFPSRGPRPVGCKV

SEQ ID NO: 751 - protein, 2320 aa, Homo sapiens [sequence omitted]

SEQ ID NO: 752 - protein, 33 aa, Homo sapiens
MLDKEIPPSISRVTSLLGAGRQSLLRTAKGTLI

SEQ ID NO: 753 - protein, 2269 aa, Homo sapiens [sequence omitted]

SEQ ID NO: 754 - protein, 120 aa, Homo sapiens [sequence omitted]

SEQ ID NO: 755 - protein, 266 aa, Homo sapiens
MPFNGEKQCVGEDQPSDSDSSRFSESMASLSDYECSRQSFASDSSSKSSSPASTSPPRVVTFDEVMATARNLSNLTLAHEIAVNENFQLKQEALPEKSLAGRVKHIVHQAFWDVLDSELNADPPEFEHAIKLFEEIREILLSFLTPGGNRLRNQICEVLDTDLIRQQAEHSAVDIQGLANYVISTMGKLCAPVRDNDIRELKATGNIVEVLRQIFHVLDLMQMDMANFTIMSLRPHLQRQLVEYERTKFQEILEETPRKAEVAGAS

SEQ ID NO: 756 - protein, 272 aa, Homo sapiens
MPFNGEKQCVGEDQPSDSDSSRFSESMASLSDYECSRQSFASDSSSKSSSPASTSPPRVVTFDEVMATARNLSNLTLAHEIAVNENFQLKQEALPEKSLAGRVKHIVHQAFWDVLDSELNADPPEFEHAIKLFEEIREILLSFLTPGGNRLRNQICEVLDTDLIRQQAEHSAVDIQGLANYVISTMGKLCAPVRDNDIRELKATGNIVEVLRQIFHVLDLMQMDMANFTIMSLRPHLQRQLVEYERTKFQEILEETPSEYNIMCIYIEIRLK

SEQ ID NO: 757 - protein, 519 aa, Homo sapiens
MPFNGEKQCVGEDQPSDSDSSRFSESMASLSDYECSRQSFASDSSSKSSSPASTSPPRVVTFDEVMATARNLSNLTLAHEIAVNENFQLKQEALPEKSLAGRVKHIVHQAFWDVLDSELNADPPEFEHAIKLFEEIREILLSFLTPGGNRLRNQICEVLDTDLIRQQAEHSAVDIQGLANYVISTMGKLCAPVRDNDIRELKATGNIVEVLRQIFHVLDLMQMDMANFTIMSLRPHLQRQLVEYERTKFQEILEETPSALDQTTEWIKESVNEELFSLSESALTPGAENTSKPSLSPTLVLNNSYLKLLQWDYQKKELPETLMTDGARLQELTEKLNQLKIIACLSLITNNMVGAITGGLPELASRLTRISAVLLEGMNKETFNLKEVLNSIGIQTCVEVNKTLMERGLPTLNAEIQANLIGQFSSIEEEDNPIWSLIDKRIKLYMRRLLCLPSPQKCMPPMPGGLAVIQQELEALGSQYANIVNLNKQVYGPFYANILRKLLFNEEAMGKVDASPPTN

SEQ ID NO: 758 - protein, 519 aa, Homo sapiens; identical to SEQ ID NO: 757

SEQ ID NO: 759 - protein, 519 aa, Homo sapiens; identical to SEQ ID NO: 757

SEQ ID NO: 760 - protein, 519 aa, Homo sapiens; identical to SEQ ID NO: 757

SEQ ID NO: 761 - protein, 163 aa, Homo sapiens
MGDSGSTRLPWSLGLCGSQVVRQLEQKWKWLKMLIAQPRLCLLQAKPGLQSLLCSPQGPGGRDQGAGGFLGQGSSPLRHQALALEELSPGVGSLEGTGWVQVKPDSLWKGIFYEWMISRLRVGCVLVLSKSLTKTLPSQALKEMRQSPSLQDPLWMFLHLPDF

SEQ ID NO: 762 - protein, 614 aa, Homo sapiens [sequence omitted]

SEQ ID NO: 763 - protein, 580 aa, Homo sapiens
MKCVLVATEGAEVLFYWTDQEFEESLRLKFGQSENEEEELPALEDQLSTLLAPVIISSMTMLEKLSDTYTCFSTENGNFLYVLHLFGECLFIAINGDHTESEGDLRRKLYVLKYLFEVHFGLVTVDGHLIRKELRPPDLAQRVQLWEHFQSLLWTYSRLREQEQCFAVEALERLIHPQLCELCIEALERHVIQAVNTSPERGGEEALHAFLLVHSKLLAFYSSHSASSLRPADLLALILLVQDLYPSESTAEDDIQPSPRRARSSQNIPVQQAWSPHSTGPTGGSSAETETDSFSLPEEYFTPAPSPGDQSSGSTIWLEGGTPPMDALQIAEDTLQTLVPHCPVPSGPRRIFLDANVKESYCPLVPHTMYCLPLWQGINLVLLTRSPSAPLALVLSQLMDGFSMLEKKLKEGPEPGASLRSQPLVGDLRQRMDKFVKNRGAQEIQSTWLEFKAKAFSKSEPGSSWELLQACGKLKRQLCAIYRLNFLTTAPSRGGPHLPQHLQDQVQRLMREKLTDWKDFLLVKSRRNITMLHLPRRLPRLGALHLCGPHHWADGGAFPQLQSKDLVGVGQGAAGCLCQN

SEQ ID NO: 764 - protein, 324 aa, Homo sapiens
MKCVLVATEGAEVLFYWTDQEFEESLRLKFGQSENEEEELPALEDQLSTLLAPVIISSMTMLEKLSDTYTCFSTENGNFLYVLHLFGECLFIAINGDHTESEGDLRRKLYVLKYLFEVHFGLVTVDGHLIRKELRPPDLAQRVQLWEHFQSLLWTYSRLREQEQCFAVEALERLIHPQLCELCIEALERHVIQAVNTSPERGGEEALHAFLLVHSKLLAFYSSHSASSLRPADLLALILLVQDLYPSESTAEDDIQPSPRRARSSQNIPVQQAWSPHSTGPTGGSSAETETDSFSLPEEYFTPAPSPGDQSSGEDRRKAGGNNS

SEQ ID NO: 765 - protein, 701 aa, Homo sapiens [sequence omitted]

SEQ ID NO: 766 - protein, 580 aa, Homo sapiens; identical to SEQ ID NO: 763

SEQ ID NO: 767 - protein, 701 aa, Homo sapiens [sequence omitted]

SEQ ID NO: 768 - protein, 681 aa, Homo sapiens [sequence omitted]

SEQ ID NO: 769 - protein, 144 aa, Homo sapiens
MSSSFLPEPLPAKSLQHGVPLSLDSSLSSLLEKICILPNRGLARTKVPIFLGIQGGSRCLACVETEEGPSLQLEDVNIEELYKGGEEATRFTFFQSSSGSAFRLEAAAWPGWFLCGPAEPQQPVQLTKESEPSARTKFYFEQSW

SEQ ID NO: 770 - protein, 152 aa, Homo sapiens
MCSLPMARYYIIKYADQKALYTRDGQLLVGDPVADNCCAEKICILPNRGLARTKVPIFLGIQGGSRCLACVETEEGPSLQLEDVNIEELYKGGEEATRFTFFQSSSGSAFRLEAAAWPGWFLCGPAEPQQPVQLTKESEPSARTKFYFEQSW

SEQ ID NO: 771 - protein, 587 aa, Homo sapiens [sequence omitted]

SEQ ID NO: 772 - protein, 458 aa, Homo sapiens [sequence omitted]

SEQ ID NO: 773 - protein, 517 aa, Homo sapiens
  misc_feature (517)..(517): Xaa can be any naturally occurring amino acid
MARMGLAGAAGRWWGLALGLTAFFLPGVHSQVVQVNDSMYGFIGTDVVLHCSFANPLPSVKITQVTWQKSTNGSKQNVAIYNPSMGVSVLAPYRERVEFLRPSFTDGTIRLSRLELEDEGVYICEFATFPTGNRESQLNLTVMAKPTNWIEGTQAVLRAKKGQDDKVLVATCTSANGKPPSVVSWETRLKGEAEYQEIRNPNGTVTVISRYRLVPSREAHQQSLACIVNYHMDRFKESLTLNVQYEPEVTIEGFDGNWYLQRMDVKLTCKADANPPATEYHWTTLNGSLPKGVEAQNRTLFFKGPINYSLAGTYICEATNPIGTRSGQVEVNITEFPYTPSPPEHGRRAGPVPTAIIGGVAGSILLVLIVVGGIVVALRRRRHTFKGDYSTKKHVYGNGYSKAGIPQHHPPMAQNLQYPDDSDDEKKAGPLGGSSYEEEEEEEEGGGGGERKVGGPHPKYDEDAKRPYFTVDEAEARQDGYGDRTLGYQYDPEQLDLAENMVSQNDGSFISKKEWYX

SEQ ID NO: 774 - protein, 352 aa, Homo sapiens
MARMGLAGAAGRWWGLALGLTAFFLPGVHSQVVQVNDSMYGFIGTDVVLHCSFANPLPSVKITQVTWQKSTNGSKQNVAIYNPSMGVSVLAPYRERVEFLRPSFTDGTIRLSRLELEDEGVYICEFATFPTGNRESQLNLTVMAKPTNWIEGTQAVLRAKKGQDDKVLVATCTSANGKPPSVVSWETRLKGEAEYQEIRNPNGTVTVISRYRLVPSREAHQQSLACIVNYHMDRFKESLTLNVQYEPEVTIEGFDGNWYLQRMDVKLTCKADANPPATEYHWTTLNGSLPKGVEAQNRTLFFKGPINYSLAGTYICEATNPIGTRSGQVEVNITAFCQLIYPGKGRTRARMF

SEQ ID NO: 775 - protein, 70 aa, Homo sapiens [sequence omitted]

SEQ ID NO: 776 - protein, 76 aa, Homo sapiens [sequence omitted]

SEQ ID NO: 777 - protein, 2490 aa, Homo sapiens
MINRPRWVVPVLPKGELEVLLEAAIDLSKKGLDVKSEACQRFFRDGLTISFTKILTDEAVSGWKFEIHRCIINNTHRLVELCVAKLSQDWFPLLELLAMALNPHCKFHIYNGTRPCESVSSSVQLPEDELFARSPDPRSPKGWLVDLLNKFGTLNGFQILHDRFINGSALNVQIIAALIKPFGQCYEFLTLHTVKKYFLPIIEMVPQFLENLTDEELKKEAKNEAKNDALSMIIKSLKNLASRVPGQEETVKNLEIFRLKMILRLLQISSFNGKMNALNEVNKVISSVSYYTHRHGNPEEEEWLTAERMAEWIQQNNILSIVLRDSLHQPQYVEKLEKILRFVIKEKALTLQDLDNIWAAQAGKHEAIVKNVHDLLAKLAWDFSPEQLDHLFDCFKASWTNASKKQREKLLELIRRLAEDDKDGVMAHKVLNLLWNLAHSDDVPVDIMDLALSAHIKILDYSCSQDRDTQKIQWIDRFIEELRTNDKWVIPALKQIREICSLFGEAPQNLSQTQRSPHVFYRHDLINQLQHNHALVTLVAENLATYMESMRLYARDHEDYDPQTVRLGSRYSHVQEVQERLNFLRFLLKDGQLWLCAPQAKQIWKCLAENAVYLCDREACFKWYSKLMGDEPDLDPDINKDFFESNVLQLDPSLLTENGMKCFERFFKAVNCREGKLVAKRRAYMMDDLELIGLDYLWRVVIQSNDDIASRAIDLLKEIYTNLGPRLQVNQVVIHEDFIQSCFDRLKASYDTLCVLDGDKDSVNCARQEAVRMVRVLTVLREYINECDSDYHEERTILPMSRAFRGKHLSFVVRFPNQGRQVDDLEVWSHTNDTIGSVRRCILNRIKANVAHTKIELFVGGELIDPADDRKLIGQLNLKDKSLITAKLTQISSNMPSSPDSSSDSSTGSPGNHGNHYSDGPNPEVESCLPGVIMSLHPRYISFLWQVADLGSSLNMPPLRDGARVLMKLMPPDSTTIEKLRAICLDHAKLGESSLSPSLDSLFFGPSASQVLYLTEVVYALLMPAGAPLADDSSDFQFHFLKSGGLPLVLSMLTRNNFLPNADMETRRGAYLNALKIAKLLLTAIGYGHVRAVAEACQPGVEGVNPMTQINQVTHDQAVVLQSALQSIPNPSSECMLRNVSVRLAQQISDEASRYMPDICVIRAIQKIIWASGCGSLQLVFSPNEEITKIYEKTNAGNEPDLEDEQVCCEALEVMTLCFALIPTALDALSKEKAWQTFIIDLLLHCHSKTVRQVAQEQFFLMCTRCCMGHRPLLFFITLLFTVLGSTARERAKHSGDYFTLLRHLLNYAYNSNINVPNAEVLLNNEIDWLKRIRDDVKRTGETGIEETILEGHLGVTKELLAFQTSEKKFHIGCEKGGANLIKELIDDFIFPASNVYLQYMRNGELPAEQAIPVCGSPPTINAGFELLVALAVGCVRNLKQIVDSLTEMYYIGTAITTCEALTEWEYLPPVGPRPPKGFVGLKNAGATCYMNSVIQQLYMIPSIRNGILAIEGTGSDVDDDMSGDEKQDNESNVDPRDDVFGYPQQFEDKPALSKTEDRKEYNIGVLRHLQVIFGHLAASRLQYYVPRGFWKQFRLWGEPVNLREQHDALEFFNSLVDSLDEALKALGHPAMLSKVLGGSFADQKICQGCPHRYECEESFTTLNVDIRNHQNLLDSLEQYVKGDLLEGANAYHCEKCNKKETTFVGTTVNIKQVDTVKRLLIKKLPPVLAIQLKRFDYDWERECAIKFNDYFEFPRELDMEPYTVAGVAKLEGDNVNPESQLIQQSEQSESETAGSTKYRLVGVLVHSGQASGGHYYSYIIQRNGGDGERNRWYKFDDGDVTECKMDDDEEMKNQCFGGEYMGEVFDHMMKRMSYRRQKRWWNAYILFYERMDTIDQDDELIRYISELAITTRPHQIIMPSAIERSVRKQNVQFMHNRMQYSMEYFQFMKKLLTCNGVYLNPPPGQDHLLPEAEEITMISIQLAARFLFTTGFHTKKVVRGSASDWYDALCILLRHSKNVRFWFAHNVLFNVSNRFSEYLLECPSAEVRGAFAKLIVFIAHFSLQDGPCPSPFASPGPSSQAYDNLSLSDHLLRAVLNLLRREVSEHGRHLQQYFNLFVMYANLGVAEKTQLLKLSVPATFMLVSLDEGPGPPIKYQYAELGKLYSVVSQLIRCCNVSSRMQSSINGNPPLPNPFGDPNLSQPIMPIQQNVADILFVRTSYVKKIIEDCSNSEETVKLLRFCCWENPQFSSTVLSELLWQVAYSYTYELRPYLDLLLQILLIEDSWQTHRIHNALKGIPDDRDGLFDTIQRSKNHYQKRAYQCIKCMVALFSNCPVAYQILQGNGDLKRKWTWAVEWLGDELERRPYTGNPQYTYNNWSPPVQSNETSNGYFLERSHSARMTLAKACELCPEEEPDDQDAPDEHESPPPEDAPLYPHSPGSQYQQNNHVHGQPYTGPAAHHMNNPQRTGQRAQENYEGSEEVSPPQTKDQ

SEQ ID NO: 778 - protein, 2493 aa, Homo sapiens
MINRPRWVVPVLPKGELEVLLEAAIDLSKKGLDVKSEACQRFFRDGLTISFTKILTDEAVSGWKFEIHRCIINNTHRLVELCVAKLSQDWFPLLELLAMALNPHCKFHIYNGTRPCESVSSSVQLPEDELFARSPDPRSPKGWLVDLLNKFGTLNGFQILHDRFINGSALNVQIIAALIKPFGQCYEFLTLHTVKKYFLPIIEMVPQFLENLTDEELKKEAKNEAKNDALSMIIKSLKNLASRVPGQEETVKNLEIFRLKMILRLLQISSFNGKMNALNEVNKVISSVSYYTHRHGNPEEEEWLTAERMAEWIQQNNILSIVLRDSLHQPQYVEKLEKILRFVIKEKALTLQDLDNIWAAQAGKHEAIVKNVHDLLAKLAWDFSPEQLDHLFDCFKASWTNASKKQREKLLELIRRLAEDDKDGVMAHKVLNLLWNLAHSDDVPVDIMDLALSAHIKILDYSCSQDRDTQKIQWIDRFIEELRTNDKWVIPALKQIREICSLFGEAPQNLSQTQRSPHVFYRHDLINQLQHNHALVTLVAENLATYMESMRLYARDHEDYDPQTVRLGSRYSHVQEVQERLNFLRFLLKDGQLWLCAPQAKQIWKCLAENAVYLCDREACFKWYSKLMGDEPDLDPDINKDFFESNVLQLDPSLLTENGMKCFERFFKAVNCREGKLVAKRRAYMMDDLELIGLDYLWRVVIQSNDDIASRAIDLLKEIYTNLGPRLQVNQVVIHEDFIQSCFDRLKASYDTLCVLDGDKDSVNCARQEAVRMVRVLTVLREYINECDSDYHEERTILPMSRAFRGKHLSFVVRFPNQGRQVDDLEVWSHTNDTIGSVRRCILNRIKANVAHTKIELFVGGELIDPADDRKLIGQLNLKDKSLITAKLTQISSNMPSSPDSSSDSSTGSPGNHGNHYSDGPNPEVESCLPGVIMSLHPRYISFLWQVADLGSSLNMPPLRDGARVLMKLMPPDSTTIEKLRAICLDHAKLGESSLSPSLDSLFFGPSASQVLYLTEVVYALLMPAGAPLADDSSDFQFHFLKSGGLPLVLSMLTRNNFLPNADMETRRGAYLNALKIAKLLLTAIGYGHVRAVAEACQPGVEGVNPMTQINQVTHDQAVVLQSALQSIPNPSSECMLRNVSVRLAQQISDEASRYMPDICVIRAIQKIIWASGCGSLQLVFSPNEEITKIYEKTNAGNEPDLEDEQVCCEALEVMTLCFALIPTALDALSKEKAWQTFIIDLLLHCHSKTVRQVAQEQFFLMCTRCCMGHRPLLFFITLLFTVLGSTARERAKHSGDYFTLLRHLLNYAYNSNINVPNAEVLLNNEIDWLKRIRDDVKRTGETGIEETILEGHLGVTKELLAFQTSEKKFHIGCEKGGANLIKELIDDFIFPASNVYLQYMRNGELPAEQAIPVCGSPPTINAGFELLVALAVGCVRNLKQIVDSLTEMYYIGTAITTCEALTEWEYLPPVGPRPPKGFVGLKNAGATCYMNSVIQQLYMIPSIRNGILAIEGTGSDVDDDMSGDEKQDNESNVDPRDDVFGYPQQFEDKPALSKTEDRKEYNIGVLRHLQVIFGHLAASRLQYYVPRGFWKQFRLWGEPVNLREQHDALEFFNSLVDSLDEALKALGHPAMLSKVLGGSFADQKICQGCPHRYECEESFTTLNVDIRNHQNLLDSLEQYVKGDLLEGANAYHCEKCNKKVDTVKRLLIKKLPPVLAIQLKRFDYDWERECAIKFNDYFEFPRELDMEPYTVAGVAKLEGDNVNPESQLIQQSEQSESETAGSTKYRLVGVLVHSGQASGGHYYSYIIQRNGGDGERNRWYKFDDGDVTECKMDDDEEMKNQCFGGEYMGEVFDHMMKRMSYRRQKRWWNAYILFYERMDTIDQDDELIRYISELAITTRPHQIIMPSAIERSVRKQNVQFMHNRMQYSMEYFQFMKKLLTCNGVYLNPPPGQDHLLPEAEEITMISIQLAARFLFTTGFHTKKVVRGSASDWYDALCILLRHSKNVRFWFAHNVLFNVSNRFSEYLLECPSAEVRGAFAKLIVFIAHFSLQDGPCPSPFASPGPSSQAYDNLSLSDHLLRAVLNLLRREVSEHGRHLQQYFNLFVMYANLGVAEKTQLLKLSVPATFMLVSLDEGPGPPIKYQYAELGKLYSVVSQLIRCCNVSSRMQSSINGNPPLPNPFGDPNLSQPIMPIQQNVADILFVRTSYVKKIIEDCSNSEETVKLLRFCCWENPQFSSTVLSELLWQVAYSYTYELRPYLDLLLQILLIEDSWQTHRIHNALKGIPDDRDGLFDTIQRSKNHYQKRAYQCIKCMVALFSNCPVAYQILQGNGDLKRKWTWAVEWLGDELERRPYTGNPQYTYNNWSPPVQSNETSNGYFLERSHSARMTLAKACELCPEEVKKATSVQQIEMEESKEPDDQDAPDEHESPPPEDAPLYPHSPGSQYQQNNHVHGQPYTGPAAHHMNNPQRTGQRAQENYEGSEEVSPPQTKDQ

SEQ ID NO: 779 - protein, 2477 aa, Homo sapiens
MINRPRWVVPVLPKGELEVLLEAAIDLSKKGLDVKSEACQRFFRDGLTISFTKILTDEAVSGWKFEIHRCIINNTHRLVELCVAKLSQDWFPLLELLAMALNPHCKFHIYNGTRPCESVSSSVQLPEDELFARSPDPRSPKGWLVDLLNKFGTLNGFQILHDRFINGSALNVQIIAALIKPFGQCYEFLTLHTVKKYFLPIIEMVPQFLENLTDEELKKEAKNEAKNDALSMIIKSLKNLASRVPGQEETVKNLEIFRLKMILRLLQISSFNGKMNALNEVNKVISSVSYYTHRHGNPEEEEWLTAERMAEWIQQNNILSIVLRDSLHQPQYVEKLEKILRFVIKEKALTLQDLDNIWAAQAGKHEAIVKNVHDLLAKLAWDFSPEQLDHLFDCFKASWTNASKKQREKLLELIRRLAEDDKDGVMAHKVLNLLWNLAHSDDVPVDIMDLALSAHIKILDYSCSQDRDTQKIQWIDRFIEELRTNDKWVIPALKQIREICSLFGEAPQNLSQTQRSPHVFYRHDLINQLQHNHALVTLVAENLATYMESMRLYARDHEDYDPQTVRLGSRYSHVQEVQERLNFLRFLLKDGQLWLCAPQAKQIWKCLAENAVYLCDREACFKWYSKLMGDEPDLDPDINKDFFESNVLQLDPSLLTENGMKCFERFFKAVNCREGKLVAKRRAYMMDDLELIGLDYLWRVVIQSNDDIASRAIDLLKEIYTNLGPRLQVNQVVIHEDFIQSCFDRLKASYDTLCVLDGDKDSVNCARQEAVRMVRVLTVLREYINECDSDYHEERTILPMSRAFRGKHLSFVVRFPNQGRQVDDLEVWSHTNDTIGSVRRCILNRIKANVAHTKIELFVGGELIDPADDRKLIGQLNLKDKSLITAKLTQISSNMPSSPDSSSDSSTGSPGNHGNHYSDGPNPEVESCLPGVIMSLHPRYISFLWQVADLGSSLNMPPLRDGARVLMKLMPPDSTTIEKLRAICLDHAKLGESSLSPSLDSLFFGPSASQVLYLTEVVYALLMPAGAPLADDSSDFQFHFLKSGGLPLVLSMLTRNNFLPNADMETRRGAYLNALKIAKLLLTAIGYGHVRAVAEACQPGVEGVNPMTQINQVTHDQAVVLQSALQSIPNPSSECMLRNVSVRLAQQISDEASRYMPDICVIRAIQKIIWASGCGSLQLVFSPNEEITKIYEKTNAGNEPDLEDEQVCCEALEVMTLCFALIPTALDALSKEKAWQTFIIDLLLHCHSKTVRQVAQEQFFLMCTRCCMGHRPLLFFITLLFTVLGSTARERAKHSGDYFTLLRHLLNYAYNSNINVPNAEVLLNNEIDWLKRIRDDVKRTGETGIEETILEGHLGVTKELLAFQTSEKKFHIGCEKGGANLIKELIDDFIFPASNVYLQYMRNGELPAEQAIPVCGSPPTINAGFELLVALAVGCVRNLKQIVDSLTEMYYIGTAITTCEALTEWEYLPPVGPRPPKGFVGLKNAGATCYMNSVIQQLYMIPSIRNGILAIEGTGSDVDDDMSGDEKQDNESNVDPRDDVFGYPQQFEDKPALSKTEDRKEYNIGVLRHLQVIFGHLAASRLQYYVPRGFWKQFRLWGEPVNLREQHDALEFFNSLVDSLDEALKALGHPAMLSKVLGGSFADQKICQGCPHRYECEESFTTLNVDIRNHQNLLDSLEQYVKGDLLEGANAYHCEKCNKKVDTVKRLLIKKLPPVLAIQLKRFDYDWERECAIKFNDYFEFPRELDMEPYTVAGVAKLEGDNVNPESQLIQQSEQSESETAGSTKYRLVGVLVHSGQASGGHYYSYIIQRNGGDGERNRWYKFDDGDVTECKMDDDEEMKNQCFGGEYMGEVFDHMMKRMSYRRQKRWWNAYILFYERMDTIDQDDELIRYISELAITTRPHQIIMPSAIERSVRKQNVQFMHNRMQYSMEYFQFMKKLLTCNGVYLNPPPGQDHLLPEAEEITMISIQLAARFLFTTGFHTKKVVRGSASDWYDALCILLRHSKNVRFWFAHNVLFNVSNRFSEYLLECPSAEVRGAFAKLIVFIAHFSLQDGPCPSPFASPGPSSQAYDNLSLSDHLLRAVLNLLRREVSEHGRHLQQYFNLFVMYANLGVAEKTQLLKLSVPATFMLVSLDEGPGPPIKYQYAELGKLYSVVSQLIRCCNVSSRMQSSINGNPPLPNPFGDPNLSQPIMPIQQNVADILFVRTSYVKKIIEDCSNSEETVKLLRFCCWENPQFSSTVLSELLWQVAYSYTYELRPYLDLLLQILLIEDSWQTHRIHNALKGIPDDRDGLFDTIQRSKNHYQKRAYQCIKCMVALFSNCPVAYQILQGNGDLKRKWTWAVEWLGDELERRPYTGNPQYTYNNWSPPVQSNETSNGYFLERSHSARMTLAKACELCPEEEPDDQDAPDEHESPPPEDAPLYPHSPGSQYQQNNHVHGQPYTGPAAHHMNNPQRTGQRAQENYEGSEEVSPPQTKDQ

SEQ ID NO: 780 - protein, 2379 aa, Homo sapiens
MALNPHCKFHIYNGTRPCESVSSSVQLPEDELFARSPDPRSPKGWLVDLLNKFGTLNGFQILHDRFINGSALNVQIIAALIKPFGQCYEFLTLHTVKKYFLPIIEMVPQFLENLTDEELKKEAKNEAKNDALSMIIKSLKNLASRVPGQEETVKNLEIFRLKMILRLLQISSFNGKMNALNEVNKVISSVSYYTHRHGNPEEEEWLTAERMAEWIQQNNILSIVLRDSLHQPQYVEKLEKILRFVIKEKALTLQDLDNIWAAQAGKHEAIVKNVHDLLAKLAWDFSPEQLDHLFDCFKASWTNASKKQREKLLELIRRLAEDDKDGVMAHKVLNLLWNLAHSDDVPVDIMDLALSAHIKILDYSCSQDRDTQKIQWIDRFIEELRTNDKWVIPALKQIREICSLFGEAPQNLSQTQRSPHVFYRHDLINQLQHNHALVTLVAENLATYMESMRLYARDHEDYDPQTVRLGSRYSHVQEVQERLNFLRFLLKDGQLWLCAPQAKQIWKCLAENAVYLCDREACFKWYSKLMGDEPDLDPDINKDFFESNVLQLDPSLLTENGMKCFERFFKAVNCREGKLVAKRRAYMMDDLELIGLDYLWRVVIQSNDDIASRAIDLLKEIYTNLGPRLQVNQVVIHEDFIQSCFDRLKASYDTLCVLDGDKDSVNCARQEAVRMVRVLTVLREYINECDSDYHEERTILPMSRAFRGKHLSFVVRFPNQGRQVDDLEVWSHTNDTIGSVRRCILNRIKANVAHTKIELFVGGELIDPADDRKLIGQLNLKDKSLITAKLTQISSNMPSSPDSSSDSSTGSPGNHGNHYSDGPNPEVESCLPGVIMSLHPRYISFLWQVADLGSSLNMPPLRDGARVLMKLMPPDSTTIEKLRAICLDHAKLGESSLSPSLDSLFFGPSASQVLYLTEVVYALLMPAGAPLADDSSDFQFHFLKSGGLPLVLSMLTRNNFLPNADMETRRGAYLNALKIAKLLLTAIGYGHVRAVAEACQPGVEGVNPMTQINQVTHDQAVVLQSALQSIPNPSSECMLRNVSVRLAQQISDEASRYMPDICVIRAIQKIIWASGCGSLQLVFSPNEEITKIYEKTNAGNEPDLEDEQVCCEALEVMTLCFALIPTALDALSKEKAWQTFIIDLLLHCHSKTVRQVAQEQFFLMCTRCCMGHRPLLFFITLLFTVLGSTARERAKHSGDYFTLLRHLLNYAYNSNINVPNAEVLLNNEIDWLKRIRDDVKRTGETGIEETILEGHLGVTKELLAFQTSEKKFHIGCEKGGANLIKELIDDFIFPASNVYLQYMRNGELPAEQAIPVCGSPPTINAGFELLVALAVGCVRNLKQIVDSLTEMYYIGTAITTCEALTEWEYLPPVGPRPPKGFVGLKNAGATCYMNSVIQQLYMIPSIRNGILAIEGTGSDVDDDMSGDEKQDNESNVDPRDDVFGYPQQFEDKPALSKTEDRKEYNIGVLRHLQVIFGHLAASRLQYYVPRGFWKQFRLWGEPVNLREQHDALEFFNSLVDSLDEALKALGHPAMLSKVLGGSFADQKICQGCPHRYECEESFTTLNVDIRNHQNLLDSLEQYVKGDLLEGANAYHCEKCNKKVDTVKRLLIKKLPPVLAIQLKRFDYDWERECAIKFNDYFEFPRELDMEPYTVAGVAKLEGDNVNPESQLIQQSEQSESETAGSTKYRLVGVLVHSGQASGGHYYSYIIQRNGGDGERNRWYKFDDGDVTECKMDDDEEMKNQCFGGEYMGEVFDHMMKRMSYRRQKRWWNAYILFYERMDTIDQDDELIRYISELAITTRPHQIIMPSAIERSVRKQNVQFMHNRMQYSMEYFQFMKKLLTCNGVYLNPPPGQDHLLPEAEEITMISIQLAARFLFTTGFHTKKVVRGSASDWYDALCILLRHSKNVRFWFAHNVLFNVSNRFSEYLLECPSAEVRGAFAKLIVFIAHFSLQDGPCPSPFASPGPSSQAYDNLSLSDHLLRAVLNLLRREVSEHGRHLQQYFNLFVMYANLGVAEKTQLLKLSVPATFMLVSLDEGPGPPIKYQYAELGKLYSVVSQLIRCCNVSSRMQSSINGNPPLPNPFGDPNLSQPIMPIQQNVADILFVRTSYVKKIIEDCSNSEETVKLLRFCCWENPQFSSTVLSELLWQVAYSYTYELRPYLDLLLQILLIEDSWQTHRIHNALKGIPDDRDGLFDTIQRSKNHYQKRAYQCIKCMVALFSNCPVAYQILQGNGDLKRKWTWAVEWLGDELERRPYTGNPQYTYNNWSPPVQSNETSNGYFLERSHSARMTLAKACELCPEEEPDDQDAPDEHESPPPEDAPLYPHSPGSQYQQNNHVHGQPYTGPAAHHMNNPQRTGQRAQENYEGSEEVSPPQTKDQ

SEQ ID NO: 781 - protein, 2395 aa, Homo sapiens
MALNPHCKFHIYNGTRPCESVSSSVQLPEDELFARSPDPRSPKGWLVDLLNKFGTLNGFQILHDRFINGSALNVQIIAALIKPFGQCYEFLTLHTVKKYFLPIIEMVPQFLENLTDEELKKEAKNEAKNDALSMIIKSLKNLASRVPGQEETVKNLEIFRLKMILRLLQISSFNGKMNALNEVNKVISSVSYYTHRHGNPEEEEWLTAERMAEWIQQNNILSIVLRDSLHQPQYVEKLEKILRFVIKEKALTLQDLDNIWAAQAGKHEAIVKNVHDLLAKLAWDFSPEQLDHLFDCFKASWTNASKKQREKLLELIRRLAEDDKDGVMAHKVLNLLWNLAHSDDVPVDIMDLALSAHIKILDYSCSQDRDTQKIQWIDRFIEELRTNDKWVIPALKQIREICSLFGEAPQNLSQTQRSPHVFYRHDLINQLQHNHALVTLVAENLATYMESMRLYARDHEDYDPQTVRLGSRYSHVQEVQERLNFLRFLLKDGQLWLCAPQAKQIWKCLAENAVYLCDREACFKWYSKLMGDEPDLDPDINKDFFESNVLQLDPSLLTENGMKCFERFFKAVNCREGKLVAKRRAYMMDDLELIGLDYLWRVVIQSNDDIASRAIDLLKEIYTNLGPRLQVNQVVIHEDFIQSCFDRLKASYDTLCVLDGDKDSVNCARQEAVRMVRVLTVLREYINECDSDYHEERTILPMSRAFRGKHLSFVVRFPNQGRQVDDLEVWSHTNDTIGSVRRCILNRIKANVAHTKIELFVGGELIDPADDRKLIGQLNLKDKSLITAKLTQISSNMPSSPDSSSDSSTGSPGNHGNHYSDGPNPEVESCLPGVIMSLHPRYISFLWQVADLGSSLNMPPLRDGARVLMKLMPPDSTTIEKLRAICLDHAKLGESSLSPSLDSLFFGPSASQVLYLTEVVYALLMPAGAPLADDSSDFQFHFLKSGGLPLVLSMLTRNNFLPNADMETRRGAYLNALKIAKLLLTAIGYGHVRAVAEACQPGVEGVNPMTQINQVTHDQAVVLQSALQSIPNPSSECMLRNVSVRLAQQISDEASRYMPDICVIRAIQKIIWASGCGSLQLVFSPNEEITKIYEKTNAGNEPDLEDEQVCCEALEVMTLCFALIPTALDALSKEKAWQTFIIDLLLHCHSKTVRQVAQEQFFLMCTRCCMGHRPLLFFITLLFTVLGSTARERAKHSGDYFTLLRHLLNYAYNSNINVPNAEVLLNNEIDWLKRIRDDVKRTGETGIEETILEGHLGVTKELLAFQTSEKKFHIGCEKGGANLIKELIDDFIFPASNVYLQYMRNGELPAEQAIPVCGSPPTINAGFELLVALAVGCVRNLKQIVDSLTEMYYIGTAITTCEALTEWEYLPPVGPRPPKGFVGLKNAGATCYMNSVIQQLYMIPSIRNGILAIEGTGSDVDDDMSGDEKQDNESNVDPRDDVFGYPQQFEDKPALSKTEDRKEYNIGVLRHLQVIFGHLAASRLQYYVPRGFWKQFRLWGEPVNLREQHDALEFFNSLVDSLDEALKALGHPAMLSKVLGGSFADQKICQGCPHRYECEESFTTLNVDIRNHQNLLDSLEQYVKGDLLEGANAYHCEKCNKKVDTVKRLLIKKLPPVLAIQLKRFDYDWERECAIKFNDYFEFPRELDMEPYTVAGVAKLEGDNVNPESQLIQQSEQSESETAGSTKYRLVGVLVHSGQASGGHYYSYIIQRNGGDGERNRWYKFDDGDVTECKMDDDEEMKNQCFGGEYMGEVFDHMMKRMSYRRQKRWWNAYILFYERMDTIDQDDELIRYISELAITTRPHQIIMPSAIERSVRKQNVQFMHNRMQYSMEYFQFMKKLLTCNGVYLNPPPGQDHLLPEAEEITMISIQLAARFLFTTGFHTKKVVRGSASDWYDALCILLRHSKNVRFWFAHNVLFNVSNRFSEYLLECPSAEVRGAFAKLIVFIAHFSLQDGPCPSPFASPGPSSQAYDNLSLSDHLLRAVLNLLRREVSEHGRHLQQYFNLFVMYANLGVAEKTQLLKLSVPATFMLVSLDEGPGPPIKYQYAELGKLYSVVSQLIRCCNVSSRMQSSINGNPPLPNPFGDPNLSQPIMPIQQNVADILFVRTSYVKKIIEDCSNSEETVKLLRFCCWENPQFSSTVLSELLWQVAYSYTYELRPYLDLLLQILLIEDSWQTHRIHNALKGIPDDRDGLFDTIQRSKNHYQKRAYQCIKCMVALFSNCPVAYQILQGNGDLKRKWTWAVEWLGDELERRPYTGNPQYTYNNWSPPVQSNETSNGYFLERSHSARMTLAKACELCPEEVKKATSVQQIEMEESKEPDDQDAPDEHESPPPEDAPLYPHSPGSQYQQNNHVHGQPYTGPAAHHMNNPQRTGQRAQENYEGSEEVSPPQTKDQ

SEQ ID NO: 782 - protein, 2554 aa, Homo sapiens
MTATTRGSPVGGNDNQGQAPDGQSQPPLQQNQTSSPDSSNENSPATPPDEQGQGDAPPQLEDEEPAFPHTDLAKLDDMINRPRWVVPVLPKGELEVLLEAAIDLSKKGLDVKSEACQRFFRDGLTISFTKILTDEAVSGWKFEIHRCIINNTHRLVELCVAKLSQDWFPLLELLAMALNPHCKFHIYNGTRPCESVSSSVQLPEDELFARSPDPRSPKGWLVDLLNKFGTLNGFQILHDRFINGSALNVQIIAALIKPFGQCYEFLTLHTVKKYFLPIIEMVPQFLENLTDEELKKEAKNEAKNDALSMIIKSLKNLASRVPGQEETVKNLEIFRLKMILRLLQISSFNGKMNALNEVNKVISSVSYYTHRHGNPEEEEWLTAERMAEWIQQNNILSIVLRDSLHQPQYVEKLEKILRFVIKEKALTLQDLDNIWAAQAGKHEAIVKNVHDLLAKLAWDFSPEQLDHLFDCFKASWTNASKKQREKLLELIRRLAEDDKDGVMAHKVLNLLWNLAHSDDVPVDIMDLALSAHIKILDYSCSQDRDTQKIQWIDRFIEELRTNDKWVIPALKQIREICSLFGEAPQNLSQTQRSPHVFYRHDLINQLQHNHALVTLVAENLATYMESMRLYARDHEDYDPQTVRLGSRYSHVQEVQERLNFLRFLLKDGQLWLCAPQAKQIWKCLAENAVYLCDREACFKWYSKLMGDEPDLDPDINKDFFESNVLQLDPSLLTENGMKCFERFFKAVNCREGKLVAKRRAYMMDDLELIGLDYLWRVVIQSNDDIASRAIDLLKEIYTNLGPRLQVNQVVIHEDFIQSCFDRLKASYDTLCVLDGDKDSVNCARQEAVRMVRVLTVLREYINECDSDYHEERTILPMSRAFRGKHLSFVVRFPNQGRQVDDLEVWSHTNDTIGSVRRCILNRIKANVAHTKIELFVGGELIDPADDRKLIGQLNLKDKSLITAKLTQISSNMPSSPDSSSDSSTGSPGNHGNHYSDGPNPEVESCLPGVIMSLHPRYISFLWQVADLGSSLNMPPLRDGARVLMKLMPPDSTTIEKLRAICLDHAKLGESSLSPSLDSLFFGPSASQVLYLTEVVYALLMPAGAPLADDSSDFQFHFLKSGGLPLVLSMLTRNNFLPNADMETRRGAYLNALKIAKLLLTAIGYGHVRAVAEACQPGVEGVNPMTQINQVTHDQAVVLQSALQSIPNPSSECMLRNVSVRLAQQISDEASRYMPDICVIRAIQKIIWASGCGSLQLVFSPNEEITKIYEKTNAGNEPDLEDEQVCCEALEVMTLCFALIPTALDALSKEKAWQTFIIDLLLHCHSKTVRQVAQEQFFLMCTRCCMGHRPLLFFITLLFTVLGSTARERAKHSGDYFTLLRHLLNYAYNSNINVPNAEVLLNNEIDWLKRIRDDVKRTGETGIEETILEGHLGVTKELLAFQTSEKKFHIGCEKGGANLIKELIDDFIFPASNVYLQYMRNGELPAEQAIPVCGSPPTINAGFELLVALAVGCVRNLKQIVDSLTEMYYIGTAITTCEALTEWEYLPPVGPRPPKGFVGLKNAGATCYMNSVIQQLYMIPSIRNGILAIEGTGSDVDDDMSGDEKQDNESNVDPRDDVFGYPQQFEDKPALSKTEDRKEYNIGVLRHLQVIFGHLAASRLQYYVPRGFWKQFRLWGEPVNLREQHDALEFFNSLVDSLDEALKALGHPAMLSKVLGGSFADQKICQGCPHRYECEESFTTLNVDIRNHQNLLDSLEQYVKGDLLEGANAYHCEKCNKKVDTVKRLLIKKLPPVLAIQLKRFDYDWERECAIKFNDYFEFPRELDMEPYTVAGVAKLEGDNVNPESQLIQQSEQSESETAGSTKYRLVGVLVHSGQASGGHYYSYIIQRNGGDGERNRWYKFDDGDVTECKMDDDEEMKNQCFGGEYMGEVFDHMMKRMSYRRQKRWWNAYILFYERMDTIDQDDELIRYISELAITTRPHQIIMPSAIERSVRKQNVQFMHNRMQYSMEYFQFMKKLLTCNGVYLNPPPGQDHLLPEAEEITMISIQLAARFLFTTGFHTKKVVRGSASDWYDALCILLRHSKNVRFWFAHNVLFNVSNRFSEYLLECPSAEVRGAFAKLIVFIAHFSLQDGPCPSPFASPGPSSQAYDNLSLSDHLLRAVLNLLRREVSEHGRHLQQYFNLFVMYANLGVAEKTQLLKLSVPATFMLVSLDEGPGPPIKYQYAELGKLYSVVSQLIRCCNVSSRMQSSINGNPPLPNPFGDPNLSQPIMPIQQNVADILFVRTSYVKKIIEDCSNSEETVKLLRFCCWENPQFSSTVLSELLWQVAYSYTYELRPYLDLLLQILLIEDSWQTHRIHNALKGIPDDRDGLFDTIQRSKNHYQKRAYQCIKCMVALFSNCPVAYQILQGNGDLKRKWTWAVEWLGDELERRPYTGNPQYTYNNWSPPVQSNETSNGYFLERSHSARMTLAKACELCPEEEPDDQDAPDEHESPPPEDAPLYPHSPGSQYQQNNHVHGQPYTGPAAHHMNNPQRTGQRAQENYEGSEEVSPPQTKDQ

SEQ ID NO: 783 - protein, 2379 aa, Homo sapiens; identical to SEQ ID NO: 780

SEQ ID NO: 784 - protein, 133 aa, Homo sapiens [sequence omitted]

SEQ ID NO: 785 - protein, 97 aa, Homo sapiens
MVDAFLGTWKLVDSKNFDDYMKSLGVGFATRQVASMTKPTTIIEKNGDILTLKTHSTFKNTEISFKLGVEFDETTADDRKVKVSQGNRGGEWRVLRL

SEQ ID NO: 786 - protein, 54 aa, Homo sapiens
MEEVVLVLYLHVTTKFRFLGLMLGDCDSDLGWGSGTCILTMEVLMWSLAGCSNV

SEQ ID NO: 787 - protein, 950 aa, Homo sapiens [sequence omitted]

SEQ ID NO: 788 - protein, 963 aa, Homo sapiens [sequence omitted]

SEQ ID NO: 789 - protein, 814 aa, Homo sapiens [sequence omitted]

SEQ ID NO: 790 - protein, 950 aa, Homo sapiens
MLSSWQGGPRPRQLLLWLLILAAWETGSGQLHYSVPEEAKHGTFVGRIAQDLGLELAELVPRLFRVASKRHGDLLEVNLQNGILFVNSRIDREELCGRSAECSIHLEVIVDRPLQVFHVEVKVRDINDNPPIFPESKKRIIIAESRPPETRFPLDGASDADIGVNSALTYRLDPNDYFTLDAQNSLEQMSSLSLVLRKTLDREEIQEHSLLLTASDGGKPELTGTVQLLITILDVNDNAPEFYQSVYKVTVLENAFNGTLVIKLNATDPDDGTNGDIVYSFRRPVWPAVVYAFTINPNNGEIRTKGKLDFEEKKLYEISVEAVDKGNIPMAGHCTLLVEVLDVNDNAPEVTITSLSLPIREDTQPSAIIALISVSDRDSGSNGQVTCTLTPHVPFKLVSTYKNYYSLVLDSALDRESVSAYELVVTARDGGSPSLWATASVSVGVADVNDNAPAFAQPEYTVFVKENNPPGCHIFTVSAQDADAQENALVSYSLVERRVGERALSSYVSVHAESGKVYALQPLDHEELELLQFQVSARDSGVPPLGSNVTLQVFVLDENDNAPALLTPGAGSAGGTVSELMPRSVGAGHVVAKVRAVDADSGYNAWLSYELQLAAVGARIPFRVGLYTGEISTTRPLDEVDAPHHRLLVLVKDHGEPALTATATVLLSLVESGQAPQASSRASAGAVGPEAALVDVNVYLIIAICAVSSLLVLTLLLYTALRCSAPPTEGACAPGKPTLVCSSAAGSWSYSQQRRPRVCSGEGPHKTDLMAFSPSLPPCLGSAEGTGQREEDSECLKEPRQPNPDWRYSASLRAGMHSSVHLEEAGILRAGPGGPDQQWPTVSSATPEPEAGEVSPPVGAGVNSNSWTFKYGPGNPKQSGPGELPDKFIIPGSPAIISIRQEPTNSQIDKSDFITFGKKEETKKKKKKKKGNKTQEKKEKGNSTTDNSDQ

SEQ ID NO: 791 - protein, 1007 aa, Homo sapiens
MEQAGTRPAATEHPRLRRPMPWLLLLPLLLLLLLLLPGPAASQLRYSVPEEQAPGALVGNVARALGLELRRLGPGCLRINHLGAPSPRYLELDLTSGALFVNERIDREALCEQRPRCLLSLEVLAHNPVAVSAVEVEILDINDNSPRFPRPNYQLQVSESVAPGARFHIESAQDPDVGANSVQTYELSPSEHFELDLKPLQENSKVLELVLRKGLDREQAALHHLVLTAVDGGIPARSGTAQISVRVLDTNDNSPAFDQSTYRVQLREDSPPGTLVVKLNASDPDEGSNGELRYSLSSYTSDRERQLFSIDASTGEVRVIGGLDYEEASSYQIYVQATDRGPVPMAGHCKVLVDIVDVNDNAPEVVLTDLYSPVPENATPNTIVAVLSVNDQDSGPNRKVSLGLEATLPFRLNGFGNSYTLVVSGPLDRERVAVYNITVTATDGGIPQLTSLRTLKVEISDINDNPPSFLEDSYSIYIQENNLPGVLLCTVQATDPDEKENAEVTYSLLEREIQGLPVTSYVSINSASGSLYAVNSFDYEKFREFFVTVEAQDKGSPPLSSTVTANVYVVDMNDHAPHILYPTSTNSSAAFEMVPRTAPAGYLVTKVIAMDSDSGQNAWLFYHLAQTSDLDLFKVELHTGEIRTTRKMGDESGSTFNLTVVVRDNGEPSLSASVAITVAVVDRVSKILPDTQRHVKSPRTYSEITLYLIIALSTVSFIFLLTIIILSIIKCYRYTAYGTACCGGFCGVRERSPAELYKQANNNIDARIPHGLKVQPHFIEVRGNGSLTKTYCYKACLTAGSGSDTFMFYNTGAQTGPGPSGAQAAVTDSRNLTGQSGQNAGNLIILKNEAVSQNEPRQPNPDWRYSASLRAGMHSSVHLEEAGILRAGPGGPDQQWPTVSSATPEPEAGEVSPPVGAGVNSNSWTFKYGPGNPKQSGPGELPDKFIIPGSPAIISIRQEPTNSQIDKSDFITFGKKEETKKKKKKKKGNKTQEKKEKGNSTTDNSDQ

SEQ ID NO: 792 - protein, 959 aa, Homo sapiens
MEIKPEVFDMVFTPEDRLGKQCLLLPLLLLAAWKVGSGQLHYSVPEEAKHGTFVGRIAQDLGLELAELVPRLFRMASKDREDLLEVNLQNGILFVNSRIDREELCGRSAECSIHLEVIVDRPLQVFHVDVEVRDINDNPPLFPVEEQRVLIYESRLPDSVFPLEGASDADVGSNSILTYKLSSSEYFGLDVKINSDDNKQIGLLLKKSLDREEAPAHNLFLTATDGGKPELTGTVQLLVTVLDVNDNAPTFEQSEYEVRIFENADNGTTVIRLNASDRDEGANGAISYSFNSLVAAMVIDHFSIDRNTGEIVIRGNLDFEQENLYKILIDATDKGHPPMAGHCTVLVRILDKNDNVPEIALTSLSLPVREDAQFGTVIALISVNDLDSGANGQVNCSLTPHVPFKLVSTFKNYYSLVLDSALDRESVSAYELVVTARDGGSPSLWATASLSVEVADMNDNAPAFAQPEYTVFVKENNPPGCHIFTVSARDADAQENALVSYSLVERRVGERALSSYISVHAESGKVYALQPLDHEELELLQFQVSARDAGVPPLGSNVTLQVFVLDENDNAPALLAPRVGGTGGAVSELVPRSLGAGQVVAKVRAVDADSGYNAWLSYELQPPASSARFPFRVGLYTGEISTTRVLDEADSPRHRLLVLVKDHGEPALTATATVLVSLVESGQAPKASSRASVGAAGPEAALVDVNVYLIIAICAVSSLLVLTLLLYTALRCSAPPTEGACTADKPTLVCSSAVGSWSYSQQRRQRVCSGEGPPKMDLMAFSPSLSPCPIMMGKAENQDLNEDHDAKPRQPNPDWRYSASLRAGMHSSVHLEEAGILRAGPGGPDQQWPTVSSATPEPEAGEVSPPVGAGVNSNSWTFKYGPGNPKQSGPGELPDKFIIPGSPAIISIRQEPTNSQIDKSDFITFGKKEETKKKKKKKKGNKTQEKKEKGNSTTDNSDQ

SEQ ID NO: 793 - protein, 844 aa, Homo sapiens [sequence omitted]

SEQ ID NO: 794 - protein, 842 aa, Homo sapiens [sequence omitted]

SEQ ID NO: 795 - protein, 789 aa, Homo sapiens [sequence omitted]

SEQ ID NO: 796 - protein, 812 aa, Homo sapiens
MEIKPEVFDMVFTPEDRLGKQCLLLPLLLLAAWKVGSGQLHYSVPEEAKHGTFVGRIAQDLGLELAELVPRLFRMASKDREDLLEVNLQNGILFVNSRIDREELCGRSAECSIHLEVIVDRPLQVFHVDVEVRDINDNPPLFPVEEQRVLIYESRLPDSVFPLEGASDADVGSNSILTYKLSSSEYFGLDVKINSDDNKQIGLLLKKSLDREEAPAHNLFLTATDGGKPELTGTVQLLVTVLDVNDNAPTFEQSEYEVRIFENADNGTTVIRLNASDRDEGANGAISYSFNSLVAAMVIDHFSIDRNTGEIVIRGNLDFEQENLYKILIDATDKGHPPMAGHCTVLVRILDKNDNVPEIALTSLSLPVREDAQFGTVIALISVNDLDSGANGQVNCSLTPHVPFKLVSTFKNYYSLVLDSALDRESVSAYELVVTARDGGSPSLWATASLSVEVADMNDNAPAFAQPEYTVFVKENNPPGCHIFTVSARDADAQENALVSYSLVERRVGERALSSYISVHAESGKVYALQPLDHEELELLQFQVSARDAGVPPLGSNVTLQVFVLDENDNAPALLAPRVGGTGGAVSELVPRSLGAGQVVAKVRAVDADSGYNAWLSYELQPPASSARFPFRVGLYTGEISTTRVLDEADSPRHRLLVLVKDHGEPALTATATVLVSLVESGQAPKASSRASVGAAGPEAALVDVNVYLIIAICAVSSLLVLTLLLYTALRCSAPPTEGACTADKPTLVCSSAVGSWSYSQQRRQRVCSGEGPPKMDLMAFSPSLSPCPIMMGKAENQDLNEDHDAKVSEFS

SEQ ID NO: 797 - protein, 950 aa, Homo sapiens [sequence omitted]

SEQ ID NO: 798 - protein, 816 aa, Homo sapiens [sequence omitted]

SEQ ID NO: 799 - protein, 798 aa, Homo sapiens [sequence omitted]

SEQ ID NO: 800 - protein, 810 aa, Homo sapiens
MFGFQRRGLGTPRLQLWLLLLEFWEVGSGQLHYSVSEEAKHGTFVGRIAQDLGLELAELVQRLFRVASKTHGDLLEVNLQNGILFVNSRIDREELCGQSAECSIHLEVIVDRPLQVFHVNVEVKDINDNPPVFSLREQKLLIAESKQSDSRFPLEGASDADIEENALLTYRLSKNEYFSLDSPTNGKQIKRLSLILKKSLDREKTPELNLLLTATDGGKPELTGTVRLLVQVLDVNDNDPEFDKSEYKVSLMENAAKETLVLKLNATDRDEGVNGEVTYSLMSIKPNGRHLFTLDQNNGEVRVNGTLDYEENKFYKIEVQATDKGTPPMAGHCTVWVEILDTNDNSPEVAVTSLSLPVREDAQPSTVIALISVSDRDSGVNGQVTCSLTPHVPFKLVSTFKNYYSLVLDSALDRENVWAYELVVTARDGGSPSLWATARVSVEVADVNDNAPAFAQPEYTVFVKENNPPGCHIFTVSARDADAQENALVSYSLVERRLGDRALSSYVSVHAESGKVYALQPLDHEELELLQFQVSARDAGVPPLSSNVTLQVFVLDENDNAPALLATQAGSAGGAVNKLVPRSVGAGHVVAKVRAVDADSGYNAWLSYELQPAAGGSRIPFRVGLYTGEISTTRALDEADSPRHRLLVLVKDHGEPALTATATVLVSLVESGQAPKASSRTLAGAASPEAALVDVNVYLIIAICVVSSLLVLTLLLYTALWWSATPTEGACAPGKPTLVCSRAVGSWSYSQQRRQRVCSEEGPPKTDLMAFSPSLPLGLNKEEEGERQEPGSNHPGQVSFLQIPPIRKCM

SEQ ID NO: 801 - protein, 824 aa, Homo sapiens [sequence omitted]

SEQ ID NO: 802 - protein, 824 aa, Homo sapiens
MYLQKRVTAHKIPQASDPLKLIVPTQRPSFSAMVIIGPRGPGSQRLLLSLLLLAAWEVGSGQLHYSVYEEAKHGTFVGRIAQDLGLELAELVPRLFRVASKRHGDLLEVNLQNGILFVNSRIDREKLCGRSAECSIHLEVIVDRPLQVFHVDVEVKDINDNPPVFREREQKVPVSESAPLDSHFPLEGASDADIGVNSLLTYALSLNENFELKIKTKKDKSILPELVLRKLLDREQTPKLNLLLMVIDGGKPELTGSVQIQITVLDVNDNGPAFDKPSYKVVLSENVQNDTRVIQLNASDPDEGLNGEISYGIKMILPVSEKCMFSINPDTGEIRIYGELDFEENNAYEIQVNAIDKGIPSMAGHSMVLVEVLDVNDNVPEVMVTSLSLPVQEDAQVGTVIALISVSDRDSGANGQVICSLTPHVPFKLVSTYKNYYSLVLDSALDRESVSAYELVVTARDGGSPSLWATARVSVEVADVNDNAPAFAQPEYTVFVKENNPPGCHIFTVSAWDADAQKNALVSYSLVERRVGEHALSSYVSVHAESGKVYALQPLDHEELELLQFQVSARDAGVPPLGSNVTLQVFVLDENDNAPALLATPAGSAGGAVSELVPRSVGAGHVVAKVRAVDADSGYNAWLSYELQPAAVGAHIPFHVGLYTGEISTTRILDEADAPRHRLLVLVKDHGEPALTSTATVLVSLVENGQAPKTSSRASVGAVDPEAALVDINVYLIIAICAVSSLLVLTLLLYTALRCSAPPTVSRCAPGKPTLVCSSAVGSWSYSQQRRQRVCSAESPPKTDLMAFSPSLQLSREDCLNPPSEVSY

SEQ ID NO: 803 - protein, 824 aa, Homo sapiens [sequence omitted]

SEQ ID NO: 804 - protein, 807 aa, Homo sapiens
MLSSWQGGPRPRQLLLWLLILAAWETGSGQLHYSVPEEAKHGTFVGRIAQDLGLELAELVPRLFRVASKRHGDLLEVNLQNGILFVNSRIDREELCGRSAECSIHLEVIVDRPLQVFHVEVKVRDINDNPPIFPESKKRIIIAESRPPETRFPLDGASDADIGVNSALTYRLDPNDYFTLDAQNSLEQMSSLSLVLRKTLDREEIQEHSLLLTASDGGKPELTGTVQLLITILDVNDNAPEFYQSVYKVTVLENAFNGTLVIKLNATDPDDGTNGDIVYSFRRPVWPAVVYAFTINPNNGEIRTKGKLDFEEKKLYEISVEAVDKGNIPMAGHCTLLVEVLDVNDNAPEVTITSLSLPIREDTQPSAIIALISVSDRDSGSNGQVTCTLTPHVPFKLVSTYKNYYSLVLDSALDRESVSAYELVVTARDGGSPSLWATASVSVGVADVNDNAPAFAQPEYTVFVKENNPPGCHIFTVSAQDADAQENALVSYSLVERRVGERALSSYVSVHAESGKVYALQPLDHEELELLQFQVSARDSGVPPLGSNVTLQVFVLDENDNAPALLTPGAGSAGGTVSELMPRSVGAGHVVAKVRAVDADSGYNAWLSYELQLAAVGARIPFRVGLYTGEISTTRPLDEVDAPHHRLLVLVKDHGEPALTATATVLLSLVESGQAPQASSRASAGAVGPEAALVDVNVYLIIAICAVSSLLVLTLLLYTALRCSAPPTEGACAPGKPTLVCSSAAGSWSYSQQRRPRVCSGEGPHKTDLMAFSPSLPPCLGSAEGTGQREEDSECLKEVSLYFKKLS

SEQ ID NO: 805 - protein, 818 aa, Homo sapiens
MVGCGVAVLCLWVSCGAAAGQLEYSVPEETERGVAVGNLSADLRLPAAAMSSRNFRFLSSHRELYFGVDLPSGNLVVREPADREQLCRAKAACVLTYDLVLEDPLELHKIRIHVLDTNDNSPLFPAGDVQLHIPEFLTPGARFTLPNAQDDDEGSNGILSYSLSPSQHFRLDMGSRVDGSEYPELVLEKALDREQRATHLLVLTARDGGLPARSGDAQVTIIVVDTNDNAPVFERSVYRTKVPETAPNGTVLFRVQALDPDEGSNGEVQYSLSNSTQAELRHRFHVHPKSGEVQVAASLGPPETLLEAYIEARDEGVFGLASTAKLLVEVTDVNDHAPELDFLTLSNPVPEDAAPGTVIALFSVKDEDLDSNGRVICGMSSAGPFQLTASFDNYYSLLIDGPLDREQISEYQVLITASDSGSPPLSTRRTITVSVADVNDNTPNFPQPQQELFVAENNGPGASLGRVFAQDPDLGKNGLVSYELLDVISEGPSASSLVAVESSSGAITAKTSFDFEQLRGFHFQVEGRDGGIPPRSATVTINLFVVDRNDNYPVILFPLPRNGSVPVEIVPRSARTGHLVTKVVAEDADSGSNAWLSYHISRASDSSLFRISANIGELRTARLVLPTDAVKQRVVVVVRDHGDPPLSSSVTLGVLLSNSVPQLLPDFEDVWEPGGQLSAQNLYLVIALACISFLFLGCLLFFVCTKLHQSPGCCAQSCCRSTEDLRYGSKMVSNPCMTSATIDVTTVERLSQTYLYRASLGLGSDNNSLLLRGEYNAADLRNLATGVGLNLPISCIQIRNRKGDHANVNAMVSKFYGI

SEQ ID NO: 806 - protein, 807 aa, Homo sapiens [sequence omitted]

SEQ ID NO: 807 - protein, 884 aa, Homo sapiens
MEQAGTRPAATEHPRLRRPMPWLLLLPLLLLLLLLLPGPAASQLRYSVPEEQAPGALVGNVARALGLELRRLGPGCLRINHLGAPSPRYLELDLTSGALFVNERIDREALCEQRPRCLLSLEVLAHNPVAVSAVEVEILDINDNSPRFPRPNYQLQVSESVAPGARFHIESAQDPDVGANSVQTYELSPSEHFELDLKPLQENSKVLELVLRKGLDREQAALHHLVLTAVDGGIPARSGTAQISVRVLDTNDNSPAFDQSTYRVQLREDSPPGTLVVKLNASDPDEGSNGELRYSLSSYTSDRERQLFSIDASTGEVRVIGGLDYEEASSYQIYVQATDRGPVPMAGHCKVLVDIVDVNDNAPEVVLTDLYSPVPENATPNTIVAVLSVNDQDSGPNRKVSLGLEATLPFRLNGFGNSYTLVVSGPLDRERVAVYNITVTATDGGIPQLTSLRTLKVEISDINDNPPSFLEDSYSIYIQENNLPGVLLCTVQATDPDEKENAEVTYSLLEREIQGLPVTSYVSINSASGSLYAVNSFDYEKFREFFVTVEAQDKGSPPLSSTVTANVYVVDMNDHAPHILYPTSTNSSAAFEMVPRTAPAGYLVTKVIAMDSDSGQNAWLFYHLAQTSDLDLFKVELHTGEIRTTRKMGDESGSTFNLTVVVRDNGEPSLSASVAITVAVVDRVSKILPDTQRHVKSPRTYSEITLYLIIALSTVSFIFLLTIIILSIIKCYRYTAYGTACCGGFCGVRERSPAELYKQANNNIDARIPHGLKVQPHFIEVRGNGSLTKTYCYKACLTAGSGSDTFMFYNTGAQTGPGPSGAQAAVTDSRNLTGQSGQNAGNLIILKNEAVSQNEVRQWSGGLLQTHAFVTHPPISCDLALLSH

SEQ ID NO: 808 - protein, 936 aa, Homo sapiens [sequence omitted]

SEQ ID NO: 809 - protein, 937 aa, Homo sapiens [sequence omitted]

SEQ ID NO: 810 - protein, 947 aa, Homo sapiens [sequence omitted]

SEQ ID NO: 811 - protein, 949 aa, Homo sapiens
MFGFQRRGLGTPRLQLWLLLLEFWEVGSGQLHYSVSEEAKHGTFVGRIAQDLGLELAELVQRLFRVASKTHGDLLEVNLQNGILFVNSRIDREELCGQSAECSIHLEVIVDRPLQVFHVNVEVKDINDNPPVFSLREQKLLIAESKQSDSRFPLEGASDADIEENALLTYRLSKNEYFSLDSPTNGKQIKRLSLILKKSLDREKTPELNLLLTATDGGKPELTGTVRLLVQVLDVNDNDPEFDKSEYKVSLMENAAKETLVLKLNATDRDEGVNGEVTYSLMSIKPNGRHLFTLDQNNGEVRVNGTLDYEENKFYKIEVQATDKGTPPMAGHCTVWVEILDTNDNSPEVAVTSLSLPVREDAQPSTVIALISVSDRDSGVNGQVTCSLTPHVPFKLVSTFKNYYSLVLDSALDRENVWAYELVVTARDGGSPSLWATARVSVEVADVNDNAPAFAQPEYTVFVKENNPPGCHIFTVSARDADAQENALVSYSLVERRLGDRALSSYVSVHAESGKVYALQPLDHEELELLQFQVSARDAGVPPLSSNVTLQVFVLDENDNAPALLATQAGSAGGAVNKLVPRSVGAGHVVAKVRAVDADSGYNAWLSYELQPAAGGSRIPFRVGLYTGEISTTRALDEADSPRHRLLVLVKDHGEPALTATATVLVSLVESGQAPKASSRTLAGAASPEAALVDVNVYLIIAICVVSSLLVLTLLLYTALWWSATPTEGACAPGKPTLVCSRAVGSWSYSQQRRQRVCSEEGPPKTDLMAFSPSLPLGLNKEEEGERQEPGSNHPGQPRQPNPDWRYSASLRAGMHSSVHLEEAGILRAGPGGPDQQWPTVSSATPEPEAGEVSPPVGAGVNSNSWTFKYGPGNPKQSGPGELPDKFIIPGSPAIISIRQEPTNSQIDKSDFITFGKKEETKKKKKKKKGNKTQEKKEKGNSTTDNSDQ

SEQ ID NO: 812 - protein, 973 aa, Homo sapiens
MYLQKRVTAHKIPQASDPLKLIVPTQRPSFSAMVIIGPRGPGSQRLLLSLLLLAAWEVGSGQLHYSVYEEAKHGTFVGRIAQDLGLELAELVPRLFRVASKRHGDLLEVNLQNGILFVNSRIDREKLCGRSAECSIHLEVIVDRPLQVFHVDVEVKDINDNPPVFREREQKVPVSESAPLDSHFPLEGASDADIGVNSLLTYALSLNENFELKIKTKKDKSILPELVLRKLLDREQTPKLNLLLMVIDGGKPELTGSVQIQITVLDVNDNGPAFDKPSYKVVLSENVQNDTRVIQLNASDPDEGLNGEISYGIKMILPVSEKCMFSINPDTGEIRIYGELDFEENNAYEIQVNAIDKGIPSMAGHSMVLVEVLDVNDNVPEVMVTSLSLPVQEDAQVGTVIALISVSDRDSGANGQVICSLTPHVPFKLVSTYKNYYSLVLDSALDRESVSAYELVVTARDGGSPSLWATARVSVEVADVNDNAPAFAQPEYTVFVKENNPPGCHIFTVSAWDADAQKNALVSYSLVERRVGEHALSSYVSVHAESGKVYALQPLDHEELELLQFQVSARDAGVPPLGSNVTLQVFVLDENDNAPALLATPAGSAGGAVSELVPRSVGAGHVVAKVRAVDADSGYNAWLSYELQPAAVGAHIPFHVGLYTGEISTTRILDEADAPRHRLLVLVKDHGEPALTSTATVLVSLVENGQAPKTSSRASVGAVDPEAALVDINVYLIIAICAVSSLLVLTLLLYTALRCSAPPTVSRCAPGKPTLVCSSAVGSWSYSQQRRQRVCSAESPPKTDLMAFSPSLQLSREDCLNPPSEPRQPNPDWRYSASLRAGMHSSVHLEEAGILRAGPGGPDQQWPTVSSATPEPEAGEVSPPVGAGVNSNSWTFKYGPGNPKQSGPGELPDKFIIPGSPAIISIRQEPTNSQIDKSDFITFGKKEETKKKKKKKKGNKTQEKKEKGNSTTDNSDQ

SEQ ID NO: 813 - protein, 950 aa, Homo sapiens [sequence omitted]

SEQ ID NO: 814 - protein, 948 aa, Homo sapiens [sequence omitted]

SEQ ID NO: 815 - protein, 948 aa, Homo sapiens [sequence omitted]

SEQ ID NO: 816 - protein, 950 aa, Homo sapiens [sequence omitted]

SEQ ID NO: 817 - protein, 111 aa, Homo sapiens
PGFNLLSVILNLHVMVDDHCKNARTLCQELQPSGALFDAAPLTMQPSYPITKVDTSWGIKADCPIMCFRPANVALQTRDVHELDACRVTVGNRDATCQGLLVTVVNGESSR

SEQ ID NO: 818 - protein, 923 aa, Homo sapiens
MGSGAGELGRAERLPVLFLFLLSLFCPALCEQIRYRIPEEMPKGSVVGNLATDLGFSVQELPTRKLRVSSEKPYFTVSAESGELLVSSRLDREEICGKKPACALEFEAVAENPLNFYHVNVEIEDINDHTPKFTQNSFELQISESAQPGTRFILEVAEDADIGLNSLQKYKLSLNPSFSLIIKEKQDGSKYPELALEKTLDREQQSYHRLVLTALDGGHPPLSGTTELRIQVTDANDNPPVFNRDVYRVSLRENVPPGTTVLQVSATDQDEGINSEITYSFYRTGQIFSLNSKSGEITTQKKLDFEETKEYSMVVEGRDGGGLVAQCTVEINIQDENDNSPEVTFHSLLEMILENAVPGTLIALIKIHDQDSGENGEVNCQLQGEVPFKIISSSKNSYKLVTDGTLDREQTPEYNVTITATDRGKPPLSSSISVILHIRDVNDNAPVFHQASYLVSVPENNPPGASIAQVCASDLDLGLNGQVSYSIMASDLEPLALASYVSMSAQSGVVFAQRAFDYEQLRTFELTLQARDQGSPALSANVSLRVLVGDRNDNAPRVLYPALGPDGSALFDMVPRAAEPGYLVTKVVAVDADSGHNAWLSYHVLQASEPGLFSLGLRTGEVRTARALGDRDAARQRLLVAVRDGGQPPLSATATLHLVFADSLQEVLPDITDRPVPSDPQAELQFYLVVALALISVLFLLAVILAVALRLRRSSSPAAWSCFQPGLCVKSGPVVPPNYSQGTLPYSYNLCVAHTGKTEFNFLKCSEQLSSGQDILCGDSSGALFPLCNSSESTSHPELQAPPNTDWRFSQAQRPGTSGSQNGDDTGTWPNNQFDTEMLQAMILASASEAADGSSTLGGGAGTMGLSARYGPQFTLQHVPDYRQNVYIPGSNATLTNAAGKRDGKAPAGGNGNKKKSGKKEKK

SEQ ID NO: 819 - protein, 932 aa, Homo sapiens
MAAPTKCQLRGRLVLLCSLLGMLWEARASQIRYSVPEETEKGYIVGNISKDLALEPRELAERRVRIVSRGRTQLFSLNPRSGTLVTAGRIDREELCAQSPRCLVNFKVLVEDRVKLYGIEIEVTDINDSAPKFQAESLEVKINEIAVPGARYPLPEAIDPDVGVNSLQSYQLSPNHHFSLNVQTGDNGAINPELVLERALDREEATAHHLVLTASDGGEPRRSSTVRIHVTVLDTNDNAPVFAQRIYRVKVLENVPPGTWLLTATASDLDEGINGKVAYKFWKINEKQSLLFQLNENTGEISTAKSLDYEECSFYEMEIQAEDGGGLKGWTKVLISVEDVNDNRPEVTITSLFSPVREDAPQGTVILLFNAHDRDSGKNGQVVCSIQENLSFTLENSEEDYYRLLTAQILDREKASEYNITVTATDRGTPPLSTEIHITLQVTDINDNPPAFSQASYSVYLPENNARGTSIFSVIAYDPDSNENSRVIYSLAEDTIQGSPLSTYVSINSDTGVLYALCSFDYEQFRDLQMQVTASDSGSPPLSSNVSLRLFVLDQNDNAPEILYPALPTDGSTGVELAPRSAEPGYLVTKVVAVDRDSGQNAWLSYRLFKASEPGLFSVGLHTGEVRTARALLDRDALKQSLVVAVQDHGQPPLSATVTLTVAIADSIPDILADLGSLQIPADLEASDLTLYLVVAVAVVSCVFLTFVITLLALRLRHWHSSHLLRATSDGLAGVPTSHFVGVDGVRAFLQTYSQEFSLTADSRKSHLIFPQPNYADTLISQQSCEKNEPLCVSVDSKFPIEDTPLVPQAPPNTDWRFSQAQRPGTSGSQNGDDTGTWPNNQFDTEMLQAMILASASEAADGSSTLGGGAGTMGLSARYGPQFTLQHVPDYRQNVYIPGSNATLTNAAGKRDGKAPAGGNGNKKKSGKKEKK

SEQ ID NO: 820 - protein, 930 aa, Homo sapiens
MGGSCAQRRRAGPRQVLFPLLLPLFYPTLSEPIRYSIPEELAKGSVVGNLAKDLGLSVLDVSARKLRVSAEKLHFSVDAESGDLLVKNRIDREQICKERRRCELQLEAVVENPLNIFHVIVVIEDVNDHAPQFDKKEIHLEIFESASAGTRLSLDPATDPDININSIKDYKINSNPYFSLMVRVNSDGGKYPELSLEKLLDREEQRSHSLILTALDGGDPPRSATAHIEISVKDTNDNPPVFSRDEYRISLSENLPPGSPVLQVTATDQDEGVNAEINYYFRSTAQSTKHMFSLDEKTGMIKNNQSFDFEDVERYTMEVEAKDGGGLSTQCKVIIEILDENDNSPEIIITSLSDQILENSPPGMVVALFKTRDLDFGGNGEVRCNIETDIPFKIYSSSNNYYKLVTDGALDREQTPEYNVTIVATDRGKPPLSSSRSITLYVADINDNAPVFDQTSYVVHVAENNPPGASIAQVSASDPDLGLNGHISYSIVASDLEPLAVSSYVSVSAQSGVVFAQRAFDHEQLRAFALTLQARDHGSPTLSANVSLRVLVGDRNDNAPRVLYPALGPDGSAFFDMVPRSAEPGYLVTKVVAVDADSGHNAWLSYHVLQASEPGLFSLGLRTGEVRTARALGDRDAARQRLLVAVRDGGQPPLSATATLHLVFADNLQEILPDLSDRPVLSDPQAELQFYLVVALALISVLFLLAVILAIALRLRRSLSPATWDCFHPGLCVKSGPVVPPNYSEGTLPYSYNLCIAHTGTKEFNFLKCSVPLHSNEDMVCSVSPGALIPPHGGEDLTSHPETLTSQAPPNTDWRFSQAQRPGTSGSQNGDDTGTWPNNQFDTEMLQAMILASASEAADGSSTLGGGAGTMGLSARYGPQFTLQHVPDYRQNVYIPGSNATLTNAAGKRDGKAPAGGNGNKKKSGKKEKK

SEQ ID NO: 821 - protein, 931 aa, Homo sapiens
MAAPPARPDHTRLLQICLLLGVLVEIRAEQILYSVFEEQEEGSVVGNIAKDLGLAPRELAERGVRIVSRGRTQLFALNPRSGTLVTAGRIDREELCDRSPNCVTNLEILLEDTVKILRVEVEIIDVNDNPPSFGTEQREIKVAENENPGARFPLPEAFDPDVGVNSLQGYQLNSNGYFSLDVQSGADGIKYPELVLERALDREEEAVHHLVLTAFDGGDPVRSGTARILIILVDTNDNAPVFTQPEYHVSVRENVPVGTRLLTVKATDPDEGANGDVTYSFRKVRDKISQLFQLNSLSGDITILGGLDYEDSGFYDIDVEAHDGPGLRARSKVLVTVLDENDNAPEVTVTSLTSSVQESSSPGTVIALFNVHDSDSGGNGLVTCSIPDNLPFTLEKTYGNYYRLLTHRTLDREEVSEYNITVTATDQGTPPLSTETHISLQVMDINDNPPTFPHASYSAYIPENNPRGASILSMTAQDPDSGDNARITYSLAEDTFQGAPLSSYVSINSNTGILYALCSFDYEQFRDLQLLMTASDSGDPPLSSNVSLSLFVLDQNDNVPEILYPTFPTDGSTGVELAPRSADSGYLVTKVVAVDRDSGQNAWLSYSLLKSSEPGLFAVGLHTGEVRTARALLDRDALKQRLVVVVQDHGQPPLSATVTLTVAVADSIPDVLADLGSLKPSADPDDSGLTLYLVVAVAAVSCVFLAFVTVLLALKLRRWHKSRLLHAEGSRLAGVPASHFVGVDGVRAFLQTYSHEVSLTADSRKSHLIFSQPSYADTLISRESCEKSEPLLITQDLLETKGDPNLQQAPPNTDWRFSQAQRPGTSGSQNGDDTGTWPNNQFDTEMLQAMILASASEAADGSSTLGGGAGTMGLSARYGPQFTLQHVPDYRQNVYIPGSNATLTNAAGKRDGKAPAGGNGNKKKSGKKEKK

SEQ ID NO: 822 - protein, 938 aa, Homo sapiens
MLRKVRSWTEIWRWATLLFLFYHLGYVCGQIRYPVPEESQEGTFVGNVAQDFLLDTDSLSARRLQVAGEVNQRHFRVDLDSGALLIKNPIDREALCGLSASCIVPLEFVTEGPLEMYRAEVEIVDVNDHAPRFPRQQLDLEIGEAAPPGQRFPLEKAQDADVGSNSISSYRLSSNEHFALDVKKRSDGSLVPELLLEKPLDREKQSDYRLVLTAVDGGNPPRSGTAELRVSVLDVNDNAPAFQQSSYRISVLESAPAGMVLIQLNASDPDLGPSGNVTFYFSGHTPDRVRNLFSLHPTTGKLTLLGPLDFESENYYEFDVRARDGGSPAMEQHCSLRVDLLDVNDNAPYITVTSELGTLPESAEPGTVVALISVQDPDSGSNGDVSLRIPDHLPFALKSAFRNQFSLVTAGPLDREAKSSYDIMVTASDAGNPPLSTHRTIFLNISDVNDNPPSFFQRSHEVFVPENNRPGDLLCSLAASDPDSGLNALISYSLLEPRNRDVSASSFISLNPQTGAVHATRSFDYEQTQTLQFEVQARDRGNPPLSSTVTVRLFVLDLNDNAPAVLRPRARPGSLCPQALPPSVGAGHLITKVTAVDLDSGYNAWVSYQLLEAPDPSLFAVSRYAGEVRTAVPIPADLPPQKLVIVVKDSGSPPLSTSVTLLVSLEEDTHPVVPDLRESSAPREGESRLTLYLAVSLVAICFVSFGSFVALLSKCLRGAACGVTCFPAGTCACLTRSRRREGLPPSNGILRIQLGSDDPIKFVDVGGHSHGCTPLASAPTRSDSFMMVKSPSAPMAGEPVRPSCPPSDLLYGLEQAPPNTDWRFSQAQRPGTSGSQNGDDTGTWPNNQFDTEMLQAMILASASEAADGSSTLGGGAGTMGLSARYGPQFTLQHVPDYRQNVYIPGSNATLTNAAGKRDGKAPAGGNGNKKKSGKKEKK

SEQ ID NO: 823 - protein, 878 aa, Homo sapiens
MGPKTLPQLAGKWQVLCMLSLCCWGWVSGQLRYSVVEESEPGTLVGNVAQDLGLKMTDLLSRRLQLGSEENGRYFSLSLMSGALAVNQKIDRESLCGASTSCLLPVQVVTEHPLELIRVEVEILDLNDNSPSFATPEREMRISESAASGARFPLDSAQDPDVGTNTVSFYTLSPNSHFSLNVKTLKDGKPFPELVLEQQLDREAQARHQLVLTAVDGGTPARSGTTLISVIVLDINDNAPTFQSSVLRVGIPENAPIGTLLLRLNATDPDEGTNGQLDYSFGDHTSEAVRNLFGLDPSSGAIHVLGPIDFEESRFYEIHARARDQGQPAMEGHCVIQVDVGDVNDNAPEVLLASLANPVLESTPVGTVVGLFNVRDRDSGRNGEVSLDISPDLPFQIKPSENHYSLLTSQPLDREATSHYIIELLASDAGSPSLHKHLTIRLNISDVNDNAPRFNQQLYTAYILENRPPGSLLCTVAASDPDTGDNARLTYSIVGNQVQGAPASSFVYVNPEDGRIFAQRTFDYELLQMLQIVVGVRDSGSPPLHANTSLHVFVLDENDNAPAVLHPRPDWEHSAPQRLPRSAPPGSLVTKVTAVDADAGHNAWLSYSLLPQSTAPGLFLVSTHTGEVRTARALLEDDSDTQQVVVLVRDNGDPSLSSTATVLLVLEDEDPEEMPKSSDFLIHPPERSDLTLYLIVALATVSLLSLVTFTFLSAKCLQGNADGDGGGGQCCRRQDSPSPDFYKQSSPNLQVSSDGTLKYMEVTLRPTDSQSHCYRTCFSPASDGSDFTFLRPLSVQQPTALALEPDAIRSRSNTLRERSQVRGSAPPRATPGGGTGEAARPHKGLNLHPLLSGRLGRWLRSTRFSGSLDRLRETRVAD

SEQ ID NO: 824 - protein, 837 aa, Homo sapiens
MANRLQRGDRSRLLLLLCIFLGTLRGFRARQIRYSVPEETEKGSFVGNISKDLGLEPRELAKRGVRIVSRGKTQLFAVNPRSGSLITAGRIDREELCETVSSCFLNMELLVEDTLKIYGVEVEIIDINDNAPSFQEDEVEIKVSEHAIPGARFALPNARDPDVGVNSLQSYQLSPNNYFSLQLRGRTDGAKNPELVLEGSLDREKEAAHLLLLTALDGGDPIRKGAVPIRVVVLDVNDHIPMFTQSVYRVSVPENISSGTRVLMVNATDPDEGINGEVMYSFRNMESKASEIFQLDSQTGEVQVRGSLDFEKYRFYEMEIQGQDGGGLFTTTTMLITVVDVNDNAPEITITSSINSILENSPPGTVIALLNVQDQDSGENGQVSCFIPNHLPFKLEKTYGNYYKLITSRVLDRELVQSYNITLTATDQGSPPLSAETHVWLNVADDNDNPPVFPHSSYSAYIPENNPRGASIFSVTALDPDSKQNALVTYSLTDDTVQGVPLSSYVSINSNTGVLYALQSFDYEQFRDLELRVIARDSGDPPLSSNVSLSLFVLDQNDNAPEILYPALPTDGSTGVELAPRSAEPGYLVTKVVAVDKDSGQNAWLSYRLLKASEPGLFAVGEHTGEVRTARALLDRDALKQSLVVAVQDHGQPPLSATVTLTVAVADSIPEVLADLGSLESLANSETSDLSLYLVVAVAAVSCIFLVFVIVLLALRLWRWHKSRLLQASEGGLAGMPTSHFVGVDGVQAFLQTYSHEVSLIADSQKSHLIFPQPNYGDTLISQESCEKSEPLLIAEDSAIILGKCDPTSNQVRFISLPPNCWCLGTSLLRRCFLSLL

SEQ ID NO: 825 - protein, 813 aa, Homo sapiens
MASPPRGWGCGELLLPFMLLGTLCEPGSGQIRYSMPEELDKGSFVGNIAKDLGLEPQELAERGVRIVSRGRTQLFALNPRSGSLVTAGRIDREELCAQSPLCVVNFNILVENKMKIYGVEVEIIDINDNFPRFRDEELKVKVNENAAAGTRLVLPFARDADVGVNSLRSYQLSSNLHFSLDVVSGTDGQKYPELVLEQPLDREKETVHDLLLTALDGGDPVLSGTTHIRVTVLDANDNAPLFTPSEYSVSVPENIPVGTRLLMLTATDPDEGINGKLTYSFRNEEEKISETFQLDSNLGEISTLQSLDYEESRFYLMEVVAQDGGALVASAKVVVTVQDVNDNAPEVILTSLTSSISEDCLPGTVIALFSVHDGDSGENGEIACSIPRNLPFKLEKSVDNYYHLLTTRDLDREETSDYNITLTVMDHGTPPLSTESHIPLKVADVNDNPPNFPQASYSTSVTENNPRGVSIFSVTAHDPDSGDNARVTYSLAEDTFQGAPLSSYVSINSDTGVLYALRSFDYEQLRDLQLWVTASDSGNPPLSSNVSLSLFVLDQNDNTPEILYPALPTDGSTGVELAPRSAEPGYLVTKVVAVDKDSGQNAWLSYRLLKASEPGLFAVGLHTGEVRTARALLDRDALKQSLVVAVEDHGQPPLSATFTVTVAVADRIPDILADLGSIKTPIDPEDLDLTLYLVVAVAAVSCVFLAFVIVLLVLRLRRWHKSRLLQAEGSRLAGVPASHFVGVDGVRAFLQTYSHEVSLTADSRKSHLIFPQPNYADTLLSEESCEKSEPLLMSDKVDANKEERRVQVSFLFR

SEQ ID NO: 826 - protein, 932 aa, Homo sapiens
MIPARLHRDYKGLVLLGILLGTLWETGCTQIRYSVPEELEKGSRVGDISRDLGLEPRELAERGVRIIPRGRTQLFALNPRSGSLVTAGRIDREELCMGAIKCQLNLDILMEDKVKIYGVEVEVRDINDNAPYFRESELEIKISENAATEMRFPLPHAWDPDIGKNSLQSYELSPNTHFSLIVQNGADGSKYPELVLKRALDREEKAAHHLVLTASDGGDPVRTGTARIRVMVLDANDNAPAFAQPEYRASVPENLALGTQLLVVNATDPDEGVNAEVRYSFRYVDDKAAQVFKLDCNSGTISTIGELDHEESGFYQMEVQAMDNAGYSARAKVLITVLDVNDNAPEVVLTSLASSVPENSPRGTLIALLNVNDQDSEENGQVICFIQGNLPFKLEKSYGNYYSLVTDIVLDREQVPSYNITVTATDRGTPPLSTETHISLNVADTNDNPPVFPQASYSAYIPENNPRGVSLVSVTAHDPDCEENAQITYSLAENTIQGASLSSYVSINSDTGVLYALSSFDYEQFRDLQVKVMARDNGHPPLSSNVSLSLFVLDQNDNAPEILYPALPTDGSTGVELAPRSAEPGYLVTKVVAVDRDSGQNAWLSYRLLKASEPGLFSVGLHTGEVRTARALLDRDALKQSLVVAVQDHGQPPLSATVTLTVAVADSIPQVLADLGSLESPANSETSDLTLYLVVAVAAVSCVFLAFVILLLALRLRRWHKSRLLQASGGGLTGAPASHFVGVDGVQAFLQTYSHEVSLTTDSRKSHLIFPQPNYADMLVSQESFEKSEPLLLSGDSVFSKDSHGLIEQAPPNTDWRFSQAQRPGTSGSQNGDDTGTWPNNQFDTEMLQAMILASASEAADGSSTLGGGAGTMGLSARYGPQFTLQHVPDYRQNVYIPGSNATLTNAAGKRDGKAPAGGNGNKKKSGKKEKK

SEQ ID NO: 827 - protein, 820 aa, Homo sapiens
MIPARLHRDYKGLVLLGILLGTLWETGCTQIRYSVPEELEKGSRVGDISRDLGLEPRELAERGVRIIPRGRTQLFALNPRSGSLVTAGRIDREELCMGAIKCQLNLDILMEDKVKIYGVEVEVRDINDNAPYFRESELEIKISENAATEMRFPLPHAWDPDIGKNSLQSYELSPNTHFSLIVQNGADGSKYPELVLKRALDREEKAAHHLVLTASDGGDPVRTGTARIRVMVLDANDNAPAFAQPEYRASVPENLALGTQLLVVNATDPDEGVNAEVRYSFRYVDDKAAQVFKLDCNSGTISTIGELDHEESGFYQMEVQAMDNAGYSARAKVLITVLDVNDNAPEVVLTSLASSVPENSPRGTLIALLNVNDQDSEENGQVICFIQGNLPFKLEKSYGNYYSLVTDIVLDREQVPSYNITVTATDRGTPPLSTETHISLNVADTNDNPPVFPQASYSAYIPENNPRGVSLVSVTAHDPDCEENAQITYSLAENTIQGASLSSYVSINSDTGVLYALSSFDYEQFRDLQVKVMARDNGHPPLSSNVSLSLFVLDQNDNAPEILYPALPTDGSTGVELAPRSAEPGYLVTKVVAVDRDSGQNAWLSYRLLKASEPGLFSVGLHTGEVRTARALLDRDALKQSLVVAVQDHGQPPLSATVTLTVAVADSIPQVLADLGSLESPANSETSDLTLYLVVAVAAVSCVFLAFVILLLALRLRRWHKSRLLQASGGGLTGAPASHFVGVDGVQAFLQTYSHEVSLTTDSRKSHLIFPQPNYADMLVSQESFEKSEPLLLSGDSVFSKDSHGLIEVSLYQIFFLFFF

SEQ ID NO: 828 - protein, 814 aa, Homo sapiens
MGNSSGWRGPAGQRRMLFLFLLSLLDQALSEPIRYAIPEELDRGSLVGNLAKDLGFGVGDLPTRNLRVIAEKKFFTVSPENGNLLVSDRIDREEICGKKSTCVLEFEMVAEKPLNFFHVTVLIQDINDNPPTFSQNITELEISELALTGATFALESAQDPDVGVNSLQQYYLSPDPHFSLIQKENLDGSRYPELVLKAPLDREEQPHHHLVLTAVDGGEPSRSCTTQIRVIVADANDNPPVFTQDMYRVNVAENLPAGSSVLKVMAIDMDEGINAEIIYAFINIGKEVRQLFKLDSKTGELTTIGELDFEERDSYTIGVEAKDGGHHTAYCKVQIDISDENDNAPEITLASESQHIQEDAELGTAVALIKTHDLDSGFNGEILCQLKGNFPFKIVQDTKNTYRLVTDGALDREQIPEYNVTITATDKGNPPLSSSKTITLHILDVNDNVPVFHQASYTVHVAENNPPGASIAHVRASDPDLGPNGLVSYYIVASDLEPRELSSYVSVSARSGVVFAQRAFDHEQLRAFELTLQARDQGSPTLSANVSLRVLVDDRNDNAPLVLYPALGPEGSALFDMVPRSAEPGYLVTKVVAVDADSGYNAWLSYHIVQASEPGLFSLGLRTGEVRTARTLGDREAARQRLLVTVRDGGQQPLSATVMLHLIFADSLQEIQPDLSDRPTPSDPQAELQFHLVVALALISVLFLLAVILAISLRLRCSSRPATEGYFQPGVCFKTVPGVLPTYSERTLPYSYNPCAASHSSNTEFKFLNIKAENAAPQDLLCDEASWFESNDNPEMPSNSGNLQKVSFFKPFLP

SEQ ID NO: 829 - protein, 863 aa, Homo sapiens
MVPEAWRSGLVSTGRVVGVLLLLGALNKASTVIHYEIPEEREKGFAVGNVVANLGLDLGSLSARRFRVVSGASRRFFEVNRETGEMFVNDRLDREELCGTLPSCTVTLELVVENPLELFSVEVVIQDINDNNPAFPTQEMKLEISEAVAPGTRFPLESAHDPDVGSNSLQTYELSRNEYFALRVQTREDSTKYAELVLERALDREREPSLQLVLTALDGGTPALSASLPIHIKVLDANDNAPVFNQSLYRARVLEDAPSGTRVVQVLATDLDEGPNGEIIYSFGSHNRAGVRQLFALDLVTGMLTIKGRLDFEDTKLHEIYIQAKDKGANPEGAHCKVLVEVVDVNDNAPEITVTSVYSPVPEDAPLGTVIALLSVTDLDAGENGLVTCEVPPGLPFSLTSSLKNYFTLKTSADLDRETVPEYNLSITARDAGTPSLSALTIVRVQVSDINDNPPQSSQSSYDVYIEENNLPGAPILNLSVWDPDAPQNARLSFFLLEQGAETGLVGRYFTINRDNGIVSSLVPLDYEDRREFELTAHISDGGTPVLATNISVNIFVTDRNDNAPQVLYPRPGGSSVEMLPRGTSAGHLVSRVVGWDADAGHNAWLSYSLLGSPNQSLFAIGLHTGQISTARPVQDTDSPRQTLTVLIKDNGEPSLSTTATLTVSVTEDSPEARAEFPSGSAPREQKKNLTFYLLLSLILVSVGFVVTVFGVIIFKVYKWKQSRDLYRAPVSSLYRTPGPSLHADAVRGGLMSPHLYHQVYLTTDSRRSDPLLKKPGAASPLASRQNTLRSCDPVFYRQVLGAESAPPGQVRFSKSCLTLLVLFYSYIILRKEWSCFFSDEDVFLVMHSHFQLALPRSKLVPL

SEQ ID NO: 830 - protein, 811 aa, Homo sapiens
MKASSGRCGLVRWLQVLLPFLLSLFPGALPVQIRYSIPEELAKNSVVGNLAKDLGLSVRDLPARKLRVSAEKEYFTVNPESGDLLVSDRIDREQICGKQPLCVLDFDTVAENPLNIFYIAVIVQDINDNTPLFKQTKINLKIGESTKPGTTFPLDPALDSDVGPNSLQRYHLNDNEYFDLAEKQTPDGRKYPELILKHSLDREEHSLHQLVLTAVDGGDPPQSGTTQIRIKVTDANDNPPVFSQDVYRVTLREDVPPGFFVLQVTATDRDEGINAEITYSFHNVDEQVKHFFNLNEKTGEITTKDDLDFEIASSYTLSIEAKDPGDLAAHCSIQVEILDDNDCAPEVIVTSVSTPLPEDSPPGTVIALIKTRDRDSGENGEVYCQVLGNAKFILKSSSKNYYKLVTDGALDREEIPEYNLTITATDGGKPPLSSSIIVTLHISDVNDNAPVFQQTSYMVHVAENNPPGASIAQISASDPDLGPSGQVSYSIVASDLKPREILSYVSVSAQSGVVFAQRAFDHEQLRAFELTLQARDQGSPALSANVSLRVLVGDLNDNAPRVLYPALGPDGSALFDMVPRAAEPGYLVTKVVAVDADSGHNAWLSYHVLQASEPGLFSLGLRTGEVRTARALGDRDAARQRLLVAVRDGGQPPLSATATLHLIFADSLQEVLPDLSDRREPSDPQAKLQFYLVVALALISVLFFLAVILAISLRLRLSSRSDAWDCFQPGLSSKPGPGVLPNYSEGTLPYSYNLCVASQSAKTEFNFLNITPELVPAQDLVCDNASWEQNTNHGAAGVPFASDTILKVSFN

SEQ ID NO: 831 - protein, 871 aa, Homo sapiens
MLRKVRSWTEIWRWATLLFLFYHLGYVCGQIRYPVPEESQEGTFVGNVAQDFLLDTDSLSARRLQVAGEVNQRHFRVDLDSGALLIKNPIDREALCGLSASCIVPLEFVTEGPLEMYRAEVEIVDVNDHAPRFPRQQLDLEIGEAAPPGQRFPLEKAQDADVGSNSISSYRLSSNEHFALDVKKRSDGSLVPELLLEKPLDREKQSDYRLVLTAVDGGNPPRSGTAELRVSVLDVNDNAPAFQQSSYRISVLESAPAGMVLIQLNASDPDLGPSGNVTFYFSGHTPDRVRNLFSLHPTTGKLTLLGPLDFESENYYEFDVRARDGGSPAMEQHCSLRVDLLDVNDNAPYITVTSELGTLPESAEPGTVVALISVQDPDSGSNGDVSLRIPDHLPFALKSAFRNQFSLVTAGPLDREAKSSYDIMVTASDAGNPPLSTHRTIFLNISDVNDNPPSFFQRSHEVFVPENNRPGDLLCSLAASDPDSGLNALISYSLLEPRNRDVSASSFISLNPQTGAVHATRSFDYEQTQTLQFEVQARDRGNPPLSSTVTVRLFVLDLNDNAPAVLRPRARPGSLCPQALPPSVGAGHLITKVTAVDLDSGYNAWVSYQLLEAPDPSLFAVSRYAGEVRTAVPIPADLPPQKLVIVVKDSGSPPLSTSVTLLVSLEEDTHPVVPDLRESSAPREGESRLTLYLAVSLVAICFVSFGSFVALLSKCLRGAACGVTCFPAGTCACLTRSRRREGLPPSNGILRIQLGSDDPIKFVDVGGHSHGCTPLASAPTRSDSFMMVKSPSAPMAGEPVRPSCPPSDLLYGLEVRPLQAQQMLEGYSDPGIWLGHVLESTGLSVSAHSDVTIFVRGNYVVDAVLCNCFVN

SEQ ID NO: 832 - protein, 820 aa, Homo sapiens
MAAPPARPDHTRLLQICLLLGVLVEIRAEQILYSVFEEQEEGSVVGNIAKDLGLAPRELAERGVRIVSRGRTQLFALNPRSGTLVTAGRIDREELCDRSPNCVTNLEILLEDTVKILRVEVEIIDVNDNPPSFGTEQREIKVAENENPGARFPLPEAFDPDVGVNSLQGYQLNSNGYFSLDVQSGADGIKYPELVLERALDREEEAVHHLVLTAFDGGDPVRSGTARILIILVDTNDNAPVFTQPEYHVSVRENVPVGTRLLTVKATDPDEGANGDVTYSFRKVRDKISQLFQLNSLSGDITILGGLDYEDSGFYDIDVEAHDGPGLRARSKVLVTVLDENDNAPEVTVTSLTSSVQESSSPGTVIALFNVHDSDSGGNGLVTCSIPDNLPFTLEKTYGNYYRLLTHRTLDREEVSEYNITVTATDQGTPPLSTETHISLQVMDINDNPPTFPHASYSAYIPENNPRGASILSMTAQDPDSGDNARITYSLAEDTFQGAPLSSYVSINSNTGILYALCSFDYEQFRDLQLLMTASDSGDPPLSSNVSLSLFVLDQNDNVPEILYPTFPTDGSTGVELAPRSADSGYLVTKVVAVDRDSGQNAWLSYSLLKSSEPGLFAVGLHTGEVRTARALLDRDALKQRLVVVVQDHGQPPLSATVTLTVAVADSIPDVLADLGSLKPSADPDDSGLTLYLVVAVAAVSCVFLAFVTVLLALKLRRWHKSRLLHAEGSRLAGVPASHFVGVDGVRAFLQTYSHEVSLTADSRKSHLIFSQPSYADTLISRESCEKSEPLLITQDLLETKGDPNLQVSQSYNRSYHTEI

SEQ ID NO: 833 - protein, 810 aa, Homo sapiens
MQRAREAEMMKSQVLFPFLLSLFCGAISQQIRYTIPEELANGSRVGKLAKDLGLSVRELPTRKLRVSAEDYFNVSLESGDLLVNGRIDREKICGRKLECALEFETVAENPMNVFHVVVVIQDINDNAPRFVAKGIDLEICESALPGVKFSLDSAQDADVEGNSLKLYTINPNQYFSLSTKESPDGSKYPVLLLEKPLDREHQSSHRLILTAMDGGDPPLSGTTHIWIRVTDANDNAPVFSQEVYRVSLQENVPWGTSVLRVMATDQDEGINAEITYAFLNSPISTSLFNLNPNTGDITTNGTLDFEETSRYVLSVEAKDGGVHTAHCNVQIEIVDENDNAPEVTFMSFSNQIPEDSDLGTVIALIKVRDKDSGQNGMVTCYTQEEVPFKLESTSKNYYKLVIAGALNREQTADYNVTIIATDKGKPALSSRTSITLHISDINDNAPVFHQASYVVHVSENNPPGASIAQVSASDPDLGPNGRVSYSILASDLEPRELLSYVSVSPQSGVVFAQRAFDHEQLRAFELTLQARDQGSPALSANVSLRVLVGDLNDNAPRVLYPALGPDGSALFDMVPRAAEPGYLVTKVVAVDADSGHNAWLSYHVLQASEPGLFSLGLRTGEVRTARALGDRDAARQRLLVAVRDGGQPPLSATATLHLIFADSLQEVLPDLSDRPEPSDPQTELQFYLVVALALISVLFLLAVILAIALRLRRSSSLDTEGCFQTGLCSKSGPGVPPNHSEGTLPYSYNLCIASHSAKTEFNSLNLTPEMAPPQDLLCDDPSMVVCASNEDHKIAYDPSLSSHVSFCKSS

SEQ ID NO: 834 - protein, 829 aa, Homo sapiens
MTNCLSFRNGRGLALLCALLGTLCETGSGQIRYSVSEELDKGSFVGNIANDLGLEPRELAERGVRIVSRGRTQLFSLNPQSGSLVTAERIDREELCAQIPLCLVKINILVEDKLKIFEVEIEIKDINDNAPNFPTEELEIKIGELTVPGTRFPIKTAFDPDVGINSLQNYKLSPNDYFSLAVNSVSEGAKYPELVLERALDREKKEIHQLVLVASDGGDPVHSGNLHIQVIVLDANDNPPMFTQPEYRVSVWENVPVGTRLLTVNATDPDEGFNAQVSYILDKMPGKIAEIFHLNSVSGEVSILKSLDYEDAMFYEIKIEAQDGPGLLSRAKILVTVLDVNDNAPEITITSLTSSVPEEGTVGREIALIDVHDRDSGQNGQVEVFVLGNLPFKLEKSIDQYYRLVTATSLDREQISEYNISLRASDGGSPPLSTETHITLHVIDINDNPPTFPHLSYSAYIPENNPRGASIFSVTAQDPDSNNNARITYALTEDTLQGAPLSSFVSINSNTGVLYALRSFDYEQFRDLKLLVTASDSGNPPLSSNVSLNLFVLDQNDNAPEILYPALPTDGSTGVELAPRSAEPGYLVTKVVAVDRDSGQNAWLSYRLLKASEPGLFSVGLHTGEVRTARALLDRDALKQSLVVAVQDHGQPPLSATVTLTVAVADRIPDILADLGSLEPSAKPNDSDLTLYLVVAVAAVSCVFLAFVIVLLALRLRRWHKSRLLQASGGGLASTPGSHFVGADGVRAFLQTYSHEVSLTADSRKSHLIFPQPNYADTLISQESCEKSEPLLITQDLLEMKGDSNLLQVSLFISLIIKNKYENVVIIKL

SEQ ID NO: 835 - protein, 934 aa, Homo sapiens
MVPEAWRSGLVSTGRVVGVLLLLGALNKASTVIHYEIPEEREKGFAVGNVVANLGLDLGSLSARRFRVVSGASRRFFEVNRETGEMFVNDRLDREELCGTLPSCTVTLELVVENPLELFSVEVVIQDINDNNPAFPTQEMKLEISEAVAPGTRFPLESAHDPDVGSNSLQTYELSRNEYFALRVQTREDSTKYAELVLERALDREREPSLQLVLTALDGGTPALSASLPIHIKVLDANDNAPVFNQSLYRARVLEDAPSGTRVVQVLATDLDEGPNGEIIYSFGSHNRAGVRQLFALDLVTGMLTIKGRLDFEDTKLHEIYIQAKDKGANPEGAHCKVLVEVVDVNDNAPEITVTSVYSPVPEDAPLGTVIALLSVTDLDAGENGLVTCEVPPGLPFSLTSSLKNYFTLKTSADLDRETVPEYNLSITARDAGTPSLSALTIVRVQVSDINDNPPQSSQSSYDVYIEENNLPGAPILNLSVWDPDAPQNARLSFFLLEQGAETGLVGRYFTINRDNGIVSSLVPLDYEDRREFELTAHISDGGTPVLATNISVNIFVTDRNDNAPQVLYPRPGGSSVEMLPRGTSAGHLVSRVVGWDADAGHNAWLSYSLLGSPNQSLFAIGLHTGQISTARPVQDTDSPRQTLTVLIKDNGEPSLSTTATLTVSVTEDSPEARAEFPSGSAPREQKKNLTFYLLLSLILVSVGFVVTVFGVIIFKVYKWKQSRDLYRAPVSSLYRTPGPSLHADAVRGGLMSPHLYHQVYLTTDSRRSDPLLKKPGAASPLASRQNTLRSCDPVFYRQVLGAESAPPGQQAPPNTDWRFSQAQRPGTSGSQNGDDTGTWPNNQFDTEMLQAMILASASEAADGSSTLGGGAGTMGLSARYGPQFTLQHVPDYRQNVYIPGSNATLTNAAGKRDGKAPAGGNGNKKKSGKKEKK

SEQ ID NO: 836 - protein, 935 aa, Homo sapiens
MANRLQRGDRSRLLLLLCIFLGTLRGFRARQIRYSVPEETEKGSFVGNISKDLGLEPRELAKRGVRIVSRGKTQLFAVNPRSGSLITAGRIDREELCETVSSCFLNMELLVEDTLKIYGVEVEIIDINDNAPSFQEDEVEIKVSEHAIPGARFALPNARDPDVGVNSLQSYQLSPNNYFSLQLRGRTDGAKNPELVLEGSLDREKEAAHLLLLTALDGGDPIRKGAVPIRVVVLDVNDHIPMFTQSVYRVSVPENISSGTRVLMVNATDPDEGINGEVMYSFRNMESKASEIFQLDSQTGEVQVRGSLDFEKYRFYEMEIQGQDGGGLFTTTTMLITVVDVNDNAPEITITSSINSILENSPPGTVIALLNVQDQDSGENGQVSCFIPNHLPFKLEKTYGNYYKLITSRVLDRELVQSYNITLTATDQGSPPLSAETHVWLNVADDNDNPPVFPHSSYSAYIPENNPRGASIFSVTALDPDSKQNALVTYSLTDDTVQGVPLSSYVSINSNTGVLYALQSFDYEQFRDLELRVIARDSGDPPLSSNVSLSLFVLDQNDNAPEILYPALPTDGSTGVELAPRSAEPGYLVTKVVAVDKDSGQNAWLSYRLLKASEPGLFAVGEHTGEVRTARALLDRDALKQSLVVAVQDHGQPPLSATVTLTVAVADSIPEVLADLGSLESLANSETSDLSLYLVVAVAAVSCIFLVFVIVLLALRLWRWHKSRLLQASEGGLAGMPTSHFVGVDGVQAFLQTYSHEVSLIADSQKSHLIFPQPNYGDTLISQESCEKSEPLLIAEDSAIILGKCDPTSNQQAPPNTDWRFSQAQRPGTSGSQNGDDTGTWPNNQFDTEMLQAMILASASEAADGSSTLGGGAGTMGLSARYGPQFTLQHVPDYRQNVYIPGSNATLTNAAGKRDGKAPAGGNGNKKKSGKKEKK

SEQ ID NO: 837 - protein, 929 aa, Homo sapiens
MGNSSGWRGPAGQRRMLFLFLLSLLDQALSEPIRYAIPEELDRGSLVGNLAKDLGFGVGDLPTRNLRVIAEKKFFTVSPENGNLLVSDRIDREEICGKKSTCVLEFEMVAEKPLNFFHVTVLIQDINDNPPTFSQNITELEISELALTGATFALESAQDPDVGVNSLQQYYLSPDPHFSLIQKENLDGSRYPELVLKAPLDREEQPHHHLVLTAVDGGEPSRSCTTQIRVIVADANDNPPVFTQDMYRVNVAENLPAGSSVLKVMAIDMDEGINAEIIYAFINIGKEVRQLFKLDSKTGELTTIGELDFEERDSYTIGVEAKDGGHHTAYCKVQIDISDENDNAPEITLASESQHIQEDAELGTAVALIKTHDLDSGFNGEILCQLKGNFPFKIVQDTKNTYRLVTDGALDREQIPEYNVTITATDKGNPPLSSSKTITLHILDVNDNVPVFHQASYTVHVAENNPPGASIAHVRASDPDLGPNGLVSYYIVASDLEPRELSSYVSVSARSGVVFAQRAFDHEQLRAFELTLQARDQGSPTLSANVSLRVLVDDRNDNAPLVLYPALGPEGSALFDMVPRSAEPGYLVTKVVAVDADSGYNAWLSYHIVQASEPGLFSLGLRTGEVRTARTLGDREAARQRLLVTVRDGGQQPLSATVMLHLIFADSLQEIQPDLSDRPTPSDPQAELQFHLVVALALISVLFLLAVILAISLRLRCSSRPATEGYFQPGVCFKTVPGVLPTYSERTLPYSYNPCAASHSSNTEFKFLNIKAENAAPQDLLCDEASWFESNDNPEMPSNSGNLQKQAPPNTDWRFSQAQRPGTSGSQNGDDTGTWPNNQFDTEMLQAMILASASEAADGSSTLGGGAGTMGLSARYGPQFTLQHVPDYRQNVYIPGSNATLTNAAGKRDGKAPAGGNGNKKKSGKKEKK

SEQ ID NO: 838 - protein, 818 aa, Homo sapiens
MAPPQRHPQRSEQVLLLTLLGTLWGAAAAQIRYSIPEELEKGSFVGNIVKDLGLEPQELAEHGVRIVSRGRMQLFSLNPRNGSLVTAGRIDREELCAQSPRCLVSFNILVEDKLNLYPVEVEIVDINDNTPRFLKEELEVKILENAAPSSRFPLMEVYDPDVGMNSLQGFKLSGNSHFSVDVQSEAHGPKYPELVLEGTLDREGEAVYRLVLTAMDGGDPVRSSVAQILVTVLDVNDNTPMFTQPVYRVSVPENLPVGTPVLAVTATDQDEGVHGEVTYSFVKITEKISQIFCLNVLTGEISTSANLDYEDSSFYELGVEARDGPGLRDRAKVLITILDVNDNVPEVVVTSGSRTIAESAPPGTVIALFQVFDRDSGLNGLVTCSIPRSLPFELEKSVGNYYRLVTNAALDREEVFLYNITVTATDKGTPPLSTETIISLNVADTNDNPPTFPHSSYSVYVLENNPRGASIFSVNALDPDVDQNAQVSYSLAEDTLQGAPLSSYVSINSDTGILYALRSFDYEQLRDLQLWVTASDSGDPPLSSNVSLSLFVLDQNDNAPEILYPALPTDGSTGVELAPRSAEPGYLVTKVVAVDRDSGQNAWLSYRLLKASEPGLFSVGLHTGEVRTARALLDRDALKQSLVVAVQDHGQPPLSATVTLTVAVADRIPDILADLGSLEPSAKPNDSDLTLYLVVAVAAVSCVFLAFVIVLLALRLQRWHKSRLLQASGGGLASMPGSHFVGVEGVRAFLQTYSHEVSLTADSRKSHLIFPQPNYADTLINQESYEKSEPLLITQDLLETKGEPRQLQVSFFPPKREE

SEQ ID NO: 839 - protein, 931 aa, Homo sapiens
MASPPRGWGCGELLLPFMLLGTLCEPGSGQIRYSMPEELDKGSFVGNIAKDLGLEPQELAERGVRIVSRGRTQLFALNPRSGSLVTAGRIDREELCAQSPLCVVNFNILVENKMKIYGVEVEIIDINDNFPRFRDEELKVKVNENAAAGTRLVLPFARDADVGVNSLRSYQLSSNLHFSLDVVSGTDGQKYPELVLEQPLDREKETVHDLLLTALDGGDPVLSGTTHIRVTVLDANDNAPLFTPSEYSVSVPENIPVGTRLLMLTATDPDEGINGKLTYSFRNEEEKISETFQLDSNLGEISTLQSLDYEESRFYLMEVVAQDGGALVASAKVVVTVQDVNDNAPEVILTSLTSSISEDCLPGTVIALFSVHDGDSGENGEIACSIPRNLPFKLEKSVDNYYHLLTTRDLDREETSDYNITLTVMDHGTPPLSTESHIPLKVADVNDNPPNFPQASYSTSVTENNPRGVSIFSVTAHDPDSGDNARVTYSLAEDTFQGAPLSSYVSINSDTGVLYALRSFDYEQLRDLQLWVTASDSGNPPLSSNVSLSLFVLDQNDNTPEILYPALPTDGSTGVELAPRSAEPGYLVTKVVAVDKDSGQNAWLSYRLLKASEPGLFAVGLHTGEVRTARALLDRDALKQSLVVAVEDHGQPPLSATFTVTVAVADRIPDILADLGSIKTPIDPEDLDLTLYLVVAVAAVSCVFLAFVIVLLVLRLRRWHKSRLLQAEGSRLAGVPASHFVGVDGVRAFLQTYSHEVSLTADSRKSHLIFPQPNYADTLLSEESCEKSEPLLMSDKVDANKEERRVQQAPPNTDWRFSQAQRPGTSGSQNGDDTGTWPNNQFDTEMLQAMILASASEAADGSSTLGGGAGTMGLSARYGPQFTLQHVPDYRQNVYIPGSNATLTNAAGKRDGKAPAGGNGNKKKSGKKEKK

SEQ ID NO: 840 - protein, 936 aa, Homo sapiens
MAAQRNRSKESKDCSGLVLLCLFFGIPWEAGARQISYSIPEELEKGSFVGNISKDLGLAPRELAERGVRIVSRGRTQLFSLNPRSGSLITAGRIDREELCAQSARCVVSFNILVEDRVKLFGIEIEVTDINDNAPKFQAENLDVKINENVAAGMRFPLPEAIDPDVGVNSLQSYQLSPNKHFSLRVQSRANGVKYPELVLEHSLDREEEAIHHLVLTASDGGDPLRSGTVLVSVTVFDANDNAPVFTLPEYRVSVPENLPVGTQLLTVTATDRDEGANGEVTYSFRKLPDTQLLKFQLNKYTGEIKISENLDYEETGFYEIEIQAEDGGAYLATAKVLITVEDVNDNSPELTITSLFSPVTEDSPLGTVVALLNVHDLDSEQNGQVTCSILAYLPFKLEKSIDSYYRLVIHRALDREQVSSYNITVTATDGGSPPLSTEAHFMLQVADINDNPPTFSQVSYFTYIPENNARGASIFSVTALDPDSKENAQIIYSLAEDTIQGVPLSSYISINSDTGVLYALRSFDYEQFHELQMQVTASDSGDPPLSSNVSLSLFVLDQNDNAPEILYPALPTDGSTGVELAPRSAEPGYLVTKVVAVDRDSGQNAWLSYRLLKASEPGLFAVGEHTGEVRTARALLDRDALKQSLVVAVQDHGQPPLSATVTLTVAVADSIPQVLADLGSFESPANSETSDLTLYLVVAVAAVSCVFLAFVIVLLAHRLRRWHKSRLLQASGGGLTGVSGSHFVGVDGVRAFLQTYSHEVSLTADSRKSHLIFPQPNYADTLISQESCEKNDPLSLLDDSKFPIEDTPLVPQAPPNTDWRFSQAQRPGTSGSQNGDDTGTWPNNQFDTEMLQAMILASASEAADGSSTLGGGAGTMGLSARYGPQFTLQHVPDYRQNVYIPGSNATLTNAAGKRDGKAPAGGNGNKKKSGKKEKK

SEQ ID NO: 841 - protein, 932 aa, Homo sapiens
MAAQPRGGDYRGFFLLSILLGTPWEAWAGRILYSVSEETDKGSFVGDIAKDLGLEPRELAERGVRIISRGRTQLFALNQRSGSLVTAGRIDREEICAQSARCLVNFNILMEDKMNLYPIDVEIIDINDNVPRFLTEEINVKIMENTAPGVRFPLSEAGDPDVGTNSLQSYQLSPNRHFSLAVQSGDDETKYPELVLERVLDREEERVHHLVLTASDGGDPPRSSTAHIQVTVVDVNDHTPVFSLPQYQVTVPENVPVGTRLLTVHAIDLDEGVNGEVTYSFRKITPKLPKMFHLNSLTGEISTLEGLDYEETAFYEMEVQAQDGPGSLTKAKVLITVLDVNDNAPEVTMTSLSSSIPEDTPLGTVIALFYLQDRDSGKNGEVTCTIPENLPFKLEKSIDNYYRLVTTKNLDRETLSLYNITLKATDGGTPPLSRETHIFMQVADTNDNPPTFPHSSYSVYIAENNPRGASIFLVTAQDHDSEDNAQITYSLAEDTIQGAPVSSYVSINSDTGVLYALQSFDYEQLRELQLRVTAHDSGDPPLSSNMSLSLFVLDQNDNPPEILYPALPTDGSTGMELAPRSAEPGYLVTKVVAVDKDSGQNAWLSYLLLKASEPGLFAVGLYTGEVRTARALLDRDALKQSLVVAVQDHGQPPLSATVTLTVAVADSIPEVLADLGSLEPSDGPYNYDLTLYLVVAVATVSCVFLAFVLVLLALRLRRWHKSRLLQASEGGLANVPTSHFVGMDGVQAFLQTYSHEVSLTADSRKSHLIFPQPNYVDMLISQESCEKNDSLLTSVDFQECKENLPSIQQAPPNTDWRFSQAQRPGTSGSQNGDDTGTWPNNQFDTEMLQAMILASASEAADGSSTLGGGAGTMGLSARYGPQFTLQHVPDYRQNVYIPGSNATLTNAAGKRDGKAPAGGNGNKKKSGKKEKK

SEQ ID NO: 842 - protein, 932 aa, Homo sapiens
MTNCLSFRNGRGLALLCALLGTLCETGSGQIRYSVSEELDKGSFVGNIANDLGLEPRELAERGVRIVSRGRTQLFSLNPQSGSLVTAERIDREELCAQIPLCLVKINILVEDKLKIFEVEIEIKDINDNAPNFPTEELEIKIGELTVPGTRFPIKTAFDPDVGINSLQNYKLSPNDYFSLAVNSVSEGAKYPELVLERALDREKKEIHQLVLVASDGGDPVHSGNLHIQVIVLDANDNPPMFTQPEYRVSVWENVPVGTRLLTVNATDPDEGFNAQVSYILDKMPGKIAEIFHLNSVSGEVSILKSLDYEDAMFYEIKIEAQDGPGLLSRAKILVTVLDVNDNAPEITITSLTSSVPEEGTVGREIALIDVHDRDSGQNGQVEVFVLGNLPFKLEKSIDQYYRLVTATSLDREQISEYNISLRASDGGSPPLSTETHITLHVIDINDNPPTFPHLSYSAYIPENNPRGASIFSVTAQDPDSNNNARITYALTEDTLQGAPLSSFVSINSNTGVLYALRSFDYEQFRDLKLLVTASDSGNPPLSSNVSLNLFVLDQNDNAPEILYPALPTDGSTGVELAPRSAEPGYLVTKVVAVDRDSGQNAWLSYRLLKASEPGLFSVGLHTGEVRTARALLDRDALKQSLVVAVQDHGQPPLSATVTLTVAVADRIPDILADLGSLEPSAKPNDSDLTLYLVVAVAAVSCVFLAFVIVLLALRLRRWHKSRLLQASGGGLASTPGSHFVGADGVRAFLQTYSHEVSLTADSRKSHLIFPQPNYADTLISQESCEKSEPLLITQDLLEMKGDSNLLQQAPPNTDWRFSQAQRPGTSGSQNGDDTGTWPNNQFDTEMLQAMILASASEAADGSSTLGGGAGTMGLSARYGPQFTLQHVPDYRQNVYIPGSNATLTNAAGKRDGKAPAGGNGNKKKSGKKEKK

SEQ ID NO: 843 - protein, 923 aa, Homo sapiens
MGSGAGELGRAERLPVLFLFLLSLFCPALCEQIRYRIPEEMPKGSVVGNLATDLGFSVQELPTRKLRVSSEKPYFTVSAESGELLVSSRLDREEICGKKPACALEFEAVAENPLNFYHVNVEIEDINDHTPKFTQNSFELQISESAQPGTRFILGSAHDADIGSNTLQNYQLSPSDHFSLINKEKSDGSKYPEMVLKTPLDREKQKSYHLTLTALDFGAPPLSSTAQIHVLVTDANDNAPVFSQDVYRVSLSENVYPGTTVLQVTATDQDEGVNAEITFSFSEASQITQFDLNSNTGEITVLNTLDFEEVKEYSIVLEARDGGGMIAQCTVEVEVIDENDNAPEVIFQSLPNLIMEDAELGTHIALLKVRDKDSRHNGEVTCKLEGDVPFKILTSSRNTYKLVTDAVLDREQNPEYNITVTATDRGKPPLSSSSSITLHIGDVNDNAPVFSQSSYIVHVAENNPPGASISQVRASDPDLGPNGQVSYCIMASDLEQRELSSYVSISAESGVVFAQRAFDHEQLRAFELTLQARDQGSPALSANVSLRVLVDDRNDNAPRVLYPALGPDGSALFDMVPHAAEPGYLVTKVVAVDADSGHNAWLSYHVLQASEPGLFSLGLRTGEVRTARALGDRDAVRQRLLVAVRDGGQPPLSATATLHLVFADSLQEVLPDITDRPDPSDLQAELQFYLVVALALISVLFLVAMILAIALRLRRSSSPASWSCFQPGLCVKSESVVPPNYSEGTLPYSYNLCVAHTGKTEFNFLKCSEQLSSGQDILCGDSSGALFPLCNSSELTSHQQAPPNTDWRFSQAQRPGTSGSQNGDDTGTWPNNQFDTEMLQAMILASASEAADGSSTLGGGAGTMGLSARYGPQFTLQHVPDYRQNVYIPGSNATLTNAAGKRDGKAPAGGNGNKKKSGKKEKK

SEQ ID NO: 844 - protein, 929 aa, Homo sapiens
MGGSCAQRRRAGPRQVLFPLLLPLFYPTLCEPIRYSIPEELAKGSVVGNLAKDLGLSVLDVSARELRVSAEKLHFSVDAQSGDLLVKDRIDREQICKERRRCELQLEAVVENPLNIFHVIVVIEDVNDHAPQFRKDEINLEISESVSLGMGTILESAEDPDISMNSLSKYQLSPNEYFSLVEKDNPDGGKYPELVLQKTLDRETQSAHHLVLTALDGGDPPRSGTAQIRILVIDANDNPPVFSQDVYRVSLREDVPPGTSILRVKATDQDEGINSEITYSFFGVADKAQHVFSLDYTTGNILTQQPLDFEEVERYTINIEAKDRGSLSTRCKVIVEVVDENDNSPEIIITSLSDQIMEDSPPGVVVALFKTRDQDSGENGEVRCSLSRGVPFKIHSSSNNYYKLVTDEALDREQTPEYNVTIAATDRGKPPLSSSKTITLHITDVNDNAPVFGQSAYLVHVPENNQPGASIAQVSASDPDFGLNGRVSYSLIASDLESRTLSSYVSVSAQSGVVFAQRAFDHEQLRTFELTLQARDQGSPALSANVSLRVLVGDRNDNAPRVLYPALGPDGSALFDTVPRAAQPGYLVTKVVAVDADSGHNAWLSYHVVQASEPGLFSLGLRTGEVRMVRALGDKDSVRQRLLVAVRDGGQPPLSATATLHLVFADSLQEVLPDFSDHPTPSDSQAEMQFYLVVALALISVLFLLAVILAIALRLRQSFSPTAGDCFESVLCSKSGPVGPPNYSEGTLPYAYNFCVPGDQMNPEFNFFTSVDHCPATQDNLNKDSMLLASILTPSVEADKKILKQQAPPNTDWRFSQAQRPGTSGSQNGDDTGTWPNNQFDTEMLQAMILASASEAADGSSTLGGGAGTMGLSARYGPQFTLQHVPDYRQNVYIPGSNATLTNAAGKRDGKAPAGGNGNKKKSGKKEKK

SEQ ID NO: 845 - protein, 823 aa, Homo sapiens
MAALQKLPHCRKLVLLCFLLATLWEARAGQIRYSVREEIDRGSFVGNIAKDLGLEPLALAEQGVRIVSRGRSQLFALNPRSGSLVTANRIDREELCAQSAPCLLNFNILLEDKLTIYSVEVEITDINDNAPRFGVEELELKISETTTPGFRIPLKNAHDADVGENALQKYALNPNDHFSLDVRRGADGNKYPELVLERSLDREEEAVHHLVLVASDGGDPVLSGTSRICVKVLDANDNAPVFTQPEYRISIPENTLVGTRILTVTATDADEGYYAQVVYFLEKSPGETSEVFELKSTSGELTIIKDLDYEDATFHEIDIEAQDGPGLLTRAKVIVTVLDVNDNAPEFYMTSATSSVSEDSLPGTIIGLFNVHDRDSGQNAFTTCSLPEDLPFKLEKSVDNYYRLVTTRALDREQFSFYNITLTAKDGGNPSLSTDAHILLQVADINDNAPAFSRTSYSTYIPENNPRGASVFSVTAHDPDSNDNAHVTYSFAEDTVQGAPLSSYISINSDTGVLYALRSFDYEQLRDLQVWVIARDSGNPPLSSNVSLSLFVLDQNDNAPEILYPAFPTDGSTGVELAPRSAEPGYLVTKVVAVDRDSGQNAWLSYHLLKASEPGLFSVGLHTGEVRTARALLDRDALKQSLVVAIQDHGQPPLSATVTLTVAVADRIPDILADLGSLEPSAIPNDSDLTLYLVVAVAAVSCVFLAFVIVLLAHRLRRWHKSRLLQASGGSLTGMQSSHFVGVDGVRAFLQTYSHEVSLTADSRKSHLIFPQPNYADTLISQESCEKKDFLSAPQSLLEEEREETFSQVIYLFTTYVLASLLK

SEQ ID NO: 846 - protein, 944 aa, Homo sapiens
MGPKTLPQLAGKWQVLCMLSLCCWGWVSGQLRYSVVEESEPGTLVGNVAQDLGLKMTDLLSRRLQLGSEENGRYFSLSLMSGALAVNQKIDRESLCGASTSCLLPVQVVTEHPLELIRVEVEILDLNDNSPSFATPEREMRISESAASGARFPLDSAQDPDVGTNTVSFYTLSPNSHFSLNVKTLKDGKPFPELVLEQQLDREAQARHQLVLTAVDGGTPARSGTTLISVIVLDINDNAPTFQSSVLRVGIPENAPIGTLLLRLNATDPDEGTNGQLDYSFGDHTSEAVRNLFGLDPSSGAIHVLGPIDFEESRFYEIHARARDQGQPAMEGHCVIQVDVGDVNDNAPEVLLASLANPVLESTPVGTVVGLFNVRDRDSGRNGEVSLDISPDLPFQIKPSENHYSLLTSQPLDREATSHYIIELLASDAGSPSLHKHLTIRLNISDVNDNAPRFNQQLYTAYILENRPPGSLLCTVAASDPDTGDNARLTYSIVGNQVQGAPASSFVYVNPEDGRIFAQRTFDYELLQMLQIVVGVRDSGSPPLHANTSLHVFVLDENDNAPAVLHPRPDWEHSAPQRLPRSAPPGSLVTKVTAVDADAGHNAWLSYSLLPQSTAPGLFLVSTHTGEVRTARALLEDDSDTQQVVVLVRDNGDPSLSSTATVLLVLEDEDPEEMPKSSDFLIHPPERSDLTLYLIVALATVSLLSLVTFTFLSAKCLQGNADGDGGGGQCCRRQDSPSPDFYKQSSPNLQVSSDGTLKYMEVTLRPTDSQSHCYRTCFSPASDGSDFTFLRPLSVQQPTALALEPDAIRSRSNTLRERSQQAPPNTDWRFSQAQRPGTSGSQNGDDTGTWPNNQFDTEMLQAMILASASEAADGSSTLGGGAGTMGLSARYGPQFTLQHVPDYRQNVYIPGSNATLTNAAGKRDGKAPAGGNGNKKKSGKKEKK

SEQ ID NO: 847 - protein, 823 aa, Homo sapiens [sequence omitted]

SEQ ID NO: 848 - protein, 820 aa, Homo sapiens
MAAPQSRPRRGELILLCALLGTLWEIGRGQIRYSVPEETDKGSFVGNISKDLGLDPRKLAKHGVRIVSRGRTQLFALNPRSGSLITAGRIDREELCAQSPRCLININTLVEDKGKLFGVEIEIIDINDNNPKFQVEDLEVKINEIAVPGARYPLPEAVDPDVGVNSLQSYQLSPNHHFSLDVQTGDNGAINPELVLERALDREEEAAHHLVLTASDGGKPPRSSTVRIHVTVLDTNDNAPVFPHPIYRVKVLENMPPGTRLLTVTASDPDEGINGKVAYKFRKINEKQTPLFQLNENTGEISIAKSLDYEECSFYEMEIQAEDVGALLGRTKLLISVEDVNDNRPEVIITSLFSPVLENSLPGTVIAFLSVHDQDSGKNGQVVCYTRDNLPFKLEKSIGNYYRLVTRKYLDRENVSIYNITVMASDLGTPPLSTETQIALHVADINDNPPTFPHASYSAYILENNLRGASIFSLTAHDPDSQENAQVTYSVTEDTLQGAPLSSYISINSDTGVLYALQSFDYEQIRDLQLLVTASDSGDPPLSSNMSLSLFVLDQNDNAPEILYPALPTDGSTGVELAPRSAERGYLVTKVVAVDRDSGQNAWLSYRLLKASEPGLFSVGLHTGEVRTARALLDRDALKQSLVVAVQDHGQPPLSATVTLTVAVADSIPEVLTELGSLKPSVDPNDSSLTLYLVVAVAAISCVFLAFVAVLLGLRLRRWHKSRLLQDSGGRLVGVPASHFVGVEEVQAFLQTYSQEVSLTADSRKSHLIFPQPNYADMLISQEGCEKNDSLLTSVDFHEYKNEADHGQVSLVLCLLLISR

SEQ ID NO: 849 - protein, 817 aa, Homo sapiens
MAAQPRGGDYRGFFLLSILLGTPWEAWAGRILYSVSEETDKGSFVGDIAKDLGLEPRELAERGVRIISRGRTQLFALNQRSGSLVTAGRIDREEICAQSARCLVNFNILMEDKMNLYPIDVEIIDINDNVPRFLTEEINVKIMENTAPGVRFPLSEAGDPDVGTNSLQSYQLSPNRHFSLAVQSGDDETKYPELVLERVLDREEERVHHLVLTASDGGDPPRSSTAHIQVTVVDVNDHTPVFSLPQYQVTVPENVPVGTRLLTVHAIDLDEGVNGEVTYSFRKITPKLPKMFHLNSLTGEISTLEGLDYEETAFYEMEVQAQDGPGSLTKAKVLITVLDVNDNAPEVTMTSLSSSIPEDTPLGTVIALFYLQDRDSGKNGEVTCTIPENLPFKLEKSIDNYYRLVTTKNLDRETLSLYNITLKATDGGTPPLSRETHIFMQVADTNDNPPTFPHSSYSVYIAENNPRGASIFLVTAQDHDSEDNAQITYSLAEDTIQGAPVSSYVSINSDTGVLYALQSFDYEQLRELQLRVTAHDSGDPPLSSNMSLSLFVLDQNDNPPEILYPALPTDGSTGMELAPRSAEPGYLVTKVVAVDKDSGQNAWLSYLLLKASEPGLFAVGLYTGEVRTARALLDRDALKQSLVVAVQDHGQPPLSATVTLTVAVADSIPEVLADLGSLEPSDGPYNYDLTLYLVVAVATVSCVFLAFVLVLLALRLRRWHKSRLLQASEGGLANVPTSHFVGMDGVQAFLQTYSHEVSLTADSRKSHLIFPQPNYVDMLISQESCEKNDSLLTSVDFQECKENLPSIQVSPALPLFP

SEQ ID NO: 850 - protein, 803 aa, Homo sapiens
MGSGAGELGRAERLPVLFLFLLSLFCPALCEQIRYRIPEEMPKGSVVGNLATDLGFSVQELPTRKLRVSSEKPYFTVSAESGELLVSSRLDREEICGKKPACALEFEAVAENPLNFYHVNVEIEDINDHTPKFTQNSFELQISESAQPGTRFILGSAHDADIGSNTLQNYQLSPSDHFSLINKEKSDGSKYPEMVLKTPLDREKQKSYHLTLTALDFGAPPLSSTAQIHVLVTDANDNAPVFSQDVYRVSLSENVYPGTTVLQVTATDQDEGVNAEITFSFSEASQITQFDLNSNTGEITVLNTLDFEEVKEYSIVLEARDGGGMIAQCTVEVEVIDENDNAPEVIFQSLPNLIMEDAELGTHIALLKVRDKDSRHNGEVTCKLEGDVPFKILTSSRNTYKLVTDAVLDREQNPEYNITVTATDRGKPPLSSSSSITLHIGDVNDNAPVFSQSSYIVHVAENNPPGASISQVRASDPDLGPNGQVSYCIMASDLEQRELSSYVSISAESGVVFAQRAFDHEQLRAFELTLQARDQGSPALSANVSLRVLVDDRNDNAPRVLYPALGPDGSALFDMVPHAAEPGYLVTKVVAVDADSGHNAWLSYHVLQASEPGLFSLGLRTGEVRTARALGDRDAVRQRLLVAVRDGGQPPLSATATLHLVFADSLQEVLPDITDRPDPSDLQAELQFYLVVALALISVLFLVAMILAIALRLRRSSSPASWSCFQPGLCVKSESVVPPNYSEGTLPYSYNLCVAHTGKTEFNFLKCSEQLSSGQDILCGDSSGALFPLCNSSELTSHQVSFL

SEQ ID NO: 851 - protein, 818 aa, Homo sapiens
MGSGAGELGRAERLPVLFLFLLSLFCPALCEQIRYRIPEEMPKGSVVGNLATDLGFSVQELPTRKLRVSSEKPYFTVSAESGELLVSSRLDREEICGKKPACALEFEAVAENPLNFYHVNVEIEDINDHTPKFTQNSFELQISESAQPGTRFILEVAEDADIGLNSLQKYKLSLNPSFSLIIKEKQDGSKYPELALEKTLDREQQSYHRLVLTALDGGHPPLSGTTELRIQVTDANDNPPVFNRDVYRVSLRENVPPGTTVLQVSATDQDEGINSEITYSFYRTGQIFSLNSKSGEITTQKKLDFEETKEYSMVVEGRDGGGLVAQCTVEINIQDENDNSPEVTFHSLLEMILENAVPGTLIALIKIHDQDSGENGEVNCQLQGEVPFKIISSSKNSYKLVTDGTLDREQTPEYNVTITATDRGKPPLSSSISVILHIRDVNDNAPVFHQASYLVSVPENNPPGASIAQVCASDLDLGLNGQVSYSIMASDLEPLALASYVSMSAQSGVVFAQRAFDYEQLRTFELTLQARDQGSPALSANVSLRVLVGDRNDNAPRVLYPALGPDGSALFDMVPRAAEPGYLVTKVVAVDADSGHNAWLSYHVLQASEPGLFSLGLRTGEVRTARALGDRDAARQRLLVAVRDGGQPPLSATATLHLVFADSLQEVLPDITDRPVPSDPQAELQFYLVVALALISVLFLLAVILAVALRLRRSSSPAAWSCFQPGLCVKSGPVVPPNYSQGTLPYSYNLCVAHTGKTEFNFLKCSEQLSSGQDILCGDSSGALFPLCNSSESTSHPELVSFIYVYSFSLPTQFSVFT

SEQ ID NO: 852 - protein, 828 aa, Homo sapiens
MAAPTKCQLRGRLVLLCSLLGMLWEARASQIRYSVPEETEKGYIVGNISKDLALEPRELAERRVRIVSRGRTQLFSLNPRSGTLVTAGRIDREELCAQSPRCLVNFKVLVEDRVKLYGIEIEVTDINDSAPKFQAESLEVKINEIAVPGARYPLPEAIDPDVGVNSLQSYQLSPNHHFSLNVQTGDNGAINPELVLERALDREEATAHHLVLTASDGGEPRRSSTVRIHVTVLDTNDNAPVFAQRIYRVKVLENVPPGTWLLTATASDLDEGINGKVAYKFWKINEKQSLLFQLNENTGEISTAKSLDYEECSFYEMEIQAEDGGGLKGWTKVLISVEDVNDNRPEVTITSLFSPVREDAPQGTVILLFNAHDRDSGKNGQVVCSIQENLSFTLENSEEDYYRLLTAQILDREKASEYNITVTATDRGTPPLSTEIHITLQVTDINDNPPAFSQASYSVYLPENNARGTSIFSVIAYDPDSNENSRVIYSLAEDTIQGSPLSTYVSINSDTGVLYALCSFDYEQFRDLQMQVTASDSGSPPLSSNVSLRLFVLDQNDNAPEILYPALPTDGSTGVELAPRSAEPGYLVTKVVAVDRDSGQNAWLSYRLFKASEPGLFSVGLHTGEVRTARALLDRDALKQSLVVAVQDHGQPPLSATVTLTVAIADSIPDILADLGSLQIPADLEASDLTLYLVVAVAVVSCVFLTFVITLLALRLRHWHSSHLLRATSDGLAGVPTSHFVGVDGVRAFLQTYSQEFSLTADSRKSHLIFPQPNYADTLISQQSCEKNEPLCVSVDSKFPIEDTPLVPVSSFFFFLSFLFLFFVLFCF

SEQ ID NO: 853 - protein, 820 aa, Homo sapiens
MGGSCAQRRRAGPRQVLFPLLLPLFYPTLSEPIRYSIPEELAKGSVVGNLAKDLGLSVLDVSARKLRVSAEKLHFSVDAESGDLLVKNRIDREQICKERRRCELQLEAVVENPLNIFHVIVVIEDVNDHAPQFDKKEIHLEIFESASAGTRLSLDPATDPDININSIKDYKINSNPYFSLMVRVNSDGGKYPELSLEKLLDREEQRSHSLILTALDGGDPPRSATAHIEISVKDTNDNPPVFSRDEYRISLSENLPPGSPVLQVTATDQDEGVNAEINYYFRSTAQSTKHMFSLDEKTGMIKNNQSFDFEDVERYTMEVEAKDGGGLSTQCKVIIEILDENDNSPEIIITSLSDQILENSPPGMVVALFKTRDLDFGGNGEVRCNIETDIPFKIYSSSNNYYKLVTDGALDREQTPEYNVTIVATDRGKPPLSSSRSITLYVADINDNAPVFDQTSYVVHVAENNPPGASIAQVSASDPDLGLNGHISYSIVASDLEPLAVSSYVSVSAQSGVVFAQRAFDHEQLRAFALTLQARDHGSPTLSANVSLRVLVGDRNDNAPRVLYPALGPDGSAFFDMVPRSAEPGYLVTKVVAVDADSGHNAWLSYHVLQASEPGLFSLGLRTGEVRTARALGDRDAARQRLLVAVRDGGQPPLSATATLHLVFADNLQEILPDLSDRPVLSDPQAELQFYLVVALALISVLFLLAVILAIALRLRRSLSPATWDCFHPGLCVKSGPVVPPNYSEGTLPYSYNLCIAHTGTKEFNFLKCSVPLHSNEDMVCSVSPGALIPPHGGEDLTSHPETLTSVSFSFLCVIYLIVY

SEQ ID NO: 854 - protein, 850 aa, Homo sapiens
MAAQRNRSKESKDCSGLVLLCLFFGIPWEAGARQISYSIPEELEKGSFVGNISKDLGLAPRELAERGVRIVSRGRTQLFSLNPRSGSLITAGRIDREELCAQSARCVVSFNILVEDRVKLFGIEIEVTDINDNAPKFQAENLDVKINENVAAGMRFPLPEAIDPDVGVNSLQSYQLSPNKHFSLRVQSRANGVKYPELVLEHSLDREEEAIHHLVLTASDGGDPLRSGTVLVSVTVFDANDNAPVFTLPEYRVSVPENLPVGTQLLTVTATDRDEGANGEVTYSFRKLPDTQLLKFQLNKYTGEIKISENLDYEETGFYEIEIQAEDGGAYLATAKVLITVEDVNDNSPELTITSLFSPVTEDSPLGTVVALLNVHDLDSEQNGQVTCSILAYLPFKLEKSIDSYYRLVIHRALDREQVSSYNITVTATDGGSPPLSTEAHFMLQVADINDNPPTFSQVSYFTYIPENNARGASIFSVTALDPDSKENAQIIYSLAEDTIQGVPLSSYISINSDTGVLYALRSFDYEQFHELQMQVTASDSGDPPLSSNVSLSLFVLDQNDNAPEILYPALPTDGSTGVELAPRSAEPGYLVTKVVAVDRDSGQNAWLSYRLLKASEPGLFAVGEHTGEVRTARALLDRDALKQSLVVAVQDHGQPPLSATVTLTVAVADSIPQVLADLGSFESPANSETSDLTLYLVVAVAAVSCVFLAFVIVLLAHRLRRWHKSRLLQASGGGLTGVSGSHFVGVDGVRAFLQTYSHEVSLTADSRKSHLIFPQPNYADTLISQESCEKNDPLSLLDDSKFPIEDTPLVPVSFIFIFTFVKKKKIGFYFEVCGMMVESVNAKTLMSRI

SEQ ID NO: 855 - protein, 808 aa, Homo sapiens
MGGSCAQRRRAGPRQVLFPLLLPLFYPTLCEPIRYSIPEELAKGSVVGNLAKDLGLSVLDVSARELRVSAEKLHFSVDAQSGDLLVKDRIDREQICKERRRCELQLEAVVENPLNIFHVIVVIEDVNDHAPQFRKDEINLEISESVSLGMGTILESAEDPDISMNSLSKYQLSPNEYFSLVEKDNPDGGKYPELVLQKTLDRETQSAHHLVLTALDGGDPPRSGTAQIRILVIDANDNPPVFSQDVYRVSLREDVPPGTSILRVKATDQDEGINSEITYSFFGVADKAQHVFSLDYTTGNILTQQPLDFEEVERYTINIEAKDRGSLSTRCKVIVEVVDENDNSPEIIITSLSDQIMEDSPPGVVVALFKTRDQDSGENGEVRCSLSRGVPFKIHSSSNNYYKLVTDEALDREQTPEYNVTIAATDRGKPPLSSSKTITLHITDVNDNAPVFGQSAYLVHVPENNQPGASIAQVSASDPDFGLNGRVSYSLIASDLESRTLSSYVSVSAQSGVVFAQRAFDHEQLRTFELTLQARDQGSPALSANVSLRVLVGDRNDNAPRVLYPALGPDGSALFDTVPRAAQPGYLVTKVVAVDADSGHNAWLSYHVVQASEPGLFSLGLRTGEVRMVRALGDKDSVRQRLLVAVRDGGQPPLSATATLHLVFADSLQEVLPDFSDHPTPSDSQAEMQFYLVVALALISVLFLLAVILAIALRLRQSFSPTAGDCFESVLCSKSGPVGPPNYSEGTLPYAYNFCVPGDQMNPEFNFFTSVDHCPATQDNLNKDSMLLASILTPSVEADKKILKQVSI

SEQ ID NO: 856 - protein, 931 aa, Homo sapiens [sequence omitted]

SEQ ID NO: 857 - protein, 932 aa, Homo sapiens
MAALQKLPHCRKLVLLCFLLATLWEARAGQIRYSVREEIDRGSFVGNIAKDLGLEPLALAEQGVRIVSRGRSQLFALNPRSGSLVTANRIDREELCAQSAPCLLNFNILLEDKLTIYSVEVEITDINDNAPRFGVEELELKISETTTPGFRIPLKNAHDADVGENALQKYALNPNDHFSLDVRRGADGNKYPELVLERSLDREEEAVHHLVLVASDGGDPVLSGTSRICVKVLDANDNAPVFTQPEYRISIPENTLVGTRILTVTATDADEGYYAQVVYFLEKSPGETSEVFELKSTSGELTIIKDLDYEDATFHEIDIEAQDGPGLLTRAKVIVTVLDVNDNAPEFYMTSATSSVSEDSLPGTIIGLFNVHDRDSGQNAFTTCSLPEDLPFKLEKSVDNYYRLVTTRALDREQFSFYNITLTAKDGGNPSLSTDAHILLQVADINDNAPAFSRTSYSTYIPENNPRGASVFSVTAHDPDSNDNAHVTYSFAEDTVQGAPLSSYISINSDTGVLYALRSFDYEQLRDLQVWVIARDSGNPPLSSNVSLSLFVLDQNDNAPEILYPAFPTDGSTGVELAPRSAEPGYLVTKVVAVDRDSGQNAWLSYHLLKASEPGLFSVGLHTGEVRTARALLDRDALKQSLVVAIQDHGQPPLSATVTLTVAVADRIPDILADLGSLEPSAIPNDSDLTLYLVVAVAAVSCVFLAFVIVLLAHRLRRWHKSRLLQASGGSLTGMQSSHFVGVDGVRAFLQTYSHEVSLTADSRKSHLIFPQPNYADTLISQESCEKKDFLSAPQSLLEEEREETFSQQAPPNTDWRFSQAQRPGTSGSQNGDDTGTWPNNQFDTEMLQAMILASASEAADGSSTLGGGAGTMGLSARYGPQFTLQHVPDYRQNVYIPGSNATLTNAAGKRDGKAPAGGNGNKKKSGKKEKK

SEQ ID NO: 858 - protein, 931 aa, Homo sapiens
MKASSGRCGLVRWLQVLLPFLLSLFPGALPVQIRYSIPEELAKNSVVGNLAKDLGLSVRDLPARKLRVSAEKEYFTVNPESGDLLVSDRIDREQICGKQPLCVLDFDTVAENPLNIFYIAVIVQDINDNTPLFKQTKINLKIGESTKPGTTFPLDPALDSDVGPNSLQRYHLNDNEYFDLAEKQTPDGRKYPELILKHSLDREEHSLHQLVLTAVDGGDPPQSGTTQIRIKVTDANDNPPVFSQDVYRVTLREDVPPGFFVLQVTATDRDEGINAEITYSFHNVDEQVKHFFNLNEKTGEITTKDDLDFEIASSYTLSIEAKDPGDLAAHCSIQVEILDDNDCAPEVIVTSVSTPLPEDSPPGTVIALIKTRDRDSGENGEVYCQVLGNAKFILKSSSKNYYKLVTDGALDREEIPEYNLTITATDGGKPPLSSSIIVTLHISDVNDNAPVFQQTSYMVHVAENNPPGASIAQISASDPDLGPSGQVSYSIVASDLKPREILSYVSVSAQSGVVFAQRAFDHEQLRAFELTLQARDQGSPALSANVSLRVLVGDLNDNAPRVLYPALGPDGSALFDMVPRAAEPGYLVTKVVAVDADSGHNAWLSYHVLQASEPGLFSLGLRTGEVRTARALGDRDAARQRLLVAVRDGGQPPLSATATLHLIFADSLQEVLPDLSDRREPSDPQAKLQFYLVVALALISVLFFLAVILAISLRLRLSSRSDAWDCFQPGLSSKPGPGVLPNYSEGTLPYSYNLCVASQSAKTEFNFLNITPELVPAQDLVCDNASWEQNTNHGAAGVPFASDTILKQAPPNTDWRFSQAQRPGTSGSQNGDDTGTWPNNQFDTEMLQAMILASASEAADGSSTLGGGAGTMGLSARYGPQFTLQHVPDYRQNVYIPGSNATLTNAAGKRDGKAPAGGNGNKKKSGKKEKK

SEQ ID NO: 859 - protein, 932 aa, Homo sapiens
MAPPQRHPQRSEQVLLLTLLGTLWGAAAAQIRYSIPEELEKGSFVGNIVKDLGLEPQELAEHGVRIVSRGRMQLFSLNPRNGSLVTAGRIDREELCAQSPRCLVSFNILVEDKLNLYPVEVEIVDINDNTPRFLKEELEVKILENAAPSSRFPLMEVYDPDVGMNSLQGFKLSGNSHFSVDVQSEAHGPKYPELVLEGTLDREGEAVYRLVLTAMDGGDPVRSSVAQILVTVLDVNDNTPMFTQPVYRVSVPENLPVGTPVLAVTATDQDEGVHGEVTYSFVKITEKISQIFCLNVLTGEISTSANLDYEDSSFYELGVEARDGPGLRDRAKVLITILDVNDNVPEVVVTSGSRTIAESAPPGTVIALFQVFDRDSGLNGLVTCSIPRSLPFELEKSVGNYYRLVTNAALDREEVFLYNITVTATDKGTPPLSTETIISLNVADTNDNPPTFPHSSYSVYVLENNPRGASIFSVNALDPDVDQNAQVSYSLAEDTLQGAPLSSYVSINSDTGILYALRSFDYEQLRDLQLWVTASDSGDPPLSSNVSLSLFVLDQNDNAPEILYPALPTDGSTGVELAPRSAEPGYLVTKVVAVDRDSGQNAWLSYRLLKASEPGLFSVGLHTGEVRTARALLDRDALKQSLVVAVQDHGQPPLSATVTLTVAVADRIPDILADLGSLEPSAKPNDSDLTLYLVVAVAAVSCVFLAFVIVLLALRLQRWHKSRLLQASGGGLASMPGSHFVGVEGVRAFLQTYSHEVSLTADSRKSHLIFPQPNYADTLINQESYEKSEPLLITQDLLETKGEPRQLQQAPPNTDWRFSQAQRPGTSGSQNGDDTGTWPNNQFDTEMLQAMILASASEAADGSSTLGGGAGTMGLSARYGPQFTLQHVPDYRQNVYIPGSNATLTNAAGKRDGKAPAGGNGNKKKSGKKEKK

SEQ ID NO: 860 - protein, 927 aa, Homo sapiens
MQRAREAEMMKSQVLFPFLLSLFCGAISQQIRYTIPEELANGSRVGKLAKDLGLSVRELPTRKLRVSAEDYFNVSLESGDLLVNGRIDREKICGRKLECALEFETVAENPMNVFHVVVVIQDINDNAPRFVAKGIDLEICESALPGVKFSLDSAQDADVEGNSLKLYTINPNQYFSLSTKESPDGSKYPVLLLEKPLDREHQSSHRLILTAMDGGDPPLSGTTHIWIRVTDANDNAPVFSQEVYRVSLQENVPWGTSVLRVMATDQDEGINAEITYAFLNSPISTSLFNLNPNTGDITTNGTLDFEETSRYVLSVEAKDGGVHTAHCNVQIEIVDENDNAPEVTFMSFSNQIPEDSDLGTVIALIKVRDKDSGQNGMVTCYTQEEVPFKLESTSKNYYKLVIAGALNREQTADYNVTIIATDKGKPALSSRTSITLHISDINDNAPVFHQASYVVHVSENNPPGASIAQVSASDPDLGPNGRVSYSILASDLEPRELLSYVSVSPQSGVVFAQRAFDHEQLRAFELTLQARDQGSPALSANVSLRVLVGDLNDNAPRVLYPALGPDGSALFDMVPRAAEPGYLVTKVVAVDADSGHNAWLSYHVLQASEPGLFSLGLRTGEVRTARALGDRDAARQRLLVAVRDGGQPPLSATATLHLIFADSLQEVLPDLSDRPEPSDPQTELQFYLVVALALISVLFLLAVILAIALRLRRSSSLDTEGCFQTGLCSKSGPGVPPNHSEGTLPYSYNLCIASHSAKTEFNSLNLTPEMAPPQDLLCDDPSMVVCASNEDHKIAYDPSLSSHQAPPNTDWRFSQAQRPGTSGSQNGDDTGTWPNNQFDTEMLQAMILASASEAADGSSTLGGGAGTMGLSARYGPQFTLQHVPDYRQNVYIPGSNATLTNAAGKRDGKAPAGGNGNKKKSGKKEKK

SEQ ID NO: 861 - protein, 932 aa, Homo sapiens
MAAPQSRPRRGELILLCALLGTLWEIGRGQIRYSVPEETDKGSFVGNISKDLGLDPRKLAKHGVRIVSRGRTQLFALNPRSGSLITAGRIDREELCAQSPRCLININTLVEDKGKLFGVEIEIIDINDNNPKFQVEDLEVKINEIAVPGARYPLPEAVDPDVGVNSLQSYQLSPNHHFSLDVQTGDNGAINPELVLERALDREEEAAHHLVLTASDGGKPPRSSTVRIHVTVLDTNDNAPVFPHPIYRVKVLENMPPGTRLLTVTASDPDEGINGKVAYKFRKINEKQTPLFQLNENTGEISIAKSLDYEECSFYEMEIQAEDVGALLGRTKLLISVEDVNDNRPEVIITSLFSPVLENSLPGTVIAFLSVHDQDSGKNGQVVCYTRDNLPFKLEKSIGNYYRLVTRKYLDRENVSIYNITVMASDLGTPPLSTETQIALHVADINDNPPTFPHASYSAYILENNLRGASIFSLTAHDPDSQENAQVTYSVTEDTLQGAPLSSYISINSDTGVLYALQSFDYEQIRDLQLLVTASDSGDPPLSSNMSLSLFVLDQNDNAPEILYPALPTDGSTGVELAPRSAERGYLVTKVVAVDRDSGQNAWLSYRLLKASEPGLFSVGLHTGEVRTARALLDRDALKQSLVVAVQDHGQPPLSATVTLTVAVADSIPEVLTELGSLKPSVDPNDSSLTLYLVVAVAAISCVFLAFVAVLLGLRLRRWHKSRLLQDSGGRLVGVPASHFVGVEEVQAFLQTYSQEVSLTADSRKSHLIFPQPNYADMLISQEGCEKNDSLLTSVDFHEYKNEADHGQQAPPNTDWRFSQAQRPGTSGSQNGDDTGTWPNNQFDTEMLQAMILASASEAADGSSTLGGGAGTMGLSARYGPQFTLQHVPDYRQNVYIPGSNATLTNAAGKRDGKAPAGGNGNKKKSGKKEKK

SEQ ID NO: 862 - protein, 683 aa, Homo sapiens
  misc_feature (683)..(683): Xaa can be any naturally occurring amino acid
MTATLRPYLSAVRATLQAALCLENFSSQVVERHNKPEVEVRSSKELLLQPVTISRNEKEKVLIEGSINSVRVSIAVKQADEIEKILCHKFMRFMMMRAENFFILRRKPVEQKKIFTIQGCYPVIRCLLRRRGWVEKKMVHRSGPTLLPPQKDLDSSAMGDSDTTEDEDEDEDEEFQPSQLFDFDDLLKFDDLDGTHALMVGLCLNLRNLPWFDEVDANSFFPRCYCLGAEDDKKAFIGDKQPKKQEKNPVLVSPEFVDEALCACEEYLSNLAHMDIDKDLEAPLYLTPEGWSLFLQRYYQVVHEGAELRHLDTQVQRCEDILQQLQAVVPQIDMEGDRNIWIVKPGAKSRGRGIMCMDHLEEMLKLVNGNPVVMKDGKWVVQKYIERPLLIFGTKFDLRQWFLVTDWNPLTVWFYRDSYIRFSTQPFSLKNLDNSVHLCNNSIQKHLENSCHRHPLLPPDNMWSSQRFQAHLQEMGAPNAWSTIIVPGMKDAVIHALQTSQDTVQCRKASFELYGADFVFGEDFQPWLIEINASPTMAPSTAVTARLCAGVQADTLRVVIDRMLDRNCDTGAFELIYKQAPALLCLRGPQLEVPCCLCPLKSEQFLAPVGRSRPKANSRPDCDKPRAEACPMKRLSPLKPLPLVGTFQRRRGLGDMKLGKPLLRFPTALVLDPTPNKKKQVKX

SEQ ID NO: 863 - protein, 352 aa, Homo sapiens
MDIDKDLEAPLYLTPEGWSLFLQRYYQVVHEGAELRHLDTQVQRCEDILQQLQAVVPQIDMEGDRNIWIVKPGAKSRGRGIMCMDHLEEMLKLVNGNPVVMKDGKWVVQKYIERPLLIFGTKFDLRQWFLVTDWNPLTVWFYRDSYIRFSTQPFSLKNLDNSVHLCNNSIQKHLENSCHRHPLLPPDNMWSSQRFQAHLQEMGAPNAWSTIIVPGMKDAVIHALQTSQDTVQCRKASFELYGADFVFGEDFQPWLIEINASPTMAPSTAVTARLCAGVQADTLRVVIDRMLDRNCDTGAFELIYKQPVTTSPASTPRPSCLLPMYSDTRARSSDDSTASWWALRPCRPQARP

SEQ ID NO: 864 - protein, 928 aa, Homo sapiens
MTATLRPYLSAVRATLQAALCLENFSSQVVERHNKPEVEVRSSKELLLQPVTISRNEKEKVLIEGSINSVRVSIAVKQADEIEKILCHKFMRFMMMRAENFFILRRKPVEGYDISFLITNFHTEQMYKHKLVDFVIHFMEEIDKEISEMKLSVNARARIVAEEFLKNEGGAVCNWLRKPQPLEPRTSFPSARRSEFRPPRRLPWAGPASAQSEEGHAGGRCQAGSPAPARRLSGAFKTLVPGTHAQGASDTHPLGPPHTPVLDPSPQDGFPVLWRGSSKASHMNRLRNAKIYVERAVKQKKIFTIQGCYPVIRCLLRRRGWVEKKMVHRSGPTLLPPQKDLDSSAMGDSDTTEDEDEDEDEEFQPSQLFDFDDLLKFDDLDGTHALMVGLCLNLRNLPWFDEVDANSFFPRCYCLGAEDDKKAFIEDFWLTAARNVLKLVVKSEWKSYPIQAVEEEASGDKQPKKQEKNPVLVSPEFVDEALCACEEYLSNLAHMDIDKDLEAPLYLTPEGWSLFLQRYYQVVHEGAELRHLDTQVQRCEDILQQLQAVVPQIDMEGDRNIWIVKPGAKSRGRGIMCMDHLEEMLKLVNGNPVVMKDGKWVVQKYIERPLLIFGTKFDLRQWFLVTDWNPLTVWFYRDSYIRFSTQPFSLKNLDNSVHLCNNSIQKHLENSCHRHPLLPPDNMWSSQRFQAHLQEMGAPNAWSTIIVPGMKDAVIHALQTSQDTVQCRKASFELYGADFVFGEDFQPWLIEINASPTMAPSTAVTARLCAGVQADTLRVVIDRMLDRNCDTGAFELIYKQPAVEVPQYVGIRLLVEGFTIKKPMAMCHRRMGVRPAVPLLTQRGSGEARHHFPSLHTKAQLPSPHVLRHQGQVLRRQHSKLVGTKALSTTGKALRTLPTAKVFISLPPNLDFKVAPSILKPRKVGLDL

SEQ ID NO: 865 - protein, 514 aa, Homo sapiens
GLSRVSPGLGAEDFWLTAARNVLKLVVKSEWKSYPIQAVEEEASGDKQPKKQEKNPVLVSPEFVDEALCACEEYLSNLAHMDIDKDLEAPLYLTPEGWSLFLQRYYQVVHEGAELRHLDTQVQRCEDILQQLQAVVPQIDMEGDRNIWIVKPGAKSRGRGIMCMDHLEEMLKLVNGNPVVMKDGKWVVQKYIERPLLIFGTKFDLRQWFLVTDWNPLTVWFYRDSYIRFSTQPFSLKNLDNSVHLCNNSIQKHLENSCHRHPLLPPDNMWSSQRFQAHLQEMGAPNAWSTIIVPGMKDAVIHALQTSQDTVQCRKASFELYGADFVFGEDFQPWLIEINASPTMAPSTAVTARLCAGVQADTLRVVIDRMLDRNCDTGAFELIYKQPAVEVPQYVGIRLLVEGFTIKKPMAMCHRRMGVRPAVPLLTQRGSGEARHHFPSLHTKAQLPSPHVLRHQGQVLRRQHSKLVGTKALSTTGKALRTLPTAKVFISLPPNLDFKVAPSILKPRKVGLDL

SEQ ID NO: 866 - protein, 168 aa, Homo sapiens
MTATLRPYLSAVRATLQAALCLENFSSQVVERHNKPEVEVRSSKELLLQPVTISRNEKEKVLIEGSINSVRVSIAVKQADEIEKILCHKFMRFMMMRAENFFILRRKPVEGYDISFLITNFHTEQMYKHKLVDFVIHFMEEIDKEISEMKLSVNARARIVAEEFLKNF

SEQ ID NO: 867 - protein, 373 aa, Homo sapiens
YGIVTGPSLCAGDKQPKKQEKNPVLVSPEFVDEALCACEEYLSNLAHMDIDKDLEAPLYLTPEGWSLFLQRYYQVVHEGAELRHLDTQVQRCEDILQQLQAVVPQIDMEGDRNIWIVKPGAKSRGRGIMCMDHLEEMLKLVNGNPVVMKDGKWVVQKYIERPLLIFGTKFDLRQWFLVTDWNPLTVWFYRDSYIRFSTQPFSLKNLDNSVHLCNNSIQKHLENSCHRHPLLPPDNMWSSQRFQAHLQEMGAPNAWSTIIVPGMKDAVIHALQTSQDTVQCRKASFELYGADFVFGEDFQPWLIEINASPTMAPSTAVTARLCAGVQADTLRVVIDRMLDRNCDTGAFELIYKQGPAPNMQVSPERNAPLCPAP

SEQ ID NO: 868 - protein, 136 aa, Homo sapiens
MTATLRPYLSAVRATLQAALCLENFSSQVVERHNKPEVEVRSSKELLLQPVTISRNEKEKVLIEGSINSVRVSIAVKQGYDISFLITNFHTEQMYKHKLVDFVIHFMEEIDKEISEMKLSVNARARIVAEEFLKNF

SEQ ID NO: 869 - protein, 89 aa, Homo sapiens [sequence omitted]

SEQ ID NO: 870 - protein, 90 aa, Homo sapiens
MARVIPGITSRDKKENSFSYDFFLKRKGISQKPPANMPSHPMARSGSHVYPELSTADRNGIACRPQRPPGSWEGVSSTCGTWLSGKGMET

SEQ ID NO: 871 - protein, 61 aa, Homo sapiens
  misc_feature (61)..(61): Xaa can be any naturally occurring amino acid
MISTKWPDWPANTQQRRGLHKVRTKMSSEIPSYEAKRGPTSGPTRPGAVRGDRSRAQRRGX

SEQ ID NO: 872 - protein, 241 aa, Homo sapiens
MNSGRPETMENLPALYTIFQGEVAMVTDYGAFIKIPGCRKQGLVHRTHMSSCRVDKPSEIVDVGDKVWVKLIGREMKNDRIKVSLSMKVVNQGTGKDLDPNNVIIEQEERRRRSFQDYTGQKITLEAVLNTTCKKCGCKGHFAKDCFMQPGGTKYSLIPDEEEEKEEAKSAEFEKPDPTRNPSRKRKKEKKKKKHRDRKSSDSDSSDSESDTGKRARHTSKDSKAAKKKKKKKKHKKKHKE

SEQ ID NO: 873 - protein, 241 aa, Homo sapiens; identical to SEQ ID NO: 872

SEQ ID NO: 874 - protein, 233 aa, Homo sapiens
MKQLIEDTEKNKVYVAMVTDYGAFIKIPGCRKQGLVHRTHMSSCRVDKPSEIVDVGDKVWVKLIGREMKNDRIKVSLSMKVVNQGTGKDLDPNNVIIEQEERRRRSFQDYTGQKITLEAVLNTTCKKCGCKGHFAKDCFMQPGGTKYSLIPDEEEEKEEAKSAEFEKPDPTRNPSRKRKKEKKKKKHRDRKSSDSDSSDSESDTGKRARHTSKDSKAAKKKKKKKKHKKKHKE

SEQ ID NO: 875 - protein, 233 aa, Homo sapiens; identical to SEQ ID NO: 874

SEQ ID NO: 876 - protein, 1126 aa, Homo sapiens
MEPNDSTSTAVEEPDSLEVLVKTLDSQTRTFIVGAQMNVKEFKEHIAASVSIPSEKQRLIYQGRVLQDDKKLQEYNVGGKVIHLVERAPPQTHLPSGASSGTGSASATHGGGSPPGTRGPGASVHDRNANSYVMVGTFNLPSDGSAVDVHINMEQAPIQSEPRVRLVMAQHMIRDIQTLLSRMECRGGPQPQHSQPPPQPPAVTPEPVALSSQTSEPVESEAPPREPMEAEEVEERAPAQNPELTPGPAPAGPTPAPETNAPNHPSPAEYVEVLQELQRLESRLQPFLQRYYEVLGAAATTDYNNNHEGREEDQRLINLVGESLRLLGNTFVALSDLRCNLACTPPRHLHVVRPMSHYTTPMVLQQAAIPIQINVGTTVTMTGNGTRPPPTPNAEAPPPGPGQASSVAPSSTNVESSAEGAPPPGPAPPPATSHPRVIRISHQSVEPVVMMHMNIQDSGTQPGGVPSAPTGPLGPPGHGQTLGQQVPGFPTAPTRVVIARPTPPQARPSHPGGPPVSGTLQGAGLGTNASLAQMVSGLVGQLLMQPVLVAQGTPGMAPPPAPATASASAGTTNTATTAGPAPGGPAQPPPTPQPSMADLQFSQLLGNLLGPAGPGAGGPGVASPTITVAMPGVPAFLQGMTDFLQATQTAPPPPPPPPPPPPAPEQQTMPPPGSPSGGAGSPGGLGLESLSPEFFTSVVQGVLSSLLGSLGARAGSSESIAAFIQRLSGSSNIFEPGADGALGFFGALLSLLCQNFSMVDVVMLLHGHFQPLQRLQPQLRSFFHQHYLGGQEPTPSNIRMATHTLITGLEEYVRESFSLVQVQPGVDIIRTNLEFLQEQFNSIAAHVLHCTDSGFGARLLELCNQGLFECLALNLHCLGGQQMELAAVINGRIRRMSRGVNPSLVSWLTTMMGLRLQVVLEHMPVGPDAILRYVRRVGDPPQPLPEEPMEVQGAERASPEPQRENASPAPGTTAEEAMSRGPPPAPEGGSRDEQDGASAETEPWAAAVPPEWVPIIQQDIQSQRKVKPQPPLSDAYLSGMPAKRRKTMQGEGPQLLLSEAVSRAAKAAGARPLTSPESLSRDLEAPEVQESYRQQLRSDIQKRLQEDPNYSPQRFPNAQRAFADDP

SEQ ID NO: 877 - protein, 1132 aa, Homo sapiens
MEPNDSTSTAVEEPDSLEVLVKTLDSQTRTFIVGAQMNVKEFKEHIAASVSIPSEKQRLIYQGRVLQDDKKLQEYNVGGKVIHLVERAPPQTHLPSGASSGTGSASATHGGGSPPGTRGPGASVHDRNANSYVMVGTFNLPSDGSAVDVHINMEQAPIQSEPRVRLVMAQHMIRDIQTLLSRMETLPYLQCRGGPQPQHSQPPPQPPAVTPEPVALSSQTSEPVESEAPPREPMEAEEVEERAPAQNPELTPGPAPAGPTPAPETNAPNHPSPAEYVEVLQELQRLESRLQPFLQRYYEVLGAAATTDYNNNHEGREEDQRLINLVGESLRLLGNTFVALSDLRCNLACTPPRHLHVVRPMSHYTTPMVLQQAAIPIQINVGTTVTMTGNGTRPPPTPNAEAPPPGPGQASSVAPSSTNVESSAEGAPPPGPAPPPATSHPRVIRISHQSVEPVVMMHMNIQDSGTQPGGVPSAPTGPLGPPGHGQTLGQQVPGFPTAPTRVVIARPTPPQARPSHPGGPPVSGTLQGAGLGTNASLAQMVSGLVGQLLMQPVLVAQGTPGMAPPPAPATASASAGTTNTATTAGPAPGGPAQPPPTPQPSMADLQFSQLLGNLLGPAGPGAGGPGVASPTITVAMPGVPAFLQGMTDFLQATQTAPPPPPPPPPPPPAPEQQTMPPPGSPSGGAGSPGGLGLESLSPEFFTSVVQGVLSSLLGSLGARAGSSESIAAFIQRLSGSSNIFEPGADGALGFFGALLSLLCQNFSMVDVVMLLHGHFQPLQRLQPQLRSFFHQHYLGGQEPTPSNIRMATHTLITGLEEYVRESFSLVQVQPGVDIIRTNLEFLQEQFNSIAAHVLHCTDSGFGARLLELCNQGLFECLALNLHCLGGQQMELAAVINGRIRRMSRGVNPSLVSWLTTMMGLRLQVVLEHMPVGPDAILRYVRRVGDPPQPLPEEPMEVQGAERASPEPQRENASPAPGTTAEEAMSRGPPPAPEGGSRDEQDGASAETEPWAAAVPPEWVPIIQQDIQSQRKVKPQPPLSDAYLSGMPAKRRKTMQGEGPQLLLSEAVSRAAKAAGARPLTSPESLSRDLEAPEVQESYRQQLRSDIQKRLQEDPNYSPQRFPNAQRAFADDP

SEQ ID NO: 878 - protein, 1229 aa, Homo sapiens [sequence omitted]

SEQ ID NO: 879 - protein, 1126 aa, Homo sapiens; identical to SEQ ID NO: 876

SEQ ID NO: 880 - protein, 1162 aa, Homo sapiens [sequence omitted]

SEQ ID NO: 881 - protein, 1126 aa, Homo sapiens; identical to SEQ ID NO: 876

SEQ ID NO: 882 - protein, 1126 aa, Homo sapiens; identical to SEQ ID NO: 876

SEQ ID NO: 883 - protein, 100 aa, Homo sapiens
MRPKHLQGIAPEVFRTPTGSHGQMPGQPLQRGHALDIRPPLRPHPLISGHALRGDRWQTPALALGPALCGFVPAHWVLTVPPPQRPSIPSRSADTCPASR

SEQ ID NO: 884 - protein, 166 aa, Homo sapiens
MLLILLSVALLAFSSAQDLNEDVSQEDVPLVISDGGDSEQFIDEERQGPPLGGQQSQPSAGDGNQDDGPQQGPPQQGGQQQQGPPPPQGKPQGPPQQGGHPPPPQGRPQGPPQQGGHPRPPRGRPQGPPQQGGHQQGPPPPPPGKPQGPPPQGGRPQGPPQGQSPQ

SEQ ID NO: 885 - protein, 166 aa, Homo sapiens; identical to SEQ ID NO: 884

SEQ ID NO: 886 - protein, 244 aa, Homo sapiens
MRVGVSLCYPGWSSVVGSWLTAVWNSWAQTILPPQPSAAEEYFACWNLLYLLKSGSFHRELTRFSQHKVGSDTRASCKMLLILLSVALLAFSSAQDLNEDVSQEDVPLVISDGGDSEQFIDEERQGPPLGGQQSQPSAGDGNQDDGPQQGPPQQGGQQQQGPPPPQGKPQGPPQQGGHPPPPQGRPQGPPQQGGHPRPPRGRPQGPPQQGGHQQGPPPPPPGKPQGPPPQGGRPQGPPQGQSPQ

SEQ ID NO: 887 - protein, 244 aa, Homo sapiens; identical to SEQ ID NO: 886

SEQ ID NO: 888 - protein, 299 aa, Homo sapiens [sequence omitted]

SEQ ID NO: 889 - protein, 178 aa, Homo sapiens
PTGCFTLVSDEELKRRVAEELALEQAKKESEDQKRLKQAKELDRERAAANEQLTRAILRERICSEEERAKAKHLARQLEEKDRVLKKQDAFYKEQLARLEERSSEFYRVTTEQYQKAAEEVEAKFKRYESHPVCADLQAKILQCYRENTHQTLKCSALATQYMHCVNHAKQSMLEKGG

SEQ ID NO: 890 - protein, 227 aa, Homo sapiens
MGGTTSTRRVTFEADENENITVVKGIRLSENVIDRMKESSPSGSKSQRYSGAYGASVSDEELKRRVAEELALEQAKKESEDQKRLKQAKELDRERAAANEQLTRAILRERICSEEERAKAKHLARQLEEKDRVLKKQDAFYKEQLARLEERSSEFYRVTTEQYQKAAEEVEAKFKRYESHPVCADLQAKILQCYRENTHQTLKCSALATQYMHCVNHAKQSMLEKGG

SEQ ID NO: 891 - protein, 108 aa, Homo sapiens
MCWKSLTLYEAQEAIRLHLDLSASAHAVLSFLILCSSHRNSVHCVEGYAPPHPQPFVHVFPLSRIFSPPPFTLNLMTPYLIFQDLAPGPRASTVFSHLFALCSLFIET

SEQ ID NO: 892 - protein, 90 aa, Homo sapiens
MVWHFRIQFHRIKKNLHSGSGEEEGSGGLLALLCHPSLSLCGREGLRGVIPQDTGSPVSVTFKGAQAPRGKAQGNHGVQFQAPGLSRRDP

SEQ ID NO: 893 - protein, 114 aa, Homo sapiens
MWTWSLNLSLENTTLSITWSSCENRIKKIVSFFLFSETISSAIKAHCSLSLLGSSSPPISASGVAGTTDTHYCAWLIFVFFVETRFAIFPRLVSNSRAQVTLPPQHPKVLRLQA

SEQ ID NO: 894 - protein, 2665 aa, Homo sapiens
MAEEGAVAVCVRVRPLNSREESLGETAQVYWKTDNNVIYQVDGSKSFNFDRVFHGNETTKNVYEEIAAPIIDSAIQGYNGTIFAYGQTASGKTYTMMGSEDHLGVIPRAIHDIFQKIKKFPDREFLLRVSYMEIYNETITDLLCGTQKMKPLIIREDVNRNVYVADLTEEVVYTSEMALKWITKGEKSRHYGETKMNQRSSRSHTIFRMILESREKGEPSNCEGSVKVSHLNLVDLAGSERAAQTGAAGVRLKEGCNINRSLFILGQVIKKLSDGQVGGFINYRDSKLTRILQNSLGGNAKTRIICTITPVSFDETLTALQFASTAKYMKNTPYVNEVSTDEALLKRYRKEIMDLKKQLEEVSLETRAQAMEKDQLAQLLEEKDLLQKVQNEKIENLTRMLVTSSSLTLQQELKAKRKRRVTWCLGKINKMKNSNYADQFNIPTNITTKTHKLSINLLREIDESVCSESDVFSNTLDTLSEIEWNPATKLLNQENIESELNSLRADYDNLVLDYEQLRTEKEEMELKLKEKNDLDEFEALERKTKKDQEMQLIHEISNLKNLVKHAEVYNQDLENELSSKVELLREKEDQIKKLQEYIDSQKLENIKMDLSYSLESIEDPKQMKQTLFDAETVALDAKRESAFLRSENLELKEKMKELATTYKQMENDIQLYQSQLEAKKKMQVDLEKELQSAFNEITKLTSLIDGKVPKDLLCNLELEGKITDLQKELNKEVEENEALREEVILLSELKSLPSEVERLRKEIQDKSEELHIITSEKDKLFSEVVHKESRVQGLLEEIGKTKDDLATTQSNYKSTDQEFQNFKTLHMDFEQKYKMVLEENERMNQEIVNLSKEAQKFDSSLGALKTELSYKTQELQEKTREVQERLNEMEQLKEQLENRDSTLQTVEREKTLITEKLQQTLEEVKTLTQEKDDLKQLQESLQIERDQLKSDIHDTVNMNIDTQEQLRNALESLKQHQETINTLKSKISEEVSRNLHMEENTGETKDEFQQKMVGIDKKQDLEAKNTQTLTADVKDNEIIEQQRKIFSLIQEKNELQQMLESVIAEKEQLKTDLKENIEMTIENQEELRLLGDELKKQQEIVAQEKNHAIKKEGELSRTCDRLAEVEEKLKEKSQQLQEKQQQLLNVQEEMSEMQKKINEIENLKNELKNKELTLEHMETERLELAQKLNENYEEVKSITKERKVLKELQKSFETERDHLRGYIREIEATGLQTKEELKIAHIHLKEHQETIDELRRSVSEKTAQIINTQDLEKSHTKLQEEIPVLHEEQELLPNVKEVSETQETMNELELLTEQSTTKDSTTLARIEMERLRLNEKFQESQEEIKSLTKERDNLKTIKEALEVKHDQLKEHIRETLAKIQESQSKQEQSLNMKEKDNETTKIVSEMEQFKPKDSALLRIEIEMLGLSKRLQESHDEMKSVAKEKDDLQRLQEVLQSESDQLKENIKEIVAKHLETEEELKVAHCCLKEQEETINELRVNLSEKETEISTIQKQLEAINDKLQNKIQEIYEKEEQFNIKQISEVQEKVNELKQFKEHRKAKDSALQSIESKMLELTNRLQESQEEIQIMIKEKEEMKRVQEALQIERDQLKENTKEIVAKMKESQEKEYQFLKMTAVNETQEKMCEIEHLKEQFETQKLNLENIETENIRLTQILHENLEEMRSVTKERDDLRSVEETLKVERDQLKENLRETITRDLEKQEELKIVHMHLKEHQETIDKLRGIVSEKTNEISNMQKDLEHSNDALKAQDLKIQEELRIAHMHLKEQQETIDKLRGIVSEKTDKLSNMQKDLENSNAKLQEKIQELKANEHQLITLKKDVNETQKKVSEMEQLKKQIKDQSLTLSKLEIENLNLAQKLHENLEEMKSVMKERDNLRRVEETLKLERDQLKESLQETKARDLEIQQELKTARMLSKEHKETVDKLREKISEKTIQISDIQKDLDKSKDELQKKIQELQKKELQLLRVKEDVNMSHKKINEMEQLKKQFEAQNLSMQSVRMDNFQLTKKLHESLEEIRIVAKERDELRRIKESLKMERDQFIATLREMIARDRQNHQVKPEKRLLSDGQQHLTESLREKCSRIKELLKRYSEMDDHYECLNRLSLDLEKEIEFHRIMKKLKYVLSYVTKIKEEQHESINKFEMDFIDEVEKQKELLIKIQHLQQDCDVPSRELRDLKLNQNMDLHIEEILKDFSESEFPSIKTEFQQVLSNRKEMTQFLEEWLNTRFDIEKLKNGIQKENDRICQVNNFFNNRIIAIMNESTEFEERSATISKEWEQDLKSLKEKNEKLFKNYQTLKTSLASGAQVNPTTQDNKNPHVTSRATQLTTEKIRELENSLHEAKESAMHKESKIIKMQKELEVTNDIIAKLQAKVHESNKCLEKTKETIQVLQDKVALGAKPYKEEIEDLKMKLVKIDLEKMKNAKEFEKEISATKATVEYQKEVIRLLRENLRRSQQAQDTSVISEHTDPQPSNKPLTCGGGSGIVQNTKALILKSEHIRLEKEISKLKQQNEQLIKQKNELLSNNQHLSNEVKTWKERTLKREAHKQVTCENSPKSPKVTGTASKKKQITPSQCKERNLQDPVPKESPKSCFFDSRSKSLPSPHPVRYFDNSSLGLCPEVQNAGAESVDSQPGPWHASSGKDVPECKTQ

SEQ ID NO: 895 - protein, 2701 aa, Homo sapiens
MAEEGAVAVCVRVRPLNSREESLGETAQVYWKTDNNVIYQVDGSKSFNFDRVFHGNETTKNVYEEIAAPIIDSAIQGYNGTIFAYGQTASGKTYTMMGSEDHLGVIPRAIHDIFQKIKKFPDREFLLRVSYMEIYNETITDLLCGTQKMKPLIIREDVNRNVYVADLTEEVVYTSEMALKWITKGEKSRHYGETKMNQRSSRSHTIFRMILESREKGEPSNCEGSVKVSHLNLVDLAGSERAAQTGAAGVRLKEGCNINRSLFILGQVIKKLSDGQVGGFINYRDSKLTRILQNSLGGNAKTRIICTITPVSFDETLTALQFASTAKYMKNTPYVNEVSTDEALLKRYRKEIMDLKKQLEEVSLETRAQAMEKDQLAQLLEEKDLLQKVQNEKIENLTRMLVTSSSLTLQQELKAKRKRRVTWCLGKINKMKNSNYADQFNIPTNITTKTHKLSINLLREIDESVCSESDVFSNTLDTLSEIEWNPATKLLNQENIESELNSLRADYDNLVLDYEQLRTEKEEMELKLKEKNDLDEFEALERKTKKDQEMQLIHEISNLKNLVKHAEVYNQDLENELSSKVELLREKEDQIKKLQEYIDSQKLENIKMDLSYSLESIEDPKQMKQTLFDAETVALDAKRESAFLRSENLELKEKMKELATTYKQMENDIQLYQSQLEAKKKMQVDLEKELQSAFNEITKLTSLIDGKVPKDLLCNLELEGKITDLQKELNKEVEENEALREEVILLSELKSLPSEVERLRKEIQDKSEELHIITSEKDKLFSEVVHKESRVQGLLEEIGKTKDDLATTQSNYKSTDQEFQNFKTLHMDFEQKYKMVLEENERMNQEIVNLSKEAQKFDSSLGALKTELSYKTQELQEKTREVQERLNEMEQLKEQLENRDSTLQTVEREKTLITEKLQQTLEEVKTLTQEKDDLKQLQESLQIERDQLKSDIHDTVNMNIDTQEQLRNALESLKQHQETINTLKSKISEEVSRNLHMEENTGETKDEFQQKMVGIDKKQDLEAKNTQTLTADVKDNEIIEQQRKIFSLIQEKNELQQMLESVIAEKEQLKTDLKENIEMTIENQEELRLLGDELKKQQEIVAQEKNHAIKKEGELSRTCDRLAEVEEKLKEKSQQLQEKQQQLLNVQEEMSEMQKKINEIENLKNELKNKELTLEHMETERLELAQKLNENYEEVKSITKERKVLKELQKSFETERDHLRGYIREIEATGLQTKEELKIAHIHLKEHQETIDELRRSVSEKTAQIINTQDLEKSHTKLQEEIPVLHEEQELLPNVKEVSETQETMNELELLTEQSTTKDSTTLARIEMERLRLNEKFQESQEEIKSLTKERDNLKTIKEALEVKHDQLKEHIRETLAKIQESQSKQEQSLNMKEKDNETTKIVSEMEQFKPKDSALLRIEIEMLGLSKRLQESHDEMKSVAKEKDDLQRLQEVLQSESDQLKENIKEIVAKHLETEEELKVAHCCLKEQEETINELRVNLSEKETEISTIQKQLEAINDKLQNKIQEIYEKEEQFNIKQISEVQEKVNELKQFKEHRKAKDSALQSIESKMLELTNRLQESQEEIQIMIKEKEEMKRVQEALQIERDQLKENTKEIVAKMKESQEKEYQFLKMTAVNETQEKMCEIEHLKEQFETQKLNLENIETENIRLTQILHENLEEMRSVTKERDDLRSVEETLKVERDQLKENLRETITRDLEKQEELKIVHMHLKEHQETIDKLRGIVSEKTNEISNMQKDLEHSNDALKAQDLKIQEELRIAHMHLKEQQETIDKLRGIVSEKTDKLSNMQKDLENSNAKLQEKIQELKANEHQLITLKKDVNETQKKVSEMEQLKKQIKDQSLTLSKLEIENLNLAQKLHENLEEMKSVMKERDNLRRVEETLKLERDQLKESLQETKARDLEIQQELKTARMLSKEHKETVDKLREKISEKTIQISDIQKDLDKSKDELQKKIQELQKKELQLLRVKEDVNMSHKKINEMEQLKKQFEAQNLSMQSVRMDNFQLTKKLHESLEEIRIVAKERDELRRIKESLKMERDQFIATLREMIARDRQNHQVKPEKRLLSDGQQHLTESLREKCSRIKELLKRYSEMDDHYECLNRLSLDLEKEIEFQKELSMRVKANLSLPYLQTKHIEKLFTANQRCSMEFHRIMKKLKYVLSYVTKIKEEQHESINKFEMDFIDEVEKQKELLIKIQHLQQDCDVPSRELRDLKLNQNMDLHIEEILKDFSESEFPSIKTEFQQVLSNRKEMTQFLEEWLNTRFDIEKLKNGIQKENDRICQVNNFFNNRIIAIMNESTEFEERSATISKEWEQDLKSLKEKNEKLFKNYQTLKTSLASGAQVNPTTQDNKNPHVTSRATQLTTEKIRELENSLHEAKESAMHKESKIIKMQKELEVTNDIIAKLQAKVHESNKCLEKTKETIQVLQDKVALGAKPYKEEIEDLKMKLVKIDLEKMKNAKEFEKEISATKATVEYQKEVIRLLRENLRRSQQAQDTSVISEHTDPQPSNKPLTCGGGSGIVQNTKALILKSEHIRLEKEISKLKQQNEQLIKQKNELLSNNQHLSNEVKTWKERTLKREAHKQVTCENSPKSPKVTGTASKKKQITPSQCKERNLQDPVPKESPKSCFFDSRSKSLPSPHPVRYFDNSSLGLCPEVQNAGAESVDSQPGPWHASSGKDVPECKTQ

SEQ ID NO: 896 - protein, 120 aa, Homo sapiens
MHPPPPAAAMDFSQNSLFGYMEDLQELTIIERPVRRSLKTPEEIERLTVDEDLSDIERAVYLLSAGQDVQGTSVIANLPFLMRQNPTETLRRVLPKVRVHEDAHLFIQRVWISHMFVQRV

SEQ ID NO: 897 - protein, 761 aa, Homo sapiens
MEMQLTAAMSFLTILQDESVSIHAYTHSFLQVILLHLEHRDTGVSNAWLETLLSVIEVLPKETLRHEILNPLVSKAQLSQTVQSRLVSCKILGKLTNKFDAHTIKREILPLVKSLCQDVEYEVRSCMCRQLENIAQGIGTELTKSVVLPELIELSRDEGSSVRLAAFETLVNLLDIFDTDDRSQTILPLVKSFCEKSFKADESILISLSFHLGKLCHGLYGIFTPDQHLRFLEFYKKLCTLGLQQENGHNENQIPPQILEQEKKYISVRKNCAYNFPAMIVFVDPKNFHMELYSTFFCLCHDPEVPVRYTIAICFYEVSKLLNSGVYLIHKELITLLQDESLEVLDALIDHLPEILELMSTGGESSVQENKLSSLPDLIPALTAAEQRAAASLKWRTHEKLLQKYACLPHVISSDQIYYRFLQRMFTIMMTNNVLPVQKAASRTLCIFLRYNRKQEQRHEVIQKLIEQLGQGKSYWNRLRFLDTCEFIIEIFSKSFFCKYFFLPAIELTHDPVANVRMKLCYLLPKVKSTLKIPADKHLLQQLEMCVRKLLCQEKDKDVLAIVKRTVLELDRMEMSMDAFQKKFYEKDLLDQEKEREELLLLEMEQLEKEKQQNDGRPMSDKMFEKKRRDTKTPTQSLPKNIPISVPGPSSVTPSTSKEIKKSKLIRSQSFNNQAFHAKYGNLEKCASKSSTTGYTTSVSGLGKTSVLSLADDSFRTRNASSVPSSFSPNTPLPSTSRGTGNSVDPKSSGSKDTQPRKATL

SEQ ID NO: 898 - protein, 873 aa, Homo sapiens
MHPPPPAAAMDFSQNSLFGYMEDLQELTIIERPVRRSLKTPEEIERLTVDEDLSDIERAVYLLSAGQDVQGTSVIANLPFLMRQNPTETLRRVLPKVREALHVAGVEMQLTAAMSFLTILQDESVSIHAYTHSFLQVILLHLEHRDTGVSNAWLETLLSVIEVLPKETLRHEILNPLVSKAQLSQTVQSRLVSCKILGKLTNKFDAHTIKREILPLVKSLCQDVEYEVRSCMCRQLENIAQGIGTELTKSVVLPELIELSRDEGSSVRLAAFETLVNLLDIFDTDDRSQTILPLVKSFCEKSFKADESILISLSFHLGKLCHGLYGIFTPDQHLRFLEFYKKLCTLGLQQENGHNENQIPPQILEQEKKYISVRKNCAYNFPAMIVFVDPKNFHMELYSTFFCLCHDPEVPVRYTIAICFYEVSKLLNSGVYLIHKELITLLQDESLEVLDALIDHLPEILELMSTGGESSVQENKLSSLPDLIPALTAAEQRAAASLKWRTHEKLLQKYACLPHVISSDQIYYRFLQRMFTIMMTNNVLPVQKAASRTLCIFLRYNRKQEQRHEVIQKLIEQLGQGKSYWNRLRFLDTCEFIIEIFSKSFFCKYFFLPAIELTHDPVANVRMKLCYLLPKVKSTLKIPADKHLLQQLEMCVRKLLCQEKDKDVLAIVKRTVLELDRMEMSMDAFQKKFYEKDLLDQEKEREELLLLEMEQLEKEKQQNDGRPMSDKMFEKKRRDTKTPTQSLPKNIPISVPGPSSVTPSTSKEIKKSKLIRSQSFNNQAFHAKYGNLEKCASKSSTTGYTTSVSGLGKTSVLSLADDSFRTRNASSVPSSFSPNTPLPSTSRGTGNSVDPKSSGSKDTQPRKATLKSRKSNP

SEQ ID NO: 899 - protein, 418 aa, Homo sapiens
MPSSVSWGILLLAGLCCLVPVSLAEDPQGDAAQKTDTSHHDQDHPTFNKITPNLAEFAFSLYRQLAHQSNSTNIFFSPVSIATAFAMLSLGTKADTHDEILEGLNFNLTEIPEAQIHEGFQELLRTLNQPDSQLQLTTGNGLFLSEGLKLVDKFLEDVKKLYHSEAFTVNFGDTEEAKKQINDYVEKGTQGKIVDLVKELDRDTVFALVNYIFFKGKWERPFEVKDTEEEDFHVDQATTVKVPMMKRLGMFNIQHCKKLSSWVLLMKYLGNATAIFFLPDEGKLQHLENELTHDIITKFLENEDRRSASLHLPKLSITGTYDLKSVLGQLGITKVFSNGADLSGVTEEAPLKLSKAVHKAVLTIDEKGTEAAGAMFLEAIPMSIPPEVKFNKPFVFLMIEQNTKSPLFMGKVVNPTQK

SEQ ID NO: 900 - protein, 418 aa, Homo sapiens; identical to SEQ ID NO: 899

SEQ ID NO: 901 - protein, 418 aa, Homo sapiens; identical to SEQ ID NO: 899

SEQ ID NO: 902 - protein, 418 aa, Homo sapiens; identical to SEQ ID NO: 899

SEQ ID NO: 903 - protein, 418 aa, Homo sapiens; identical to SEQ ID NO: 899

SEQ ID NO: 904 - protein, 418 aa, Homo sapiens; identical to SEQ ID NO: 899

SEQ ID NO: 905 - protein, 418 aa, Homo sapiens; identical to SEQ ID NO: 899

SEQ ID NO: 906 - protein, 384 aa, Homo sapiens
MRTLVGLLTSNQALLQLEAARCLHELSHSEQSTVAEACLPATSYLLTYLSSHSSDFIELCLYTLGNLIVESEAVRRQLLPQGIVPALAACIQSPHVAVLEALGYALSQLLQAEEAPEKIIPSILASTLPQHMLQMLQPGPKLNPGVAVEFAWCLHYIICSQVSNPLLIGHGALSTLGLLLLDLAGAVQKTEDAGLELLACPVLRCLSNLLTEAAVETVGGQMQLRDERVVAALFILLQFFFQKQPSLLPEGLWLLNNLTANSPSFCTSLLSLDLIEPLLQLLPVSNVVSVMVLTVLCNVAEKGPAYCQRLWPGPLLPALLHTLAFSDTEVVGQSLELLHLLFLYQPEAVQVFLQQSGLQALERHQEEAQLQDRVYALQQTALQG

SEQ ID NO: 907 - protein, 501 aa, Homo sapiens
MWSRRQGRLRPTVCGVEELRRRRREREAALRKARREQQLVSKRLLRNDAPEEAGEGCVAAILGETEVQQFLRQAQRGTEEKEREGALVSLRRGLQHPETQQTFIRLEGSMRTLVGLLTSNQALLQLEAARCLHELSHSEQSTVAEACLPATSYLLTYLSSHSSDFIPGMKQAKPSAFVACSQELCLYTLGNLIVESEAVRRQLLPQGIVPALAACIQGLVRTTGIFVVPTYSPASASSSILASTLPQHMLQMLQPGPKLNPGVAVEFAWCLHYIICSQVSNPLLIGHGALSTLGLLLLDLAGAVQKTEDAGLELLACPVLRCLSNLLTEAAVETVGGQMQLRDERVVAALFILLQFFFQKQPSLLPEGLWLLNNLTANSPSFCTSLLSLDLIEPLLQLLPVSNVVSVMVLTVLCNVAEKGPAYCQRLWPGPLLPALLHTLAFSDTEVVGQSLELLHLLFLYQPEAVQVFLQQSGLQALERHQEEAQLQDRVYALQQTALQG

SEQ ID NO: 908 - protein, 253 aa, Homo sapiens
MLQMLQPGPKLNPGVAVEFAWCLHYIICSQVSNPLLIGHGALSTLGLLLLDLAGAVQKTEDAGLELLACPVLRCLSNLLTEAAVETVGGQMQLRDERVVAALFILLQFFFQKQPSLLPEGLWLLNNLTANSPSFCTSLLSLDLIEPLLQLLPVSNVVSVMVLTVLCNVAEKGPAYCQRLWPGPLLPALLHTLAFSDTEVVGQSLELLHLLFLYQPEAVQVFLQQSGLQALERHQEEAQLQDRVYALQQTALQG

SEQ ID NO: 909 - protein, 98 aa, Homo sapiens
MAASRLPPATLTLKQFVRRQQVLLLYRRILQTIRQVPNDSDRKYLKDWAREEFRRNKSATEEASPTTEAQDLKEANGIVTTTGVRSICVREFSLDLGL

SEQ ID NO: 910 - protein, 88 aa, Homo sapiens
MAASRLPPATLTLKQFVRRQQVLLLYRRILQTIRQVPNDSDRKYLKDWAREEFRRNKSATEEDTIRMMITQGNMQLKELEKTLALAKS

SEQ ID NO: 911 - protein, 88 aa, Homo sapiens; identical to SEQ ID NO: 910

SEQ ID NO: 912 - protein, 5596 aa, Homo sapiens [sequence omitted]

SEQ ID NO: 913 - protein, 1091 aa, Homo sapiens [sequence omitted]

SEQ ID NO: 914 - protein, 875 aa, Homo sapiens
MTRTQKGKTFLPHCFYQSLPPRLGWGMILNYSKLKGKEECASVSSVPMVFFSSQYRLHRKSQYLKMAAANLTFSQEVVWQRGLPSIPYSQYSFDHLYNTNDIIHTPQIRKARPQKPVSFKFLGSSSPLTGDTSLAVKTESSANPEKKLKKSKPASTVREAPRPLIHHPCMHPDMLGRPPSLDVNLEEREAWLLPPEKEARAWEATVLEKLNERTARWIQSKRPRRPGASPNKWQSFLRQQYDWSHIRDELTSASDLELLKQLEAEETAEFEDQSVILPPQEKKKPELLLPVYYRLPSYFQQAETVEIMPGNKSTEDIHEKTSLSQPQTQSYFRQVTPRAGKFAYSTDNTFEQEIYFDEVQIIHQIGAKRDQIVLENLNRYNKQLSKVFPETPEKWSAQAIPEASYRPVQGALRWTALPTPAKDMLLQVGEKDVPIKTRRLKKQAKSLQEDVTWELVVLRRMLKEWKTAWALIIEWHHETVENLLQSLGDLHDDVRIKAITTCATAALERPRIATSQRDSDKTIQDLPEVLLPALEAALCDKNAHVRMAAAICQYAIQSHNPLARNIMQTALLKGNSVDSWAAAQCLALEGTATYPVIKRILHQLFTKKNEDTEEQSYILLSYLSEKTTLIHTMLAVELNSCQWKNRIVACQAFSRISGNVCLDMKHKLIQLMWNDWNKEVRRAAAQALGQMSLGKEVHDIIRVKLGQGNSQERVEALYLIGELKLMTAKLLPSFLHCFSDDFTAVRRAACLAAGALQIRDKMVLECLLNLMQRDPYWKIKAFAIRALGQIGQVSPELTDLLLWAIHYEESPGVRLEACRSILALKLQGDRVRDTFLDVLLLENHDAVLKEMYQTMKILNLGNEGNQEMLQEIKNR

SEQ ID NO: 915 - protein, 838 aa, Homo sapiens [sequence omitted]

SEQ ID NO: 916 - protein, 145 aa, Homo sapiens
MLGWIQPSRQPQLRAAPPTRTPSAKRCILCNFLPGCWLVGDVAGSRQPSAPQTLRQRQHTRPPPQERGSGRRSPLREARRANPHFKSFPVLEARGLPCGARRTGPRRPVREMTLPSDPERATLPNPRLGAPAVPRRGPRSHGGRR

SEQ ID NO: 917 - protein, 145 aa, Homo sapiens; identical to SEQ ID NO: 916

SEQ ID NO: 918 - protein, 2725 aa, Homo sapiens
MEQTDCKPYQPLPKVKHEMDLAYTSSSDESEDGRKPRQSYNSRETLHEYNQELRMNYNSQSRKRKEVEKSTQEMEFCETSHTLCSGYQTDMHSVSRHGYQLEMGSDVDTETEGAASPDHALRMWIRGMKSEHSSCLSSRANSALSLTDTDHERKSDGENGFKFSPVCCDMEAQAGSTQDVQSSPHNQFTFRPLPPPPPPPHACTCARKPPPAADSLQRRSMTTRSQPSPAAPAPPTSTQDSVHLHNSWVLNSNIPLETRHFLFKHGSGSSAIFSAASQNYPLTSNTVYSPPPRPLPRSTFSRPAFTFNKPYRCCNWKCTALSATAITVTLALLLAYVIAVHLFGLTWQLQPVEGELYANGVSKGNRGTESMDTTYSPIGGKVSDKSEKKVFQKGRAIDTGEVDIGAQVMQTIPPGLFWRFQITIHHPIYLKFNISLAKDSLLGIYGRRNIPPTHTQFDFVKLMDGKQLVKQDSKGSDDTQHSPRNLILTSLQETGFIEYMDQGPWYLAFYNDGKKMEQVFVLTTAIEIMDDCSTNCNGNGECISGHCHCFPGFLGPDCARDSCPVLCGGNGEYEKGHCVCRHGWKGPECDVPEEQCIDPTCFGHGTCIMGVCICVPGYKGEICEEEDCLDPMCSNHGICVKGECHCSTGWGGVNCETPLPVCQEQCSGHGTFLLDAGVCSCDPKWTGSDCSTELCTMECGSHGVCSRGICQCEEGWVGPTCEERSCHSHCTEHGQCKDGKCECSPGWEGDHCTIAHYLDAVRDGCPGLCFGNGRCTLDQNGWHCVCQVGWSGTGCNVVMEMLCGDNLDNDGDGLTDCVDPDCCQQSNCYISPLCQGSPDPLDLIQQSQTLFSQHTSRLFYDRIKFLIGKDSTHVIPPEVSFDSRRACVIRGQVVAIDGTPLVGVNVSFLHHSDYGFTISRQDGSFDLVAIGGISVILIFDRSPFLPEKRTLWLPWNQFIVVEKVTMQRVVSDPPSCDISNFISPNPIVLPSPLTSFGGSCPERGTIVPELQVVQEEIPIPSSFVRLSYLSSRTPGYKTLLRILLTHSTIPVGMIKVHLTVAVEGRLTQKWFPAAINLVYTFAWNKTDIYGQKVWGLAEALVSVGYEYETCPDFILWEQRTVVLQGFEMDASNLGGWSLNKHHILNPQSGIIHKGNGENMFISQQPPVISTIMGNGHQRSVACTNCNGPAHNNKLFAPVALASGPDGSVYVGDFNFVRRIFPSGNSVSILELSTSPAHKYYLAMDPVSESLYLSDTNTRKVYKLKSLVETKDLSKNFEVVAGTGDQCLPFDQSHCGDGGRASEASLNSPRGITVDRHGFIYFVDGTMIRKIDENAVITTVIGSNGLTSTQPLSCDSGMDITQVRLEWPTDLAVNPMDNSLYVLDNNIVLQISENRRVRIIAGRPIHCQVPGIDHFLVSKVAIHSTLESARAISVSHSGLLFIAETDERKVNRIQQVTTNGEIYIIAGAPTDCDCKIDPNCDCFSGDGGYAKDAKMKAPSSLAVSPDGTLYVADLGNVRIRTISRNQAHLNDMNIYEIASPADQELYQFTVNGTHLHTLNLITRDYVYNFTYNSEGDLGAITSSNGNSVHIRRDAGGMPLWLVVPGGQVYWLTISSNGVLKRVSAQGYNLALMTYPGNTGLLATKSNENGWTTVYEYDPEGHLTNATFPTGEVSSFHSDLEKLTKVELDTSNRENVLMSTNLTATSTIYILKQENTQSTYRVNPDGSLRVTFASGMEIGLSSEPHILAGAVNPTLGKCNISLPGEHNANLIEWRQRKEQNKGNVSAFERRLRAHNRNLLSIDFDHITRTGKIYDDHRKFTLRILYDQTGRPILWSPVSRYNEVNITYSPSGLVTFIQRGTWNEKMEYDQSGKIISRTWADGKIWSYTYLEKSVMLLLHSQRRYIFEYDQPDCLLSVTMPSMVRHSLQTMLSVGYYRNIYTPPDSSTSFIQDYSRDGRLLQTLHLGTGRRVLYKYTKQARLSEVLYDTTQVTLTYEESSGVIKTIHLMHDGFICTIRYRQTGPLIGRQIFRFSEEGLVNARFDYSYNNFRVTSMQAVINETPLPIDLYRYVDVSGRTEQFGKFSVINYDLNQVITTTVMKHTKIFSANGQVIEVQYEILKAIAYWMTIQYDNVGRMVICDIRVGVDANITRYFYEYDADGQLQTVSVNDKTQWRYSYDLNGNINLLSHGKSARLTPLRYDLRDRITRLGEIQYKMDEDGFLRQRGNDIFEYNSNGLLQKAYNKASGWTVQYYYDGLGRRVASKSSLGQHLQFFYADLTNPIRVTHLYNHTSSEITSLYYDLQGHLIAMELSSGEEYYVACDNTGTPLAVFSSRGQVIKEILYTPYGDIYHDTYPDFQVIIGFHGGLYDFLTKLVHLGQRDYDVVAGRWTTPNHHIWKQLNLLPKPFNLYSFENNYPVGKIQDVAKYTTDIRSWLELFGFQLHNVLPGFPKPELENLELTYELLRLQTKTQEWDPGKTILGIQCELQKQLRNFISLDQLPMTPRYNDGRCLEGGKQPRFAAVPSVFGKGIKFAIKDGIVTADIIGVANEDSRRLAAILNNAHYLENLHFTIEGRDTHYFIKLGSLEEDLVLIGNTGGRRILENGVNVTVSQMTSVLNGRTRRFADIQLQHGALCFNIRYGTTVEEEKNHVLEIARQRAVAQAWTKEQRRLQEGEEGIRAWTEGEKQQLLSTGRVQGYDGYFVLSVEQYLELSDSANNIHFMRQSEIGRR

SEQ ID NO: 919 - protein, 261 aa, Homo sapiens
MASQLQNRLRSALALVTGAGSGIGRAVSVRLAGEGATVAACDLDRAAAQETVRLLGGPGSKEGPPRGNHAAFQADVSEARAARCLLEQVQACFSRPPSVVVSCAGITQDEFLLHMSEDDWDKVIAVNLKGTFLVTQAAAQALVSNGCRGSIINISSIVGKVGNVGQTNYAASKAGVIGLTQTAARELGRHGIRCNSVLPGFIATPMTQKVPQKVVDKITEMIPMGHLGDPEDVADVVAFLASEDSGYITGTSVEVTGGLFM

SEQ ID NO: 920 - protein, 629 aa, Homo sapiens
MVRGARQPQQPRSRLAPRLTGTVEKPPRKRRSSIRGSGDSSHSQSQGERYQHFTEKTEFALKEIMSSGGAEDDIPQGERKTVTDFCYLLDKSKQLFNGLRDLPQYGQKQWQSYFGRTFDVYTKLWKFQQQHRQVLDNRYGLKRWQIGEIASKIGQLYYHYYLRTSETSYLNEAFSFYSAIRQRSYYSQVNKEDRPELVVKKLRYYARFIVVCLLLNKMDVVKDLVKELSDEIEDYTHRFNTEDQVEWNLVLQEVAAFIEADPVMVLNDDNTIVITSNRLAETGAPLLEQGMIVGQLSLADALIIGNCNNQVKFSELTVDMFRMLQALEREPMNLASQMNKPGMQESADKPTRRENPHKYLLYKPTFSQLYTFLAASFKELPANSVLLIYLSATGVFPTGRSDSEGPYDFGGVLTNSNRDIINGDAIHKRNQSHKEMHCLHPGDLYPFTRKPLFIIVDSSNSVAYKNFTNLFGQPLVCLLSPTAYPKALQDQSQRGSLFTLFLNNPLMAFLFVSGLSSMRRGLWEKCQEYLRKINRDIAQLLTHSRSIDQAFLQFFGDEFLRLLLTRFIFCSATMRMHKIFRETRNYPESYPQLPRDETVENPHLQKHILELASILDVRNVFFENTIDDY

SEQ ID NO: 921 - protein, 606 aa, Homo sapiens
MVRGARQPQQPRSRLAPRLTGTVEKPPRKRRSRTEFALKEIMSSGGAEDDIPQGERKTVTDFCYLLDKSKQLFNGLRDLPQYGQKQWQSYFGRTFDVYTKLWKFQQQHRQVLDNRYGLKRWQIGEIASKIGQLYYHYYLRTSETSYLNEAFSFYSAIRQRSYYSQVNKEDRPELVVKKLRYYARFIVVCLLLNKMDVVKDLVKELSDEIEDYTHRFNTEDQVEWNLVLQEVAAFIEADPVMVLNDDNTIVITSNRLAETGAPLLEQGMIVGQLSLADALIIGNCNNQVKFSELTVDMFRMLQALEREPMNLASQMNKPGMQESADKPTRRENPHKYLLYKPTFSQLYTFLAASFKELPANSVLLIYLSATGVFPTGRSDSEGPYDFGGVLTNSNRDIINGDAIHKRNQSHKEMHCLHPGDLYPFTRKPLFIIVDSSNSVAYKNFTNLFGQPLVCLLSPTAYPKALQDQSQRGSLFTLFLNNPLMAFLFVSGLSSMRRGLWEKCQEYLRKINRDIAQLLTHSRSIDQAFLQFFGDEFLRLLLTRFIFCSATMRMHKIFRETRNYPESYPQLPRDETVENPHLQKHILELASILDVRNVFFENTIDDY

SEQ ID NO: 922 - protein, 523 aa, Homo sapiens [sequence omitted]

SEQ ID NO: 923 - protein, 17 aa, Homo sapiens
MDQEQIRPPIIAWAITL

SEQ ID NO: 924 - protein, 172 aa, Homo sapiens
MSSLVKEDLEKKLFKPLSQNLYEFIEIEFSVQDRYYLCVSVTKKEEVKIVMVKHYRIGLDEKYEVTKKWSLNDLQMIDGKEADTDNPFFDLHFKKVYSLEAYSCASKYAFARTVNKLNHAYLKKDLQIVNFDSTYINDDSIWSSNNKDCLVLMRICFYAFNLVCLSLCPLPL

SEQ ID NO: 925 - protein, 72 aa, Homo sapiens [sequence omitted]

SEQ ID NO: 926 - protein, 196 aa, Homo sapiens [sequence omitted]

SEQ ID NO: 927 - protein, 71 aa, Homo sapiens
VVADSVNISSSYSIFFLGVRNAPRRYKSYQSLHRRTLGCYDLVLDHGDCPASREYSSPPTLLLKSPLLYVR

SEQ ID NO: 928 - protein, 533 aa, Homo sapiens
MSWAARPPFLPQRHAAGQCGPVGVRKEMHCGVASRWRRRRPWLDPAAAAAAAVAGGEQQTPEPEPGEAGRDGMGDSGRDSRSPDSSSPNPLPQGVPPPSPPGPPLPPSTAPSLGGSGAPPPPPMPPPPLGSPFPVISSSMGSPGLPPPAPPGFSGPVSSPQINSTVSLPGGGSGPPEDVKPPVLGVRGLHCPPPPGGPGAGKRLCAICGDRSSGKHYGVYSCEGCKGFFKRTIRKDLTYSCRDNKDCTVDKRQRNRCQYCRYQKCLATGMKREAVQEERQRGKDKDGDGEGAGGAPEEMPVDRILEAELAVEQKSDQGVEGPGGTGGSGSSPNDPVTNICQAADKQLFTLVEWAKRIPHFSSLPLDDQVILLRAGWNELLIASFSHRSIDVRDGILLATGLHVHRNSAHSAGVGAIFDRVLTELVSKMRDMRMDKTELGCLRAIILFNPDAKGLSNPSEVEVLREKVYASLETYCKQKYPEQQGRFAKLLLRLPALRSIGLKCLEHLFFFKLIGDTPIDTFLMEMLEAPHQLA

SEQ ID NO: 929 - protein, 469 aa, Homo sapiens
MARGLGAPHWVAVGLLTWATLGLLVAGLGGHDDLHDDLQEDFHGHSHRHSHEDFHHGHSHAHGHGHTHESIWHGHTHDHDHGHSHEDLHHGHSHGYSHESLYHRGHGHDHEHSHGGYGESGAPGIKQDLDAVTLWAYALGATVLISAAPFFVLFLIPVESNSPRHRSLLQILLSFASGGLLGDAFLHLIPHALEPHSHHTLEQPGHGHSHSGQGPILSVGLWVLSGIVAFLVVEKFVRHVKGGHGHSHGHGHAHSHTRGSHGHGRQERSTKEKQSSEEEEKETRGVQKRRGGSTVPKDGPVRPQNAEEEKRGLDLRVSGYLNLAADLAHNFTDGLAIGASFRGGRGLGILTTMTVLLHEVPHEVGDFAILVQSGCSKKQAMRLQLLTAVGALAGTACALLTEGGAVGSEIAGGAGPGWVLPFTAGGFIYVATVSVLPELLREASPLQSLLEVLGLLGGVIMMVLIAHLE

SEQ ID NO: 930 - protein, 469 aa, Homo sapiens; identical to SEQ ID NO: 929

SEQ ID NO: 931 - protein, 537 aa, Homo sapiens [sequence omitted]

SEQ ID NO: 932 - protein, 866 aa, Homo sapiens
MQRELVYARGDGPGAPRPGSTAHPPHAIPNSPPSTPVPHSMPPSPSRIPYGGTRSMVVPGNATIPRDRISSLPVSRPISPSPSAILERRDVKPDEDMSGKNIAMYRNEGFYADPYLYHEGRMSIASSHGGHPLDVPDHIIAYHRTAIRSASAYCNPSMQAEMHMEQSLYRQKSRKYPDSHLPTLGSKTPPASPHRVSDLRMIDMHAHYNAHGPPHTMQPDRASPSRQAFKKEPGTLVYIEKPRSAAGLSSLVDLGPPLMEKQVFAYSTATIPKDRETSEKMMKTTANRNHTDSAGTPHVSGGKMLSALESTVPPSQPPPVGTSAIHMSLLEMRRSVAELRLQLQQMRQLQLQNQELLRAMMKKAELEISGKVMETMKRLEDPVQRQRVLVEQERQKYLHEEEKIVKKLCELEDFVEDLKKDSTAASRLVTLKDVEDGAFLLRQVGEAVATLKGEFPTLQNKMRAILRIEVEAVRFLKEEPHKLDSLLKRVRSMTDVLTMLRRHVTDGLLKGTDAAQAAQYMAMEKATAAEVLKSQEEAAHTSGQPFHSTGAPGDAKSEVVPLSGMMVRHAQSSPVVIQPSQHSVALLNPAQNLPHVASSPAVPQEATSTLQMSQAPQSPQIPMNGSAMQSLFIEEIHSVSAKNRAVSIEKAEKKWEEKRQNLDHYNGKEFEKLLEEAQANIMKSIPNLEMPPATGPLPRGDAPVDKVELSEDSPNSEQDLEKLGGKSPPPPPPPPRRSYLPGSGLTTTRSGDVVYTGRKENITAKASSEDAGPSPQTRATKYPAEEPASAWTPSPPPVTTSSSKDEEEEEEEGDKIMAELQGSSGAPQTSRMPVPMSAKNRPGTLDKPGKQSKLQDPRQYRQVVLP

SEQ ID NO: 933 - protein, 1384 aa, Homo sapiens
MEENESQKCEPCLPYSADRRQMQEQGKGNLHVTSPEDAECRRTKERLSNGNSRGSVSKSSRNIPRRHTLGGPRSSKEILGMQTSEMDRKREAFLEHLKQKYPHHASAIMGHQERLRDQTRSPKLSHSPQPPSLGDPVEHLSETSADSLEAMSEGDAPTPFSRGSRTRASLPVVRSTNQTKERSLGVLYLQYGDETKQLRMPNEITSADTIRALFVSAFPQQLTMKMLESPSVAIYIKDESRNVYYELNDVRNIQDRSLLKVYNKDPAHAFNHTPKTMNGDMRMQRELVYARGDGPGAPRPGSTAHPPHAIPNSPPSTPVPHSMPPSPSRIPYGGTRSMVVPGNATIPRDRISSLPVSRPISPSPSAILERRDVKPDEDMSGKNIAMYRNEGFYADPYLYHEGRMSIASSHGGHPLDVPDHIIAYHRTAIRSASAYCNPSMQAEMHMEQSLYRQKSRKYPDSHLPTLGSKTPPASPHRVSDLRMIDMHAHYNAHGPPHTMQPDRASPSRQAFKKEPGTLVYIEKPRSAAGLSSLVDLGPPLMEKQVFAYSTATIPKDRETRERMQAMEKQIASLTGLVQSALFKGPITSYSKDASSEKMMKTTANRNHTDSAGTPHVSGGKMLSALESTVPPSQPPPVGTSAIHMSLLEMRRSVAELRLQLQQMRQLQLQNQELLRAMMKKAELEISGKVMETMKRLEDPVQRQRVLVEQERQKYLHEEEKIVKKLCELEDFVEDLKKDSTAASRLVTLKDVEDGAFLLRQVGEAVATLKGEFPTLQNKMRAILRIEVEAVRFLKEEPHKLDSLLKRVRSMTDVLTMLRRHVTDGLLKGTDAAQAAQYMAMEKATAAEVLKSQEEAAHTSGQPFHSTGAPGDAKSEVVPLSGMMVRHAQSSPVVIQPSQHSVALLNPAQNLPHVASSPAVPQEATSTLQMSQAPQSPQIPMNGSAMQSLFIEEIHSVSAKNRAVSIEKAEKKWEEKRQNLDHYNGKEFEKLLEEAQANIMKSIPNLEMPPATGPLPRGDAPVDKVELSEDSPNSEQDLEKLGGKSPPPPPPPPRRSYLPGSGLTTTRSGDVVYTGRKENITAKASSEDAGPSPQTRATKYPAEEPASAWTPSPPPVTTSSSKDEEEEEEEGDKIMAELQAFQKCSFMDVNSNSHAEPSRADSHVKDTRSGATVPPKEKKGSSGAPQTSRMPVPMSAKNRPGTLDKPGKQSKLQDPRQYRQANGSAKKSGGDFKPTSPSLPASKIPALSPSSGKSSSLPSSSGDSSNLPNPPATKPSIASNPLSPQTGPPAHSASLIPSVSNGSLKFQSLTHTGKGHHLSFSPQSQNGRAPPPLSFSSSPPSPASSVSLNQGAKGTRTIHTPSLTSYKAQNGSSSKATPSTAKETS

SEQ ID NO: 934 - protein, 317 aa, Homo sapiens
MGGVIKSIFTFVLIVEFIIGNLGNSFIALVNCIDWVKGRKISSVDRILTALAISRISLVWLIFGSWCVSVFFPALFATEKMFRMLTNIWTVINHFSVWLATGLGTFYFLKIANFSNSIFLYLKWRVKKVVLVLLLVTSVFLFLNIALINIHINASINGYRRNKTCSSDSSNFTRFSSLIVLTSTVFIFIPFTLSLAMFLLLIFSMWKHRKKMQHTVKISGDASTKAHRGVKSVITFFLLYAIFSLSFFISVWTSERLEENLIILSQVMGMAYPSCHSCVLILGNKKLRQASLSVLLWLRYMFKDGEPSGHKEFRESS

SEQ ID NO: 935 - protein, 1718 aa, Homo sapiens [sequence omitted]

SEQ ID NO: 936 - protein, 1637 aa, Homo sapiens [sequence omitted]

SEQ ID NO: 937 - protein, 55 aa, Homo sapiens
MKYCFTNQKRGIILAARQSGQESRSLQHWLLLLEFCEAGKDQFHYTILEEAKDGT

SEQ ID NO: 938 - protein, 299 aa, Homo sapiens
MMCFLLIISSILVVFAFVLGNVANGFIALVNVIDWVNTRKISSAEQILTALVVSRIGLLWVMLFLWYATVFNSALYGLEVRIVASNAWAVTNHFSMWLAASLSIFCLLKIANFSNLISLHLKKRIKSVVLVILLGPLVFLICNLAVITMDERVWTKEYEGNVTWKIKLRNAIHLSSLTVTTLANLIPFTLSLICFLLLICSLCKHLKKMRLHSKGSQDPSTKVHIKALQTVTSFLMLFAIYFLCIITSTWNLRTQQSKLVLLLCQTVAIMYPSFHSFILIMGSRKLKQTFLSVLWQMTC

SEQ ID NO: 939 - protein, 309 aa, Homo sapiens [sequence omitted]

SEQ ID NO: 940 - protein, 256 aa, Homo sapiens [sequence omitted]

SEQ ID NO: 941 - protein, 158 aa, Homo sapiens
ERVTIKGNLTFNYMDTMHDFTSLFLLQMMFILPFVETLASILLLILSLWSHTRQMKLHGIYSRDPSTEAHVKPIKAIISFLLLFIVHYFISIILTLACPLLDFVAARTFSSVLVFFHPSGHSFLLILRDSKLKQASLCVLKKMKYAKKDIISHFYKHA

SEQ ID NO: 942 - protein, 159 aa, Homo sapiens
PNCHCSGILQNWFTLIILLHWYATVFNSALYSLEVRIVPSNVSAIINHFSIWLATSLSIFYLFKIANFSNFIFLHLKKRIKSVLLVILLGSLVFLICNLAVVTMDDSVWTKEFEGNVTWKIELRNAIHLSNMTITNHASKLHTVHSDSNIFSAVSLFSV

SEQ ID NO: 943 - protein, 299 aa, Homo sapiens
MITFLYIFFSILIMVLFVLGNFANGFIALVNFIDWVKRKKISSADQILTALAVSRIGLLWALLLNWYLTVLNPAFYSVELRITSYNAWVVTNHFSMWLAANLSIFYLLKIANFSNLLFLHLKRRVRSVILVILLGTLIFLVCHLLVANMDESMWAEEYEGNMTGKMKLRNTVHLSYLTVTTLWSFIPFTLSLISFLMLICSLYKHLKKMQLHGEGSQDLSTKVHIKALQTLISFLLLCAIFFLFLIVSVWSPRRLRNDPVVMVSKAVGNIYLAFDSFILIWRTKKLKHTFLLILCQIRC

SEQ ID NO: 944 - protein, 309 aa, Homo sapiens [sequence omitted]

SEQ ID NO: 945 - protein, 71 aa, Homo sapiens
MICFLLIILSILVVFAFVLGNVANGFIALVGVLEWVKTQKISSADQISHCSGGVQNWFTLGHIITLVCNCV

SEQ ID NO: 946 - protein, 309 aa, Homo sapiens
MTTFIPIIFSSVVVVLFVIGNFANGFIALVNSIERVKRQKISFADQILTALAVSRVGLLWVLLLNWYSTVFNPAFYSVEVRTTAYNVWAVTGHFSNWLATSLSIFYLLKIANFSNLIFLHLKRRVKSVILVMLLGPLLFLACQLFVINMKEIVRTKEYEGNMTWKIKLRSAVYLSDATVTTLGNLVPFTLTLLCFLLLICSLCKHLKKMQLHGKGSQDPSTKVHIKALQTVIFFLLLCAVYFLSIMISVWSFGSLENKPVFMFCKAIRFSYPSIHPFILIWGNKKLKQTFLSVLRQVRYWVKGEKPSSP

SEQ ID NO: 947 - protein, 335 aa, Homo sapiens
MDPKGLLSLTFVLFLSLAFGASYGTGGRMMNCPKILRQLGSKVLLPLTYERINKSMNKSIHIVVTMAKSLENSVENKIVSLDPSEAGPPRYLGDRYKFYLENLTLGIRESRKEDEGWYLMTLEKNVSVQRFCLQLRLYEQVSTPEIKVLNKTQENGTCTLILGCTVEKGDHVAYSWSEKAGTHPLNPANSSHLLSLTLGPQHADNIYICTVSNPISNNSQTFSPWPGCRTDPSETKPWAVYAGLLGGVIMILIMVVILQLRRRGKTNHYQTTVEKKSLTIYAQVQKPGPLQKKLDSFPAQDPCTTIYVAATEPVPESVQETNSITVYASVTLPES

SEQ ID NO: 948 - protein, 717 aa, Homo sapiens
MAVAVRTLQEQLEKAKESLKNVDENIRKLTGRDPNDVRPIQARLLALSGPGGGRGRGSLLLRRGFSDSGGGPPAKQRDLEGAVSRLGGERRTRRESRQESDPEDDDVKKPALQSSVVATSKERTRRDLIQDQNMDEKGKQRNRRIFGLLMGTLQKFKQESTVATERQKRRQEIEQKLEVQAEEERKQVENERRELFEERRAKQTELRLLEQKVELAQLQEEWNEHNAKIIKYIRTKTKPHLFYIPGRMCPATQKLIEESQRKMNALFEGRRIEFAEQINKMEARPRRQSMKEKEHQVVRNEEQKAEQEEGKVAQREEELEETGNQHNDVEIEEAGEEEEKEIAIVHSDAEKEQEEEEQKQEMEVKMEEETEVRESEKQQDSQPEEVMDVLEMVENVKHVIADQEVMETNRVESVEPSENEASKELEPEMEFEIEPDKECKSLSPGKENVSALDMEKESEEKEEKESEPQPEPVAQPQPQSQPQLQLQSQSQPVLQSQPPSQPEDLSLAVLQPTPQVTQEQGHLLPERKDFPVESVKLTEVPVEPVLTVHPESKSKTKTRSRSRGRARNKTSKSRSRSSSSSSSSSSSTSSSSGSSSSSGSSSSRSSSSSSSSTSGSSSRDSSSSTSSSSESRSRSRGRGHNRDRKHRRSVDRKRRDTSGLERSHKSSKGGSSRDTKGSKDKNSRSDRKRSISESSRSGKRSSRSERDRKSDRKDKRR

SEQ ID NO: 949 - protein, 261 aa, Homo sapiens
MAGQCLPTQGWVPSFPQIPPLGKHYSQRWAQEDLLEEQKDGARAAAVADKKKGLMGPLTELDTKDVDALLKKSEAQHEQPEDGCPFGALTQRLLQALVEENIISPMEDSPIPDMSGKESGADGASTSPRNQNKPFSVPHTKSLESRIKEELIAQGLLESEDRPAEDSEDEVLAELRKRQAELKALSAHNRTKKHDLLRLAKEEVSRQELRQRVRMADNEVMDAFRKIMAARQKKRTPTKKEKDQAWKTLKERESILKLLDG

SEQ ID NO: 950 - protein, 369 aa, Homo sapiens
MSELKDCPLQFHDFKSVDHLKVCPRYTAVLARSEDDGIGIEELDTLQLELETLLSSASRRLRVLEAETQILTDWQDKKGDRRFLKLGRDHELGAPPKHGKPKKQKLEGKAGHGPGPGPGRPKSKNLQPKIQEYEFTDDPIDVPRIPKNDAPNRFWASVEPYCADITSEEVRTLEELLKPPEDEAEHYKIPPLGKHYSQRWAQEDLLEEQKDGARAAAVADKKKGLMGPLTELDTKDVDALLKKSEAQHEQPEDGCPFGALTQRLLQALVEENIISPMEDSPIPDMSGKESGADGASTSPRNQNKPFSVPHTKSLESRIKEELIAQGLLESEDRPAEDSEDEVLAELRKRQAELKALSAHNRTKKHDLLR

SEQ ID NO: 951 - protein, 369 aa, Homo sapiens; identical to SEQ ID NO: 950

SEQ ID NO: 952 - protein, 432 aa, Homo sapiens
MSELKDCPLQFHDFKSVDHLKVCPRYTAVLARSEDDGIGIEELDTLQLELETLLSSASRRLRVLEAETQILTDWQDKKGDRRFLKLGRDHELGAPPKHGKPKKQKLEGKAGHGPGPGPGRPKSKNLQPKIQEYEFTDDPIDVPRIPKNDAPNRFWASVEPYCADITSEEVRTLEELLKPPEDEAEHYKIPPLGKHYSQRWAQEDLLEEQKDGARAAAVADKKKGLMGPLTELDTKDVDALLKKSEAQHEQPEDGCPFGALTQRLLQALVEENIISPMEDSPIPDMSGKESGADGASTSPRNQNKPFSVPHTKSLESRIKEELIAQGLLESEDRPAEDSEDEVLAELRKRQAELKALSAHNRTKKHDLLRLAKEEVSRQELRQRVRMADNEVMDAFRKIMAARQKKRTPTKKEKDQAWKTLKERESILKLLDG

SEQ ID NO: 953 - protein, 97 aa, Homo sapiens
MGPVVPEFSRTSSDVEQATGSTSDRYGPGMWEGNAAEGGFVTEGGKSEGMKLWPLVIFLSYFPGKPGELTLFSVLPELSQSLGLREQELQVVRASGK

SEQ ID NO: 954 - protein, 351 aa, Homo sapiens
MRAVLAREMDGRRVLGRFWSGWRRGLGVRPVPEDAGFGTEARHQRQPRGSCQRSGPLGDQPFAGLLPKNLSREELVDALRAAVVDRKGPLVTLNKPQGLPVTGKPGELTLFSVLPELSQSLGLREQELQVVRASGKESSGLVLLSSCPQTASRLQKYFTHARRAQRPTATYCAVTDGIPAASEGKIQAALKLEHIDGVNLTVPVKAPSRKDILEGVKKTLSHFRVVATGSGCALVQLQPLTVFSSQLQVHMVLQLCPVLGDHMYSARVGTVLGQRFLLPAENNKPQRQVLDEALLRRLHLTPSQAAQLPLHLHLHRLLLPGTRARDTPVELLAPLPPYFSRTLQCLGLRLQ

SEQ ID NO: 955 - protein, 136 aa, Homo sapiens
MRAVLAREMDGRRVLGRFWSGWRRGLGVRPVPEDAGFGTEARHQRQPRGSCQRSGPLGDQPFAGLLPKNLSREELVDALRAAVVDRKGPLVTLNKPQGLPVTGKPGELTLFSVLPELSQSLGLREQELQVVRASGK

SEQ ID NO: 956 - protein, 149 aa, Homo sapiens [sequence omitted]

SEQ ID NO: 957 - protein, 149 aa, Homo sapiens [sequence omitted]

SEQ ID NO: 958 - protein, 246 aa, Homo sapiens
MFQLPILNFSPQQVAGVCETLEESGDVERLGRFLWSLPVAPAACEALNKNESVLRARAIVAFHGGNYRELYHILENHKFTKESHAKLQALWLEAHYQEAEKLRGRPLGPVDKYRVRKKFPLPRTIWDGEQKTHCFKERTRHLLREWYLQDPYPNPSKKRELAQATGLTPTQVGNWFKNRRQRDRAAAAKNRLQQQVLSQGSGRALRAEGDGTPEVLGVATSPAASLSSKAATSAISITSSDSECDI

SEQ ID NO: 959 - protein, 12759 aa, Homo sapiens [sequence omitted]

SEQ ID NO: 960 - protein, 12704 aa, Homo sapiens [sequence omitted]

SEQ ID NO: 961 - protein, 811 aa, Homo sapiens [sequence omitted]

SEQ ID NO: 962 - protein, 12622 aa, Homo sapiens [sequence omitted]

SEQ ID NO: 963 - protein, 13888 aa, Homo sapiens [sequence omitted]

SEQ ID NO: 964 - protein, 12756 aa, Homo sapiens [sequence omitted]

SEQ ID NO: 965 - protein, 811 aa, Homo sapiens [sequence omitted]

SEQ ID NO: 966 - protein, 325 aa, Homo sapiens
MVCGSPGGMLLLRAGLLALAALCLLRVPGARAAACEPVRIPLCKSLPWNMTKMPNHLHHSTQANAILAIEQFEGLLGTHCSPDLLFFLCAMYAPICTIDFQHEPIKPCKSVCERARQGCEPILIKYRHSWPENLACEELPVYDRGVCISPEAIVTADGADFPMDSSNGNCRGASSERCKCKPIRATQKTYFRNNYNYVIRAKVKEIKTKCHDVTAVVEVKEILKSSLVNIPRDTVNLYTSSGCLCPPLNVNEEYIIMGYEDEERSRLLLVEGSIAEKWKDRLGKKVKRWDMKLRHLGLSKSDSSNSDSTQSQKSGRNSNPRQARN

SEQ ID NO: 967 - protein, 325 aa, Homo sapiens; identical to SEQ ID NO: 966

SEQ ID NO: 968 - protein, 484 aa, Homo sapiens
MSRSTQELLGYHCRLQDKLQEQEGSLAAEGRHSLASAADHMKVVPSLLLSVLLAQVWLVPGLAPSPQSPETPAPQNQTSRVVQAPKEEEEDEQEASEEKASEEEKAWLMASRQQLAKETSNFGFSLLRKISMRHDGNMVFSPFGMSLAMTGLMLGATGPTETQIKRGLHLQALKPTKPGLLPSLFKGLRETLSRNLELGLTQGSFAFIHKDFDVKETFFNLSKRYFDTECVPMNFRNASQAKRLMNHYINKETRGKIPKLFDEINPETKLILVDYILFKGKWLTPFDPVFTEVDTFHLDKYKTIKVPMMYGAGKFASTFDKNFRCHVLKLPYQGNATMLVVLMEKMGDHLALEDYLTTDLVETWLRNMKTRNMEVFFPKFKLDQKYEMHELLRQMGIRRIFSPFADLSELSATGRNLQVSRVLQRTVIEVDERGTEAVAGILSEITAYSMPPVIKVDRPFHFMIYEETSGMLLFLGRVVNPTLL

SEQ ID NO: 969 - protein, 444 aa, Homo sapiens
MKVVPSLLLSVLLAQVWLVPGLAPSPQSPETPAPQNQTSRVVQAPKEEEEDEQEASEEKASEEEKAWLMASRQQLAKETSNFGFSLLRKISMRHDGNMVFSPFGMSLAMTGLMLGATGPTETQIKRGLHLQALKPTKPGLLPSLFKGLRETLSRNLELGLTQGSFAFIHKDFDVKETFFNLSKRYFDTECVPMNFRNASQAKRLMNHYINKETRGKIPKLFDEINPETKLILVDYILFKGKWLTPFDPVFTEVDTFHLDKYKTIKVPMMYGAGKFASTFDKNFRCHVLKLPYQGNATMLVVLMEKMGDHLALEDYLTTDLVETWLRNMKTRNMEVFFPKFKLDQKYEMHELLRQMGIRRIFSPFADLSELSATGRNLQVSRVLQRTVIEVDERGTEAVAGILSEITAYSMPPVIKVDRPFHFMIYEETSGMLLFLGRVVNPTLL

SEQ ID NO: 970 - protein, 444 aa, Homo sapiens; identical to SEQ ID NO: 969

SEQ ID NO: 971 - protein, 173 aa, Homo sapiens [sequence omitted]

SEQ ID NO: 972 - protein, 1279 aa, Homo sapiens [sequence omitted]

SEQ ID NO: 973 - protein, 216 aa, Homo sapiens
MLPCPIPFSPSRLLIPPFPSFPSNYQLWLGRHNLFDDENTAQFVHVSESFPHPGFNMSLLENHTRQADEDYSHDLMLLRLTEPADTITDAVKVVELPTEEPEVGSTCLASGWGSIEPENFSFPDDLQCVDLKILPNDECKKAHVQKVTDFMLCVGHLEGGKDTCVGDSGGPLMCDGVLQGVTSWGYVPCGTPNKPSVAVRVLSYVKWIEDTIAENS

SEQ ID NO: 974 - protein, 262 aa, Homo sapiens
MWFLVLCLALSLGGTGAAPPIQSRIVGGWECEQHSQPWQAALYHFSTFQCGGILVHRQWVLTAAHCISDNYQLWLGRHNLFDDENTAQFVHVSESFPHPGFNMSLLENHTRQADEDYSHDLMLLRLTEPADTITDAVKVVELPTEEPEVGSTCLASGWGSIEPENFSFPDDLQCVDLKILPNDECKKAHVQKVTDFMLCVGHLEGGKDTCVGDSGGPLMCDGVLQGVTSWGYVPCGTPNKPSVAVRVLSYVKWIEDTIAENS

SEQ ID NO: 975 - protein, 432 aa, Homo sapiens
MDMHCKADPFSAMHPGHGGVNQLGGVFVNGRPLPDVVRQRIVELAHQGVRPCDISRQLRVSHGCVSKILGRYYETGSIKPGVIGGSKPKVATPKVVDKIAEYKRQNPTMFAWEIRDRLLAEGICDNDTVPSVSSINRIIRTKVQQPFHPTPDGAGTGVTAPGHTIVPSTASPPVSSASNDPVGSYSINGILGIPRSNGEKRKRDEVEVYTDPAHIRGGGGLHLVWTLRDVSEGSVPNGDSQSGVDSLRKHLRADTFTQQQLEALDRVFERPSYPDVFQASEHIKSEQGNEYSLPALTPGLDEVKSSLSASTNPELGSNVSGTQTYPVVTGRDMASTTLPGYPPHVPPTGQGSYPTSTLAGMVPGSEFSGNPYSHPQYTAYNEAWRFSNPALLMPPPGAPPLPLLPLPMTATSYRGDHIKLQADSFGLHIVPV

SEQ ID NO: 976 - protein, 417 aa, Homo sapiens
MDMHCKADPFSAMHPGHGGVNQLGGVFVNGRPLPDVVRQRIVELAHQGVRPCDISRQLRVSHGCVSKILGRYYETGSIKPGVIGGSKPKVATPKVVDKIAEYKRQNPTMFAWEIRDRLLAEGICDNDTVPSVSSINRIIRTKVQQPFHPTPDGAGTGVTAPGHTIVPSTASPPVSSASNDPVGSYSINGILGIPRSNGEKRKRDEVEVYTDPAHIRGGGGLHLVWTLRDVSEGSVPNGDSQSGVDSLRKHLRADTFTQQQLEALDRVFERPSYPDVFQASEHIKSEQGNEYSLPALTPGLDEVKSSLSASTNPELGSNVSGTQTYPVVTGRDMASTTLPGYPPHVPPTGQGSYPTSTLAGMVPGSEFSGNPYSHPQYTAYNEAWRFSNPALLSSPYYYSAAPRGSAPAAAAAAYDRH

SEQ ID NO: 977 - protein, 399 aa, Homo sapiens [sequence omitted]

SEQ ID NO: 978 - protein, 396 aa, Homo sapiens
MDMHCKADPFSAMHPGHGGVNQLGGVFVNGRPLPDVVRQRIVELAHQGVRPCDISRQLRVSHGCVSKILGRYYETGSIKPGVIGGSKPKVATPKVVDKIAEYKRQNPTMFAWEIRDRLLAEGICDNDTVPSVSSINRIIRTKVQQPFHPTPDGAGTGVTAPGHTIVPSTASPPVSSASNDPVGSYSINGILGIPRSNGEKRKRDEDVSEGSVPNGDSQSGVDSLRKHLRADTFTQQQLEALDRVFERPSYPDVFQASEHIKSEQGNEYSLPALTPGLDEVKSSLSASTNPELGSNVSGTQTYPVVTGRDMASTTLPGYPPHVPPTGQGSYPTSTLAGMVPEAAVGPSSSLMSKPGRKLAEVPPCVQPTGASSPATRTATPSTRPTTRLGDSATPPY

SEQ ID NO: 979 - protein, 416 aa, Homo sapiens
MDMHCKADPFSAMHRHGGVNQLGGVFVNGRPLPDVVRQRIVELAHQGVRPCDISRQLRVSHGCVSKILGRYYETGSIKPGVIGGSKPKVATPKVVDKIAEYKRQNPTMFAWEIRDRLLAEGICDNDTVPSVSSINRIIRTKVQQPFHPTPDGAGTGVTAPGHTIVPSTASPPVSSASNDPVGSYSINGILGIPRSNGEKRKRDEVEVYTDPAHIRGGGGLHLVWTLRDVSEGSVPNGDSQSGVDSLRKHLRADTFTQQQLEALDRVFERPSYPDVFQASEHIKSEQGNEYSLPALTPGLDEVKSSLSASTNPELGSNVSGTQTYPVVTGRDMASTTLPGYPPHVPPTGQGSYPTSTLAGMVPGSEFSGNPYSHPQYTAYNEAWRFSNPALLSSPYYYSAAPRGSAPAAAAAAYDRH

SEQ ID NO: 980 - protein, 394 aa, Homo sapiens
MDMHCKADPFSAMHPGHGGVNQLGGVFVNGRPLPDVVRQRIVELAHQGVRPCDISRQLRVSHGCVSKILGRYYETGSIKPGVIGGSKPKVATPKVVDKIAEYKRQNPTMFAWEIRDRLLAEGICDNDTVPSVSSINRIIRTKVQQPFHPTPDGAGTGVTAPGHTIVPSTASPPVSSASNDPVGSYSINGILGIPRSNGEKRKRDEDVSEGSVPNGDSQSGVDSLRKHLRADTFTQQQLEALDRVFERPSYPDVFQASEHIKSEQGNEYSLPALTPGLDEVKSSLSASTNPELGSNVSGTQTYPVVTGRDMASTTLPGYPPHVPPTGQGSYPTSTLAGMVPGSEFSGNPYSHPQYTAYNEAWRFSNPALLSSPYYYSAAPRGSAPAAAAAAYDRH

SEQ ID NO: 981 - protein, 421 aa, Homo sapiens [sequence omitted]

SEQ ID NO: 982 - protein, 409 aa, Homo sapiens
MDMHCKADPFSAMHPGHGGVNQLGGVFVNGRPLPDVVRQRIVELAHQGVRPCDISRQLRVSHGCVSKILGRYYETGSIKPGVIGGSKPKVATPKVVDKIAEYKRQNPTMFAWEIRDRLLAEGICDNDTVPSVSSINRIIRTKVQQPFHPTPDGAGTGVTAPGHTIVPSTASPPVSSASNDPVGSYSINGILGIPRSNGEKRKRDEDVSEGSVPNGDSQSGVDSLRKHLRADTFTQQQLEALDRVFERPSYPDVFQASEHIKSEQGNEYSLPALTPGLDEVKSSLSASTNPELGSNVSGTQTYPVVTGRDMASTTLPGYPPHVPPTGQGSYPTSTLAGMVPGSEFSGNPYSHPQYTAYNEAWRFSNPALLMPPPGAPPLPLLPLPMTATSYRGDHIKLQADSFGLHIVPV

SEQ ID NO: 983 - protein, 147 aa, Homo sapiens
VEIVPLHSSLGDKADEFIRANATNKLTVIAEQIQHLQEQARKVLEDAHRDANLHHVACNIVKKPGNIYYLYKRESGQQYFSIISPKEWGTSCPHDFLGAYKLQHDLSWTPYEDIEKQDAKISMMDTLLSQSVALPPCTEPNFQGLTH

SEQ ID NO: 984 - protein, 199 aa, Homo sapiens
MEDAAAPGRTEGVLERQGAPPAAGQGGALVELTPTPGGLALVSPYHTHRAGDPLDLVALAEQVQKADEFIRANATNKLTVIAEQIQHLQEQARKVLEDAHRDANLHHVACNIVKKPGNIYYLYKRESGQQYFSIISPKEWGTSCPHDFLGAYKLQHDLSWTPYEDIEKQDAKISMMDTLLSQSVALPPCTEPNFQGLTH

SEQ ID NO: 985 - protein, 736 aa, Homo sapiens [sequence omitted]

SEQ ID NO: 986 - protein, 363 aa, Homo sapiens
MAVRALKLLTTLLAVVAAASQAEVESEAGWGMVTPDLLFAEGTAAYARGDWPGVVLSMERALRSRAALRALRLRCRTQCAADFPWELDPDWSPSPAQASGAAALRDLSFFGGLLRRAACLRRCLGPPAAHSLSEEMELEFRKRSPYNYLQVAYFKINKLEKAVAAAHTFFVGNPEHMEMQQNLDYYQTMSGVKEADFKDLETQPHMQEFRLGVRLYSEEQPQEAVPHLEAALQEYFVAYEECRALCEGPYDYDGYNYLEYNADLFQAITDHYIQVLNCKQNCVTELASHPSREKPFEDFLPSHYNYLQFAYYNIGNYTQAVECAKTYLLFFPNDEVMNQNLAYYAAMLGEEHTRSIGPREQGT

SEQ ID NO: 987 - protein, 804 aa, Homo sapiens [sequence omitted]

SEQ ID NO: 988 - protein, 376 aa, Homo sapiens [sequence omitted]

SEQ ID NO: 989 - protein, 127 aa, Homo sapiens
MDVFKKGFSIAKEGVVGAVEKTKQGVTEAAEKTKEGVMYVGAKTKENVVQSVTSVAEKTKEQANAVSEAVVSSVNTVATKTVEEAENIAVTSGVVRKEDLRPSAPQQEGEASKEKEEVAEEAQSGGD

SEQ ID NO: 990 - protein, 104 aa, Homo sapiens
MDVFKKGFSIAKEGVVGAVEKTKQGVTEAAEKTKEGVMYVGAKTKENVVQSVTSATKTVEEAENIAVTSGVVRKEDLRPSAPQQEGEASKEKEEVAEEAQSGGD

SEQ ID NO: 991 - protein, 170 aa, Homo sapiens
MDVFKKGFSIAKEGVVGAVEKTKQGVTEAAEKTKEGVMYVGAKTKENVVQSVTSVAEKTKEQANAVSEAVVSSVNTVATKTVEEAENIAVTSGVVRKEDLRPSAPQQEGEASKEKEEVAEEVGAGLLGCTMGGSLVGTPSPTDALLPSWAPRAQRGLLTFHSPYRDCVQG

SEQ ID NO: 992 - protein, 127 aa, Homo sapiens; identical to SEQ ID NO: 989

SEQ ID NO: 993 - protein, 949 aa, Homo sapiens [sequence omitted]

SEQ ID NO: 994 - protein, 317 aa, Homo sapiens
MSCTRMIQVLDPRPLTSSVMPVDVAMRLCLAHSPPVKSFLGPYDEFQRRHFVNKLKPLKSCLNIKHKAKSQNDWKCSHNQAKKRVVFADSKGLSLTAIHVFSDLPEEPAWDLQFDLLDLNDISSALKHHEEKNLILDFPQPSTDYLSFRSHFQKNFVCLENCSLQERTVTGTVKVKNVSFEKKVQIRITFDSWKNYTDVDCVYMKNVYGGTDSDTFSFAIDLPPVIPTEQKIEFCISYHANGQVFWDNNDGQNYRIVHVQWKPDGVQTQMAPQDCAFHQTSPKTELESTIFGSPRLASGLFPEWQSWGRMENLASYR

SEQ ID NO: 995 - protein, 373 aa, Homo sapiens
MTTSASSHLNKGIKQVYMSLPQGEKVQAMYIWIDGTGEGLRCKTRTLDSEPKCVEELPEWNFDGSSTLQSEGSNSDMYLVPAAMFRDPFRKDPNKLVLCEVFKYNRRPAETNLRHTCKRIMDMVSNQHPWFGMEQEYTLMGTDGHPFGWPSNGFPGPQGPYYCGVGADRAYGRDIVEAHYRACLYAGVKIAGTNAEVMPAQWEFQIGPCEGISMGDHLWVARFILHRVCEDFGVIATFDPKPIPGNWNGAGCHTNFSTKAMREENGLKYIEEAIEKLSKRHQYHIRAYDPKGGLDNARRLTGFHETSNINDFSAGVANRSASIRIPRTVGQEKKGYFEDRRPSANCDPFSVTEALIRTCLLNETGDEPFQYKN

SEQ ID NO: 996 - protein, 384 aa, Homo sapiens [sequence omitted]

SEQ ID NO: 997 - protein, 206 aa, Homo sapiens [sequence omitted]

SEQ ID NO: 998 - protein, 373 aa, Homo sapiens; identical to SEQ ID NO: 995

SEQ ID NO: 999 - protein, 373 aa, Homo sapiens; identical to SEQ ID NO: 995

SEQ ID NO: 1000 - protein, 377 aa, Homo sapiens
MSEEQFGGDGAAAAATAAVGGSAGEQEGAMVAATQGAAAAAGSGAGTGGGTASGGTEGGSAESEGAKIDASKNEEDEGHSNSSPRHSEAATAQREEWKMFIGGLSWDTTKKDLKDYFSKFGEVVDCTLKLDPITGRSRGFGFVLFKESESVDKVMDQKEHKLNGKVIDPKRAKAMKTKEPVKKIFVGGLSPDTPEEKIREYFGGFGEVESIELPMDNKTNKRRGFCFITFKEEEPVKKIMEKKYHNVGLSKCEIKVAMSKEQYQQQQQWGSRGGFAGRARGRGGGPSQNWNQGYSNYWNQGYGNYGYNSQGYGGYGGYDYTGYNNYYGYGDYSTGTSLQALCRADFTILTGPLNADRVRDAHALECCRLVVKQYFPI

SEQ ID NO: 1001 - protein, 152 aa, Homo sapiens
MDQKEHKLNGKVIDPKRAKAMKTKEPVKKIFVGGLSPDTPEEKIREYFGGFGEVESIELPMDNKTNKRRGFCFITFKEEEPVKKIMEKKYHNVGLSKCEIKVAMSKEQYQQQQQWGSRGGFAGRARGRGGDQQSGYGKVSRRGGHQNSYKPY

SEQ ID NO: 1002 - protein, 306 aa, Homo sapiens
MSEEQFGGDGAAAAATAAVGGSAGEQEGAMVAATQGAAAAAGSGAGTGGGTASGGTEGGSAESEGAKIDASKNEEDEGHSNSSPRHSEAATAQREEWKMFIGGLSWDTTKKDLKDYFSKFGEVVDCTLKLDPITGRSRGFGFVLFKESESVDKVMDQKEHKLNGKVIDPKRAKAMKTKEPVKKIFVGGLSPDTPEEKIREYFGGFGEVESIELPMDNKTNKRRGFCFITFKEEEPVKKIMEKKYHNVGLSKCEIKVAMSKEQYQQQQQWGSRGGFAGRARGRGGDQQSGYGKVSRRGGHQNSYKPY

SEQ ID NO: 1003 - protein, 306 aa, Homo sapiens; identical to SEQ ID NO: 1002

SEQ ID NO: 1004 - protein, 287 aa, Homo sapiens
MSEEQFGGDGAAAAATAAVGGSAGEQEGAMVAATQGAAAAAGSGAGTGGGTASGGTEGGSAESEGAKIDASKNEEDEGKMFIGGLSWDTTKKDLKDYFSKFGEVVDCTLKLDPITGRSRGFGFVLFKESESVDKVMDQKEHKLNGKVIDPKRAKAMKTKEPVKKIFVGGLSPDTPEEKIREYFGGFGEVESIELPMDNKTNKRRGFCFITFKEEEPVKKIMEKKYHNVGLSKCEIKVAMSKEQYQQQQQWGSRGGFAGRARGRGGDQQSGYGKVSRRGGHQNSYKPY

SEQ ID NO: 1005 - protein, 336 aa, Homo sapiens
MSEEQFGGDGAAAAATAAVGGSAGEQEGAMVAATQGAAAAAGSGAGTGGGTASGGTEGGSAESEGAKIDASKNEEDEGKMFIGGLSWDTTKKDLKDYFSKFGEVVDCTLKLDPITGRSRGFGFVLFKESESVDKVMDQKEHKLNGKVIDPKRAKAMKTKEPVKKIFVGGLSPDTPEEKIREYFGGFGEVESIELPMDNKTNKRRGFCFITFKEEEPVKKIMEKKYHNVGLSKCEIKVAMSKEQYQQQQQWGSRGGFAGRARGRGGGPSQNWNQGYSNYWNQGYGNYGYNSQGYGGYGGYDYTGYNNYYGYGDYSNQQSGYGKVSRRGGHQNSYKPY

SEQ ID NO: 1006 - protein, 355 aa, Homo sapiens
MSEEQFGGDGAAAAATAAVGGSAGEQEGAMVAATQGAAAAAGSGAGTGGGTASGGTEGGSAESEGAKIDASKNEEDEGHSNSSPRHSEAATAQREEWKMFIGGLSWDTTKKDLKDYFSKFGEVVDCTLKLDPITGRSRGFGFVLFKESESVDKVMDQKEHKLNGKVIDPKRAKAMKTKEPVKKIFVGGLSPDTPEEKIREYFGGFGEVESIELPMDNKTNKRRGFCFITFKEEEPVKKIMEKKYHNVGLSKCEIKVAMSKEQYQQQQQWGSRGGFAGRARGRGGGPSQNWNQGYSNYWNQGYGNYGYNSQGYGGYGGYDYTGYNNYYGYGDYSNQQSGYGKVSRRGGHQNSYKPY

SEQ ID NO: 1007 - protein, 306 aa, Homo sapiens; identical to SEQ ID NO: 1002

SEQ ID NO: 1008 - protein, 336 aa, Homo sapiens; identical to SEQ ID NO: 1005

SEQ ID NO: 1009 - protein, 355 aa, Homo sapiens; identical to SEQ ID NO: 1006

SEQ ID NO: 1010 - protein, 336 aa, Homo sapiens; identical to SEQ ID NO: 1005

SEQ ID NO: 1011 - protein, 277 aa, Homo sapiens
MVAATQGAAAAAGSGAGTGGGTASGGTEGGSAESEGAKIDASKNEEDEGHSNSSPRHSEAATAQREEWKMFIGGLSWDTTKKDLKDYFSKFGEVVDCTLKLDPITGRSRGFGFVLFKESESVDKVMDQKEHKLNGKVIDPKRAKAMKTKEPVKKIFVGGLSPDTPEEKIREYFGGFGEVESIELPMDNKTNKRRGFCFITFKEEEPVKKIMEKKYHNVGLSKCEIKVAMSKEQYQQQQQWGSRGGFAGRARGRGGDQQSGYGKVSRRGGHQNSYKPY

SEQ ID NO: 1012 - protein, 563 aa, Homo sapiens
MLLPAPALRRALLSRPWTGAGLRWKHTSSLKVANEPVLAFTQGSPERDALQKALKDLKGRMEAIPCVVGDEEVWTSDVQYQVSPFNHGHKVAKFCYADKSLLNKAIEAALAARKEWDLKPIADRAQIFLKAADMLSGPRRAEILAKTMVGQGKTVIQAEIDAAAELIDFFRFNAKYAVELEGQQPISVPPSTNSTVYRGLEGFVAAISPFNFTAIGGNLAGAPALMGNVVLWKPSDTAMLASYAVYRILREAGLPPNIIQFVPADGPLFGDTVTSSEHLCGINFTGSVPTFKHLWKQVAQNLDRFHTFPRLAGECGGKNFHFVHRSADVESVVSGTLRSAFEYGGQKCSACSRLYVPHSLWPQIKGRLLEEHSRIKVGDPAEDFGTFFSAVIDAKSFARIKKWLEHARSSPSLTILAGGKCDDSVGYFVEPCIVESKDPQEPIMKEEIFGPVLSVYVYPDDKYKETLQLVDSTTSYGLTGAVFSQDKDVVQEATKVLRNAAGNFYINDKSTGSIVGQQPFGGARASGTNDKPGGPHYILRWTSPQVIKETHKPLGDWSYAYMQ

SEQ ID NO: 1013 - protein, 563 aa, Homo sapiens; identical to SEQ ID NO: 1012

SEQ ID NO: 1014 - protein, 563 aa, Homo sapiens; identical to SEQ ID NO: 1012

SEQ ID NO: 1015 - protein, 517 aa, Homo sapiens
MVNSLLFGEMALAFGCPPGGGGGGCPGGGGGGGGAGPGPSPVTAALRDDLGSNIHLLKGLNVRFRCFLAKVHELERRNRLLEKQLEQQQSERERRLRYKTFSREQAVQTGPELLRPPAPGGGHGLSSGAAAGANANAVALGGLPPGGGSHPQHYGRLPGTIWSYTQVRRTGGGGVETVQGPGVSWVHPDGVGVQIDTITPEIRALYNVLAKVKRERDEYKRRWEEELAKRMNLQTMVDTLQEAAQEADAIQEEMNEKIERLKAELVVFKGLMSDPMTDLDTKIQEKAMKVDMDICRRIDITAKLCDVAQQRNSEDVSKIFQVVPKKKERKVASDDDISEQDGEVNRFSDDEVGSMNITDEMKRMFNQLRETFDFDDDCDSLTWEENEDTLLLWEDFTNCNPTIDLQGEQEENLGNLIHETESFFKTRDKEYQETIGQIELELATAKSDMNRHLHEYMEMCSMKRGLDVQMETCRRLIKGSADRNSPSPSSVASSDSGSTDEIQDEFEREADVEPMVS

SEQ ID NO: 1016 - protein, 287 aa, Homo sapiens
MNLQTMVDTLQEAAQEADAIQEEMNEKIERLKAELVVFKGLMSDPMTDLDTKIQEKAMKVDMDICRRIDITAKLCDVAQQRNSEDVSKIFQVVPKKKERKVASDDDISEQDGEVNRFSDDEVGSMNITDEMKRMFNQLRETFDFDDDCDSLTWEENEDTLLLWEDFTNCNPTIDLQGEQEENLGNLIHETESFFKTRDKEYQETIGQIELELATAKSDMNRHLHEYMEMCSMKRGLDVQMETCRRLIKGSADRNSPSPSSVASSDSGSTDEIQDEFEREADVEPMVS

SEQ ID NO: 1017 - protein, 581 aa, Homo sapiens
MAASGRGLCKAVAASPFPAWRRDNTEARGGLKPEYDAVVIGAGHNGLVAAAYLQRLGVNTAVFERRHVIGGAAVTEEIIPGFKFSRASYLLSLLRPQIYTDLELKKHGLRLHLRNPYSFTPMLEEGAGSKVPRCLLLGTDMAENQKQIAQFSQKDAQVFPKYEEFMHRLALAIDPLLDAAPVDMAAFQHGSLLQRMRSLSTLKPLLKAGRILGAQLPRYYEVLTAPITKVLDQWFESEPLKATLATDAVIGAMTSPHTPGSGYVLLHHVMGGLEGMQGAWGYVQGGMGALSDAIASSATTHGASIFTEKTVAKVQVNSEGCVQGVVLEDGTEVRSKMVLSNTSPQITFLKLTPQEWLPEEFLERISQLDTRSPVTKINVAVDRLPSFLAAPNAPRGQPLPHHQCSIHLNCEDTLLLHQAFEDAMDGLPSHRPVIELCIPSSLDPTLAPPGCHVVSLFTQYMPYTLAGGKAWDEQERDAYADRVFDCIEVYAPGFKDSVVGRDILTPPDLERIFGLPGGNIFHCAMSLDQLYFARPVPLHSGYRCPLQGLYLCGSGAHPGGGVMGAAGRNAAHVAFRDLKSM

SEQ ID NO: 1018 - protein, 581 aa, Homo sapiens; identical to SEQ ID NO: 1017

SEQ ID NO: 1019 - protein, 914 aa, Homo sapiens [sequence omitted]

SEQ ID NO: 1020 - protein, 971 aa, Homo sapiens
MRMSDTVTVKDETATMKDLEAEVKDTTRVENLIKSENYGKILVEKNEHCIENNIDLQEKIQIQLTQSFEKEEKPSKDEAEKEKASDKLPRKMLSRDSSQEYTDSTGIDLHEFLVNTLKNNPRDRMMLLKLEQEILDFIGNNESPRKKFPPMTSYHRMLLHRVAAYFGLDHNVDQSGKSVIVNKTSNTRIPDQKFNEHIKDDKGEDFQKRYILKRDNSSFDKDDNQMRIRLKDDRRSKSIEEREEEYQRARDRIFSQDSLCSQENYIIDKRLQDEDASSTQQRRQIFRVNKDASGRSTNSHQSSTENELKYSEPRPWSSTDSDSSLRNLKPAVTKASSFSGISVLTRGDSSGSSKSIGRLSKTGQPFINPDGSPVVYNPPMTQQPVRSQVPGPPQPPLPAPPQQPAANHIFSQQDNLGSQFSHMSLARQPSADGSDPHAAMFQSTVVLQSPQQSGYIMTAAPPPHPPPPPPPPPPPPPLPPGQPVPTAGYPASGHPVSQPVLQQQGYIQQPSPQMPACYCAPGHYHSSQPQYRPVPSVHYNSHLNQPLPQPAQQTGYQVIPNQQQNYQGIVGVQQPQSQSLVSGQPNSIGNQIQGVVIPYTSVPTYQVSLPQGSQGIPHQTYQQPVMFPNQSNQGSMPTTGMPVYYSVIPPGQQNNLSSSVGYLQHPGSEQVQFPRTTSPCSSQQLQGHQCTAGPPPPPGGGMVMMQLSVPNNPQSCAHSPPQWKQNKYYCDHQRGQKCVEFSSVDNIVQHSPQLSSPIISPAQSPAPAQLSTLKTVRPSGPPLSIMPQFSRPFVPGQGDSRYPLLGQPLQYNPPAVLHGHIPNQQGQPGSRHGNRGRRQAKKAASTDLGAGETVVGKVLEITELPDGITRMEAEKLFGELFKIGAKIRWLRDPQSQPRRHPLCCGSGDNTANPERSKPSDLASTYTVLATFPSISAAQNALKKQINSVNKFKLRTSKKHYDFHILERASSQ

SEQ ID NO: 1021 - protein, 1615 aa, Homo sapiens
MEAAPPGPPWPLLLLLLLLLALCGCPAPAAASPLLLFANRRDVRLVDAGGVKLESTIVVSGLEDAAAVDFQFSKGAVYWTDVSEEAIKQTYLNQTGAAVQNVVISGLVSPDGLACDWVGKKLYWTDSETNRIEVANLNGTSRKVLFWQDLDQPRAIALDPAHGYMYWTDWGETPRIERAGMDGSTRKIIVDSDIYWPNGLTIDLEEQKLYWADAKLSFIHRANLDGSFRQKVVEGSLTHPFALTLSGDTLYWTDWQTRSIHACNKRTGGKRKEILSALYSPMDIQVLSQERQPFFHTRCEEDNGGCSHLCLLSPSEPFYTCACPTGVQLQDNGRTCKAGAEEVLLLARRTDLRRISLDTPDFTDIVLQVDDIRHAIAIDYDPLEGYVYWTDDEVRAIRRAYLDGSGAQTLVNTEINDPDGIAVDWVARNLYWTDTGTDRIEVTRLNGTSRKILVSEDLDEPRAIALHPVMGLMYWTDWGENPKIECANLDGQERRVLVNASLGWPNGLALDLQEGKLYWGDAKTDKIEVINVDGTKRRTLLEDKLPHIFGFTLLGDFIYWTDWQRRSIERVHKVKASRDVIIDQLPDLMGLKAVNVAKVVGTNPCADRNGGCSHLCFFTPHATRCGCPIGLELLSDMKTCIVPEAFLVFTSRAAIHRISLETNNNDVAIPLTGVKEASALDFDVSNNHIYWTDVSLKTISRAFMNGSSVEHVVEFGLDYPEGMAVDWMGKNLYWADTGTNRIEVARLDGQFRQVLVWRDLDNPRSLALDPTKGYIYWTEWGGKPRIVRAFMDGTNCMTLVDKVGRANDLTIDYADQRLYWTDLDTNMIESSNMLGQERVVIADDLPHPFGLTQYSDYIYWTDWNLHSIERADKTSGRNRTLIQGHLDFVMDILVFHSSRQDGLNDCMHNNGQCGQLCLAIPGGHRCGCASHYTLDPSSRNCSPPTTFLLFSQKSAISRMIPDDQHSPDLILPLHGLRNVKAIDYDPLDKFIYWVDGRQNIKRAKDDGTQPFVLTSLSQGQNPDRQPHDLSIDIYSRTLFWTCEATNTINVHRLSGEAMGVVLRGDRDKPRAIVVNAERGYLYFTNMQDRAAKIERAALDGTEREVLFTTGLIRPVALVVDNTLGKLFWVDADLKRIESCDLSGANRLTLEDANIVQPLGLTILGKHLYWIDRQQQMIERVEKTTGDKRTRIQGRVAHLTGIHAVEEVSLEEFSAHPCARDNGGCSHICIAKGDGTPRCSCPVHLVLLQNLLTCGEPPTCSPDQFACATGEIDCIPGAWRCDGFPECDDQSDEEGCPVCSAAQFPCARGQCVDLRLRCDGEADCQDRSDEADCDAICLPNQFRCASGQCVLIKQQCDSFPDCIDGSDELMCEITKPPSDDSPAHSSAIGPVIGIILSLFVMGGVYFVCQRVVCQRYAGANGPFPHEYVSGTPHVPLNFIAPGGSQHGPFTGIACGKSMMSSVSLMGGRGGVPLYDRNHVTGASSSSSSSTKATLYPPILNPPPSPATDPSLYNMDMFYSSNIPATARPYRPYIIRGMAPPTTPCSTDVCDSDYSASRWKASKYYLDLNSDSDPYPPPPTPHSQYLSAEDSCPPSPATERSYFHLFPPPPSPCTDSS

SEQ ID NO: 1022 - protein, 1627 aa, Homo sapiens
MEAAPPGPPWPLLLLLLLLLALCGCPAPAAASPLLLFANRRDVRLVDAGGVKLESTIVVSGLEDAAAVDFQFSKGAVYWTDVSEEAIKQTYLNQTGAAVQNVVISGLVSPDGLACDWVGKKLYWTDSETNRIEVANLNGTSRKVLFWQDLDQPRAIALDPAHGYMYWTDWGETPRIERAGMDGSTRKIIVDSDIYWPNGLTIDLEEQKLYWADAKLSFIHRANLDGSFRQKVVEGSLTHPFALTLSGDTLYWTDWQTRSIHACNKRTGGKRKEILSALYSPMDIQVLSQERQPFFHTRCEEDNGGCSHLCLLSPSEPFYTCACPTGVQLQDNGRTCKAGAEEVLLLARRTDLRRISLDTPDFTDIVLQVDDIRHAIAIDYDPLEGYVYWTDDEVRAIRRAYLDGSGAQTLVNTEINDPDGIAVDWVARNLYWTDTGTDRIEVTRLNGTSRKILVSEDLDEPRAIALHPVMGLMYWTDWGENPKIECANLDGQERRVLVNASLGWPNGLALDLQEGKLYWGDAKTDKIEVINVDGTKRRTLLEDKLPHIFGFTLLGDFIYWTDWQRRSIERVHKVKASRDVIIDQLPDLMGLKAVNVAKVVGTNPCADRNGGCSHLCFFTPHATRCGCPIGLELLSDMKTCIVPEAFLVFTSRAAIHRISLETNNNDVAIPLTGVKEASALDFDVSNNHIYWTDVSLKTISRAFMNGSSVEHVVEFGLDYPEGMAVDWMGKNLYWADTGTNRIEVARLDGQFRQVLVWRDLDNPRSLALDPTKGYIYWTEWGGKPRIVRAFMDGTNCMTLVDKVGRANDLTIDYADQRLYWTDLDTNMIESSNMLGQERVVIADDLPHPFGLTQYSDYIYWTDWNLHSIERADKTSGRNRTLIQGHLDFVMDILVFHSSRQDGLNDCMHNNGQCGQLCLAIPGGHRCGCASHYTLDPSSRNCSPPTTFLLFSQKSAISRMIPDDQHSPDLILPLHGLRNVKAIDYDPLDKFIYWVDGRQNIKRAKDDGTQAVLRSLGFFVLQPFVLTSLSQGQNPDRQPHDLSIDIYSRTLFWTCEATNTINVHRLSGEAMGVVLRGDRDKPRAIVVNAERGYLYFTNMQDRAAKIERAALDGTEREVLFTTGLIRPVALVVDNTLGKLFWVDADLKRIESCDLSGANRLTLEDANIVQPLGLTILGKHLYWIDRQQQMIERVEKTTGDKRTRIQGRVAHLTGIHAVEEVSLEEFSAHPCARDNGGCSHICIAKGDGTPRCSCPVHLVLLQNLLTCGEPPTCSPDQFACATGEIDCIPGAWRCDGFPECDDQSDEEGCPVCSAAQFPCARGQCVDLRLRCDGEADCQDRSDEADCDAICLPNQFRCASGQCVLIKQQCDSFPDCIDGSDELMCEITKPPSDDSPAHSSAIGPVIGIILSLFVMGGVYFVCQRVVCQRYAGANGPFPHEYVSGTPHVPLNFIAPGGSQHGPFTGIACGKSMMSSVSLMGGRGGVPLYDRNHVTGASSSSSSSTKATLYPPILNPPPSPATDPSLYNMDMFYSSNIPATARPYRPYIIRGMAPPTTPCSTDVCDSDYSASRWKASKYYLDLNSDSDPYPPPPTPHSQYLSAEDSCPPSPATERSYFHLFPPPPSPCTDSS

SEQ ID NO: 1023 - protein, 155 aa, Homo sapiens
MVLSGALCFRMKDSALKVLYLHNNQLLAGGLHAGKVIKGEEISVVPNRWLDASLSPVILGVQGGSQCLSCGVGQEPTLTLEPVNIMELYLGAKESKSFTFYRRDMGLTSSFESAAYPGWFLCTVPEADQPVRLTQLPENGGWNAPITDFYFQQCD

SEQ ID NO: 1024 - protein, 155 aa, Homo sapiens; identical to SEQ ID NO: 1023

SEQ ID NO: 1025 - protein, 164 aa, Homo sapiens
MNPQREAAPKSYAIRDSRQMVWVLSGNSLIAAPLSRSIKPVTLHLIACRDTEFSDKEKGNMVYLGIKGKDLCLFCAEIQGKPTLQLKLQGSQDNIGKDTCWKLVGIHTCINLDVRESCFMGTLDQWGIGVGRKKWKSSFQHHHLRKKDKDFSSMRTNIGMPGRM

SEQ ID NO: 1026 - protein, 157 aa, Homo sapiens
MNPQREAAPKSYAIRDSRQMVWVLSGNSLIAAPLSRSIKPVTLHLIACRDTEFSDKEKGNMVYLGIKGKDLCLFCAEIQGKPTLQLKEKNIMDLYVEKKAQKPFLFFHNKEGSTSVFQSVSYPGWFIATSTTSGQPIFLTKERGITNNTNFYLDSVE

SEQ ID NO: 1027 - protein, 767 aa, Homo sapiens
MFAKLKKKIAEETAVAQRPGGATRIPRSVSKESVASMGADSGDDFASDGSSSREDLSSQLLRRNEQIRKLEARLSDYAEQVRNLQKIKEKLEIALEKHQDSSMRKFQEQNETFQANRAKMAEGLALALARKDQEWSEKMDQLEKEKNILTAQLQEMKNQSMNLFQRRDEMDELEGFQQQELSKIKHMLLKKEESLGKMEQELEARTRELSRTQEELMNSNQMSSDLSQKLEELQRHYSTLEEQRDHVIASKTGAESKITALEQKEQELQALIQQLSIDLQKVTAETQEKEDVITHLQEKVASLEKRLEQNLSGEEHVQELLKEKTLAEQNLEDTRQQLLAARSSQAKAINTLETRVRELEQTLQASEEQLQQSKGIVAAQETQIQELAAANQESSHVQQQALALEQQFLERTQALEAQIVALERTRAADQTTAEQGMRQLEQENAALKECRNEYERSLQNHQFELKKLKEEWSQREIVSVAMAQALEEVRKQREEFQQQAANLTAIIDEKEQNLREKTEVLLQKEQEILQLERGHNSALLQIHQLQAELEALRTLKAEEAAVVAEQEDLLRLRGPLQAEALSVNESHVTSRAMQDPVFQLPTAGRTPNGEVGAMDLTQLQKEKQDLEQQLLEKNKTIKQMQQRMLELRKTLQKELKIRPDNELFEVREKPGPEMANMAPSVTNNTDLTDAREINFEYLKHVVLKFMSCRESEAFHLIKAVSVLLNFSQEEENMLKETLEYKMSWFGSKPAPKGSIRPSISNPRIPWS

SEQ ID NO: 1028 - protein, 767 aa, Homo sapiens; identical to SEQ ID NO: 1027

SEQ ID NO: 1029 - protein, 480 aa, Homo sapiens
MREVKALAKLEHPGIVRYFNAWLEAPPEKWQEKMDEIWLKDESTDWPLSSPSPMDAPSVKIRRMDPFSTKEHIEIIAPSPQRSRSFSVGISCDQTSSSESQFSPLEFSGMDHEDISESVDAAYNLQDSCLTDCDVEDGTMDGNDEGHSFELCPSEASPYVRSRERTSSSIVFEDSGCDNASSKEEPKTNRLHIGNHCANKLTAFKPTSSKSSSEATLSISPPRPTTLSLDLTKNTTEKLQPSSPKVYLYIQMQLCRKENLKDWMNGRCTIEERERSVCLHIFLQIAEAVEFLHSKGLMHRDLKPSNIFFTMDDVVKVGDFGLVTAMDQDEEEQTVLTPMPAYARHTGQVGTKLYMSPEQIHGNSYSHKVDIFSLGLILFELLYPFSTQMERVRTLTDVRNLKFPPLFTQKYPCEYVMVQDMLSPSPMERPEAINIIENAVFEDLDFPGKTVLRQRSRSLSSSGTKHSRQSNNSHSPLPSN

SEQ ID NO: 1030 - protein, 1071 aa, Homo sapiens [sequence omitted]

SEQ ID NO: 1031 - protein, 378 aa, Homo sapiens
MATALPPRLQPVRGNETLREHYQYVGKLAGRLKEASEGSTLTTVLFLVICSFIVLENLMVLIAIWKNNKFHNRMYFFIGNLALCDLLAGIAYKVNILMSGKKTFSLSPTVWFLREGSMFVALGASTCSLLAIAIERHLTMIKMRPYDANKRHRVFLLIGMCWLIAFTLGALPILGWNCLHNLPDCSTILPLYSKKYIAFCISIFTAILVTIVILYARIYFLVKSSSRKVANHNNSERSMALLRTVVIVVSVFIACWSPLFILFLIDVACRVQACPILFKAQWFIVLAVLNSAMNPVIYTLASKEMRRAFFRLVCNCLVRGRGARASPIQPALDPSRSKSSSSNNSSHSPKVKEDLPHTAPSSCIMDKNAALQNGIFCN

SEQ ID NO: 1032 - protein, 951 aa, Homo sapiens [sequence omitted]

SEQ ID NO: 1033 - protein, 951 aa, Homo sapiens [sequence omitted]

SEQ ID NO: 1034 - protein, 248 aa, Homo sapiens [sequence omitted]

SEQ ID NO: 1035 - protein, 295 aa, Homo sapiens [sequence omitted]

SEQ ID NO: 1036 - protein, 63 aa, Homo sapiens
MCQAWGNPLPELKCLKDGTFPLPIGESVTVTRDLEGTYLCRARSTQGEVTRKPPGMRLSSSLW

SEQ ID NO: 1037 - protein, 532 aa, Homo sapiens
MAPSSPRPALPALLVLLGALFPGPGNAQTSVSPSKVILPRGGSVLVTCSTSCDQPKLLGIETPLPKKELLLPGNNRKVYELSNVQEDSQPMCYSNCPDGQSTAKTFLTVYWTPERVELAPLPSWQPVGKNLTLRCQVEGGAPRANLTVVLLRGEKELKREPAVGEPAEVTTTVLVRRDHHGANFSCRTELDLRPQGLELFENTSAPYQLQTFVLPATPPQLVSPRVLEVDTQGTVVCSLDGLFPVSEAQVHLALGDQRLNPTVTYGNDSFSAKASVSVTAEDEGTQRLTCAVILGNQSQETLQTVTIYSFPAPNVILTKPEVSEGTEVTVKCEAHPRAKVTLNGVPAQPLGPRAQLLLKATPEDNGRSFSCSATLEVAGQLIHKNQTRELRVLYGPRLDERDCPGNWTWPENSQQTPMCQAWGNPLPELKCLKDGTFPLPIGESVTVTRDLEGTYLCRARSTQGEVTRKVTVNVLSPRYEIVIITVVAAAVIMGTAGLSTYLYNRQRKIKKYRLQQAQKGTPMKPNTQATPP

SEQ ID NO: 1038 - protein, 237 aa, Homo sapiens
MGSLFPLSLLFFLAAAYPGVGSALGRRTKRAQSPKGSPLAPSGTSVPFWVRMSPEFVAVQPGKSVQLNCSNSCPQPQNSSLRTPLRQGKTLRGPGWVSYQLLDVRAWSSLAHCLVTCAGKTRWATSRITAYKPPHSVILEPPVLKGRKYTLRCHVTQVFPVGYLVVTLRHGSRVIYSESLERFTGLDLANVTLTYEFAAGPRDFWQPVICHARLNLDGLVVRNSSAPITLMLGEAPL

SEQ ID NO: 1039 - protein, 272 aa, Homo sapiens
MGSLFPLSLLFFLAAAYPGVGSALGRRTKRAQSPKGSPLAPSGTSVPFWVRMSPEFVAVQPGKSVQLNCSNSCPQPQNSSLRTPLRQGKTLRGPGWVSYQLLDVRAWSSLAHCLVTCAGKTRWATSRITAYSVPGGLLGGDPEAWKPGHLFRKPGALHRPGSGQRDLDLRVCCWTPRLLAARDLPRAPQSRRPGGPQQLGTHYTDARLEPRAHSFGLRFHRCPCRDPPHCGRCVPMQVPSYEVPGVKGDVLCRLSEKKRNMKQSGEMAIHGG

SEQ ID NO: 1040 - protein, 261 aa, Homo sapiens
PSRALRDLSALLGAHEPGVRGCAAGEVSAAQLQQQLSPAAEFQPPHPAAARQDAQRAGLGVLPAARREGLELPRALPRDLRRKNTLGHLQDHRLQTAPQRDFGASGLKGQEIHFALPRDAGVPGGLLGGDPEAWKPGHLFRKPGALHRPGSGQRDLDLRVCCWTPRLLAARDLPRAPQSRRPGGPQQLGTHYTDARLEPRAHSFGLRFHRCPCRDPPHCGRCVPMQVPSYEVPGVKGDVLCRLSEKKRNMKQSGEMAIHGG

SEQ ID NO: 1041 - protein, 924 aa, Homo sapiens
MPGPSPGLRRALLGLWAALGLGLFGLSAVSQEPFWADLQPRVAFVERGGSLWLNCSTNCPRPERGGLETSLRRNGTQRGLRWLARQLVDIREPETQPVCFFRCARRTLQARGLIRTFQRPDRVELMPLPPWQPVGENFTLSCRVPGAGPRASLTLTLLRGAQELIRRSFAGEPPRARGAVLTATVLARREDHGANFSCRAELDLRPHGLGLFENSSAPRELRTFSLSPDAPRLAAPRLLEVGSERPVSCTLDGLFPASEARVYLALGDQNLSPDVTLEGDAFVATATATASAEQEGARQLVCNVTLGGENRETRENVTIYSFPAPLLTLSEPSVSEGQMVTVTCAAGAQALVTLEGVPAAVPGQPAQLQLNATENDDRRSFFCDATLDVDGETLIKNRSAELRVLYAPRLDDSDCPRSWTWPEGPEQTLRCEARGNPEPSVHCARSDGGAVLALGLLGPVTRALSGTYRCKAANDQGEAVKDVTLTVEYAPALDSVGCPERITWLEGTEASLSCVAHGVPPPDVICVRSGELGAVIEGLLRVAREHAGTYRCEATNPRGSAAKNVAVTVEYGPRFEEPSCPSNWTWVEGSGRLFSCEVDGKPQPSVKCVGSGGATEGVLLPLAPPDPSPRAPRIPRVLAPGIYVCNATNRHGSVAKTVVVSAESPPEMDESTCPSHQTWLEGAEASALACAARGRPSPGVRCSREGIPWPEQQRVSREDAGTYHCVATNAHGTDSRTVTVGVEYRPVVAELAASPPGGVRPGGNFTLTCRAEAWPPAQISWRAPPGALNIGLSSNNSTLSVAGAMGSHGGEYECAATNAHGRHARRITVRVAGPWLWVAVGGAAGGAALLAAGAGLAFYVQSTACKKGEYNVQEAESSGEAVCLNGAGGGAGGAAGAEGGPEAAGGAAESPAEGEVFAIQLTSA

SEQ ID NO: 1042 - protein, 305 aa, Homo sapiens
MAPLDLDKYVEIARLCKYLPENDLKRLCDYVCDLLLEESNVQPVSTPVTVCGDIHGQFYDLCELFRTGGQVPDTNYIFMGDFVDRGYYSLETFTYLLALKAKWPDRITLLRGNHESRQITQVYGFYDECQTKYGNANAWRYCTKVFDMLTVAALIDEQILCVHGGLSPDIKTLDQIRTIERNQEIPHKGAFCDLVWSDPEDVDTWAISPRGAGWLFGAKVTNEFVHINNLKLICRAHQLVHEGYKFMFDEKLVTVWSAPNYCYRCGNIASIMVFKDVNTREPKLFRAVPDSERVIPPRTTTPYFL

SEQ ID NO: 1043 - protein, 305 aa, Homo sapiens; identical to SEQ ID NO: 1042

SEQ ID NO: 1044 - protein, 599 aa, Homo sapiens [sequence omitted]

SEQ ID NO: 1045 - protein, 562 aa, Homo sapiens [sequence omitted]

SEQ ID NO: 1046 - protein, 184 aa, Homo sapiens
MAEPQPPSGGLTDEAALSCCSDADPSTKDFLLQQTMLRVKDPKKSLDFYTRVLGMTLIQKCDFPIMKFSLYFLAYEDKNDIPKEKDEKIAWALSRKATLELTHNWGTEDDETQSYHNGNSDPRGFGHIGIAVPDVYSACKRFEELGVKFVKKPDDGKMKGLAFIQDPDGYWIEILNPNKMATLM

SEQ ID NO: 1047 - protein, 184 aa, Homo sapiens; identical to SEQ ID NO: 1046

SEQ ID NO: 1048 - protein, 959 aa, Homo sapiens
MEEMYFAWLENPQSVHKSWDSFFREASEEAFSGSAQPRPPSVVHESRSAVSSRTKTSKLVEDHLAVQSLIRAYQIRGHHVAQLDPLGILDADLDSFVPSDLITTIDKLAFYDLQEADLDKEFQLPTTTFIGGSENTLSLREIIRRLENTYCQHIGLEFMFINDVEQCQWIRQKFETPGVMQFSSEEKRTLLARLVRSMRFEDFLARKWSSEKRFGLEGCEVMIPALKTIIDKSSEMGIENVILGMPHRGRLNVLANVIRKDLEQIFCQFDPKLEAADEGSGDVKYHLGMYHERINRVTNRNITLSLVANPSHLEAVDPVVQGKTKAEQFYRGDAQGKKVMSILVHGDAAFAGQGVVYETFHLSDLPSYTTNGTVHVVVNNQIGFTTDPRMARSSPYPTDVARVVNAPIFHVNADDPEAVIYVCSVAAEWRNTFNKDVVVDLVCYRRRGHNEMDEPMFTQPLMYKQIHRQVPVLKKYADKLIAEGTVTLQEFEEEIAKYDRICEEAYGRSKDKKILHIKHWLDSPWPGFFNVDGEPKSMTCPATGIPEDMLTHIGSVASSVPLEDFKIHTGLSRILRGRADMTKNRTVDWALAEYMAFGSLLKEGIHVRLSGQDVERGTFSHRHHVLHDQEVDRRTCVPMNHLWPDQAPYTVCNSSLSEYGVLGFELGYAMASPNALVLWEAQFGDFHNTAQCIIDQFISTGQAKWVRHNGIVLLLPHGMEGMGPEHSSARPERFLQMSNDDSDAYPAFTKDFEVSQLYDCNWIVVNCSTPANYFHVLRRQILLPFRKPLIIFTPKSLLRHPEAKSSFDQMVSGTSFQRVIPEDGAAARAPEQVQRLIFCTGKVYYDLVKERSSQDLEEKVAITRLEQISPFPFDLIKQEAEKYPGAELAWCQEEHKNMGYYDYISPRFMTILRRARPIWYVGRDPAAAPATGNRNTHLVSLKKFLDTAFNLQAFEGKTF

SEQ ID NO: 1049 - protein, 801 aa, Homo sapiens
MFINDVEQCQWIRQKFETPGVMQFSSEEKRTLLARLVRSMRFEDFLARKWSSEKRFGLEGCEVMIPALKTIIDKSSEMGIENVILGMPHRGRLNVLANVIRKDLEQIFCQFDPKLEAADEGSGDVKYHLGMYHERINRVTNRNITLSLVANPSHLEAVDPVVQGKTKAEQFYRGDAQGKKVMSILVHGDAAFAGQGVVYETFHLSDLPSYTTNGTVHVVVNNQIGFTTDPRMARSSPYPTDVARVVNAPIFHVNADDPEAVIYVCSVAAEWRNTFNKDVVVDLVCYRRRGHNEMDEPMFTQPLMYKQIHRQVPVLKKYADKLIAEGTVTLQEFEEEIAKYDRICEEAYGRSKDKKILHIKHWLDSPWPGFFNVDGEPKSMTCPATGIPEDMLTHIGSVASSVPLEDFKIHTGLSRILRGRADMTKNRTVDWALAEYMAFGSLLKEGIHVRLSGQDVERGTFSHRHHVLHDQEVDRRTCVPMNHLWPDQAPYTVCNSSLSEYGVLGFELGYAMASPNALVLWEAQFGDFHNTAQCIIDQFISTGQAKWVRHNGIVLLLPHGMEGMGPEHSSARPERFLQMSNDDSDAYPAFTKDFEVSQLYDCNWIVVNCSTPANYFHVLRRQILLPFRKPLIIFTPKSLLRHPEAKSSFDQMVSGTSFQRVIPEDGAAARAPEQVQRLIFCTGKVYYDLVKERSSQDLEEKVAITRLEQISPFPFDLIKQEAEKYPGAELAWCQEEHKNMGYYDYISPRFMTILRRARPIWYVGRDPAAAPATGNRNTHLVSLKKFLDTAFNLQAFEGKTF

SEQ ID NO: 1050 - protein, 1010 aa, Homo sapiens
MSQLRLLPSRLGVQAARLLAAHDVPVFGWRSRSSGPPATFPSSKGGGGSSYMEEMYFAWLENPQSVHKSWDSFFREASEEAFSGSAQPRPPSVVHESRSAVSSRTKTSKLVEDHLAVQSLIRAYQIRGHHVAQLDPLGILDADLDSFVPSDLITTIDKLAFYDLQEADLDKEFQLPTTTFIGGSENTLSLREIIRRLENTYCQHIGLEFMFINDVEQCQWIRQKFETPGVMQFSSEEKRTLLARLVRSMRFEDFLARKWSSEKRFGLEGCEVMIPALKTIIDKSSEMGIENVILGMPHRGRLNVLANVIRKDLEQIFCQFDPKLEAADEGSGDVKYHLGMYHERINRVTNRNITLSLVANPSHLEAVDPVVQGKTKAEQFYRGDAQGKKVMSILVHGDAAFAGQGVVYETFHLSDLPSYTTNGTVHVVVNNQIGFTTDPRMARSSPYPTDVARVVNAPIFHVNADDPEAVIYVCSVAAEWRNTFNKDVVVDLVCYRRRGHNEMDEPMFTQPLMYKQIHRQVPVLKKYADKLIAEGTVTLQEFEEEIAKYDRICEEAYGRSKDKKILHIKHWLDSPWPGFFNVDGEPKSMTCPATGIPEDMLTHIGSVASSVPLEDFKIHTGLSRILRGRADMTKNRTVDWALAEYMAFGSLLKEGIHVRLSGQDVERGTFSHRHHVLHDQEVDRRTCVPMNHLWPDQAPYTVCNSSLSEYGVLGFELGYAMASPNALVLWEAQFGDFHNTAQCIIDQFISTGQAKWVRHNGIVLLLPHGMEGMGPEHSSARPERFLQMSNDDSDAYPAFTKDFEVSQLYDCNWIVVNCSTPANYFHVLRRQILLPFRKPLIIFTPKSLLRHPEAKSSFDQMVSGTSFQRVIPEDGAAARAPEQVQRLIFCTGKVYYDLVKERSSQDLEEKVAITRLEQISPFPFDLIKQEAEKYPGAELAWCQEEHKNMGYYDYISPRFMTILRRARPIWYVGRDPAAAPATGNRNTHLVSLKKFLDTAFNLQAFEGKTF

SEQ ID NO: 1051 - protein, 691 aa, Homo sapiens [sequence omitted]

SEQ ID NO: 1052 - protein, 685 aa, Homo sapiens
MWLKLFFLLLYFLVLFVLARFFEAIVWYETGIFATQLVDPVALSFKKLKTILECRGLGYSGLPEKKDVRELVEKSGDLMEGELYSALKEEEASESVSSTNFSGEMHFYELVEDTKDGIWLVQVIANDRSPLVGKIHWEKMVKKVSRFGIRTGTFNCSSDPRYCRRRGWVRSTLIMSVPQTSTSKGKVMLKEYSGRKIEVEHIFKWITAHAASRIKTIYNAEHLKEEWNKSDQYWLKIYLFANLDQPPAFFSALSIKFTGRVEFIFVNVENWDNKSYMTDIGIYNMPSYILRTPEGIYRYGNHTGEFISLQAMDSFLRSLQPEVNDLFVLSLVLVNLMAWMDLFITQGATIKRFVVLISTLGTYNSLLIISWLPVLGFLQLPYLDSFYEYSLKLLRYSNTTTLASWVRADWMFYSSHPALFLSTYLGHGLLIDYFEKKRRRNNNNDEVNANNLEWLSSLWDWYTSYLFHPIASFQNFPVESDWDEDPDLFLERLAFPDLWLHPLIPTDYIKNLPMWRFKCLGVQSEEEMSEGSQDTENDSESENTDTLSSEKEVFEDKQSVLHNSPGTASHCDAEACSCANKYCQTSPCERKGRSYGSYNTNEDMEPDWLTWPADMLHCTECVVCLENFENGCLLMGLPCGHVFHQNCIVMWLAGGRHCCPVCRWPSYKKKQPYAQHQPLSNDVPS

SEQ ID NO: 1053 - protein, 127 aa, Homo sapiens
MSFSGKYQLQSQENFEAFMKAIGLPEELIQKGKDIKGVSEIVQNGKHFKFTITAGSKVIQNEFTVGEECELETMTGEKVKTVVQLEGDNKLVTTFKNIKSVTELNGDIITNTMTLGDIVFKRISKRI

SEQ ID NO: 1054 - protein, 115 aa, Homo sapiens
MSFSGKYQLQSQENFEAFMKAIGLPEELIQKGKDIKGVSEIVQNGKHFKFTITAGSKVIQNEFTVGEECELETMTGEKVKVGGHPFCCQNFPWNLALGPHSSRLKPHNSTHRYHL

SEQ ID NO: 1055 - protein, 692 aa, Homo sapiens
MSQQDAVAALSERLLVAAYKGQTENVVQLINKGARVAVTKHGRTPLHLAANKGHLPVVQILLKAGCDLDVQDDGDQTALHRATVVGNTEIIAALIHEGCALDRQDKDGNTALHEASWHGFSQSAKLLVKAGANVLAKNKAGNTALHLACQNSHSQSTRVLLLAGSRADLKNNAGDTCLHVAARYNHLSIIRLLLTAFCSVHEKNQAGDTALHVAAALNHKKVAKILLEAGADTTIVNNAGQTPLETARYHNNPEVALLLTKAPQGSVSAGDTPSSEQAVARKEEAREEFLSASPEPRAKDDRRRKSRPKVSAFSDPTPPADQQPGHQKNLHAHNHPKKRNRHRCSSPPPPHEFRAYQLYTLYRGKDGKVMQAPINGCRCEPLINKLENQLEATVEEIKAELGSVQDKMNTKLGQMENKTQHQMRVLDKLMVERLSAERTECLNRLQQHSDTEKHEGEKRQISLVDELKTWCMLKIQNLEQKLSGDSRACRAKSTPSTCESSTGVDQLVVTAGPAAASDSSPPVVRPKEKALNSTATQRLQQELSSSDCTGSRLRNVKVQTALLPMNEAARSDQQAGPCVNRGTQTKKSGKSGPTRHRAQQPAASSTCGQPPPATGSEQTGPHIRDTSQALELTQYFFEAVSTQMEKWYERKIEEARSQANQKAQQDKATLKEHIKSLEEELAKLRTRVQKEN

SEQ ID NO: 1056 - protein, 567 aa, Homo sapiens
MSQQDAVAALSERLLVAAYKGQTENVVQLINKGARVAVTKHGRTPLHLAANKGHLPVVQILLKAGCDLDVQDDGDQTALHRATVVGNTEIIAALIHEGCALDRQDKDGNTALHEASWHGFSQSAKLLVKAGANVLAKNKGSVSAGDTPSSEQAVARKEEAREEFLSASPEPRAKDDRRRKSRPKVSAFSDPTPPADQQPGHQKNLHAHNHPKKRNRHRCSSPPPPHEFRAYQLYTLYRGKDGKVMQAPINGCRCEPLINKLENQLEATVEEIKAELGSVQDKMNTKLGQMENKTQHQMRVLDKLMVERLSAERTECLNRLQQHSDTEKHEGEKRQISLVDELKTWCMLKIQNLEQKLSGDSRACRAKSTPSTCESSTGVDQLVVTAGPAAASDSSPPVVRPKEKALNSTATQRLQQELSSSDCTGSRLRNVKVQTALLPMNEAARSDQQAGPCVNRGTQTKKSGKSGPTRHRAQQPAASSTCGQPPPATGSEQTGPHIRDTSQALELTQYFFEAVSTQMEKWYERKIEEARSQANQKAQQDKATLKEHIKSLEEELAKLRTRVQKEN

SEQ ID NO: 1057 - protein, 727 aa, Homo sapiens [sequence omitted]

SEQ ID NO: 1058 - protein, 664 aa, Homo sapiens [sequence omitted]

SEQ ID NO: 1059 - protein, 735 aa, Homo sapiens [sequence omitted]

SEQ ID NO: 1060 - protein, 617 aa, Homo sapiens
MTPEFDEEVVFENSPLYQYLQDLGHTDFEICSSLSPKTEKCTTEGQQKPPTRVLPKQGILLKVAETIKSWIFFSQCNKKDDLLHKLDIGFRLDSLHTILQQEVLLQEDVELIELLDPSILSAGQSQQQENGHLPTLCSLATPNIWDLSMLFAFISLLVMLPTWWIVSSWLVWGVILFVYLVIRALRLWRTAKLQVTLKKYSVHLEDMATNSRAFTNLVRKALRLIQETEVISRGFTLVSAACPFNKAGQHPSQHLIGLRKAVYRTLRANFQAARLATLYMLKNYPLNSESDNVTNYICVVPFKELGLGLSEEQISEEEAHNFTDGFSLPALKVLFQLWVAQSSEFFRRLALLLSTANSPPGPLLTPALLPHRILSDVTQGLPHAHSACLEELKRSYEFYRYFETQHQSVPQCLSKTQQKSRELNNVHTAVRSLQLHLKALLNEVIILEDELEKLVCTKETQELVSEAYPILEQKLKLIQPHVQASNNCWEEAISQVDKLLRRNTDKKGKPEIACENPHCTVVPLKQPTLHIADKDPIPEEQELEAYVDDIDIDSDFRKDDFYYLSQEDKERQKREHEESKRVLQELKSVLGFKASEAERQKWKQLLFSDHGVKSAWN

SEQ ID NO: 1061 - protein, 779 aa, Homo sapiens [sequence omitted]

SEQ ID NO: 1062 - protein, 701 aa, Homo sapiens
MLKEWAIKDIGFRLDSLHTILQQEVLLQEDVELIELLDPSILSAGQSQQQENGHLPTLCSLATPNIWDLSMLFAFISLLVMLPTWWIVSSWLVWGVILFVYLVIRALRLWRTAKLQVTLKKYSVHLEDMATNSRAFTNLVRKALRLIQETEVISRGFTLVSAACPFNKAGQHPSQHLIGLRKAVYRTLRANFQAARLATLYMLKNYPLNSESDNVTNYICVVPFKELGLGLSEEQISEEEAHNFTDGFSLPALKVLFQLWVAQSSEFFRRLALLLSTANSPPGPLLTPALLPHRILSDVTQGLPHAHSACLEELKRSYEFYRYFETQHQSVPQCLSKTQQKSRELNNVHTAVRSLQLHLKALLNEVIILEDELEKLVCTKETQELVSEAYPILEQKLKLIQPHVQASNNCWEEAISQVDKLLRRNTDKKGKPEIACENPHCTVVPLKQPTLHIADKDPIPEEQELEAYVDDIDIDSDFRKDDFYYLSQEDKERQKREHEESKRVLQELKSVLGFKASEAERQKWKQLLFSDHAVLKSLSPVDPVEPISNSEPSMNSDMGKVSKNDTEEESNKSATTDNEISRTEYLCENSLEGKNKDNSSNEVFPQGAEERMCYQCESEDEPQADGSGLTTAPPTPRDSLQPSIKQRLARLQLSPDFTFTAGLAAEVAARSLSFTTMQEQTFGDEEEEQIIEENKNEIEEK

SEQ ID NO: 1063 - protein, 539 aa, Homo sapiens
MLKEWAIKDIGFRLDSLHTILQQEVLLQEDVELIELLDPSILSAGQSQQQENGHLPTLCSLATPNIWDLSMLFAFISLLVMLPTWWIVSSWLVWGVILFVYLVIRALRLWRTAKLQVTLKKYSVHLEDMATNSRAFTNLVRKALRLIQETEVISRGFTLVSAACPFNKAGQHPSQHLIGLRKAVYRTLRANFQAARLATLYMLKNYPLNSESDNVTNYICVVPFKELGLGLSEEQISEEEAHNFTDGFSLPALKVLFQLWVAQSSEFFRRLALLLSTANSPPGPLLTPALLPHRILSDVTQGLPHAHSACLEELKRSYEFYRYFETQHQSVPQCLSKTQQKSRELNNVHTAVRSLQLHLKALLNEVIILEDELEKLVCTKETQELVSEAYPILEQKLKLIQPHVQASNNCWEEAISQVDKLLRRNTDKKGKPEIACENPHCTVVPLKQPTLHIADKDPIPEEQELEAYVDDIDIDSDFRKDDFYYLSQEDKERQKREHEESKRVLQELKSVLGFKASEAERQKWKQLLFSDHGVKSAWN

SEQ ID NO: 1064 - protein, 565 aa, Homo sapiens
MLKEWAIKQGILLKVAETIKSWIFFSQCNKKDDLLHKLDIGFRLDSLHTILQQEVLLQEDVELIELLDPSILSAGQSQQQENGHLPTLCSLATPNIWDLSMLFAFISLLVMLPTWWIVSSWLVWGVILFVYLVIRALRLWRTAKLQVTLKKYSVHLEDMATNSRAFTNLVRKALRLIQETEVISRGFTLVSAACPFNKAGQHPSQHLIGLRKAVYRTLRANFQAARLATLYMLKNYPLNSESDNVTNYICVVPFKELGLGLSEEQISEEEAHNFTDGFSLPALKVLFQLWVAQSSEFFRRLALLLSTANSPPGPLLTPALLPHRILSDVTQGLPHAHSACLEELKRSYEFYRYFETQHQSVPQCLSKTQQKSRELNNVHTAVRSLQLHLKALLNEVIILEDELEKLVCTKETQELVSEAYPILEQKLKLIQPHVQASNNCWEEAISQVDKLLRRNTDKKGKPEIACENPHCTVVPLKQPTLHIADKDPIPEEQELEAYVDDIDIDSDFRKDDFYYLSQEDKERQKREHEESKRVLQELKSVLGFKASEAERQKWKQLLFSDHGKH

SEQ ID NO: 1065 - protein, 569 aa, Homo sapiens
MLKEWAIKQGILLKVAETIKSWIFFSQCNKKDDLLHKLDIGFRLDSLHTILQQEVLLQEDVELIELLDPSILSAGQSQQQENGHLPTLCSLATPNIWDLSMLFAFISLLVMLPTWWIVSSWLVWGVILFVYLVIRALRLWRTAKLQVTLKKYSVHLEDMATNSRAFTNLVRKALRLIQETEVISRGFTLVSAACPFNKAGQHPSQHLIGLRKAVYRTLRANFQAARLATLYMLKNYPLNSESDNVTNYICVVPFKELGLGLSEEQISEEEAHNFTDGFSLPALKVLFQLWVAQSSEFFRRLALLLSTANSPPGPLLTPALLPHRILSDVTQGLPHAHSACLEELKRSYEFYRYFETQHQSVPQCLSKTQQKSRELNNVHTAVRSLQLHLKALLNEVIILEDELEKLVCTKETQELVSEAYPILEQKLKLIQPHVQASNNCWEEAISQVDKLLRRNTDKKGKPEIACENPHCTVVPLKQPTLHIADKDPIPEEQELEAYVDDIDIDSDFRKDDFYYLSQEDKERQKREHEESKRVLQELKSVLGFKASEAERQKWKQLLFSDHGVKSAWN

SEQ ID NO: 1066 - protein, 1196 aa, Homo sapiens [sequence omitted]

SEQ ID NO: 1067 - protein, 222 aa, Homo sapiens
MLSRAVCGTSRQLAPVLGYLGSRQKHSLPDLPYDYGALEPHINAQIMQLHHSKHHAAYVNNLNVTEEKYQEALAKGDVTAQIALQPALKFNGGGHINHSIFWTNLSPNGGGEPKGELLEAIKRDFGSFDKFKEKLTAASVGVQGSGWGWLGFNKERGHLQIAACPNQDPLQGTTGLIPLLGIDVWEHAYYLQYKNVRPDYLKAIWNVINWENVTERYMACKK

SEQ ID NO: 1068 - protein, 222 aa, Homo sapiens; identical to SEQ ID NO: 1067

SEQ ID NO: 1069 - protein, 140 aa, Homo sapiens
MLSRAVCGTSRQLAPVLGYLGSRQKHSLPDLPYDYGALEPHINAQIMQLHHSKHHAAYVNNLNVTEEKYQEALAKGRFQAERREAVPGRGDPREPGPIRTGLSVEENSLRICTGSEFSRHDSLSFKHMVYLIVEGVPRWV

SEQ ID NO: 1070 - protein, 702 aa, Homo sapiens
MFVGLFSLLSFNVFRSGDGVAEPRRWQRGSPGAVGLYVDPMEPLVTWVVPLLFLFLLSRQGAACRTSECCFQDPPYPDADSGSASGPRDLRCYRISSDRYECSWQYEGPTAGVSHFLRCCLSSGRCCYFAAGSATRLQFSDQAGVSVLYTVTLWVESWARNQTEKSPEVTLQLYNSVKYEPPLGDIKVSKLAGQLRMEWETPDNQVGAEVQFRHRTPSSPWKLGDCGPQDDDTESCLCPLEMNVAQEFQLRRRQLGSQGSSWSKWSSPVCVPPENPPQPQVRFSVEQLGQDGRRRLTLKEQPTQLELPEGCQGLAPGTEVTYRLQLHMLSCPCKAKATRTLHLGKMPYLSGAAYNVAVISSNQFGPGLNQTWHIPADTHTEPVALNISVGTNGTTMYWPARAQSMTYCIEWQPVGQDGGLATCSLTAPQDPDPAGMATYSWSRESGAMGQEKCYYITIFASAHPEKLTLWSTVLSTYHFGGNASAAGTPHHVSVKNHSLDSVSVDWAPSLLSTCPGVLKEYVVRCRDEDSKQVSEHPVQPTETQVTLSGLRAGVAYTVQVRADTAWLRGVWSQPQRFSIEVQVSDWLIFFASLGSFLSILLVGVLGYLGLNRAARHLCPPLPTPCASSAIEFPGGKETWQWINPVDFQEEASLQEALVVEMSWDKGERTEPLEKTELPEGAPELALDTELSLEDGDRCKAKM

SEQ ID NO: 1071 - protein, 662 aa, Homo sapiens
MEPLVTWVVPLLFLFLLSRQGAACRTSECCFQDPPYPDADSGSASGPRDLRCYRISSDRYECSWQYEGPTAGVSHFLRCCLSSGRCCYFAAGSATRLQFSDQAGVSVLYTVTLWVESWARNQTEKSPEVTLQLYNSVKYEPPLGDIKVSKLAGQLRMEWETPDNQVGAEVQFRHRTPSSPWKLGDCGPQDDDTESCLCPLEMNVAQEFQLRRRQLGSQGSSWSKWSSPVCVPPENPPQPQVRFSVEQLGQDGRRRLTLKEQPTQLELPEGCQGLAPGTEVTYRLQLHMLSCPCKAKATRTLHLGKMPYLSGAAYNVAVISSNQFGPGLNQTWHIPADTHTEPVALNISVGTNGTTMYWPARAQSMTYCIEWQPVGQDGGLATCSLTAPQDPDPAGMATYSWSRESGAMGQEKCYYITIFASAHPEKLTLWSTVLSTYHFGGNASAAGTPHHVSVKNHSLDSVSVDWAPSLLSTCPGVLKEYVVRCRDEDSKQVSEHPVQPTETQVTLSGLRAGVAYTVQVRADTAWLRGVWSQPQRFSIEVQVSDWLIFFASLGSFLSILLVGVLGYLGLNRAARHLCPPLPTPCASSAIEFPGGKETWQWINPVDFQEEASLQEALVVEMSWDKGERTEPLEKTELPEGAPELALDTELSLEDGDRCKAKM

SEQ ID NO: 1072 - protein, 754 aa, Homo sapiens
  misc_feature (754)..(754): Xaa can be any naturally occurring amino acid
MFVGLFSLLSFNVFRSGDGVAEPRRWQRGSPGAVGLYVDPMEPLVTWVVPLLFLFLLSRQGAACRTSECCFQDPPYPDADSGSASGPRDLRCYRISSDRYECSWQYEGPTAGVSHFLRCCLSSGRCCYFAAGSATRLQFSDQAGVSVLYTVTLWVESWARNQTEKSPEVTLQLYNSVKYEPPLGDIKVSKLAGQLRMEWETPDNQVGAEVQFRHRTPSSPWKLGDCGPQDDDTESCLCPLEMNVAQEFQLRRRQLGSQGSSWSKWSSPVCVPPENPPQPQVRFSVEQLGQDGRRRLTLKEQPTQLELPEGCQGLAPGTEVTYRLQLHMLSCPCKAKATRTLHLGKMPYLSGAAYNVAVISSNQFGPGLNQTWHIPADTHTEPVALNISVGTNGTTMYWPARAQSMTYCIEWQPVGQDGGLATCSLTAPQDPDPAGMATYSWSRESGAMGQEKCYYITIFASAHPEKLTLWSTVLSTYHFGGNASAAGTPHHVSVKNHSLDSVSVDWAPSLLSTCPGVLKEYVVRCRDEDSKQVSEHPVQPTETQVTLSGLRAGVAYTVQVRADTAWLRGVWSQPQRFSIEVQVSDWLIFFASLGSFLSILLVGVLGYLGLNRAARHLCPPLPTPCASSAIEFPGGKETWQWINPVDFQEEASLQEALVVEMSWDKGERTEPLEKTELPEGAPELALDTELSLEDGDRCKAKVLGPSGPDGQGCNPARGVGGLDIHRSWDIRAWRPEGETKTSTLSYRHEERLSX

SEQ ID NO: 1073 - protein, 615 aa, Homo sapiens
MEPLVTWVVPLLFLFLLSRQGAACRTSECCFQDPPYPDADSGSASGPRDLRCYRISSDRYECSWQYEGPTAGVSHFLRCCLSSGRCCYFAAGSATRLQFSDQAGVSVLYTVTLWVESWARNQTEKSPEVTLQLYNSVKYEPPLGDIKVSKLAGQLRMEWETPDNQVGAEVQFRHRTPSSPWKLGDCGPQDDDTESCLCPLEMNVAQEFQLRRRQLGSQGSSWSKWSSPVCVPPENPPQPQVRFSVEQLGQDGRRRLTLKEQPTQLELPEGCQGLAPGTEVTYRLQLHMLSCPCKAKATRTLHLGKMPYLSGAAYNVAVISSNQFGPGLNQTWHIPADTHTEPVALNISVGTNGTTMYWPARAQSMTYCIEWQPVGQDGGLATCSLTAPQDPDPAGMATYSWSRESGAMGQEKCYYITIFASAHPEKLTLWSTVLSTYHFGGNASAAGTPHHVSVKNHSLDSVSVDWAPSLLSTCPGVLKEYVVRCRDEDSKQVSEVQVSDWLIFFASLGSFLSILLVGVLGYLGLNRAARHLCPPLPTPCASSAIEFPGGKETWQWINPVDFQEEASLQEALVVEMSWDKGERTEPLEKTELPEGAPELALDTELSLEDGDRCDR

SEQ ID NO: 1074 - protein, 1229 aa, Homo sapiens [sequence omitted]

SEQ ID NO: 1075 - protein, 202 aa, Homo sapiens
  misc_feature (202)..(202): Xaa can be any naturally occurring amino acid
PAADRAAPAAPLSRCATLAAGPGLRAGAELRSPPRGGASPAPSGPAPASSLPHQPGVCPCVRVSVRRSARATIRASGGQQGGVGTPPHRGGLCLGMKSRRDKLHIPALTLDLSPSSQSPSLLGPSSPCSPCSPSLGLHPWSCRSGNRKSLVVGTPSPTLSRPLSPLSVPTGSSPLDSPRNFSAASALNFPFARSHIPRMDRX

SEQ ID NO: 1076 - protein, 333 aa, Homo sapiens
MGDWGFLEKLLDQVQEHSTVVGKIWLTVLFIFRILILGLAGESVWGDEQSDFECNTAQPGCTNVCYDQAFPISHIRYWVLQFLFVSTPTLVYLGHVIYLSRREERLRQKEGELRALPAKDPQVERALAAVERQMAKISVAEDGRLRIRGALMGTYVASVLCKSVLEAGFLYGQWRLYGWTMEPVFVCQRAPCPYLVDCFVSRPTEKTIFIIFMLVVGLISLVLNLLELVHLLCRCLSRGMRARQGQDAPPTQGTSSDPYTDQVFFYLPVGQGPSSPPCPTYNGLSSSEQNWANLTTEERLASSRPPLFLDPPPQNGQKPPSRPSSSASKKQYV

SEQ ID NO: 1077 - protein, 333 aa, Homo sapiens; identical to SEQ ID NO: 1076

SEQ ID NO: 1078 - protein, 1278 aa, Homo sapiens
MTARGLALGLLLLLLCPAQVFSQSCVWYGECGIAYGDKRYNCEYSGPPKPLPKDGYDLVQELCPGFFFGNVSLCCDVRQLQTLKDNLQLPLQFLSRCPSCFYNLLNLFCELTCSPRQSQFLNVTATEDYVDPVTNQTKTNVKELQYYVGQSFANAMYNACRDVEAPSSNDKALGLLCGKDADACNATNWIEYMFNKDNGQAPFTITPVFSDFPVHGMEPMNNATKGCDESVDEVTAPCSCQDCSIVCGPKPQPPPPPAPWTILGLDAMYVIMWITYMAFLLVFFGAFFAVWCYRKRYFVSEYTPIDSNIAFSVNASDKGEASCCDPVSAAFEGCLRRLFTRWGSFCVRNPGCVIFFSLVFITACSSGLVFVRVTTNPVDLWSAPSSQARLEKEYFDQHFGPFFRTEQLIIRAPLTDKHIYQPYPSGADVPFGPPLDIQILHQVLDLQIAIENITASYDNETVTLQDICLAPLSPYNTNCTILSVLNYFQNSHSVLDHKKGDDFFVYADYHTHFLYCVRAPASLNDTSLLHDPCLGTFGGPVFPWLVLGGYDDQNYNNATALVITFPVNNYYNDTEKLQRAQAWEKEFINFVKNYKNPNLTISFTAERSIEDELNRESDSDVFTVVISYAIMFLYISLALGHIKSCRRLLVDSKVSLGIAGILIVLSSVACSLGVFSYIGLPLTLIVIEVIPFLVLAVGVDNIFILVQAYQRDERLQGETLDQQLGRVLGEVAPSMFLSSFSETVAFFLGALSVMPAVHTFSLFAGLAVFIDFLLQITCFVSLLGLDIKRQEKNRLDIFCCVRGAEDGTSVQASESCLFRFFKNSYSPLLLKDWMRPIVIAIFVGVLSFSIAVLNKVDIGLDQSLSMPDDSYMVDYFKSISQYLHAGPPVYFVLEEGHDYTSSKGQNMVCGGMGCNNDSLVQQIFNAAQLDNYTRIGFAPSSWIDDYFDWVKPQSSCCRVDNITDQFCNASVVDPACVRCRPLTPEGKQRPQGGDFMRFLPMFLSDNPNPKCGKGGHAAYSSAVNILLGHGTRVGATYFMTYHTVLQTSADFIDALKKARLIASNVTETMGINGSAYRVFPYSVFYVFYEQYLTIIDDTIFNLGVSLGAIFLVTMVLLGCELWSAVIMCATIAMVLVNMFGVMWLWGISLNAVSLVNLVMSCGISVEFCSHITRAFTVSMKGSRVERAEEALAHMGSSVFSGITLTKFGGIVVLAFAKSQIFQIFYFRMYLAMVLLGATHGLIFLPVLLSYIGPSVNKAKSCATEERYKGTERERLLNF

SEQ ID NO: 1079 - protein, 694 aa, Homo sapiens [sequence omitted]

SEQ ID NO: 1080 - protein, 286 aa, Homo sapiens
MDDKGEVKCIKFSLENKILAVQRTSKTVDFCNFIPDNSQLEYTQECKTKNANILGFCWTSSTEIVFITDQGIEFYQVLPEKRSLKLLKSHNLNVNWYMYCPESAVILLSTTVLENVLQPFHFRAGTMSKLPKFEIELPAAPKSTKPSLSERDIAMATIYGQLYVLFLRHHSRTSNSTGAEVVLYHLPREGACKKMHILKLNRTGKFALNVVDNLVVVHHQDTETSVIFDIKLRGEFDGSVTFHHPVLPARSIQPYQIPITGPAAVTSQSPVPCKLCGFFILDCLST

SEQ ID NO: 1081 - protein, 659 aa, Homo sapiens
MGEEDYYLELCERPVQFEKANPVNCVFFDEANKQVFAVRSGGATGVVVKGPDDRNPISFRMDDKGEVKCIKFSLENKILAVQRTSKTVDFCNFIPDNSQLEYTQECKTKNANILGFCWTSSTEIVFITDQGIEFYQVLPEKRSLKLLKSHNLNVNWYMYCPESAVILLSTTVLENVLQPFHFRAGTMSKLPKFEIELPAAPKSTKPSLSERDIAMATIYGQLYVLFLRHHSRTSNSTGAEVVLYHLPREGACKKMHILKLNRTGKFALNVVDNLVVVHHQDTETSVIFDIKLRGEFDGSVTFHHPVLPARSIQPYQIPITGPAAVTSQSPVPCKLYVDSSSWIVFQPDIIISASQGYLWNLQVKLEPIVNLLPDKGRLMDFLLQRKECKMVILSVCSQMLSESDRASLPVIATVFDKLNHEYKKYLDAEQSYAMAVEAGQSRSSPLLKRPVRTQAVLDQSDVYTHVLSAFVEKKEMPHKFVIAVLMEYIRSLNQFQIAVQHYLHELVIKTLVQHNLFYMLHQFLQYHVLSDSKPLACLLLSLESFYPPAHQLSLDMLKRLSTANDEIVEVLLSKHQVLAALRFIRGIGGHDNISARKFLDAAKQTEDNMLFYTIFRFFEQRNQRLRGSPNFTPGEHCEEHVAFFKQIFGDQALMRPTTF

SEQ ID NO: 1082 - protein, 657 aa, Homo sapiens
MGEEDYYLELCERPVQFEKANPVNCVFFDEANKQVFAVRSGGATGVVVKGPDDRNPISFRMDDKGEVKCIKFSLENKILAVQRTSKTVDFCNFIPDNSQLEYTQECKTKNANILGFCWTSSTEIVFITDQGIEFYQVLPEKRSLKLLKSHNLNVNWYMYCPESAVILLSTTVLENVLQPFHFRAGTMSKLPKFEIELPAAPKSTKPSLSERDIAMATIYGQLYVLFLRHHSRTSNSTGAEVVLYHLPREGACKKMHILKLNRTGKFALNVVDNLVVVHHQDTETSVIFDIKLRGEFDGSVTFHHPVLPARSIQPYQIPITGPAAVTSQSPVPCKLYSSSWIVFQPDIIISASQGYLWNLQVKLEPIVNLLPDKGRLMDFLLQRKECKMVILSVCSQMLSESDRASLPVIATVFDKLNHEYKKYLDAEQSYAMAVEAGQSRSSPLLKRPVRTQAVLDQSDVYTHVLSAFVEKKEMPHKFVIAVLMEYIRSLNQFQIAVQHYLHELVIKTLVQHNLFYMLHQFLQYHVLSDSKPLACLLLSLESFYPPAHQLSLDMLKRLSTANDEIVEVLLSKHQVLAALRFIRGIGGHDNISARKFLDAAKQTEDNMLFYTIFRFFEQRNQRLRGSPNFTPGEHCEEHVAFFKQIFGDQALMRPTTF

SEQ ID NO: 1083 - protein, 749 aa, Homo sapiens
MNKGISSIPINLRVYSPHVLNLTLIDLPGITKVPVGDQPPDIEYQIREMIMQFITRENCLILAVTPANTDLANSDALKLAKEVDPQGLRTIGVITKLDLMDEGTDARDVLENKLLPLRRGYVGVVNRSQKDIDGKKDIKAAMLAERKFFLSHPAYRHIADRMGTPHLQKVLNQQLTNHIRDTLPNFRNKLQGQLLSIEHEVEAYKNFKPEDPTRKTKALLQMVQQFAVDFEKRIEGSGDQVDTLELSGGAKINRIFHERFPFEIVKMEFNEKELRREISYAIKNIHGIRTGLFTPDMAFEAIVKKQIVKLKGPSLKSVDLVIQELINTVKKCTKKLANFPRLCEETERIVANHIREREGKTKDQVLLLIDIQVSYINTNHEDFIGFANAQQRSSQVHKKTTVGNQVIRKGWLTISNIGIMKGGSKGYWFVLTAESLSWYKDDEEKEKKYMLPLDNLKVRDVEKSFMSSKHIFALFNTEQRNVYKDYRFLELACDSQEDVDSWKASLLRAGVYPDKSVAENDENGQAENFSMDPQLERQVETIRNLVDSYMSIINKCIRDLIPKTIMHLMINNVKDFINSELLAQLYSSEDQNTLMEESAEQAQRRDEMLRMYQALKEALGIIGDISTATVSTPAPPPVDDSWIQHSRRSPPPSPTTQRRPTLSAPLARPTSGRGPAPAIPSPGPHSGAPPVPFRPGPLPPFPSSSDSFGAPPQVPSRPTRAPPSVPSRRPPPSPTRPTIIRPLESSLLD

SEQ ID NO: 1084 - protein, 877 aa, Homo sapiens [sequence omitted]

SEQ ID NO: 1085 - protein, 555 aa, Homo sapiens
MGNREMEELIPLVNRLQDAFSALGQSCLLELPQIAVVGGQSAGKSSVLENFVGRDFLPRGSGIVTRRPLVLQLVTSKAEYAEFLHCKGKKFTDFDEVRLEIEAETDRVTGMNKGISSIPINLRVYSPHVLNLTLIDLPGITKVPVGDQPPDIEYQIREMIMQFITRENCLILAVTPANTDLANSDALKLAKEVDPQGLRTIGVITKLDLMDEGTDARDVLENKLLPLRRGYVGVVNRSQKDIDGKKDIKAAMLAERKFFLSHPAYRHIADRMGTPHLQKVLNQQLTNHIRDTLPNFRNKLQGQLLSIEHEVEAYKNFKPEDPTRKTKALLQMVQQFAVDFEKRIEGSGDQVDTLELSGGAKINRIFHERFPFEIVKMEFNEKELRREISYAIKNIHGIRTGLFTPDMAFEAIVKKQIVKLKGPSLKSVDLVIQELINTVKKCTKKLANFPRLCEETERIVANHIREREGKTKDQVLLLIDIQVSYINTNHEDFIGFANAQQRSSQVHKKTTVGNQVIRKGWLTISNIGIMKGGSKGYWFVLTAESLSWYKDDENI

SEQ ID NO: 1086 - protein, 859 aa, Homo sapiens
MGNREMEELIPLVNRLQDAFSALGQSCLLELPQIAVVGGQSAGKSSVLENFVGRDFLPRGSGIVTRRPLVLQLVTSKAEYAEFLHCKGKKFTDFDEVRLEIEAETDRVTGMNKGISSIPINLRVYSPHVLNLTLIDLPGITKVPVGDQPPDIEYQIREMIMQFITRENCLILAVTPANTDLANSDALKLAKEVDPQGLRTIGVITKLDLMDEGTDARDVLENKLLPLRRGYVGVVNRSQKDIDGKKDIKAAMLAERKFFLSHPAYRHIADRMGTPHLQKVLNQQLTNHIRDTLPNFRNKLQGQLLSIEHEVEAYKNFKPEDPTRKTKALLQMVQQFAVDFEKRIEGSGDQVDTLELSGGAKINRIFHERFPFEIVKMEFNEKELRREISYAIKNIHGIRTGLFTPDMAFEAIVKKQIVKLKGPSLKSVDLVIQELINTVKKCTKKLANFPRLCEETERIVANHIREREGKTKDQVLLLIDIQVSYINTNHEDFIGFANAQQRSSQVHKKTTVGNQVIRKGWLTISNIGIMKGGSKGYWFVLTAESLSWYKDDEEKEKKYMLPLDNLKVRDVEKSFMSSKHIFALFNTEQRNVYKDYRFLELACDSQEDVDSWKASLLRAGVYPDKSVAENDENGQAENFSMDPQLERQVETIRNLVDSYMSIINKCIRDLIPKTIMHLMINNVKDFINSELLAQLYSSEDQNTLMEESAEQAQRRDEMLRMYQALKEALGIIGDISTATVSTPAPPPVDDSWIQHSRRSPPPSPTTQRRPTLSAPLARPTSGRGPAPAIPSPGPHSGAPPVPFRPGPLPPFPSSSDSFGAPPQVPSRPTRAPPSVPSRRPPPSPTRPTIIRPLESSLLD

SEQ ID NO: 1087 - protein, 330 aa, Homo sapiens
MKGGSKGYWFVLTAESLSWYKDDEEKEKKYMLPLDNLKVRDVEKSFMSSKHIFALFNTEQRNVYKDYRFLELACDSQEDVDSWKASLLRAGVYPDKSVAENDENGQAENFSMDPQLERQVETIRNLVDSYMSIINKCIRDLIPKTIMHLMINNVKDFINSELLAQLYSSEDQNTLMEESAEQAQRRDEMLRMYQALKEALGIIGDISTATVSTPAPPPVDDSWIQHSRRSPPPSPTTQRRPTLSAPLARPTSGRGPAPAIPSPGPHSGAPPVPFRPGPLPPFPSSSDSFGAPPQVPSRPTRAPPSVPSRRPPPSPTRPTIIRPLESSLLD

SEQ ID NO: 1088 - protein, 1165 aa, Homo sapiens [sequence omitted]

SEQ ID NO: 1089 - protein, 830 aa, Homo sapiens
MQTEMHHIQTLFIMSEIFRKGMKEELQLDHSTVDKIFPCLDELLEIHRHFFYSMKERRQESCAGSDRNFVIDRIGDILVQQFSEENASKMKKIYGEFCCHHKEAVNLFKELQQNKKFQNFIKLRNSNLLARRRGIPECILLVTQRITKYPVLVERILQYTKERTEEHKDLRKALCLIKDMIATVDLKVNEYEKNQKWLEILNKIENKTYTKLKNGHVFRKQALMSEERTLLYDGLVYWKTATGRFKDILALLLTDVLLFLQEKDQKYIFAAVDQKPSVISLQKLIAREVANEERGMFLISASSAGPEMYEIHTNSKEERNNWMRRIQQAVESCPEEKGGRTSESDEDKRKAEARVAKIQQCQEILTNQDQQICAYLEEKLHIYAELGELSGFEDVHLEPHLLIKPDPGEPPQAASLLAAALKEALVTGGREGRGCSDVDPGIQGVVTDLAVSDAGEKVECRNFPGSSQSEIIQAIQNLTRLLYSLQAALTIQDSHIEIHRLVLQQQEGLSLGHSILRGGPLQDQKSRDADRQHEELANVHQLQHQLQQEQRRWLRRCEQQQRAQATRESWLQERERECQSQEELLLRSRGELDLQLQEYQHSLERLREGQRLVEREQARMRAQQSLLGHWKHGRQRSLPAVLLPGGPEVMELNRSESLCHENSFFINEALVQMSFNTFNKLNPSVIHQDATYPTTQSHSDLVRTSEHQVDLKVDPSQPSNVSHKLWTAAGSGHQILPFHESSKDSCKNGSSMTKCSCTLTSPPGLWTGTTSTLKDLDTSHTESPTPHDSNSHRPQLQAFITEAKLNLPTRTMTRQDGETGDGAKENIVYL

SEQ ID NO: 1090 - protein, 848 aa, Homo sapiens
MQTEMHHIQTLFIMSEIFRKGMKEELQLDHSTVDKIFPCLDELLEIHRHFFYSMKERRQESCAGSDRNFVIDRIGDILVQQFSEENASKMKKIYGEFCCHHKEAVNLFKELQQNKKFQNFIKLRNSNLLARRRGIPECILLVTQRITKYPVLVERILQYTKERTEEHKDLRKALCLIKDMIATVDLKVNEYEKNQKWLEILNKIENKTYTKLKNGHVFRKQALMSEERTLLYDGLVYWKTATGRFKDILALLLTDVLLFLQEKDQKYIFAAVDQKPSVISLQKLIAREVANEERGMFLISASSAGPEMYEIHTNSKEERNNWMRRIQQAVESCPEEKGGRTSESDEDKRKAEARVAKIQQCQEILTNQDQQICAYLEEKLHIYAELGELSGFEDVHLEPHLLIKPDPGEPPQAASLLAAALKEAESLQVAVKASQMGAVSQSCEDSCGDSVLADTLSSHDVPGSPTASLVTGGREGRGCSDVDPGIQGVVTDLAVSDAGEKVECRNFPGSSQSEIIQAIQNLTRLLYSLQAALTIQDSHIEIHRLVLQQQEGLSLGHSILRGGPLQDQKSRDADRQHEELANVHQLQHQLQQEQRRWLRRCEQQQRAQATRESWLQERERECQSQEELLLRSRGELDLQLQEYQHSLERLREGQRLVEREQARMRAQQSLLGHWKHGRQRSLPAVLLPGGPEVMELNRSESLCHENSFFINEALVQMSFNTFNKLNPSVIHQDATYPTTQSHSDLVRTSEHQVDLKVDPSQPSNVSHKLWTAAGSGHQILPFHESSKDSCKNDLDTSHTESPTPHDSNSHRPQLQAFITEAKLNLPTRTMTRQDGETGDGAKENIVYL

SEQ ID NO: 1091 - protein, 768 aa, Homo sapiens
MANCQIAILYQRFQRVVFGISQLLCFSALISELTNQKEVAAWTYHYSTKAYSWNISRKYCQNRYTDLVAIQNKNEIDYLNKVLPYYSSYYWIGIRKNNKTWTWVGTKKALTNEAENWADNEPNNKRNNEDCVEIYIKSPSAPGKWNDEHCLKKKHALCYTASCQDMSCSKQGECLETIGNYTCSCYPGFYGPECEYVRECGELELPQHVLMNCSHPLGNFSFNSQCSFHCTDGYQVNGPSKLECLASGIWTNKPPQCLAAQCPPLKIPERGNMTCLHSAKAFQHQSSCSFSCEEGFALVGPEVVQCTASGVWTAPAPVCKAISCEPLESPVHGSMDCSPSLRAFQYDTNCSFRCAEGFMLRGADIVRCDNLGQWTAPAPVCQALQCQDLPVPNEARVNCSHPFGAFRYQSVCSFTCNEGLLLVGASVLQCLATGNWNSVPPECQAIPCTPLLSPQNGTMTCVQPLGSSSYKSTCQFICDEGYSLSGPERLDCTRSGRWTDSPPMCEAIKCPELFAPEQGSLDCSDTRGEFNVGSTCHFSCDNGFKLEGPNNVECTTSGRWSATPPTCKGIASLPTPGVQCPALTTPGQGTMYCRHHPGTFGFNTTCYFGCNAGFTLIGDSTLSCRPSGQWTAVTPACRAVKCSELHVNKPIAMNCSNLWGNFSYGSICSFHCLEGQLLNGSAQTACQENGHWSTTVPTCQAGPLTIQEALTYFGGAVASTIGLIMGGTLLALLRKRFRQKDDGKCPLNPHSHLGTYGVFTNAAFDPSP

SEQ ID NO: 1092 - protein, 790 aa, Homo sapiens
MANCQIAILYQRFQRVVFGISQLLCFSALISELTNQKEVAAWTYHYSTKAYSWNISRKYCQNRYTDLVAIQNKNEIDYLNKVLPYYSSYYWIGIRKNNKTWTWVGTKKALTNEAENWADNEPNNKRNNEDCVEIYIKSPSAPGKWNDEHCLKKKHALCYTASCQDMSCSKQGECLETIGNYTCSCYPGFYGPECEYVRECGELELPQHVLMNCSHPLGNFSFNSQCSFHCTDGYQVNGPSKLECLASGIWTNKPPQCLAAQCPPLKIPERGNMTCLHSAKAFQHQSSCSFSCEEGFALVGPEVVQCTASGVWTAPAPVCKAVQCQHLEAPSEGTMDCVHPLTAFAYGSSCKFECQPGYRVRGLDMLRCIDSGHWSAPLPTCEAISCEPLESPVHGSMDCSPSLRAFQYDTNCSFRCAEGFMLRGADIVRCDNLGQWTAPAPVCQALQCQDLPVPNEARVNCSHPFGAFRYQSVCSFTCNEGLLLVGASVLQCLATGNWNSVPPECQAIPCTPLLSPQNGTMTCVQPLGSSSYKSTCQFICDEGYSLSGPERLDCTRSGRWTDSPPMCEAIKCPELFAPEQGSLDCSDTRGEFNVGSTCHFSCDNGFKLEGPNNVECTTSGRWSATPPTCKGIASLPTPGVQCPALTTPGQGTMYCRHHPGTFGFNTTCYFGCNAGFTLIGDSTLSCRPSGQWTAVTPACRAVKCSELHVNKPIAMNCSNLWGNFSYGSICSFHCLEGQLLNGSAQTACQENGHWSTTVPTCQDDGKCPLNPHSHLGTYGVFTNAAFDPSP

SEQ ID NO: 1093 - protein, 830 aa, Homo sapiens
MANCQIAILYQRFQRVVFGISQLLCFSALISELTNQKEVAAWTYHYSTKAYSWNISRKYCQNRYTDLVAIQNKNEIDYLNKVLPYYSSYYWIGIRKNNKTWTWVGTKKALTNEAENWADNEPNNKRNNEDCVEIYIKSPSAPGKWNDEHCLKKKHALCYTASCQDMSCSKQGECLETIGNYTCSCYPGFYGPECEYVRECGELELPQHVLMNCSHPLGNFSFNSQCSFHCTDGYQVNGPSKLECLASGIWTNKPPQCLAAQCPPLKIPERGNMTCLHSAKAFQHQSSCSFSCEEGFALVGPEVVQCTASGVWTAPAPVCKAVQCQHLEAPSEGTMDCVHPLTAFAYGSSCKFECQPGYRVRGLDMLRCIDSGHWSAPLPTCEAISCEPLESPVHGSMDCSPSLRAFQYDTNCSFRCAEGFMLRGADIVRCDNLGQWTAPAPVCQALQCQDLPVPNEARVNCSHPFGAFRYQSVCSFTCNEGLLLVGASVLQCLATGNWNSVPPECQAIPCTPLLSPQNGTMTCVQPLGSSSYKSTCQFICDEGYSLSGPERLDCTRSGRWTDSPPMCEAIKCPELFAPEQGSLDCSDTRGEFNVGSTCHFSCDNGFKLEGPNNVECTTSGRWSATPPTCKGIASLPTPGVQCPALTTPGQGTMYCRHHPGTFGFNTTCYFGCNAGFTLIGDSTLSCRPSGQWTAVTPACRAVKCSELHVNKPIAMNCSNLWGNFSYGSICSFHCLEGQLLNGSAQTACQENGHWSTTVPTCQAGPLTIQEALTYFGGAVASTIGLIMGGTLLALLRKRFRQKDDGKCPLNPHSHLGTYGVFTNAAFDPSP

SEQ ID NO: 1094 - protein, 830 aa, Homo sapiens; identical to SEQ ID NO: 1093

SEQ ID NO: 1095 - protein, 2224 aa, Homo sapiens
MFPGCPRLWVLVVLGTSWVGWGSQGTEAAQLRQFYVAAQGISWSYRPEPTNSSLNLSVTSFKKIVYREYEPYFKKEKPQSTISGLLGPTLYAEVGDIIKVHFKNKADKPLSIHPQGIRYSKLSEGASYLDHTFPAEKMDDAVAPGREYTYEWSISEDSGPTHDDPPCLTHIYYSHENLIEDFNSGLIGPLLICKKGTLTEGGTQKTFDKQIVLLFAVFDESKSWSQSSSLMYTVNGYVNGTMPDITVCAHDHISWHLLGMSSGPELFSIHFNGQVLEQNHHKVSAITLVSATSTTANMTVGPEGKWIISSLTPKHLQAGMQAYIDIKNCPKKTRNLKKITREQRRHMKRWEYFIAAEEVIWDYAPVIPANMDKKYRSQHLDNFSNQIGKHYKKVMYTQYEDESFTKHTVNPNMKEDGILGPIIRAQVRDTLKIVFKNMASRPYSIYPHGVTFSPYEDEVNSSFTSGRNNTMIRAVQPGETYTYKWNILEFDEPTENDAQCLTRPYYSDVDIMRDIASGLIGLLLICKSRSLDRRGIQRAADIEQQAVFAVFDENKSWYLEDNINKFCENPDEVKRDDPKFYESNIMSTINGYVPESITTLGFCFDDTVQWHFCSVGTQNEILTIHFTGHSFIYGKRHEDTLTLFPMRGESVTVTMDNVGTWMLTSMNSSPRSKKLRLKFRDVKCIPDDDEDSYEIFEPPESTVMATRKMHDRLEPEDEESDADYDYQNRLAAALGIRSFRNSSLNQEEEEFNLTALALENGTEFVSSNTDIIVGSNYSSPSNISKFTVNNLAEPQKAPSHQQATTAGSPLRHLIGKNSVLNSSTAEHSSPYSEDPIEDPLQPDVTGIRLLSLGAGEFKSQEHAKHKGPKVERDQAAKHRFSWMKLLAHKVGRHLSQDTGSPSGMRPWEDLPSQDTGSPSRMRPWKDPPSDLLLLKQSNSSKILVGRWHLASEKGSYEIIQDTDEDTAVNNWLISPQNASRAWGESTPLANKPGKQSGHPKFPRVRHKSLQVRQDGGKSRLKKSQFLIKTRKKKKEKHTHHAPLSPRTFHPLRSEAYNTFSERRLKHSLVLHKSNETSLPTDLNQTLPSMDFGWIASLPDHNQNSSNDTGQASCPPGLYQTVPPEEHYQTFPIQDPDQMHSTSDPSHRSSSPELSEMLEYDRSHKSFPTDISQMSPSSEHEVWQTVISPDLSQVTLSPELSQTNLSPDLSHTTLSPELIQRNLSPALGQMPISPDLSHTTLSPDLSHTTLSLDLSQTNLSPELSQTNLSPALGQMPLSPDLSHTTLSLDFSQTNLSPELSHMTLSPELSQTNLSPALGQMPISPDLSHTTLSLDFSQTNLSPELSQTNLSPALGQMPLSPDPSHTTLSLDLSQTNLSPELSQTNLSPDLSEMPLFADLSQIPLTPDLDQMTLSPDLGETDLSPNFGQMSLSPDLSQVTLSPDISDTTLLPDLSQISPPPDLDQIFYPSESSQSLLLQEFNESFPYPDLGQMPSPSSPTLNDTFLSKEFNPLVIVGLSKDGTDYIEIIPKEEVQSSEDDYAEIDYVPYDDPYKTDVRTNINSSRDPDNIAAWYLRSNNGNRRNYYIAAEEISWDYSEFVQRETDIEDSDDIPEDTTYKKVVFRKYLDSTFTKRDPRGEYEEHLGILGPIIRAEVDDVIQVRFKNLASRPYSLHAHGLSYEKSSEGKTYEDDSPEWFKEDNAVQPNSSYTYVWHATERSGPESPGSACRAWAYYSAVNPEKDIHSGLIGPLLICQKGILHKDSNMPMDMREFVLLFMTFDEKKSWYYEKKSRSSWRLTSSEMKKSHEFHAINGMIYSLPGLKMYEQEWVRLHLLNIGGSQDIHVVHFHGQTLLENGNKQHQLGVWPLLPGSFKTLEMKASKPGWWLLNTEVGENQRAGMQTPFLIMDRDCRMPMGLSTGIISDSQIKASEFLGYWEPRLARLNNGGSYNAWSVEKLAAEFASKPWIQVDMQKEVIITGIQTQGAKHYLKSCYTTEFYVAYSSNQINWQIFKGNSTRNVMYFNGNSDASTIKENQFDPPIVARYIRISPTRAYNRPTLRLELQGCEVNGCSTPLGMENGKIENKQITASSFKKSWWGDYWEPFRARLNAQGRVNAWQAKANNNKQWLEIDLLKIKKITAIITQGCKSLSSEMYVKSYTIHYSEQGVEWKPYRLKSSMVDKIFEGNTNTKGHVKNFFNPPIISRFIRVIPKTWNQSIALRLELFGCDIY

SEQ ID NO: 1096 - protein, 301 aa, Homo sapiens [sequence omitted]

SEQ ID NO: 1097 - protein, 264 aa, Homo sapiens [sequence omitted]

SEQ ID NO: 1098 - protein, 213 aa, Homo sapiens
MCIVGRLPWVKLPIYILVQLLSAFCASGATYVLYHDALQNYTGGNLTVTGPKETASIFATYPAPYLSLNNGFLDQVLGTGMLIVGLLAILDRRNKGVPAGLEPVVVGMLILALGLSMGANCGIPLNPARDLGPRLFTYVAGWGPEVFSAGNGWWWVPVVAPLVGATVGTATYQLLVALHHPEGPEPAQDLVSAQHKASELETPASAQMLECKL

SEQ ID NO: 1099 - protein, 1155 aa, Homo sapiens
MAVCAKKRPPEEERRARANDREYNEKFQYASNCIKTSKYNILTFLPVNLFEQFQEVANTYFLFLLILQLIPQISSLSWFTTIVPLVLVLTITAVKDATDDYFRHKSDNQVNNRQSQVLINGILQQEQWMNVCVGDIIKLENNQFVAAVDWTLSSGILVSCSGEVICEPPNNKLDKFSGTLYWKENKFPLSNQNMLLRGCVLRNTEWCFGLVIFAGPDTKLMQNSGRTKFKRTSIDRLMNTLVLWIFGFLVCMGVILAIGNAIWEHEVGMRFQVYLPWDEAVDSAFFSGFLSFWSYIIILNTVVPISLYVSVEVIRLGHSYFINWDKKMFCMKKRTPAEARTTTLNEELGQVEYIFSDKTGTLTQNIMVFNKCSINGHSYGDVFDVLGHKAELGERPEPVDFSFNPLADKKFLFWDPSLLEAVKIGDPHTHEFFRLLSLCHTVMSEEKNEGELYYKAQSPDEGALVTAARNFGFVFRSRTPKTITVHEMGTAITYQLLAILDFNNIRKRMSVIVRNPEGKIRLYCKGADTILLDRLHHSTQELLNTTMDHLNEYAGEGLRTLVLAYKDLDEEYYEEWAERRLQASLAQDSREDRLASIYEEVENNMMLLGATAIEDKLQQGVPETIALLTLANIKIWVLTGDKQETAVNIGYSCKMLTDDMTEVFIVTGHTVLEVREELRKAREKMMDSSRSVGNGFTYQDKLSSSKLTSVLEAVAGEYALVINGHSLAHALEADMELEFLETACACKAVICCRVTPLQKAQVVELVKKYKKAVTLAIGDGANDVSMIKTAHIGVGISGQEGIQAVLASDYSFSQFKFLQRLLLVHGRWSYLRMCKFLCYFFYKNFAFTMVHFWFGFFCGFSAQTVYDQYFITLYNIVYTSLPVLAMGVFDQDVPEQRSMEYPKLYEPGQLNLLFNKREFFICIAQGIYTSVLMFFIPYGVFADATRDDGTQLADYQSFAVTVATSLVIVVSVQIGLDTGYWTAINHFFIWGSLAVYFAILFAMHSNGLFDMFPNQFRFVGNAQNTLAQPTVWLTIVLTTVVCIMPVVAFRFLRLNLKPDLSDTVRYTQLVRKKQKAQHRCMRRVGRTGSRRSGYAFSHQEGFGELIMSGKNMRLSSLALSSFTTRSSSSWIESLRRKKSDSASSPSGGADKPLKG

SEQ ID NO: 1100 - protein, 381 aa, Homo sapiens
MTVPKEMPEKWARAQAPPSWSRKKPSWGTEEERRARANDREYNEKFQYASNCIKTSKYNILTFLPVNLFEQFQEVANTYFLFLLILQLIPQISSLSWFTTIVPLVLVLTITAVKDATDDYFRHKSDNQVNNRQSQVLINGILQQEQWMNVCVGDIIKLENNQFVAADLLLLSSSEPHGLCYIETAELDGETNMKVRQAIPVTSELGDISKLAKFDGEVICEPPNNKLDKFSGTLYWKENKFPLSNQNMLLRGCVLRNTEWCFGLVIFAGPDTKLMQNSGRTKFKRTSIDRLMNTLVLWIFGFLVCMGVILAIGNAIWEHEVGMRFQVYLPWDEAVDSAFFSGFLSFWSYIIILNTVVPISLYVSPECGGHPSGPQLLHQLG

SEQ ID NO: 1101 - protein, 1164 aa, Homo sapiens
MAVCAKKRPPEEERRARANDREYNEKFQYASNCIKTSKYNILTFLPVNLFEQFQEVANTYFLFLLILQLIPQISSLSWFTTIVPLVLVLTITAVKDATDDYFRHKSDNQVNNRQSQVLINGILQQEQWMNVCVGDIIKLENNQFVAAVDWTLSSGILVSCSGEVICEPPNNKLDKFSGTLYWKENKFPLSNQNMLLRGCVLRNTEWCFGLVIFAGPDTKLMQNSGRTKFKRTSIDRLMNTLVLWIFGFLVCMGVILAIGNAIWEHEVGMRFQVYLPWDEAVDSAFFSGFLSFWSYIIILNTVVPISLYVSVEVIRLGHSYFINWDKKMFCMKKRTPAEARTTTLNEELGQVEYIFSDKTGTLTQNIMVFNKCSINGHSYGDVFDVLGHKAELGERPEPVDFSFNPLADKKFLFWDPSLLEAVKIGDPHTHEFFRLLSLCHTVMSEEKNEGELYYKAQSPDEGALVTAARNFGFVFRSRTPKTITVHEMGTAITYQLLAILDFNNIRKRMSVIVRNPEGKIRLYCKGADTILLDRLHHSTQELLNTTMDHLNVGEYAGEGLRTLVLAYKDLDEEYYEEWAERRLQASLAQDSREDRLASIYEEVENNMMESLWYFQLLGATAIEDKLQQGVPETIALLTLANIKIWVLTGDKQETAVNIGYSCKMLTDDMTEVFIVTGHTVLEVREELRKAREKMMDSSRSVGNGFTYQDKLSSSKLTSVLEAVAGEYALVINGHSLAHALEADMELEFLETACACKAVICCRVTPLQKAQVVELVKKYKKAVTLAIGDGANDVSMIKTAHIGVGISGQEGIQAVLASDYSFSQFKFLQRLLLVHGRWSYLRMCKFLCYFFYKNFAFTMVHFWFGFFCGFSAQTVYDQYFITLYNIVYTSLPVLAMGVFDQDVPEQRSMEYPKLYEPGQLNLLFNKREFFICIAQGIYTSVLMFFIPYGVFADATRDDGTQLADYQSFAVTVATSLVIVVSVQIGLDTGYWTAINHFFIWGSLAVYFAILFAMHSNGLFDMFPNQFRFVGNAQNTLAQPTVWLTIVLTTVVCIMPVVAFRFLRLNLKPDLSDTVRYTQLVRKKQKAQHRCMRRVGRTGSRRSGYAFSHQEGFGELIMSGKNMRLSSLALSSFTTRSSSSWIESLRRKKSDSASSPSGGADKPLKG

SEQ ID NO: 1102 - protein, 634 aa, Homo sapiens
MAQGVLWILLGLLLWSDPGTASLPLLMDSVIQALAELEQKVPAAKTRHTASAWLMSAPNSGPHNRLYHFLLGAWSLNATELDPCPLSPELLGLTKEVARHDVREGKEYGVVLAPDGSTVAVEPLLAGLEAGLQGRRVINLPLDSMAAPWETGDTFPDVVAIAPDVRATSSPGLRDGSPDVTTADIGANTPDATKGCPDVQASLPDAKAKSPPTMVDSLLAVTLAGNLGLTFLRGSQTQSHPDLGTEGCWDQLSAPRTFTLLDPKASLLTMAFLNGALDGVILGDYLSRTPEPRPSLSHLLSQYYGAGVARDPGFRSNFRRQNGAALTSASILAQQVWGTLVLLQRLEPVHLQLQCMSQEQLAQVAANATKEFTEAFLGCPAIHPRCRWGAAPYRGRPKLLQLPLGFLYVHHTYVPAPPCTDFTRCAANMRSMQRYHQDTQGWGDIGYSFVVGSDGYVYEGRGWHWVGAHTLGHNSRGFGVAIVGNYTAALPTEAALRTVRDTLPSCAVRAGLLRPDYALLGHRQLVRTDCPGDALFDLLRTWPHFTAVSLRSLHYTARRPSVYTSSTRPLPPACNSCARTASARPPTSRRHVYSGNLGPAFAGHSAGNIPDPVTSAYAASAQPQTQPACPFPSS

SEQ ID NO: 1103 - protein, 576 aa, Homo sapiens
MAQGVLWILLGLLLWSDPGTASLPLLMDSVIQALAELEQKVPAAKTRHTASAWLMSAPNSGPHNRLYHFLLGAWSLNATELDPCPLSPELLGLTKEVARHDVREGKEYGVVLAPDGSTVAVEPLLAGLEAGLQGRRVINLPLDSMAAPWETGDTFPDVVAIAPDVRATSSPGLRDGSPDVTTADIGANTPDATKGCPDVQASLPDAKAKSPPTMVDSLLAVTLAGNLGLTFLRGSQTQSHPDLGTEGCWDQLSAPRTFTLLDPKASLLTMAFLNGALDGVILGDYLSRTPEPRPSLSHLLSQYYGAGVARDPGFRSNFRRQNGAALTSASILAQQVWGTLVLLQRLEPVHLQLQCMSQEQLAQVAANATKEFTEAFLGCPAIHPRCRWGAAPYRGRPKLLQLPLGFLYVHHTYVPAPPCTDFTRCAANMRSMQRYHQDTQGWGDIGYSFVVGSDGYVYEGRGWHWVGAHTLGHNSRGFGVAIVGNYTAALPTEAALRTVRDTLPSCAVRAGLLRPDYALLGHRQLVRTDCPGDALFDLLRTWPHFTATVKPRPARSVSKRSRREPPPRTLPATDLQ

SEQ ID NO: 1104 - protein, 114 aa, Homo sapiens
MDKSLLLELPILLCCFRALSGSLSMRNDAVIEIVQCRMCHLQFPGEKCSRGRGICTATTEEACMVGRMFKRDGNPWLTFMGCLKNCADVKGIRWSVYLVNFRCCRSHDLCNEDL

SEQ ID NO: 1105 - protein, 126 aa, Homo sapiens
MDKSLLLELPILLCCFRALSGSLSMRNDAVNEIVAVKNNFPVIEIVQCRMCHLQFPGEKCSRGRGICTATTEEACMVGRMFKRDGNPWLTFMGCLKNCADVKGIRWSVYLVNFRCCRSHDLCNEDL

SEQ ID NO: 1106 - protein, 111 aa, Homo sapiens
MDKSLLLELPILLCCFRALSGSLSMRNDAVIEIVQCRMCHLQFPGEKCSRGRGICTATTEEACMVGRMFKSKLWVGEKKNGQRTYTGTYQPQGKGEILLYFYYRQSHTWDG

SEQ ID NO: 1107 - protein, 638 aa, Homo sapiens
MKGGCVSQWKAAAGFLFCVMVFASAERPVFTNHFLVELHKGGEDKARQVAAEHGFGVRKLPFAEGLYHFYHNGLAKAKRRRSLHHKQQLERDPRVKMALQQEGFDRKKRGYRDINEIDINMNDPLFTKQWYLINTGQADGTPGLDLNVAEAWELGYTGKGVTIGIMDDGIDYLHPDLASNYNAEASYDFSSNDPYPYPRYTDDWFNSHGTRCAGEVSAAANNNICGVGVAYNSKVAGIRMLDQPFMTDIIEASSISHMPQLIDIYSASWGPTDNGKTVDGPRELTLQAMADGVNKGRGGKGSIYVWASGDGGSYDDCNCDGYASSMWTISINSAINDGRTALYDESCSSTLASTFSNGRKRNPEAGVATTDLYGNCTLRHSGTSAAAPEAAGVFALALEANLGLTWRDMQHLTVLTSKRNQLHDEVHQWRRNGVGLEFNHLFGYGVLDAGAMVKMAKDWKTVPERFHCVGGSVQDPEKIPSTGKLVLTLTTDACEGKENFVRYLEHVQAVITVNATRRGDLNINMTSPMGTKSILLSRRPRDDDSKVGFDKWPFMTTHTWGEDARGTWTLELGFVGSAPQKGVLKEWTLMLHGTQSAPYIDQVVRDYQSKLAMSKKEELEEELDEAVERSLKSILNKN

SEQ ID NO: 1108 - protein, 638 aa, Homo sapiens; identical to SEQ ID NO: 1107

SEQ ID NO: 1109 - protein, 2803 aa, Homo sapiens
MDGVAEFSEYVSETVDVPSPFDLLEPPTSGGFLKLSKPCCYIFPGGRGDSALFAVNGFNILVDGGSDRKSCFWKLVRHLDRIDSVLLTHIGADNLPGINGLLQRKVAELEEEQSQGSSSYSDWVKNLISPELGVVFFNVPEKLRLPDASRKAKRSIEEACLTLQHLNRLGIQAEPLYRVVSNTIEPLTLFHKMGVGRLDMYVLNPVKDSKEMQFLMQKWAGNSKAKTGIVLPNGKEAEISVPYLTSITALVVWLPANPTEKIVRVLFPGNAPQNKILEGLEKLRHLDFLRYPVATQKDLASGAVPTNLKPSKIKQRADSKESLKATTKTAVSKLAKREEVVEEGAKEARSELAKELAKTEKKAKESSEKPPEKPAKPERVKTESSEALKAEKRKLIKDKVGKKHLKEKISKLEEKKDKEKKEIKKERKELKKDEGRKEEKKDAKKEEKRKDTKPELKKISKPDLKPFTPEVRKTLYKAKVPGRVKIDRSRAIRGEKELSSEPQTPPAQKGTVPLPTISGHRELVLSSPEDLTQDFEEMKREERALLAEQRDTGLGDKPFPLDTAEEGPPSTAIQGTPPSVPGLGQEEHVMKEKELVPEVPEEQGSKDRGLDSGAETEEEKDTWEEKKQREAERLPDRTEAREESEPEVKEDVIEKAELEEMEEVHPSDEEEEDATKAEGFYQKHMQEPLKVTPRSREAFGGRELGLQGKAPEKETSLFLSSLTTPAGATEHVSYIQDETIPGYSETEQTISDEEIHDEPEERPAPPRFHTSTYDLPGPEGAGPFEASQPADSAVPATSGKVYGTPETELTYPTNIVAAPLAEEEHVSSATSITECDKLSSFATSVAEDQSVASLTAPQTEETGKSSLLLDTVTSIPSSRTEATQGLDYVPSAGTISPTSSLEEDKGFKSPPCEDFSVTGESEKRGEIIGKGLSGERAVEEEEEETANVEMSEKLCSQYGTPVFSAPGHALHPGEPALGEAEERCLSPDDSTVKMASPPPSGPPSATHTPFHQSPVEEKSEPQDFQEADSWGDTKRTPGVGKEDAAEETVKPGPEEGTLEKEEKVPPPRSPQAQEAPVNIDEGLTGCTIQLLPAQDKAIVFEIMEAGEPTGPILGAEALPGGLRTLPQEPGKPQKDEVLRYPDRSLSPEDAESLSVLSVPSPDTANQEPTPKSPCGLTEQYLHKDRWPEVSPEDTQSLSLSEESPSKETSLDVSSKQLSPESLGTLQFGELNLGKEEMGHLMQAEDTSHHTAPMSVPEPHAATASPPTDGTTRYSAQTDITDDSLDRKSPASSFSHSTPSGNGKYLPGAITSPDEHILTPDSSFSKSPESLPGPALEDIAIKWEDKVPGLKDRTSEQKKEPEPKDEVLQQKDKTLEHKEVVEPKDTAIYQKDEALHVKNEAVKQQDKALEQKGRDLEQKDTALEQKDKALEPKDKDLEEKDKALEQKDKIPEEKDKALEQKDTALEQKDKALEPKDKDLEQKDRVLEQKEKIPEEKDKALDQKVRSVEHKAPEDTVAEMKDRDLEQTDKAPEQKHQAQEQKDKVSEKKDQALEQKYWALGQKDEALEQNIQALEENHQTQEQESLVQEDKTRKPKMLEEKSPEKVKAMEEKLEALLEKTKALGLEESLVQEGRAREQEEKYWRGQDVVQEWQETSPTREEPAGEQKELAPAWEDTSPEQDNRYWRGREDVALEQDTYWRELSCERKVWFPHELDGQGARPHYTEERESTFLDEGPDDEQEVPLREHATRSPWASDFKDFQESSPQKGLEVERWLAESPVGLPPEEEDKLTRSPFEIISPPASPPEMVGQRVPSAPGQESPIPDPKLMPHMKNEPTTPSWLADIPPWVPKDRPLPPAPLSPAPGPPTPAPESHTPAPFSWGTAEYDSVVAAVQEGAAELEGGPYSPLGKDYRKAEGEREEEGRAEAPDKSSHSSKVPEASKSHATTEPEQTEPEQREPTPYPDERSFQYADIYEQMMLTGLGPACPTREPPLGAAGDWPPCLSTKEAAAGRNTSAEKELSSPISPKSLQSDTPTFSYAALAGPTVPPRPEPGPSMEPSLTPPAVPPRAPILSKGPSPPLNGNILSCSPDRRSPSPKESGRSHWDDSTSDSELEKGAREQPEKEAQSPSPPHPIPMGSPTLWPETEAHVSPPLDSHLGPARPSLDFPASAFGFSSLQPAPPQLPSPAEPRSAPCGSLAFSGDRALALAPGPPTRTRHDEYLEVTKAPSLDSSLPQLPSPSSPGAPLLSNLPRPASPALSEGSSSEATTPVISSVAERFSPSLEAAEQESGELDPGMEPAAHSLWDLTPLSPAPPASLDLALAPAPSLPGDMGDGILPCHLECSEAATEKPSPFQVPSEDCAANGPTETSPNPPGPAPAKAENEEAAACPAWERGAWPEGAERSSRPDTLLSPEQPVCPAGGSGGPPSSASPEVEAGPQGCATEPRPHRGELSPSFLNPPLPPSIDDRDLSTEEVRLVGRGGRRRVGGPGTTGGPCPVTDETPPTSASDSGSSQSDSDVPPETEECPSITAEAALDSDEDGDFLPVDKAGGVSGTHHPRPGHDPPPLPQPDPRPSPPRPDVCMADPEGLSSESGRVERLREKEKVQGRVGRRAPGKAKPASPARRLDLRGKRSPTPGKGPADRASRAPPRPRSTTSQVTPAEEKDGHSPMSKGLVNGLKAGPMALSSKGSSGAPVYVDLAYIPNHCSGKTADLDFFRRVRASYYVVSGNDPANGEPSRAVLDALLEGKAQWGENLQVTLIPTHDTEVTREWYQQTHEQQQQLNVLVLASSSTVVMQDESFPACKIEF

SEQ ID NO: 1110 - protein, 3027 aa, Homo sapiens
METTPGLGLRSPGAPLAQNPAELLCEAGAAVAAARWDLQKHSLLIVIGDIGTESQLRAVRAHLEQGILSWNIDLSSFDLNQQLRLFITRHLAHFSSEVKGQRTLCHQSEILETIILVNPSADSISSEVHHLLSSSSAYKLLILSGQSLEPGGDLILQSGTYSYENFAQVLHNPEISQLLSNRDPGIQAFLTVSCLGEGDWSHLGLSSSQETLHLRLNPEPTLPTMDGVAEFSEYVSETVDVPSPFDLLEPPTSGGFLKLSKPCCYIFPGGRGDSALFAVNGFNILVDGGSDRKSCFWKLVRHLDRIDSVLLTHIGADNLPGINGLLQRKVAELEEEQSQGSSSYSDWVKNLISPELGVVFFNVPEKLRLPDASRKAKRSIEEACLTLQHLNRLGIQAEPLYRVVSNTIEPLTLFHKMGVGRLDMYVLNPVKDSKEMQFLMQKWAGNSKAKTGIVLPNGKEAEISVPYLTSITALVVWLPANPTEKIVRVLFPGNAPQNKILEGLEKLRHLDFLRYPVATQKDLASGAVPTNLKPSKIKQRADSKESLKATTKTAVSKLAKREEVVEEGAKEARSELAKELAKTEKKAKESSEKPPEKPAKPERVKTESSEALKAEKRKLIKDKVGKKHLKEKISKLEEKKDKEKKEIKKERKELKKDEGRKEEKKDAKKEEKRKDTKPELKKISKPDLKPFTPEVRKTLYKAKVPGRVKIDRSRAIRGEKELSSEPQTPPAQKGTVPLPTISGHRELVLSSPEDLTQDFEEMKREERALLAEQRDTGLGDKPFPLDTAEEGPPSTAIQGTPPSVPGLGQEEHVMKEKELVPEVPEEQGSKDRGLDSGAETEEEKDTWEEKKQREAERLPDRTEAREESEPEVKEDVIEKAELEEMEEVHPSDEEEEDATKAEGFYQKHMQEPLKVTPRSREAFGGRELGLQGKAPEKETSLFLSSLTTPAGATEHVSYIQDETIPGYSETEQTISDEEIHDEPEERPAPPRFHTSTYDLPGPEGAGPFEASQPADSAVPATSGKVYGTPETELTYPTNIVAAPLAEEEHVSSATSITECDKLSSFATSVAEDQSVASLTAPQTEETGKSSLLLDTVTSIPSSRTEATQGLDYVPSAGTISPTSSLEEDKGFKSPPCEDFSVTGESEKRGEIIGKGLSGERAVEEEEEETANVEMSEKLCSQYGTPVFSAPGHALHPGEPALGEAEERCLSPDDSTVKMASPPPSGPPSATHTPFHQSPVEEKSEPQDFQEADSWGDTKRTPGVGKEDAAEETVKPGPEEGTLEKEEKVPPPRSPQAQEAPVNIDEGLTGCTIQLLPAQDKAIVFEIMEAGEPTGPILGAEALPGGLRTLPQEPGKPQKDEVLRYPDRSLSPEDAESLSVLSVPSPDTANQEPTPKSPCGLTEQYLHKDRWPEVSPEDTQSLSLSEESPSKETSLDVSSKQLSPESLGTLQFGELNLGKEEMGHLMQAEDTSHHTAPMSVPEPHAATASPPTDGTTRYSAQTDITDDSLDRKSPASSFSHSTPSGNGKYLPGAITSPDEHILTPDSSFSKSPESLPGPALEDIAIKWEDKVPGLKDRTSEQKKEPEPKDEVLQQKDKTLEHKEVVEPKDTAIYQKDEALHVKNEAVKQQDKALEQKGRDLEQKDTALEQKDKALEPKDKDLEEKDKALEQKDKIPEEKDKALEQKDTALEQKDKALEPKDKDLEQKDRVLEQKEKIPEEKDKALDQKVRSVEHKAPEDTVAEMKDRDLEQTDKAPEQKHQAQEQKDKVSEKKDQALEQKYWALGQKDEALEQNIQALEENHQTQEQESLVQEDKTRKPKMLEEKSPEKVKAMEEKLEALLEKTKALGLEESLVQEGRAREQEEKYWRGQDVVQEWQETSPTREEPAGEQKELAPAWEDTSPEQDNRYWRGREDVALEQDTYWRELSCERKVWFPHELDGQGARPHYTEERESTFLDEGPDDEQEVPLREHATRSPWASDFKDFQESSPQKGLEVERWLAESPVGLPPEEEDKLTRSPFEIISPPASPPEMVGQRVPSAPGQESPIPDPKLMPHMKNEPTTPSWLADIPPWVPKDRPLPPAPLSPAPGPPTPAPESHTPAPFSWGTAEYDSVVAAVQEGAAELEGGPYSPLGKDYRKAEGEREEEGRAEAPDKSSHSSKVPEASKSHATTEPEQTEPEQREPTPYPDERSFQYADIYEQMMLTGLGPACPTREPPLGAAGDWPPCLSTKEAAAGRNTSAEKELSSPISPKSLQSDTPTFSYAALAGPTVPPRPEPGPSMEPSLTPPAVPPRAPILSKGPSPPLNGNILSCSPDRRSPSPKESGRSHWDDSTSDSELEKGAREQPEKEAQSPSPPHPIPMGSPTLWPETEAHVSPPLDSHLGPARPSLDFPASAFGFSSLQPAPPQLPSPAEPRSAPCGSLAFSGDRALALAPGPPTRTRHDEYLEVTKAPSLDSSLPQLPSPSSPGAPLLSNLPRPASPALSEGSSSEATTPVISSVAERFSPSLEAAEQESGELDPGMEPAAHSLWDLTPLSPAPPASLDLALAPAPSLPGDMGDGILPCHLECSEAATEKPSPFQVPSEDCAANGPTETSPNPPGPAPAKAENEEAAACPAWERGAWPEGAERSSRPDTLLSPEQPVCPAGGSGGPPSSASPEVEAGPQGCATEPRPHRGELSPSFLNPPLPPSIDDRDLSTEEVRLVGRGGRRRVGGPGTTGGPCPVTDETPPTSASDSGSSQSDSDVPPETEECPSITAEAALDSDEDGDFLPVDKAGGVSGTHHPRPGHDPPPLPQPDPRPSPPRPDVCMADPEGLSSESGRVERLREKEKVQGRVGRRAPGKAKPASPARRLDLRGKRSPTPGKGPADRASRAPPRPRSTTSQVTPAEEKDGHSPMSKGLVNGLKAGPMALSSKGSSGAPVYVDLAYIPNHCSGKTADLDFFRRVRASYYVVSGNDPANGEPSRAVLDALLEGKAQWGENLQVTLIPTHDTEVTREWYQQTHEQQQQLNVLVLASSSTVVMQDESFPACKIEF

SEQ ID NO: 1111 - protein, 2984 aa, Homo sapiens [sequence omitted]

SEQ ID NO: 1112 - protein, 2803 aa, Homo sapiens; identical to SEQ ID NO: 1109

SEQ ID NO: 1113 - protein, 1972 aa, Homo sapiens
MDPTGSQLDSDFSQQDTPCLIIEDSQPESQVLEDDSGSHFSMLSRHLPNLQTHKENPVLDVVSNPEQTAGEERGDGNSGFNEHLKENKVADPVDSSNLDTCGSISQVIEQLPQPNRTSSVLGMSVESAPAVEEEKGEELEQKEKEKEEDTSGNTTHSLGAEDTASSQLGFGVLELSQSQDVEENTVPYEVDKEQLQSVTTNSGYTRLSDVDANTAIKHEEQSNEDIPIAEQSSKDIPVTAQPSKDVHVVKEQNPPPARSEDMPFSPKASVAAMEAKEQLSAQELMESGLQIQKSPEPEVLSTQEDLFDQSNKTVSSDGCSTPSREEGGCSLASTPATTLHLLQLSGQRSLVQDSLSTNSSDLVAPSPDAFRSTPFIVPSSPTEQEGRQDKPMDTSVLSEEGGEPFQKKLQSGEPVELENPPLLPESTVSPQASTPISQSTPVFPPGSLPIPSQPQFSHDIFIPSPSLEEQSNDGKKDGDMHSSSLTVECSKTSEIEPKNSPEDLGLSLTGDSCKLMLSTSEYSQSPKMESLSSHRIDEDGENTQIEDTEPMSPVLNSKFVPAENDSILMNPAQDGEVQLSQNDDKTKGDDTDTRDDISILATGCKGREETVAEDVCIDLTCDSGSQAVPSPATRSEALSSVLDQEEAMEIKEHHPEEGSSGSEVEEIPETPCESQGEELKEENMESVPLHLSLTETQSQGLCLQKEMPKKECSEAMEVETSVISIDSPQKLAILDQELEHKEQEAWEEATSEDSSVVIVDVKEPSPRVDVSCEPLEGVEKCSDSQSWEDIAPEIEPCAENRLDTKEEKSVEYEGDLKSGTAETEPVEQDSSQPSLPLVRADDPLRLDQELQQPQTQEKTSNSLTEDSKMANAKQLSSDAEAQKLGKPSAHASQSFCESSSETPFHFTLPKEGDIIPPLTGATPPLIGHLKLEPKRHSTPIGISNYPESTIATSDVMSESMVETHDPILGSGKGDSGAAPDVDDKLCLRMKLVSPETEASEESLQFNLEKPATGERKNGSTAVAESVASPQKTMSVLSCICEARQENEARSEDPPTTPIRGNLLHFPSSQGEEEKEKLEGDHTIRQSQQPMKPISPVKDPVSPASQKMVIQGPSSPQGEAMVTDVLEDQKEGRSTNKENPSKALIERPSQNNIGIQTMECSLRVPETVSAATQTIKNVCEQGTSTVDQNFGKQDATVQTERGSGEKPVSAPGDDTESLHSQGEEEFDMPQPPHGHVLHRHMRTIREVRTLVTRVITDVYYVDGTEVERKVTEETEEPIVECQECETEVSPSQTGGSSGDLGDISSFSSKASSLHRTSSGTSLSAMHSSGSSGKGAGPLRGKTSGTEPADFALPSSRGGPGKLSPRKGVSQTGTPVCEEDGDAGLGIRQGGKAPVTPRGRGRRGRPPSRTTGTRETAVPGPLGIEDISPNLSPDDKSFSRVVPRVPDSTRRTDVGAGALRRSDSPEIPFQAAAGPSDGLDASSPGNSFVGLRVVAKWSSNGYFYSGKITRDVGAGKYKLLFDDGYECDVLGKDILLCDPIPLDTEVTALSEDEYFSAGVVKGHRKESGELYYSIEKEGQRKWYKRMAVILSLEQGNRLREQYGLGPYEAVTPLTKAADISLDNLVEGKRKRRSNVSSPATPTASSSSSTTPTRKITESPRASMGVLSGKRKLITSEEERSPAKRGRKSATVKPGAVGAGEFVSPCESGDNTGEPSALEEQRGPLPLNKTLFLGYAFLLTMATTSDKLASRSKLPDGPTGSSEEEEEFLEIPPFNKQYTESQLRAGAGYILEDFNEAQCNTAYQCLLIADQHCRTRKYFLCLASGIPCVSHVWVHDSCHANQLQNYRNYLLPAGYSLEEQRILDWQPRENPFQNLKVLLVSDQQQNFLELWSEILMTGGAASVKQHHSSAHNKDIALGVFDVVVTDPSCPASVLKCAEALQLPVVSQEWVIQCLIVGERIGFKQHPKYKHDYVSH

SEQ ID NO: 1114 - protein, 385 aa, Homo sapiens
MVPTIYPLETLHNALSLRQVSEFLSRVCQRHTDAQAQASAALFDSMHSSQASDNPFSPPRTLHSPPLQLQQRSEKPPWLETRFCHVGQAGLELLTSSDLPASASQSAGITGVSHRTQPDSSGPSSTVSSAGPSSPTTVDGNSQFGFSDQPSLNSHVAEEHQGLGLLQETPGSGAQELSIEGEQELFEPNQSPQVPPMETSQPYEEVSQPCQEVPDISQPCQDISEALSQPCQKVPDISQQCQENHDNGNHTCQEVPHISQPCQKSSQLCQKVSEEVCQLCLENSEEVSQPCQGVSVEVGKLVHKFHVGVGSLVQETLVEVGSPAEEIPEEVIQPYQEFSVEVGRLAQETSAINLLSQGIPEIDKPSQEFPEEIDLQAQEVPEEIN

SEQ ID NO: 1115 - protein, 199 aa, Homo sapiens
MANRGPAYGLSREVQQKIEKQYDADLEQILIQWITTQCRKDVGRPQPGRENFQNWLKDGTVLCELINALYPEGQAPVKKIQASTMAFKQMEQISQFLQAAERYGINTTDIFQTVDLWEGKNMACVQRTLMNLGGLAVARDDGLFSGDPNWFPKKSKENPRNFSDNQLQEGKNVIGLQMGTNRGASQAGMTGYGMPRQIL

SEQ ID NO: 1116 - protein, 220 aa, Homo sapiens
MSAFSLALALVSSPQPPPPIGMANRGPAYGLSREVQQKIEKQYDADLEQILIQWITTQCRKDVGRPQPGRENFQNWLKDGTVLCELINALYPEGQAPVKKIQASTMAFKQMEQISQFLQAAERYGINTTDIFQTVDLWEGKNMACVQRTLMNLGGLAVARDDGLFSGDPNWFPKKSKENPRNFSDNQLQEGKNVIGLQMGTNRGASQAGMTGYGMPRQIL

SEQ ID NO: 1117 - protein, 179 aa, Homo sapiens
MANRGPAYGLSREVQQKIEKQYDADLEQILIQWITTQCRKDVGRPQPGRENFQNWLKDGTVLCELINALYPEGQAPVKKIQASTMAFKQMEQISQFLQAAERYGINTTDIFQTVDLWEGGTGRGAGSCHPGGQRLGWALLTRQKGLFSGSLQRKRGVFVFHGALGHIGGWNGEGYGNEQ

SEQ ID NO: 1118 - protein, 1179 aa, Homo sapiens
MVWCLGLAVLSLVISQGADGRGKPEVVSVVGRAGESVVLGCDLLPPAGRPPLHVIEWLRFGFLLPIFIQFGLYSPRIDPDYVGRVRLQKGASLQIEGLRVEDQGWYECRVFFLDQHIPEDDFANGSWVHLTVNSPPQFQETPPAVLEVQELEPVTLRCVARGSPLPHVTWKLRGKDLGQGQGQVQVQNGTLRIRRVERGSSGVYTCQASSTEGSATHATQLLVLGPPVIVVPPKNSTVNASQDVSLACHAEAYPANLTYSWFQDNINVFHISRLQPRVRILVDGSLRLLATQPDDAGCYTCVPSNGLLHPPSASAYLTVLYPAQVTAMPPETPLPIGMPGVIRCPVRANPPLLFVSWTKDGKALQLDKFPGWSQGTEGSLIIALGNEDALGEYSCTPYNSLGTAGPSPVTRVLLKAPPAFIERPKEEYFQEVGRELLIPCSAQGDPPPVVSWTKVGRGLQGQAQVDSNSSLILRPLTKEAHGHWECSASNAVARVATSTNVYVLGTSPHVVTNVSVVALPKGANVSWEPGFDGGYLQRFSVWYTPLAKRPDRMHHDWVSLAVPVGAAHLLVPGLQPHTQYQFSVLAQNKLGSGPFSEIVLSAPEGLPTTPAAPGLPPTEIPPPLSPPRGLVAVRTPRGVLLHWDPPELVPKRLDGYVLEGRQGSQGWEVLDPAVAGTETELLVPGLIKDVLYEFRLVAFAGSFVSDPSNTANVSTSGLEVYPSRTQLPGLLPQPVLAGVVGGVCFLGVAVLVSILAGCLLNRRRAARRRRKRLRQDPPLIFSPTGKSAAPSALGSGSPDSVAKLKLQGSPVPSLRQSLLWGDPAGTPSPHPDPPSSRGPLPLEPICRGPDGRFVMGPTVAAPQERSGREQAEPRTPAQRLARSFDCSSSSPSGAPQPLCIEDISPVAPPPAAPPSPLPGPGPLLQYLSLPFFREMNVDGDWPPLEEPSPAAPPDYMDTRRCPTSSFLRSPETPPVSPRESLPGAVVGAGATAEPPYTALADWTLRERLLPGLLPAAPRGSLTSQSSGRGSASFLRPPSTAPSAGGSYLSPAPGDTSSWASGPERWPRREHVVTVSKRRNTSVDENYEWDSEFPGDMELLETLHLGLASSRLRPEAEPELGVKTPEEGCLLNTAHVTGPEARCAALREEFLAFRRRRDATRARLPAYRQPVPHPEQATLL

SEQ ID NO: 1119 - protein, 526 aa, Homo sapiens [sequence omitted]

SEQ ID NO: 1120 - protein, 822 aa, Homo sapiens
MSGEAWQLQLGAHRRLPRLSEAGAAAMLRGGRRGQLGWHSWAAGPGSLLAWLILASAGAAPCPDACCPHGSSGLRCTRDGALDSLHHLPGAENLTELYIENQQHLQHLELRDLRGLGELRNLTIVKSGLRFVAPDAFHFTPRLSRLNLSFNALESLSWKTVQGLSLQELVLSGNPLHCSCALRWLQRWEEEGLGGVPEQKLQCHGQGPLAHMPNASCGVPTLKVQVPNASVDVGDDVLLRCQVEGRGLEQAGWILTELEQSATVMKSGGLPSLGLTLANVTSDLNRKNVTCWAENDVGRAEVSVQVNVSFPASVQLHTAVEMHHWCIPFSVDGQPAPSLRWLFNGSVLNETSFIFTEFLEPAANETVRHGCLRLNQPTHVNNGNYTLLAANPFGQASASIMAAFMDNPFEFNPEDPIPVSFSPVDTNSTSGDPVEKKDETPFGVSVAVGLAVFACLFLSTLLLVLNKCGRRNKFGINRPAVLAPEDGLAMSLHFMTLGGSSLSPTEGKGSGLQGHIIENPQYFSDACVHHIKRRDIVLKWELGEGAFGKVFLAECHNLLPEQDKMLVAVKALKEASESARQDFQREAELLTMLQHQHIVRFFGVCTEGRPLLMVFEYMRHGDLNRFLRSHGPDAKLLAGGEDVAPGPLGLGQLLAVASQVAAGMVYLAGLHFVHRDLATRNCLVGQGLVVKIGDFGMSRDIYSTDYYRVGGRTMLPIRWMPPESILYRKFTTESDVWSFGVVLWEIFTYGKQPWYQLSNTEAIDCITQGRELERPRACPPEVYAIMRGCWQREPQQRHSIKDVHARLQALAQAPPVYLDVLG

SEQ ID NO: 1121 - protein, 1351 aa, Homo sapiens [sequence omitted]

SEQ ID NO: 1122 - protein, 1297 aa, Homo sapiens
MAVPSLWPWGACLPVIFLSLGFGLDTVEVCPSLDIRSEVAELRQLENCSVVEGHLQILLMFTATGEDFRGLSFPRLTQVTDYLLLFRVYGLESLRDLFPNLAVIRGTRLFLGYALVIFEMPHLRDVALPALGAVLRGAVRVEKNQELCHLSTIDWGLLQPAPGANHIVGNKLGEECADVCPGVLGAAGEPCAKTTFSGHTDYRCWTSSHCQRVCPCPHGMACTARGECCHTECLGGCSQPEDPRACVACRHLYFQGACLWACPPGTYQYESWRCVTAERCASLHSVPGRASTFGIHQGSCLAQCPSGFTRNSSSIFCHKCEGLCPKECKVGTKTIDSIQAAQDLVGCTHVEGSLILNLRQGYNLEPQLQHSLGLVETITGFLKIKHSFALVSLGFFKNLKLIRGDAMVDGNYTLYVLDNQNLQQLGSWVAAGLTIPVGKIYFAFNPRLCLEHIYRLEEVTGTRGRQNKAEINPRTNGDRAACQTRTLRFVSNVTEADRILLRWERYEPLEARDLLSFIVYYKESPFQNATEHVGPDACGTQSWNLLDVELPLSRTQEPGVTLASLKPWTQYAVFVRAITLTTEEDSPHQGAQSPIVYLRTLPAAPTVPQDVISTSNSSSHLLVRWKPPTQRNGNLTYYLVLWQRLAEDGDLYLNDYCHRGLRLPTSNNDPRFDGEDGDPEAEMESDCCPCQHPPPGQVLPPLEAQEASFQKKFENFLHNAITIPISPWKVTSINKSPQRDSGRHRRAAGPLRLGGNSSDFEIQEDKVPRERAVLSGLRHFTEYRIDIHACNHAAHTVGCSAATFVFARTMPHREADGIPGKVAWEASSKNSVLLRWLEPPDPNGLILKYEIKYRRLGEEATVLCVSRLRYAKFGGVHLALLPPGNYSARVRATSLAGNGSWTDSVAFYILGPEEEDAGGLHVLLTATPVGLTLLIVLAALGFFYGKKRNRTLYASVNPEYFSASDMYVPDEWEVPREQISIIRELGQGSFGMVYEGLARGLEAGEESTPVALKTVNELASPRECIEFLKEASVMKAFKCHHVVRLLGVVSQGQPTLVIMELMTRGDLKSHLRSLRPEAENNPGLPQPALGEMIQMAGEIADGMAYLAANKFVHRDLAARNCMVSQDFTVKIGDFGMTRDVYETDYYRKGGKGLLPVRWMAPESLKDGIFTTHSDVWSFGVVLWEIVTLAEQPYQGLSNEQVLKFVMDGGVLEELEGCPLQLQELMSRCWQPNPRLRPSFTHILDSIQEELRPSFRLLSFYYSPECRGARGSLPTTDAEPDSSPTPRDCSPQNGGPGH

SEQ ID NO: 1123 - protein, 1158 aa, Homo sapiens
MTHGEELGSDVHQDSIVLTYLEGLLMHQAAGGSGTAVDKKSAGHNEEDQNFNISGSAFPTCQSNGPVLNTHTYQGSGMLHLKKARLLQSSEDWNAAKRKRLSDSIMNLNVKKEALLAGMVDSVPKGKQDSTLLASLLQSFSSRLQTVALSQQIRQSLKEQGYALSHDSLKVEKDLRCYGVASSHLKTLLKKSKVKDQKPDTNLPDVTKNLIRDRFAESPHHVGQSGTKVMSEPLSCAARLQAVASMVEKRASPATSPKPSVACSQLALLLSSEAHLQQYSREHALKTQNANQAASERLAAMARLQENGQKDVGSYQLPKGMSSHLNGQARTSSSKLMASKSSATVFQNPMGIIPSSPKNAGYKNSLERNNIKQAANNSLLLHLLKSQTIPKPMNGHSHSERGSIFEESSTPTTIDEYSDNNPSFTDDSSGDESSYSNCVPIDLSCKHRTEKSESDQPVSLDNFTQSLLNTWDPKVPDVDIKEDQDTSKNSKLNSHQKVTLLQLLLGHKNEENVEKNTSPQGVHNDVSKFNTQNYARTSVIESPSTNRTTPVSTPPLLTSSKAGSPINLSQHSLVIKWNSPPYVCSTQSEKLTNTASNHSMDLTKSKDPPGEKPAQNEGAQNSATFSASKLLQNLAQCGMQSSMSVEEQRPSKQLLTGNTDKPIGMIDRLNSPLLSNKTNAVEENKAFSSQPTGPEPGLSGSEIENLLERRTVLQLLLGNPNKGKSEKKEKTPLRDESTQEHSERALSEQILMVKIKSEPCDDLQIPNTNVHLSHDAKSAPFLGMAPAVQRSAPALPVSEDFKSEPVSPQDFSFSKNGLLSRLLRQNQDSYLADDSDRSHRNNEMALLESKNLCMVPKKRKLYTEPLENPFKKMKNNIVDAANNHSAPEVLYGSLLNQEELKFSRNDLEFKYPAGHGSASESEHRSWARESKSFNVLKQLLLSENCVRDLSPHRSNSVADSKKKGHKNNVTNSKPEFSISSLNGLMYSSTQPSSCMDNRTFSYPGVVKTPVSPTFPEHLGCAGSRPESGLLNGCSMPSEKGPIKWVITDAEKNEYEKDSPRLTKTNPILYYMLQKGGNSVTSRETQDKDIWREASSAESVSQVTAKEELLPTAETKASFFNLRSPYNSHMGNNASRPHSANGEVYGLLGSVLTIKKESE

SEQ ID NO: 1124 - protein, 288 aa, Homo sapiens
MAATFFGEVVKAPCRAGTEDEEEEEEGRRETPEDREVRLQLARKREVRLLRRQTKTSLEVSLLEKYPCSKFIIAIGNNAVAFLSSFVMNSGVWEEVGCAKLWNEWCRTTDTTHLSSTEAFCVFYHLKSNPSVFLCQCSCYVAEDQQYQWLEKVFGSCPRKNMQITILTCRHVTDYKTSESTGSLPSPFLRALKTQNFKDSACCPLLEQPNIVHDLPAAVLSYCQVWKIPAILYLCYTDVMKLDLITVEAFKPILSTRSLKGLVKNIPQSTEILKKLMTTNEIQSNIYT

SEQ ID NO: 1125 - protein, 2157 aa, Homo sapiens
MSDRSGPTAKGKDGKKYSSLNLFDTYKGKSLEIQKPAVAPRHGLQSLGKVAIARRMPPPANLPSLKAENKGNDPNVSLVPKDGTGWASKQEQSDPKSSDASTAQPPESQPLPASQTPASNQPKRPPAAPENTPLVPSGVKSWAQASVTHGAHGDGGRASSLLSRFSREEFPTLQAAGDQDKAAKERESAEQSSGPGPSLRPQNSTTWRDGGGRGPDELEGPDSKLHHGHDPRGGLQPSGPPQFPPYRGMMPPFMYPPYLPFPPPYGPQGPYRYPTPDGPSRFPRVAGPRGSGPPMRLVEPVGRPSILKEDNLKEFDQLDQENDDGWAGAHEEVDYTEKLKFSDEEDGRDSDEEGAEGHRDSQSASGEERPPEADGKKGNSPNSEPPTPKTAWAETSRPPETEPGPPAPKPPLPPPHRGPAGNWGPPGDYPDRGGPPCKPPAPEDEDEAWRQRRKQSSSEISLAVERARRRREEEERRMQEERRAACAEKLKRLDEKFGAPDKRLKAEPAAPPAAPSTPAPPPAVPKELPAPPAPPPASAPTPEKEPEEPAQAPPAQSTPTPGVAAAPTLVSGGGSTSSTSSGSFEASPVEPQLPSKEGPEPPEEVPPPTTPPVPKVEPKGDGIGPTRQPPSQGLGYPKYQKSLPPRFQRQQQEQLLKQQQQHQWQQHQQGSAPPTPVPPSPPQPVTLGAVPAPQAPPPPPKALYPGALGRPPPMPPMNFDPRWMMIPPYVDPRLLQGRPPLDFYPPGVHPSGLVPRERSDSGGSSSEPFDRHAPAMLRERGTPPVDPKLAWVGDVFTATPAEPRPLTSPLRQAADEDDKGMRSETPPVPPPPPYLASYPGFPENGAPGPPISRFPLEEPGPRPLPWPPGSDEVAKIQTPPPKKEPPKEETAQLTGPEAGRKPARGVGSGGQGPPPPRRESRTETRWGPRPGSSRRGIPPEEPGAPPRRAGPIKKPPPPTKVEELPPKPLEQGDETPKPPKPDPLKITKGKLGGPKETPPNGNLSPAPRLRRDYSYERVGPTSCRGRGRGEYFARGRGFRGTYGGRGRGARSREFRSYREFRGDDGRGGGTGGPNHPPAPRGRTASETRSEGSEYEEIPKRRRQRGSETGSETHESDLAPSDKEAPTPKEGTLTQVPLAPPPPGAPPSPAPARFTARGGRVFTPRGVPSRRGRGGGRPPPQVCPGWSPPAKSLAPKKPPTGPLPPSKEPLKEKLIPGPLSPVARGGSNGGSNVGMEDGERPRRRRHGRAQQQDKPPRFRRLKQERENAARGSEGKPSLTLPASAPGPEEALTTVTVAPAPRRAAAKSPDLSNQNSDQANEEWETASESSDFTSERRGDKEAPPPVLLTPKAVGTPGGGGGGAVPGISAMSRGDLSQRAKDLSKRSFSSQRPGMERQNRRPGPGGKAGSSGSSSGGGGGGPGGRTGPGRGDKRSWPSPKNRSRPPEERPPGLPLPPPPPSSSAVFRLDQVIHSNPAGIQQALAQLSSRQGSVTAPGGHPRHKPGPPQAPQGPSPRPPTRYEPQRVNSGLSSDPHFEEPGPMVRGVGGTPRDSAGVSPFPPKRRERPPRKPELLQEESLPPPHSSGFLGSKPEGPGPQAESRDTGTEALTPHIWNRLHTATSRKSYRPSSMEPWMEPLSPFEDVAGTEMSQSDSGVDLSGDSQVSSGPCSQRSSPDGGLKGAAEGPPKRPGGSSPLNAVPCEGPPGSEPPRRPPPAPHDGDRKELPREQPLPPGPIGTERSQRTDRGTEPGPIRPSHRPGPPVQFGTSDKDSDLRLVVGDSLKAEKELTASVTEAIPVSRDWELLPSAAASAEPQSKNLDSGHCVPEPSSSGQRLYPEVFYGSAGPSSSQISGGAMDSQLHPNSGGFRPGTPSLHPYRSQPLYLPPGPAPPSALLSGVALKGQFLDFSTMQATELGKLPAGGVLYPPPSFLYSPAFCPSPLPDTSLLQVRQDLPSPSDFYSTPLQPGGQSGFLPSGAPAQQMLLPMVDSQLPVVNFGSLPPAPPPAPPPLSLLPVGPALQPPSLAVRPPPAPATRVLPSPARPFPASLGRAELHPVELKPFQDYQKLSSNLGGPGSSRTPPTGRSFSGLNSRLKATPSTYSGVFRTQRVDLYQQASPPDALRWIPKPWERTGPPPREGPSRRAEEPGSRGDKEPGLPPPR

SEQ ID NO: 1126 - protein, 580 aa, Homo sapiens
MSDRSGPTAKGKDGKKYSSLNLFDTYKGKSLEIQKPAVAPRHGLQSLGKVAIARRMPPPANLPSLKAENKGNDPNVSLVPKDGTGWASKQEQSDPKSSDASTAQPPESQPLPASQTPASNQPKRPPAAPENTPLVPSGVKSWAQASVTHGAHGDGGRASSLLSRFSREEFPTLQAAGDQDKAAKERESAEQSSGPGPSLRPQNSTTWRDGGGRGPDELEGPDSKLHHGHDPRGGLQPSGPPQFPPYRGMMPPFMYPPYLPFPPPYGPQGPYRYPTPDGPSRFPRVAGPRGSGPPMRLVEPVGRPSILKEDNLKEFDQLDQENDDGWAGAHEEVDYTEKLKFSDEEDGRDSDEEGAEGHRDSQSASGEERPPEADGKKGNSPNSEPPTPKTAWAETSRPPETEPGPPAPKPPLPPPHRGPAGNWGPPGDYPDRGGPPCKPPAPEDEDEAWRQRRKQSSSEISLAVERARRRREEEERRMQEERRAACAEKLKRLDEKFGAPDKRLKAEPAAPPAAPSTPAPPPAVPKELPAPPAPPPASASQSAGITGVSHCTWPCCNPVFFSRDRVSPCWPGWSRTPDLR

SEQ ID NO: 1127 - protein, 2108 aa, Homo sapiens [sequence omitted]

SEQ ID NO: 1128 - protein, 1823 aa, Homo sapiens
MMMVGQGPMKRLTTLKSSSSAMRKMGETLMRRELRATGIPNQLLVRNGPLKQMAKRATPPTANRPLLRRPGQKPLGLQRQSRDLLPQSLPYPHLTGDRGGPPCKPPAPEDEDEAWRQRRKQSSSEISLAVERARRRREEEERRMQEERRAACAEKLKRLDEKFGAPDKRLKAEPAAPPAAPSTPAPPPAVPKELPAPPAPPPASAPTPEKEPEEPAQAPPAQSTPTPGVAAAPTLVSGGGSTSSTSSGSFEASPVEPQLPSKEGPEPPEEVPPPTTPPVPKVEPKGDGIGPTRQPPSQGLGYPKYQKSLPPRFQRQQQEQLLKQQQQHQWQQHQQGSAPPTPVPPSPPQPVTLGAVPAPQAPPPPPKALYPGALGRPPPMPPMNFDPRWMMIPPYVDPRLLQGRPPLDFYPPGVHPSGLVPRERSDSGGSSSEPFDRHAPAMLRERGTPPVDPKLAWVGDVFTATPAEPRPLTSPLRQAADEDDKGMRSETPPVPPPPPYLASYPGFPENGAPGPPISRFPLEEPGPRPLPWPPGSDEVAKIQTPPPKKEPPKEETAQLTGPEAGRKPARGVGSGGQGPPPPRRESRTETRWGPRPGSSRRGIPPEEPGAPPRRAGPIKKPPPPTKVEELPPKPLEQGDETPKPPKPDPLKITKGKLGGPKETPPNGNLSPAPRLRRDYSYERVGPTSCRGRGRGEYFARGRGFRGTYGGRGRGARSREFRSYREFRGDDGRGGGTGGPNHPPAPRGRTASETRSEGSEYEEIPKRRRQRGSETGSETHESDLAPSDKEAPTPKEGTLTQVPLAPPPPGAPPSPAPARFTARGGRVFTPRGVPSRRGRGGGRPPPQVCPGWSPPAKSLAPKKPPTGPLPPSKEPLKEKLIPGPLSPVARGGSNGGSNVGMEDGERPRRRRHGRAQQQDKPPRFRRLKQERENAARGSEGKPSLTLPASAPGPEEALTTVTVAPAPRRAAAKSPDLSNQNSDQANEEWETASESSDFTSERRGDKEAPPPVLLTPKAVGTPGGGGGGAVPGISAMSRGDLSQRAKDLSKRSFSSQRPGMERQNRRPGPGGKAGSSGSSSGGGGGGPGGRTGPGRGDKRSWPSPKNRSRPPEERPPGLPLPPPPPSSSAVFRLDQVIHSNPAGIQQALAQLSSRQGSVTAPGGHPRHKPGPPQAPQGPSPRPPTRYEPQRVNSGLSSDPHFEEPGPMVRGVGGTPRDSAGVSPFPPKRRERPPRKPELLQEESLPPPHSSGFLGSKPEGPGPQAESRDTGTEALTPHIWNRLHTATSRKSYRPSSMEPWMEPLSPFEDVAGTEMSQSDSGVDLSGDSQVSSGPCSQRSSPDGGLKGAAEGPPKRPGGSSPLNAVPCEGPPGSEPPRRPPPAPHDGDRKELPREQPLPPGPIGTERSQRTDRGTEPGPIRPSHRPGPPVQFGTSDKDSDLRLVVGDSLKAEKELTASVTEAIPVSRDWELLPSAAASAEPQSKNLDSGHCVPEPSSSGQRLYPEVFYGSAGPSSSQISGGAMDSQLHPNSGGFRPGTPSLHPYRSQPLYLPPGPAPPSALLSGVALKGQFLDFSTMQATELGKLPAGGVLYPPPSFLYSPAFCPSPLPDTSLLQVRQDLPSPSDFYSTPLQPGGQSGFLPSGAPAQQMLLPMVDSQLPVVNFGSLPPAPPPAPPPLSLLPVGPALQPPSLAVRPPPAPATRVLPSPARPFPASLGRAELHPVELKPFQDYQKLSSNLGGPGSSRTPPTGRSFSGLNSRLKATPSTYSGVFRTQRVDLYQQASPPDALRWIPKPWERTGPPPREGPSRRAEEPGSRGDKEPGLPPPR

SEQ ID NO: 1129 - protein, 2102 aa, Homo sapiens [sequence omitted]

SEQ ID NO: 1130 - protein, 406 aa, Homo sapiens
MTYKLHKDFIIAVKSDDQNYRVEAVHALVHKLPEKNREMLDILIKHLVKVSLHSQQNLMTVSNLGVIFGPTLMRAQEETVAAMMNIKFQNIVVEILIEHYEKIFHTAPDPSIPLPQPQSRSGSRRTRAICLSTGSRKPRGRYTPCLAEPDSDSYSSSPDSTPMGSIESLSSHSSEQNSTTKSASCQPREKSGGIPWIATPSSSNGQKSLGLWTTSPESSSREDATKTDAESDCQSVASVTSPGDVSPPIDLVKKEPYGLSGLKRASASSLRSISAAEGNKSYSGSIQSLTSVGSKETPKASPNPDLPPKMCRRLRLDTASSNGYQRPGSVVAAKAQLFENVGSPKPVSSGRQAKAMYSCKAEHSHELSFPQGAIFSNVYPSVEPGWLKATYEGKTGLVPENYVVFL

SEQ ID NO: 1131 - protein, 1935 aa, Homo sapiens
MGDSEMAVFGAAAPYLRKSEKERLEAQTRPFDLKKDVFVPDDKQEFVKAKIVSREGGKVTAETEYGKTVTVKEDQVMQQNPPKFDKIEDMAMLTFLHEPAVLYNLKDRYGSWMIYTYSGLFCVTVNPYKWLPVYTPEVVAAYRGKKRSEAPPHIFSISDNAYQYMLTDRENQSILITGESGAGKTVNTKRVIQYFAVIAAIGDRSKKDQSPGKGTLEDQIIQANPALEAFGNAKTVRNDNSSRFGKFIRIHFGATGKLASADIETYLLEKSRVIFQLKAERDYHIFYQILSNKKPELLDMLLITNNPYDYAFISQGETTVASIDDAEELMATDNAFDVLGFTSEEKNSMYKLTGAIMHFGNMKFKLKQREEQAEPDGTEEADKSAYLMGLNSADLLKGLCHPRVKVGNEYVTKGQNVQQVIYATGALAKAVYERMFNWMVTRINATLETKQPRQYFIGVLDIAGFEIFDFNSFEQLCINFTNEKLQQFFNHHMFVLEQEEYKKEGIEWTFIDFGMDLQACIDLIEKPMGIMSILEEECMFPKATDMTFKAKLFDNHLGKSANFQKPRNIKGKPEAHFSLIHYAGIVDYNIIGWLQKNKDPLNETVVGLYQKSSLKLLSTLFANYAGADAPIEKGKGKAKKGSSFQTVSALHRENLNKLMTNLRSTHPHFVRCIIPNETKSPGVMDNPLVMHQLRCNGVLEGIRICRKGFPNRILYGDFRQRYRILNPAAIPEGQFIDSRKGAEKLLSSLDIDHNQYKFGHTKVFFKAGLLGLLEEMRDERLSRIITRIQAQSRGVLARMEYKKLLERRDSLLVIQWNIRAFMGVKNWPWMKLYFKIKPLLKSAEREKEMASMKEEFTRLKEALEKSEARRKELEEKMVSLLQEKNDLQLQVQAEQDNLADAEERCDQLIKNKIQLEAKVKEMNERLEDEEEMNAELTAKKRKLEDECSELKRDIDDLELTLAKVEKEKHATENKVKNLTEEMAGLDEIIAKLTKEKKALQEAHQQALDDLQAEEDKVNTLTKAKVKLEQQVDDLEGSLEQEKKVRMDLERAKRKLEGDLKLTQESIMDLENDKQQLDERLKKKDFELNALNARIEDEQALGSQLQKKLKELQARIEELEEELEAERTARAKVEKLRSDLSRELEEISERLEEAGGATSVQIEMNKKREAEFQKMRRDLEEATLQHEATAAALRKKHADSVAELGEQIDNLQRVKQKLEKEKSEFKLELDDVTSNMEQIIKAKANLEKMCRTLEDQMNEHRSKAEETQRSVNDLTSQRAKLQTENGELSRQLDEKEALISQLTRGKLTYTQQLEDLKRQLEEEVKAKNALAHALQSARHDCDLLREQYEEETEAKAELQRVLSKANSEVAQWRTKYETDAIQRTEELEEAKKKLAQRLQEAEEAVEAVNAKCSSLEKTKHRLQNEIEDLMVDVERSNAAAAALDKKQRNFDKILAEWKQKYEESQSELESSQKEARSLSTELFKLKNAYEESLEHLETFKRENKNLQEEISDLTEQLGSSGKTIHELEKVRKQLEAEKMELQSALEEAEASLEHEEGKILRAQLEFNQIKAEIERKLAEKDEEMEQAKRNHLRVVDSLQTSLDAETRSRNEALRVKKKMEGDLNEMEIQLSHANRMAAEAQKQVKSLQSLLKDTQIQLDDAVRANDDLKENIAIVERRNNLLQAELEELRAVVEQTERSRKLAEQELIETSERVQLLHSQNTSLINQKKKMDADLSQLQTEVEEAVQECRNAEEKAKKAITDAAMMAEELKKEQDTSAHLERMKKNMEQTIKDLQHRLDEAEQIALKGGKKQLQKLEARVRELENELEAEQKRNAESVKGMRKSERRIKELTYQTEEDRKNLLRLQDLVDKLQLKVKAYKRQAEEAEEQANTNLSKFRKVQHELDEAEERADIAESQVNKLRAKSRDIGTKGLNEE

SEQ ID NO: 1132 - protein, 951 aa, Homo sapiens [sequence omitted]

SEQ ID NO: 1133 - protein, 1945 aa, Homo sapiens
MGDSEMAVFGAAAPYLRKSEKERLEAQTRPFDLKKDVFVPDDKQEFVKAKIVSREGGKVTAETEYGKTVTVKEDQVMQQNPPKFDKIEDMAMLTFLHEPAVLYNLKDRYGSWMIYTYSGLFCVTVNPYKWLPVYTPEVVAAYRGKKRSEAPPHIFSISDNAYQYMLTDRENQSILITGESGAGKTVNTKRVIQYFAVIAAIGDRSKKDQSPGKGTLEDQIIQANPALEAFGNAKTVRNDNSSRFGKFIRIHFGATGKLASADIETYLLEKSRVIFQLKAERDYHIFYQILSNKKPELLDMLLITNNPYDYAFISQGETTVASIDDAEELMATDNAFDVLGFTSEEKNSMYKLTGAIMHFGNMKFKLKQREEQAEPDGTEEADKSAYLMGLNSADLLKGLCHPRVKVGNEYVTKGQNVQQVIYATGALAKAVYERMFNWMVTRINATLETKQPRQYFIGVLDIAGFEIFDFNSFEQLCINFTNEKLQQFFNHHMFVLEQEEYKKEGIEWTFIDFGMDLQACIDLIEKPMGIMSILEEECMFPKATDMTFKAKLFDNHLGKSANFQKPRNIKGKPEAHFSLIHYAGIVDYNIIGWLQKNKDPLNETVVGLYQKSSLKLLSTLFANYAGADAPIEKGKGKAKKGSSFQTVSALHRENLNKLMTNLRSTHPHFVRCIIPNETKSPGVMDNPLVMHQLRCNGVLEGIRICRKGFPNRILYGDFRQRYRILNPAAIPEGQFIDSRKGAEKLLSSLDIDHNQYKFGHTKVFFKAGLLGLLEEMRDERLSRIITRIQAQSRGVLARMEYKKLLERRDSLLVIQWNIRAFMGVKNWPWMKLYFKIKPLLKSAEREKEMASMKEEFTRLKEALEKSEARRKELEEKMVSLLQEKNDLQLQVQAEQDNLADAEERCDQLIKNKIQLEAKVKEMNERLEDEEEMNAELTAKKRKLEDECSELKRDIDDLELTLAKVEKEKHATENKVKNLTEEMAGLDEIIAKLTKEKKALQEAHQQALDDLQAEEDKVNTLTKAKVKLEQQVDDLEGSLEQEKKVRMDLERAKRKLEGDLKLTQESIMDLENDKQQLDERLKKKDFELNALNARIEDEQALGSQLQKKLKELQARIEELEEELEAERTARAKVEKLRSDLSRELEEISERLEEAGGATSVQIEMNKKREAEFQKMRRDLEEATLQHEATAAALRKKHADSVAELGEQIDNLQRVKQKLEKEKSEFKLELDDVTSNMEQIIKAKAANLEKMCRTLEDQMNEHRSKAEETQRSVNDLTSQRAKLQTENGELSRQLDEKEALISQLTRGKLTYTQQLEDLKRQLEEEVKAKNALAHALQSARHDCDLLREQYEEETEAKAELQRVLSKANSEVAQWRTKYETDAIQRTEELEEAKKKLAQRLQEAEEAVEAVNAKCSSLEKTKHRLQNEIEDLMVDVERSNAAAAALDKKQRNFDKILAEWKQKYEESQSELESSQKEARSLSTELFKLKNAYEESLEHLETFKRENKNLQEEISDLTEQLGSSGKTIHELEKVRKQLEAEKMELQSALEEAEASLEHEEGKILRAQLEFNQIKAEIERKLAEKDEEMEQAKRNHLRVVDSLQTSLDAETRSRNEALRVKKKMEGDLNEMEIQLSHANRMAAEAQKQVKSLQSLLKDTQIQLDDAVRANDDLKENIAIVERRNNLLQAELEELRAVVEQTERSRKLAEQELIETSERVQLLHSQNTSLINQKKKMDADLSQLQTEVEEAVQECRNAEEKAKKAITDAAMMAEELKKEQDTSAHLERMKKNMEQTIKDLQHRLDEAEQIALKGGKKQLQKLEARVRELENELEAEQKRNAESVKGMRKSERRIKELTYQTEEDRKNLLRLQDLVDKLQLKVKAYKRQAEEAEEQANTNLSKFRKVQHELDEAEERADIAESQVNKLRAKSRDIGTKRCGFTMLARLVLNS

SEQ ID NO: 1134 - protein, 156 aa, Homo sapiens
MLSARDRRDRHPEEGVVAELQGFAVDKAFLTSHKGILLETELALTLIIFICFTASISAYMAAALLEFFITLAFLFLYATQYYQRFDRINWPCLDFLRCVSAIIIFLVVSFAAVTSRDGAAIAAFVFGIILVSIFAYDAFKIYRTEMAPGASQGDQQ

SEQ ID NO: 1135 - protein, 107 aa, Homo sapiens
MKTLLFGVWTLLALILCPGVPEELFEVSIWPSQALVEFGQSLVVNCSTTCPDPGPSGIETFLKKTQVGKGPQWKEFLLEDVTENSILQCFFSCAGIQKDTSLGITVY

SEQ ID NO: 1136 - protein, 916 aa, Homo sapiens [sequence omitted]

SEQ ID NO: 1137 - protein, 1248 aa, Homo sapiens [sequence omitted]

SEQ ID NO: 1138 - protein, 159 aa, Homo sapiens
MEFDLNGNGDIGEKRVICGGRVVCRPKKTEVSPTCSIPHDLGGGPPTTVGGRRMGMRKWERRERVSPPSPHPHPLPPDIMSLKRMLEKLGVPKTHLELKKLIGEVSSGSGETFSYPDFLRMMLGKRSAILKMILMYEEKAREKEKPTGPPAKKAISELP

SEQ ID NO: 1139 - protein, 147 aa, Homo sapiens
MSQTRDLQGGKAFGLLKAQQEERLDEINKQFLDDPKYSSDEDLPSKLEGFKEKYMEFDLNGNGDIDIMSLKRMLEKLGVPKTHLELKKLIGEVSSGSGETFSYPDFLRMMLGKRSAILKMILMYEEKAREKEKPTGPPAKKAISELP

SEQ ID NO: 1140 - protein, 93 aa, Homo sapiens
MEFDLNGNGDIDIMSLKRMLEKLGVPKTHLELKKLIGEVSSGSGETFSYPDFLRMMLGKRSAILKMILMYEEKAREKEKPTGPPAKKAISELP

SEQ ID NO: 1141 - protein, 93 aa, Homo sapiens; identical to SEQ ID NO: 1140

SEQ ID NO: 1142 - protein, 132 aa, Homo sapiens
MEFDLNGNGDIGEKRVICGGRVVCRPKKTEVSPTCSIPHDLGGGPPTTVGGRRMGMRKWERRERVSPPSPHPHPLPPDIMSLKRMLEKLGVPKTHLELKKLIGEVSSGSGETFSYPDFLRMMLGKRSAILKM

SEQ ID NO: 1143 - protein, 132 aa, Homo sapiens
  misc_feature (132)..(132): Xaa can be any naturally occurring amino acid
MEFDLNGNGDIGEKRVICGGRVVCRPKKTEVSPTCSIPHDLGGGPPTTVGGRRMGMRKWERRERVSPPSPHPHPLPPDIMSLKRMLEKLGVPKTHLELKKLIGEVSSGSGETFSYPDFLRMMLGKRSAILKX

SEQ ID NO: 1144 - protein, 132 aa, Homo sapiens; identical to SEQ ID NO: 1143
  misc_feature (132)..(132): Xaa can be any naturally occurring amino acid

SEQ ID NO: 1145 - protein, 116 aa, Homo sapiens
MAAGSAPMQLHLRATIRMKDGLCVPRKWIYHLTEGSTDLRTEGRPDMKTELFSSSCPGGIMLNETGQGYQRFLLYNRSPHPPEKCVEEFKSLTSCLDSKAFLLTPRNQEACELSNN

SEQ ID NO: 1146 - protein, 197 aa, Homo sapiens
PNLPPTATSVSPIVFGDLEAILPAPPRSPSFTFVGHDEKVRSPKHSQRSTWASGTLSQGQLPPRRSWQLLTLWTTLSSIWLLALPRCSSTFVLPSACEWKDGLCVPRKWIYHLTEGSTDLRTEGRPDMKTELFSSSCPGGIMLNETGQGYQRFLLYNRSPHPPEKCVEEFKSLTSCLDSKAFLLTPRNQEACELSNN

SEQ ID NO: 1147 - protein, 188 aa, Homo sapiens
MFHQIWAALLYFYGIILNSIYQCPEHSQLTTLGVDGKEFPEVHLGQWYFIAGAAPTKEELATFDPVDNIVFNMAAGSAPMQLHLRATIRMKDGLCVPRKWIYHLTEGSTDLRTEGRPDMKTELFSSSCPGGIMLNETGQGYQRFLLYNRSPHPPEKCVEEFKSLTSCLDSKAFLLTPRNQEACELSNN

SEQ ID NO: 1148 - protein, 156 aa, Homo sapiens
MGRSSQRSTWASGTLSQGQLPPRRSWQLLTLWTTLSSIWLLALPRCSSTFVLPSACEWKDGLCVPRKWIYHLTEGSTDLRTEGRPDMKTELFSSSCPGGIMLNETGQGYQRFLLYNRSPHPPEKCVEEFKSLTSCLDSKAFLLTPRNQEACELSNN

SEQ ID NO: 1149 - protein, 146 aa, Homo sapiens
MVITIYYDVKVRFIVRGCGQYISYRCQEKRNTYFAEYWYQAQCCQYDYCNSWSSPQLQSSLPEPHDRPLALPLSDSQIQWFYQALNLSLPLPNFHAGTEPDGLDPMVTLSLNLGLSFAELRRMYLFLNSSGLLVLPQAGLLTPHPS

SEQ ID NO: 1150 - protein, 146 aa, Homo sapiens; identical to SEQ ID NO: 1149

SEQ ID NO: 1151 - protein, 356 aa, Homo sapiens
MSRPLLITFTPATDPSDLWKDGQQQPQPEKPESTLDGAAARAFYEALIGDESSAPDSQRSQTEPARERKRKKRRIMKAPAAEAVAEGASGRHGQGRSLEAEDKMTHRILRAAQEGDLPELRRLLEPHEAGGAGGNINARDAFWWTPLMCAARAGQGAAVSYLLGRGAAWVGVCELSGRDAAQLAEEAGFPEVARMVRESHGETRSPENRSPTPSLQYCENCDTHFQDSNHRTSTAHLLSLSQGPQPPNLPLGVPISSPGFKLLLRGGWEPGMGLGPRGEGRANPIPTVLKRDQEGLGYRSAPQPRVTHFPAWDTRAVAGRERPPRVATLSWREERRREEKDRAWERDLRTYMNLEF

SEQ ID NO: 1152 - protein, 356 aa, Homo sapiens; identical to SEQ ID NO: 1151

SEQ ID NO: 1153 - protein, 356 aa, Homo sapiens; identical to SEQ ID NO: 1151

SEQ ID NO: 1154 - protein, 356 aa, Homo sapiens; identical to SEQ ID NO: 1151

SEQ ID NO: 1155 - protein, 234 aa, Homo sapiens
MEKCKGTSRMAGTTSADVKMSSSEEVSWISWFCGLRGNEFFCEVDEDYIQDKFNLTGLNEQVPHYRQALDMILDLEPDEELEDNPNQSDLIEQAAEMLYGLIHARYILTNRGIAQMLEKYQQGDFGYCPRVYCENQPMLPIGLSDIPGEAMVKLYCPKCMDVYTPKSSRHHHTDGAYFGTGFPHMLFMVHPEYRPKRPANQFVPRLYGFKIHPMAYQLQLQAASNFKSPVKTIR

SEQ ID NO: 1156 - protein, 215 aa, Homo sapiens
MSSSEEVSWISWFCGLRGNEFFCEVDEDYIQDKFNLTGLNEQVPHYRQALDMILDLEPDEELEDNPNQSDLIEQAAEMLYGLIHARYILTNRGIAQMLEKYQQGDFGYCPRVYCENQPMLPIGLSDIPGEAMVKLYCPKCMDVYTPKSSRHHHTDGAYFGTGFPHMLFMVHPEYRPKRPANQFVPRLYGFKIHPMAYQLQLQAASNFKSPVKTIR

SEQ ID NO: 1157 - protein, 110 aa, Homo sapiens [sequence omitted]

SEQ ID NO: 1158 - protein, 125 aa, Homo sapiens [sequence omitted]

SEQ ID NO: 1159 - protein, 139 aa, Homo sapiens
AAAEHRRGRKKDEVREGAGFLEPQGSTELSKFVPVNWEPPQPLPFPKYLRCYRCLLETKELGCLLGSDICLTPAGSSCITLHKKNSSGSDVMVSDCRSKEQMSDCSNTRTSPVSGFWIFSQYCFLDFCNDPQNRGLYTP

SEQ ID NO: 1160 - protein, 148 aa, Homo sapiens
MQTFPVAGALDPAILDTSSPQALYTVLLIVLVMMSLVFGKFVPVNWEPPQPLPFPKYLRCYRCLLETKELGCLLGSDICLTPAGSSCITLHKKNSSGSDVMVSDCRSKEQMSDCSNTRTSPVSGFWIFSQYCFLDFCNDPQNRGLYTP

SEQ ID NO: 1161 - DNA, 201 bp, Homo sapiens
ccccaccttcatacctgctccaattcaggccaagacatcccctgtggatgaaaaggccctacaggaccagctggtgctagtcgctgcaaaacttgacaccraagacaagttgagggccgcaatggtcgggatgctggccaacttcttgggcttccgtatatatggcatgcacagtgagctatggggcgtggtccatggggc

SEQ ID NO: 1162 - DNA, 201 bp, Homo sapiens
cggctggatgcgcacaaggtcctgtctgccctgcaggctgtacagggcctgctagtggcccagggcagggctgatagccaggcccagctgctgctgtccayggtggtgggcgtgttcacagccccaggcctgcacctgaagcagccgtttgtgcagggcctggctctctatacccctgtggtcctcccacgctctctggac

SEQ ID NO: 1163 - DNA, 201 bp, Homo sapiens
gatggctcctgccggtgtgagcctgagggccaccatcctctgcctcctggcctgggctggcctggctgcaggtgaccgggtgtacatacaccccttccacytcgtcatccacaatgagagtacctgtgagcagctggcaaaggccaatgccgggaagcccaaagaccccaccttcatacctgctccaattcaggccaagac

SEQ ID NO: 1164 - DNA, 201 bp, Homo sapiens
ctcccacgctctctggacttcacagaactggatgttgctgctgagaagattgacaggttcatgcaggctgtgacaggatggaagactggctgctccctgaygggagccagtgtggacagcaccctggctttcaacacctacgtccacttccaagggaagatgaagggcttctccctgctggccgagccccaggagttctgg

SEQ ID NO: 1165 - DNA, 201 bp, Homo sapiens
gacctggacaaggtggagggtctcactttccagcaaaactccctcaactggatgaagaaactgtctccccggaccatccacctgaccatgccccaactggygctgcaaggatcttatgacctgcaggacctgctcgcccaggctgagctgcccgccattctgcacaccgagctgaacctgcaaaaattgagcaatgaccgc

SEQ ID NO: 1166 - DNA, 201 bp, Homo sapiens
tgaaaaggccctacaggaccagctggtgctagtcgctgcaaaacttgacaccgaagacaagttgagggccgcaatggtcgggatgctggccaacttcttgkgcttccgtatatatggcatgcacagtgagctatggggcgtggtccatggggccaccgtcctctccccaacggctgtctttggcaccctggcctctctcta

SEQ ID NO: 1167 - DNA, 201 bp, Homo sapiens
gctgagaagattgacaggttcatgcaggctgtgacaggatggaagactggctgctccctgatgggagccagtgtggacagcaccctggctttcaacacctrcgtccacttccaagggaagatgaagggcttctccctgctggccgagccccaggagttctgggtggacaacagcacctcagtgtctgttcccatgctctct

SEQ ID NO: 1168 - DNA, 201 bp, Homo sapiens
gtgttcacagccccaggcctgcacctgaagcagccgtttgtgcagggcctggctctctatacccctgtggtcctcccacgctctctggacttcacagaackggatgttgctgctgagaagattgacaggttcatgcaggctgtgacaggatggaagactggctgctccctgatgggagccagtgtggacagcaccctggct

SEQ ID NO: 1169 - DNA, 201 bp, Homo sapiens
accccaccttcatacctgctccaattcaggccaagacatcccctgtggatgaaaaggccctacaggaccagctggtgctagtcgctgcaaaacttgacacygaagacaagttgagggccgcaatggtcgggatgctggccaacttcttgggcttccgtatatatggcatgcacagtgagctatggggcgtggtccatgggg

SEQ ID NO: 1170 - DNA, 201 bp, Homo sapiens
gagggccaccatcctctgcctcctggcctgggctggcctggctgcaggtgaccgggtgtacatacaccccttccacctcgtcatccacaatgagagtaccygtgagcagctggcaaaggccaatgccgggaagcccaaagaccccaccttcatacctgctccaattcaggccaagacatcccctgtggatgaaaaggccct

SEQ ID NO: 1171 - DNA, 201 bp, Homo sapiens
ctgagcacaatcagctgcaggaggtggctgctcagctgaaagcctgtggggacaaaggaggagacccaggactcgctgtatccgagccccgagggtatgcrgaagcgagcaccccagtctgagatggctcctgccggtgtgagcctgagggccaccatcctctgcctcctggcctgggctggcctggctgcaggtgaccgg

SEQ ID NO: 1172 - DNA, 201 bp, Homo sapiens
gcaatggtcgggatgctggccaacttcttgggcttccgtatatatggcatgcacagtgagctatggggcgtggtccatggggccaccgtcctctccccaayggctgtctttggcaccctggcctctctctatctgggagccttggaccacacagctgacaggctacaggcaatcctgggtgttccttggaaggacaagaac

SEQ ID NO: 1173 - DNA, 124 bp, Homo sapiens
aaagaaaggcgatgctaagaaacrtgctgcaggggaggctggcacattctgctccttagctaaccgcacaggcccatgggtccacacacatcagaccatggctctctgtggtctatctttgcca

SEQ ID NO: 1174 - DNA, 201 bp, Homo sapiens
tcaaagcgccactgccctgcacttcctgggccgcgtggccaacccgctgagcacagcatgaggccagggccccagaacacagtgcctggcaaggcctctgyccctggcctttgaggcaaaggccagcagcagataacaaccccggacaaatcagcgatgtgtcacccccagtctcccaccttttcttctaatgagtcgact

SEQ ID NO: 1175 - DNA, 201 bp, Homo sapiens
gtgggcgtgttcacagccccaggcctgcacctgaagcagccgtttgtgcagggcctggctctctatacccctgtggtcctcccacgctctctggacttcayagaactggatgttgctgctgagaagattgacaggttcatgcaggctgtgacaggatggaagactggctgctccctgatgggagccagtgtggacagcacc

SEQ ID NO: 1176 - DNA, 201 bp, Homo sapiens
aaggccagcagcagataacaaccccggacaaatcagcgatgtgtcacccccagtctcccaccttttcttctaatgagtcgactttgagctggaaagcagcsgtttctccttggtctaagtgtgctgcatggagtgagcagtagaagcctgcagcggcacaaatgcacctcccagtttgctgggtttattttagagaatggg

SEQ ID NO: 1177 - DNA, 201 bp, Homo sapiens
cccctgtggatgaaaaggccctacaggaccagctggtgctagtcgctgcaaaacttgacaccgaagacaagttgagggccgcaatggtcgggatgctggcyaacttcttgggcttccgtatatatggcatgcacagtgagctatggggcgtggtccatggggccaccgtcctctccccaacggctgtctttggcaccctgg

SEQ ID NO: 1178 - DNA, 201 bp, Homo sapiens
agcagataacaaccccggacaaatcagcgatgtgtcacccccagtctcccaccttttcttctaatgagtcgactttgagctggaaagcagccgtttctccytggtctaagtgtgctgcatggagtgagcagtagaagcctgcagcggcacaaatgcacctcccagtttgctgggtttattttagagaatgggggtggggag

SEQ ID NO: 1179 - DNA, 201 bp, Homo sapiens
tctcactttccagcaaaactccctcaactggatgaagaaactgtctccccggaccatccacctgaccatgccccaactggtgctgcaaggatcttatgacmtgcaggacctgctcgcccaggctgagctgcccgccattctgcacaccgagctgaacctgcaaaaattgagcaatgaccgcatcagggtgggggaggtgct

SEQ ID NO: 1180 - DNA, 201 bp, Homo sapiens
acaatcagctgcaggaggtggctgctcagctgaaagcctgtggggacaaaggaggagacccaggactcgctgtatccgagccccgagggtatgcggaagcsagcaccccagtctgagatggctcctgccggtgtgagcctgagggccaccatcctctgcctcctggcctgggctggcctggctgcaggtgaccgggtgtac

SEQ ID NO: 1181 - DNA, 201 bp, Homo sapiens
gacaaatcagcgatgtgtcacccccagtctcccaccttttcttctaatgagtcgactttgagctggaaagcagccgtttctccttggtctaagtgtgctgyatggagtgagcagtagaagcctgcagcggcacaaatgcacctcccagtttgctgggtttattttagagaatgggggtggggaggcaagaaccagtgttta

SEQ ID NO: 1182 - DNA, 201 bp, Homo sapiens
gcgcctgcctgctgctgatccagcctcactatgcctctgacctggacaaggtggagggtctcactttccagcaaaactccctcaactggatgaagaaactrtctccccggaccatccacctgaccatgccccaactggtgctgcaaggatcttatgacctgcaggacctgctcgcccaggctgagctgcccgccattctgc

SEQ ID NO: 1183 - DNA, 201 bp, Homo sapiens
aatcagcgatgtgtcacccccagtctcccaccttttcttctaatgagtcgactttgagctggaaagcagccgtttctccttggtctaagtgtgctgcatgkagtgagcagtagaagcctgcagcggcacaaatgcacctcccagtttgctgggtttattttagagaatgggggtggggaggcaagaaccagtgtttagcgc

SEQ ID NO: 1184 - DNA, 201 bp, Homo sapiens
atgccgggaagcccaaagaccccaccttcatacctgctccaattcaggccaagacatcccctgtggatgaaaaggccctacaggaccagctggtgctagtygctgcaaaacttgacaccgaagacaagttgagggccgcaatggtcgggatgctggccaacttcttgggcttccgtatatatggcatgcacagtgagctat

SEQ ID NO: 1185 - DNA, 201 bp, Homo sapiens
tgtctgttcccatgctctctggcatgggcaccttccagcactggagtgacatccaggacaacttctcggtgactcaagtgcccttcactgagagcgcctgyctgctgctgatccagcctcactatgcctctgacctggacaaggtggagggtctcactttccagcaaaactccctcaactggatgaagaaactgtctcccc

SEQ ID NO: 1186 - DNA, 201 bp, Homo sapiens
aaaggaggagacccaggactcgctgtatccgagccccgagggtatgcggaagcgagcaccccagtctgagatggctcctgccggtgtgagcctgagggccmccatcctctgcctcctggcctgggctggcctggctgcaggtgaccgggtgtacatacaccccttccacctcgtcatccacaatgagagtacctgtgagca

SEQ ID NO: 1187 - DNA, 201 bp, Homo sapiens
aaatcagcgatgtgtcacccccagtctcccaccttttcttctaatgagtcgactttgagctggaaagcagccgtttctccttggtctaagtgtgctgcatkgagtgagcagtagaagcctgcagcggcacaaatgcacctcccagtttgctgggtttattttagagaatgggggtggggaggcaagaaccagtgtttagcg

SEQ ID NO: 1188 - DNA, 201 bp, Homo sapiens
caaatgcacctcccagtttgctgggtttattttagagaatgggggtggggaggcaagaaccagtgtttagcgcgggactactgttccaaaaagaattccarccgaccagcttgtttgtgaaacaaaaaagtgttcccttttcaagttgagaacaaaaattgggttttaaaaacatgacctccgtgtagtgtctgtaatacc

SEQ ID NO: 1189 - DNA, 201 bp, Homo sapiens
gggtttattttagagaatgggggtggggaggcaagaaccagtgtttagcgcgggactactgttccaaaaagaattccaaccgaccagcttgtttgtgaaamaaaaaagtgttcccttttcaagttgagaacaaaaattgggttttaaaaacatgacctccgtgtagtgtctgtaataccttagttttttccacagatgctt

SEQ ID NO: 1190 - DNA, 201 bp, Homo sapiens
tcccacgctctctggacttcacagaactggatgttgctgctgagaagattgacaggttcatgcaggctgtgacaggatggaagactggctgctccctgatrggagccagtgtggacagcaccctggctttcaacacctacgtccacttccaagggaagatgaagggcttctccctgctggccgagccccaggagttctggg

SEQ ID NO: 1191 - DNA, 201 bp, Homo sapiens; identical to SEQ ID NO: 1161

SEQ ID NO: 1192 - DNA, 201 bp, Homo sapiens; identical to SEQ ID NO: 1162

SEQ ID NO: 1193 - DNA, 201 bp, Homo sapiens
agcctgtggtctggccaagtgatgtaaccctcctctccagcctgtgcacaggcagcctgggaacagctccatccccacccctcagctataaatagggcatygtgacccggccaggggaagaagctgccgttgttctgggtactacagcagaagggtatgcggaagcgagcaccccagtctgagatggctcctgccggtgtg

SEQ ID NO: 1194 - DNA, 201 bp, Homo sapiens; identical to SEQ ID NO: 1164

SEQ ID NO: 1195 - DNA, 201 bp, Homo sapiens
ggccaagtgatgtaaccctcctctccagcctgtgcacaggcagcctgggaacagctccatccccacccctcagctataaatagggcatcgtgacccggccrggggaagaagctgccgttgttctgggtactacagcagaagggtatgcggaagcgagcaccccagtctgagatggctcctgccggtgtgagcctgagggcc

SEQ ID NO: 1196 - DNA, 201 bp, Homo sapiens
ccctcctctccagcctgtgcacaggcagcctgggaacagctccatccccacccctcagctataaatagggcatcgtgacccggccaggggaagaagctgcygttgttctgggtactacagcagaagggtatgcggaagcgagcaccccagtctgagatggctcctgccggtgtgagcctgagggccaccatcctctgcctc

SEQ ID NO: 1197 - DNA, 201 bp, Homo sapiens; identical to SEQ ID NO: 1163

SEQ ID NO: 1198 - DNA, 201 bp, Homo sapiens
ccagcctgtggtctggccaagtgatgtaaccctcctctccagcctgtgcacaggcagcctgggaacagctccatccccacccctcagctataaatagggcmtcgtgacccggccaggggaagaagctgccgttgttctgggtactacagcagaagggtatgcggaagcgagcaccccagtctgagatggctcctgccggtg

SEQ ID NO: 1199 - DNA, 201 bp, Homo sapiens; identical to SEQ ID NO: 1165

SEQ ID NO: 1200 - DNA, 201 bp, Homo sapiens; identical to SEQ ID NO: 1166

SEQ ID NO: 1201 - DNA, 201 bp, Homo sapiens; identical to SEQ ID NO: 1167

SEQ ID NO: 1202 - DNA, 201 bp, Homo sapiens; identical to SEQ ID NO: 1168

SEQ ID NO: 1203 - DNA, 201 bp, Homo sapiens; identical to SEQ ID NO: 1169

SEQ ID NO: 1204 - DNA, 201 bp, Homo sapiens; identical to SEQ ID NO: 1170

SEQ ID NO: 1205 - DNA, 201 bp, Homo sapiens
gaacagctccatccccacccctcagctataaatagggcatcgtgacccggccaggggaagaagctgccgttgttctgggtactacagcagaagggtatgcrgaagcgagcaccccagtctgagatggctcctgccggtgtgagcctgagggccaccatcctctgcctcctggcctgggctggcctggctgcaggtgaccgg

SEQ ID NO: 1206 - DNA, 201 bp, Homo sapiens; identical to SEQ ID NO: 1172

SEQ ID NO: 1207 - DNA, 201 bp, Homo sapiens
tgtagtgtctgtaataccttagttttttccacagatgcttgtgatttttgaacaatacgtgaaagatgcaagcacctgaatttctgtttgaatgcggaacmatagctggttatttctcccttgtgttagtaataaacgtcttgccacaataagcctccaaaaattttatctttcatttagcagccaaacagatgtatacaa

SEQ ID NO: 1208 - DNA, 201 bp, Homo sapiens; identical to SEQ ID NO: 1174

SEQ ID NO: 1209 - DNA, 126 bp, Homo sapiens
aagacttcctggaagaggtcccagcrtgagtgtcgcttctggcatctgtccttctggccagcctgtggtctggccaagtgatgtaaccctcctctccagcctgtgcacaggcagcctgggaacagc

SEQ ID NO: 1210 - DNA, 201 bp, Homo sapiens; identical to SEQ ID NO: 1176

SEQ ID NO: 1211 - DNA, 201 bp, Homo sapiens; identical to SEQ ID NO: 1175

SEQ ID NO: 1212 - DNA, 201 bp, Homo sapiens
agcttgtttgtgaaacaaaaaagtgttcccttttcaagttgagaacaaaaattgggttttaaaattaaagtatacatttttgcattgccttcggtttgtakttagtgtcttgaatgtaagaacatgacctccgtgtagtgtctgtaataccttagttttttccacagatgcttgtgatttttgaacaatacgtgaaagatg

SEQ ID NO: 1213 - DNA, 201 bp, Homo sapiens; identical to SEQ ID NO: 1178

SEQ ID NO: 1214 - DNA, 201 bp, Homo sapiens; identical to SEQ ID NO: 1177

SEQ ID NO: 1215 - DNA, 201 bp, Homo sapiens; identical to SEQ ID NO: 1181

SEQ ID NO: 1216 - DNA, 201 bp, Homo sapiens; identical to SEQ ID NO: 1179

SEQ ID NO: 1217 - DNA, 201 bp, Homo sapiens
ctccatccccacccctcagctataaatagggcatcgtgacccggccaggggaagaagctgccgttgttctgggtactacagcagaagggtatgcggaagcsagcaccccagtctgagatggctcctgccggtgtgagcctgagggccaccatcctctgcctcctggcctgggctggcctggctgcaggtgaccgggtgtac

SEQ ID NO: 1218 - DNA, 201 bp, Homo sapiens
acctgaatttctgtttgaatgcggaaccatagctggttatttctcccttgtgttagtaataaacgtcttgccacaataagcctccaaaaattttatctttyatttagcagccaaacagatgtatacaattcagcagatagactgtgcaaacgaaagtgctttcctggactttggatggaatttccatgggaggtctgagcc

SEQ ID NO: 1219 - DNA, 201 bp, Homo sapiens; identical to SEQ ID NO: 1183

SEQ ID NO: 1220 - DNA, 201 bp, Homo sapiens; identical to SEQ ID NO: 1182

SEQ ID NO: 1221 - DNA, 201 bp, Homo sapiens; identical to SEQ ID NO: 1184

SEQ ID NO: 1222 - DNA, 201 bp, Homo sapiens; identical to SEQ ID NO: 1185

SEQ ID NO: 1223 - DNA, 201 bp, Homo sapiens
gtgcaaacgaaagtgctttcctggactttggatggaatttccatgggaggtctgagccagtacttagcagtcctttgaagttttaggtgatgcttttctcyggacacttccattggtaagcagtggtggccatctgtgtgatggacagggggcgggaagagggtgacagggaaggccccataccccatgtggcacctggga

SEQ ID NO: 1224 - DNA, 201 bp, Homo sapiens
ggggaagaagctgccgttgttctgggtactacagcagaagggtatgcggaagcgagcaccccagtctgagatggctcctgccggtgtgagcctgagggccmccatcctctgcctcctggcctgggctggcctggctgcaggtgaccgggtgtacatacaccccttccacctcgtcatccacaatgagagtacctgtgagca

SEQ ID NO: 1225 - DNA, 201 bp, Homo sapiens; identical to SEQ ID NO: 1187

SEQ ID NO: 1226 - DNA, 201 bp, Homo sapiens
caaatgcacctcccagtttgctgggtttattttagagaatgggggtggggaggcaagaaccagtgtttagcgcgggactactgttccaaaaagaattccarccgaccagcttgtttgtgaaacaaaaaagtgttcccttttcaagttgagaacaaaaattgggttttaaaattaaagtatacatttttgcattgccttcgg

SEQ ID NO: 1227 - DNA, 201 bp, Homo sapiens
gggtttattttagagaatgggggtggggaggcaagaaccagtgtttagcgcgggactactgttccaaaaagaattccaaccgaccagcttgtttgtgaaamaaaaaagtgttcccttttcaagttgagaacaaaaattgggttttaaaattaaagtatacatttttgcattgccttcggtttgtatttagtgtcttgaatg

SEQ ID NO: 1228 - DNA, 201 bp, Homo sapiens; identical to SEQ ID NO: 1190

SEQ ID NO: 1229 - DNA, 201 bp, Homo sapiens
tcctcatcaccatcatcgccatgagctcactgggcgtcctcctgggggccacctgtgcaggcctcctgctctactgcacctgttcctactcgggcctgagytcccgaagctgcaccacactggagaactacaacttcgagctctacgatggccttaagcacaaggtcaagatgaaccaccaaaagtgctgctccgaggcat

SEQ ID NO: 1230 - DNA, 201 bp, Homo sapiens
gtgaatccgcagacctcctgggcaaacactgtgggaacatcgccccgcccaccatcatctcctcgggctccatgctctacatcaagttcacctccgactaygcccggcagggggcaggcttctctctgcgctacgagatcttcaagacaggctctgaagattgctcaaaaaacttcacaagccccaacgggaccatcgaat

SEQ ID NO: 1231 - DNA, 201 bp, Homo sapiens
cacctccgactacgcccggcagggggcaggcttctctctgcgctacgagatcttcaagacaggctctgaagattgctcaaaaaacttcacaagccccaacsggaccatcgaatctcctgggtttcctgagaagtatccacacaacttggactgcacctttaccatcctggccaaacccaagatggagatcatcctgcagtt

SEQ ID NO: 1232 - DNA, 201 bp, Homo sapiens
ccaacatgctggggatgctctcaggcctcattgcagactcccagatctccgcctcttccacccaggaatacctctggagccccagtgcagcccgcctggtyagcagccgctcgggctggttccctcgaatccctcaggcccagcccggtgaggagtggcttcaggtagatctgggaacacccaagacagtgaaaggtgtca

SEQ ID NO: 1233 - DNA, 201 bp, Homo sapiens
cggtggctaagtcattgcaggaacggggctgtgttctctgctgggacaaaacaggagctcatctctttggggtcacagttctattttgtttgtgagtttgwattattattattattattattattattattatattttatttctttggtctgtgagcaactcaaagaggcagaagaggagaatgacttttccagaatagaa

SEQ ID NO: 1234 - DNA, 201 bp, Homo sapiens
agtacgattggctggacatctgggatggcattccacatgttggccccctgattggcaagtactgtgggaccaaaacaccctctgaacttcgttcatcgacrgggatcctctccctgacctttcacacggacatggcggtggccaaggatggcttctctgcgcgttactacctggtccaccaagagccactagagaactttc

SEQ ID NO: 1235 - DNA, 201 bp, Homo sapiens
aggatggcttctctgcgcgttactacctggtccaccaagagccactagagaactttcagtgcaatgttcctctgggcatggagtctggccggattgctaaygaacagatcagtgcctcatctacctactctgatgggaggtggacccctcaacaaagccggctccatggtgatgacaatggctggacccccaacttggatt

SEQ ID NO: 1236 - DNA, 201 bp, Homo sapiens
cgaagctgcaccacactggagaactacaacttcgagctctacgatggccttaagcacaaggtcaagatgaaccaccaaaagtgctgctccgaggcatgacrgattgcacctgaatcctatctgacgtttcattccagcaagaggggctggggaagattacatttttttttcctttggaaactgaatgccataatctcgatc

SEQ ID NO: 1237 - DNA, 201 bp, Homo sapiens
ccaacaaggagtatctccaggtggacctgcgctttttaaccatgctcacggccatcgcaacacagggagcgatttccagggaaacacagaatggctactaygtcaaatcctacaagctggaagtcagcactaatggagaggactggatggtgtaccggcatggcaaaaaccacaaggtatttcaagccaacaacgatgcaa

SEQ ID NO: 1238 - DNA, 201 bp, Homo sapiens
aagtctcctacagcctaaacggcaaggactgggaatacattcaggaccccaggacccagcagccaaagctgttcgaagggaacatgcactatgacacccckgacatccgaaggtttgaccccattccggcacagtatgtgcgggtatacccggagaggtggtcgccggcggggattgggatgcggctggaggtgctgggct

SEQ ID NO: 1239 - DNA, 201 bp, Homo sapiens
gggccacctgtgcaggcctcctgctctactgcacctgttcctactcgggcctgagctcccgaagctgcaccacactggagaactacaacttcgagctctaygatggccttaagcacaaggtcaagatgaaccaccaaaagtgctgctccgaggcatgacggattgcacctgaatcctatctgacgtttcattccagcaaga

SEQ ID NO: 1240 - DNA, 201 bp, Homo sapiens
gttcctactcgggcctgagctcccgaagctgcaccacactggagaactacaacttcgagctctacgatggccttaagcacaaggtcaagatgaaccaccaraagtgctgctccgaggcatgacggattgcacctgaatcctatctgacgtttcattccagcaagaggggctggggaagattacatttttttttcctttgga

SEQ ID NO: 1241 - DNA, 201 bp, Homo sapiens
attcgggatggggacagtgaatccgcagacctcctgggcaaacactgtgggaacatcgccccgcccaccatcatctcctcgggctccatgctctacatcargttcacctccgactacgcccggcagggggcaggcttctctctgcgctacgagatcttcaagacaggctctgaagattgctcaaaaaacttcacaagcccc

SEQ ID NO: 1242 - DNA, 201 bp, Homo sapiens
tggctaatttgaggccctgagtgggccttgaatgctaaaaagaagcagggtacgcagggctacatgtagataccacaccaaggctggaggctggtctgtcrtaagacagaaagaaagacgctgggcccaattttgacttggccaggggacaccttggtgtgtttgttatctttatctgtgggtaggctagctgacccatct

SEQ ID NO: 1243 - DNA, 201 bp, Homo sapiens
tcaccattggctaatttgaggccctgagtgggccttgaatgctaaaaagaagcagggtacgcagggctacatgtagataccacaccaaggctggaggctgstctgtcataagacagaaagaaagacgctgggcccaattttgacttggccaggggacaccttggtgtgtttgttatctttatctgtgggtaggctagctga

SEQ ID NO: 1244 - DNA, 201 bp, Homo sapiens
agaaacctctgcataagacgttgtaaggaggaaaataaaagagagaaaaacacaaagatttaaacaagaaacctacgaacccagctctggaaagagccacyttctccaaaatggatatgtttcctctcacctgggttttcttagccctctacttttcaagacaccaagtgagaggccaaccagacccaccgtgcggaggtc

SEQ ID NO: 1245 - DNA, 201 bp, Homo sapiens
aactcaacctgcatccctctaaaagtcctatatccatattcaccattggctaatttgaggccctgagtgggccttgaatgctaaaaagaagcagggtacgsagggctacatgtagataccacaccaaggctggaggctggtctgtcataagacagaaagaaagacgctgggcccaattttgacttggccaggggacacctt

SEQ ID NO: 1246 - DNA, 201 bp, Homo sapiens
cacctgaatcctatctgacgtttcattccagcaagaggggctggggaagattacatttttttttcctttggaaactgaatgccataatctcgatcaaaccratccagaataccgaaggtatggacaggacagaaaagcgagtcgcaggaggaagggagatgcagccgcacaggggatgattaccctcctaggaccgcggtg

SEQ ID NO: 1247 - DNA, 201 bp, Homo sapiens; identical to SEQ ID NO: 1229

SEQ ID NO: 1248 - DNA, 201 bp, Homo sapiens; identical to SEQ ID NO: 1230

SEQ ID NO: 1249 - DNA, 201 bp, Homo sapiens; identical to SEQ ID NO: 1231

SEQ ID NO: 1250 - DNA, 201 bp, Homo sapiens; identical to SEQ ID NO: 1232

SEQ ID NO: 1251 - DNA, 201 bp, Homo sapiens; identical to SEQ ID NO: 1233

SEQ ID NO: 1252 - DNA, 201 bp, Homo sapiens; identical to SEQ ID NO: 1234

SEQ ID NO: 1253 - DNA, 201 bp, Homo sapiens; identical to SEQ ID NO: 1235

SEQ ID NO: 1254 - DNA, 201 bp, Homo sapiens; identical to SEQ ID NO: 1236

SEQ ID NO: 1255 - DNA, 201 bp, Homo sapiens; identical to SEQ ID NO: 1237

SEQ ID NO: 1256 - DNA, 201 bp, Homo sapiens; identical to SEQ ID NO: 1238

SEQ ID NO: 1257 - DNA, 201 bp, Homo sapiens; identical to SEQ ID NO: 1239

SEQ ID NO: 1258 - DNA, 201 bp, Homo sapiens
ccaaaatgcgatctcaagccgtgagctgctcaggctttcaggcggagcaaagcactggcaccctgggagccggcagcgggtggccagggcgaggccaagcyacacctctgactcacccggtgtgcgccggccgggaagggggcctggttcagccgccgccgccggcgacgagaaccaattctgggaaggagcaagatgggg

SEQ ID NO: 1259 - DNA, 201 bp, Homo sapiens; identical to SEQ ID NO: 1240

SEQ ID NO: 1260 - DNA, 201 bp, Homo sapiens; identical to SEQ ID NO: 1241

SEQ ID NO: 1261 - DNA, 201 bp, Homo sapiens; identical to SEQ ID NO: 1242

SEQ ID NO: 1262 - DNA, 201 bp, Homo sapiens; identical to SEQ ID NO: 1243

SEQ ID NO: 1263 - DNA, 201 bp, Homo sapiens; identical to SEQ ID NO: 1245

SEQ ID NO: 1264 - DNA, 201 bp, Homo sapiens; identical to SEQ ID NO: 1246

SEQ ID NO: 1265 - DNA, 201 bp, Homo sapiens
aaatgattgacattcctgtaggtgccccatagaggtgtggcattgagaaattatgtctggaaaatacagccagtgtagtgaccagctgagttaccatatascctgatgattccccttctgtaacagaaggtgacaacaactttgtgaactttctatatctttatctgatgccccaagtggcatcatctttatgtacatgcc

SEQ ID NO: 1266 - DNA, 201 bp, Homo sapiens; identical to SEQ ID NO: 1237

SEQ ID NO: 1267 - DNA, 201 bp, Homo sapiens; identical to SEQ ID NO: 1230

SEQ ID NO: 1268 - DNA, 201 bp, Homo sapiens
ttgggagagactttcagcattctttcacgatatccagatatgtcccttcagcacacacactcaactttctcatctggttcgtttcatcctcccgaaagaayggtgctctcccactcttactctatttcaaagagctactctgtctcaaccacagcagccctgccaagaaaaggcaagatgaaaggctagagcatgtgctac

SEQ ID NO: 1269 - DNA, 201 bp, Homo sapiens
tactctgtctcaaccacagcagccctgccaagaaaaggcaagatgaaaggctagagcatgtgctaccttgagatttcaagaagtgtcctacctcagctgargatggagaaacggggagtggagaggggatcagcccagggtaccatgtgatgactaatatgccactcattaagggcttttacctcggctgtccacatccag

SEQ ID NO: 1270 - DNA, 201 bp, Homo sapiens; identical to SEQ ID NO: 1231

SEQ ID NO: 1271 - DNA, 201 bp, Homo sapiens
atgttgccttataaaagagaagctcataatgaatgtttagcctttatcagttacatccaatcttggaataagtcatagagaataacaagtctgggactgaygtaggaaaaacagtagtctgtttaagttgagaggaggaggaggtggacgagagaagggaggagagggaagaactgaaatgtctcctcacccagggtggtt

SEQ ID NO: 1272 - DNA, 201 bp, Homo sapiens; identical to SEQ ID NO: 1238

SEQ ID NO: 1273 - DNA, 201 bp, Homo sapiens; identical to SEQ ID NO: 1232

SEQ ID NO: 1274 - DNA, 201 bp, Homo sapiens
tctgtttaagttgagaggaggaggaggtggacgagagaagggaggagagggaagaactgaaatgtctcctcacccagggtggttattgggcccaacttggratggggttgagtacgaaggttaaaaaacatatactttggtattatattggtcattgtaatagcagttgtaaaatatggggggaaaagggatcatttgctt

SEQ ID NO: 1275 - DNA, 201 bp, Homo sapiens
agtttctgtgtgaactctcagacatctctttcccggatccccaaccctgagcactcttatcaatcccaaccatcctccttgggttcattttggtttctggkttttctttttcctttttgttgattccaaaccaacaaacccaactctaatgctgcatcttggactatccgaagagatccacccccaagcactccacaactc

SEQ ID NO: 1276 - DNA, 201 bp, Homo sapiens
ttcctgctaaaaatccactggggaggtataaaattcactccaaagaagtttgcctgggccaaaagcctccaggttccttctgagaacaaaatactaatgattttttttttttttttggctgcttgggagagactttcagcattctttcacgatatccagatatgtcccttcagcacacacactcaactttctcatctggtt

SEQ ID NO: 1277 - DNA, 201 bp, Homo sapiens; identical to SEQ ID NO: 1241

SEQ ID NO: 1278 - DNA, 201 bp, Homo sapiens; identical to SEQ ID NO: 1234

SEQ ID NO: 1279 - DNA, 201 bp, Homo sapiens
taaaattcactccaaagaagtttgcctgggccaaaagcctccaggttccttctgagaacaaaatactaatgattttttttttttttttggctgcttgggasagactttcagcattctttcacgatatccagatatgtcccttcagcacacacactcaactttctcatctggttcgtttcatcctcccgaaagaacggtgct

SEQ ID NO: 1280 - DNA, 201 bp, Homo sapiens; identical to SEQ ID NO: 1244

SEQ ID NO: 1281 - DNA, 201 bp, Homo sapiens; identical to SEQ ID NO: 1235

SEQ ID NO: 1282 - DNA, 201 bp, Homo sapiens
ctggctgggtttctgttggctgtcattgtcatctccaggtacctaaagaaatagaggccacatgggatgcagtgtggcttctcccatccctatccccaacycacctgacccaagagaaggttcccctagcacactcaaacaagacccccttgtcttctggtgtctttgaaatgtcaagataacagccactgggtgtctgcg

SEQ ID NO: 1283 - DNA, 201 bp, Homo sapiens
gctgagttaccatataccctgatgattccccttctgtaacagaaggtgacaacaactttgtgaactttctatatctttatctgatgccccaagtggcatcwtctttatgtacatgccttagttgagaatatgagactgctctaatctttgtgaatgccttcacacttcagctgaggatgtcaccttctctgtcactcccca

SEQ ID NO: 1284 - DNA, 201 bp, Homo sapiens; identical to SEQ ID NO: 1230

SEQ ID NO: 1285 - DNA, 201 bp, Homo sapiens
ttacctcaatggaggctttcacacattagaaaaagaagtgtccctttccctgtagaccaggaattcagaacggtcaaagatcgcccaaactgccttccccsctctctagccaaagtcagctgaaaacgcagttggagccaaattcttccccagatactccattttagtcaccaggtaaaagacacaacctggaaattgcca

SEQ ID NO: 1286 - DNA, 201 bp, Homo sapiens
cctaggggtcattttcccgtaaggttctcagtgagctaggaactatcagtcagcttgggttacctcaatggaggctttcacacattagaaaaagaagtgtycctttccctgtagaccaggaattcagaacggtcaaagatcgcccaaactgccttcccccctctctagccaaagtcagctgaaaacgcagttggagccaaa

SEQ ID NO: 1287 - DNA, 201 bp, Homo sapiens; identical to SEQ ID NO: 1231

SEQ ID NO: 1288 - DNA, 201 bp, Homo sapiens
cagaagacagtgtcattggcctaggggtcattttcccgtaaggttctcagtgagctaggaactatcagtcagcttgggttacctcaatggaggctttcacrcattagaaaaagaagtgtccctttccctgtagaccaggaattcagaacggtcaaagatcgcccaaactgccttcccccctctctagccaaagtcagctga

SEQ ID NO: 1289 - DNA, 201 bp, Homo sapiens; identical to SEQ ID NO: 1232

SEQ ID NO: 1290 - DNA, 201 bp, Homo sapiens
ttgacaggagtgctttccctaaacaaaggtttgggaaacagtctaagactatcgatgtgtgaccagaagacagtgtcattggcctaggggtcattttcccrtaaggttctcagtgagctaggaactatcagtcagcttgggttacctcaatggaggctttcacacattagaaaaagaagtgtccctttccctgtagaccag

SEQ ID NO: 1291 - DNA, 201 bp, Homo sapiens
gatgacttccaaaaataacgatgtttttctgaatgtcgctgcattcctttgtattctcctagttttgactgcttagatctttccggcctctcagactgagkcaagggagaagcaagagaaactcaccccgagccagaagctcaggccagtacagcttactcccctgccaccagagtgaaggtcagccttcaacacagacac

SEQ ID NO: 1292 - DNA, 201 bp, Homo sapiens; identical to SEQ ID NO: 1234

SEQ ID NO: 1293 - DNA, 201 bp, Homo sapiens; identical to SEQ ID NO: 1235

SEQ ID NO: 1294 - DNA, 201 bp, Homo sapiens
aagtgctgggattataggcatgaaccaccgcgcccggcctggactcttttttaatcgttacaacatctgtgcaaagtagatctttttgtcactcccatttyagagatgataaactgacacttgatatcatgcccagggtcacacagttcacctgtgatagagccgattcagaaaccggaagtctgactccaaagtccagat

SEQ ID NO: 1295 - DNA, 201 bp, Homo sapiens
ccccgagccagaagctcaggccagtacagcttactcccctgccaccagagtgaaggtcagccttcaacacagacacaaggagccccagaaggggaggagaygtcatacctctgtccctccccagatcagtctcctggcaggccaggctctctgattcttatctctagttaccccttgtttttctcaaaagaacaggtccct

SEQ ID NO: 1296 - DNA, 201 bp, Homo sapiens; identical to SEQ ID NO: 1237

SEQ ID NO: 1297 - DNA, 201 bp, Homo sapiens
aggcaagggagaagcaagagaaactcaccccgagccagaagctcaggccagtacagcttactcccctgccaccagagtgaaggtcagccttcaacacagayacaaggagccccagaaggggaggagacgtcatacctctgtccctccccagatcagtctcctggcaggccaggctctctgattcttatctctagttacccc

SEQ ID NO: 1298 - DNA, 201 bp, Homo sapiens
ctgtccttcccccggatgagtgtctccaagtgtactctaggctggtcctccaaagcagccccctgctccccgcatcatcagttttatgtactggggctccrtgtgaggtttcttttgacaggagtgctttccctaaacaaaggtttgggaaacagtctaagactatcgatgtgtgaccagaagacagtgtcattggcctag

SEQ ID NO: 1299 - DNA, 201 bp, Homo sapiens
ggaaagggaagaaggtgatagggactgggtcccacaccagaagggctgagtggcctctctccctgcagctgttcgaagggaacatgcactatgacacccckgacatccgaaggtttgaccccattccggcacagtatgtgcgggtatacccggagaggtggtcgccggcggggattgggatgcggctggaggtgctgggct

SEQ ID NO: 1300 - DNA, 201 bp, Homo sapiens
acagtcgtcatccaactcctgaaatccaataaaacaaatatcgtttgagagattactttgtgccaggcactgtgctaaataccttatttctgactcttttktttgtttgtttgtttgtttttgagatggagtctctgtcacccaggctggagtgcagtggcctgttctcggctcactgcaacctccgcctccagggttcaa

SEQ ID NO: 1301 - DNA, 201 bp, Homo sapiens; identical to SEQ ID NO: 1241

SEQ ID NO: 1302 - DNA, 201 bp, Homo sapiens; identical to SEQ ID NO: 1244

SEQ ID NO: 1303 - DNA, 201 bp, Homo sapiens
tgggatgcggctggaggtgctgggctgtgactggacaggtaagatgacatttcctcctctttgcatctcacccacatggtcctctgaccctggcatcccaygaggccctgggagggctgtggagggggcagccatcccaggagctggaaatgctgcagacccctgccatgttctcctgcctcagaccacgggtactgcagc

SEQ ID NO: 1304 - DNA, 201 bp, Homo sapiens; identical to SEQ ID NO: 1229

SEQ ID NO: 1305 - DNA, 201 bp, Homo sapiens; identical to SEQ ID NO: 1230

SEQ ID NO: 1306 - DNA, 201 bp, Homo sapiens; identical to SEQ ID NO: 1231

SEQ ID NO: 1307 - DNA, 201 bp, Homo sapiens; identical to SEQ ID NO: 1232

SEQ ID NO: 1308 - DNA, 201 bp, Homo sapiens; identical to SEQ ID NO: 1233

SEQ ID NO: 1309 - DNA, 201 bp, Homo sapiens; identical to SEQ ID NO: 1234

SEQ ID NO: 1310 - DNA, 201 bp, Homo sapiens; identical to SEQ ID NO: 1235

SEQ ID NO: 1311 - DNA, 201 bp, Homo sapiens; identical to SEQ ID NO: 1236

SEQ ID NO: 1312 - DNA, 201 bp, Homo sapiens; identical to SEQ ID NO: 1237

SEQ ID NO: 1313 - DNA, 201 bp, Homo sapiens; identical to SEQ ID NO: 1238

SEQ ID NO: 1314 - DNA, 201 bp, Homo sapiens; identical to SEQ ID NO: 1239

SEQ ID NO: 1315 - DNA, 201 bp, Homo sapiens; identical to SEQ ID NO: 1240

SEQ ID NO: 1316 - DNA, 201 bp, Homo sapiens; identical to SEQ ID NO: 1241

SEQ ID NO: 1317 - DNA, 201 bp, Homo sapiens; identical to SEQ ID NO: 1242

SEQ ID NO: 1318 - DNA, 201 bp, Homo sapiens; identical to SEQ ID NO: 1243

SEQ ID NO: 1319 - DNA, 201 bp, Homo sapiens; identical to SEQ ID NO: 1245

SEQ ID NO: 1320 - DNA, 201 bp, Homo sapiens; identical to SEQ ID NO: 1246

SEQ ID NO: 1321 - DNA, 201 bp, Homo sapiens; identical to SEQ ID NO: 1229

SEQ ID NO: 1322 - DNA, 201 bp, Homo sapiens; identical to SEQ ID NO: 1230

SEQ ID NO: 1323 - DNA, 201 bp, Homo sapiens; identical to SEQ ID NO: 1231

SEQ ID NO: 1324 - DNA, 201 bp, Homo sapiens; identical to SEQ ID NO: 1232

SEQ ID NO: 1325 - DNA, 201 bp, Homo sapiens; identical to SEQ ID NO: 1233

SEQ ID NO: 1326 - DNA, 201 bp, Homo sapiens; identical to SEQ ID NO: 1234

SEQ ID NO: 1327 - DNA, 201 bp, Homo sapiens; identical to SEQ ID NO: 1235

SEQ ID NO: 1328 - DNA, 201 bp, Homo sapiens; identical to SEQ ID NO: 1236

SEQ ID NO: 1329 - DNA, 201 bp, Homo sapiens; identical to SEQ ID NO: 1237

SEQ ID NO: 1330 - DNA, 201 bp, Homo sapiens; identical to SEQ ID NO: 1238

SEQ ID NO: 1331 - DNA, 201 bp, Homo sapiens; identical to SEQ ID NO: 1239

SEQ ID NO: 1332 - DNA, 201 bp, Homo sapiens; identical to SEQ ID NO: 1240

SEQ ID NO: 1333 - DNA, 201 bp, Homo sapiens; identical to SEQ ID NO: 1241

SEQ ID NO: 1334 - DNA, 201 bp, Homo sapiens; identical to SEQ ID NO: 1242

SEQ ID NO: 1335 - DNA, 201 bp, Homo sapiens; identical to SEQ ID NO: 1243

SEQ ID NO: 1336 - DNA, 201 bp, Homo sapiens; identical to SEQ ID NO: 1244

SEQ ID NO: 1337 - DNA, 201 bp, Homo sapiens; identical to SEQ ID NO: 1245

SEQ ID NO: 1338 - DNA, 201 bp, Homo sapiens; identical to SEQ ID NO: 1246

SEQ ID NO: 1339 - DNA, 201 bp, Homo sapiens
agcaaaacccactagcaagaaatgaaagaacatttcttaggctaaaatcctcaaggaagtctacataaatgattgtatgtgctatgttcagcccagcaatrtctcatataccacgtatcattgaagaatgacattccatttaggtgaagtgtccagatactgaaatatccacctttaaagttcttaaaagagaactttaaa

SEQ ID NO: 1340 - DNA, 201 bp, Homo sapiens
tgcaattgtaactgtctcaatgcaagcttcgctgtagatgcccttcttaacaatatgctttatcttctgactgagaaaatcacttgagatgttatcatgcmcaatcccacttgttctgcctctccaccctggcaccttctccgaacccagagatcccagagggccagcatctcaccccatgtaactccatgtaattctccc

SEQ ID NO: 1341 - DNA, 201 bp, Homo sapiens
ggggacatgatatggacctgttacgtgggcccacagcatccaggtccagcctaagctgggaagatcaaggaaggctccctggaggaggtgacgcctatackaattctaaagaatttggccaggcagcagggagtgtgtttggctggtgtcataggcagacagcagcatgcccaaagacaagaaggagggagggtttgatgc

SEQ ID NO: 1342 - DNA, 201 bp, Homo sapiens
ggataaagaagagatggaaatataccaagtgaaaacatcagatttttctaaaaagggatttgtgtattttcctggagtcatgagtcctatagaaaaaaatktatattctttttgttttgtcctttttactggcaagggatttaagcctttggattaagagaaactcaaaagataatttaattccattcttatacttctgcc

SEQ ID NO: 1343 - DNA, 201 bp, Homo sapiens
tccaccatctccttaggagacagggtggtcaggaagcaggaaagactaagatgatggggactctctgctgtccccaccttccctgtccattgtagggtctytgcagcctcataccctatgtccagcgacctcccccaccccgccgccagtggaatgcctgaaagtggggtttggcctgggaaagtccaggtaacacttcag

SEQ ID NO: 1344 - DNA, 201 bp, Homo sapiens
ctatacgaattctaaagaatttggccaggcagcagggagtgtgtttggctggtgtcataggcagacagcagcatgcccaaagacaagaaggagggagggtytgatgccttcaggaaccaaaataattgaacatgcctgaacccaatttcttaaccagtgagcattgtaagggtagactaaaaggggctgtccttgtgactt

SEQ ID NO: 1345 - DNA, 201 bp, Homo sapiens; identical to SEQ ID NO: 1244

SEQ ID NO: 1346 - DNA, 201 bp, Homo sapiens
caggtacgtggtggacgaatgggagcagctggctgctggccccacacttaccaaccttgaccacagggtccacccagcaactccacctcacccatggatcrgggggaaaaacaactcacagactgttctcctcttaccaaggttaaaacgcagctggaattactttgggcagtttgtttttaaaaatgagtgttgcaattg

SEQ ID NO: 1347 - DNA, 201 bp, Homo sapiens
agccaaaggacaaaagggcgagactacgggccgtctgggcaaacagagagaagccactttattccctgtggagtggaggatgctaggatgttgctgctccrgcagacagaggcctttcgcttgagtcatcagccaacagactgaatgttatggttttagaaacccatacacaaagttgagtggttttttccatttctaaaa

SEQ ID NO: 1348 - DNA, 201 bp, Homo sapiens
ctcactttgaaatcgagaagcacgactgcaacttgctgtctgcttggaaaatttcactcacaagccgcagctttgcctgactcagtgcaatccaaggccaycatctctggtgaacttcccttgactcctccctccagccacttgcagaaatgcaaatcctgggcacccacaggctgtttgggggcctgtatagaagctgtg

SEQ ID NO: 1349 - DNA, 158 bp, Homo sapiens
tccccatgtgtcctggttcccgtttctccacctagactgtaaacctctcgagggcagggaccacaccctgtactgttctgtgtctttcacagctcctcccmcaatgctgaatatacagcaggtgctcaataaatgattcttagtgactttacttgtaa

SEQ ID NO: 1350 - DNA, 121 bp, Homo sapiens
agctgaggtgtgagcagctgycgaagtcagttccttgtggagccggagctgggcgcggattcgccgaggcaccgaggcactcagaggaggtgagagagcggcggcagacaacaggggaccc

SEQ ID NO: 1351 - DNA, 201 bp, Homo sapiens
agcaaggcctgccgccgcctcttcggcccagtggacagcgagcagctgagccgcgactgtgatgcgctaatggcgggctgcatccaggaggcccgtgagcratggaacttcgactttgtcaccgagacaccactggagggtgacttcgcctgggagcgtgtgcggggccttggcctgcccaagctctaccttcccacgggg

SEQ ID NO: 1352 - DNA, 201 bp, Homo sapiens
ggcagaccagcatgacagatttctaccactccaaacgccggctgatcttctccaagaggaagccctaatccgcccacaggaagcctgcagtcctggaagcrcgagggcctcaaaggcccgctctacatcttctgccttagtctcagtttgtgtgtcttaattattatttgtgttttaatttaaacacctcctcatgtacat

SEQ ID NO: 1353 - DNA, 201 bp, Homo sapiens
tgagccgcgactgtgatgcgctaatggcgggctgcatccaggaggcccgtgagcgatggaacttcgactttgtcaccgagacaccactggagggtgacttmgcctgggagcgtgtgcggggccttggcctgcccaagctctaccttcccacggggccccggcgaggccgggatgagttgggaggaggcaggcggcctggca

SEQ ID NO: 1354 - DNA, 201 bp, Homo sapiens
atttctaccactccaaacgccggctgatcttctccaagaggaagccctaatccgcccacaggaagcctgcagtcctggaagcgcgagggcctcaaaggccygctctacatcttctgccttagtctcagtttgtgtgtcttaattattatttgtgttttaatttaaacacctcctcatgtacataccctggccgccccctgc

SEQ ID NO: 1355 - DNA, 201 bp, Homo sapiens
ttcgactttgtcaccgagacaccactggagggtgacttcgcctgggagcgtgtgcggggccttggcctgcccaagctctaccttcccacggggccccggcraggccgggatgagttgggaggaggcaggcggcctggcacctcacctgctctgctgcaggggacagcagaggaagaccatgtggacctgtcactgtcttgt

SEQ ID NO: 1356 - DNA, 201 bp, Homo sapiens
tgggctctgcaattcccctctgctgctgtccctcccccttgtcctttcccttcagtaccctctcagctccaggtggctctgaggtgcctgtcccacccccmcccccagctcaatggactggaaggggaagggacacacaagaagaagggcaccctagttctacctcaggcagctcaagcagcgaccgccccctcctctagc

SEQ ID NO: 1357 - DNA, 201 bp, Homo sapiens
tctcccggaggttgggtgggccggcttcatgccagctacttcctcctccccacttgtccgctgggtggtaccctctggaggggtgtggctccttcccatcrctgtcacaggcggttatgaaattcaccccctttcctggacactcagacctgaattctttttcatttgagaagtaaacagatggcactttgaaggggcctc

SEQ ID NO: 1358 - DNA, 201 bp, Homo sapiens
caagcgtgcccgcgtgtgtccctgcgtgtccgcgaggatgcgtgttcgcgggtgtgtgctgcgttcacaggtgtttctgcggcaggcgccatgtcagaacyggctggggatgtccgtcagaacccatgcggcagcaaggcctgccgccgcctcttcggcccagtggacagcgagcagctgagccgcgactgtgatgcgcta

SEQ ID NO: 1359 - DNA, 201 bp, Homo sapiens
accagcatgacagatttctaccactccaaacgccggctgatcttctccaagaggaagccctaatccgcccacaggaagcctgcagtcctggaagcgcgagsgcctcaaaggcccgctctacatcttctgccttagtctcagtttgtgtgtcttaattattatttgtgttttaatttaaacacctcctcatgtacataccct

SEQ ID NO: 1360 - DNA, 201 bp, Homo sapiens
gtagatctttctaggagggagacactggcccctcaaatcgtccagcgaccttcctcatccaccccatccctccccagttcattgcactttgattagcagcrgaacaaggagtcagacattttaagatggtggcagtagaggctatggacagggcatgccacgtgggctcatatggggctgggagtagttgtctttcctggc

SEQ ID NO: 1361 - DNA, 201 bp, Homo sapiens
cctcatggcccctctgacctgcactggggagcccgtctcagtgttgagccttttccctctttggctcccctgtaccttttgaggagccccagctacccttyttctccagctgggctctgcaattcccctctgctgctgtccctcccccttgtcctttcccttcagtaccctctcagctccaggtggctctgaggtgcctgt

SEQ ID NO: 1362 - DNA, 201 bp, Homo sapiens
ggtcgaaaacggcggcagaccagcatgacagatttctaccactccaaacgccggctgatcttctccaagaggaagccctaatccgcccacaggaagcctgyagtcctggaagcgcgagggcctcaaaggcccgctctacatcttctgccttagtctcagtttgtgtgtcttaattattatttgtgttttaatttaaacacc

SEQ ID NO: 1363 - DNA, 201 bp, Homo sapiens
aagaagaagggcaccctagttctacctcaggcagctcaagcagcgaccgccccctcctctagctgtgggggtgagggtcccatgtggtggcacaggccccyttgagtggggttatctctgtgttaggggtatatgatgggggagtagatctttctaggagggagacactggcccctcaaatcgtccagcgaccttcctcat

SEQ ID NO: 1364 - DNA, 201 bp, Homo sapiens
tcttgtacccttgtgcctcgctcaggggagcaggctgaagggtccccaggtggacctggagactctcagggtcgaaaacggcggcagaccagcatgacagrtttctaccactccaaacgccggctgatcttctccaagaggaagccctaatccgcccacaggaagcctgcagtcctggaagcgcgagggcctcaaaggccc

SEQ ID NO: 1365 - DNA, 201 bp, Homo sapiens
caggcgccatgtcagaaccggctggggatgtccgtcagaacccatgcggcagcaaggcctgccgccgcctcttcggcccagtggacagcgagcagctgagmcgcgactgtgatgcgctaatggcgggctgcatccaggaggcccgtgagcgatggaacttcgactttgtcaccgagacaccactggagggtgacttcgcct

SEQ ID NO: 1366 - DNA, 201 bp, Homo sapiens
attagcagcggaacaaggagtcagacattttaagatggtggcagtagaggctatggacagggcatgccacgtgggctcatatggggctgggagtagttgtytttcctggcactaacgttgagcccctggaggcactgaagtgcttagtgtacttggagtattggggtctgaccccaaacaccttccagctcctgtaacata

SEQ ID NO: 1367 - DNA, 201 bp, Homo sapiens
aagcgtgcccgcgtgtgtccctgcgtgtccgcgaggatgcgtgttcgcgggtgtgtgctgcgttcacaggtgtttctgcggcaggcgccatgtcagaaccrgctggggatgtccgtcagaacccatgcggcagcaaggcctgccgccgcctcttcggcccagtggacagcgagcagctgagccgcgactgtgatgcgctaa

SEQ ID NO: 1368 - DNA, 201 bp, Homo sapiens
ggcagtagaggctatggacagggcatgccacgtgggctcatatggggctgggagtagttgtctttcctggcactaacgttgagcccctggaggcactgaaktgcttagtgtacttggagtattggggtctgaccccaaacaccttccagctcctgtaacatactggcctggactgttttctctcggctccccatgtgtcct

SEQ ID NO: 1369 - DNA, 121 bp, Homo sapiens
agctgaggtgtgagcagctgycgaagtcagttccttgtggagccggagctgggcgcggattcgccgaggcaccgaggcactcagaggaggcgccatgtcagaaccggctggggatgtccgt

SEQ ID NO: 1370 - DNA, 201 bp, Homo sapiens; identical to SEQ ID NO: 1351

SEQ ID NO: 1371 - DNA, 201 bp, Homo sapiens; identical to SEQ ID NO: 1352

SEQ ID NO: 1372 - DNA, 201 bp, Homo sapiens; identical to SEQ ID NO: 1353

SEQ ID NO: 1373 - DNA, 201 bp, Homo sapiens; identical to SEQ ID NO: 1354

SEQ ID NO: 1374 - DNA, 201 bp, Homo sapiens; identical to SEQ ID NO: 1355

SEQ ID NO: 1375 - DNA, 201 bp, Homo sapiens; identical to SEQ ID NO: 1356

SEQ ID NO: 1376 - DNA, 201 bp, Homo sapiens
tattttatgaaatactatttaaagcctcctcatcccgtgttctccttttcctctctcccggagggtggtaccctctggaggggtgtggctccttcccatcrctgtcacaggcggttatgaaattcaccccctttcctggacactcagacctgaattctttttcatttgagaagtaaacagatggcactttgaaggggcctc

SEQ ID NO: 1377 - DNA, 201 bp, Homo sapiens
gaggtgtgagcagctgccgaagtcagttccttgtggagccggagctgggcgcggattcgccgaggcaccgaggcactcagaggaggcgccatgtcagaacyggctggggatgtccgtcagaacccatgcggcagcaaggcctgccgccgcctcttcggcccagtggacagcgagcagctgagccgcgactgtgatgcgcta

SEQ ID NO: 1378 - DNA, 201 bp, Homo sapiens; identical to SEQ ID NO: 1359

SEQ ID NO: 1379 - DNA, 201 bp, Homo sapiens
gtagatctttctaggagggagacactggcccctcaaatcgtccagcgaccttcctcatccaccccatccctccccagttcattgcactttgattagcagcrgaacaaggagtcagacattttaagatggtggcagtagaggctatggacagggcatgccacgtgggctcactgaagtgcttagtgtacttggagtattggg

SEQ ID NO: 1380 - DNA, 201 bp, Homo sapiens; identical to SEQ ID NO: 1361

SEQ ID NO: 1381 - DNA, 201 bp, Homo sapiens; identical to SEQ ID NO: 1362

SEQ ID NO: 1382 - DNA, 201 bp, Homo sapiens; identical to SEQ ID NO: 1363

SEQ ID NO: 1383 - DNA, 201 bp, Homo sapiens; identical to SEQ ID NO: 1364

SEQ ID NO: 1384 - DNA, 201 bp, Homo sapiens
gaggcgccatgtcagaaccggctggggatgtccgtcagaacccatgcggcagcaaggcctgccgccgcctcttcggcccagtggacagcgagcagctgagmcgcgactgtgatgcgctaatggcgggctgcatccaggaggcccgtgagcgatggaacttcgactttgtcaccgagacaccactggagggtgacttcgcct

SEQ ID NO: 1385 - DNA, 201 bp, Homo sapiens
aggtgtgagcagctgccgaagtcagttccttgtggagccggagctgggcgcggattcgccgaggcaccgaggcactcagaggaggcgccatgtcagaaccrgctggggatgtccgtcagaacccatgcggcagcaaggcctgccgccgcctcttcggcccagtggacagcgagcagctgagccgcgactgtgatgcgctaa

SEQ ID NO: 1386 - DNA, 173 bp, Homo sapiens
agttcattgcactttgattagcagcggaacaaggagtcagacattttaagatggtggcagtagaggctatggacagggcatgccacgtgggctcactgaaktgcttagtgtacttggagtattggggtctgaccccaaacaccttccagctcctgtaacatactggcctggac

SEQ ID NO: 1387 - DNA, 158 bp, Homo sapiens; identical to SEQ ID NO: 1349

SEQ ID NO: 1388 - DNA, 121 bp, Homo sapiens; identical to SEQ ID NO: 1369

SEQ ID NO: 1389 - DNA, 201 bp, Homo sapiens; identical to SEQ ID NO: 1351

SEQ ID NO: 1390 - DNA, 201 bp, Homo sapiens; identical to SEQ ID NO: 1352

SEQ ID NO: 1391 - DNA, 201 bp, Homo sapiens; identical to SEQ ID NO: 1353

SEQ ID NO: 1392 - DNA, 201 bp, Homo sapiens; identical to SEQ ID NO: 1354

SEQ ID NO: 1393 - DNA, 201 bp, Homo sapiens; identical to SEQ ID NO: 1355

SEQ ID NO: 1394 - DNA, 201 bp, Homo sapiens; identical to SEQ ID NO: 1356

SEQ ID NO: 1395 - DNA, 201 bp, Homo sapiens; identical to SEQ ID NO: 1357

SEQ ID NO: 1396 - DNA, 201 bp, Homo sapiens; identical to SEQ ID NO: 1377

SEQ ID NO: 1397 - DNA, 201 bp, Homo sapiens; identical to SEQ ID NO: 1359

SEQ ID NO: 1398 - DNA, 201 bp, Homo sapiens; identical to SEQ ID NO: 1360

SEQ ID NO: 1399 - DNA, 201 bp, Homo sapiens; identical to SEQ ID NO: 1361

SEQ ID NO: 1400 - DNA, 201 bp, Homo sapiens; identical to SEQ ID NO: 1362

SEQ ID NO: 1401 - DNA, 201 bp, Homo sapiens; identical to SEQ ID NO: 1363

SEQ ID NO: 1402 - DNA, 201 bp, Homo sapiens; identical to SEQ ID NO: 1364

SEQ ID NO: 1403 - DNA, 201 bp, Homo sapiens; identical to SEQ ID NO: 1384

SEQ ID NO: 1404 - DNA, 201 bp, Homo sapiens; identical to SEQ ID NO: 1366

SEQ ID NO: 1405 - DNA, 201 bp, Homo sapiens; identical to SEQ ID NO: 1385

SEQ ID NO: 1406 - DNA, 201 bp, Homo sapiens; identical to SEQ ID NO: 1368

SEQ ID NO: 1407 - DNA, 158 bp, Homo sapiens; identical to SEQ ID NO: 1349

SEQ ID NO: 1408 - DNA, 201 bp, Homo sapiens; identical to SEQ ID NO: 1351

SEQ ID NO: 1409 - DNA, 201 bp, Homo sapiens; identical to SEQ ID NO: 1352

SEQ ID NO: 1410 - DNA, 201 bp, Homo sapiens; identical to SEQ ID NO: 1353

SEQ ID NO: 1411 - DNA, 201 bp, Homo sapiens; identical to SEQ ID NO: 1354

SEQ ID NO: 1412 - DNA, 201 bp, Homo sapiens
cagcagtgtatacgggctatgtggggagtattcaggagacagacaactcactcgtcaaatcctccccttcctggccaacaaagctgctgcaaccacagggrtttcttctgttcaggcgccatgtcagaaccggctggggatgtccgtcagaacccatgcggcagcaaggcctgccgccgcctcttcggcccagtggacagc

SEQ ID NO: 1413 - DNA, 201 bp, Homo sapiens; identical to SEQ ID NO: 1355

SEQ ID NO: 1414 - DNA, 201 bp, Homo sapiens; identical to SEQ ID NO: 1356

SEQ ID NO: 1415 - DNA, 201 bp, Homo sapiens
tttccccagcagtgtatacgggctatgtggggagtattcaggagacagacaactcactcgtcaaatcctccccttcctggccaacaaagctgctgcaaccrcagggatttcttctgttcaggcgccatgtcagaaccggctggggatgtccgtcagaacccatgcggcagcaaggcctgccgccgcctcttcggcccagtg

SEQ ID NO: 1416 - DNA, 201 bp, Homo sapiens; identical to SEQ ID NO: 1357

SEQ ID NO: 1417 - DNA, 201 bp, Homo sapiens
ttcaggagacagacaactcactcgtcaaatcctccccttcctggccaacaaagctgctgcaaccacagggatttcttctgttcaggcgccatgtcagaacyggctggggatgtccgtcagaacccatgcggcagcaaggcctgccgccgcctcttcggcccagtggacagcgagcagctgagccgcgactgtgatgcgcta

SEQ ID NO: 1418 - DNA, 171 bp, Homo sapiens
aggaaggggatggtaggagacaggagacctctaaagaccccagttaggtcaccagacttctctgagccccmgtttccccagcagtgtatacgggctatgtggggagtattcaggagacagacaactcactcgtcaaatcctccccttcctggccaacaaagctgctgcaac

SEQ ID NO: 1419 - DNA, 201 bp, Homo sapiens; identical to SEQ ID NO: 1359

SEQ ID NO: 1420 - DNA, 201 bp, Homo sapiens; identical to SEQ ID NO: 1360

SEQ ID NO: 1421 - DNA, 201 bp, Homo sapiens; identical to SEQ ID NO: 1361

SEQ ID NO: 1422 - DNA, 201 bp, Homo sapiens; identical to SEQ ID NO: 1362

SEQ ID NO: 1423 - DNA, 201 bp, Homo sapiens; identical to SEQ ID NO: 1363

SEQ ID NO: 1424 - DNA, 201 bp, Homo sapiens; identical to SEQ ID NO: 1364

SEQ ID NO: 1425 - DNA, 201 bp, Homo sapiens; identical to SEQ ID NO: 1365

SEQ ID NO: 1426 - DNA, 201 bp, Homo sapiens; identical to SEQ ID NO: 1366

SEQ ID NO: 1427 - DNA, 201 bp, Homo sapiens
tcaggagacagacaactcactcgtcaaatcctccccttcctggccaacaaagctgctgcaaccacagggatttcttctgttcaggcgccatgtcagaaccrgctggggatgtccgtcagaacccatgcggcagcaaggcctgccgccgcctcttcggcccagtggacagcgagcagctgagccgcgactgtgatgcgctaa

SEQ ID NO: 1428 - DNA, 201 bp, Homo sapiens; identical to SEQ ID NO: 1368

SEQ ID NO: 1429 - DNA, 201 bp, Homo sapiens
gccgacccaagctacagtgcaagagtggctttatacaagatgctctaggcaactgtattgatatcaatgagtgtttgagtatcagtgccccgtgccctatygggcatacatgcatcaacacagagggctcctacacgtgccagaagaacgtgcccaactgtggccgtggctaccatctcaacgaggagggaacgcgctgtg

SEQ ID NO: 1430 - DNA, 143 bp, Homo sapiens
caccgtcagctcctttgtggccaagcttttcatctttgtgtctgcagagctctgagcactcgcttcgcgtcgcggggtctccctcctgttgctttcctaamcctgccctccggggcgttaataaagtcttagcaagcgtccca

SEQ ID NO: 1431 - DNA, 201 bp, Homo sapiens
ctgtggccgtggctaccatctcaacgaggagggaacgcgctgtgttgatgtggacgagtgcgcgccacctgctgagccctgtgggaagggacatcgctgcrtgaactctcccggcagtttccgctgcgaatgcaagacgggttactattttgacggcatcagcaggatgtgtgtcgatgtcaacgagtgccagcgctaccc

SEQ ID NO: 1432 - DNA, 201 bp, Homo sapiens
gcagctgttccgtgggcttccggctctctgtggatggcaggtcatgtgaagacatcaatgagtgcagcagcagcccctgtagccaggagtgtgccaacgtytacggctcctaccagtgttactgccggcgaggctaccagctcagcgatgtggatggagtcacctgtgaagacatcgacgagtgcgccctgcccaccgggg

SEQ ID NO: 1433 - DNA, 201 bp, Homo sapiens
cccgcggtggttttccgcatgggcccctccagtgctgtccccggggacagcatgcagctggccatcaccggcggcaatgaggagggctttttcaccaccckgaaggtgacctgtccccgagcccagggacttgctcctgaccgtcaagatggatctctctcgccacggcaccgtcagctcctttgtggccaagcttttcat

SEQ ID NO: 1434 - DNA, 201 bp, Homo sapiens
ggagtcacctgtgaagacatcgacgagtgcgccctgcccaccgggggccacatctgctcctaccgctgcatcaacatccctggaagcttccagtgcagctscccctcgtctggctacaggctggcccccaatggccgcaactgccaagacattgatgagtgtgtgactggcatccacaactgctccatcaacgagacctgc

SEQ ID NO: 1435 - DNA, 201 bp, Homo sapiens
cacatctgctcctaccgctgcatcaacatccctggaagcttccagtgcagctgcccctcgtctggctacaggctggcccccaatggccgcaactgccaagwcattgatgagtgtgtgactggcatccacaactgctccatcaacgagacctgcttcaacatccagggcggcttccgctgcctggccttcgagtgccctgag

SEQ ID NO: 1436 - DNA, 201 bp, Homo sapiens
aggtgctgccattgctgtctgctggggagggcggcccaggcccagggccagagctgcgagtacagcctcatggttggctaccagtgtggacaggtcttccrggcatgctgtgtcaagagccaggagaccggagatttggatgtcgggggcctccaagaaacggataagatcattgaggttgaggaggaacaagaggaccca

SEQ ID NO: 1437 - DNA, 201 bp, Homo sapiens
cggggacagcatgcagctggccatcaccggcggcaatgaggagggctttttcaccacccggaaggtgacctgtccccgagcccagggacttgctcctgacygtcaagatggatctctctcgccacggcaccgtcagctcctttgtggccaagcttttcatctttgtgtctgcagagctctgagcactcgcttcgcgtcgcg

SEQ ID NO: 1438 - DNA, 201 bp, Homo sapiens
gccagctggaggagctgcactgtgccacgggcatcagcctggccaacgagcaggaccgctgtgccacgccccacggtgacaacgccagcctggaggccacrtttgtgaagaggtgctgccattgctgtctgctggggagggcggcccaggcccagggccagagctgcgagtacagcctcatggttggctaccagtgtggac

SEQ ID NO: 1439 - DNA, 201 bp, Homo sapiens; identical to SEQ ID NO: 1429

SEQ ID NO: 1440 - DNA, 201 bp, Homo sapiens; identical to SEQ ID NO: 1434

SEQ ID NO: 1441 - DNA, 201 bp, Homo sapiens; identical to SEQ ID NO: 1435

SEQ ID NO: 1442 - DNA, 201 bp, Homo sapiens; identical to SEQ ID NO: 1438

SEQ ID NO: 1443 - DNA, 201 bp, Homo sapiens; identical to SEQ ID NO: 1436

SEQ ID NO: 1444 - DNA, 201 bp, Homo sapiens; identical to SEQ ID NO: 1431

SEQ ID NO: 1445 - DNA, 201 bp, Homo sapiens; identical to SEQ ID NO: 1432

SEQ ID NO: 1446 - DNA, 201 bp, Homo sapiens; identical to SEQ ID NO: 1429

SEQ ID NO: 1447 - DNA, 151 bp, Homo sapiens
caccgtcagctcctttgtggccaagcttttcatctttgtgtctgcagagctctgagcactcgcttcgcgtcgcggggtctccctcctgttgctttcctaamcctgccctccggggcgttaataaagtcttagcaagcgtcccacacagtga

SEQ ID NO: 1448 - DNA, 201 bp, Homo sapiens; identical to SEQ ID NO: 1431

SEQ ID NO: 1449 - DNA, 201 bp, Homo sapiens; identical to SEQ ID NO: 1432

SEQ ID NO: 1450 - DNA, 201 bp, Homo sapiens
cccgcggtggttttccgcatgggcccctccagtgctgtccccggggacagcatgcagctggccatcaccggcggcaatgaggagggctttttcaccaccckgaaggtgagcccccacagtggggtggtggccctcaccaagcctgtccccgagcccagggacttgctcctgaccgtcaagatggatctctctcgccacggc

SEQ ID NO: 1451 - DNA, 201 bp, Homo sapiens; identical to SEQ ID NO: 1434

SEQ ID NO: 1452 - DNA, 201 bp, Homo sapiens; identical to SEQ ID NO: 1435

SEQ ID NO: 1453 - DNA, 201 bp, Homo sapiens; identical to SEQ ID NO: 1436

SEQ ID NO: 1454 - DNA, 201 bp, Homo sapiens
gcaatgaggagggctttttcaccacccggaaggtgagcccccacagtggggtggtggccctcaccaagcctgtccccgagcccagggacttgctcctgacygtcaagatggatctctctcgccacggcaccgtcagctcctttgtggccaagcttttcatctttgtgtctgcagagctctgagcactcgcttcgcgtcgcg

SEQ ID NO: 1455 - DNA, 201 bp, Homo sapiens; identical to SEQ ID NO: 1438

SEQ ID NO: 1456 - DNA, 201 bp, Homo sapiens; identical to SEQ ID NO: 1429

SEQ ID NO: 1457 - DNA, 201 bp, Homo sapiens
actaccgccgctccgcagccacatgatcgtagggaactctgcatgaggccatcggtgcaggctggagaagagaaggcaagttggcaggagtggagaccacrggcatttgagccacttcctcatgtaacttaacttgtgccttcaggacctgctcaagcccgatcacgtatataccacttccatttgatgatggaatgctgc

SEQ ID NO: 1458 - DNA, 162 bp, Homo sapiens
ggcccaagtggcagagcaacttgcacaacagcctggacctgtcatagagctttctcctgttctggaccccactcaaaactggcagcctttcaggtcactcrataaatgtgctggagtaacactcaaacgaggaatgtgttgcctccaaaatccaataggccc

SEQ ID NO: 1459 - DNA, 143 bp, Homo sapiens
cttgcacaacagcctggacctgtcatagagctttctcctgttctggaccccactcaaaactggcagcctttcaggtcactcgataaatgtgctggagtaamactcaaacgaggaatgtgttgcctccaaaatccaataggccc

SEQ ID NO: 1460 - DNA, 201 bp, Homo sapiens; identical to SEQ ID NO: 1431

SEQ ID NO: 1461 - DNA, 201 bp, Homo sapiens; identical to SEQ ID NO: 1432

SEQ ID NO: 1462 - DNA, 201 bp, Homo sapiens; identical to SEQ ID NO: 1434

SEQ ID NO: 1463 - DNA, 201 bp, Homo sapiens
atgataggcagttcaggtcatatggtgacttgatgacccagagtcaaacattcagtttccaccaaagcccagtaacaggccaagagctgtctctcaaaagragagtagttatctgcagaagatggcagggccttgctccgaaagcctagagaccgccactgtgattcacctatgggggcctgccaaaggctgcagccagca

SEQ ID NO: 1464 - DNA, 201 bp, Homo sapiens; identical to SEQ ID NO: 1435

SEQ ID NO: 1465 - DNA, 201 bp, Homo sapiens; identical to SEQ ID NO: 1436

SEQ ID NO: 1466 - DNA, 201 bp, Homo sapiens; identical to SEQ ID NO: 1438

SEQ ID NO: 1467 - DNA, 201 bp, Homo sapiens
agattttctatgttctaaggacatggctgctgtagaatagcacagacgtggatgataaattatccccagaagcagcatgacagaatgcctcggggagcacwtggaagggaaattgcagttctgttgaaatagaggaaaatcccttggtaaagacacagcctgttaggctcgtgtgggcctccagtatgttcaccaggggaa

SEQ ID NO: 1468 - DNA, 201 bp, Homo sapiens
accccgtgcacaccatctcccacaccgtcatctcgctgcctaccttccgcgagttcacccgccctgaagagatcatcttcctccgggccatcacgccaccrcatcctgccagccaggctaacatcatcttcgacatcacggaagggaacctgcgggactcttttgacatcatcaagcgttacatggacggcatgaccgtgg

SEQ ID NO: 1469 - DNA, 201 bp, Homo sapiens
tgcgccaggtgcggcccatcgtgggcccatttcatgccgtcctgaagctggagatgaactatgtggtcgggggcgtggtctcccaccgaaatgttgtcaaygtccacatcttcgtctctgagtactggttctgagggctggtctgccgcacagccgcaggtgcacctccaggccaaatcattgctgccagtgactgtggtc

SEQ ID NO: 1470 - DNA, 201 bp, Homo sapiens; identical to SEQ ID NO: 1434

SEQ ID NO: 1471 - DNA, 201 bp, Homo sapiens; identical to SEQ ID NO: 1436

SEQ ID NO: 1472 - DNA, 201 bp, Homo sapiens
caggtgcggcccatcgtgggcccatttcatgccgtcctgaagctggagatgaactatgtggtcgggggcgtggtctcccaccgaaatgttgtcaacgtccrcatcttcgtctctgagtactggttctgagggctggtctgccgcacagccgcaggtgcacctccaggccaaatcattgctgccagtgactgtggtctgtac

SEQ ID NO: 1473 - DNA, 201 bp, Homo sapiens
atgataaattatccccagaagcagcatgacagaatgcctcggggagcacttggaagggaaattgcagttctgttgaaatagaggaaaatcccttggtaaaracacagcctgttaggctcgtgtgggcctccagtatgttcaccaggggaatggctgggatttctcggcactctgcatcatccatcttttcttataggtggg

SEQ ID NO: 1474 - DNA, 201 bp, Homo sapiens; identical to SEQ ID NO: 1429

SEQ ID NO: 1475 - DNA, 201 bp, Homo sapiens
taccctcagacttttttaatgttaggtatttgtagcattaggccaacatgtattaagctgagccagatgaataagtccatctgatgtattttcggtgtttraaaaatgagcccagttgctcaactgtttggttgaaaaccttgctcattttttaatgcgaaggctaagtgtcaccccctttctctgcctctggctgggcct

SEQ ID NO: 1476 - DNA, 201 bp, Homo sapiens
cctgattgtatgaaatttgacattttggcactttttttttttttttggccaatcagattttctatgttctaaggacatggctgctgtagaatagcacagaygtggatgataaattatccccagaagcagcatgacagaatgcctcggggagcacttggaagggaaattgcagttctgttgaaatagaggaaaatcccttgg

SEQ ID NO: 1477 - DNA, 141 bp, Homo sapiens
cccttggtaaagacacagcctgttaggctcgtgtgggcctccagtatgttcaccaggggaatggctgggatttctcggcactctgcatcatccatcttttyttataggtgggaaaataaacaactttgtgatcctcctgat

SEQ ID NO: 1478 - DNA, 201 bp, Homo sapiens; identical to SEQ ID NO: 1431

SEQ ID NO: 1479 - DNA, 201 bp, Homo sapiens; identical to SEQ ID NO: 1432

SEQ ID NO: 1480 - DNA, 201 bp, Homo sapiens
ttgtagcattaggccaacatgtattaagctgagccagatgaataagtccatctgatgtattttcggtgtttaaaaaatgagcccagttgctcaactgtttrgttgaaaaccttgctcattttttaatgcgaaggctaagtgtcaccccctttctctgcctctggctgggccttgctaagggccaaggaaagaaagacattt

SEQ ID NO: 1481 - DNA, 201 bp, Homo sapiens; identical to SEQ ID NO: 1435

SEQ ID NO: 1482 - DNA, 201 bp, Homo sapiens
gggggcgtggtctcccaccgaaatgttgtcaacgtccacatcttcgtctctgagtactggttctgagggctggtctgccgcacagccgcaggtgcacctcsaggccaaatcattgctgccagtgactgtggtctgtacttgtttataccctcagacttttttaatgttaggtatttgtagcattaggccaacatgtattaa

SEQ ID NO: 1483 - DNA, 201 bp, Homo sapiens; identical to SEQ ID NO: 1438

SEQ ID NO: 1484 - DNA, 201 bp, Homo sapiens; identical to SEQ ID NO: 1429

SEQ ID NO: 1485 - DNA, 201 bp, Homo sapiens
aaccttccatggttgtcttttcccagcagatgaagcatagcctccttggaatggcatgggaggcctggcctgatctggcctctgcccaccctttgagctgyacctgccccaccccagctcatccatgtgcttgtaccctggccccacggggaggcttgcccttccctgaatctgccttcttgtggctttagcatgtgccat

SEQ ID NO: 1486 - DNA, 201 bp, Homo sapiens; identical to SEQ ID NO: 1431

SEQ ID NO: 1487 - DNA, 201 bp, Homo sapiens; identical to SEQ ID NO: 1432

SEQ ID NO: 1488 - DNA, 201 bp, Homo sapiens; identical to SEQ ID NO: 1434

SEQ ID NO: 1489 - DNA, 201 bp, Homo sapiens; identical to SEQ ID NO: 1435

SEQ ID NO: 1490 - DNA, 201 bp, Homo sapiens
gatctggcctctgcccaccctttgagctgtacctgccccaccccagctcatccatgtgcttgtaccctggccccacggggaggcttgcccttccctgaatstgccttcttgtggctttagcatgtgccatgctgtccccctgcagactgccattctccttgcagacttggctcagaagtcacctcctcagtgcagttagcc

SEQ ID NO: 1491 - DNA, 201 bp, Homo sapiens; identical to SEQ ID NO: 1436

SEQ ID NO: 1492 - DNA, 201 bp, Homo sapiens; identical to SEQ ID NO: 1438

SEQ ID NO: 1493 - DNA, 201 bp, Homo sapiens
caagaacagccccaagctgtagctcttcttgtctcttcaaaaccaaaaagcgccgtgcctctggttcatgtgaaggaaaccgtcagcaagccttatgtaayggagagccctgctgaagactcaaactgggtgaataaggtcttcaagaagaacaagcaaaagacaagtggcaccagaaaaggcttcccaagacattcggga

SEQ ID NO: 1494 - DNA, 201 bp, Homo sapiens
cccaccccaccacctggactgtcacctctgtcacctcagcagcaggtacaaccgtctggatcaccagccagatccctacactctcaggcacccacttcacmcaggccatccctggggccttcaactgtgggggcacctcaaacactgccccgaagttctctttcagccttccctgctcagccacctgtggaggaactaggc

SEQ ID NO: 1495 - DNA, 201 bp, Homo sapiens
ctgctgaagactcaaactgggtgaataaggtcttcaagaagaacaagcaaaagacaagtggcaccagaaaaggcttcccaagacattcgggatccaaaaamccaagcagcaaagtgcagtgagcatgtctaatgttccttaaatcccacggagaggagcagctttgggaactgtgttcagagagattccgaggaatagagg

SEQ ID NO: 1496 - DNA, 201 bp, Homo sapiens
tgtaatggagagccctgctgaagactcaaactgggtgaataaggtcttcaagaagaacaagcaaaagacaagtggcaccagaaaaggcttcccaagacatycgggatccaaaaaaccaagcagcaaagtgcagtgagcatgtctaatgttccttaaatcccacggagaggagcagctttgggaactgtgttcagagagatt

SEQ ID NO: 1497 - DNA, 201 bp, Homo sapiens
ttgaggcggctgaatgctgtttatcttaattcttcctccaagagagtgattttcccccgggtggaagtgtactgccagatagaactcgcccttggcaatgrgtgccctgaacgcagtcaaccaagccttcgagcacggcaggccagtctggaaggagccacacaacctcacaaggagtgggttcccaaaggggatggaagg

SEQ ID NO: 1498 - DNA, 201 bp, Homo sapiens
tcccagcactttgggaggctgaggtaggtggaaaacctgaggtcaggagttcaagaacagcctgaccaacatggtgaaactccatctctactaaaaatacmaaaattaaccaggcttgatggtgtgcacctgtaatctcagctactcgggaggctgaggcaagagaatcgcttgaacccaggaggcagaggttgcagtgca

SEQ ID NO: 1499 - DNA, 201 bp, Homo sapiens
cgtcccggtgtactgtggcctcatccccccgacttaccgcggtgtgaggtacatcgatgggggcttcacgggcatgcagccctgtgccttctggaccgacrccatcaccatctccaccttcagtgggcagcaggacatctgtccccgggactgcccggccatcttccacgacttccgcatgttcaactgctccttccagtt

SEQ ID NO: 1500 - DNA, 201 bp, Homo sapiens
tccatgtgagcctcacccgcttaacggacggggagaatgtggtggtttcagagttcacgtccaaggaggagctcattgaggccctatactgcagctgcttygtcccggtgtactgtggcctcatccccccgacttaccgcggtgtgaggtacatcgatgggggcttcacgggcatgcagccctgtgccttctggaccgacg

SEQ ID NO: 1501 - DNA, 201 bp, Homo sapiens
gaccttccaaactaaagaggcccccgagaacttctatgagattctagagaaggctttgaagagaggctccctgctgggctgcttcattgataccagaagtrctgcagaatctgaggcccggacgccgtttggtcttattaagggtcatgcctacagtgtaacgggaattgaccaggtaagcttccgaggccagagaatcga

SEQ ID NO: 1502 - DNA, 201 bp, Homo sapiens
ccaggtaagcttccgaggccagagaatcgagctcatccgaatccggaacccttggggccaggttgagtggaacgggtcgtggagcgacaggatggcatttmaggacttcaaggcccactttgataaagtggagatctgcaacctcactcccgatgccctggaggaagacgcgatccacaaatgggaggtgacggtccatca

SEQ ID NO: 1503 - DNA, 201 bp, Homo sapiens
gggggtgtggcagagaccttccaaactaaagaggcccccgagaacttctatgagattctagagaaggctttgaagagaggctccctgctgggctgcttcaytgataccagaagtgctgcagaatctgaggcccggacgccgtttggtcttattaagggtcatgcctacagtgtaacgggaattgaccaggtaagcttccga

SEQ ID NO: 1504 - DNA, 201 bp, Homo sapiens
tctgccagggagagctgggagactgctggctattagccgccatcgcctcccttacgcttaatcaaaaagcactggccagagtcatcccccaggaccaaagmtttggccctggttatgccgggatattccatttccagttctggcagcacagtgagtggctggacgtggtgatcgatgaccgcctgcccaccttcagggacc

SEQ ID NO: 1505 - DNA, 201 bp, Homo sapiens
atgggaagctggagtttgatgaattcaaagtgttctgggacaagctgaagcagtggattaaccttttccttcggtttgatgctgacaagtccggcaccatrtctacctatgaactacggactgcactgaaagctgcaggctttcagctgagcagccacctcctgcagctgattgtgctcaggtatgcggatgaggagctcc

SEQ ID NO: 1506 - DNA, 201 bp, Homo sapiens
gaaaaaagccattacccgggatatggatggaaatgtagacattgaccttcctgagcctccaaagccaactccacctgaccaggagacagaggaggagcagyggtttcgggctctgtttgaacaagtcgctggtgaggacatggaggtgacagcagaggaacttgagtatgttttaaatgctgtgctgcaaaagaaaaagga

SEQ ID NO: 1507 - DNA, 201 bp, Homo sapiens
gccagagaatcgagctcatccgaatccggaacccttggggccaggttgagtggaacgggtcgtggagcgacaggatggcatttcaggacttcaaggcccamtttgataaagtggagatctgcaacctcactcccgatgccctggaggaagacgcgatccacaaatgggaggtgacggtccatcagggaagctgggttcgcg

SEQ ID NO: 1508 - DNA, 201 bp, Homo sapiens
cgaccaggggaaatcgtgaaaaacccagaattcattcttggaggggccaccaggactgatatctgccagggagagctgggagactgctggctattagccgycatcgcctcccttacgcttaatcaaaaagcactggccagagtcatcccccaggaccaaagctttggccctggttatgccgggatattccatttccagttc

SEQ ID NO: 1509 - DNA, 201 bp, Homo sapiens
ggttgagtggaacgggtcgtggagcgacaggatggcatttcaggacttcaaggcccactttgataaagtggagatctgcaacctcactcccgatgccctgraggaagacgcgatccacaaatgggaggtgacggtccatcagggaagctgggttcgcggctccacggctgggggctgccgcaatttcctggataccttttg

SEQ ID NO: 1510 - DNA, 201 bp, Homo sapiens
agttctggagcgccttgctggaaaaagcctacgccaagctaaatgggagctatgaagctctgaagggaggcagcgccatcgaggccatggaagacttcacygggggtgtggcagagaccttccaaactaaagaggcccccgagaacttctatgagattctagagaaggctttgaagagaggctccctgctgggctgcttca

SEQ ID NO: 1511 - DNA, 201 bp, Homo sapiens
tccagttctggcagcacagtgagtggctggacgtggtgatcgatgaccgcctgcccaccttcagggaccgcttggttttcctccactctgccgaccacaaygagttctggagcgccttgctggaaaaagcctacgccaagctaaatgggagctatgaagctctgaagggaggcagcgccatcgaggccatggaagacttca

SEQ ID NO: 1512 - DNA, 173 bp, Homo sapiens
tgtagctccagtcattgtgatcagacatcctttataaaacatgtttttataaatgtgtatgtggaataagatgaggaggaaaaggagtgaggtcataattyagcatttctgcatcataagtgtgcttccttatcagggaagacatcaggtagttccgataattggacaagagt

SEQ ID NO: 1513 - DNA, 201 bp, Homo sapiens; identical to SEQ ID NO: 1501

SEQ ID NO: 1514 - DNA, 201 bp, Homo sapiens
gtggagcgacagttctccggagtggcgttctgttggtccagctgagcagaagcgtctgtgtcacactgctctggatgatggggaattctggatggcatttmaggacttcaaggcccactttgataaagtggagatctgcaacctcactcccgatgccctggaggaagacgcgatccacaaatgggaggtgacggtccatca

SEQ ID NO: 1515 - DNA, 201 bp, Homo sapiens; identical to SEQ ID NO: 1503

SEQ ID NO: 1516 - DNA, 201 bp, Homo sapiens; identical to SEQ ID NO: 1504

SEQ ID NO: 1517 - DNA, 201 bp, Homo sapiens; identical to SEQ ID NO: 1505

SEQ ID NO: 1518 - DNA, 201 bp, Homo sapiens; identical to SEQ ID NO: 1506

SEQ ID NO: 1519 - DNA, 201 bp, Homo sapiens
cggagtggcgttctgttggtccagctgagcagaagcgtctgtgtcacactgctctggatgatggggaattctggatggcatttcaggacttcaaggcccamtttgataaagtggagatctgcaacctcactcccgatgccctggaggaagacgcgatccacaaatgggaggtgacggtccatcagggaagctgggttcgcg

SEQ ID NO: 1520 - DNA, 201 bp, Homo sapiens; identical to SEQ ID NO: 1508

SEQ ID NO: 1521 - DNA, 201 bp, Homo sapiens
agctcatccgaatccggaacccttggggccaggttgagtggaacgggtcgtggagcgacagttctccggagtggcgttctgttggtccagctgagcagaarcgtctgtgtcacactgctctggatgatggggaattctggatggcatttcaggacttcaaggcccactttgataaagtggagatctgcaacctcactcccg

SEQ ID NO: 1522 - DNA, 201 bp, Homo sapiens
tcacactgctctggatgatggggaattctggatggcatttcaggacttcaaggcccactttgataaagtggagatctgcaacctcactcccgatgccctgraggaagacgcgatccacaaatgggaggtgacggtccatcagggaagctgggttcgcggctccacggctgggggctgccgcaatttcctggataccttttg

SEQ ID NO: 1523 - DNA, 201 bp, Homo sapiens; identical to SEQ ID NO: 1510

SEQ ID NO: 1524 - DNA, 201 bp, Homo sapiens; identical to SEQ ID NO: 1511

SEQ ID NO: 1525 - DNA, 173 bp, Homo sapiens; identical to SEQ ID NO: 1512

SEQ ID NO: 1526 - DNA, 201 bp, Homo sapiens
cacgttcatctgccgcaaaaatgccagcattagcgtgcgggcccaggaccgctactatagctcatcttggagcgaatgggcatctgtgccctgcagttagrttctgatccaggatgaaaatttggaggaaaagtggaagatattaagcaaaatgtttaaagacacaacggaatagacccaaaaagataatttctatctgat

SEQ ID NO: 1527 - DNA, 201 bp, Homo sapiens
cagtactgatttgacattcagtgtcaaaagcagcagaggctcttctgacccccaaggggtgacgtgcggagctgctacactctctgcagagagagtcagargggacaacaaggagtatgagtactcagtggagtgccaggaggacagtgcctgcccagctgctgaggagagtctgcccattgaggtcatggtggatgccgt

SEQ ID NO: 1528 - DNA, 201 bp, Homo sapiens
aatttctatctgatttgctttaaaacgtttttttaggatcacaatgatatctttgctgtatttgtatagttagatgctaaatgctcattgaaacaatcagmtaatttatgtatagattttccagctctcaagttgccatgggccttcatgctatttaaatatttaagtaatttatgtatttattagtatattactgttatt

SEQ ID NO: 1529 - DNA, 201 bp, Homo sapiens
tacatcagttttatgacaatcaggaagaatgcagtgttctgataccagtgccatcatacacttgtgatggatgggaacgcaagagatacttacatggaaayctgacaatgcaaacctgttgagaagatccaggagaacaagatgctagttcccatgtctgtgaagacttcctggagatggtgttgataaagcaatttaggg

SEQ ID NO: 1530 - DNA, 201 bp, Homo sapiens
tccacattcctacttctccctgacattctgcgttcaggtccagggcaagagcaagagagaaaagaaagatagagtcttcacggacaagacctcagccacgktcatctgccgcaaaaatgccagcattagcgtgcgggcccaggaccgctactatagctcatcttggagcgaatgggcatctgtgccctgcagttaggttct

SEQ ID NO: 1531 - DNA, 201 bp, Homo sapiens
atcacaatgatatctttgctgtatttgtatagttagatgctaaatgctcattgaaacaatcagctaatttatgtatagattttccagctctcaagttgccmtgggccttcatgctatttaaatatttaagtaatttatgtatttattagtatattactgttatttaacgtttgtctgccaggatgtatggaatgtttcata

SEQ ID NO: 1532 - DNA, 199 bp, Homo sapiens
agatgtgtcaccagcagttggtcatctcttggttttccctggtttttctggcatctcccctcgtggccatatgggaactgaagaaagatgtttatgtcrtagaattggattggtatccggatgcccctggagaaatggtggtcctcacctgtgacacccctgaagaagatggtatcacctggaccttggaccagagcag

SEQ ID NO: 1533 - DNA, 201 bp, Homo sapiens
aagacacaacggaatagacccaaaaagataatttctatctgatttgctttaaaacgtttttttaggatcacaatgatatctttgctgtatttgtatagttmgatgctaaatgctcattgaaacaatcagctaatttatgtatagattttccagctctcaagttgccatgggccttcatgctatttaaatatttaagtaatt

SEQ ID NO: 1534 - DNA, 201 bp, Homo sapiens
tgtctggaaggcaaaaagatcttaagattcaagagagaggacaagtagttatggctaaggacatgaaattgtcagaatggcaggtggcttcttaacagccmtgtgagaagcagacagatgcaaagaaaatctggaatccctttctcattagcatgaatgaacctgatacacaattatgaccagaaaatatggctccatgaa

SEQ ID NO: 1535 - DNA, 201 bp, Homo sapiens
gtgcaacatcgacgtcacccagcagtgtgtcatcgccgagatctggttcccggtggcagatgccacacgtatcaagagggcactggagcaaggcatggaamtaagtggctcctccatggcccccatcatgaccacagtgcaatctaaaacagcccctcccacatttaacaggaccaataaattcacagctggcttccagaa

SEQ ID NO: 1536 - DNA, 201 bp, Homo sapiens
cgctgcatgctggaggctgtgctgagtgcccggtgcaggtgagccggtcctgcggagttgtgccgagtgcctgctgcagaccgaggctgggccaagatggygtctgtgtttcgaagcgaggagatgtgtttgtcacaactgtttctccaggtggaagctgcatattgctgtgtggctgagctcggagagctcggattggtt

SEQ ID NO: 1537 - DNA, 201 bp, Homo sapiens
accaatttagctgatgatttctttactgaggacacttctggcctcctggagttgaaagcagtgcctgcatatatgaccggaaagttggggttcatagccgrtgtgatcaacagggagaggatggcttcctttgagcggttactgtggcgaatctgccgaggaaacgtgtacttgaagttcagtgagatggacgcccctctg

SEQ ID NO: 1538 - DNA, 201 bp, Homo sapiens
caaacacagcctcctacctgcggctctgggccctcagcctggctcatgcacaactgtctgaagtgctctggactatggtgatgaacagcggccttcagacrcgaggctggggaggaatcgtcggggtttttattatttttgccgtatttgctgtcctgacagtagccatccttctgatcatggagggcctctctgctttcc

SEQ ID NO: 1539 - DNA, 201 bp, Homo sapiens
ccatcatgaccacagtgcaatctaaaacagcccctcccacatttaacaggaccaataaattcacagctggcttccagaatattgttgatgcctatggtgtyggcagctaccgggagataaacccagccccctacaccatcatcactttccccttcctgttcgctgtgatgtttggagactgtggtcatggaaccgtgatgc

SEQ ID NO: 1540 - DNA, 201 bp, Homo sapiens
tacaggaagccaaccagaaccagcaggccttgaaacaaagcttcctagaactgacagaactgaaatacctcctgaagaaaacccaagacttctttgagacrgaaaccaatttagctgatgatttctttactgaggacacttctggcctcctggagttgaaagcagtgcctgcatatatgaccggaaagttggggttcatag

SEQ ID NO: 1541 - DNA, 201 bp, Homo sapiens
actgcactgggttgagttccagaacaagttctatgtcggggatggttacaagttttctccattctcctttaaacacatcctggatggcacagccgaggagyaggctgagggctgcacctcccacggtggtcaccatgccaatgaaggaagttcagtcttgtctttgatatcagcccctgcaaggcgctcaatgggaaggtt

SEQ ID NO: 1542 - DNA, 201 bp, Homo sapiens
tcaaacacagcctcctacctgcggctctgggccctcagcctggctcatgcacaactgtctgaagtgctctggactatggtgatgaacagcggccttcagaygcgaggctggggaggaatcgtcggggtttttattatttttgccgtatttgctgtcctgacagtagccatccttctgatcatggagggcctctctgctttc

SEQ ID NO: 1543 - DNA, 201 bp, Homo sapiens
ggaatcgtcggggtttttattatttttgccgtatttgctgtcctgacagtagccatccttctgatcatggagggcctctctgctttcctgcacgccctgcractgcactgggttgagttccagaacaagttctatgtcggggatggttacaagttttctccattctcctttaaacacatcctggatggcacagccgaggag

SEQ ID NO: 1544 - DNA, 192 bp, Homo sapiens
gacgtcagcctgtggatttgatacgacttaaccacgtcagaggaaggactttggcaagtgatattgtcttcatgtggggtattaattctcaaataataaartaattgacaaatgaggggagaatgctaaacagatgtcttcttgcaatattttaaatattgtatttgagaaaataaacatctgagtcattca

SEQ ID NO: 1545 - DNA, 201 bp, Homo sapiens
acatcattctgcaatttatccctgagatgatttttatcctgtgtctgtttggatacctggttttcatgatcattttcaaatggtgctgctttgacgtccaygtatctcagcacgcccccagcatcctcatccacttcatcaacatgtttctgtttaactacagtgactcttccaacgcacccctctacaaacatcagcaag

SEQ ID NO: 1546 - DNA, 201 bp, Homo sapiens
ctgggaattgtccagatggtttttggtgtcatcctcagccttttcaatcacatatacttcagaagaactctcaacatcattctgcaatttatccctgagaygatttttatcctgtgtctgtttggatacctggttttcatgatcattttcaaatggtgctgctttgacgtccatgtatctcagcacgcccccagcatcctc

SEQ ID NO: 1547 - DNA, 201 bp, Homo sapiens
aagaacatattcatcatattttaccaaggagagcagctcaggcagaaaatcaagaagatctgtgatgggtttcgagccactgtctacccttgcccagagcstgcggtggagcgcagagagatgttggagagcgtcaatgtgaggctggaagatttaatcaccgtcataacacaaacagagtctcaccgccagcgcctgctg

SEQ ID NO: 1548 - DNA, 201 bp, Homo sapiens
ggattgatccgatttggaacttggcttcaaacaaactcacatttctgaactcgtataaaatgaagatgtcggtgatcctgggaattgtccagatggttttyggtgtcatcctcagccttttcaatcacatatacttcagaagaactctcaacatcattctgcaatttatccctgagatgatttttatcctgtgtctgtttg

SEQ ID NO: 1549 - DNA, 201 bp, Homo sapiens
tgatcatggagggcctctctgctttcctgcacgccctgcgactgcactgggttgagttccagaacaagttctatgtcggggatggttacaagttttctccrttctcctttaaacacatcctggatggcacagccgaggagtaggctgagggctgcacctcccacggtggtcaccatgccaatgaaggaagttcagtcttgt

SEQ ID NO: 1550 - DNA, 201 bp, Homo sapiens
gtggcaagtgaagacaggaatgaaaggaatgtaaagcagcttttctctgaagagaagaagagagagagacacagccaagaccgaggctgggccaagatggygtctgtgtttcgaagcgaggagatgtgtttgtcacaactgtttctccaggtggaagctgcatattgctgtgtggctgagctcggagagctcggattggtt

SEQ ID NO: 1551 - DNA, 201 bp, Homo sapiens; identical to SEQ ID NO: 1545

SEQ ID NO: 1552 - DNA, 201 bp, Homo sapiens; identical to SEQ ID NO: 1546

SEQ ID NO: 1553 - DNA, 201 bp, Homo sapiens; identical to SEQ ID NO: 1548

SEQ ID NO: 1554 - DNA, 201 bp, Homo sapiens; identical to SEQ ID NO: 1549

SEQ ID NO: 1555 - DNA, 201 bp, Homo sapiens; identical to SEQ ID NO: 1535

SEQ ID NO: 1556 - DNA, 201 bp, Homo sapiens
tgcagtctcatttccagttcctccatgacgtggcaagtgaagacaggaatgaaaggaatgtaaagcagcttttctctgaagagaagaagagagagagacasagccaagaccgaggctgggccaagatggtgtctgtgtttcgaagcgaggagatgtgtttgtcacaactgtttctccaggtggaagctgcatattgctgtg

SEQ ID NO: 1557 - DNA, 201 bp, Homo sapiens; identical to SEQ ID NO: 1537

SEQ ID NO: 1558 - DNA, 201 bp, Homo sapiens; identical to SEQ ID NO: 1539

SEQ ID NO: 1559 - DNA, 201 bp, Homo sapiens; identical to SEQ ID NO: 1538

SEQ ID NO: 1560 - DNA, 201 bp, Homo sapiens; identical to SEQ ID NO: 1542

SEQ ID NO: 1561 - DNA, 201 bp, Homo sapiens; identical to SEQ ID NO: 1541

SEQ ID NO: 1562 - DNA, 201 bp, Homo sapiens; identical to SEQ ID NO: 1540

SEQ ID NO: 1563 - DNA, 201 bp, Homo sapiens; identical to SEQ ID NO: 1543

SEQ ID NO: 1564 - DNA, 192 bp, Homo sapiens; identical to SEQ ID NO: 1544

SEQ ID NO: 1565 - DNA, 201 bp, Homo sapiens; identical to SEQ ID NO: 1547

SEQ ID NO: 1566 - DNA, 201 bp, Homo sapiens; identical to SEQ ID NO: 1535

SEQ ID NO: 1567 - DNA, 201 bp, Homo sapiens
tcgggtctcatttccagttcctccatgacgtggcaagtgaagacaggaatgaaaggaatgtaaagcagcttttctctgaagagaagaagagagagagacasagccaagaccgaggctgggccaagatggtgtctgtgtttcgaagcgaggagatgtgtttgtcacaactgtttctccaggtggaagctgcatattgctgtg

SEQ ID NO: 1568 - DNA, 201 bp, Homo sapiens; identical to SEQ ID NO: 1550

SEQ ID NO: 1569 - DNA, 201 bp, Homo sapiens; identical to SEQ ID NO: 1537

SEQ ID NO: 1570 - DNA, 201 bp, Homo sapiens; identical to SEQ ID NO: 1538

SEQ ID NO: 1571 - DNA, 201 bp, Homo sapiens; identical to SEQ ID NO: 1539

SEQ ID NO: 1572 - DNA, 201 bp, Homo sapiens; identical to SEQ ID NO: 1540

SEQ ID NO: 1573 - DNA, 201 bp, Homo sapiens; identical to SEQ ID NO: 1541

SEQ ID NO: 1574 - DNA, 201 bp, Homo sapiens; identical to SEQ ID NO: 1542

SEQ ID NO: 1575 - DNA, 201 bp, Homo sapiens; identical to SEQ ID NO: 1543

SEQ ID NO: 1576 - DNA, 192 bp, Homo sapiens; identical to SEQ ID NO: 1544

SEQ ID NO: 1577 - DNA, 201 bp, Homo sapiens; identical to SEQ ID NO: 1547

SEQ ID NO: 1578 - DNA, 201 bp, Homo sapiens; identical to SEQ ID NO: 1549

SEQ ID NO: 1579 - DNA, 201 bp, Homo sapiens; identical to SEQ ID NO: 1550

SEQ ID NO: 1580 - DNA, 201 bp, Homo sapiens; identical to SEQ ID NO: 1545

SEQ ID NO: 1581 - DNA, 201 bp, Homo sapiens; identical to SEQ ID NO: 1546

SEQ ID NO: 1582 - DNA, 201 bp, Homo sapiens; identical to SEQ ID NO: 1548

SEQ ID NO: 1583 - DNA, 201 bp, Homo sapiens; identical to SEQ ID NO: 1549

SEQ ID NO: 1584 - DNA, 201 bp, Homo sapiens; identical to SEQ ID NO: 1535

SEQ ID NO: 1585 - DNA, 201 bp, Homo sapiens; identical to SEQ ID NO: 1567

SEQ ID NO: 1586 - DNA, 201 bp, Homo sapiens; identical to SEQ ID NO: 1537

SEQ ID NO: 1587 - DNA, 201 bp, Homo sapiens; identical to SEQ ID NO: 1539

SEQ ID NO: 1588 - DNA, 201 bp, Homo sapiens; identical to SEQ ID NO: 1538

SEQ ID NO: 1589 - DNA, 201 bp, Homo sapiens; identical to SEQ ID NO: 1542

SEQ ID NO: 1590 - DNA, 201 bp, Homo sapiens; identical to SEQ ID NO: 1541

SEQ ID NO: 1591 - DNA, 201 bp, Homo sapiens; identical to SEQ ID NO: 1540

SEQ ID NO: 1592 - DNA, 201 bp, Homo sapiens; identical to SEQ ID NO: 1543

SEQ ID NO: 1593 - DNA, 192 bp, Homo sapiens; identical to SEQ ID NO: 1544

SEQ ID NO: 1594 - DNA, 201 bp, Homo sapiens; identical to SEQ ID NO: 1547

SEQ ID NO: 1595 - DNA, 201 bp, Homo sapiens; identical to SEQ ID NO: 1535

SEQ ID NO: 1596 - DNA, 201 bp, Homo sapiens
ctgcatgctggaggctgtgctgagtgcccggtgcaggtgagccggtcctgcggagttgtgccgagtgcctgctgcagagaccgaggctgggccaagatggygtctgtgtttcgaagcgaggagatgtgtttgtcacaactgtttctccaggtggaagctgcatattgctgtgtggctgagctcggagagctcggattggtt

SEQ ID NO: 1597 - DNA, 201 bp, Homo sapiens; identical to SEQ ID NO: 1537

SEQ ID NO: 1598 - DNA, 201 bp, Homo sapiens; identical to SEQ ID NO: 1538

SEQ ID NO: 1599 - DNA, 201 bp, Homo sapiens; identical to SEQ ID NO: 1539

SEQ ID NO: 1600 - DNA, 201 bp, Homo sapiens; identical to SEQ ID NO: 1540

SEQ ID NO: 1601 - DNA, 201 bp, Homo sapiens; identical to SEQ ID NO: 1541

SEQ ID NO: 1602 - DNA, 201 bp, Homo sapiens; identical to SEQ ID NO: 1542

SEQ ID NO: 1603 - DNA, 201 bp, Homo sapiens; identical to SEQ ID NO: 1543

SEQ ID NO: 1604 - DNA, 192 bp, Homo sapiens; identical to SEQ ID NO: 1544

SEQ ID NO: 1605 - DNA, 201 bp, Homo sapiens; identical to SEQ ID NO: 1545

SEQ ID NO: 1606 - DNA, 201 bp, Homo sapiens; identical to SEQ ID NO: 1546

SEQ ID NO: 1607 - DNA, 201 bp, Homo sapiens; identical to SEQ ID NO: 1547

SEQ ID NO: 1608 - DNA, 201 bp, Homo sapiens; identical to SEQ ID NO: 1548

SEQ ID NO: 1609 - DNA, 201 bp, Homo sapiens; identical to SEQ ID NO: 1549

SEQ ID NO: 1610 - DNA, 201 bp, Homo sapiens; identical to SEQ ID NO: 1535

SEQ ID NO: 1611 - DNA, 201 bp, Homo sapiens
tccctgctccgtgcgtcaggttggggaaaccaccgtctgccccagaccctgacccaggacccgcctggaggaagctgggaccgaggctgggccaagatggygtctgtgtttcgaagcgaggagatgtgtttgtcacaactgtttctccaggtggaagctgcatattgctgtgtggctgagctcggagagctcggattggtt

SEQ ID NO: 1612 - DNA, 201 bp, Homo sapiens; identical to SEQ ID NO: 1537

SEQ ID NO: 1613 - DNA, 201 bp, Homo sapiens; identical to SEQ ID NO: 1538

SEQ ID NO: 1614 - DNA, 201 bp, Homo sapiens; identical to SEQ ID NO: 1539

SEQ ID NO: 1615 - DNA, 201 bp, Homo sapiens; identical to SEQ ID NO: 1540

SEQ ID NO: 1616 - DNA, 201 bp, Homo sapiens; identical to SEQ ID NO: 1541

SEQ ID NO: 1617 - DNA, 201 bp, Homo sapiens; identical to SEQ ID NO: 1542

SEQ ID NO: 1618 - DNA, 201 bp, Homo sapiens; identical to SEQ ID NO: 1543

SEQ ID NO: 1619 - DNA, 192 bp, Homo sapiens; identical to SEQ ID NO: 1544

SEQ ID NO: 1620 - DNA, 201 bp, Homo sapiens; identical to SEQ ID NO: 1545

SEQ ID NO: 1621 - DNA, 201 bp, Homo sapiens; identical to SEQ ID NO: 1546

SEQ ID NO: 1622 - DNA, 201 bp, Homo sapiens; identical to SEQ ID NO: 1547

SEQ ID NO: 1623 - DNA, 201 bp, Homo sapiens; identical to SEQ ID NO: 1548

SEQ ID NO: 1624 - DNA, 201 bp, Homo sapiens; identical to SEQ ID NO: 1549

SEQ ID NO: 1625 - DNA, 201 bp, Homo sapiens
cagtttccacaagaagaaaattgtgactgatgtgtcagaggtctgcagcatctataccactgccacttctctctctggatccctcctatcagaatgttcaraccggcctgtcatgaacagaacaagtggtgctccgtcctcttggcactcctcctctatgtatttgctaagccccttaaacactctaagtatttcaaacaa

SEQ ID NO: 1626 - DNA, 201 bp, Homo sapiens
tccaaatggaaactgaaatatttgttgaaatgtttaaatttgctgataacaaatgttctgaaagaagtaaactagccgggcgcagtggcgtgcgcctgtartcccagctactcgggaggctgaggcaggaggatcgcttgagcccaagagttcatatctagcctggtcaacatagcaagacccctgtctctatttttttaa

SEQ ID NO: 1627 - DNA, 201 bp, Homo sapiens
ttcttcaacagcagcggcagcagcgacgccagcatcggcgacccctcgcagtccgacgatcctgacgatcccgacgaccccgacttccccggcagcccggwgaggcggcggcggaggtgtcccggcggccgagtgcccaaggaccggcccagcctgaccgtgaccccaaagcgctggaagctgcgagctcgcccaagccta

SEQ ID NO: 1628 - DNA, 201 bp, Homo sapiens
ccccaaagcgctggaagctgcgagctcgcccaagcctaaccgtgaccccaagacgcctggggctgcgagctcggcccccgcagaagtgcagcacaccctgyggcccgctccgacttccgcccttccccagccgcgactccggccgcctcagcccggacctcagcgtgtgcggccagcccagggacggcgacgagctgggca

SEQ ID NO: 1629 - DNA, 201 bp, Homo sapiens
acaggccaggactcttgtcaagagagagggcttcaagaggccgtccggagagagcatcaggaggccagtgttcccaagggccgcattgtgccaaggggaayagacaggctggagagaactagatcaagccggaagagcaaacatcaggaggcaacggaaacctctctcctccattcccaccgctttaaaaagggccaaaag

SEQ ID NO: 1630 - DNA, 201 bp, Homo sapiens
gcaacggaaacctctctcctccattcccaccgctttaaaaagggccaaaagctgggaaaagattcgttccccacccaggacctgactcctttacagaatgyctgcttttggaccaaaaccagggcttccttcagtttccacaagaagaaaattgtgactgatgtgtcagaggtctgcagcatctataccactgccacttct

SEQ ID NO: 1631 - DNA, 201 bp, Homo sapiens
tgctctgccagcacagtctgtttaagtaagctaaatgtatcttactgccccgaaatgagaggagactggtcttgaagcctctggtgctgtttcaacctccrtccccacaggagggtggaactcccattctcacaggtttccagtcagcttttcaaacaagaattttgtttccaaatggaaactgaaatatttgttgaaatg

SEQ ID NO: 1632 - DNA, 201 bp, Homo sapiens
ttcaaacaagaattttgtttccaaatggaaactgaaatatttgttgaaatgtttaaatttgctgataacaaatgttctgaaagaagtaaactagccgggcrcagtggcgtgcgcctgtagtcccagctactcgggaggctgaggcaggaggatcgcttgagcccaagagttcatatctagcctggtcaacatagcaagacc

SEQ ID NO: 1633 - DNA, 201 bp, Homo sapiens
tcaaacaaaaaggcatctgatgctgaaaaggtttatggggaatgcagtcagaagggtcctgtcccctttagccattgccttcccacagaaaaactgcaackctgtgagaagattggggaaggggtgtttggcgaagtgtttcaaacaattgctgatcacacacccgtagccataaaaatcattgctattgaaggaccagat

SEQ ID NO: 1634 - DNA, 201 bp, Homo sapiens
aaccagggcttccttcagtttccacaagaagaaaattgtgactgatgtgtcagaggtctgcagcatctataccactgccacttctctctctggatccctcytatcagaatgttcaaaccggcctgtcatgaacagaacaagtggtgctccgtcctcttggcactcctcctctatgtatttgctaagccccttaaacactct

SEQ ID NO: 1635 - DNA, 201 bp, Homo sapiens
cagcagcgacgccagcatcggcgacccctcgcagtccgacgatcctgacgatcccgacgaccccgacttccccggcagcccggtgaggcggcggcggaggygtcccggcggccgagtgcccaaggaccggcccagcctgaccgtgaccccaaagcgctggaagctgcgagctcgcccaagcctaaccgtgaccccaagacg

SEQ ID NO: 1636 - DNA, 201 bp, Homo sapiens
tctctggcctcgccctgccccgggtccccaacgccaagggacagtgtcatctcgatcggcacctccgcctgtctggttgcagcctcagccgtcccgagcgrcctccacctcccagaagtctccctggaccgagcatctctcccctgctcccaggaggaagcgacaggaggagccaaggacaccaggatggtccaccaaacc

SEQ ID NO: 1637 - DNA, 201 bp, Homo sapiens
aggacttactgcaagaagtacatgaagagcaactggttaacctgctcactgttctgtctcaaaatgagacacattaacgggtaggctacaatgttcctggrcttctttcaaagtggaagcacttctgagctctttagcattgaagtgtcaaaagcaattcacatgggaagacaatttcttatatgtgctttgtgactgcca

SEQ ID NO: 1638 - DNA, 201 bp, Homo sapiens
taaggatattaaaagctgtcaggccaagaccccagcttcattatgcagctgaggtctgtttttttgtttttcgttttttgtttttcattcctgcttttgargaacagctctgtggaaagaacgtgttgcctcctaccttgcccacaagttttgatttttaatttctacagaagatttttttggattaattgtctgatttcc

SEQ ID NO: 1639 - DNA, 201 bp, Homo sapiens
tatgactggactgagaaaaactgggtgtactcccacgattgcgtgtccctccatgatgtgctcgctgcagagctcactaaagccttaaaaaccaaactggrcttgtcttccttggcctattctggagaagacgcttgatgcccagcccggttttaaggatattaaaagctgtcaggccaagaccccagcttcattatgcag

SEQ ID NO: 1640 - DNA, 201 bp, Homo sapiens
ctctgtagatgagaccacctatgaaagactagcggaggaatcactggactctttagcagagttttttgaagaccttgcagacaagccatacacgtttgagkactatgatgtttcctttgggagtggtgtcttaactggtaaactgggtagagatctagcaacctacgtgatcaacaagcagacaccaaacaagcaaatctg

SEQ ID NO: 1641 - DNA, 201 bp, Homo sapiens
accttcaagcgggagaacaagaaccttcaggaggaaatctcggaccttactgagcagctaggagaaggaggaaagaatgtgcatgagctggagaaggtcckcaaacagctggaggtggagaagctggagctgcagtcagccctggaggaggcagaggcctccctggagcacgaggagggcaagatcctccgggcccagcta

SEQ ID NO: 1642 - DNA, 201 bp, Homo sapiens
tcaccaaggggcagagcgtgcagcaggtgtactactccatcggggctctggccaaggcagtgtatgagaagatgttcaactggatggtgacgcgcatcaaygccaccctggagaccaagcagccacgccagtacttcataggagtcctggacatcgctggcttcgagatcttcgacttcaacagctttgagcagctctgca

SEQ ID NO: 1643 - DNA, 201 bp, Homo sapiens
atcctccgggcccagctagagttcaaccagatcaaggcagagatcgagcggaagctggcagagaaggacgaggagatggaacaggccaagcgcaaccaccwgcgggtggtggactcgctgcagacctccctggatgcagagacacgcagccgcaacgaggtcctgagggtgaagaagaagatggaaggagacctcaatgag

SEQ ID NO: 1644 - DNA, 201 bp, Homo sapiens
ctcgctccctcagcacagagctcttcaagctcaagaacgcctacgaggagtccctggagcacctagagaccttcaagcgggagaacaagaaccttcaggargaaatctcggaccttactgagcagctaggagaaggaggaaagaatgtgcatgagctggagaaggtccgcaaacagctggaggtggagaagctggagctgc

SEQ ID NO: 1645 - DNA, 201 bp, Homo sapiens
cccagaacaccagcctcatcaaccagaagaagaagatggagtcggatctgacccagctccagtcggaagtggaggaggcagtgcaggagtgcagaaacgcygaggagaaggccaagaaggccatcacggatgccgccatgatggcagaggagctgaagaaggagcaggacaccagcgcccacctggagcgcatgaagaaga

SEQ ID NO: 1646 - DNA, 201 bp, Homo sapiens
caaaaacaagattcagctggaggccaaagtaaaggagatgaatgagaggctggaggatgaggaggagatgaacgcggagctcactgccaagaagcgcaagytggaagacgagtgctcagagctcaagaaggacattgatgacctggagctgacactggccaaggtggagaaggagaagcatgcaacagagaacaaggtgaa

SEQ ID NO: 1647 - DNA, 201 bp, Homo sapiens
ccgtggaggctgttaatgccaagtgctcctcactggagaagaccaagcaccggctacagaatgagatagaggacttgatggtggacgtagagcgctccaaygctgctgctgcagccctggacaagaagcagagaaactttgacaagatcctggccgagtggaagcagaagtatgaggagtcgcagtctgagctggagtcct

SEQ ID NO: 1648 - DNA, 201 bp, Homo sapiens
cagagacacgcagccgcaacgaggtcctgagggtgaagaagaagatggaaggagacctcaatgagatggagatccagctcagccacgccaaccgcatggcygccgaggcccagaagcaagtcaagagcctccagagcttgctgaaggacacccagatccagctggacgatgcggtccgtgccaacgacgacctgaaggaga

SEQ ID NO: 1649 - DNA, 201 bp, Homo sapiens
tggaggctgttaatgccaagtgctcctcactggagaagaccaagcaccggctacagaatgagatagaggacttgatggtggacgtagagcgctccaatgcygctgctgcagccctggacaagaagcagagaaactttgacaagatcctggccgagtggaagcagaagtatgaggagtcgcagtctgagctggagtcctcac

SEQ ID NO: 1650 - DNA, 201 bp, Homo sapiens
ctctctggacattgatcacaaccagtacaagtttggccacaccaaggtgttcttcaaggcagggctgcttgggctgctggaggagatgcgggatgagaggmtgagccgcatcatcacgcgcatgcaggcccaagcccggggccagctcatgcgcattgagttcaagaagatagtggaacgcagggatgccctgctggtaat

SEQ ID NO: 1651 - DNA, 201 bp, Homo sapiens
cagaggagaaagctggcgtctacaagctgacgggagccatcatgcactacgggaacatgaagttcaagcagaagcagcgggaggagcaggcggagccagasggcaccgaagatgctgacaagtcggcctacctcatggggctgaactcagctgacctgctcaaggggctgtgccaccctcgggtgaaagtgggcaacgagt

SEQ ID NO: 1652 - DNA, 201 bp, Homo sapiens
acttcagaggagaaagctggcgtctacaagctgacgggagccatcatgcactacgggaacatgaagttcaagcagaagcagcgggaggagcaggcggagcmagacggcaccgaagatgctgacaagtcggcctacctcatggggctgaactcagctgacctgctcaaggggctgtgccaccctcgggtgaaagtgggcaac

SEQ ID NO: 1653 - DNA, 201 bp, Homo sapiens
gagaaggacgaggagatggaacaggccaagcgcaaccaccagcgggtggtggactcgctgcagacctccctggatgcagagacacgcagccgcaacgaggycctgagggtgaagaagaagatggaaggagacctcaatgagatggagatccagctcagccacgccaaccgcatggctgccgaggcccagaagcaagtcaag

SEQ ID NO: 1654 - DNA, 201 bp, Homo sapiens
cttcagaggagaaagctggcgtctacaagctgacgggagccatcatgcactacgggaacatgaagttcaagcagaagcagcgggaggagcaggcggagccmgacggcaccgaagatgctgacaagtcggcctacctcatggggctgaactcagctgacctgctcaaggggctgtgccaccctcgggtgaaagtgggcaacg

SEQ ID NO: 1655 - DNA, 201 bp, Homo sapiens
ggcggagcaggagctgattgagaccagcgagcgggtgcagctgctgcattcccagaacaccagcctcatcaaccagaagaagaagatggagtcggatctgwcccagctccagtcggaagtggaggaggcagtgcaggagtgcagaaacgccgaggagaaggccaagaaggccatcacggatgccgccatgatggcagagga

SEQ ID NO: 1656 - DNA, 201 bp, Homo sapiens
acctcaaggagcgctacgcggcctggatgatatatacctactcgggcctcttctgtgtcactgtcaacccctacaagtggctgccggtgtacaatgccgargtggtggccgcctaccggggcaagaagaggagtgaggccccgccccacatcttctccatctccgacaacgcctatcagtacatgctgacagatcgggaga

SEQ ID NO: 1657 - DNA, 201 bp, Homo sapiens
cgcggcctggatgatatatacctactcgggcctcttctgtgtcactgtcaacccctacaagtggctgccggtgtacaatgccgaggtggtggccgcctacmggggcaagaagaggagtgaggccccgccccacatcttctccatctccgacaacgcctatcagtacatgctgacagatcgggagaaccagtccatcctcat

SEQ ID NO: 1658 - DNA, 201 bp, Homo sapiens
agctggcggagcaggagctgattgagaccagcgagcgggtgcagctgctgcattcccagaacaccagcctcatcaaccagaagaagaagatggagtcggayctgacccagctccagtcggaagtggaggaggcagtgcaggagtgcagaaacgccgaggagaaggccaagaaggccatcacggatgccgccatgatggcag

SEQ ID NO: 1659 - DNA, 201 bp, Homo sapiens
gcgtctagaggcccagacccggccctttgacattcgcactgagtgcttcgtgcccgatgacaaggaagagtttgtcaaagccaagattttgtcccgggagrgaggcaaggtcattgctgaaaccgagaatgggaagacggtgactgtgaaggaggaccaggtgttgcagcagaacccacccaagttcgacaagattgagga

SEQ ID NO: 1660 - DNA, 201 bp, Homo sapiens
ccgcgtgaagctagaagaggcccaacgctccctcaatgatttcaccacccagcgagccaagctgcagaccgagaatggagagttggcccggcagctagagsaaaaggaggcgctaatctcgcagctgacccgggggaagctctcttatacccagcaaatggaggacctcaaaaggcagctggaggaggagggcaaggcgaa

SEQ ID NO: 1661 - DNA, 201 bp, Homo sapiens
agcccgcggtgcttttcaacctcaaggagcgctacgcggcctggatgatatatacctactcgggcctcttctgtgtcactgtcaacccctacaagtggctrccggtgtacaatgccgaggtggtggccgcctaccggggcaagaagaggagtgaggccccgccccacatcttctccatctccgacaacgcctatcagtaca

SEQ ID NO: 1662 - DNA, 201 bp, Homo sapiens
atcatggacctggaaaatgataaactgcagctggaagaaaagcttaagaagaaggagtttgacattaatcagcagaacagtaagattgaggatgagcaggygctggcccttcaactacagaagaaactgaaggaaaaccaggcacgcatcgaggagctggaggaggagctggaggccgagcgcaccgccagggctaaggtg

SEQ ID NO: 1663 - DNA, 201 bp, Homo sapiens
tgaggatgagcaggtgctggcccttcaactacagaagaaactgaaggaaaaccaggcacgcatcgaggagctggaggaggagctggaggccgagcgcaccrccagggctaaggtggagaagctgcgctcagacctgtctcgggagctggaggagatcagcgagcggctggaagaggccggcggggccacgtccgtgcagat

SEQ ID NO: 1664 - DNA, 201 bp, Homo sapiens
ggaagctggcggagcaggagctgattgagaccagcgagcgggtgcagctgctgcattcccagaacaccagcctcatcaaccagaagaagaagatggagtckgatctgacccagctccagtcggaagtggaggaggcagtgcaggagtgcagaaacgccgaggagaaggccaagaaggccatcacggatgccgccatgatgg

SEQ ID NO: 1665 - DNA, 201 bp, Homo sapiens
cacaccaaggtgttcttcaaggcagggctgcttgggctgctggaggagatgcgggatgagaggctgagccgcatcatcacgcgcatgcaggcccaagcccrgggccagctcatgcgcattgagttcaagaagatagtggaacgcagggatgccctgctggtaatccagtggaacattcgggccttcatgggggtcaagaat

SEQ ID NO: 1666 - DNA, 201 bp, Homo sapiens
cccttcaactacagaagaaactgaaggaaaaccaggcacgcatcgaggagctggaggaggagctggaggccgagcgcaccgccagggctaaggtggagaarctgcgctcagacctgtctcgggagctggaggagatcagcgagcggctggaagaggccggcggggccacgtccgtgcagatcgagatgaacaagaagcgcg

SEQ ID NO: 1667 - DNA, 201 bp, Homo sapiens
ggagggaggcaaggtcattgctgaaaccgagaatgggaagacggtgactgtgaaggaggaccaggtgttgcagcagaacccacccaagttcgacaagattsaggacatggccatgctgaccttcctgcacgagcccgcggtgcttttcaacctcaaggagcgctacgcggcctggatgatatatacctactcgggcctctt

SEQ ID NO: 1668 - DNA, 201 bp, Homo sapiens
actcagctgacctgctcaaggggctgtgccaccctcgggtgaaagtgggcaacgagtatgtcaccaaggggcagagcgtgcagcaggtgtactactccatyggggctctggccaaggcagtgtatgagaagatgttcaactggatggtgacgcgcatcaacgccaccctggagaccaagcagccacgccagtacttcatag

SEQ ID NO: 1669 - DNA, 201 bp, Homo sapiens
cccgggggaagctctcttatacccagcaaatggaggacctcaaaaggcagctggaggaggagggcaaggcgaagaacgccctggcccatgcactgcagtcrgcccggcatgactgcgacctgctgcgggagcagtacgaggaggagacagaggccaaggccgagctgcagcgcgtcctgtccaaggccaactcggaggtgg

SEQ ID NO: 1670 - DNA, 201 bp, Homo sapiens
tccggaacgacaactcctcccgctttgggaaattcattaggatccactttggggccactggaaagctggcttctgcagacatagagacctacctgctggaraagtcccgggtgatcttccagctgaaagctgagagaaactaccacatcttctaccagattctgtccaacaagaagccggagttgctggacatgctgctgg

SEQ ID NO: 1671 - DNA, 201 bp, Homo sapiens
ctacaggacctggtggacaagctgcaactgaaggtcaaggcctacaagcgccaggccgaggaggcggaggagcaagccaacaccaacctgtccaagttccrcaaggtgcagcatgagctggatgaggcagaggagcgggcggacatcgctgagtcccaggtcaacaagcttcgagccaagagccgtgacattggtgccaag

SEQ ID NO: 1672 - DNA, 201 bp, Homo sapiens
tggagatccagctcagccacgccaaccgcatggctgccgaggcccagaagcaagtcaagagcctccagagcttgctgaaggacacccagatccagctggaygatgcggtccgtgccaacgacgacctgaaggagaacatcgccatcgtggagcggcgcaacaacctgctgcaggctgagctggaggagctgcgtgccgtgg

SEQ ID NO: 1673 - DNA, 201 bp, Homo sapiens
agacctccctggatgcagagacacgcagccgcaacgaggtcctgagggtgaagaagaagatggaaggagacctcaatgagatggagatccagctcagccaygccaaccgcatggctgccgaggcccagaagcaagtcaagagcctccagagcttgctgaaggacacccagatccagctggacgatgcggtccgtgccaacg

SEQ ID NO: 1674 - DNA, 201 bp, Homo sapiens
cctgtgaaatcattgttcgcgcgaccctcatctgcctcaggatgctgtactctactacgcacaactgctccatcttttaagatattggaagtgagagcacrggaggagcatgggcggttcgttttgttagaaagaaacccggattcacgagatggtttttattgattagtttacaggatttgcactattgatagagttttt

SEQ ID NO: 1675 - DNA, 201 bp, Homo sapiens
gggagcatctcagggggcacctgccgttgaattgttctcacttgtgtttgtaagaatccaagtatgtcacccttacaccaagtgagcacacagtgacacartcccctttcaatgtagataacattgcttcagagctggagaacttcatggggctcatcgaggtggtgacgggctacgtgaagatccgccattctcatgcct

SEQ ID NO: 1676 - DNA, 201 bp, Homo sapiens
ggatgctgtactctactacgcacaactgctccatcttttaagatattggaagtgagagcacgggaggagcatgggcggttcgttttgttagaaagaaaccyggattcacgagatggtttttattgattagtttacaggatttgcactattgatagagtttttgccttggcacaggcctgctttgtgataggggttttaaaa

SEQ ID NO: 1677 - DNA, 201 bp, Homo sapiens
tgtttggaaaacagagatgttatcacccttactggattttgcctcatcagtcaagggttgcgtgtctgactgtgaccagtgagacggcagacgggggtgcrcttagggcttttctgccaagaatgacagcagttggtctggagtgctcacctccctgtgaaatcattgttcgcgcgaccctcatctgcctcaggatgctgt

SEQ ID NO: 1678 - DNA, 201 bp, Homo sapiens
gcttcccctgcctgggaggcctcgttccaggagtcgttgttgagagtcaagccagggaagtgtgtttttgtcagggagcagccagtcctgtgctgggagcrtctcagggggcacctgccgttgaattgttctcacttgtgtttgtaagaatccaagtatgtcacccttacaccaagtgagcacacagtgacacaatcccct

SEQ ID NO: 1679 - DNA, 201 bp, Homo sapiens
tcacccttactggattttgcctcatcagtcaagggttgcgtgtctgactgtgaccagtgagacggcagacgggggtgcgcttagggcttttctgccaagartgacagcagttggtctggagtgctcacctccctgtgaaatcattgttcgcgcgaccctcatctgcctcaggatgctgtactctactacgcacaactgctc

SEQ ID NO: 1680 - DNA, 201 bp, Homo sapiens
agaagaaaggaggaagccgcagtattgcctgtgctgctcgagtaggtcttgggtggagtcatggttctccattcttaggaggttgctgtttggaaaacagrgatgttatcacccttactggattttgcctcatcagtcaagggttgcgtgtctgactgtgaccagtgagacggcagacgggggtgcgcttagggcttttct

SEQ ID NO: 1681 - DNA, 201 bp, Homo sapiens
tcatcggcccggcgctgattcctcgtgtccggaggcatgggtgagcatggcagctggttgctccatttgagagacacgctggcgacacactccgtccatcygactgcccctgctgtgctgctcaaggccacaggcacacaggtctcattgcttctgactagattattatttgggggaactggacacaataggtctttctct

SEQ ID NO: 1682 - DNA, 201 bp, Homo sapiens
ttgggatggtctatgaaggagttgccaagggtgtggtgaaagatgaacctgaaaccagagtggccattaaaacagtgaacgaggccgcaagcatgcgtgaraggattgagtttctcaacgaagcttctgtgatgaaggagttcaattgtcaccatgtggtgcgattgctgggtgtggtgtcccaaggccagccaacactgg

SEQ ID NO: 1683 - DNA, 201 bp, Homo sapiens
gcaccaatgcttcagttccttccattcccttggacgttctttcagcatcgaactcctcttctcagttaatcgtgaagtggaaccctccctctctgcccaayggcaacctgagttactacattgtgcgctggcagcggcagcctcaggacggctacctttaccggcacaattactgctccaaagaagacaaaatccccatca

SEQ ID NO: 1684 - DNA, 201 bp, Homo sapiens
cctttaagaatgtcacagagtatgatgggcaggatgcctgcggctccaacagctggaacatggtggacgtggacctcccgcccaacaaggacgtggagccyggcatcttactacatgggctgaagccctggactcagtacgccgtttacgtcaaggctgtgaccctcaccatggtggagaacgaccatatccgtggggcca

SEQ ID NO: 1685 - DNA, 201 bp, Homo sapiens
ccagacctgaaaggaagcggagagatgtcatgcaagtggccaacaccaccatgtccagccgaagcaggaacaccacggccgcagacacctacaacatcacygacccggaagagctggagacagagtaccctttctttgagagcagagtggataacaaggagagaactgtcatttctaaccttcggcctttcacattgtacc

SEQ ID NO: 1686 - DNA, 201 bp, Homo sapiens
caagaacgagcgggccttgccgctgccccagtcttcgacctgctgatccttggatcctgaatctgtgcaaacagtaacgtgtgcgcacgcgcagcggggtsgggggggagagagagttttaacaatccattcacaagcctcctgtacctcagtggatcttcagaactgcccttgctgcccgcgggagacagcttctctgca

SEQ ID NO: 1687 - DNA, 201 bp, Homo sapiens
gtgcaaacagtaacgtgtgcgcacgcgcagcggggtggggggggagagagagttttaacaatccattcacaagcctcctgtacctcagtggatcttcagawctgcccttgctgcccgcgggagacagcttctctgcagtaaaacacatttgggatgttccttttttcaatatgcaagcagctttttattccctgcccaaac

SEQ ID NO: 1688 - DNA, 201 bp, Homo sapiens
aagcaccctttaagaatgtcacagagtatgatgggcaggatgcctgcggctccaacagctggaacatggtggacgtggacctcccgcccaacaaggacgtrgagcccggcatcttactacatgggctgaagccctggactcagtacgccgtttacgtcaaggctgtgaccctcaccatggtggagaacgaccatatccgtg

SEQ ID NO: 1689 - DNA, 201 bp, Homo sapiens
tgtgcgcacgcgcagcggggtggggggggagagagagttttaacaatccattcacaagcctcctgtacctcagtggatcttcagaactgcccttgctgccygcgggagacagcttctctgcagtaaaacacatttgggatgttccttttttcaatatgcaagcagctttttattccctgcccaaacccttaactgacatgg

SEQ ID NO: 1690 - DNA, 201 bp, Homo sapiens
ctcagtgaaggtggggagaagctgaaccggcttccctgccctgcctccccagccccctgcccaacccccaagaatctggtggccatgggccccgaagcagyctggcggacaggcttggagtcaaggggccccatgcctgcttctctcccagccccagctcccccgcccgcccccaaggacacagatgggaaggggtttcca

SEQ ID NO: 1691 - DNA, 201 bp, Homo sapiens
ctaccagggcttgtccaacgagcaagtccttcgcttcgtcatggagggcggccttctggacaagccagacaactgtcctgacatgctgtttgaactgatgygcatgtgctggcagtataaccccaagatgaggccttccttcctggagatcatcagcagcatcaaagaggagatggagcctggcttccgggaggtctcctt

SEQ ID NO: 1692 - DNA, 201 bp, Homo sapiens
aagaacgagcgggccttgccgctgccccagtcttcgacctgctgatccttggatcctgaatctgtgcaaacagtaacgtgtgcgcacgcgcagcggggtgsggggggagagagagttttaacaatccattcacaagcctcctgtacctcagtggatcttcagaactgcccttgctgcccgcgggagacagcttctctgcag

SEQ ID NO: 1693 - DNA, 201 bp, Homo sapiens
aacgagcgggccttgccgctgccccagtcttcgacctgctgatccttggatcctgaatctgtgcaaacagtaacgtgtgcgcacgcgcagcggggtggggkgggagagagagttttaacaatccattcacaagcctcctgtacctcagtggatcttcagaactgcccttgctgcccgcgggagacagcttctctgcagtaa

SEQ ID NO: 1694 - DNA, 201 bp, Homo sapiens
gaacgggggccgcaagaacgagcgggccttgccgctgccccagtcttcgacctgctgatccttggatcctgaatctgtgcaaacagtaacgtgtgcgcacrcgcagcggggtggggggggagagagagttttaacaatccattcacaagcctcctgtacctcagtggatcttcagaactgcccttgctgcccgcgggagac

SEQ ID NO: 1695 - DNA, 201 bp, Homo sapiens
ccctgccactgcccgacagacactcaggacacaaggccgagaacggccccggccctggggtgctggtcctccgcgccagcttcgacgagagacagccttaygcccacatgaacgggggccgcaagaacgagcgggccttgccgctgccccagtcttcgacctgctgatccttggatcctgaatctgtgcaaacagtaacgt

SEQ ID NO: 1696 - DNA, 201 bp, Homo sapiens
ccaacctcacggtcatccgcggctggaaactcttctacaactacgccctggtcatcttcgagatgaccaatctcaaggatattgggctttacaacctgagraacattactcggggggccatcaggattgagaaaaatgctgacctctgttacctctccactgtggactggtccctgatcctggatgcggtgtccaataact

SEQ ID NO: 1697 - DNA, 201 bp, Homo sapiens
tgaagcgcctggagaactgcacggtgatcgagggctacctccacatcctgctcatctccaaggccgaggactaccgcagctaccgcttccccaagctcackgtcattaccgagtacttgctgctgttccgagtggctggcctcgagagcctcggagacctcttccccaacctcacggtcatccgcggctggaaactcttct

SEQ ID NO: 1698 - DNA, 201 bp, Homo sapiens
ctgcctgcccgcccaacacctacaggtttgagggctggcgctgtgtggaccgtgacttctgcgccaacatcctcagcgccgagagcagcgactccgagggrtttgtgatccacgacggcgagtgcatgcaggagtgcccctcgggcttcatccgcaacggcagccagagcatgtactgcatcccttgtgaaggtccttgcc

SEQ ID NO: 1699 - DNA, 201 bp, Homo sapiens
aatttaccgcatggaggaagtgacggggactaaagggcgccaaagcaaaggggacataaacaccaggaacaacggggagagagcctcctgtgaaagtgacrtcctgcatttcacctccaccaccacgtcgaagaatcgcatcatcataacctggcaccggtaccggccccctgactacagggatctcatcagcttcaccgt

SEQ ID NO: 1700 - DNA, 201 bp, Homo sapiens
aacaccaggaacaacggggagagagcctcctgtgaaagtgacgtcctgcatttcacctccaccaccacgtcgaagaatcgcatcatcataacctggcaccrgtaccggccccctgactacagggatctcatcagcttcaccgtttactacaaggaagcaccctttaagaatgtcacagagtatgatgggcaggatgcctgc

SEQ ID NO: 1701 - DNA, 201 bp, Homo sapiens
gttctttcagcatcgaactcctcttctcagttaatcgtgaagtggaaccctccctctctgcccaacggcaacctgagttactacattgtgcgctggcagcrgcagcctcaggacggctacctttaccggcacaattactgctccaaagaagacaaaatccccatcaggaagtatgccgacggcaccatcgacattgaggag

SEQ ID NO: 1702 - DNA, 201 bp, Homo sapiens
tgtgcaaacagtaacgtgtgcgcacgcgcagcggggtggggggggagagagagttttaacaatccattcacaagcctcctgtacctcagtggatcttcagwactgcccttgctgcccgcgggagacagcttctctgcagtaaaacacatttgggatgttccttttttcaatatgcaagcagctttttattccctgcccaaa

SEQ ID NO: 1703 - DNA, 201 bp, Homo sapiens; identical to SEQ ID NO: 1681

SEQ ID NO: 1704 - DNA, 201 bp, Homo sapiens; identical to SEQ ID NO: 1682

SEQ ID NO: 1705 - DNA, 201 bp, Homo sapiens
gcaccaatgcttcagttccttccattcccttggacgttctttcagcatcgaactcctcttctcagttaatcgtgaagtggaaccctccctctctgcccaayggcaacctgagttactacattgtgcgctggcagcggcagcctcaggacggctacctttaccggcacaattactgctccaaagacaaaatccccatcagga

SEQ ID NO: 1706 - DNA, 201 bp, Homo sapiens; identical to SEQ ID NO: 1684

SEQ ID NO: 1707 - DNA, 201 bp, Homo sapiens; identical to SEQ ID NO: 1685

SEQ ID NO: 1708 - DNA, 201 bp, Homo sapiens; identical to SEQ ID NO: 1686

SEQ ID NO: 1709 - DNA, 201 bp, Homo sapiens; identical to SEQ ID NO: 1687

SEQ ID NO: 1710 - DNA, 201 bp, Homo sapiens; identical to SEQ ID NO: 1688

SEQ ID NO: 1711 - DNA, 201 bp, Homo sapiens; identical to SEQ ID NO: 1689

SEQ ID NO: 1712 - DNA, 201 bp, Homo sapiens; identical to SEQ ID NO: 1690

SEQ ID NO: 1713 - DNA, 201 bp, Homo sapiens; identical to SEQ ID NO: 1691

SEQ ID NO: 1714 - DNA, 201 bp, Homo sapiens; identical to SEQ ID NO: 1692

SEQ ID NO: 1715 - DNA, 201 bp, Homo sapiens; identical to SEQ ID NO: 1693

SEQ ID NO: 1716 - DNA, 201 bp, Homo sapiens; identical to SEQ ID NO: 1694

SEQ ID NO: 1717 - DNA, 201 bp, Homo sapiens; identical to SEQ ID NO: 1695

SEQ ID NO: 1718 - DNA, 201 bp, Homo sapiens; identical to SEQ ID NO: 1696

SEQ ID NO: 1719 - DNA, 201 bp, Homo sapiens; identical to SEQ ID NO: 1697

SEQ ID NO: 1720 - DNA, 201 bp, Homo sapiens; identical to SEQ ID NO: 1698

SEQ ID NO: 1721 - DNA, 201 bp, Homo sapiens; identical to SEQ ID NO: 1699

SEQ ID NO: 1722 - DNA, 201 bp, Homo sapiens; identical to SEQ ID NO: 1700

SEQ ID NO: 1723 - DNA, 201 bp, Homo sapiens
gttctttcagcatcgaactcctcttctcagttaatcgtgaagtggaaccctccctctctgcccaacggcaacctgagttactacattgtgcgctggcagcrgcagcctcaggacggctacctttaccggcacaattactgctccaaagacaaaatccccatcaggaagtatgccgacggcaccatcgacattgaggaggtc

SEQ ID NO: 1724 - DNA, 201 bp, Homo sapiens; identical to SEQ ID NO: 1702

SEQ ID NO: 1725 - DNA, 201 bp, Homo sapiens
caagctcttcgaggccagcattgaaacaggggaccgtgtctggaggatgcctctcttcaaacattgtacaagacaggttgtagattgccagctggctgatrttaacaacattggaaaatatagatctgcgggagcatgtacatctgcggcattcctgaaagaattcgtgactcatcctaagtgggcacatttagacatagc

SEQ ID NO: 1726 - DNA, 201 bp, Homo sapiens
atgtacatctgcggcattcctgaaagaattcgtgactcatcctaagtgggcacatttagacatagcaggtgtgatgaccaacaaagatgaggttccctatytatggaaaggcatgaccgggaggcccacaaggactctcatagagttcttacttcgtttcagtcaagacaatgcttagttcagatactcaaaaatgtcttc

SEQ ID NO: 1727 - DNA, 201 bp, Homo sapiens
ttcgtgactcatcctaagtgggcacatttagacatagcaggtgtgatgaccaacaaagatgaggttccctatctatggaaaggcatgaccgggaggcccamaaggactctcatagagttcttacttcgtttcagtcaagacaatgcttagttcagatactcaaaaatgtcttcactctatcttaaattggacagttgaagt

SEQ ID NO: 1728 - DNA, 201 bp, Homo sapiens
tgaggttccctatctatggaaaggcatgaccgggaggcccacaaggactctcatagagttcttacttcgtttcagtcaagacaatgcttagttcagatacwcaaaaatgtcttcactctatcttaaattggacagttgaagttaaaaggtttttgaatgaatggatgaaaatattttaaaggaggcaatttatatttaaaa

SEQ ID NO: 1729 - DNA, 201 bp, Homo sapiens
aatctcagtttgcccattaatattataggtctggcccctctgtgaaaacatgcccagcggcaaggccaacaagctgggggatgttgttagagccaggaacrggaagaccatccaggttggtaacactgatgctgaggggaggctcatactggctgatgcgctctgttacgtgcacacatttaacccgaaggtcatcctcaa

SEQ ID NO: 1730 - DNA, 201 bp, Homo sapiens
atgagagaaaattatgtaccaacagaattatttgtgagaagaatgaacaaattttgataaagtatgaatttgttttattttaaaaagcaaacatactaaattttttttattttattgcttataatttattaagaatgtttacacctgtataaggatttcatatatacattgtatgtgtgtatatataaatacatatatgac

SEQ ID NO: 1731 - DNA, 201 bp, Homo sapiens
ttcctcttccagctgagcagagttggataattgaattagtcattctgacattctttggaccatatcatcttagtggtttggggtcagtgctcatctgatawatctttcttaccacctcttctacttactttctcttacttaaattatctggcataagcagttatctccagcttttgttagaatcttgcatgttgattacta

SEQ ID NO: 1732 - DNA, 201 bp, Homo sapiens
gggtgactgacacaccaaacaagatgtttcactgggtactctgccatagaaatggcagattaagaagattgactataccaaacattatattaaaaacacaraataaaaactataaaaatgtactttaggacattaaagaaaactcaagttagaagcataccattttcctttcatggaagggtacagtattacaaagataat

SEQ ID NO: 1733 - DNA, 201 bp, Homo sapiens
aatgtatcccctttgctaagcaatgcatgactgcaatcctaattctcacatgttttggggaaaaaattttaattttgaaaaaatttaggaaagttcctacyaaatatacatgtataaagtttattaaaagtcataatgacccaggaatagctaatgacacagaagtagatcaaaatagaacacaatagagaacttcaaaat

SEQ ID NO: 1734 - DNA, 201 bp, Homo sapiens
atagagctggccgaatgccggggtagaggggaccggaagttgtttttttcgcccccgcccagcggccggatcgcatctcagctggttggctttggttagasctcccgtcagactttcgttcggccctaggatttggtagccccgaagtgtgggctctctccagtaccagactcatttcagtaccagcctttgggaagtcgt

SEQ ID NO: 1735 - DNA, 176 bp, Homo sapiens
atcttgctctgcccccgacatcgtggtgagaggggaaccttcctcatatctgggcgctggcctctccgggcttggragagaggaactcagtgatcatagagctggccgaatgccggggtagaggggaccggaagttgtttttttcgcccccgcccagcggccggatcgcatctcag

SEQ ID NO: 1736 - DNA, 193 bp, Homo sapiens
ttgctttgggtatatgtatattgttacttgtagccaaaaagaaacctctcttagtagaaacaaagggagagttaggttattcaaaaattagtatgggacarttgaatatgcctttttctgcgggagtaggtggggagaaacttaaaggttcacttgtaaaacaataaagtactaaagaaaatgtgataatact

SEQ ID NO: 1737 - DNA, 201 bp, Homo sapiens
gttgtttttttcgcccccgcccagcggccggatcgcatctcagctggttggctttggttagagctcccgtcagactttcgttcggccctaggatttggtakccccgaagtgtgggctctctccagtaccagactcatttcagtaccagcctttgggaagtcgtgtgaatacctcggtctcttagccacagggatagaatgg

SEQ ID NO: 1738 - DNA, 201 bp, Homo sapiens
gccggggtagaggggaccggaagttgtttttttcgcccccgcccagcggccggatcgcatctcagctggttggctttggttagagctcccgtcagactttmgttcggccctaggatttggtagccccgaagtgtgggctctctccagtaccagactcatttcagtaccagcctttgggaagtcgtgtgaatacctcggtct

SEQ ID NO: 1739 - DNA, 201 bp, Homo sapiens
tttttgcttctccataacgagatggtgtctggagtgtacaagtccgcggagcagggggaggtggaaaacggacgatgtattactaagctggaaaacatggsgtttcgagtgggacaaggattgatagaaaggtttacaaaagatactgcaaggttcaaggatgagttagatatcatgaagttcatttgtaaagatttttgg

SEQ ID NO: 1740 - DNA, 201 bp, Homo sapiens
ttagaagcataccattttcctttcatggaagggtacagtattacaaagataatttgtttaacttgatttattaaattctagttatgtgccctataatgatktttcagtcagtgacagacctcatatatggcagtggttccataagattacaatactgtatttttactgtaccttctttatgtttagatatgcaagtactta

SEQ ID NO: 1741 - DNA, 201 bp, Homo sapiens
gtttttgcttctccataacgagatggtgtctggagtgtacaagtccgcggagcagggggaggtggaaaacggacgatgtattactaagctggaaaacatgsggtttcgagtgggacaaggattgatagaaaggtttacaaaagatactgcaaggttcaaggatgagttagatatcatgaagttcatttgtaaagatttttg

SEQ ID NO: 1742 - DNA, 201 bp, Homo sapiens
gaacacaatagagaacttcaaaataaaacaggtgtgagaattgtgtgtgtgaaaaagctgggttcaaataagttggtttgttagacattcatatgcctacycatcagccatttcgttctcccttccttgctgacaaagccccattttttttttctttttttttggcctaaaactctgtatggctgccttgtgctatagaat

SEQ ID NO: 1743 - DNA, 201 bp, Homo sapiens
tagccacagggatagaatggcggcctgacggagccgcggcgccggcgaagtcgctgaggcgcgagctggaacccccagaccagctcaaacgggagccaaamctcgaagcttggaagaattagcaggaaatggcggatgaggcgttgtttttgcttctccataacgagatggtgtctggagtgtacaagtccgcggagcagg

SEQ ID NO: 1744 - DNA, 132 bp, Homo sapiens
tcatcctgttgtacacctattgcaaatgaagattttggtgatgcatctgggaggatctggaaggggcctgcacctcttgagcttggagctccctcatatgrgttcaccagtgaggacacagtcattgttggt

SEQ ID NO: 1745 - DNA, 161 bp, Homo sapiens
aagaacctgcagttgaagagcgtttgcattcatcctgttgtacacctattgcaaatgaagattttggtgatgcatctgggaggatctggaaggggcctgcmcctcttgagcttggagctccctcatatgggttcaccagtgaggacacagtcattgttggt

SEQ ID NO: 1746 - DNA, 188 bp, Homo sapiens
gccacagaaccaagaaggaaattgaccaagaacctgcagttgaagagcgtttgcattcatcctgttgtacacctattgcaaatgaagattttggtgatgcrtctgggaggatctggaaggggcctgcacctcttgagcttggagctccctcatatgggttcaccagtgaggacacagtcattgttggt

SEQ ID NO: 1747 - DNA, 154 bp, Homo sapiens
caggagtcactgagtggccaggccatgagcctgtcttgggtcaactctgtgggyctcaatgtccctgcttctgttcgttattcccatacagacatcaatgtgcctgacttccctgattactgttgcattgagatttttgatgggacaaagtctt

SEQ ID NO: 1748 - DNA, 196 bp, Homo sapiens
caggagtcactgagtggccaggccatgagcctgtcttgggtcaactctgtgggcctcaatgtccctgcttctgttcgttattcccatacagacatyaatgtgcctgacttccctgattactgttgcattgagatttttgatgggacaaagtcttcaaaagaggatggcgaggctaggaaagggttctcctatttgg

SEQ ID NO: 1749 - DNA, 201 bp, Homo sapiens
aaaagccataatacaatttggtctgtcgtgaagggtatccttaaaaaggatggccccttgggcttctaccatggactctcgagtactctacttcaagaagkaccgggttatttctttttctttggtggctatgaactgagccgatcgttttttgcgtcagggagatcaaaagatgaactaggccctgtccatttgatgtta

SEQ ID NO: 1750 - DNA, 201 bp, Homo sapiens
actgagccgatcgttttttgcgtcagggagatcaaaagatgaactaggccctgtccatttgatgttaagtggtggagttgctggaatttgcctgtggcttrtcgtgttcccagtggattgtattaaatccagaattcaagttctttccatgtatgggaaacaggcaggatttattggtaccctcttaagtgttgtgagaaa

SEQ ID NO: 1751 - DNA, 201 bp, Homo sapiens
gtgtactgactgggcagcccttcgacacaataaaagtgaagatgcagacgttccctgacctgtacaagggcctcaccgactgcttcctgaagacatacgcycaagtgggtctccggggcttctacaagggcaccggcccggcacttatggcctacgtcgccgaaaactcggtcctcttcatgtgctacgggttctgccagc

SEQ ID NO: 1752 - DNA, 201 bp, Homo sapiens
tccttcgcctctgcatttgctgcactggctctctgccccactgagcttgtgaagtgccggctacagaccatgtatgaaatggagatgtcagggaagatagyaaaaagccataatacaatttggtctgtcgtgaagggtatccttaaaaaggatggccccttgggcttctaccatggactctcgagtactctacttcaagaa

SEQ ID NO: 1753 - DNA, 201 bp, Homo sapiens
ccccactgagcttgtgaagtgccggctacagaccatgtatgaaatggagatgtcagggaagatagcaaaaagccataatacaatttggtctgtcgtgaagkgtatccttaaaaaggatggccccttgggcttctaccatggactctcgagtactctacttcaagaagtaccgggttatttctttttctttggtggctatga

SEQ ID NO: 1754 - DNA, 201 bp, Homo sapiens
gaatttgcctgtggcttgtcgtgttcccagtggattgtattaaatccagaattcaagttctttccatgtatgggaaacaggcaggatttattggtaccctyttaagtgttgtgagaaatgaaggaatagtagccttatattctggactgaaagctactatgattcgagcaatccctgccaatggggcactgtttgtggcct

SEQ ID NO: 1755 - DNA, 201 bp, Homo sapiens
aaacctttcagtgattctaacttcaagcttggaaaaaaagacgaggcttcccagtgtttgtggtggtggatctgcctggttctcaatttgacaccctaagmgatcatactcaagaatagtacagatgtgtggaatacgccaatacctttaactacagacatcatgttctcaagataaaagcctttaaaacaaaaagccatc

SEQ ID NO: 1756 - DNA, 201 bp, Homo sapiens
ctcgtggaaagtgtacaggaggccaaggcccagttaaccaccccagcctttcctgtagagggctggcaatgtagtctctgcacctatatcaataattcagwgttaccttattgtgaaatgtgtgagactcctcaaggcagtgctgttatgcaaatagatagcctcaaccatatccaggataaaaacgagaaggatgattct

SEQ ID NO: 1757 - DNA, 201 bp, Homo sapiens
tgaacgcacaagaactctttttacgtctgagagatgcccctaaaagtcagaggaagaatcttctgtatgctacctggacttcaaagctcccattagaacayctaaatgaaatgataagaaacccaggggaaggacatttctggcaggtggatcacatcaagccagtgtatgggggaggaggacagtgttccctggacaacc

SEQ ID NO: 1758 - DNA, 201 bp, Homo sapiens
gaatcacacaaggtaacaggtgccgagcaaggtctgcaggtttctggattgccagatagtgcagcacctgaaggaggtgcagcgcacacaaatgatcagcrcaggtgtcaaaggatgaagcagccacttacagaagtgcaaatcctcagccactcatcttaatccttaacaagacagcactccagataggcagccacgacc

SEQ ID NO: 1759 - DNA, 201 bp, Homo sapiens
gaggcttcccagtgtttgtggtggtggatctgcctggttctcaatttgacaccctaagcgatcatactcaagaatagtacagatgtgtggaatacgccaayacctttaactacagacatcatgttctcaagataaaagcctttaaaacaaaaagccatcgtaggtatcaagtcaacatgaaattggaatgcaaaattaata

SEQ ID NO: 1760 - DNA, 201 bp, Homo sapiens
aagttcgaaaaagaaaaacagcatgatattcgatcattttttgtaccacaacctaaaaaaagacagttgatgacctcctgtgacgaatcaaagagattccrggaggaaaatactgtagtgtcatcagaccctacaaaaacagctgcaagagatatcatcgattatgaaagtgatgttgaacctgaaacgaaaagattgaaa

SEQ ID NO: 1761 - DNA, 201 bp, Homo sapiens
tggtggctaggttcccaagttcgaaaaagaaaaacagcatgatattcgatcattttttgtaccacaacctaaaaaaagacagttgatgacctcctgtgacraatcaaagagattccgggaggaaaatactgtagtgtcatcagaccctacaaaaacagctgcaagagatatcatcgattatgaaagtgatgttgaacctga

SEQ ID NO: 1762 - DNA, 201 bp, Homo sapiens
tatgaaagtgatgttgaacctgaaacgaaaagattgaaattggctgcctcggaagaccactgcagtccgtcggaagagacaccatcccagtccaagcaaayccgaactccactcgtggaaagtgtacaggaggccaaggcccagttaaccaccccagcctttcctgtagagggctggcaatgtagtctctgcacctatatc

SEQ ID NO: 1763 - DNA, 201 bp, Homo sapiens
aacagtggaagagttcagacactttgccagtgtatgacaccttaatgttctgtgcaagtaggaatactgaccggattcacatctatactaaggatggaaarcagatgagctgtaatttcattcctctggatataaaattagacctttgggaagatttaccagcaagctttcagctgaaacaatatcgctcactgattttga

SEQ ID NO: 1764 - DNA, 201 bp, Homo sapiens
ttggtaaagaactgcatgaatcacacaaggtaacaggtgccgagcaaggtctgcaggtttctggattgccagatagtgcagcacctgaaggaggtgcagcrcacacaaatgatcagcgcaggtgtcaaaggatgaagcagccacttacagaagtgcaaatcctcagccactcatcttaatccttaacaagacagcactcca

SEQ ID NO: 1765 - DNA, 201 bp, Homo sapiens
aagtgaagaatgttgggggccatgtccgtctgatcacaaaggagtccaggccacgggatcctttcacaaaaaaacttcttgaagatggagcctgtgtcccrtttctaaatccatacacagtccaggcagatctcactgtgaagccctctacatccaaaggctatttgcaagctgtggataatgaaggaaatccactttgcc

SEQ ID NO: 1766 - DNA, 201 bp, Homo sapiens
tgaacctgaaacgaaaagattgaaattggctgcctcggaagaccactgcagtccgtcggaagagacaccatcccagtccaagcaaatccgaactccactcrtggaaagtgtacaggaggccaaggcccagttaaccaccccagcctttcctgtagagggctggcaatgtagtctctgcacctatatcaataattcagagtt

SEQ ID NO: 1767 - DNA, 201 bp, Homo sapiens
aagaccactgcagtccgtcggaagagacaccatcccagtccaagcaaatccgaactccactcgtggaaagtgtacaggaggccaaggcccagttaaccacyccagcctttcctgtagagggctggcaatgtagtctctgcacctatatcaataattcagagttaccttattgtgaaatgtgtgagactcctcaaggcagtg

SEQ ID NO: 1768 - DNA, 179 bp, Homo sapiens
gtcacctgggagcttttctggggctgtcaactggaacaccgcaggatttctccatgtggcctgggtttcctcataccartggtggctaggttcccaagttcgaaaaagaaaaacagcatgatattcgatcattttttgtaccacaacctaaaaaaagacagttgatgacctcctgtgac

SEQ ID NO: 1769 - DNA, 201 bp, Homo sapiens
tcaacatgaaattggaatgcaaaattaatactgctgaggatttccttcatatcccatgctgtttaactatctcttccacagtcctagaatcaatctttttwaattaagagacagggtctgtctttgttacccaggctggagtacagtggtgtcatcaaagctcagtgcagcctccaactcctgggctcaatactcttgcct

SEQ ID NO: 1770 - DNA, 201 bp, Homo sapiens; identical to SEQ ID NO: 1756

SEQ ID NO: 1771 - DNA, 201 bp, Homo sapiens; identical to SEQ ID NO: 1757

SEQ ID NO: 1772 - DNA, 201 bp, Homo sapiens; identical to SEQ ID NO: 1762

SEQ ID NO: 1773 - DNA, 201 bp, Homo sapiens
ttattcagaataaaactgatgttaggagaatgtcgaccagtaaagtgacagttctgggttatggtctcttaaccgcagatgcaaagactttgatagatgcmctgaataatcagaacttcaaagtagttatagtggatgaatcacactacatgaaatccagaaatgcaactcgcagcaggattttattgccaatagtacaga

SEQ ID NO: 1774 - DNA, 201 bp, Homo sapiens; identical to SEQ ID NO: 1764

SEQ ID NO: 1775 - DNA, 201 bp, Homo sapiens; identical to SEQ ID NO: 1766

SEQ ID NO: 1776 - DNA, 201 bp, Homo sapiens; identical to SEQ ID NO: 1755

SEQ ID NO: 1777 - DNA, 201 bp, Homo sapiens; identical to SEQ ID NO: 1758

SEQ ID NO: 1778 - DNA, 201 bp, Homo sapiens; identical to SEQ ID NO: 1759

SEQ ID NO: 1779 - DNA, 201 bp, Homo sapiens
agaaattgaaaaatggatcccagagctaagtccagaagaaatcaatgttattcagaataaaactgatgttaggagaatgtcgaccagtaaagtgacagttstgggttatggtctcttaaccgcagatgcaaagactttgatagatgcactgaataatcagaacttcaaagtagttatagtggatgaatcacactacatgaa

SEQ ID NO: 1780 - DNA, 201 bp, Homo sapiens
cacttcgaaaaagaaaaacagcatgatattcgatcattttttgtaccacaacctaaaaaaagacagttgatgacctcctgtgacgaatcaaagagattccrggaggaaaatactgtagtgtcatcagaccctacaaaaacagctgcaagagatatcatcgattatgaaagtgatgttgaacctgaaacgaaaagattgaaa

SEQ ID NO: 1781 - DNA, 201 bp, Homo sapiens
ggaagctttgttcactcacttcgaaaaagaaaaacagcatgatattcgatcattttttgtaccacaacctaaaaaaagacagttgatgacctcctgtgacraatcaaagagattccgggaggaaaatactgtagtgtcatcagaccctacaaaaacagctgcaagagatatcatcgattatgaaagtgatgttgaacctga

SEQ ID NO: 1782 - DNA, 201 bp, Homo sapiens
gagacagtcatggggttgataactcgcatgtttaaacaaactgctattgccaaggcaggtgctgtaaaggattatattaagatgatgcttcagaatgattygcttaaatttctggtttttgctcaccatttaagcatgctccaagcttgcacagaagcagtcatcgaaaataagactcgttacattaggatagatggaagt

SEQ ID NO: 1783 - DNA, 201 bp, Homo sapiens; identical to SEQ ID NO: 1763

SEQ ID NO: 1784 - DNA, 201 bp, Homo sapiens; identical to SEQ ID NO: 1765

SEQ ID NO: 1785 - DNA, 201 bp, Homo sapiens; identical to SEQ ID NO: 1767

SEQ ID NO: 1786 - DNA, 201 bp, Homo sapiens; identical to SEQ ID NO: 1769

SEQ ID NO: 1787 - DNA, 201 bp, Homo sapiens; identical to SEQ ID NO: 1755

SEQ ID NO: 1788 - DNA, 201 bp, Homo sapiens; identical to SEQ ID NO: 1763

SEQ ID NO: 1789 - DNA, 201 bp, Homo sapiens; identical to SEQ ID NO: 1764

SEQ ID NO: 1790 - DNA, 201 bp, Homo sapiens; identical to SEQ ID NO: 1757

SEQ ID NO: 1791 - DNA, 201 bp, Homo sapiens; identical to SEQ ID NO: 1758

SEQ ID NO: 1792 - DNA, 201 bp, Homo sapiens; identical to SEQ ID NO: 1765

SEQ ID NO: 1793 - DNA, 201 bp, Homo sapiens; identical to SEQ ID NO: 1759

SEQ ID NO: 1794 - DNA, 201 bp, Homo sapiens; identical to SEQ ID NO: 1769

SEQ ID NO: 1795 - DNA, 201 bp, Homo sapiens; identical to SEQ ID NO: 1756

SEQ ID NO: 1796 - DNA, 201 bp, Homo sapiens; identical to SEQ ID NO: 1757

SEQ ID NO: 1797 - DNA, 201 bp, Homo sapiens
aaatcaagaattcaaattctcttctactaattacttttagtattaaatacattttgaaagtacttaacagaaactaagatacaatactgaatatttctgtkgtctttttgatttgattcagactcgcaattatgtttcagcaatgttttgtaaagctctttacccctaatatgcctaatcactgtattgtgcatagattgt

SEQ ID NO: 1798 - DNA, 201 bp, Homo sapiens; identical to SEQ ID NO: 1779

SEQ ID NO: 1799 - DNA, 201 bp, Homo sapiens; identical to SEQ ID NO: 1780

SEQ ID NO: 1800 - DNA, 201 bp, Homo sapiens; identical to SEQ ID NO: 1781

SEQ ID NO: 1801 - DNA, 201 bp, Homo sapiens; identical to SEQ ID NO: 1762

SEQ ID NO: 1802 - DNA, 201 bp, Homo sapiens; identical to SEQ ID NO: 1773

SEQ ID NO: 1803 - DNA, 201 bp, Homo sapiens; identical to SEQ ID NO: 1763

SEQ ID NO: 1804 - DNA, 201 bp, Homo sapiens; identical to SEQ ID NO: 1782

SEQ ID NO: 1805 - DNA, 201 bp, Homo sapiens; identical to SEQ ID NO: 1765

SEQ ID NO: 1806 - DNA, 201 bp, Homo sapiens; identical to SEQ ID NO: 1766

SEQ ID NO: 1807 - DNA, 201 bp, Homo sapiens; identical to SEQ ID NO: 1767

SEQ ID NO: 1808 - DNA, 201 bp, Homo sapiens; identical to SEQ ID NO: 1773

SEQ ID NO: 1809 - DNA, 201 bp, Homo sapiens; identical to SEQ ID NO: 1782

SEQ ID NO: 1810 - DNA, 201 bp, Homo sapiens
ccatgttacaagtcaaaaatctaggagtctgaagattactctaggcccctgcatcttcctcacccctcatgttcagtcagcatgtcccatcagatcttctygctgctagccccatgtgtcctaagttcccaggaaaccctcccattccccattcatccctcaaggaagggacgatcaagtgtcattagacatttgaagaga

SEQ ID NO: 1811 - DNA, 201 bp, Homo sapiens; identical to SEQ ID NO: 1779

SEQ ID NO: 1812 - DNA, 201 bp, Homo sapiens; identical to SEQ ID NO: 1756

SEQ ID NO: 1813 - DNA, 201 bp, Homo sapiens; identical to SEQ ID NO: 1757

SEQ ID NO: 1814 - DNA, 201 bp, Homo sapiens; identical to SEQ ID NO: 1797

SEQ ID NO: 1815 - DNA, 201 bp, Homo sapiens; identical to SEQ ID NO: 1779

SEQ ID NO: 1816 - DNA, 201 bp, Homo sapiens; identical to SEQ ID NO: 1780

SEQ ID NO: 1817 - DNA, 201 bp, Homo sapiens; identical to SEQ ID NO: 1781

SEQ ID NO: 1818 - DNA, 201 bp, Homo sapiens; identical to SEQ ID NO: 1762

SEQ ID NO: 1819 - DNA, 201 bp, Homo sapiens; identical to SEQ ID NO: 1773

SEQ ID NO: 1820 - DNA, 201 bp, Homo sapiens; identical to SEQ ID NO: 1763

SEQ ID NO: 1821 - DNA, 201 bp, Homo sapiens; identical to SEQ ID NO: 1782

SEQ ID NO: 1822 - DNA, 201 bp, Homo sapiens; identical to SEQ ID NO: 1765

SEQ ID NO: 1823 - DNA, 201 bp, Homo sapiens; identical to SEQ ID NO: 1766

SEQ ID NO: 1824 - DNA, 201 bp, Homo sapiens; identical to SEQ ID NO: 1767

SEQ ID NO: 1825 - DNA, 135 bp, Homo sapiens
ggacctgctgatactggcccagagcaccagcaagagttggagagtaaacttctgctgaaagcagacaggaatatgttatctaatttcaaatgcgaagattmtaaatttgaaaccatcgaaaaaccccagtcctga

SEQ ID NO: 1826 - DNA, 142 bp, Homo sapiens
atctggaggacctgctgatactggcccagagcaccagcaagagttggagagtaaacttctgctgaaagcagacaggaatatgttatctaatttcaaatgcraagattctaaatttgaaaccatcgaaaaaccccagtcctga

SEQ ID NO: 1827 - DNA, 173 bp, Homo sapiens
atgattcttcagaggctcttcaagttctcctctgtcattcggtcagtagtctcactccctttgcagaagaacrttggtgtcacacagtggcatttaacaagaaacttggtcccatacagaaactcttcgtggacaacattagggactacaaatctaagccacaggcatctgga

SEQ ID NO: 1828 - DNA, 151 bp, Homo sapiens
atgattcttcagaggctcttcaagttctcctctgtcattcggtcagtagtstcactccctttgcagaagaacgttggtgtcacacagtggcatttaacaagaaacttggtcccatacagaaactcttcgtggacaacattagggactacaa

SEQ ID NO: 1829 - DNA, 144 bp, Homo sapiens
gtactctcagccatggtgaatcccaccgtgttcttccacattcyagtggacagcgagcccttgggccgcgtctccttcaagctgtttgcagacaagtttccaaagacagcagaaaactttcgtgctctgagcactggagagaaa

SEQ ID NO: 1830 - DNA, 124 bp, Homo sapiens
gaatctttgtgctcttgctgcagttccctttgggttccatgttttccttgttcccttccatgactagctggattgcagagttgaattaagtttatgattakgaaataaaaactaaataacaaaa

SEQ ID NO: 1831 - DNA, 178 bp, Homo sapiens
acaggaagggaaagtgaagacagtcagagagagactcgcaatagcactgattgcggatggactcgctaatgaggcagagaaagtgagagaccaagaaggcygtcctgaaaaacgctaagaaaaaaagggaagatagtgcagatgaaataaagtgtaatcctttattaacatctctttg

SEQ ID NO: 1832 - DNA, 201 bp, Homo sapiens
cctgccccatgccccaccttgcctgctcttcagatgcggtggagataattcctgcagagggagtgggtatctcgcagctcctctgcaaacaatttctggtyactgaggaagatatcaggaaacaggaagggaaagtgaagacagtcagagagagactcgcaatagcactgattgcggatggactcgctaatgaggcagaga

SEQ ID NO: 1833 - DNA, 201 bp, Homo sapiens
tttatgagacacctctcagcaacaacaactgtgagggagtgagggtggcaggcttggaagaggcctcagccaatcccatgggaagttctgaaaccgggagkgtccttctgaattatccacagggagggggtattgcctccaaatggagtgcagtggagggagtaattgactctgctgccctggcacctggtgtttctgcca

SEQ ID NO: 1834 - DNA, 201 bp, Homo sapiens
ggctcgtgcctcttggcgtccgctttctttctggtcatggttctccttgctgcgacacaggtcctggtcaaaagcccagcgtgctcatcacctctgggcakatcctagggcaagaggagcagaaaaccctgctcttccctggtctcctgtctttggtttttcagttcaatgtggaaaacagtgacttacgatgtctcagcc

SEQ ID NO: 1835 - DNA, 201 bp, Homo sapiens
aactgtgagggagtgagggtggcaggcttggaagaggcctcagccaatcccatgggaagttctgaaaccgggagggtccttctgaattatccacagggagsgggtattgcctccaaatggagtgcagtggagggagtaattgactctgctgccctggcacctggtgtttctgccaaatgcctaagaccagaggcaccgaag

SEQ ID NO: 1836 - DNA, 114 bp, Homo sapiens
atgcagaagcaccwcttcccagaagcactggcaaacatctcctggagtgccattggccctgatcgggttgcaggcccacacctaagccagtctctgtggtcaaagatgggatac

SEQ ID NO: 1837 - DNA, 201 bp, Homo sapiens
gccagtctctgtggtcaaagatgggatacactgatgagcttatgagccaaggaatcaccgaggagactataattccccatcatttccatcagcctctgctyccttttatagaaatacttggtgtcattgcagtcttatttaaggtgctgtgcaaacatggcttcagcataagttcccaagctgaatatccaactagactgc

SEQ ID NO: 1838 - DNA, 201 bp, Homo sapiens
ctcattctgagccccaaacttctcccctgttgggttccctggagaacagaccccaaagtggagatctgtgcacaggtttatgagacacctctcagcaacarcaactgtgagggagtgagggtggcaggcttggaagaggcctcagccaatcccatgggaagttctgaaaccgggagggtccttctgaattatccacaggga

SEQ ID NO: 1839 - DNA, 201 bp, Homo sapiens
cgagagccatacggccacctggggcccgcagagctgctggaggcctcgcccgccgcgcgctccctgcagaccccgtcggcgcgcctggtgcccgcttccgygccgcccgcgcgcctggtggaggtgcccgccgcgccggtccgggtggtggagacctcggccctgctgtgcaccgcgcaacacttagcggccgtccagtcg

SEQ ID NO: 1840 - DNA, 201 bp, Homo sapiens
ctgatgccatggaactgttgcttggttcttatccagagtttgtgagagtgggggacctgccctgtgacagtgtggaggaccagctgtccttggcaaccackttgtatgataaggggctgctgctcactaagatgcctctagccctaaattagtttcttgttgattgctggaaacaaggcagtagtgattctccgctgccac

SEQ ID NO: 1841 - DNA, 201 bp, Homo sapiens
gggaggggccgaatagaagaatgatgggcgtggccaaccccgaggtggctggaggccgcgcccccttcccagagtgcaccgcagccgctgcattcaggaascgctttagcttcggccccggccggccgggcggggaagactggtgtggtctggccatggatgggctccaggccagtgcagggccgttgaggcgcgggcggc

SEQ ID NO: 1842 - DNA, 201 bp, Homo sapiens
tgcggcgcgtcttggccgagctgaaccgcatccccagcagccggcggcgagcggcccgcctctttgagtggctcatcgcgcccatgccgccagatcacttytaccggcgcctatgggagcgcgaggcggtgctggtgcggcggcaggaccacacctactaccagggacttttctctaccgctgacctggattcgatgctgc

SEQ ID NO: 1843 - DNA, 201 bp, Homo sapiens
tttagcttcggccccggccggccgggcggggaagactggtgtggtctggccatggatgggctccaggccagtgcagggccgttgaggcgcgggcggccgargcgccggcgcaagccccagccacacagcgggtcggtcctggccctgcccttgaggtccaggaagatacgaaagcagctgcgaagtgttgtatcccgcatg

SEQ ID NO: 1844 - DNA, 201 bp, Homo sapiens
gcgtggccaaccccgaggtggctggaggccgcgcccccttcccagagtgcaccgcagccgctgcattcaggaaccgctttagcttcggccccggccggccrggcggggaagactggtgtggtctggccatggatgggctccaggccagtgcagggccgttgaggcgcgggcggccgaagcgccggcgcaagccccagccac

SEQ ID NO: 1845 - DNA, 201 bp, Homo sapiens
agaagaatgatgggcgtggccaaccccgaggtggctggaggccgcgcccccttcccagagtgcaccgcagccgctgcattcaggaaccgctttagcttcgsccccggccggccgggcggggaagactggtgtggtctggccatggatgggctccaggccagtgcagggccgttgaggcgcgggcggccgaagcgccggcgc

SEQ ID NO: 1846 - DNA, 201 bp, Homo sapiens
ctgtggccgaccagcgagccaaagacttcattcacgattctctgccccctgttttgactgatagggagagggcactaagtgtttacgggcttccaattcgstgggaggctggagaacctgtaaacgtgggggcccagttgacaacagaaacagaagtccatatgcttcaggatgggatagctcggctggtgggtgaggggg

SEQ ID NO: 1847 - DNA, 201 bp, Homo sapiens
ccccctaactcgcagggctttgccccccactacgacgacatcgaggccttcgtgctgcagctggaaggtaggaaactctggcgtgtataccgaccccgagycccaaccgaggaactggctctgacatccagccccaacttcagtcaggacgacctcggtgagccggtgctgcagaccgtgctggaacctggagatttgctg

SEQ ID NO: 1848 - DNA, 201 bp, Homo sapiens
ttgagtggctcatcgcgcccatgccgccagatcacttctaccggcgcctatgggagcgcgaggcggtgctggtgcggcggcaggaccacacctactaccasggacttttctctaccgctgacctggattcgatgctgcgcaacgaggaggtgcagttcggccagcatttggacgccgctcgctacatcaacggacgacgcg

SEQ ID NO: 1849 - DNA, 201 bp, Homo sapiens
aggggccgaatagaagaatgatgggcgtggccaaccccgaggtggctggaggccgcgcccccttcccagagtgcaccgcagccgctgcattcaggaaccgytttagcttcggccccggccggccgggcggggaagactggtgtggtctggccatggatgggctccaggccagtgcagggccgttgaggcgcgggcggccga

SEQ ID NO: 1850 - DNA, 175 bp, Homo sapiens
gcatatggttgatccatatggtggcagtgtcattacttaatttttttaatagttgaataatattccattgtgtggatatataacatttaaaaaatcaattkataaattgatggacatttggattatttccactttttggctattgtaaataatggtgcaataaacatttatgtac

SEQ ID NO: 1851 - DNA, 113 bp, Homo sapiens
agcatttttagcrtacaacaacatccaagtggattactatgaatgcctagacctctatggcaaacagtctcttcgtggcctgtgctgaggactacatcagtctcctgcaatta

SEQ ID NO: 1852 - DNA, 201 bp, Homo sapiens
agtagagacggggtttcaccgtgttagccaggatggtctagatctcctgacctcgttatttgcctgcctgggcctcccaaaatgctgggattacaggcgtragccatcacacccagccggcacagtgcttttaagcatatggttgatccatatggtggcagtgtcattacttaatttttttaatagttgaataatattcca

SEQ ID NO: 1853 - DNA, 201 bp, Homo sapiens
ctagacctctatggcaaacagtctcttcgtggcctgtgctgaggactacatcagtctcctgcaattatcatctacactgaaaaacaaagaggacagaggcraagctagtggccctcaccatcccctgcaagctgattgcttcttactgcaagcacttgagcatcttcctgagagctttcttgggcaatgggaaccaggctt

SEQ ID NO: 1854 - DNA, 201 bp, Homo sapiens
tcccaaaatgctgggattacaggcgtaagccatcacacccagccggcacagtgcttttaagcatatggttgatccatatggtggcagtgtcattacttaayttttttaatagttgaataatattccattgtgtggatatataacatttaaaaaatcaatttataaattgatggacatttggattatttccactttttggct

SEQ ID NO: 1855 - DNA, 113 bp, Homo sapiens; identical to SEQ ID NO: 1851

SEQ ID NO: 1856 - DNA, 154 bp, Homo sapiens
aaaggtccccagttggatggagctctagctgctcatgtgataagctgcctattaatacacaaaagattgcctttcctccttgctctgtcttcctgctgctmtcctactaatgtttcctgggattgcctccaaataaaccacttgaactcacata

SEQ ID NO: 1857 - DNA, 170 bp, Homo sapiens
ttctacactctcttccaaaggtccccagttggatggagctctagctgctcatgtgataagctgcctattaatacacaaaagattgcctttcctccttgctytgtcttcctgctgctctcctactaatgtttcctgggattgcctccaaataaaccacttgaactcacata

SEQ ID NO: 1858 - DNA, 201 bp, Homo sapiens; identical to SEQ ID NO: 1853

SEQ ID NO: 1859 - DNA, 175 bp, Homo sapiens; identical to SEQ ID NO: 1850

SEQ ID NO: 1860 - DNA, 201 bp, Homo sapiens
tagcgtacaacaacatccaagtggattactatgaatgcctagacctctatggcaaacaggaaggaaagaagaaagggaggaagaaaggaaaacagggagcytagagaaaggagggagaaaataagaaaaaaaaaagagagagagaaaggtagaacctggattctcttcgtggcctgtgctgaggactacatcagtctcctg

SEQ ID NO: 1861 - DNA, 113 bp, Homo sapiens
agcatttttagcrtacaacaacatccaagtggattactatgaatgcctagacctctatggcaaacaggaaggaaagaagaaagggaggaagaaaggaaaacagggagcctaga

SEQ ID NO: 1862 - DNA, 201 bp, Homo sapiens; identical to SEQ ID NO: 1852

SEQ ID NO: 1863 - DNA, 201 bp, Homo sapiens
agagaaaggtagaacctggattctcttcgtggcctgtgctgaggactacatcagtctcctgcaattatcatctacactgaaaaacaaagaggacagaggcraagctagtggccctcaccatcccctgcaagctgattgcttcttactgcaagcacttgagcatcttcctgagagctttcttgggcaatgggaaccaggctt

SEQ ID NO: 1864 - DNA, 201 bp, Homo sapiens; identical to SEQ ID NO: 1854

SEQ ID NO: 1865 - DNA, 201 bp, Homo sapiens
cgcctccccgctgccacccgggccaccctgatcctcagcctggcctttgcctccctccactcggcttgctcggcagaagcaagcagcagcaacagctcaascttgaccgctcaccacccagaccctgggaccctggagcagtgcctcaacgtggacttctgcccacaagcagcccggtgctgccgcacaggagtggacgag

SEQ ID NO: 1866 - DNA, 201 bp, Homo sapiens
ttcacctttaagcttcagttacttttacaagggaaagaagaaagagcgggagaaccaaataaggcaagccagtgctgcccttgcatgtcactcccaagggsccctgggctgtgcccaggtaactcctctctcaagatagtccctctgtaatgtatcctgttttaacctttcttctaggcaccaagggaggtgcacaagaaa

SEQ ID NO: 1867 - DNA, 136 bp, Homo sapiens
gggctgtgcccaggtaactcctctctcaagatagtccctctgtaatgtatcctgttttaacctttcttctaggcaccaagggaggtgcacaagaaactatragacttagtctcatcatcaacattttcagaagcaa

SEQ ID NO: 1868 - DNA, 201 bp, Homo sapiens
cgcagccaccgcaacgacatcatgttgctgcgcctagtccagcccgcacgcctgaacccccaggtgcgccccgcggtgctacccacgcgttgcccccaccygggggaggcctgtgtggtgtctggctggggcctggtgtcccacaacgagcctgggaccgctgggagcccccggtcacaagtgagtctcccagatacgttg

SEQ ID NO: 1869 - DNA, 201 bp, Homo sapiens
gcgttgcccccacccgggggaggcctgtgtggtgtctggctggggcctggtgtcccacaacgagcctgggaccgctgggagcccccggtcacaagtgagtytcccagatacgttgcattgtgccaacatcagcattatctcggacacatcttgtgacaagagctacccagggcgcctgacaaacaccatggtgtgtgcagg

SEQ ID NO: 1870 - DNA, 201 bp, Homo sapiens
gtgcaccccactcccagccatggcaagtggctctctacgagcgtggacgctttaactgtggcgcttccctcatctccccacactgggtgctgtctgcggcmcactgccaaagccgcttcatgagagtgcgcctgggagagcacaacctgcgcaagcgcgatggcccagagcaactacggaccacgtctcgggtcattccac

SEQ ID NO: 1871 - DNA, 167 bp, Homo sapiens
caacacacatgaccacccgtgtgatcttgaacaagaggcccaatctcacttcgccttggtttccttatctgtaaaatgagaccatcttattgctgacttcmaagggctgttgtgaggattaaatgagatgattcgtctgaactgattaaaatcgtgtctggcactga

SEQ ID NO: 1872 - DNA, 201 bp, Homo sapiens
gatccctaggtgaggagaagcggcttgaagcagggctccattcattcaacacacatgaccacccgtgtgatcttgaacaagaggcccaatctcacttcgcyttggtttccttatctgtaaaatgagaccatcttattgctgacttcaaagggctgttgtgaggattaaatgagatgattcgtctgaactgattaaaatcgt

SEQ ID NO: 1873 - DNA, 201 bp, Homo sapiens
aggaatttctgtgacttttttctggggtcaaagagaaaccccgagacactgtacactgttccttttcacccaccaccccgatccctaggtgaggagaagcrgcttgaagcagggctccattcattcaacacacatgaccacccgtgtgatcttgaacaagaggcccaatctcacttcgccttggtttccttatctgtaaaa

SEQ ID NO: 1874 - DNA, 201 bp, Homo sapiens
acacccgcgctacgaagcgcgcagccaccgcaacgacatcatgttgctgcgcctagtccagcccgcacgcctgaacccccaggtgcgccccgcggtgctayccacgcgttgcccccacccgggggaggcctgtgtggtgtctggctggggcctggtgtcccacaacgagcctgggaccgctgggagcccccggtcacaagt

SEQ ID NO: 1875 - DNA, 201 bp, Homo sapiens
cgctcaaggtcacctgtttaatgccaagataacaaagcgctgatccaagttgctctgtaggaatttctgtgacttttttctggggtcaaagagaaaccccragacactgtacactgttccttttcacccaccaccccgatccctaggtgaggagaagcggcttgaagcagggctccattcattcaacacacatgaccaccc

SEQ ID NO: 1876 - DNA, 201 bp, Homo sapiens
cgcagccaccgcaacgacatcatgttgctgcgcctagtccagcccgcacgcctgaacccccaggtgcgccccgcggtgctacccacgcgttgcccccaccygggggaggcctgtgtggtgtctggctggggcctggttccactgtcttccccagtgagtctcccagatacgttgcattgtgccaacatcagcattatctcg

SEQ ID NO: 1877 - DNA, 201 bp, Homo sapiens
ccaggtgcgccccgcggtgctacccacgcgttgcccccacccgggggaggcctgtgtggtgtctggctggggcctggttccactgtcttccccagtgagtytcccagatacgttgcattgtgccaacatcagcattatctcggacacatcttgtgacaagagctacccagggcgcctgacaaacaccatggtgtgtgcagg

SEQ ID NO: 1878 - DNA, 201 bp, Homo sapiens; identical to SEQ ID NO: 1870

SEQ ID NO: 1879 - DNA, 166 bp, Homo sapiens
caacacacatgaccacccgtgtgatcttgaacaagaggcccaatctcacttcgccttggtttccttatctgtaaaatgagaccatcttattgctgacttcmaagggctgttgtgaggattaaatgagatgattcgtctgaactgattaaaatcgtgtctggcactg

SEQ ID NO: 1880 - DNA, 201 bp, Homo sapiens; identical to SEQ ID NO: 1872

SEQ ID NO: 1881 - DNA, 201 bp, Homo sapiens; identical to SEQ ID NO: 1873

SEQ ID NO: 1882 - DNA, 201 bp, Homo sapiens
acacccgcgctacgaagcgcgcagccaccgcaacgacatcatgttgctgcgcctagtccagcccgcacgcctgaacccccaggtgcgccccgcggtgctayccacgcgttgcccccacccgggggaggcctgtgtggtgtctggctggggcctggttccactgtcttccccagtgagtctcccagatacgttgcattgtgc

SEQ ID NO: 1883 - DNA, 201 bp, Homo sapiens; identical to SEQ ID NO: 1875

SEQ ID NO: 1884 - DNA, 201 bp, Homo sapiens
ctcgggtcattccacacccgcgctacgaagcgcgcagccaccgcaacgacatcatgttgctgcgcctagtccagcccgcacgcctgaacccccagtgagtytcccagatacgttgcattgtgccaacatcagcattatctcggacacatcttgtgacaagagctacccagggcgcctgacaaacaccatggtgtgtgcagg

SEQ ID NO: 1885 - DNA, 201 bp, Homo sapiens; identical to SEQ ID NO: 1870

SEQ ID NO: 1886 - DNA, 167 bp, Homo sapiens; identical to SEQ ID NO: 1871

SEQ ID NO: 1887 - DNA, 201 bp, Homo sapiens; identical to SEQ ID NO: 1872

SEQ ID NO: 1888 - DNA, 201 bp, Homo sapiens; identical to SEQ ID NO: 1873

SEQ ID NO: 1889 - DNA, 201 bp, Homo sapiens; identical to SEQ ID NO: 1875

SEQ ID NO: 1890 - DNA, 201 bp, Homo sapiens
cgcagccaccgcaacgacatcatgttgctgcgcctagtccagcccgcacgcctgaacccccaggtgcgccccgcggtgctacccacgcgttgcccccaccygggggaggcctgtgtggtgtctggctggggcctggtgtcccacaacgagcctgggaccgctgggagcccccggtcacaagggtgactctgggggacccct

SEQ ID NO: 1891 - DNA, 201 bp, Homo sapiens; identical to SEQ ID NO: 1870

SEQ ID NO: 1892 - DNA, 167 bp, Homo sapiens; identical to SEQ ID NO: 1871

SEQ ID NO: 1893 - DNA, 201 bp, Homo sapiens; identical to SEQ ID NO: 1872

SEQ ID NO: 1894 - DNA, 201 bp, Homo sapiens; identical to SEQ ID NO: 1873

SEQ ID NO: 1895 - DNA, 201 bp, Homo sapiens
acacccgcgctacgaagcgcgcagccaccgcaacgacatcatgttgctgcgcctagtccagcccgcacgcctgaacccccaggtgcgccccgcggtgctayccacgcgttgcccccacccgggggaggcctgtgtggtgtctggctggggcctggtgtcccacaacgagcctgggaccgctgggagcccccggtcacaagg

SEQ ID NO: 1896 - DNA, 201 bp, Homo sapiens; identical to SEQ ID NO: 1875

SEQ ID NO: 1897 - DNA, 201 bp, Homo sapiens; identical to SEQ ID NO: 1870

SEQ ID NO: 1898 - DNA, 167 bp, Homo sapiens; identical to SEQ ID NO: 1871

SEQ ID NO: 1899 - DNA, 201 bp, Homo sapiens; identical to SEQ ID NO: 1872

SEQ ID NO: 1900 - DNA, 201 bp, Homo sapiens; identical to SEQ ID NO: 1873

SEQ ID NO: 1901 - DNA, 201 bp, Homo sapiens; identical to SEQ ID NO: 1875

SEQ ID NO: 1902 - DNA, 201 bp, Homo sapiens
aagactggggggaaaagggagaaggcctgctttctagtcgagaaaagcggagaccgtctgaaactctacttgctccaacagaaagcagtgccccagcaaaygaacaacaacagcgctcacctgaaacagtttcaccttcatttttagaggagaggaacacaataggagggcgtattactccacgggttttaaccctagccc

SEQ ID NO: 1903 - DNA, 177 bp, Homo sapiens
atgagagtggtcattcgggtttgctttggaggtccagagaaaatgcaagtccaacttccaggcacagaccagttgcycgcagcaggcttcctcccattggtctcagaccaaggaagaccttgtgcgatccagggagcagagcaagagagcagctccttctcgcaccatcctgcatca

SEQ ID NO: 1904 - DNA, 201 bp, Homo sapiens
gccttctcctgttctggcagccatgggccgctccagctggggatgctcatccttgcaagcagccatccacgcacaaagggcacagaggggaatggtgtcakgaaacaagactggggggaaaagggagaaggcctgctttctagtcgagaaaagcggagaccgtctgaaactctacttgctccaacagaaagcagtgcccca

SEQ ID NO: 1905 - DNA, 169 bp, Homo sapiens
tcagccccagcagcggagacgcggtgcggcccagggtgctgtcgctgctgcctgcgcgccgcagggggatcagcgctgtgtgcggagaggctcgtgcgcayggaaggggcgaggtgcgggtcgcggggcccgggaaccgcggagcccgccccggcaccaacttccctac

SEQ ID NO: 1906 - DNA, 201 bp, Homo sapiens
ttcaagaccaccaaccaccaaacaacagctgaaagaacgccctccctgatagggctcagcagcttatttctatcagagttaagtggtctagcaccttcccsgctaaaaactgaacgcccgttcacaggcatagcttttaattctccacatttcagagatggagggaggggcagaagaataaaacccccacctcctccggcc

SEQ ID NO: 1907 - DNA, 201 bp, Homo sapiens
ccgaggagcccgaggggcaaaagcacgttgggcgacgggaggcagcgacgggcgcttggagacgtgtcctggggcttcggggcctctccgcagggcacctsccccctcgagggcaactcgcaccccgcgggccgggcggctgcccgctccccactgcccggtcagccccagcagcggagacgcggtgcggcccagggtgct

SEQ ID NO: 1908 - DNA, 176 bp, Homo sapiens
tgcccggtcagccccagcagcggagacgcggtgcggcccagggtgctgtcgctgctgcctgcgcgccgcagggggatcagcgctgtgtgcggagaggctcktgcgcacggaaggggcgaggtgcgggtcgcggggcccgggaaccgcggagcccgccccggcaccaacttccctac

SEQ ID NO: 1909 - DNA, 201 bp, Homo sapiens
gtggcgctccccggaagagacaagctgaggaagactcccggcctcgcacttcccggggggctgcccagagagcgcttcccctcaccccaccgcccagcccygggacgccgggggcaggtaacccaacgaggagcgggccaaagtgacgggcaaggccaggaacccgaggagcccgaggggcaaaagcacgttgggcgacgg

SEQ ID NO: 1910 - DNA, 201 bp, Homo sapiens
gggaccatcgagaacaaggagtgctgtttcgaagtagcggctagaggggccccctgcctccgcccccgcccttccgaggattcctggagtccactcacccytccccaccactccagtagcggcgggagcagcagcgttaggccggggtgtggctgcacctctgcgaaggctgtcgtgccccgtgcagctgcggcgttcggg

SEQ ID NO: 1911 - DNA, 201 bp, Homo sapiens
ccccgtgcagctgcggcgttcgggtgggggaggggaggctcacaccctgcggcggcttaagcctggatttacgcactggaggagggaattagccctgagawgtcagccctgtgcccctggcgctgtccacccggacgcccgcggagcgccaggcgccgcagcggaccgcgcgcgcactgattgccgcagctactctccctg

SEQ ID NO: 1912 - DNA, 201 bp, Homo sapiens
ttcctctcacgctccgcgttgcacagccttgggggcctttaaaaggaaccggaagtgtcgtgagctaagacagtcgcgcggggaccatcgagaacaaggartgctgtttcgaagtagcggctagaggggccccctgcctccgcccccgcccttccgaggattcctggagtccactcacccctccccaccactccagtagcg

SEQ ID NO: 1913 - DNA, 201 bp, Homo sapiens
tctatggatcaaggcaaaatgagtaccttaagtctagagccccagggaaaaacaaaagcaaaacacaaaagaacactgcttctaatggcatcatagcaagsagtttatctagaaagatgatgccagcagtcacctcttttccaggaagacagaaacaaaaaccgttctcctcgagaggccaacagtgtagaagcccctttt

SEQ ID NO: 1914 - DNA, 155 bp, Homo sapiens
atcctcacaggacccccagccaggggaaacttcccagcttccagcgggaagtgcygcttccccaaattgggcagcacctggggatgcctctagatgcataatcacctcagaggtcctgagccagagtccagagattctttctgagattctggcaa

SEQ ID NO: 1915 - DNA, 201 bp, Homo sapiens
gagagtggtgctccatgttccaaggaagaaaagcaacccacagctcctcctgcccgtgcagcagatgaccagaaagacgagaaagggaaacaaactcccaytcatggtgaaatgaagaaccaaggatcatctgagcaaagactcaaggaccatttgaacaaagacatccacatctataccacagatgacttggcatctatg

SEQ ID NO: 1916 - DNA, 156 bp, Homo sapiens
atgcctattactccaatcctgtactcacttgctccctgccagagacaacacaaagagatgagtatacacactcaggaaaacttcgcccgggccttcgagcrtcagcaattccacaaggccatcaacttggggtatgaactatccgtgaaggactag

SEQ ID NO: 1917 - DNA, 173 bp, Homo sapiens
ccatctcaagcctaaaaatgcctattactccaatcctgtactcacttgctccctgccagagacaacacaaagagatgagtatacacactcaggaaaacttygcccgggccttcgagcatcagcaattccacaaggccatcaacttggggtatgaactatccgtgaaggactag

SEQ ID NO: 1918 - DNA, 160 bp, Homo sapiens
aaaaatgcctattactccaatcctgtactcacttgctccctgccagagacaacacaaagagatgagtatacacactcaggaaaacttcgcccgggccttcsagcatcagcaattccacaaggccatcaacttggggtatgaactatccgtgaaggactag

SEQ ID NO: 1919 - DNA, 201 bp, Homo sapiens
ggaaatgtagtgacattaaccaaacacacaaagccatctcaagcctaaaaatgcctattactccaatcctgtactcacttgctccctgccagagacaacayaaagagatgagtatacacactcaggaaaacttcgcccgggccttcgagcatcagcaattccacaaggccatcaacttggggtatgaactatccgtgaagg

SEQ ID NO: 1920 - DNA, 201 bp, Homo sapiens
tgtctgctgagagctgagctgcctgcctgggatcagccagatggagcaggcagagacggcacggaccacactccagaggaacacgccatggatggctataytgttgatgtttcagatatccaaaaaccatttctagggaaaatcatctctgacagctggcatgaaatcaatgtccacctgaaaagtacctttgagggccat

SEQ ID NO: 1921 - DNA, 174 bp, Homo sapiens
agtaacaaacccagcttgtactacccatgcctacaacagcccagatgtggcactcaaggttgaaaaggggccayaacttggtaacgggacacacatgaccccatgcaggagaacagccagggccatgaggaaagggactttggtgcacaatggcagcaggaagcagtgcaggga

SEQ ID NO: 1922 - DNA, 201 bp, Homo sapiens
ctactaacgccagcacatgctgtgatgggattcccccagcagtgcccacacgatgctgggcccacacagcctgtgacacctgctggccacttcgctcccayggagaagcctctttcacgttcatatgtgctggggatctgtgtctgctgagagctgagctgcctgcctgggatcagccagatggagcaggcagagacggca

SEQ ID NO: 1923 - DNA, 201 bp, Homo sapiens
cccacggagaagcctctttcacgttcatatgtgctggggatctgtgtctgctgagagctgagctgcctgcctgggatcagccagatggagcaggcagagayggcacggaccacactccagaggaacacgccatggatggctatattgttgatgtttcagatatccaaaaaccatttctagggaaaatcatctctgacagct

SEQ ID NO: 1924 - DNA, 201 bp, Homo sapiens
cctcaagggccacaaataaagagccgctcacggggagcagggcagagagactggcacatgtggaccccagcacaccccagaactctgccaccccacacagrgcagatggggcagccatcagaaatgcggggcatggacccaaacgccagcatagcaccacacccccaaatgaggggggaacaggctcagcaccccaagaca

SEQ ID NO: 1925 - DNA, 201 bp, Homo sapiens
ctgtgtctgctgagagctgagctgcctgcctgggatcagccagatggagcaggcagagacggcacggaccacactccagaggaacacgccatggatggctrtattgttgatgtttcagatatccaaaaaccatttctagggaaaatcatctctgacagctggcatgaaatcaatgtccacctgaaaagtacctttgagggc

SEQ ID NO: 1926 - DNA, 201 bp, Homo sapiens
aaaaccatttctagggaaaatcatctctgacagctggcatgaaatcaatgtccacctgaaaagtacctttgagggccatctaataaaggccaaaactatgsccacgaatccaaaactgcggaagtctagactggcgtttctaaataagctagagaaaaatactcaatgtgcgacatcttgtaaactcacagctgctgaaga

SEQ ID NO: 1927 - DNA, 197 bp, Homo sapiens
atggccaccctgcccaatatccctgcctgctgttcaactcatgtcctgcccgcccacctccagcacctgcaagtcctactccacccagaggatgtcytggctgctcatatttcaacgaaatcaaacaacatagacaaagaaagcaaaaggaaagaaatgctgacagagacccacaaaggccgctgtgatttggtaaa

SEQ ID NO: 1928 - DNA, 201 bp, Homo sapiens
ggtggccatggcctttgaccgttacgtggccatctgcaatccacttcactacacaaacatcttgacatcccgggtgctggtgggcatcactatgtgcattktaattcgtccagttctgtttacactcccgataatctatctcatctaccgtttaccattttgtcaggctcatataatagcccattcctactatgagcacat

SEQ ID NO: 1929 - DNA, 177 bp, Homo sapiens
aggaccaaatggaaacgagagcgagtgctctatgtacttactaaaaaataagattctgaccatgttcttttactaaggactttgatctcccctatgaagaytgatacgttcttgctttaaggaatatctcctaatccttaccttattcctgtcaatttgcagtacaagttggtttgt

SEQ ID NO: 1930 - DNA, 201 bp, Homo sapiens
gatttggacacaacattccacattacatgcacattcttgttgctactctctatttggttatcccaccctctctcaaccccatcatttgtggggtgaggacyaaatggaaacgagagcgagtgctctatgtacttactaaaaaataagattctgaccatgttcttttactaaggactttgatctcccctatgaagattgata

SEQ ID NO: 1931 - DNA, 201 bp, Homo sapiens
gcatcactatgtgcattgtaattcgtccagttctgtttacactcccgataatctatctcatctaccgtttaccattttgtcaggctcatataatagcccaytcctactatgagcacatgggcattgcaaaattgtcctgtggaaacatccgtgtcaatgctatctatgggctctttgtggtctccctctttctcctgaacc

SEQ ID NO: 1932 - DNA, 201 bp, Homo sapiens
catgccttcactggcatggaggctgaggtcctggtggccatggcctttgaccgttacgtggccatctgcaatccacttcactacacaaacatcttgacatsccgggtgctggtgggcatcactatgtgcattgtaattcgtccagttctgtttacactcccgataatctatctcatctaccgtttaccattttgtcaggct

SEQ ID NO: 1933 - DNA, 201 bp, Homo sapiens
attgttatctcatatgtttacattctctgtgctgtcttctgcctcccatcacatgatgctcggctaaaagccctaagcacatgtggctctcatgttggggwcatctgtgttttctatatcccgtcggtcttctctttccttactcattgatttggacacaacattccacattacatgcacattcttgttgctactctctat

SEQ ID NO: 1934 - DNA, 201 bp, Homo sapiens
gctcatgagattaactttggagcttgtgtggcccagatgtttctgatccatgccttcactggcatggaggctgaggtcctggtggccatggcctttgaccrttacgtggccatctgcaatccacttcactacacaaacatcttgacatcccgggtgctggtgggcatcactatgtgcattgtaattcgtccagttctgttt

SEQ ID NO: 1935 - DNA, 201 bp, Homo sapiens
gcacatgtggctctcatgttggggtcatctgtgttttctatatcccgtcggtcttctctttccttactcattgatttggacacaacattccacattacatkcacattcttgttgctactctctatttggttatcccaccctctctcaaccccatcatttgtggggtgaggaccaaatggaaacgagagcgagtgctctatg

SEQ ID NO: 1936 - DNA, 201 bp, Homo sapiens
tctcattggaatcccaggtctggaagacgtccatatgtgaatctccctgcacttctgctctgtttaccttttggctttgctgggaaatgctaccattctgytagtcatcaaggcagaacagaccctccgggagcccatgttctactttctggccatcctttccacaattgatttggccctttctacaacctctgtgcctcg

SEQ ID NO: 1937 - DNA, 120 bp, Homo sapiens
catggcaacaggggcacttytcacccagccacattttttctcattggaatcccaggtctggaagacgtccatatgtgaatctccctgcacttctgctctgtttaccttttggctttgctg

SEQ ID NO: 1938 - DNA, 190 bp, Homo sapiens
catggcaacaggggcacttttcacccagccacattttttctcattggaatcccaggtctggaagacgtccatatgtgaatctccctgcayttctgctctgtttaccttttggctttgctgggaaatgctaccattctgctagtcatcaaggcagaacagaccctccgggagcccatgttctactttctgg

SEQ ID NO: 1939 - DNA, 201 bp, Homo sapiens
cgggagcccatgttctactttctggccatcctttccacaattgatttggccctttctacaacctctgtgcctcgtacgctgggtatcttctggtttgatgytcatgagattaactttggagcttgtgtggcccagatgtttctgatccatgccttcactggcatggaggctgaggtcctggtggccatggcctttgaccgt

SEQ ID NO: 1940 - DNA, 201 bp, Homo sapiens
ctgggtttctaaatttcctcctcctccacgtagtgtctaccctctgcctgtctttctgcaagcctgatcgagttaaccagtattactgtgatatctcaccratgggggccctgttgtgccagtccatgcacctggcaaacatgcttgttttagtggaatcagttatcttggggatcagtgcttttctggctgcctttaact

SEQ ID NO: 1941 - DNA, 201 bp, Homo sapiens
ccgaactggacatggctcgagggaagaatcggggcacgtcctgcggaaagacctgccgggaagaccgcgatgatgagtggatgggggtgagcctggcccgrcagcccaaggctgatggccgtgtgttggcctgtgctcatcgctggaagaacatctactatgaagccgaccacatcctaccccatggcttctgctacatca

SEQ ID NO: 1942 - DNA, 201 bp, Homo sapiens
cgaactggacatggctcgagggaagaatcggggcacgtcctgcggaaagacctgccgggaagaccgcgatgatgagtggatgggggtgagcctggcccgamagcccaaggctgatggccgtgtgttggcctgtgctcatcgctggaagaacatctactatgaagccgaccacatcctaccccatggcttctgctacatcat

SEQ ID NO: 1943 - DNA, 201 bp, Homo sapiens
gttctccgctggaaaaagggacaaaagattgcccaaaagaatcagactgtttttgaaaggaattgccgttcagaggactgtgccgcagacctgcagcttcrgggtaaactgctgctctccagtatggatgagaaaaccctgtatctagctttgggggctgtgaagaacatctccctaaacatctctatctccaacctcgga

SEQ ID NO: 1944 - DNA, 201 bp, Homo sapiens
cctggacgatctggacaatgatgggttcccagatgtggccattggtgcacccaaggaggatgacttcgcaggggcggtctatatctatcatggtgatgccrgtgggatagtccctcagtactcaatgaaactgtctgggcagaagataaatccagtgctccggatgtttggtcagtccatatcgggaggcattgatatgga

SEQ ID NO: 1945 - DNA, 201 bp, Homo sapiens
tactttgtgctgctgggagagaccatgggtcaggtcacagagaagctgcagctgacttacatggaggagacgtgtcgtcactatgtggcccatgtgaagcrgagggtgcaggacgtcatcagcccgatcgtgtttgaagcagcctacagcctcagtgagcatgtgactggagaggaggagagggaactgccgcctctgaca

SEQ ID NO: 1946 - DNA, 136 bp, Homo sapiens
gcgggccccgcggcccgcgcgctcggcgccctgctygccgggcagaggggaaggcggcggccggctggggatgggcggcccggctgcgccgaggggcgccgggaggctccgcgcgctgctgctggcgctggtggtc

SEQ ID NO: 1947 - DNA, 201 bp, Homo sapiens
gtgctcatcgctggaagaacatctactatgaagccgaccacatcctaccccatggcttctgctacatcatcccctccaacctccaggccaaaggcaggacrctgatcccttgctatgaagagtataagaagaagtacggagaggaacacggctcctgccaggctgggatagcgggcttcttcaccgaggagctggtggtga

SEQ ID NO: 1948 - DNA, 201 bp, Homo sapiens
tgggcgcaccaaaggcagattccaaatacagcccttcagtgaagtctcctggggctgtgtttaagtgccgtgttcacaccaaccctgaccggagatgcacmgaactggacatggctcgagggaagaatcggggcacgtcctgcggaaagacctgccgggaagaccgcgatgatgagtggatgggggtgagcctggcccgac

SEQ ID NO: 1949 - DNA, 201 bp, Homo sapiens
tgatgctgttctcttcttcattctatcaagcccaggtgccagcctgaggcagccacttcggccaggtcacacgaccggggccagcaccacttcctttaaaratgaactctgaactttggagagtgagctacagagccgagcaatatttatggatgcaacacgcatggtcaaccctcaggggaaaactgttacctaaagtat

SEQ ID NO: 1950 - DNA, 201 bp, Homo sapiens
aaaaggagaagggccagatgcccagggtctactttgtgctgctgggagagaccatgggtcaggtcacagagaagctgcagctgacttacatggaggagacrtgtcgtcactatgtggcccatgtgaagcggagggtgcaggacgtcatcagcccgatcgtgtttgaagcagcctacagcctcagtgagcatgtgactggag

SEQ ID NO: 1951 - DNA, 201 bp, Homo sapiens
cccatggcttctgctacatcatcccctccaacctccaggccaaaggcaggacgctgatcccttgctatgaagagtataagaagaagtacggagaggaacayggctcctgccaggctgggatagcgggcttcttcaccgaggagctggtggtgatgggtgctccagggtcattttattgggctggaaccatcaaagtgctga

SEQ ID NO: 1952 - DNA, 124 bp, Homo sapiens
gcgggccccgcggcccgcgcgctsggcgccctgctcgccgggcagaggggaaggcggcggccggctggggatgggcggcccggctgcgccgaggggcgccgggaggctccgcgcgctgctgctg

SEQ ID NO: 1953 - DNA, 201 bp, Homo sapiens
aggccaaaggcaggacgctgatcccttgctatgaagagtataagaagaagtacggagaggaacacggctcctgccaggctgggatagcgggcttcttcacygaggagctggtggtgatgggtgctccagggtcattttattgggctggaaccatcaaagtgctgaaccttacggacaacacctatttaaaactgaacgacg

SEQ ID NO: 1954 - DNA, 201 bp, Homo sapiens
tttgtatcttccatatttggaagaaaaaaatcttctccagatttttcggaggccccactgatgctgttctcttcttcattctatcaagcccaggtgccagyctgaggcagccacttcggccaggtcacacgaccggggccagcaccacttcctttaaagatgaactctgaactttggagagtgagctacagagccgagcaa

SEQ ID NO: 1955 - DNA, 201 bp, Homo sapiens
ctccctaaacatctctatctccaacctcggagatgatgcctatgatgccaacgtgtccttcaatgtttcccgggagctcttcttcatcaacatgtggcagmaggaggagatgggcatctcctgtgagctgctggaatcggacttcctcaaatgcagcgtgggatttcctttcatgaggtcaaagtcaaagtatgaattcag

SEQ ID NO: 1956 - DNA, 201 bp, Homo sapiens
tggggatgggcggcccggctgcgccgaggggcgccgggaggctccgcgcgctgctgctggcgctggtggtcgcggggatccccgcgggcgcctacaacctygacccgcagcgccccgtgcacttccagggccccgctgactcgttcttcggctacgcagttctggagcatttccacgacaacacgcgctgggtccttgtgg

SEQ ID NO: 1957 - DNA, 201 bp, Homo sapiens
gccagatgcccagggtctactttgtgctgctgggagagaccatgggtcaggtcacagagaagctgcagctgacttacatggaggagacgtgtcgtcactaygtggcccatgtgaagcggagggtgcaggacgtcatcagcccgatcgtgtttgaagcagcctacagcctcagtgagcatgtgactggagaggaggagaggg

SEQ ID NO: 1958 - DNA, 201 bp, Homo sapiens
tttgggggctgtgaagaacatctccctaaacatctctatctccaacctcggagatgatgcctatgatgccaacgtgtccttcaatgtttcccgggagctcytcttcatcaacatgtggcagaaggaggagatgggcatctcctgtgagctgctggaatcggacttcctcaaatgcagcgtgggatttcctttcatgaggtc

SEQ ID NO: 1959 - DNA, 201 bp, Homo sapiens
tccatcaacatcacagcgcctcagtgtcacgacggacagcagcctgtgaactgcctgaacgtcaccacctgcttcagcttccatggcaaacacgttccagragagattggcctgaattatgttctgatggctgacgtggccaaaaaggagaagggccagatgcccagggtctactttgtgctgctgggagagaccatgggt

SEQ ID NO: 1960 - DNA, 201 bp, Homo sapiens
cctgtatctagctttgggggctgtgaagaacatctccctaaacatctctatctccaacctcggagatgatgcctatgatgccaacgtgtccttcaatgttycccgggagctcttcttcatcaacatgtggcagaaggaggagatgggcatctcctgtgagctgctggaatcggacttcctcaaatgcagcgtgggatttcc

SEQ ID NO: 1961 - DNA, 201 bp, Homo sapiens
atgttttccttctgacactggctgttgtggacatcatctgcacaacaagcatcataccgaagatgctggggaccatgctaacatcagaaaataccatttcwtatgcaggctgcatgtcccagctcttcttgttcacatggtctctgggagctgagatggttctcttcaccaccatggcctatgaccgctatgtggccattt

SEQ ID NO: 1962 - DNA, 201 bp, Homo sapiens
gcacacagctcttatcatgaggttgactttctgtgggccaaacaccattgaccacttcttctgtgagatacccccattgctggctttgtcctgtagccctstaagaatcaatgaggtgatggtgtatgttgctgatattaccctggccataggggactttattcttacctgcatctcctatggttttatcattgttgctat

SEQ ID NO: 1963 - DNA, 201 bp, Homo sapiens
ttgctgatattaccctggccataggggactttattcttacctgcatctcctatggttttatcattgttgctattctccgtatccgcacagtagaaggcaakaggaaggccttctcaacatgctcatctcatctcacagtggtgaccctttactattctcctgtaatctacacctatatccgccctgcttccagctatacat

SEQ ID NO: 1964 - DNA, 201 bp, Homo sapiens
cttcttgttcacatggtctctgggagctgagatggttctcttcaccaccatggcctatgaccgctatgtggccatttgtttccctcttcattacagtactrttatgaaccaccatatgtgtgtagccttgctcagcatggtcatggctattgcagtcaccaattcctgggtgcacacagctcttatcatgaggttgacttt

SEQ ID NO: 1965 - DNA, 201 bp, Homo sapiens
aatcaatgaggtgatggtgtatgttgctgatattaccctggccataggggactttattcttacctgcatctcctatggttttatcattgttgctattctcygtatccgcacagtagaaggcaagaggaaggccttctcaacatgctcatctcatctcacagtggtgaccctttactattctcctgtaatctacacctatat

SEQ ID NO: 1966 - DNA, 201 bp, Homo sapiens
tggggaccatgctaacatcagaaaataccatttcatatgcaggctgcatgtcccagctcttcttgttcacatggtctctgggagctgagatggttctcttyaccaccatggcctatgaccgctatgtggccatttgtttccctcttcattacagtactgttatgaaccaccatatgtgtgtagccttgctcagcatggtca

SEQ ID NO: 1967 - DNA, 201 bp, Homo sapiens
ggcctcaccaaaaagcctgaactccagggaattatcttcctcttttttctcattgtctatcttgtggcttttctcggcaacatgctcatcatcattgccawaatctataacaacaccttgcatacgcccatgtatgttttccttctgacactggctgttgtggacatcatctgcacaacaagcatcataccgaagatgctg

SEQ ID NO: 1968 - DNA, 201 bp, Homo sapiens
atgtatgttttccttctgacactggctgttgtggacatcatctgcacaacaagcatcataccgaagatgctggggaccatgctaacatcagaaaataccakttcatatgcaggctgcatgtcccagctcttcttgttcacatggtctctgggagctgagatggttctcttcaccaccatggcctatgaccgctatgtggcc

SEQ ID NO: 1969 - DNA, 201 bp, Homo sapiens
ttatcatgaggttgactttctgtgggccaaacaccattgaccacttcttctgtgagatacccccattgctggctttgtcctgtagccctgtaagaatcaaygaggtgatggtgtatgttgctgatattaccctggccataggggactttattcttacctgcatctcctatggttttatcattgttgctattctccgtatcc

SEQ ID NO: 1970 - DNA, 201 bp, Homo sapiens
gcacgtggagcggaggagctggaaacttgcctttcaggcagatattgcccaactcatgtctctcgtcatcaataccttctattctaacaaggagattttcyttcaggggttgatctaatgtttctgatgcattggacaagatttcctgtaagagcctgacaaacccttccaagttggacaatggtaaagagctggaagtta

SEQ ID NO: 1971 - DNA, 201 bp, Homo sapiens
ggaccccagcaggaaaagcaaagcaagagaattctgctaagaagttttattctgaatctgaggaagaggaggactcttctgatagtagcagtgacagtgakagtgaatctggaagtgaaagtggagaacaaggcgaaagtggggaggaaggagacagcaatgaggacagcagtgaggactcctccagtgagcaggacagtg

SEQ ID NO: 1972 - DNA, 201 bp, Homo sapiens
tggaccccagcaggaaaagcaaagcaagagaattctgctaagaagttttattctgaatctgaggaagaggaggactcttctgatagtagcagtgacagtgsgagtgaatctggaagtgaaagtggagaacaaggcgaaagtggggaggaaggagacagcaatgaggacagcagtgaggactcctccagtgagcaggacagt

SEQ ID NO: 1973 - DNA, 201 bp, Homo sapiens
aactccaaacagacaaaattgcttacccagtacatattaaatctcggcaagtatgatcaaaactacgacatcagagaccgtacaagatttattaggcagcktattgttccgaatgaaaagagtggagctttaagtaaatatgccaaaaaaatattcctagcacaaaagcctgcaccactgcttgagtctccttttaaagat

SEQ ID NO: 1974 - DNA, 201 bp, Homo sapiens
ctagagcaagtattctttggctaattggagaaaactgtgaacgagttcctaaaattgcccctgatgttttgaggaagatggctaaaagcttcactagtgargatgatctggtaaaactgcagatattaaatctgggagcaaaattgtatttaaccaactccaaacagacaaaattgcttacccagtacatattaaatctcg

SEQ ID NO: 1975 - DNA, 201 bp, Homo sapiens
tgaaagataaaagcacattggtagctggcagtgttgtgatggcttttgaagaagtatgcccggacagaatagatctgattcataaaaattaccgcaagctrtgtaacttactagtggatgttgaagagtgggggcaggttgtcataatccacatgctaactcgatatgctcggacacagtttgtcagcccttggaaagagg

SEQ ID NO: 1976 - DNA, 201 bp, Homo sapiens
ggccagaggtggcgcccgacccatcagttcgaaatgtagaagtaatagagttggcaaaagaatggaccccagcaggaaaagcaaagcaagagaattctgcyaagaagttttattctgaatctgaggaagaggaggactcttctgatagtagcagtgacagtgagagtgaatctggaagtgaaagtggagaacaaggcgaaa

SEQ ID NO: 1977 - DNA, 201 bp, Homo sapiens
catctggcagtgggggtagaatacactcttgacattcttgtctcctgctttagaatgctagtgtgtatctatcatgtatgcaatactttccccctttttgytttgctaaccaaagagcatatattttactgtcagttgtctcaactcttgaatccatgtggcgttttctctgtcctgctgcttcttttggcctcctcgttt

SEQ ID NO: 1978 - DNA, 201 bp, Homo sapiens
aagatgatctggtaaaactgcagatattaaatctgggagcaaaattgtatttaaccaactccaaacagacaaaattgcttacccagtacatattaaatctyggcaagtatgatcaaaactacgacatcagagaccgtacaagatttattaggcagcttattgttccgaatgaaaagagtggagctttaagtaaatatgcca

SEQ ID NO: 1979 - DNA, 201 bp, Homo sapiens
ctgcggtggttatggcagttgctcagctgtattggcacatatcaccaaaatctgaagctggcataatttctaaatcactagtgcgtttacttcgtagcaayagggaggtgcagtatattgtcctacaaaatatagcaactatgtcaattcaacttgaaattttgacaaacttggcaaatgaagccaacatatcaactcttc

SEQ ID NO: 1980 - DNA, 201 bp, Homo sapiens
aggaactcaaaagccaaaggaaaaagtgattctgaagatggggagaaggaaaatgaaaaatctaaaacttcagattcttcaaatgacgaatctagttcaawagaagacagttcttccgattctgaatcagagtcagaacctgaaagtgaatctgaatccagaagagtcactaaggagaaagaaaagaaaacaaagcaagat

SEQ ID NO: 1981 - DNA, 201 bp, Homo sapiens
gtgaggactcctccagtgagcaggacagtgagagtggacgggagtcaggcctagaaaacaaaagaacagccaagaggaactcaaaagccaaaggaaaaagygattctgaagatggggagaaggaaaatgaaaaatctaaaacttcagattcttcaaatgacgaatctagttcaatagaagacagttcttccgattctgaat

SEQ ID NO: 1982 - DNA, 201 bp, Homo sapiens
aaattgcttacccagtacatattaaatctcggcaagtatgatcaaaactacgacatcagagaccgtacaagatttattaggcagcttattgttccgaatgwaaagagtggagctttaagtaaatatgccaaaaaaatattcctagcacaaaagcctgcaccactgcttgagtctccttttaaagatagagatcatttccag

SEQ ID NO: 1983 - DNA, 201 bp, Homo sapiens
ggtagacatgaatgagatatttaaagttcattggaaatcttcttccctacagcagtaagcaaaaattagcaaagagatagtctaaatggcctctcagcttkgtatgtgaaaatgagatcacatactttttaaatccaaatacaaaagcatagtctctgcaagattttgttctttgaatttcttgatattgtaattgattat

SEQ ID NO: 1984 - DNA, 201 bp, Homo sapiens
gcatgaaaatgcatgtttttaatccaatagactctcttgagcctgagggatccattacagtttcaatgggtattgacttttgtgattctactcagactgcyagtttccagttgtgtaccaaggatgattgcttcaatgttaatattcagccacctgttggagaactgcttttacctgtggccatgtcagagaaagatttta

SEQ ID NO: 1985 - DNA, 201 bp, Homo sapiens
cttctggccaggataatatacacaggtttgcagctaaaactgtgcacagtgggtcattgatgctagtcacagtggaactgaaggaaggctctacagcccarcttatcataaacactgagaaaactgtgattggctctgttctgctgcgggaactgaagcctgtcctgtctcaggggtaacctgcttacatctggactttag

SEQ ID NO: 1986 - DNA, 201 bp, Homo sapiens
aaaactgtgattggctctgttctgctgcgggaactgaagcctgtcctgtctcaggggtaacctgcttacatctggactttagaatctggcacacaacaaargtgcctggcatccactactgctgcctttcatttataataatagcccttccatctggcagtgggggtagaatacactcttgacattcttgtctcctgcttt

SEQ ID NO: 1987 - DNA, 201 bp, Homo sapiens
ctgctaagaagttttattctgaatctgaggaagaggaggactcttctgatagtagcagtgacagtgagagtgaatctggaagtgaaagtggagaacaaggygaaagtggggaggaaggagacagcaatgaggacagcagtgaggactcctccagtgagcaggacagtgagagtggacgggagtcaggcctagaaaacaaaa

SEQ ID NO: 1988 - DNA, 201 bp, Homo sapiens
tttcctgctgttgtgaagaatgtggccagtaaaaatattgagatcaagaagttggtatatgtttacctggttcgatatgctgaagaacagcaggatcttgyactcctgtccataagcacttttcagcgagctctgaaggacccaaaccaactaattcgtgcaagcgctttgagagttctgtcaagtattagagtgccaatt

SEQ ID NO: 1989 - DNA, 201 bp, Homo sapiens
ttcctgctgttgtgaagaatgtggccagtaaaaatattgagatcaagaagttggtatatgtttacctggttcgatatgctgaagaacagcaggatcttgcmctcctgtccataagcacttttcagcgagctctgaaggacccaaaccaactaattcgtgcaagcgctttgagagttctgtcaagtattagagtgccaatta

SEQ ID NO: 1990 - DNA, 201 bp, Homo sapiens; identical to SEQ ID NO: 1971

SEQ ID NO: 1991 - DNA, 201 bp, Homo sapiens; identical to SEQ ID NO: 1972

SEQ ID NO: 1992 - DNA, 201 bp, Homo sapiens; identical to SEQ ID NO: 1973

SEQ ID NO: 1993 - DNA, 201 bp, Homo sapiens; identical to SEQ ID NO: 1974

SEQ ID NO: 1994 - DNA, 201 bp, Homo sapiens; identical to SEQ ID NO: 1975

SEQ ID NO: 1995 - DNA, 201 bp, Homo sapiens; identical to SEQ ID NO: 1976

SEQ ID NO: 1996 - DNA, 201 bp, Homo sapiens; identical to SEQ ID NO: 1977

SEQ ID NO: 1997 - DNA, 201 bp, Homo sapiens; identical to SEQ ID NO: 1978

SEQ ID NO: 1998 - DNA, 201 bp, Homo sapiens
ctgcggtggttatggcagttgctcagctgtattggcacatatcaccaaaatctgaagctggcataatttctaaatcactagtgcgtttacttcgtagcaayagggaggtgcagtatattgtcctacaaaatatagcaactatgtcaattcaaagagcttgaaattttgacaaacttggcaaatgaagccaacatatcaact

SEQ ID NO: 1999 - DNA, 201 bp, Homo sapiens; identical to SEQ ID NO: 1980

SEQ ID NO: 2000 - DNA, 201 bp, Homo sapiens; identical to SEQ ID NO: 1981

SEQ ID NO: 2001 - DNA, 201 bp, Homo sapiens; identical to SEQ ID NO: 1982

SEQ ID NO: 2002 - DNA, 201 bp, Homo sapiens; identical to SEQ ID NO: 1983

SEQ ID NO: 2003 - DNA, 201 bp, Homo sapiens; identical to SEQ ID NO: 1984

SEQ ID NO: 2004 - DNA, 201 bp, Homo sapiens; identical to SEQ ID NO: 1985

SEQ ID NO: 2005 - DNA, 201 bp, Homo sapiens; identical to SEQ ID NO: 1986

SEQ ID NO: 2006 - DNA, 201 bp, Homo sapiens; identical to SEQ ID NO: 1987

SEQ ID NO: 2007 - DNA, 201 bp, Homo sapiens; identical to SEQ ID NO: 1988

SEQ ID NO: 2008 - DNA, 201 bp, Homo sapiens; identical to SEQ ID NO: 1989

SEQ ID NO: 2009 - DNA, 201 bp, Homo sapiens
cactgttttaaataaagaatcttacataagaatgttgacaacattcacagtaagccattggcagaaaattgatctgcatgtcctagaccaatgattacaaktctgtgggtctgtggtttagggggcccagcccatcattccttttccccttggcactcatgagagagatgccaagttcagtgtggatttttcttggtgctc

SEQ ID NO: 2010 - DNA, 201 bp, Homo sapiens
actgttttaaataaagaatcttacataagaatgttgacaacattcacagtaagccattggcagaaaattgatctgcatgtcctagaccaatgattacaagtctgtgggtctgtggtttagggggcccagcccatcattccttttccccttggcactcatgagagagatgccaagttcagtgtggatttttcttggtgctct

SEQ ID NO: 2011 - DNA, 201 bp, Homo sapiens
ctgttttaaataaagaatcttacataagaatgttgacaacattcacagtaagccattggcagaaaattgatctgcatgtcctagaccaatgattacaagtctgtgggtctgtggtttagggggcccagcccatcattccttttccccttggcactcatgagagagatgccaagttcagtgtggatttttcttggtgctcta

SEQ ID NO: 2012 - DNA, 201 bp, Homo sapiens
gacacttttaagaaacaaagatagttttctgaacattctgtgtcctgcctgtctcctgttgattcgcagatgtaatatcgagtattcatcaactggtctcmatttcctgaacacattcactgtatccctcattgtcaccgttatccccctgcttcaaaatgtgccagttccacttggtaataacgttgggaaaatgcaggt

SEQ ID NO: 2013 - DNA, 201 bp, Homo sapiens
ccccttggcactcatgagagagatgccaagttcagtgtggatttttcttggtgctctatggagaaatggagtctgtgtgcttactgaagagtcccaaaaascagagaccattttcatttactgccatcataaatattctccaccattcaagatgcctgtgtacacggctatttgggaaacttaagtgttggaggaggcagg

SEQ ID NO: 2014 - DNA, 201 bp, Homo sapiens
cttacataagaatgttgacaacattcacagtaagccattggcagaaaattgatctgcatgtcctagaccaatgattacaagtctgtgggtctgtggtttarggggcccagcccatcattccttttccccttggcactcatgagagagatgccaagttcagtgtggatttttcttggtgctctatggagaaatggagtctgt

SEQ ID NO: 2015 - DNA, 201 bp, Homo sapiens
gttctttgcttttatgatacatttgtaactcacagctgttagcatgacctcacatcactgcgtaggacccggaaatcacatctcctggtcaggtcacgaaraagaacacaggcttgactattgtccagaagttactttccccttgactaaaggtttccccttagggtacacattgctatttaactttgcctcctacccttt

SEQ ID NO: 2016 - DNA, 201 bp, Homo sapiens
gaatgttgacaacattcacagtaagccattggcagaaaattgatctgcatgtcctagaccaatgattacaagtctgtgggtctgtggtttagggggcccakcccatcattccttttccccttggcactcatgagagagatgccaagttcagtgtggatttttcttggtgctctatggagaaatggagtctgtgtgcttact

SEQ ID NO: 2017 - DNA, 182 bp, Homo sapiens
tttctgagctgaaaccttaacaaatagggaatttggcagggaagacacctgggtttttaattcagaaccctatttatatactgttaaaatttgaggtactrtagtttatataaaagtcggatgttaagatattatatttcagtactaggagcttctttgcagtcattaacatgacaaattaa

SEQ ID NO: 2018 - DNA, 201 bp, Homo sapiens
ttgatctgcatgtcctagaccaatgattacaagtctgtgggtctgtggtttagggggcccagcccatcattccttttccccttggcactcatgagagagaygccaagttcagtgtggatttttcttggtgctctatggagaaatggagtctgtgtgcttactgaagagtcccaaaaaccagagaccattttcatttactgc

SEQ ID NO: 2019 - DNA, 201 bp, Homo sapiens
tgttttaaataaagaatcttacataagaatgttgacaacattcacagtaagccattggcagaaaattgatctgcatgtcctagaccaatgattacaagtctgtgggtctgtggtttagggggcccagcccatcattccttttccccttggcactcatgagagagatgccaagttcagtgtggatttttcttggtgctctat

SEQ ID NO: 2020 - DNA, 201 bp, Homo sapiens
ttctgtgtcctgcctgtctcctgttgattcgcagatgtaatatcgagtattcatcaactggtctcaatttcctgaacacattcactgtatccctcattgtmaccgttatccccctgcttcaaaatgtgccagttccacttggtaataacgttgggaaaatgcaggtttatgaatgatgtggacttttagaggatcaaatca

SEQ ID NO: 2021 - DNA, 201 bp, Homo sapiens
tttaaataaagaatcttacataagaatgttgacaacattcacagtaagccattggcagaaaattgatctgcatgtcctagaccaatgattacaagtctgtgggtctgtggtttagggggcccagcccatcattccttttccccttggcactcatgagagagatgccaagttcagtgtggatttttcttggtgctctatgga

SEQ ID NO: 2022 - DNA, 201 bp, Homo sapiens
tgttctttgcttttatgatacatttgtaactcacagctgttagcatgacctcacatcactgcgtaggacccggaaatcacatctcctggtcaggtcacgaraaagaacacaggcttgactattgtccagaagttactttccccttgactaaaggtttccccttagggtacacattgctatttaactttgcctcctaccctt

SEQ ID NO: 2023 - DNA, 201 bp, Homo sapiens
ttaaataaagaatcttacataagaatgttgacaacattcacagtaagccattggcagaaaattgatctgcatgtcctagaccaatgattacaagtctgtgggtctgtggtttagggggcccagcccatcattccttttccccttggcactcatgagagagatgccaagttcagtgtggatttttcttggtgctctatggag

SEQ ID NO: 2024 - DNA, 201 bp, Homo sapiens
gttttgcttgttgcatgggttccctgtgctttgtaacttgcatgaacacaaccaggtttctcaacaatgatttgtctgctgactcttttcagagatagtgraggaaaaaaaatgtattaaaaccccaaattatctaggtttccaagtaggaaaaataaagatacatatgacttttattattattcgatgataattagcttt

SEQ ID NO: 2025 - DNA, 201 bp, Homo sapiens
cgaaatccatagagatgaagttcctcaccggctacgaggtcaaggtcatggaagacgcccacttggatgccatcctcatcctgggggaggccttcgcctcygatgagccttttgattttggcactcagagcaccaccgagaagatccacaacctgattcccgtcatgctgaggcaccgtctcgtccccccacccgaggaaa

SEQ ID NO: 2026 - DNA, 201 bp, Homo sapiens
cggacttcatgccactgaagcagatgatgaaaactctcaacaacgacctgggccccaactggcgggacaagttggaatacttcgaggagcggcccttcgcygccgcatccattgggcaggtgcacttggcccgaatgaagggcggccgcgaggtggccatgaagatccagtaccctggcgtggcccagagcatcaacagtg

SEQ ID NO: 2027 - DNA, 201 bp, Homo sapiens
atgaacagatacgattgtgggattttatcatctgtgtagtaggtgtgtgtatgtgtttctagagtgagatttgtgttttctgcccttttcctctccagccratgggctggagctgggagaggtgctgagctaacagtgccaacaagtgctccttaagcctgcgaggcccaggcctgtggggctggttctcacctttgacag

SEQ ID NO: 2028 - DNA, 201 bp, Homo sapiens
gccttcgcctctgatgagccttttgattttggcactcagagcaccaccgagaagatccacaacctgattcccgtcatgctgaggcaccgtctcgtcccccsacccgaggaaacctactccctgcacaggaagatggggggctccttcctcatctgctccaagctgaaggcccgcttcccctgcaaggccatgttcgaggag

SEQ ID NO: 2029 - DNA, 201 bp, Homo sapiens
acttggatgccatcctcatcctgggggaggccttcgcctctgatgagccttttgattttggcactcagagcaccaccgagaagatccacaacctgattccygtcatgctgaggcaccgtctcgtccccccacccgaggaaacctactccctgcacaggaagatggggggctccttcctcatctgctccaagctgaaggccc

SEQ ID NO: 2030 - DNA, 118 bp, Homo sapiens
caggtgtcaccagttccagccaaaggctcctcacaggcgctgtgaatttttgtacaagtcttgtaattatcgaatcaacaacttgtttcaatttaataaaratgctcatgggaagtgc

SEQ ID NO: 2031 - DNA, 201 bp, Homo sapiens
ttcagtgcaaaacccagaaacatgaacagatacgattgtgggattttatcatctgtgtagtaggtgtgtgtatgtgtttctagagtgagatttgtgttttstgcccttttcctctccagccgatgggctggagctgggagaggtgctgagctaacagtgccaacaagtgctccttaagcctgcgaggcccaggcctgtggg

SEQ ID NO: 2032 - DNA, 201 bp, Homo sapiens
tggtgtctggcttccccctggaccaggccgaagggctcagccaggagattcggaacgagatctgctacaacatcctggttctgtgcctgagggagctgttygagttccacttcatgcaaacagaccccaactggtccaacttcttctatgacccccagcagcacaaggtggctcttttggattttggggcaacgcgggaat

SEQ ID NO: 2033 - DNA, 201 bp, Homo sapiens
aactgctgccccacagtgagggtgggagcagcggaacagggaatgccagacacaggctcgctgctgctggaaggcggggtgggacttccttcctctgtccrgagaggcacaggtgtcaccagttccagccaaaggctcctcacaggcgctgtgaatttttgtacaagtcttgtaattatcgaatcaacaacttgtttcaat

SEQ ID NO: 2034 - DNA, 201 bp, Homo sapiens
gaccggcgggcggacagcgactccgccctgaaggatggctgccatattgggagacaccatcatggtggctaaaggccttgtcaagctgacccaggcggccrtggaaacccacctgcagcacttgggcatcggaggggagctgatcatggcggccagggccctgcagtccacggctgtggagcagattggcatgttcttggg

SEQ ID NO: 2035 - DNA, 201 bp, Homo sapiens
acgagaccggcgggcggacagcgactccgccctgaaggatggctgccatattgggagacaccatcatggtggctaaaggccttgtcaagctgacccaggcrgccgtggaaacccacctgcagcacttgggcatcggaggggagctgatcatggcggccagggccctgcagtccacggctgtggagcagattggcatgttct

SEQ ID NO: 2036 - DNA, 198 bp, Homo sapiens
tggcttatgccattgaatcttgttttaagagatccttccctaccctcaaggttttctaaatttttattttcataataagatttttagttcatctgaartgtatttttatgattgtatttagtagggacctaattttgtttttctttgtaaccaggtgtcccagcactgtttactgaacagtctctcctttctcgctgg

SEQ ID NO: 2037 - DNA, 201 bp, Homo sapiens
gcatgttcttggggaaggtgcagggtcaggataaacatgaagaatattttgctgagaacttcggcggcccagaaggggagttccacttctcagtcccgcakgcagccggagcctccacagacttctcttcagcctccgctcccgaccagtcagcgcccccatccctgggtcatgcccacagcgagggcccagctcctgcct

SEQ ID NO: 2038 - DNA, 201 bp, Homo sapiens; identical to SEQ ID NO: 2025

SEQ ID NO: 2039 - DNA, 201 bp, Homo sapiens; identical to SEQ ID NO: 2027

SEQ ID NO: 2040 - DNA, 201 bp, Homo sapiens; identical to SEQ ID NO: 2026

SEQ ID NO: 2041 - DNA, 201 bp, Homo sapiens; identical to SEQ ID NO: 2028

SEQ ID NO: 2042 - DNA, 201 bp, Homo sapiens; identical to SEQ ID NO: 2029

SEQ ID NO: 2043 - DNA, 118 bp, Homo sapiens; identical to SEQ ID NO: 2030

SEQ ID NO: 2044 - DNA, 201 bp, Homo sapiens; identical to SEQ ID NO: 2031

SEQ ID NO: 2045 - DNA, 201 bp, Homo sapiens
tctctcgcaggccaatgcctcaccaggtgattgaagcagagaaacttaggtggtgaaaggagaagatggggcctgtcctgagagtttctgttcctgagatkctagaggcagaggtttccagaaccacaagacagacccaagagggctgtgttggcaaaacaaatggcagagtggagctggccagaggcatctgtgcgtggc

SEQ ID NO: 2046 - DNA, 201 bp, Homo sapiens
ccagaggcatctgtgcgtggcgactccaagagagcacccgactccagatggcgacactgcaggatggagcggggcatgcctgcagacaggtgtcagagacrgggtcttgctgtattgcccaggctagatttgaactcctggcctgaagtaatcctcccaccttggcctcccaaagttctgggactacaggctggagtgcaa

SEQ ID NO: 2047 - DNA, 201 bp, Homo sapiens; identical to SEQ ID NO: 2032

SEQ ID NO: 2048 - DNA, 201 bp, Homo sapiens
attctcctgcctcagcctcccataccagttcaactttttcagattccacgtgagggagtgacggggcaaatctgcgtgctgctggtggcggtgcctcccarggctgctcggcggggacgccgagggctgcacccgagctccatcccgtgttggctgcgcgccctccaaaaccccggctgtcagcgactgcgggcacctgca

SEQ ID NO: 2049 - DNA, 201 bp, Homo sapiens; identical to SEQ ID NO: 2033

SEQ ID NO: 2050 - DNA, 176 bp, Homo sapiens
tggcttatgccattgaatcttgttttaagagatccttccctaccctcaaggttttctaaatttttattttcataayaagatttttagttcatctgaaatgtatttttatgattgtatttagtagggacctaattttgtttttctttgtaaccaggtgtcccagcactgtttactga

SEQ ID NO: 2051 - DNA, 201 bp, Homo sapiens
gagacaccatcatggtggctaaaggccttgtcaagctgacccaggcggccgtggaaacccacctgcagcacttgggcatcggaggggagctgatcatggcrgccagggccctgcagtccacggctgtggagcagattggcatgttcttggggaaggtgcagggtcaggataaacatgaagaatattttgctgagaacttcg

SEQ ID NO: 2052 - DNA, 201 bp, Homo sapiens; identical to SEQ ID NO: 2034

SEQ ID NO: 2053 - DNA, 201 bp, Homo sapiens; identical to SEQ ID NO: 2035

SEQ ID NO: 2054 - DNA, 198 bp, Homo sapiens; identical to SEQ ID NO: 2036

SEQ ID NO: 2055 - DNA, 201 bp, Homo sapiens; identical to SEQ ID NO: 2037

SEQ ID NO: 2056 - DNA, 170 bp, Homo sapiens
cggacttcatgccactgaagcagatgatgaaaactctcaacaacgacctgggccccaactggcgggacaagttggaatacttcgaggagcggcccttcgcygccgcatccattgggcaggtgcacttggcccgaatgaagggcggccgcgaggtggccatgaagatccag

SEQ ID NO: 2057 - DNA, 201 bp, Homo sapiens; identical to SEQ ID NO: 2045

SEQ ID NO: 2058 - DNA, 201 bp, Homo sapiens; identical to SEQ ID NO: 2046

SEQ ID NO: 2059 - DNA, 201 bp, Homo sapiens; identical to SEQ ID NO: 2048

SEQ ID NO: 2060 - DNA, 176 bp, Homo sapiens; identical to SEQ ID NO: 2050

SEQ ID NO: 2061 - DNA, 201 bp, Homo sapiens; identical to SEQ ID NO: 2051

SEQ ID NO: 2062 - DNA, 201 bp, Homo sapiens
ggatcccagcttcctgcagccagggtcaggataaacatgaagaatattttgctgagaacttcggcggcccagaaggggagttccacttctcagtcccgcakgcagccggagcctccacagacttctcttcagcctccgctcccgaccagtcagcgcccccatccctgggtcatgcccacagcgagggcccagctcctgcct

SEQ ID NO: 2063 - DNA, 201 bp, Homo sapiens
gcggatcccagcttcctgcagccagccctgaaggatggctgccatattgggagacaccatcatggtggctaaaggccttgtcaagctgacccaggcggccrtggaaacccacctgcagcacttgggcatcggaggggagctgatcatggcggccagggccctgcagtccacggctgtggagcagattggcatgttcttggg

SEQ ID NO: 2064 - DNA, 201 bp, Homo sapiens
gaccgcggatcccagcttcctgcagccagccctgaaggatggctgccatattgggagacaccatcatggtggctaaaggccttgtcaagctgacccaggcrgccgtggaaacccacctgcagcacttgggcatcggaggggagctgatcatggcggccagggccctgcagtccacggctgtggagcagattggcatgttct

SEQ ID NO: 2065 - DNA, 201 bp, Homo sapiens; identical to SEQ ID NO: 2037

SEQ ID NO: 2066 - DNA, 201 bp, Homo sapiens; identical to SEQ ID NO: 2025

SEQ ID NO: 2067 - DNA, 201 bp, Homo sapiens; identical to SEQ ID NO: 2027

SEQ ID NO: 2068 - DNA, 201 bp, Homo sapiens; identical to SEQ ID NO: 2026

SEQ ID NO: 2069 - DNA, 201 bp, Homo sapiens; identical to SEQ ID NO: 2028

SEQ ID NO: 2070 - DNA, 201 bp, Homo sapiens; identical to SEQ ID NO: 2029

SEQ ID NO: 2071 - DNA, 118 bp, Homo sapiens; identical to SEQ ID NO: 2030

SEQ ID NO: 2072 - DNA, 201 bp, Homo sapiens; identical to SEQ ID NO: 2031

SEQ ID NO: 2073 - DNA, 201 bp, Homo sapiens; identical to SEQ ID NO: 2032

SEQ ID NO: 2074 - DNA, 201 bp, Homo sapiens; identical to SEQ ID NO: 2033

SEQ ID NO: 2075 - DNA, 201 bp, Homo sapiens; identical to SEQ ID NO: 2051

SEQ ID NO: 2076 - DNA, 201 bp, Homo sapiens
acgagtgacattggctgacatcacagttgtctgcaccctgttgtggctctataagcaggttctagagccttctttccgccgggcctttcgcaataccaacygctggttcctcacctgcattaaccagccccagttccgggctgtcttgggggaactgaaactgtgtgagaagatggcccagtttgatgctaaaaagtttgc

SEQ ID NO: 2077 - DNA, 201 bp, Homo sapiens
gagggccttcaaggctctcatcgctgctcagtacagcggggctcagatccgcgtgctctccgcaccaccccacttccattttggccaaaccaaccgcaccyctgaatttcttcgcaaatttcctgccggcaaggtcccagcatttgagggtgatgatggattctgtgtgtttgagagcaacgccattgcctactatgtgag

SEQ ID NO: 2078 - DNA, 201 bp, Homo sapiens
ggcggaaactggatcctggcagagaggagacccagacgctggttcgagagtacttttcctgggagggggccttccagcatgtgggcaaagccttcaatcasggcaagatcttcaagtgaacatctcttgccatcacctagctgcctgcacctgcccttcagggagatgggggtcattaaaggaaactgaacattgaaaaaa

SEQ ID NO: 2079 - DNA, 201 bp, Homo sapiens
gagtctgggtcttccgaggccaggagcttgcctttccgctgagtccagattggcaggtggactacgagtcatacacatggcggaaactggatcctggcagmgaggagacccagacgctggttcgagagtacttttcctgggagggggccttccagcatgtgggcaaagccttcaatcacggcaagatcttcaagtgaacat

SEQ ID NO: 2080 - DNA, 201 bp, Homo sapiens
tctttgcggaatcaccatggcggctgggaccctgtacacgtatcctgaaaactggagggccttcaaggctctcatcgctgctcagtacagcggggctcagrtccgcgtgctctccgcaccaccccacttccattttggccaaaccaaccgcacctctgaatttcttcgcaaatttcctgccggcaaggtcccagcatttga

SEQ ID NO: 2081 - DNA, 201 bp, Homo sapiens
ctggtgggcgaacgagtgacattggctgacatcacagttgtctgcaccctgttgtggctctataagcaggttctagagccttctttccgccgggcctttcscaataccaaccgctggttcctcacctgcattaaccagccccagttccgggctgtcttgggggaactgaaactgtgtgagaagatggcccagtttgatgct

SEQ ID NO: 2082 - DNA, 104 bp, Homo sapiens
ccakcctttctttgcggaatcaccatggcggctgggaccctgtacacgtatcctgaaaactggagggccttcaaggctctcatcgctgctcagtacagcggggc

SEQ ID NO: 2083 - DNA, 201 bp, Homo sapiens
aggacttttctggtgggcgaacgagtgacattggctgacatcacagttgtctgcaccctgttgtggctctataagcaggttctagagccttctttccgccrggcctttcgcaataccaaccgctggttcctcacctgcattaaccagccccagttccgggctgtcttgggggaactgaaactgtgtgagaagatggcccag

SEQ ID NO: 2084 - DNA, 201 bp, Homo sapiens
atttctgggagcactttgataaggacggctggtccctgtggtactcagagtatcgcttccctgaagaactcactcagaccttcatgagctgcaatctcatsactggaatgttccagcgactggacaagctgaggaagaatgccttcgccagtgtcatcctttttggaaccaacaatagcagctccatttctggagtctggg

SEQ ID NO: 2085 - DNA, 201 bp, Homo sapiens
agccccaggctgagcggaaggaggagaaaaaggcggctgcccctgctcctgaggaggagatggatgaatgtgagcaggcgctggctgctgagcccaaggcyaaggaccccttcgctcacctgcccaagagtacctttgtgttggatgaatttaagcgcaagtactccaatgaggacacactctctgtggcactgccatatt

SEQ ID NO: 2086 - DNA, 201 bp, Homo sapiens
aggctctcatcgctgctcagtacagcggggctcagatccgcgtgctctccgcaccaccccacttccattttggccaaaccaaccgcacctctgaatttctycgcaaatttcctgccggcaaggtcccagcatttgagggtgatgatggattctgtgtgtttgagagcaacgccattgcctactatgtgagcaatgaggagc

SEQ ID NO: 2087 - DNA, 201 bp, Homo sapiens
ataagcaggttctagagccttctttccgccgggcctttcgcaataccaaccgctggttcctcacctgcattaaccagccccagttccgggctgtcttgggsgaactgaaactgtgtgagaagatggcccagtttgatgctaaaaagtttgcagagacccagcctaaaaaggacacaccacggaaagagaagggttcacggg

SEQ ID NO: 2088 - DNA, 201 bp, Homo sapiens
atttgagggtgatgatggattctgtgtgtttgagagcaacgccattgcctactatgtgagcaatgaggagctgcggggaagtactccagaggcagcagccmaggtggtgcagtgggtgagctttgctgattccgatatagtgcccccagccagtacctgggtgttccccaccttgggcatcatgcaccacaacaaacaggc

SEQ ID NO: 2089 - DNA, 201 bp, Homo sapiens
aggatgtgcaggaatatctcacctgtgtgcagaaaaatcaggcaggcagctagcgagtttgaccccacatgccctcttctgtttgtcttgcaccttgtctraggaccctaaatgaacgataaacagagatggtagctatgagtatacaaaaggtaaatccacttaatcacatacagaagagcaacaacaaactgcttacga

SEQ ID NO: 2090 - DNA, 201 bp, Homo sapiens
cggtctggcccacctgtatggaatcgcaggaagcgttaacgtgacgggagatgaggtgaagaaactggatgtgctatccaattccctggtgatcaacatgstccaatcctcctatagtacctgcgtcctggtctcagaagagaataaggacgccatcatcaccgccaaggagaagcgggggaaatacgtggtctgctttga

SEQ ID NO: 2091 - DNA, 201 bp, Homo sapiens
gcagctagcgagtttgaccccacatgccctcttctgtttgtcttgcaccttgtctaaggaccctaaatgaacgataaacagagatggtagctatgagtatrcaaaaggtaaatccacttaatcacatacagaagagcaacaacaaactgcttacgacaggtttggaagccacaggcgattctatggtcaatgtgaaggact

SEQ ID NO: 2092 - DNA, 201 bp, Homo sapiens
atccaattccctggtgatcaacatgctccaatcctcctatagtacctgcgtcctggtctcagaagagaataaggacgccatcatcaccgccaaggagaagmgggggaaatacgtggtctgctttgacccactggatggatcttccaatattgactgcctggcctccatcggaaccatctttgccatctatagaaagacctc

SEQ ID NO: 2093 - DNA, 158 bp, Homo sapiens
cattcctgcgcatcgtgcagtgccgctctgtggagggcagctgtggcttctagctgcccgggtggcatccctgtgacccctccccagtgcctctcctggtsgtggaaggtgctactccagtgcccaccagccttgtcctaataaaattaagttgcatc

SEQ ID NO: 2094 - DNA, 201 bp, Homo sapiens
ccgcgcccgtcgcctgtaccagctggcatatgacacctatcaggagtttaacccccagacctccctctgcttctcagagtctattccaacaccttccaacwgggtgaaaacgcagcagaaatctaacctagagctgctccgcatctccctgctgctcatccagtcatggctggagcccgtgcagctcctcaggagcgtctt

SEQ ID NO: 2095 - DNA, 195 bp, Homo sapiens
acatgcagagaaacaggtgaggagaagcagcgagagagaaggggccaggtataaaaagggcccacaagagaccagctcaaggatcccaaggcccractccccgaaccactcagggtcctgtggacagctcacctagcggcaatggctgcaggctcccggacgtccctgctcctggcttttggcctgctctgcctg

SEQ ID NO: 2096 - DNA, 172 bp, Homo sapiens
ggacaaggtcgagacattcctgcgcatcgtgcagtgccgctctgtggagggcagctgtggcttctagctgcccgggtggcatccctgtgacccctccccastgcctctcctggtcgtggaaggtgctactccagtgcccaccagccttgtcctaataaaattaagttgcatc

SEQ ID NO: 2097 - DNA, 201 bp, Homo sapiens
gcagtgccttcccaaccattcccttatccaggctttttgacaacgctatgctccgcgcccgtcgcctgtaccagctggcatatgacacctatcaggagttraacccccagacctccctctgcttctcagagtctattccaacaccttccaacagggtgaaaacgcagcagaaatctaacctagagctgctccgcatctccc

SEQ ID NO: 2098 - DNA, 201 bp, Homo sapiens
ggtataaaaagggcccacaagagaccagctcaaggatcccaaggcccaactccccgaaccactcagggtcctgtggacagctcacctagctgcaatggctrcaggctcccggacgtccctgctcctggcttttggcctgctctgcctgccctggcttcaagagggcagtgccttcccaaccattcccttatccaggctttt

SEQ ID NO: 2099 - DNA, 201 bp, Homo sapiens
tttaacccccagacctccctctgtttctcagagtctattccgacaccctccaacagggaggaaacacaacagaaatccaacctagagctgctccgcatctscctgctgctcatccagtcgtggctggagcccgtgcagttcctcaggagtgtcttcgccaacagcctggtgtacggcgcctctgacagcaacgtctatgac

SEQ ID NO: 2100 - DNA, 201 bp, Homo sapiens
aaggggccagggtataaaaagggcccacaagagaccagctcaaggatcccaaggcccaactccccgaaccactcagggtcctgtggacagctcacctagcbgcaatggctacaggctcccggacgtccctgctcctggcttttggcctgctctgcctgccctggcttcaagagggcagtgccttcccaaccattcccttat

SEQ ID NO: 2101 - DNA, 201 bp, Homo sapiens
ctgccctggcttcaagagggcagtgccttcccaaccattcccttatccaggctttttgacaacgctatgctccgcgcccatcgtctgcaccagctggcctwtgacacctaccaggagtttaacccccagacctccctctgtttctcagagtctattccgacaccctccaacagggaggaaacacaacagaaatccaaccta

SEQ ID NO: 2102 - DNA, 201 bp, Homo sapiens
gcctgccctggcttcaagagggcagtgccttcccaaccattcccttatccaggctttttgacaacgctatgctccgcgcccatcgtctgcaccagctggcmtttgacacctaccaggagtttaacccccagacctccctctgtttctcagagtctattccgacaccctccaacagggaggaaacacaacagaaatccaacc

SEQ ID NO: 2103 - DNA, 170 bp, Homo sapiens
acagtgggagagaaggggccagggtataaaaagggcccacaagagaccagctcaaggatcccaaggcccractccccgaaccactcagggtcctgtggacagctcacctagctgcaatggctacaggctcccggacgtccctgctcctggcttttggcctgctctgcctg

SEQ ID NO: 2104 - DNA, 149 bp, Homo sapiens
acagtgggagagaaggggccagggtataaaaagggcccacaagagaccrgctcaaggatcccaaggcccaactccccgaaccactcagggtcctgtggacagctcacctagctgcaatggctacaggctcccggacgtccctgctcctg

SEQ ID NO: 2105 - DNA, 201 bp, Homo sapiens
cctgctcctggcttttggcctgctctgcctgccctggcttcaagagggcagtgccttcccaaccattcccttatccaggctttttgacaacgctatgctcygcgcccatcgtctgcaccagctggcctttgacacctaccaggagtttaacccccagacctccctctgtttctcagagtctattccgacaccctccaacag

SEQ ID NO: 2106 - DNA, 201 bp, Homo sapiens
tccctgctgctcatccagtcgtggctggagcccgtgcagttcctcaggagtgtcttcgccaacagcctggtgtacggcgcctctgacagcaacgtctatgrcctcctaaaggacctagaggaaggcatccaaacgctgatggggaggctggaagatggcagcccccggactgggcagatcttcaagcagacctacagcaag

SEQ ID NO: 2107 - DNA, 201 bp, Homo sapiens
tggcttcaagagggcagtgccttcccaaccattcccttatccaggctttttgacaacgctatgctccgcgcccatcgtctgcaccagctggcctttgacayctaccaggagtttaacccccagacctccctctgtttctcagagtctattccgacaccctccaacagggaggaaacacaacagaaatccaacctagagctg

SEQ ID NO: 2108 - DNA, 201 bp, Homo sapiens
cagtgccttcccaaccattcccttatccaggctttttgacaacgctatgctccgcgcccatcgtctgcaccagctggcctttgacacctaccaggagtttracccccagacctccctctgtttctcagagtctattccgacaccctccaacagggaggaaacacaacagaaatccaacctagagctgctccgcatctccct

SEQ ID NO: 2109 - DNA, 179 bp, Homo sapiens
acagtgggagagaaggggccagggtataaaaagggcccacaagagaccagctcaaggatcccaaggcccaactccccgmaccactcagggtcctgtggacagctcacctagctgcaatggctacaggctcccggacgtccctgctcctggcttttggcctgctctgcctgccctggctt

SEQ ID NO: 2110 - DNA, 201 bp, Homo sapiens
tgcagttcctcaggagtgtcttcgccaacagcctggtgtacggcgcctctgacagcaacgtctatgacctcctaaaggacctagaggaaggcatccaaacrctgatggggaggctggaagatggcagcccccggactgggcagatcttcaagcagacctacagcaagttcgacacaaactcacacaacgatgacgcactac

SEQ ID NO: 2111 - DNA, 201 bp, Homo sapiens
ctggcctttgacacctaccaggagtttaacccccagacctccctctgtttctcagagtctattccgacaccctccaacagggaggaaacacaacagaaatycaacctagagctgctccgcatctccctgctgctcatccagtcgtggctggagcccgtgcagttcctcaggagtgtcttcgccaacagcctggtgtacggc

SEQ ID NO: 2112 - DNA, 201 bp, Homo sapiens
acctagaggaaggcatccaaacgctgatggggaggctggaagatggcagcccccggactgggcagatcttcaagcagacctacagcaagttcgacacaaamtcacacaacgatgacgcactactcaagaactacgggctgctctactgcttcaggaaggacatggacaaggtcgagacattcctgcgcatcgtgcagtgcc

SEQ ID NO: 2113 - DNA, 201 bp, Homo sapiens
tagaggaaggcatccaaacgctgatggggaggctggaagatggcagcccccggactgggcagatcttcaagcagacctacagcaagttcgacacaaactcrcacaacgatgacgcactactcaagaactacgggctgctctactgcttcaggaaggacatggacaaggtcgagacattcctgcgcatcgtgcagtgccgct

SEQ ID NO: 2114 - DNA, 154 bp, Homo sapiens
acagtgggagagaaggggccagggtataaaaagggcccacaagagaccagctchaggatcccaaggcccaactccccgaaccactcagggtcctgtggacagctcacctagctgcaatggctacaggctcccggacgtccctgctcctggcttt

SEQ ID NO: 2115 - DNA, 201 bp, Homo sapiens
tgacacctaccaggagtttaacccccagacctccctctgtttctcagagtctattccgacaccctccaacagggaggaaacacaacagaaatccaacctaragctgctccgcatctccctgctgctcatccagtcgtggctggagcccgtgcagttcctcaggagtgtcttcgccaacagcctggtgtacggcgcctctga

SEQ ID NO: 2116 - DNA, 157 bp, Homo sapiens
tccctgtccttctgattttaaaataactataccagcaggaggacgtccagacacagcataggctacctggccatgcccaaccggtgggacatttgagttgyttgcttggcactgtcctctcatgcgttgggtccactcagtagatgcctgttgaatt

SEQ ID NO: 2117 - DNA, 201 bp, Homo sapiens
ccgcatctccctgctgctcatccagtcgtggctggagcccgtgcagttcctcaggagtgtcttcgccaacagcctggtgtacggcgcctctgacagcaacdtctatgacctcctaaaggacctagaggaaggcatccaaacgctgatggggaggctggaagatggcagcccccggactgggcagatcttcaagcagaccta

SEQ ID NO: 2118 - DNA, 201 bp, Homo sapiens
tcctaaaggacctagaggaaggcatccaaacgctgatggggaggctggaagatggcagcccccggactgggcagatcttcaagcagacctacagcaagttygacacaaactcacacaacgatgacgcactactcaagaactacgggctgctctactgcttcaggaaggacatggacaaggtcgagacattcctgcgcatcg

SEQ ID NO: 2119 - DNA, 157 bp, Homo sapiens
acagtgggagagaaggggccagggtataaaaagggcccacaagagaccagctcaagsatcccaaggcccaactccccgaaccactcagggtcctgtggacagctcacctagctgcaatggctacaggctcccggacgtccctgctcctggcttttgg

SEQ ID NO: 2120 - DNA, 201 bp, Homo sapiens
gctgctccgcatctccctgctgctcatccagtcgtggctggagcccgtgcagttcctcaggagtgtcttcgccaacagcctggtgtacggcgcctctgacwgcaacgtctatgacctcctaaaggacctagaggaaggcatccaaacgctgatggggaggctggaagatggcagcccccggactgggcagatcttcaagca

SEQ ID NO: 2121 - DNA, 201 bp, Homo sapiens
cgctgatggggaggctggaagatggcagcccccggactgggcagatcttcaagcagacctacagcaagttcgacacaaactcacacaacgatgacgcactrctcaagaactacgggctgctctactgcttcaggaaggacatggacaaggtcgagacattcctgcgcatcgtgcagtgccgctctgtggagggcagctgtg

SEQ ID NO: 2122 - DNA, 201 bp, Homo sapiens
ccaggagtttaacccccagacctccctctgtttctcagagtctattccgacaccctccaacagggaggaaacacaacagaaatccaacctagagctgctcygcatctccctgctgctcatccagtcgtggctggagcccgtgcagttcctcaggagtgtcttcgccaacagcctggtgtacggcgcctctgacagcaacgt

SEQ ID NO: 2123 - DNA, 150 bp, Homo sapiens
ccccgaaccactcagggtcctgtggacagctcacctagctgcaatggctrcaggtaagcgcccctaaaatccctttgggcacaatgtgtcctgaggggagaggcagcgacctgtagatgggacgggggcactaaccctcaggtttggggc

SEQ ID NO: 2124 - DNA, 201 bp, Homo sapiens
cagaacccccagacctccctctgtttctcagagtctattccgacaccctccaacagggaggaaacacaacagaaatccaacctagagctgctccgcatctscctgctgctcatccagtcgtggctggagcccgtgcagttcctcaggagtgtcttcgccaacagcctggtgtacggcgcctctgacagcaacgtctatgac

SEQ ID NO: 2125 - DNA, 140 bp, Homo sapiens
ccccgaaccactcagggtcctgtggacagctcacctagcbgcaatggctacaggtaagcgcccctaaaatccctttgggcacaatgtgtcctgaggggagaggcagcgacctgtagatgggacgggggcactaaccctca

SEQ ID NO: 2126 - DNA, 201 bp, Homo sapiens
ctgccctggcttcaagagggcagtgccttcccaaccattcccttatccaggctttttgacaacgctatgctccgcgcccatcgtctgcaccagctggcctwtgacacctaccaggagtttgaagaagcctatatcccaaaggaacagaagtattcattcctgcagaacccccagacctccctctgtttctcagagtctatt

SEQ ID NO: 2127 - DNA, 163 bp, Homo sapiens
ggaaggacatggacaaggtcgagacattcctgcgcatcgtgcagtgccgctctgtggagggcagctgtggcttctagctgcccggtggcatcctgtgaccyctccccagtgcctctcctggccctgaaggtgccactccagtgcccaccagccttgtcctaat

SEQ ID NO: 2128 - DNA, 201 bp, Homo sapiens
gcctgccctggcttcaagagggcagtgccttcccaaccattcccttatccaggctttttgacaacgctatgctccgcgcccatcgtctgcaccagctggcmtttgacacctaccaggagtttgaagaagcctatatcccaaaggaacagaagtattcattcctgcagaacccccagacctccctctgtttctcagagtcta

SEQ ID NO: 2129 - DNA, 201 bp, Homo sapiens
tcctgaggggagaggcagcgacctgtagatgggacgggggcactaaccctcaggtttggggcttctgaatgtgagtatcgccatgtaagcccagtatttgkccaatctcagaaagctcctggtccctggagggatggagagagaaaaacaaacagctcctggagcagggagagtgctggcctcttgctctccggctccctc

SEQ ID NO: 2130 - DNA, 185 bp, Homo sapiens
ccccgaaccactcagggtcctgtggacagctcacctagctgcaatggctacaggtaagcgcccctaaaatccctttgggcacaaygtgtcctgaggggagaggcagcgacctgtagatgggacgggggcactaaccctcaggtttggggcttctgaatgtgagtatcgccatgtaagcccagtat

SEQ ID NO: 2131 - DNA, 201 bp, Homo sapiens
agtatcgccatgtaagcccagtatttggccaatctcagaaagctcctggtccctggagggatggagagagaaaaacaaacagctcctggagcagggagagygctggcctcttgctctccggctccctctgttgccctctggtttctccccaggctcccggacgtccctgctcctggcttttggcctgctctgcctgccctg

SEQ ID NO: 2132 - DNA, 201 bp, Homo sapiens
cctgctcctggcttttggcctgctctgcctgccctggcttcaagagggcagtgccttcccaaccattcccttatccaggctttttgacaacgctatgctcygcgcccatcgtctgcaccagctggcctttgacacctaccaggagtttgaagaagcctatatcccaaaggaacagaagtattcattcctgcagaaccccca

SEQ ID NO: 2133 - DNA, 201 bp, Homo sapiens; identical to SEQ ID NO: 2106

SEQ ID NO: 2134 - DNA, 201 bp, Homo sapiens
tggcttcaagagggcagtgccttcccaaccattcccttatccaggctttttgacaacgctatgctccgcgcccatcgtctgcaccagctggcctttgacayctaccaggagtttgaagaagcctatatcccaaaggaacagaagtattcattcctgcagaacccccagacctccctctgtttctcagagtctattccgaca

SEQ ID NO: 2135 - DNA, 201 bp, Homo sapiens
tatgctccgcgcccatcgtctgcaccagctggcctttgacacctaccaggagtttgaagaagcctatatcccaaaggaacagaagtattcattcctgcagracccccagacctccctctgtttctcagagtctattccgacaccctccaacagggaggaaacacaacagaaatccaacctagagctgctccgcatctccct

SEQ ID NO: 2136 - DNA, 201 bp, Homo sapiens; identical to SEQ ID NO: 2110

SEQ ID NO: 2137 - DNA, 106 bp, Homo sapiens
ccccgmaccactcagggtcctgtggacagctcacctagctgcaatggctacaggtaagcgcccctaaaatccctttgggcacaatgtgtcctgaggggagaggcag

SEQ ID NO: 2138 - DNA, 201 bp, Homo sapiens
aaggaacagaagtattcattcctgcagaacccccagacctccctctgtttctcagagtctattccgacaccctccaacagggaggaaacacaacagaaatycaacctagagctgctccgcatctccctgctgctcatccagtcgtggctggagcccgtgcagttcctcaggagtgtcttcgccaacagcctggtgtacggc

SEQ ID NO: 2139 - DNA, 201 bp, Homo sapiens; identical to SEQ ID NO: 2112

SEQ ID NO: 2140 - DNA, 201 bp, Homo sapiens; identical to SEQ ID NO: 2113

SEQ ID NO: 2141 - DNA, 201 bp, Homo sapiens
gaagtattcattcctgcagaacccccagacctccctctgtttctcagagtctattccgacaccctccaacagggaggaaacacaacagaaatccaacctaragctgctccgcatctccctgctgctcatccagtcgtggctggagcccgtgcagttcctcaggagtgtcttcgccaacagcctggtgtacggcgcctctga

SEQ ID NO: 2142 - DNA, 201 bp, Homo sapiens; identical to SEQ ID NO: 2117

SEQ ID NO: 2143 - DNA, 201 bp, Homo sapiens; identical to SEQ ID NO: 2118

SEQ ID NO: 2144 - DNA, 201 bp, Homo sapiens; identical to SEQ ID NO: 2120

SEQ ID NO: 2145 - DNA, 201 bp, Homo sapiens
ctttgggcacaatgtgtcctgaggggagaggcagcgacctgtagatgggacgggggcactaaccctcaggtttggggcttctgaatgtgagtatcgccatstaagcccagtatttggccaatctcagaaagctcctggtccctggagggatggagagagaaaaacaaacagctcctggagcagggagagtgctggcctctt

SEQ ID NO: 2146 - DNA, 201 bp, Homo sapiens; identical to SEQ ID NO: 2121

SEQ ID NO: 2147 - DNA, 201 bp, Homo sapiens
attcctgcagaacccccagacctccctctgtttctcagagtctattccgacaccctccaacagggaggaaacacaacagaaatccaacctagagctgctcygcatctccctgctgctcatccagtcgtggctggagcccgtgcagttcctcaggagtgtcttcgccaacagcctggtgtacggcgcctctgacagcaacgt

SEQ ID NO: 2148 - DNA, 201 bp, Homo sapiens
gacagctcacctagtggcaatggctccagaggctggaagacggcagccgccggactgggcagatcctcaagcagacctacagcaagtttgacacaaactcrcacaaccatgacgcactgctcaagaactacgggctgctctactgcttcaggaaggacatggacaaggtcgagacattcctgcgcatggtgcagtgccgct

SEQ ID NO: 2149 - DNA, 201 bp, Homo sapiens
agctggccattgacacctaccaggagtttaggctggaagacggcagccgccggactgggcagatcctcaagcagacctacagcaagtttgacacaaactcrcacaaccatgacgcactgctcaagaactacgggctgctctactgcttcaggaaggacatggacaaggtcgagacattcctgcgcatggtgcagtgccgct

SEQ ID NO: 2150 - DNA, 201 bp, Homo sapiens
tgctccacatctccctgctgctcatcgagtcgcggctggagcccgtgcggttcctcaggagtaccttcaccaacaacctggtgtatgacacctcggacagygatgactatcacctcctaaaggacctagaggaaggcatccaaatgctgatggggaggctggaagacggcagccacctgactgggcagaccctcaagcaga

SEQ ID NO: 2151 - DNA, 182 bp, Homo sapiens
gaaggacatggacaaggtcgagacattcctgcgcatggtgcagtgccgctctgtggagggcagctgtggcttctaggggcccgcgtggcatcctgtgaccyctccccagtgcctctcctggccctgaaggtgccactccagtgcccaccagccttgtcctaataaaattaagttgtattgtt

SEQ ID NO: 2152 - DNA, 201 bp, Homo sapiens
acatctccctgctgctcatcgagtcgcggctggagcccgtgcggttcctcaggagtaccttcaccaacaacctggtgtatgacacctcggacagtgatgamtatcacctcctaaaggacctagaggaaggcatccaaatgctgatggggaggctggaagacggcagccacctgactgggcagaccctcaagcagacctaca

SEQ ID NO: 2153 - DNA, 150 bp, Homo sapiens; identical to SEQ ID NO: 2123

SEQ ID NO: 2154 - DNA, 201 bp, Homo sapiens
cagaacccccagacctccctctgtttctcagagtctattccgacaccctccaacagggaggaaacacaacagaaatccaacctagagctgctccgcatctscctgctgctcatccagtcgtggctggagcccgtgcacccccggactgggcagatcttcaagcagacctacagcaagttcgacacaaactcacacaacgat

SEQ ID NO: 2155 - DNA, 140 bp, Homo sapiens; identical to SEQ ID NO: 2125

SEQ ID NO: 2156 - DNA, 201 bp, Homo sapiens; identical to SEQ ID NO: 2126

SEQ ID NO: 2157 - DNA, 201 bp, Homo sapiens; identical to SEQ ID NO: 2128

SEQ ID NO: 2158 - DNA, 201 bp, Homo sapiens; identical to SEQ ID NO: 2129

SEQ ID NO: 2159 - DNA, 185 bp, Homo sapiens; identical to SEQ ID NO: 2130

SEQ ID NO: 2160 - DNA, 201 bp, Homo sapiens; identical to SEQ ID NO: 2131

SEQ ID NO: 2161 - DNA, 201 bp, Homo sapiens; identical to SEQ ID NO: 2132

SEQ ID NO: 2162 - DNA, 201 bp, Homo sapiens; identical to SEQ ID NO: 2134

SEQ ID NO: 2163 - DNA, 201 bp, Homo sapiens; identical to SEQ ID NO: 2135

SEQ ID NO: 2164 - DNA, 201 bp, Homo sapiens
aaggaacagaagtattcattcctgcagaacccccagacctccctctgtttctcagagtctattccgacaccctccaacagggaggaaacacaacagaaatycaacctagagctgctccgcatctccctgctgctcatccagtcgtggctggagcccgtgcacccccggactgggcagatcttcaagcagacctacagcaag

SEQ ID NO: 2165 - DNA, 201 bp, Homo sapiens
tgctccgcatctccctgctgctcatccagtcgtggctggagcccgtgcacccccggactgggcagatcttcaagcagacctacagcaagttcgacacaaamtcacacaacgatgacgcactactcaagaactacgggctgctctactgcttcaggaaggacatggacaaggtcgagacattcctgcgcatcgtgcagtgcc

SEQ ID NO: 2166 - DNA, 201 bp, Homo sapiens
tccgcatctccctgctgctcatccagtcgtggctggagcccgtgcacccccggactgggcagatcttcaagcagacctacagcaagttcgacacaaactcrcacaacgatgacgcactactcaagaactacgggctgctctactgcttcaggaaggacatggacaaggtcgagacattcctgcgcatcgtgcagtgccgct

SEQ ID NO: 2167 - DNA, 106 bp, Homo sapiens; identical to SEQ ID NO: 2137

SEQ ID NO: 2168 - DNA, 201 bp, Homo sapiens
gaagtattcattcctgcagaacccccagacctccctctgtttctcagagtctattccgacaccctccaacagggaggaaacacaacagaaatccaacctaragctgctccgcatctccctgctgctcatccagtcgtggctggagcccgtgcacccccggactgggcagatcttcaagcagacctacagcaagttcgacac

SEQ ID NO: 2169 - DNA, 201 bp, Homo sapiens
acctagagctgctccgcatctccctgctgctcatccagtcgtggctggagcccgtgcacccccggactgggcagatcttcaagcagacctacagcaagttygacacaaactcacacaacgatgacgcactactcaagaactacgggctgctctactgcttcaggaaggacatggacaaggtcgagacattcctgcgcatcg

SEQ ID NO: 2170 - DNA, 201 bp, Homo sapiens; identical to SEQ ID NO: 2145

SEQ ID NO: 2171 - DNA, 201 bp, Homo sapiens
tcatccagtcgtggctggagcccgtgcacccccggactgggcagatcttcaagcagacctacagcaagttcgacacaaactcacacaacgatgacgcactrctcaagaactacgggctgctctactgcttcaggaaggacatggacaaggtcgagacattcctgcgcatcgtgcagtgccgctctgtggagggcagctgtg

SEQ ID NO: 2172 - DNA, 201 bp, Homo sapiens
attcctgcagaacccccagacctccctctgtttctcagagtctattccgacaccctccaacagggaggaaacacaacagaaatccaacctagagctgctcygcatctccctgctgctcatccagtcgtggctggagcccgtgcacccccggactgggcagatcttcaagcagacctacagcaagttcgacacaaactcaca

SEQ ID NO: 2173 - DNA, 201 bp, Homo sapiens; identical to SEQ ID NO: 2098

SEQ ID NO: 2174 - DNA, 201 bp, Homo sapiens; identical to SEQ ID NO: 2124

SEQ ID NO: 2175 - DNA, 201 bp, Homo sapiens; identical to SEQ ID NO: 2100

SEQ ID NO: 2176 - DNA, 201 bp, Homo sapiens; identical to SEQ ID NO: 2126

SEQ ID NO: 2177 - DNA, 201 bp, Homo sapiens; identical to SEQ ID NO: 2128

SEQ ID NO: 2178 - DNA, 201 bp, Homo sapiens
gcataaatgtacacagaaacaggtgggggcaacagtgggagagaaggggccagggtataaaaagggcccacaagagaccagctcaaggatcccaaggcccractccccgaaccactcagggtcctgtggacagctcacctagctgcaatggctacaggctcccggacgtccctgctcctggcttttggcctgctctgcctg

SEQ ID NO: 2179 - DNA, 106 bp, Homo sapiens
atgatsccagcatgtgtgggaggagcttctaaattatccattagcacaagcccgtcagtggccccatgcataaatgtacacagaaacaggtgggggcaacagtggg

SEQ ID NO: 2180 - DNA, 201 bp, Homo sapiens
caagcccgtcagtggccccatgcataaatgtacacagaaacaggtgggggcaacagtgggagagaaggggccagggtataaaaagggcccacaagagaccrgctcaaggatcccaaggcccaactccccgaaccactcagggtcctgtggacagctcacctagctgcaatggctacaggctcccggacgtccctgctcctg

SEQ ID NO: 2181 - DNA, 196 bp, Homo sapiens
atgatcccagcatgtgtgggaggagcttctaaattatccattagcacaagcccgtcagtggccccatgcataaatgtacacagaaacaggtggggkcaacagtgggagagaaggggccagggtataaaaagggcccacaagagaccagctcaaggatcccaaggcccaactccccgaaccactcagggtcctgtgg

SEQ ID NO: 2182 - DNA, 178 bp, Homo sapiens
atgatcccagcatgtgtgggaggagcttctaaattatccattagcacaagcccgtcagtggccccatgcataaatgtrcacagaaacaggtgggggcaacagtgggagagaaggggccagggtataaaaagggcccacaagagaccagctcaaggatcccaaggcccaactccccgaa

SEQ ID NO: 2183 - DNA, 141 bp, Homo sapiens
atgatcccagcatgtgtgggaggagcttctaaattatccaytagcacaagcccgtcagtggccccatgcataaatgtacacagaaacaggtgggggcaacagtgggagagaaggggccagggtataaaaagggcccacaag

SEQ ID NO: 2184 - DNA, 201 bp, Homo sapiens; identical to SEQ ID NO: 2132

SEQ ID NO: 2185 - DNA, 201 bp, Homo sapiens
tccctgctgctcatccagtcgtggctggagcccgtgcagttcctcaggagtgtcttcgccaacagcctggtgtacggcgcctctgacagcaacgtctatgrcctcctaaaggacctagaggaaggcatccaaacgctgatgggggctggaagatggcagcccccggactgggcagatcttcaagcagacctacagcaagtt

SEQ ID NO: 2186 - DNA, 201 bp, Homo sapiens; identical to SEQ ID NO: 2134

SEQ ID NO: 2187 - DNA, 201 bp, Homo sapiens; identical to SEQ ID NO: 2135

SEQ ID NO: 2188 - DNA, 201 bp, Homo sapiens
tacacagaaacaggtgggggcaacagtgggagagaaggggccagggtataaaaagggcccacaagagaccagctcaaggatcccaaggcccaactccccgmaccactcagggtcctgtggacagctcacctagctgcaatggctacaggctcccggacgtccctgctcctggcttttggcctgctctgcctgccctggctt

SEQ ID NO: 2189 - DNA, 201 bp, Homo sapiens
tgcagttcctcaggagtgtcttcgccaacagcctggtgtacggcgcctctgacagcaacgtctatgacctcctaaaggacctagaggaaggcatccaaacrctgatgggggctggaagatggcagcccccggactgggcagatcttcaagcagacctacagcaagttcgacacaaactcacacaacgatgacgcactactc

SEQ ID NO: 2190 - DNA, 201 bp, Homo sapiens; identical to SEQ ID NO: 2138

SEQ ID NO: 2191 - DNA, 201 bp, Homo sapiens
ggacctagaggaaggcatccaaacgctgatgggggctggaagatggcagcccccggactgggcagatcttcaagcagacctacagcaagttcgacacaaamtcacacaacgatgacgcactactcaagaactacgggctgctctactgcttcaggaaggacatggacaaggtcgagacattcctgcgcatcgtgcagtgcc

SEQ ID NO: 2192 - DNA, 201 bp, Homo sapiens
cctagaggaaggcatccaaacgctgatgggggctggaagatggcagcccccggactgggcagatcttcaagcagacctacagcaagttcgacacaaactcrcacaacgatgacgcactactcaagaactacgggctgctctactgcttcaggaaggacatggacaaggtcgagacattcctgcgcatcgtgcagtgccgct

SEQ ID NO: 2193 - DNA, 201 bp, Homo sapiens
ccgtcagtggccccatgcataaatgtacacagaaacaggtgggggcaacagtgggagagaaggggccagggtataaaaagggcccacaagagaccagctchaggatcccaaggcccaactccccgaaccactcagggtcctgtggacagctcacctagctgcaatggctacaggctcccggacgtccctgctcctggcttt

SEQ ID NO: 2194 - DNA, 201 bp, Homo sapiens; identical to SEQ ID NO: 2141

SEQ ID NO: 2195 - DNA, 157 bp, Homo sapiens; identical to SEQ ID NO: 2116

SEQ ID NO: 2196 - DNA, 201 bp, Homo sapiens
ccgcatctccctgctgctcatccagtcgtggctggagcccgtgcagttcctcaggagtgtcttcgccaacagcctggtgtacggcgcctctgacagcaacdtctatgacctcctaaaggacctagaggaaggcatccaaacgctgatgggggctggaagatggcagcccccggactgggcagatcttcaagcagacctaca

SEQ ID NO: 2197 - DNA, 201 bp, Homo sapiens
tcagtggccccatgcataaatgtacacagaaacaggtgggggcaacagtgggagagaaggggccagggtataaaaagggcccacaagagaccagctcaagsatcccaaggcccaactccccgaaccactcagggtcctgtggacagctcacctagctgcaatggctacaggctcccggacgtccctgctcctggcttttgg

SEQ ID NO: 2198 - DNA, 201 bp, Homo sapiens
gctgctccgcatctccctgctgctcatccagtcgtggctggagcccgtgcagttcctcaggagtgtcttcgccaacagcctggtgtacggcgcctctgacwgcaacgtctatgacctcctaaaggacctagaggaaggcatccaaacgctgatgggggctggaagatggcagcccccggactgggcagatcttcaagcaga

SEQ ID NO: 2199 - DNA, 201 bp, Homo sapiens
aacgctgatgggggctggaagatggcagcccccggactgggcagatcttcaagcagacctacagcaagttcgacacaaactcacacaacgatgacgcactrctcaagaactacgggctgctctactgcttcaggaaggacatggacaaggtcgagacattcctgcgcatcgtgcagtgccgctctgtggagggcagctgtg

SEQ ID NO: 2200 - DNA, 201 bp, Homo sapiens; identical to SEQ ID NO: 2147

SEQ ID NO: 2201 - DNA, 201 bp, Homo sapiens; identical to SEQ ID NO: 2098

SEQ ID NO: 2202 - DNA, 201 bp, Homo sapiens; identical to SEQ ID NO: 2100

SEQ ID NO: 2203 - DNA, 201 bp, Homo sapiens
ctgccctggcttcaagagggcagtgccttcccaaccattcccttatccaggctttttgacaacgctatgctccgcgcccatcgtctgcaccagctggcctwtgacacctaccaggagtttaggctggaagatggcagcccccggactgggcagatcttcaagcagacctacagcaagttcgacacaaactcacacaacgat

SEQ ID NO: 2204 - DNA, 201 bp, Homo sapiens
gcctgccctggcttcaagagggcagtgccttcccaaccattcccttatccaggctttttgacaacgctatgctccgcgcccatcgtctgcaccagctggcmtttgacacctaccaggagtttaggctggaagatggcagcccccggactgggcagatcttcaagcagacctacagcaagttcgacacaaactcacacaacg

SEQ ID NO: 2205 - DNA, 201 bp, Homo sapiens; identical to SEQ ID NO: 2178

SEQ ID NO: 2206 - DNA, 106 bp, Homo sapiens; identical to SEQ ID NO: 2179

SEQ ID NO: 2207 - DNA, 201 bp, Homo sapiens; identical to SEQ ID NO: 2180

SEQ ID NO: 2208 - DNA, 196 bp, Homo sapiens; identical to SEQ ID NO: 2181

SEQ ID NO: 2209 - DNA, 178 bp, Homo sapiens; identical to SEQ ID NO: 2182

SEQ ID NO: 2210 - DNA, 141 bp, Homo sapiens; identical to SEQ ID NO: 2183

SEQ ID NO: 2211 - DNA, 201 bp, Homo sapiens
cctgctcctggcttttggcctgctctgcctgccctggcttcaagagggcagtgccttcccaaccattcccttatccaggctttttgacaacgctatgctcygcgcccatcgtctgcaccagctggcctttgacacctaccaggagtttaggctggaagatggcagcccccggactgggcagatcttcaagcagacctacag

SEQ ID NO: 2212 - DNA, 201 bp, Homo sapiens
tggcttcaagagggcagtgccttcccaaccattcccttatccaggctttttgacaacgctatgctccgcgcccatcgtctgcaccagctggcctttgacayctaccaggagtttaggctggaagatggcagcccccggactgggcagatcttcaagcagacctacagcaagttcgacacaaactcacacaacgatgacgca

SEQ ID NO: 2213 - DNA, 201 bp, Homo sapiens; identical to SEQ ID NO: 2188

SEQ ID NO: 2214 - DNA, 201 bp, Homo sapiens; identical to SEQ ID NO: 2193

SEQ ID NO: 2215 - DNA, 201 bp, Homo sapiens
agctggcctttgacacctaccaggagtttaggctggaagatggcagcccccggactgggcagatcttcaagcagacctacagcaagttcgacacaaactcrcacaacgatgacgcactactcaagaactacgggctgctctactgcttcaggaaggacatggacaaggtcgagacattcctgcgcatcgtgcagtgccgct

SEQ ID NO: 2216 - DNA, 201 bp, Homo sapiens
accagctggcctttgacacctaccaggagtttaggctggaagatggcagcccccggactgggcagatcttcaagcagacctacagcaagttcgacacaaamtcacacaacgatgacgcactactcaagaactacgggctgctctactgcttcaggaaggacatggacaaggtcgagacattcctgcgcatcgtgcagtgcc

SEQ ID NO: 2217 - DNA, 157 bp, Homo sapiens; identical to SEQ ID NO: 2116

SEQ ID NO: 2218 - DNA, 201 bp, Homo sapiens
atcgtctgcaccagctggcctttgacacctaccaggagtttaggctggaagatggcagcccccggactgggcagatcttcaagcagacctacagcaagttygacacaaactcacacaacgatgacgcactactcaagaactacgggctgctctactgcttcaggaaggacatggacaaggtcgagacattcctgcgcatcg

SEQ ID NO: 2219 - DNA, 201 bp, Homo sapiens; identical to SEQ ID NO: 2197

SEQ ID NO: 2220 - DNA, 201 bp, Homo sapiens
accaggagtttaggctggaagatggcagcccccggactgggcagatcttcaagcagacctacagcaagttcgacacaaactcacacaacgatgacgcactrctcaagaactacgggctgctctactgcttcaggaaggacatggacaaggtcgagacattcctgcgcatcgtgcagtgccgctctgtggagggcagctgtg

SEQ ID NO: 2221 - DNA, 201 bp, Homo sapiens; identical to SEQ ID NO: 2124

SEQ ID NO: 2222 - DNA, 201 bp, Homo sapiens; identical to SEQ ID NO: 2128

SEQ ID NO: 2223 - DNA, 201 bp, Homo sapiens; identical to SEQ ID NO: 2178

SEQ ID NO: 2224 - DNA, 106 bp, Homo sapiens; identical to SEQ ID NO: 2179

SEQ ID NO: 2225 - DNA, 201 bp, Homo sapiens
cgctgatgggggtgagggtggcgccaggggtccccaatcctggagccccactgactttgagagctgtgttagagaaacactgctgccctctttttagcagwcaggccctgacccaagagaactcaccttattcttcatttcccctcgtgaatcctccaggcctttctctacaccctgaaggggagggaggaaaatgaatga

SEQ ID NO: 2226 - DNA, 201 bp, Homo sapiens; identical to SEQ ID NO: 2132

SEQ ID NO: 2227 - DNA, 201 bp, Homo sapiens
tccctgctgctcatccagtcgtggctggagcccgtgcagttcctcaggagtgtcttcgccaacagcctggtgtacggcgcctctgacagcaacgtctatgrcctcctaaaggacctagaggaaggcatccaaacgctgatgggggtgagggtggcgccaggggtccccaatcctggagccccactgactttgagagctgtg

SEQ ID NO: 2228 - DNA, 201 bp, Homo sapiens; identical to SEQ ID NO: 2134

SEQ ID NO: 2229 - DNA, 201 bp, Homo sapiens; identical to SEQ ID NO: 2135

SEQ ID NO: 2230 - DNA, 201 bp, Homo sapiens; identical to SEQ ID NO: 2138

SEQ ID NO: 2231 - DNA, 201 bp, Homo sapiens
ttggcctctccttctcttccttcactttgcagaggctggaagatggcagcccccggactgggcagatcttcaagcagacctacagcaagttcgacacaaamtcacacaacgatgacgcactactcaagaactacgggctgctctactgcttcaggaaggacatggacaaggtcgagacattcctgcgcatcgtgcagtgcc

SEQ ID NO: 2232 - DNA, 201 bp, Homo sapiens
gcctctccttctcttccttcactttgcagaggctggaagatggcagcccccggactgggcagatcttcaagcagacctacagcaagttcgacacaaactcrcacaacgatgacgcactactcaagaactacgggctgctctactgcttcaggaaggacatggacaaggtcgagacattcctgcgcatcgtgcagtgccgct

SEQ ID NO: 2233 - DNA, 201 bp, Homo sapiens; identical to SEQ ID NO: 2193

SEQ ID NO: 2234 - DNA, 201 bp, Homo sapiens; identical to SEQ ID NO: 2141

SEQ ID NO: 2235 - DNA, 157 bp, Homo sapiens; identical to SEQ ID NO: 2116

SEQ ID NO: 2236 - DNA, 201 bp, Homo sapiens
ccgcatctccctgctgctcatccagtcgtggctggagcccgtgcagttcctcaggagtgtcttcgccaacagcctggtgtacggcgcctctgacagcaacdtctatgacctcctaaaggacctagaggaaggcatccaaacgctgatgggggtgagggtggcgccaggggtccccaatcctggagccccactgactttgag

SEQ ID NO: 2237 - DNA, 201 bp, Homo sapiens
gctgctccgcatctccctgctgctcatccagtcgtggctggagcccgtgcagttcctcaggagtgtcttcgccaacagcctggtgtacggcgcctctgacwgcaacgtctatgacctcctaaaggacctagaggaaggcatccaaacgctgatgggggtgagggtggcgccaggggtccccaatcctggagccccactgac

SEQ ID NO: 2238 - DNA, 201 bp, Homo sapiens; identical to SEQ ID NO: 2147

SEQ ID NO: 2239 - DNA, 201 bp, Homo sapiens; identical to SEQ ID NO: 2098

SEQ ID NO: 2240 - DNA, 201 bp, Homo sapiens; identical to SEQ ID NO: 2100

SEQ ID NO: 2241 - DNA, 201 bp, Homo sapiens
cccactgactttgagagctgtgttagagaaacactgctgccctctttttagcagtcaggccctgacccaagagaactcaccttattcttcatttcccctcrtgaatcctccaggcctttctctacaccctgaaggggagggaggaaaatgaatgaatgagaaagggagggaacagtacccaagcgcttggcctctccttct

SEQ ID NO: 2242 - DNA, 201 bp, Homo sapiens
gctgtgttagagaaacactgctgccctctttttagcagtcaggccctgacccaagagaactcaccttattcttcatttcccctcgtgaatcctccaggccwttctctacaccctgaaggggagggaggaaaatgaatgaatgagaaagggagggaacagtacccaagcgcttggcctctccttctcttccttcactttgca

SEQ ID NO: 2243 - DNA, 201 bp, Homo sapiens; identical to SEQ ID NO: 2126

SEQ ID NO: 2244 - DNA, 201 bp, Homo sapiens; identical to SEQ ID NO: 2180

SEQ ID NO: 2245 - DNA, 196 bp, Homo sapiens; identical to SEQ ID NO: 2181

SEQ ID NO: 2246 - DNA, 178 bp, Homo sapiens; identical to SEQ ID NO: 2182

SEQ ID NO: 2247 - DNA, 141 bp, Homo sapiens; identical to SEQ ID NO: 2183

SEQ ID NO: 2248 - DNA, 201 bp, Homo sapiens
tgcagttcctcaggagtgtcttcgccaacagcctggtgtacggcgcctctgacagcaacgtctatgacctcctaaaggacctagaggaaggcatccaaacrctgatgggggtgagggtggcgccaggggtccccaatcctggagccccactgactttgagagctgtgttagagaaacactgctgccctctttttagcagtc

SEQ ID NO: 2249 - DNA, 201 bp, Homo sapiens; identical to SEQ ID NO: 2188

SEQ ID NO: 2250 - DNA, 201 bp, Homo sapiens
cagcctggtgtacggcgcctctgacagcaacgtctatgacctcctaaaggacctagaggaaggcatccaaacgctgatgggggtgagggtggcgccagggktccccaatcctggagccccactgactttgagagctgtgttagagaaacactgctgccctctttttagcagtcaggccctgacccaagagaactcacctta

SEQ ID NO: 2251 - DNA, 201 bp, Homo sapiens
acctcctaaaggacctagaggaaggcatccaaacgctgatgggggtgagggtggcgccaggggtccccaatcctggagccccactgactttgagagctgtrttagagaaacactgctgccctctttttagcagtcaggccctgacccaagagaactcaccttattcttcatttcccctcgtgaatcctccaggcctttctc

SEQ ID NO: 2252 - DNA, 201 bp, Homo sapiens; identical to SEQ ID NO: 2197

SEQ ID NO: 2253 - DNA, 201 bp, Homo sapiens
cccaagcgcttggcctctccttctcttccttcactttgcagaggctggaagatggcagcccccggactgggcagatcttcaagcagacctacagcaagttygacacaaactcacacaacgatgacgcactactcaagaactacgggctgctctactgcttcaggaaggacatggacaaggtcgagacattcctgcgcatcg

SEQ ID NO: 2254 - DNA, 201 bp, Homo sapiens
tcactttgcagaggctggaagatggcagcccccggactgggcagatcttcaagcagacctacagcaagttcgacacaaactcacacaacgatgacgcactrctcaagaactacgggctgctctactgcttcaggaaggacatggacaaggtcgagacattcctgcgcatcgtgcagtgccgctctgtggagggcagctgtg

SEQ ID NO: 2255 - DNA, 201 bp, Homo sapiens; identical to SEQ ID NO: 2098

SEQ ID NO: 2256 - DNA, 201 bp, Homo sapiens
ttatccaggctttttgacaacgctatgctccgcgcccatcgtctgcaccagctggcctttgacacctaccaggagtttaacctagagctgctccgcatctscctgctgctcatccagtcgtggctggagcccgtgcagttcctcaggagtgtcttcgccaacagcctggtgtacggcgcctctgacagcaacgtctatgac

SEQ ID NO: 2257 - DNA, 201 bp, Homo sapiens; identical to SEQ ID NO: 2100

SEQ ID NO: 2258 - DNA, 201 bp, Homo sapiens
ctgccctggcttcaagagggcagtgccttcccaaccattcccttatccaggctttttgacaacgctatgctccgcgcccatcgtctgcaccagctggcctwtgacacctaccaggagtttaacctagagctgctccgcatctccctgctgctcatccagtcgtggctggagcccgtgcagttcctcaggagtgtcttcgcc

SEQ ID NO: 2259 - DNA, 201 bp, Homo sapiens
gcctgccctggcttcaagagggcagtgccttcccaaccattcccttatccaggctttttgacaacgctatgctccgcgcccatcgtctgcaccagctggcmtttgacacctaccaggagtttaacctagagctgctccgcatctccctgctgctcatccagtcgtggctggagcccgtgcagttcctcaggagtgtcttcg

SEQ ID NO: 2260 - DNA, 201 bp, Homo sapiens; identical to SEQ ID NO: 2178

SEQ ID NO: 2261 - DNA, 106 bp, Homo sapiens; identical to SEQ ID NO: 2179

SEQ ID NO: 2262 - DNA, 201 bp, Homo sapiens; identical to SEQ ID NO: 2180

SEQ ID NO: 2263 - DNA, 196 bp, Homo sapiens; identical to SEQ ID NO: 2181

SEQ ID NO: 2264 - DNA, 178 bp, Homo sapiens; identical to SEQ ID NO: 2182

SEQ ID NO: 2265 - DNA, 141 bp, Homo sapiens; identical to SEQ ID NO: 2183

SEQ ID NO: 2266 - DNA, 201 bp, Homo sapiens
cctgctcctggcttttggcctgctctgcctgccctggcttcaagagggcagtgccttcccaaccattcccttatccaggctttttgacaacgctatgctcygcgcccatcgtctgcaccagctggcctttgacacctaccaggagtttaacctagagctgctccgcatctccctgctgctcatccagtcgtggctggagcc

SEQ ID NO: 2267 - DNA, 201 bp, Homo sapiens; identical to SEQ ID NO: 2106

SEQ ID NO: 2268 - DNA, 201 bp, Homo sapiens
tggcttcaagagggcagtgccttcccaaccattcccttatccaggctttttgacaacgctatgctccgcgcccatcgtctgcaccagctggcctttgacayctaccaggagtttaacctagagctgctccgcatctccctgctgctcatccagtcgtggctggagcccgtgcagttcctcaggagtgtcttcgccaacagc

SEQ ID NO: 2269 - DNA, 201 bp, Homo sapiens; identical to SEQ ID NO: 2188

SEQ ID NO: 2270 - DNA, 201 bp, Homo sapiens; identical to SEQ ID NO: 2110

SEQ ID NO: 2271 - DNA, 201 bp, Homo sapiens; identical to SEQ ID NO: 2112

SEQ ID NO: 2272 - DNA, 201 bp, Homo sapiens; identical to SEQ ID NO: 2113

SEQ ID NO: 2273 - DNA, 201 bp, Homo sapiens; identical to SEQ ID NO: 2193

SEQ ID NO: 2274 - DNA, 201 bp, Homo sapiens
cttcccaaccattcccttatccaggctttttgacaacgctatgctccgcgcccatcgtctgcaccagctggcctttgacacctaccaggagtttaacctaragctgctccgcatctccctgctgctcatccagtcgtggctggagcccgtgcagttcctcaggagtgtcttcgccaacagcctggtgtacggcgcctctga

SEQ ID NO: 2275 - DNA, 157 bp, Homo sapiens; identical to SEQ ID NO: 2116

SEQ ID NO: 2276 - DNA, 201 bp, Homo sapiens; identical to SEQ ID NO: 2117

SEQ ID NO: 2277 - DNA, 201 bp, Homo sapiens; identical to SEQ ID NO: 2118

SEQ ID NO: 2278 - DNA, 201 bp, Homo sapiens; identical to SEQ ID NO: 2197

SEQ ID NO: 2279 - DNA, 201 bp, Homo sapiens; identical to SEQ ID NO: 2120

SEQ ID NO: 2280 - DNA, 201 bp, Homo sapiens; identical to SEQ ID NO: 2121

SEQ ID NO: 2281 - DNA, 201 bp, Homo sapiens
cattcccttatccaggctttttgacaacgctatgctccgcgcccatcgtctgcaccagctggcctttgacacctaccaggagtttaacctagagctgctcygcatctccctgctgctcatccagtcgtggctggagcccgtgcagttcctcaggagtgtcttcgccaacagcctggtgtacggcgcctctgacagcaacgt

SEQ ID NO: 2282 - DNA, 201 bp, Homo sapiens
accatgacgcactgctcaagaactacgggctgctctactgcttcaggaaggacatggacaaggtcgagacattcctgcgcatggtgcagtgccgctctgtrgagggcagctgtggcttctaggtgcccgagtagcatcctgtgacccctccccagtgcctctcctggccctgaaggtgccactccagtgcccaccagctgc

SEQ ID NO: 2283 - DNA, 201 bp, Homo sapiens; identical to SEQ ID NO: 2150

SEQ ID NO: 2284 - DNA, 201 bp, Homo sapiens
ctctactgcttcaggaaggacatggacaaggtcgagacattcctgcgcatggtgcagtgccgctctgtggagggcagctgtggcttctaggtgcccgagtrgcatcctgtgacccctccccagtgcctctcctggccctgaaggtgccactccagtgcccaccagctgctcatcgagtcgtggctggagcccgtgcggttc

SEQ ID NO: 2285 - DNA, 201 bp, Homo sapiens
acgcactgctcaagaactacgggctgctctactgcttcaggaaggacatggacaaggtcgagacattcctgcgcatggtgcagtgccgctctgtggagggyagctgtggcttctaggtgcccgagtagcatcctgtgacccctccccagtgcctctcctggccctgaaggtgccactccagtgcccaccagctgctcatcg

SEQ ID NO: 2286 - DNA, 201 bp, Homo sapiens
ctgctctactgcttcaggaaggacatggacaaggtcgagacattcctgcgcatggtgcagtgccgctctgtggagggcagctgtggcttctaggtgcccgmgtagcatcctgtgacccctccccagtgcctctcctggccctgaaggtgccactccagtgcccaccagctgctcatcgagtcgtggctggagcccgtgcgg

SEQ ID NO: 2287 - DNA, 201 bp, Homo sapiens
gaaggacatggacaaggtcgagacattcctgcgcatggtgcagtgccgctctgtggagggcagctgtggcttctaggggcccgcgtggcatcctgtgaccyctccccagtgcctctcctgcccgtgcggttcctcaggagtatgttcgccaacaacctggtgtatgacacctcggacagcgatgactatcacctcctaaag

SEQ ID NO: 2288 - DNA, 201 bp, Homo sapiens; identical to SEQ ID NO: 2152

SEQ ID NO: 2289 - DNA, 201 bp, Homo sapiens
accatgacgcactgctcaagaactacgggctgctctactgcttcaggaaggacatggacaaggtcgagacattcctgcgcatggtgcagtgccgctctgtrgagggcagctgtggcttctaggtgcccgagtagcatcctgtgacccctccccagtgcctctcctggccctgaaggtgccactccagtgcccaccagcctt

SEQ ID NO: 2290 - DNA, 201 bp, Homo sapiens
acgcactgctcaagaactacgggctgctctactgcttcaggaaggacatggacaaggtcgagacattcctgcgcatggtgcagtgccgctctgtggagggyagctgtggcttctaggtgcccgagtagcatcctgtgacccctccccagtgcctctcctggccctgaaggtgccactccagtgcccaccagccttgtccta

SEQ ID NO: 2291 - DNA, 201 bp, Homo sapiens
ctctactgcttcaggaaggacatggacaaggtcgagacattcctgcgcatggtgcagtgccgctctgtggagggcagctgtggcttctaggtgcccgagtrgcatcctgtgacccctccccagtgcctctcctggccctgaaggtgccactccagtgcccaccagccttgtcctaataaaattaagttgtatcatttcatc

SEQ ID NO: 2292 - DNA, 201 bp, Homo sapiens
ctgctctactgcttcaggaaggacatggacaaggtcgagacattcctgcgcatggtgcagtgccgctctgtggagggcagctgtggcttctaggtgcccgmgtagcatcctgtgacccctccccagtgcctctcctggccctgaaggtgccactccagtgcccaccagccttgtcctaataaaattaagttgtatcatttc

SEQ ID NO: 2293 - DNA, 201 bp, Homo sapiens; identical to SEQ ID NO: 2150

SEQ ID NO: 2294 - DNA, 182 bp, Homo sapiens; identical to SEQ ID NO: 2151

SEQ ID NO: 2295 - DNA, 201 bp, Homo sapiens; identical to SEQ ID NO: 2152

SEQ ID NO: 2296 - DNA, 201 bp, Homo sapiens; identical to SEQ ID NO: 2150

SEQ ID NO: 2297 - DNA, 182 bp, Homo sapiens; identical to SEQ ID NO: 2151

SEQ ID NO: 2298 - DNA, 201 bp, Homo sapiens; identical to SEQ ID NO: 2152

SEQ ID NO: 2299 - DNA, 201 bp, Homo sapiens; identical to SEQ ID NO: 2098

SEQ ID NO: 2300 - DNA, 201 bp, Homo sapiens; identical to SEQ ID NO: 2124

SEQ ID NO: 2301 - DNA, 201 bp, Homo sapiens; identical to SEQ ID NO: 2100

SEQ ID NO: 2302 - DNA, 201 bp, Homo sapiens; identical to SEQ ID NO: 2126

SEQ ID NO: 2303 - DNA, 201 bp, Homo sapiens; identical to SEQ ID NO: 2128

SEQ ID NO: 2304 - DNA, 201 bp, Homo sapiens; identical to SEQ ID NO: 2178

SEQ ID NO: 2305 - DNA, 106 bp, Homo sapiens; identical to SEQ ID NO: 2179

SEQ ID NO: 2306 - DNA, 201 bp, Homo sapiens; identical to SEQ ID NO: 2180

SEQ ID NO: 2307 - DNA, 196 bp, Homo sapiens; identical to SEQ ID NO: 2181

SEQ ID NO: 2308 - DNA, 178 bp, Homo sapiens; identical to SEQ ID NO: 2182

SEQ ID NO: 2309 - DNA, 141 bp, Homo sapiens; identical to SEQ ID NO: 2183

SEQ ID NO: 2310 - DNA, 201 bp, Homo sapiens; identical to SEQ ID NO: 2132

SEQ ID NO: 2311 - DNA, 201 bp, Homo sapiens; identical to SEQ ID NO: 2106

SEQ ID NO: 2312 - DNA, 201 bp, Homo sapiens; identical to SEQ ID NO: 2134

SEQ ID NO: 2313 - DNA, 201 bp, Homo sapiens; identical to SEQ ID NO: 2135

SEQ ID NO: 2314 - DNA, 201 bp, Homo sapiens; identical to SEQ ID NO: 2188

SEQ ID NO: 2315 - DNA, 201 bp, Homo sapiens; identical to SEQ ID NO: 2110

SEQ ID NO: 2316 - DNA, 201 bp, Homo sapiens; identical to SEQ ID NO: 2138

SEQ ID NO: 2317 - DNA, 201 bp, Homo sapiens; identical to SEQ ID NO: 2112

SEQ ID NO: 2318 - DNA, 201 bp, Homo sapiens; identical to SEQ ID NO: 2113

SEQ ID NO: 2319 - DNA, 201 bp, Homo sapiens; identical to SEQ ID NO: 2193

SEQ ID NO: 2320 - DNA, 201 bp, Homo sapiens; identical to SEQ ID NO: 2141

SEQ ID NO: 2321 - DNA, 157 bp, Homo sapiens; identical to SEQ ID NO: 2116

SEQ ID NO: 2322 - DNA, 201 bp, Homo sapiens; identical to SEQ ID NO: 2117

SEQ ID NO: 2323 - DNA, 201 bp, Homo sapiens; identical to SEQ ID NO: 2118

SEQ ID NO: 2324 - DNA, 201 bp, Homo sapiens; identical to SEQ ID NO: 2197

SEQ ID NO: 2325 - DNA, 201 bp, Homo sapiens; identical to SEQ ID NO: 2120

SEQ ID NO: 2326 - DNA, 201 bp, Homo sapiens; identical to SEQ ID NO: 2121

SEQ ID NO: 2327 - DNA, 201 bp, Homo sapiens; identical to SEQ ID NO: 2147

SEQ ID NO: 2328 - DNA, 201 bp, Homo sapiens; identical to SEQ ID NO: 2289

SEQ ID NO: 2329 - DNA, 201 bp, Homo sapiens; identical to SEQ ID NO: 2290

SEQ ID NO: 2330 - DNA, 199 bp, Homo sapiens
ctctactgcttcaggaaggacatggacaaggtcgagacattcctgcgcatggtgcagtgccgctctgtggagggcagctgtggcttctaggtgcccgagtrgcatcctgtgacccctccccagtgcctctcctggccctgaaggtgccactccagtgcccaccagccttgtcctaataaaattaagttgtatcatttca

SEQ ID NO: 2331 - DNA, 201 bp, Homo sapiens
cctggtgtatgacacctcggacagcgatgactatcacctcctaaaggacctagaggaaggcatccaaacgctgatgggggtgagggtggcgccaggggtcrccaatcctggaaccccactggcttcgagggctgggggagagaaatactgctgccctctttttagcagtaaggcgctgacccaagagaactcaccttattc

SEQ ID NO: 2332 - DNA, 201 bp, Homo sapiens; identical to SEQ ID NO: 2292

SEQ ID NO: 2333 - DNA, 201 bp, Homo sapiens
atccaaacgctgatgggggtgagggtggcgccaggggtcaccaatcctggaaccccactggcttcgagggctgggggagagaaatactgctgccctctttktagcagtaaggcgctgacccaagagaactcaccttattcttcatttcgcctggtgaatcctccaggcctttctctacaccctgaaggggagggaggaaaa

SEQ ID NO: 2334 - DNA, 201 bp, Homo sapiens
gtaaggcgctgacccaagagaactcaccttattcttcatttcgcctggtgaatcctccaggcctttctctacaccctgaaggggagggaggaaaatggatraatgagagagggagggaacagtgcccaagcgcttggcctctccttctcttccttcactttgcagaggctggaagacggcagccgccggactgggcagatc

SEQ ID NO: 2335 - DNA, 182 bp, Homo sapiens; identical to SEQ ID NO: 2151

SEQ ID NO: 2336 - DNA, 201 bp, Homo sapiens; identical to SEQ ID NO: 2149

SEQ ID NO: 2337 - DNA, 201 bp, Homo sapiens; identical to SEQ ID NO: 2098

SEQ ID NO: 2338 - DNA, 201 bp, Homo sapiens; identical to SEQ ID NO: 2256

SEQ ID NO: 2339 - DNA, 201 bp, Homo sapiens; identical to SEQ ID NO: 2100

SEQ ID NO: 2340 - DNA, 201 bp, Homo sapiens; identical to SEQ ID NO: 2258

SEQ ID NO: 2341 - DNA, 201 bp, Homo sapiens; identical to SEQ ID NO: 2259

SEQ ID NO: 2342 - DNA, 170 bp, Homo sapiens; identical to SEQ ID NO: 2103

SEQ ID NO: 2343 - DNA, 149 bp, Homo sapiens; identical to SEQ ID NO: 2104

SEQ ID NO: 2344 - DNA, 201 bp, Homo sapiens; identical to SEQ ID NO: 2266

SEQ ID NO: 2345 - DNA, 201 bp, Homo sapiens; identical to SEQ ID NO: 2106

SEQ ID NO: 2346 - DNA, 201 bp, Homo sapiens; identical to SEQ ID NO: 2268

SEQ ID NO: 2347 - DNA, 179 bp, Homo sapiens; identical to SEQ ID NO: 2109

SEQ ID NO: 2348 - DNA, 201 bp, Homo sapiens; identical to SEQ ID NO: 2110

SEQ ID NO: 2349 - DNA, 154 bp, Homo sapiens; identical to SEQ ID NO: 2114

SEQ ID NO: 2350 - DNA, 201 bp, Homo sapiens; identical to SEQ ID NO: 2113

SEQ ID NO: 2351 - DNA, 201 bp, Homo sapiens; identical to SEQ ID NO: 2112

SEQ ID NO: 2352 - DNA, 201 bp, Homo sapiens; identical to SEQ ID NO: 2274

SEQ ID NO: 2353 - DNA, 157 bp, Homo sapiens; identical to SEQ ID NO: 2116

SEQ ID NO: 2354 - DNA, 201 bp, Homo sapiens; identical to SEQ ID NO: 2117

SEQ ID NO: 2355 - DNA, 201 bp, Homo sapiens; identical to SEQ ID NO: 2118

SEQ ID NO: 2356 - DNA, 157 bp, Homo sapiens; identical to SEQ ID NO: 2119

SEQ ID NO: 2357 - DNA, 201 bp, Homo sapiens; identical to SEQ ID NO: 2120

SEQ ID NO: 2358 - DNA, 201 bp, Homo sapiens; identical to SEQ ID NO: 2121

SEQ ID NO: 2359 - DNA, 201 bp, Homo sapiens; identical to SEQ ID NO: 2281

SEQ ID NO: 2360 - DNA, 161 bp, Homo sapiens
cattcctgcgcatcgtgcagtgccgctctgtggagggcagctgtggcttctagctgcccgggtggcatccctgtgacccctccccagtgcctctcctggtsgtggaaggtgctactccagtgcccaccagccttgtcctaataaaattaagttgcatcatt

SEQ ID NO: 2361 - DNA, 201 bp, Homo sapiens
gtttgaagaagcctatatcctgaaggagcagaagtattcattcctgcagaacccccagacctccctctgcttctcagagtctattccaacaccttccaacwgggtgaaaacgcagcagaaatctaacctagagctgctccgcatctccctgctgctcatccagtcatggctggagcccgtgcagctcctcaggagcgtctt

SEQ ID NO: 2362 - DNA, 195 bp, Homo sapiens; identical to SEQ ID NO: 2095

SEQ ID NO: 2363 - DNA, 175 bp, Homo sapiens
ggacaaggtcgagacattcctgcgcatcgtgcagtgccgctctgtggagggcagctgtggcttctagctgcccgggtggcatccctgtgacccctccccastgcctctcctggtcgtggaaggtgctactccagtgcccaccagccttgtcctaataaaattaagttgcatcatt

SEQ ID NO: 2364 - DNA, 201 bp, Homo sapiens
gcagtgccttcccaaccattcccttatccaggctttttgacaacgctatgctccgcgcccgtcgcctgtaccagctggcatatgacacctatcaggagttrgaagaagcctatatcctgaaggagcagaagtattcattcctgcagaacccccagacctccctctgcttctcagagtctattccaacaccttccaacaggg

SEQ ID NO: 2365 - DNA, 201 bp, Homo sapiens; identical to SEQ ID NO: 2098

SEQ ID NO: 2366 - DNA, 201 bp, Homo sapiens; identical to SEQ ID NO: 2124

SEQ ID NO: 2367 - DNA, 201 bp, Homo sapiens; identical to SEQ ID NO: 2100

SEQ ID NO: 2368 - DNA, 201 bp, Homo sapiens; identical to SEQ ID NO: 2126

SEQ ID NO: 2369 - DNA, 201 bp, Homo sapiens; identical to SEQ ID NO: 2128

SEQ ID NO: 2370 - DNA, 201 bp, Homo sapiens; identical to SEQ ID NO: 2178

SEQ ID NO: 2371 - DNA, 106 bp, Homo sapiens; identical to SEQ ID NO: 2179

SEQ ID NO: 2372 - DNA, 201 bp, Homo sapiens; identical to SEQ ID NO: 2180

SEQ ID NO: 2373 - DNA, 196 bp, Homo sapiens; identical to SEQ ID NO: 2181

SEQ ID NO: 2374 - DNA, 178 bp, Homo sapiens; identical to SEQ ID NO: 2182

SEQ ID NO: 2375 - DNA, 141 bp, Homo sapiens; identical to SEQ ID NO: 2183

SEQ ID NO: 2376 - DNA, 201 bp, Homo sapiens; identical to SEQ ID NO: 2132

SEQ ID NO: 2377 - DNA, 201 bp, Homo sapiens; identical to SEQ ID NO: 2106

SEQ ID NO: 2378 - DNA, 201 bp, Homo sapiens; identical to SEQ ID NO: 2134

SEQ ID NO: 2379 - DNA, 201 bp, Homo sapiens; identical to SEQ ID NO: 2135

SEQ ID NO: 2380 - DNA, 201 bp, Homo sapiens; identical to SEQ ID NO: 2188

SEQ ID NO: 2381 - DNA, 201 bp, Homo sapiens; identical to SEQ ID NO: 2110

SEQ ID NO: 2382 - DNA, 201 bp, Homo sapiens; identical to SEQ ID NO: 2138

SEQ ID NO: 2383 - DNA, 201 bp, Homo sapiens; identical to SEQ ID NO: 2112

SEQ ID NO: 2384 - DNA, 201 bp, Homo sapiens; identical to SEQ ID NO: 2113

SEQ ID NO: 2385 - DNA, 201 bp, Homo sapiens; identical to SEQ ID NO: 2193

SEQ ID NO: 2386 - DNA, 201 bp, Homo sapiens; identical to SEQ ID NO: 2141

SEQ ID NO: 2387 - DNA, 157 bp, Homo sapiens; identical to SEQ ID NO: 2116

SEQ ID NO: 2388 - DNA, 201 bp, Homo sapiens; identical to SEQ ID NO: 2117

SEQ ID NO: 2389 - DNA, 201 bp, Homo sapiens; identical to SEQ ID NO: 2118

SEQ ID NO: 2390 - DNA, 201 bp, Homo sapiens; identical to SEQ ID NO: 2197

SEQ ID NO: 2391 - DNA, 201 bp, Homo sapiens; identical to SEQ ID NO: 2120

SEQ ID NO: 2392 - DNA, 201 bp, Homo sapiens; identical to SEQ ID NO: 2121

SEQ ID NO: 2393 - DNA, 201 bp, Homo sapiens; identical to SEQ ID NO: 2147

SEQ ID NO: 2394 - DNA, 201 bp, Homo sapiens; identical to SEQ ID NO: 2290

SEQ ID NO: 2395 - DNA, 201 bp, Homo sapiens; identical to SEQ ID NO: 2291

SEQ ID NO: 2396 - DNA, 201 bp, Homo sapiens; identical to SEQ ID NO: 2292

SEQ ID NO: 2397 - DNA, 201 bp, Homo sapiens; identical to SEQ ID NO: 2289

SEQ ID NO: 2398 - DNA, 199 bp, Homo sapiens; identical to SEQ ID NO: 2330

SEQ ID NO: 2399 - DNA, 201 bp, Homo sapiens; identical to SEQ ID NO: 2290

SEQ ID NO: 2400 - DNA, 201 bp, Homo sapiens; identical to SEQ ID NO: 2331

SEQ ID NO: 2401 - DNA, 201 bp, Homo sapiens; identical to SEQ ID NO: 2292

SEQ ID NO: 2402 - DNA, 201 bp, Homo sapiens; identical to SEQ ID NO: 2333

SEQ ID NO: 2403 - DNA, 201 bp, Homo sapiens; identical to SEQ ID NO: 2334

SEQ ID NO: 2404 - DNA, 201 bp, Homo sapiens
tagaggaaggcatccaaacgctgatggggaggctggaagacggcagccgccggactgggcagatcctcaagcagacctacagcaagtttgacacaaactcrcacaaccatgacgcactgctcaagaactacgggctgctctactgcttcaggaaggacatggacaaggtcgagacattcctgcgcatggtgcagtgccgct

SEQ ID NO: 2405 - DNA, 201 bp, Homo sapiens; identical to SEQ ID NO: 2289

SEQ ID NO: 2406 - DNA, 201 bp, Homo sapiens; identical to SEQ ID NO: 2290

SEQ ID NO: 2407 - DNA, 201 bp, Homo sapiens; identical to SEQ ID NO: 2291

SEQ ID NO: 2408 - DNA, 201 bp, Homo sapiens; identical to SEQ ID NO: 2292

SEQ ID NO: 2409 - DNA, 201 bp, Homo sapiens; identical to SEQ ID NO: 2098

SEQ ID NO: 2410 - DNA, 201 bp, Homo sapiens; identical to SEQ ID NO: 2100

SEQ ID NO: 2411 - DNA, 201 bp, Homo sapiens; identical to SEQ ID NO: 2203

SEQ ID NO: 2412 - DNA, 201 bp, Homo sapiens; identical to SEQ ID NO: 2204

SEQ ID NO: 2413 - DNA, 170 bp, Homo sapiens; identical to SEQ ID NO: 2103

SEQ ID NO: 2414 - DNA, 149 bp, Homo sapiens; identical to SEQ ID NO: 2104

SEQ ID NO: 2415 - DNA, 201 bp, Homo sapiens; identical to SEQ ID NO: 2211

SEQ ID NO: 2416 - DNA, 201 bp, Homo sapiens; identical to SEQ ID NO: 2212

SEQ ID NO: 2417 - DNA, 154 bp, Homo sapiens; identical to SEQ ID NO: 2114

SEQ ID NO: 2418 - DNA, 201 bp, Homo sapiens; identical to SEQ ID NO: 2215

SEQ ID NO: 2419 - DNA, 201 bp, Homo sapiens; identical to SEQ ID NO: 2216

SEQ ID NO: 2420 - DNA, 179 bp, Homo sapiens; identical to SEQ ID NO: 2109

SEQ ID NO: 2421 - DNA, 157 bp, Homo sapiens; identical to SEQ ID NO: 2116

SEQ ID NO: 2422 - DNA, 157 bp, Homo sapiens; identical to SEQ ID NO: 2119

SEQ ID NO: 2423 - DNA, 201 bp, Homo sapiens; identical to SEQ ID NO: 2218

SEQ ID NO: 2424 - DNA, 201 bp, Homo sapiens; identical to SEQ ID NO: 2220

SEQ ID NO: 2425 - DNA, 201 bp, Homo sapiens
cactgctgccctctttttagcagtcaggcgctgacccaagagaactcaccgtattcttcatttcccctcgtgaatcctccaggcctttctctacaacctgraggggagggaggaaaatggatgaatgagagagggagggaacagtgcccaagcgcttggcctctccttctcttccttcactttgcagaggctggaagatgg

SEQ ID NO: 2426 - DNA, 201 bp, Homo sapiens
tgccctctttttagcagtcaggcgctgacccaagagaactcaccgtattcttcatttcccctcgtgaatcctccaggcctttctctacaacctggaggggrgggaggaaaatggatgaatgagagagggagggaacagtgcccaagcgcttggcctctccttctcttccttcactttgcagaggctggaagatggcagccc

SEQ ID NO: 2427 - DNA, 201 bp, Homo sapiens
atcctccaggcctttctctacaacctggaggggagggaggaaaatggatgaatgagagagggagggaacagtgcccaagcgcttggcctctccttctcttscttcactttgcagaggctggaagatggcagcccccggactgggcagatcttcaatcagtcctacagcaagtttgacacaaaatcgcacaacgatgacgca

SEQ ID NO: 2428 - DNA, 162 bp, Homo sapiens
cattcctgcgcatcgtgcagtgccgctctgtggagggcagctgtggcttctagctgcccgggtggcatccctgtgacccctccccagtgcctctcctggtsgtggaaggtgctactccagtgcccaccagccttgtcctaataaaattaagttgcatcattt

SEQ ID NO: 2429 - DNA, 201 bp, Homo sapiens; identical to SEQ ID NO: 2361

SEQ ID NO: 2430 - DNA, 195 bp, Homo sapiens; identical to SEQ ID NO: 2095

SEQ ID NO: 2431 - DNA, 176 bp, Homo sapiens
ggacaaggtcgagacattcctgcgcatcgtgcagtgccgctctgtggagggcagctgtggcttctagctgcccgggtggcatccctgtgacccctccccastgcctctcctggtcgtggaaggtgctactccagtgcccaccagccttgtcctaataaaattaagttgcatcattt

SEQ ID NO: 2432 - DNA, 201 bp, Homo sapiens; identical to SEQ ID NO: 2364

SEQ ID NO: 2433 - DNA, 201 bp, Homo sapiens; identical to SEQ ID NO: 2098

SEQ ID NO: 2434 - DNA, 201 bp, Homo sapiens; identical to SEQ ID NO: 2099

SEQ ID NO: 2435 - DNA, 201 bp, Homo sapiens; identical to SEQ ID NO: 2100

SEQ ID NO: 2436 - DNA, 201 bp, Homo sapiens; identical to SEQ ID NO: 2101

SEQ ID NO: 2437 - DNA, 201 bp, Homo sapiens; identical to SEQ ID NO: 2102

SEQ ID NO: 2438 - DNA, 201 bp, Homo sapiens; identical to SEQ ID NO: 2178

SEQ ID NO: 2439 - DNA, 106 bp, Homo sapiens; identical to SEQ ID NO: 2179

SEQ ID NO: 2440 - DNA, 201 bp, Homo sapiens; identical to SEQ ID NO: 2180

SEQ ID NO: 2441 - DNA, 196 bp, Homo sapiens; identical to SEQ ID NO: 2181

SEQ ID NO: 2442 - DNA, 178 bp, Homo sapiens; identical to SEQ ID NO: 2182

SEQ ID NO: 2443 - DNA, 141 bp, Homo sapiens; identical to SEQ ID NO: 2183

SEQ ID NO: 2444 - DNA, 201 bp, Homo sapiens; identical to SEQ ID NO: 2105

SEQ ID NO: 2445 - DNA, 201 bp, Homo sapiens; identical to SEQ ID NO: 2106

SEQ ID NO: 2446 - DNA, 201 bp, Homo sapiens; identical to SEQ ID NO: 2107

SEQ ID NO: 2447 - DNA, 201 bp, Homo sapiens; identical to SEQ ID NO: 2108

SEQ ID NO: 2448 - DNA, 201 bp, Homo sapiens; identical to SEQ ID NO: 2188

SEQ ID NO: 2449 - DNA, 201 bp, Homo sapiens; identical to SEQ ID NO: 2110

SEQ ID NO: 2450 - DNA, 201 bp, Homo sapiens; identical to SEQ ID NO: 2111

SEQ ID NO: 2451 - DNA, 201 bp, Homo sapiens; identical to SEQ ID NO: 2112

SEQ ID NO: 2452 - DNA, 201 bp, Homo sapiens; identical to SEQ ID NO: 2113

SEQ ID NO: 2453 - DNA, 201 bp, Homo sapiens; identical to SEQ ID NO: 2193

SEQ ID NO: 2454 - DNA, 201 bp, Homo sapiens; identical to SEQ ID NO: 2115

SEQ ID NO: 2455 - DNA, 157 bp, Homo sapiens; identical to SEQ ID NO: 2116

SEQ ID NO: 2456 - DNA, 201 bp, Homo sapiens; identical to SEQ ID NO: 2117

SEQ ID NO: 2457 - DNA, 201 bp, Homo sapiens; identical to SEQ ID NO: 2118

SEQ ID NO: 2458 - DNA, 201 bp, Homo sapiens; identical to SEQ ID NO: 2197

SEQ ID NO: 2459 - DNA, 201 bp, Homo sapiens; identical to SEQ ID NO: 2120

SEQ ID NO: 2460 - DNA, 201 bp, Homo sapiens; identical to SEQ ID NO: 2121

SEQ ID NO: 2461 - DNA, 201 bp, Homo sapiens; identical to SEQ ID NO: 2122

SEQ ID NO: 2462 - DNA, 169 bp, Homo sapiens
aggatcccaaggcccaactccccgaaccactcagggtcctgtggacagctcacctagctgcaatggctrcagaggctggaagatggcagcccccggactgggcagatcttcaagcagacctacagcaagttcgacacaaactcacacaacgatgacgcactactcaaga

SEQ ID NO: 2463 - DNA, 159 bp, Homo sapiens
aggatcccaaggcccaactccccgaaccactcagggtcctgtggacagctcacctagcbgcaatggctacagaggctggaagatggcagcccccggactgggcagatcttcaagcagacctacagcaagttcgacacaaactcacacaacgatgacgca

SEQ ID NO: 2464 - DNA, 116 bp, Homo sapiens
aggatcccaaggcccractccccgaaccactcagggtcctgtggacagctcacctagctgcaatggctacagaggctggaagatggcagcccccggactgggcagatcttcaagca

SEQ ID NO: 2465 - DNA, 201 bp, Homo sapiens
gtggacagctcacctagctgcaatggctacagaggctggaagatggcagcccccggactgggcagatcttcaagcagacctacagcaagttcgacacaaamtcacacaacgatgacgcactactcaagaactacgggctgctctactgcttcaggaaggacatggacaaggtcgagacattcctgcgcatcgtgcagtgcc

SEQ ID NO: 2466 - DNA, 201 bp, Homo sapiens
gacagctcacctagctgcaatggctacagaggctggaagatggcagcccccggactgggcagatcttcaagcagacctacagcaagttcgacacaaactcrcacaacgatgacgcactactcaagaactacgggctgctctactgcttcaggaaggacatggacaaggtcgagacattcctgcgcatcgtgcagtgccgct

SEQ ID NO: 2467 - DNA, 125 bp, Homo sapiens
aggatcccaaggcccaactccccgmaccactcagggtcctgtggacagctcacctagctgcaatggctacagaggctggaagatggcagcccccggactgggcagatcttcaagcagacctacag

SEQ ID NO: 2468 - DNA, 157 bp, Homo sapiens; identical to SEQ ID NO: 2116

SEQ ID NO: 2469 - DNA, 103 bp, Homo sapiens
agsatcccaaggcccaactccccgaaccactcagggtcctgtggacagctcacctagctgcaatggctacagaggctggaagatggcagcccccggactgggc

SEQ ID NO: 2470 - DNA, 201 bp, Homo sapiens
cagggtcctgtggacagctcacctagctgcaatggctacagaggctggaagatggcagcccccggactgggcagatcttcaagcagacctacagcaagttygacacaaactcacacaacgatgacgcactactcaagaactacgggctgctctactgcttcaggaaggacatggacaaggtcgagacattcctgcgcatcg

SEQ ID NO: 2471 - DNA, 201 bp, Homo sapiens
aatggctacagaggctggaagatggcagcccccggactgggcagatcttcaagcagacctacagcaagttcgacacaaactcacacaacgatgacgcactrctcaagaactacgggctgctctactgcttcaggaaggacatggacaaggtcgagacattcctgcgcatcgtgcagtgccgctctgtggagggcagctgtg

SEQ ID NO: 2472 - DNA, 201 bp, Homo sapiens; identical to SEQ ID NO: 2282

SEQ ID NO: 2473 - DNA, 201 bp, Homo sapiens; identical to SEQ ID NO: 2150

SEQ ID NO: 2474 - DNA, 201 bp, Homo sapiens; identical to SEQ ID NO: 2284

SEQ ID NO: 2475 - DNA, 201 bp, Homo sapiens; identical to SEQ ID NO: 2285

SEQ ID NO: 2476 - DNA, 201 bp, Homo sapiens; identical to SEQ ID NO: 2286

SEQ ID NO: 2477 - DNA, 201 bp, Homo sapiens; identical to SEQ ID NO: 2287

SEQ ID NO: 2478 - DNA, 201 bp, Homo sapiens; identical to SEQ ID NO: 2152

SEQ ID NO: 2479 - DNA, 150 bp, Homo sapiens; identical to SEQ ID NO: 2123

SEQ ID NO: 2480 - DNA, 185 bp, Homo sapiens; identical to SEQ ID NO: 2130

SEQ ID NO: 2481 - DNA, 140 bp, Homo sapiens; identical to SEQ ID NO: 2125

SEQ ID NO: 2482 - DNA, 201 bp, Homo sapiens
ctgccctggcttcaagagggcagtgccttcccaaccattcccttatccaggctttttgacaacgctatgctccgcgcccatcgtctgcaccagctggcctwtgacacctaccaggagtttgaagaagcctatatcctgaaggagcagaagtattcattcctgcagaacccccagacctccctctgcttctcagagtctatt

SEQ ID NO: 2483 - DNA, 201 bp, Homo sapiens; identical to SEQ ID NO: 2361

SEQ ID NO: 2484 - DNA, 201 bp, Homo sapiens
gcctgccctggcttcaagagggcagtgccttcccaaccattcccttatccaggctttttgacaacgctatgctccgcgcccatcgtctgcaccagctggcmtttgacacctaccaggagtttgaagaagcctatatcctgaaggagcagaagtattcattcctgcagaacccccagacctccctctgcttctcagagtcta

SEQ ID NO: 2485 - DNA, 201 bp, Homo sapiens; identical to SEQ ID NO: 2131

SEQ ID NO: 2486 - DNA, 201 bp, Homo sapiens
cctgctcctggcttttggcctgctctgcctgccctggcttcaagagggcagtgccttcccaaccattcccttatccaggctttttgacaacgctatgctcygcgcccatcgtctgcaccagctggcctttgacacctaccaggagtttgaagaagcctatatcctgaaggagcagaagtattcattcctgcagaaccccca

SEQ ID NO: 2487 - DNA, 201 bp, Homo sapiens
tggcttcaagagggcagtgccttcccaaccattcccttatccaggctttttgacaacgctatgctccgcgcccatcgtctgcaccagctggcctttgacayctaccaggagtttgaagaagcctatatcctgaaggagcagaagtattcattcctgcagaacccccagacctccctctgcttctcagagtctattccaaca

SEQ ID NO: 2488 - DNA, 106 bp, Homo sapiens; identical to SEQ ID NO: 2137

SEQ ID NO: 2489 - DNA, 201 bp, Homo sapiens; identical to SEQ ID NO: 2129

SEQ ID NO: 2490 - DNA, 201 bp, Homo sapiens; identical to SEQ ID NO: 2145

SEQ ID NO: 2491 - DNA, 201 bp, Homo sapiens; identical to SEQ ID NO: 2404

SEQ ID NO: 2492 - DNA, 201 bp, Homo sapiens; identical to SEQ ID NO: 2150

SEQ ID NO: 2493 - DNA, 182 bp, Homo sapiens; identical to SEQ ID NO: 2151

SEQ ID NO: 2494 - DNA, 201 bp, Homo sapiens; identical to SEQ ID NO: 2152

SEQ ID NO: 2495 - DNA, 201 bp, Homo sapiens
gcctctccttctcttccttcactttgcagaggctggaagacggcagccgccggactgggcagatcctcaagcagacctacagcaagtttgacacaaactcrcacaaccatgacgcactgctcaagaactacgggctgctctactgcttcaggaaggacatggacaaggtcgagacattcctgcgcatggtgcagtgccgct

SEQ ID NO: 2496 - DNA, 201 bp, Homo sapiens
gatgactatcacctcctaaaggacctagaggaaggcatccaaacgctgatgggggtgagggtggcgccaggggtcgccaatcctggaaccccactggcttmgagggctgggggagagaaacactgctgccctctttgtagcagtcaggcgctgacccaagagaactcaccttattcttcatttcgcctggtgaatcctcca

SEQ ID NO: 2497 - DNA, 201 bp, Homo sapiens
ggacctagaggaaggcatccaaacgctgatgggggtgagggtggcgccaggggtcgccaatcctggaaccccactggcttagagggctgggggagagaaayactgctgccctctttgtagcagtcaggcgctgacccaagagaactcaccttattcttcatttcgcctggtgaatcctccaggcccttctctacaccctga

SEQ ID NO: 2498 - DNA, 201 bp, Homo sapiens
gctgatgggggtgagggtggcgccaggggtcgccaatcctggaaccccactggcttagagggctgggggagagaaacactgctgccctctttgtagcagtmaggcgctgacccaagagaactcaccttattcttcatttcgcctggtgaatcctccaggcccttctctacaccctgaaggggagggaggaaaatggatgaa

SEQ ID NO: 2499 - DNA, 201 bp, Homo sapiens
gctgggggagagaaacactgctgccctctttgtagcagtcaggcgctgacccaagagaactcaccttattcttcatttcgcctggtgaatcctccaggccyttctctacaccctgaaggggagggaggaaaatggatgaatgagagagggagggaacagtgcccaagcgcttggcctctccttctcttccttcactttgca

SEQ ID NO: 2500 - DNA, 158 bp, Homo sapiens; identical to SEQ ID NO: 2093

SEQ ID NO: 2501 - DNA, 201 bp, Homo sapiens; identical to SEQ ID NO: 2361

SEQ ID NO: 2502 - DNA, 195 bp, Homo sapiens; identical to SEQ ID NO: 2095

SEQ ID NO: 2503 - DNA, 172 bp, Homo sapiens; identical to SEQ ID NO: 2096

SEQ ID NO: 2504 - DNA, 201 bp, Homo sapiens; identical to SEQ ID NO: 2364

SEQ ID NO: 2505 - DNA, 201 bp, Homo sapiens
caggcgtgagccaccgcgcccaaccacggttagaggaatccagttgctctgccaaacagacctggctggaagggatggaacacacgctcacctgcgtcccraagggaaacccagctccagccttggtgtgtacctggaatggggtggtctttgaccttgaagtgccacagaaggcaacccagaaccacactggaacctacc

SEQ ID NO: 2506 - DNA, 170 bp, Homo sapiens
ggggtttcactgtgttagccaggatggtctcgaactcctgacctcgtgatccacctgcctcgacctcccraagtgctgggattacaggcgtgagccaccgcgcccaaccacggttagaggaatccagttgctctgccaaacagacctggctggaagggatggaacacacg

SEQ ID NO: 2507 - DNA, 165 bp, Homo sapiens
ggggtttcactgtgttagccaggatggtctcgaactcctgacctcgtgatccacctgcctcgacmtcccaaagtgctgggattacaggcgtgagccaccgcgcccaaccacggttagaggaatccagttgctctgccaaacagacctggctggaagggatggaac

SEQ ID NO: 2508 - DNA, 101 bp, Homo sapiens
mgggtttcactgtgttagccaggatggtctcgaactcctgacctcgtgatccacctgcctcgacctcccaaagtgctgggattacaggcgtgagccaccgc

SEQ ID NO: 2509 - DNA, 201 bp, Homo sapiens
atgccacagtggaccacctctccaagtacttggccctgcgcattgccctcgagcggaggcaacagcaggaagcaggggagccaggagggcctggagggggygcctctgacaccggaggacctgatgggtgtggcggggagggtgggggtgccggaggaggtgacggtcctgaggagcctgctttgcccagcctggagggcg

SEQ ID NO: 2510 - DNA, 201 bp, Homo sapiens
accccagcttctttgtcccccagtacccccagcccagccagccaataagaggacacaaatgaggacacgtggcttttatacaaagtatctatatgagattyttctatattgtacagagtggggcaaaacacgcccccatctgctgccttttctattgccctgcaacgtcccatctatacgaggtgttggagaaggtgaaga

SEQ ID NO: 2511 - DNA, 201 bp, Homo sapiens
atgagaaattctggaaggtgtcccggccactggagctgtgctatgctcccaccaaggatccaaagtgaccccaccaggggacagccagaggaaggggaccmtggggtatccctgtgtcctggtctatcaccccagcttctttgtcccccagtacccccagcccagccagccaataagaggacacaaatgaggacacgtggc

SEQ ID NO: 2512 - DNA, 201 bp, Homo sapiens
tacggagcgggaacaaggagtgtcctacctgccgaaagaagctggtgtccaagcgatccctacggccagaccccaactttgatgccctgatctctaagatytatcctagccgggaggaatacgaggcccatcaagaccgagtgcttatccgcctgagccgcctgcacaaccagcaggcattgagctccagcattgaggagg

SEQ ID NO: 2513 - DNA, 201 bp, Homo sapiens
agcaggaagcaggggagccaggagggcctggagggggcgcctctgacaccggaggacctgatgggtgtggcggggagggtgggggtgccggaggaggtgayggtcctgaggagcctgctttgcccagcctggagggcgtcagtgaaaagcagtacaccatctacatcgcacctggaggcggggcgttcacgacgttgaatg

SEQ ID NO: 2514 - DNA, 201 bp, Homo sapiens
ccagcttctttgtcccccagtacccccagcccagccagccaataagaggacacaaatgaggacacgtggcttttatacaaagtatctatatgagattcttytatattgtacagagtggggcaaaacacgcccccatctgctgccttttctattgccctgcaacgtcccatctatacgaggtgttggagaaggtgaagaacc

SEQ ID NO: 2515 - DNA, 178 bp, Homo sapiens
acaaagtatctatatgagattcttctatattgtacagagtggggcaaaacacgcccccatctgctgccttttctattgccctgcaacgtcccatctatacsaggtgttggagaaggtgaagaaccctcccattcacgcccgcctaccaacaacaaacgtgcttttttcctctttgaaa

SEQ ID NO: 2516 - DNA, 105 bp, Homo sapiens
ggctrctgtttctaaaacccctttccctctaacccacaccacctttctactcactgatgccttcaggaagccataatggatggcacagagattgctgtttcccct

SEQ ID NO: 2517 - DNA, 201 bp, Homo sapiens; identical to SEQ ID NO: 2511

SEQ ID NO: 2518 - DNA, 201 bp, Homo sapiens; identical to SEQ ID NO: 2514

SEQ ID NO: 2519 - DNA, 201 bp, Homo sapiens; identical to SEQ ID NO: 2509

SEQ ID NO: 2520 - DNA, 201 bp, Homo sapiens; identical to SEQ ID NO: 2510

SEQ ID NO: 2521 - DNA, 201 bp, Homo sapiens; identical to SEQ ID NO: 2513

SEQ ID NO: 2522 - DNA, 201 bp, Homo sapiens; identical to SEQ ID NO: 2512

SEQ ID NO: 2523 - DNA, 178 bp, Homo sapiens; identical to SEQ ID NO: 2515

SEQ ID NO: 2524 - DNA, 201 bp, Homo sapiens
gcagtggacctgacattgcccaaggttgaagcaataaatagaagactgggctccctggtggatgagtttaaggagcttgttcacccaccagattacaatcytgaagggaaagttaccaagagaaaacatgataatgaaggttctggaagcaaaaggcccaaggtggagtattcagaagaggagctgaagacccacattagc

SEQ ID NO: 2525 - DNA, 201 bp, Homo sapiens
gaacaagcagtggacctgacattgcccaaggttgaagcaataaatagaagactgggctccctggtggatgagtttaaggagcttgttcacccaccagattwcaatcctgaagggaaagttaccaagagaaaacatgataatgaaggttctggaagcaaaaggcccaaggtggagtattcagaagaggagctgaagacccac

SEQ ID NO: 2526 - DNA, 152 bp, Homo sapiens
cagaagaggagctgaagacccacattagcaagggcacgctgggcaagttcactgtgcccatgttgaaagaggcctgccgggcttacgggctgaagagtggkctgaagaagcaggagctgctggaagccctcaccaagcacttccaggattga

SEQ ID NO: 2527 - DNA, 201 bp, Homo sapiens
gcaggtgtcaccagagagaaatgcaccactgtgcccagcaccatagctctggctcagagagtttgcctgagaaagcagcagacagaaaacagaaggtgcgwgttgctcccgaaggaactgacttcatgtgcaacagagctcggagaagtccaaggctaagcacactctccagaacagtggaggttgtgctgaaaggcaact

SEQ ID NO: 2528 - DNA, 201 bp, Homo sapiens
tcctaacatgcaggtgtcaccagagagaaatgcaccactgtgcccagcaccatagctctggctcagagagtttgcctgagaaagcagcagacagaaaacaraaggtgcgagttgctcccgaaggaactgacttcatgtgcaacagagctcggagaagtccaaggctaagcacactctccagaacagtggaggttgtgctga

SEQ ID NO: 2529 - DNA, 201 bp, Homo sapiens
attcctatctccggacgcctcttcccaaatcctgcggcctctgacaaatgcctcacaatgtctgggctgacctcgaaaattcagggcccagctcctaacawgcaggtgtcaccagagagaaatgcaccactgtgcccagcaccatagctctggctcagagagtttgcctgagaaagcagcagacagaaaacagaaggtgcg

SEQ ID NO: 2530 - DNA, 201 bp, Homo sapiens
ttcgaataatgccagccaccttctggttctaaagcagagggagtggcctgaatggacacagctggcccctttcccgtacactgaaagggcagagcaggcckaaggctccaacggccaaactgcctcaccctctgccctaatcagcagggtgggcctgccttttgctaagcgatctctatgcctgggattccctttattcca

SEQ ID NO: 2531 - DNA, 201 bp, Homo sapiens
gagtgggagaaaattaagatggggcaagaatttgtggagtccaaagaaaagctggggccttttgggtatccacccaccttggtgtaccagaatggcagcaytggctgtgttgaaaacgtggatgcaagtagctatccaccaccatcacagtcagactctgcttcttcaccttctccttccttctccgaggacaacttgcct

SEQ ID NO: 2532 - DNA, 201 bp, Homo sapiens
ctgccctaatcagcagggtgggcctgccttttgctaagcgatctctatgcctgggattccctttattccaggagacattaagcctctaaagaatgtctcayctcctctgcccaaaaatgatgctcttctgtaggctggtgttgttgcttccctcccaggatccctttggtgagtgtggtgttcaggatgcaccagcaccac

SEQ ID NO: 2533 - DNA, 201 bp, Homo sapiens
caaaaatgatgctcttctgtaggctggtgttgttgcttccctcccaggatccctttggtgagtgtggtgttcaggatgcaccagcaccacctctacatgcyttcaggcaacacggcccagttttaacctctagtatccatgaccaaactatccctgacacataaggacaggggcctcttctggctgtcaggagcaaagccc

SEQ ID NO: 2534 - DNA, 201 bp, Homo sapiens
atggaacagaggcactcaaattctacacagacccttcatacttctttgatctttggaagaagaagatgctgcaggacaccaaggatatcatgaaagagaaragaaagcacaggaaagaaaagaaagataatccaaatcgagggaatgtaaacccacgtaaaatcaagacacgtaaggaagagtgggagaaaattaagatgg

SEQ ID NO: 2535 - DNA, 201 bp, Homo sapiens
aggcactcaaattctacacagacccttcatacttctttgatctttggaagaagaagatgctgcaggacaccaaggatatcatgaaagagaagagaaagcayaggaaagaaaagaaagataatccaaatcgagggaatgtaaacccacgtaaaatcaagacacgtaaggaagagtgggagaaaattaagatggggcaagaat

SEQ ID NO: 2536 - DNA, 101 bp, Homo sapiens
acatttgtgccccactgacctgaaggttccatgtaactgtatacacatgaatacttaaatgccaacattttaaataatttgataaagtctttgtagccaca

SEQ ID NO: 2537 - DNA, 201 bp, Homo sapiens
cactctgtgcagagactgggcggccagcctgcccttgctgtcgctgacggtgactgcgggaggccaggttgtttttcatcattcagaacattgcctgaagyaggtccaccgtgccgttagtaacgaggaacatcgagccaaggcacctgtgccgtcagacgttgcctagcgttagaagcgagctggaatgcgtgaccaaca

SEQ ID NO: 2538 - DNA, 201 bp, Homo sapiens
tctgtgcagagactgggcggccagcctgcccttgctgtcgctgacggtgactgcgggaggccaggttgtttttcatcattcagaacattgcctgaagcagktccaccgtgccgttagtaacgaggaacatcgagccaaggcacctgtgccgtcagacgttgcctagcgttagaagcgagctggaatgcgtgaccaacatca

SEQ ID NO: 2539 - DNA, 201 bp, Homo sapiens
cttaccccttacagggacgatggaacagaggcactcaaattctacacagacccttcatacttctttgatctttggaagaagaagatgctgcaggacaccarggatatcatgaaagagaagagaaagcacaggaaagaaaagaaagataatccaaatcgagggaatgtaaacccacgtaaaatcaagacacgtaaggaagag

SEQ ID NO: 2540 - DNA, 201 bp, Homo sapiens
aggacaccaaggatatcatgaaagagaagagaaagcacaggaaagaaaagaaagataatccaaatcgagggaatgtaaacccacgtaaaatcaagacacgwaaggaagagtgggagaaaattaagatggggcaagaatttgtggagtccaaagaaaagctggggccttttgggtatccacccaccttggtgtaccagaatg

SEQ ID NO: 2541 - DNA, 201 bp, Homo sapiens
acctttgcctctccggtaagctcccttgctgagagggtcgatggactacaagttaaagtcactcagctggatcccaaggaagaagaagtgtcactgcaagkaatcaacacccgaaaagccttcagaagctccaccattcaagaccagaagctttttgacagaaactctctcccagtgcctgtcttagaaacatacaatacc

SEQ ID NO: 2542 - DNA, 201 bp, Homo sapiens
ccttaggagccatattcaactacagtcttctaaaacctgtgccctcagccacttcgaataatgccagccaccttctggttctaaagcagagggagtggccygaatggacacagctggcccctttcccgtacactgaaagggcagagcaggcctaaggctccaacggccaaactgcctcaccctctgccctaatcagcaggg

SEQ ID NO: 2543 - DNA, 201 bp, Homo sapiens
tccggggccccctcctccccctttcactggtgcagatggccagcctgctgtaccaccaccgctttctgacaccaccaagcccaagtcctccttgcctgccrtaagcgatgcccatagcgacctgctttcagccatctgtcaaggttttcagctgcgcagggttgaggagcagcaggaacaagagaagtgggatgtcgtggg

SEQ ID NO: 2544 - DNA, 201 bp, Homo sapiens
caaaaatgatgctcttctgtaggctggtgttgttgcttccctcccaggatccctttggtgagtgtggtgttcaggatgcaccagcaccacctctacatgcyttcaggcaacacggcccagttttaacctctagtatccatgaccaaactatccctgacacataaggacaggggcctcttctggctgtcaggagcaaagcct

SEQ ID NO: 2545 - DNA, 201 bp, Homo sapiens; identical to SEQ ID NO: 2534

SEQ ID NO: 2546 - DNA, 201 bp, Homo sapiens; identical to SEQ ID NO: 2535

SEQ ID NO: 2547 - DNA, 201 bp, Homo sapiens
ttttatttccccaatttaaacaaagattctgccaactgtggaaacttcagtccctcaggctggcagctgtgctggtacctgcctgggggggcctggcagtygtgaagcaggctgaaaggcagaggggctccaggtcctgtttccagctcccctcactgcacatggtgaagctccctccctccccacttttcccagagctaa

SEQ ID NO: 2548 - DNA, 201 bp, Homo sapiens; identical to SEQ ID NO: 2537

SEQ ID NO: 2549 - DNA, 201 bp, Homo sapiens; identical to SEQ ID NO: 2538

SEQ ID NO: 2550 - DNA, 201 bp, Homo sapiens; identical to SEQ ID NO: 2540

SEQ ID NO: 2551 - DNA, 201 bp, Homo sapiens; identical to SEQ ID NO: 2542

SEQ ID NO: 2552 - DNA, 201 bp, Homo sapiens; identical to SEQ ID NO: 2531

SEQ ID NO: 2553 - DNA, 201 bp, Homo sapiens; identical to SEQ ID NO: 2530

SEQ ID NO: 2554 - DNA, 201 bp, Homo sapiens; identical to SEQ ID NO: 2532

SEQ ID NO: 2555 - DNA, 201 bp, Homo sapiens
tatagtcatgagttctgcctctgtgcccttgctggccgcttcccctttgccttctttcctggaactcagggtgtggggactgagcctgtaggggccagcakgccctcctgctgtggccactcccaagtgtgccctcttccctctctccagatcaggtgtctctagcacaggacttggcaccaagctccatgctgagacacc

SEQ ID NO: 2556 - DNA, 201 bp, Homo sapiens
cagtagctggagaggcaggcagagggcagtggttctcccaaataggagacctggggcctggccaggccagggtttgggcctaatggctttgactgaattamccccatcctcctcctttctggaaaagggagagctagagccactcactgtcattctgctctgaccttgaagggggcggtgttggcctggcttctggaatgg

SEQ ID NO: 2557 - DNA, 201 bp, Homo sapiens
taaaggagcagcccgggggagggggcaggcttagccagcccttggaggctcagagcagctggcccaggctccagctcgcctccagtggaagcccgagcgcygtcagaaacaaccctggccaatgtcaccgcagagccgaggcggtgttgtcagggctaatgtgaaatctcttcccgtggcgctgatcctccgactctgcag

SEQ ID NO: 2558 - DNA, 201 bp, Homo sapiens
ttcctgattccaagtcacctgtgctttctgggaccaaagaatgggcacctgctggagtcttggcagagctttcttggctgtattgctactccagacctcaycataggttggggtcccagtaggagggctcagggtctgtgccagccctgtcagtgctgctcagaccttcatagcctctcttgtcattctttgttgcccctt

SEQ ID NO: 2559 - DNA, 201 bp, Homo sapiens; identical to SEQ ID NO: 2539

SEQ ID NO: 2560 - DNA, 201 bp, Homo sapiens
ctccagtggaagcccgagcgccgtcagaaacaaccctggccaatgtcaccgcagagccgaggcggtgttgtcagggctaatgtgaaatctcttcccgtggygctgatcctccgactctgcagcaccagcttggacagactgaggtctctgtggctttgctgactctgcttaagcattcccaccgggtcccagctctgctct

SEQ ID NO: 2561 - DNA, 127 bp, Homo sapiens
cctgacctcagggcatggggagggagggagccagttccccaaggccaggggactttgctcctgagagatgtcagacttcctggaggcatcaggctttgagytctgctggggtccagctgacctggca

SEQ ID NO: 2562 - DNA, 153 bp, Homo sapiens
ggactgcctcccactgcggcccctcacctgacctcagggcatggggagggagggagccagttccccaaggccaggggactttgctcctgagagatgtcagrcttcctggaggcatcaggctttgagttctgctggggtccagctgacctggca

SEQ ID NO: 2563 - DNA, 201 bp, Homo sapiens; identical to SEQ ID NO: 2541

SEQ ID NO: 2564 - DNA, 144 bp, Homo sapiens
cccactgcggcccctcacctgacctcagggcatggggagggagggagccagttccccaaggccaggggactttgctcctgagagatgtcagacttcctggrggcatcaggctttgagttctgctggggtccagctgacctggca

SEQ ID NO: 2565 - DNA, 201 bp, Homo sapiens; identical to SEQ ID NO: 2543

SEQ ID NO: 2566 - DNA, 201 bp, Homo sapiens; identical to SEQ ID NO: 2544

SEQ ID NO: 2567 - DNA, 201 bp, Homo sapiens; identical to SEQ ID NO: 2534

SEQ ID NO: 2568 - DNA, 201 bp, Homo sapiens; identical to SEQ ID NO: 2535

SEQ ID NO: 2569 - DNA, 201 bp, Homo sapiens; identical to SEQ ID NO: 2547

SEQ ID NO: 2570 - DNA, 201 bp, Homo sapiens; identical to SEQ ID NO: 2537

SEQ ID NO: 2571 - DNA, 201 bp, Homo sapiens; identical to SEQ ID NO: 2538

SEQ ID NO: 2572 - DNA, 201 bp, Homo sapiens; identical to SEQ ID NO: 2540

SEQ ID NO: 2573 - DNA, 201 bp, Homo sapiens; identical to SEQ ID NO: 2542

SEQ ID NO: 2574 - DNA, 201 bp, Homo sapiens; identical to SEQ ID NO: 2531

SEQ ID NO: 2575 - DNA, 201 bp, Homo sapiens; identical to SEQ ID NO: 2530

SEQ ID NO: 2576 - DNA, 201 bp, Homo sapiens; identical to SEQ ID NO: 2532

SEQ ID NO: 2577 - DNA, 201 bp, Homo sapiens; identical to SEQ ID NO: 2555

SEQ ID NO: 2578 - DNA, 201 bp, Homo sapiens
tgtcattgtattaagtttatccagttaattaacttgaggaactaaccaatttttaccttctgtctagaatgatgtacatgtagtagagtaagccataatgytcccaaagtgccttgttttctctgatacaaacgtatttataaggacgtattccagtgggttcttgggtgtgtttgccacaacaagattttagggaagggg

SEQ ID NO: 2579 - DNA, 201 bp, Homo sapiens
cagtagctggagaggcaggcagagggcagtggttctcccaaataggagacctggggcctggccaggccagggtttgggcctaatggctttgactgaattamccccatcctcctcaaaaaaaaaaaggcttctttagacccagagccctttaagatgataaaggacccaatgcaggtaatcctgtttttggactcatgtaat

SEQ ID NO: 2580 - DNA, 108 bp, Homo sapiens
acatttgtgccccactgacctgaaggttccatgtaactgtatacacatgaatacttaaatgccaacattttaaataatttgataaagtctttgtagccacaaaaaaaa

SEQ ID NO: 2581 - DNA, 201 bp, Homo sapiens
ggaagggaaaggaactcttcagttggagatctgggcagtgggttaagccagacccctaaagtgaccctttcctcttctgccctattcttctcagaccctcygaaagacatccaatttttttaaagccctgtagctccaagcctggtctcatttgcttccctgccaggctcattgtgtgtataccacatttgtgccccactg

SEQ ID NO: 2582 - DNA, 201 bp, Homo sapiens; identical to SEQ ID NO: 2557

SEQ ID NO: 2583 - DNA, 201 bp, Homo sapiens; identical to SEQ ID NO: 2558

SEQ ID NO: 2584 - DNA, 201 bp, Homo sapiens; identical to SEQ ID NO: 2539

SEQ ID NO: 2585 - DNA, 201 bp, Homo sapiens; identical to SEQ ID NO: 2560

SEQ ID NO: 2586 - DNA, 201 bp, Homo sapiens
cctgacctcagggcatggggagggagggagccagttccccaaggccaggggactttgctcctgagagatgtcagacttcctggaggcatcaggctttgagytctgctggggtccagctgacctggcaccaggtgtcgcacagagatgtgcctcattctgtgcctcctgccgtgttcactttaactgtgcctcagtgtgggt

SEQ ID NO: 2587 - DNA, 201 bp, Homo sapiens
ggactgcctcccactgcggcccctcacctgacctcagggcatggggagggagggagccagttccccaaggccaggggactttgctcctgagagatgtcagrcttcctggaggcatcaggctttgagttctgctggggtccagctgacctggcaccaggtgtcgcacagagatgtgcctcattctgtgcctcctgccgtgtt

SEQ ID NO: 2588 - DNA, 201 bp, Homo sapiens
ttgaggaactaaccaatttttaccttctgtctagaatgatgtacatgtagtagagtaagccataatgctcccaaagtgccttgttttctctgatacaaacrtatttataaggacgtattccagtgggttcttgggtgtgtttgccacaacaagattttagggaaggggtgtatgtgtagtagggatgccgtttgaaaacag

SEQ ID NO: 2589 - DNA, 201 bp, Homo sapiens; identical to SEQ ID NO: 2541

SEQ ID NO: 2590 - DNA, 201 bp, Homo sapiens
cccactgcggcccctcacctgacctcagggcatggggagggagggagccagttccccaaggccaggggactttgctcctgagagatgtcagacttcctggrggcatcaggctttgagttctgctggggtccagctgacctggcaccaggtgtcgcacagagatgtgcctcattctgtgcctcctgccgtgttcactttaac

SEQ ID NO: 2591 - DNA, 201 bp, Homo sapiens
ttaactgtgcctcagtgtgggttagggaataattttgtcattgtattaagtttatccagttaattaacttgaggaactaaccaatttttaccttctgtctrgaatgatgtacatgtagtagagtaagccataatgctcccaaagtgccttgttttctctgatacaaacgtatttataaggacgtattccagtgggttcttg

SEQ ID NO: 2592 - DNA, 201 bp, Homo sapiens; identical to SEQ ID NO: 2543

SEQ ID NO: 2593 - DNA, 201 bp, Homo sapiens
gctggccaagaccacccaggaaaccatcgacaagactgctaaccaggcctctgacaccttctctgggattgggaaaaaattcggcctcctgaaatgacagmagggagacttgggtcggcctcctgaaatgacagcagggagacttgggtgaccccccttccaggcgccatctagcacagcctggccctgatctccgggcag

SEQ ID NO: 2594 - DNA, 201 bp, Homo sapiens
cagaggcggggcagaaagccatggaccagctggccaagaccacccaggaaaccatcgacaagactgctaaccaggcctctgacaccttctctgggattggraaaaaattcggcctcctgaaatgacagcagggagacttgggtcggcctcctgaaatgacagcagggagacttgggtgaccccccttccaggcgccatcta

SEQ ID NO: 2595 - DNA, 201 bp, Homo sapiens
ccacagaggcggggcagaaagccatggaccagctggccaagaccacccaggaaaccatcgacaagactgctaaccaggcctctgacaccttctctgggatygggaaaaaattcggcctcctgaaatgacagcagggagacttgggtcggcctcctgaaatgacagcagggagacttgggtgaccccccttccaggcgccat

SEQ ID NO: 2596 - DNA, 201 bp, Homo sapiens
accaggcctctgacaccttctctgggattgggaaaaaattcggcctcctgaaatgacagcagggagacttgggtcggcctcctgaaatgacagcagggagrcttgggtgaccccccttccaggcgccatctagcacagcctggccctgatctccgggcagccaccacctcctcggtctgccccctcattaaaattcacgtt

SEQ ID NO: 2597 - DNA, 201 bp, Homo sapiens
catggaccagctggccaagaccacccaggaaaccatcgacaagactgctaaccaggcctctgacaccttctctgggattgggaaaaaattcggcctcctgmaatgacagcagggagacttgggtcggcctcctgaaatgacagcagggagacttgggtgaccccccttccaggcgccatctagcacagcctggccctgatc

SEQ ID NO: 2598 - DNA, 201 bp, Homo sapiens
aagactgctaaccaggcctctgacaccttctctgggattgggaaaaaattcggcctcctgaaatgacagcagggagacttgggtcggcctcctgaaatgayagcagggagacttgggtgaccccccttccaggcgccatctagcacagcctggccctgatctccgggcagccaccacctcctcggtctgccccctcattaa

SEQ ID NO: 2599 - DNA, 201 bp, Homo sapiens
caggcctctgacaccttctctgggattgggaaaaaattcggcctcctgaaatgacagcagggagacttgggtcggcctcctgaaatgacagcagggagacytgggtgaccccccttccaggcgccatctagcacagcctggccctgatctccgggcagccaccacctcctcggtctgccccctcattaaaattcacgttcc

SEQ ID NO: 2600 - DNA, 201 bp, Homo sapiens
ccaccgcggcccgtcttaggccaggatgtgctccctgccctgcggactctggagcagggcccggccactccccggagcctgtatgacgggaaccgccccgmgccctctcccctacgcggggcaggccagccctggggcgccttaaaaaccggagctggcgcttggcatcgccactctgggcaggatccaacgtcgctccag

SEQ ID NO: 2601 - DNA, 201 bp, Homo sapiens
tcggcctcctgaaatgacagcagggagacttgggtcggcctcctgaaatgacagcagggagacttgggtgaccccccttccaggcgccatctagcacagcytggccctgatctccgggcagccaccacctcctcggtctgccccctcattaaaattcacgttcccaccctgtgtccacttcatgattcctcgcaagctggg

SEQ ID NO: 2602 - DNA, 201 bp, Homo sapiens
ggcgccttaaaaaccggagctggcgcttggcatcgccactctgggcaggatccaacgtcgctccagctgctcttgacgactccacagataccccgaagccmtggcaagcaagggcttgcaggacctgaagcaacaggtggaggggaccgcccaggaagccgtgtcagcggccggagcggcagctcagcaagtggtggacca

SEQ ID NO: 2603 - DNA, 201 bp, Homo sapiens
actgctaaccaggcctctgacaccttctctgggattgggaaaaaattcggcctcctgaaatgacagcagggagacttgggtcggcctcctgaaatgacagmagggagacttgggtgaccccccttccaggcgccatctagcacagcctggccctgatctccgggcagccaccacctcctcggtctgccccctcattaaaat

SEQ ID NO: 2604 - DNA, 152 bp, Homo sapiens
cccatataaagccacatccgcagtagttatcacttccacctcgggggactcaatagtttccacatcaatgcctagatcctctgcgatgaaaaagattgagyctgagacaactttctccctgatatttagactgagggagactagcacctccc

SEQ ID NO: 2605 - DNA, 201 bp, Homo sapiens
cattcatgccagcttctgctcagtcaacaaagtccccagacatttcacctgaagccagcagcagtcattctaactctcctcccttgacaatatctacacamaagaccatcgccacacaaacaggtccttctggggtgacatctcttggccaactgaccctggacacatcaaccatagccacctcagcaggaactccatcag

SEQ ID NO: 2606 - DNA, 142 bp, Homo sapiens
gccacatccgcagtagttatcacttccacctcgggggactcaatagtttccacatcaatgcctagatcctctgcgatgaaaaagattgagtctgagacaaytttctccctgatatttagactgagggagactagcacctccc

SEQ ID NO: 2607 - DNA, 201 bp, Homo sapiens
gactcgttcacctcaaaatttaaggaacaccttggccacttcagaagccaccacagatacacacacaatgcatccttctataaacacagcagtggccaatrtggggaccaccagttcaccaaatgaattctattttactgtctcacctgactcagacccatataaagccacatccgcagtagttatcacttccacctcggg

SEQ ID NO: 2608 - DNA, 201 bp, Homo sapiens
gatatgactactctaacagtaataactataaatctcactttaaataatttaaaacaaattaaagtgatatatgagttaaatgaccaagcagacttgattcyaggaatgttaaggaatgttcattatttgttttggataatgaagtcagcagaggaaaaaaaaatatgaccatctcaaaagatgccaacgttgtctttgata

SEQ ID NO: 2609 - DNA, 201 bp, Homo sapiens
tttaatatattttttaaaaaacaattcttgtaaaatacttttttgattagccttctgaccatgattaaaatggtgtacctcaaagtagctgctaaccttaygtgtatctgcaacaccctgaaaaattatctaataaaaaggcacaaagaaaaagcttgtcaatgttgtggataattagaaagtgaataattttatttaata

SEQ ID NO: 2610 - DNA, 201 bp, Homo sapiens
cagagtaatcaggtaaagcttaaacaagtgttttaaaagatgagtttttcctacattctgaaaagcaaacatgaaaaactgaacacagtttttacagatayacaatatggagtgacttatatacaaaatgaccttaaaaatatattaaactcattatagtagttaatatctaagtaaaatatgatgaaatttaatagagaa

SEQ ID NO: 2611 - DNA, 151 bp, Homo sapiens
tcccagcataaagttgggagtgacaccagagccttctgcaagatgcttctrattctgctgtcagtggccctgctggccttcagctcagctcaggacttagatgaagatgtcagccaagaagacgttcccttggtaatatcagatggaggag

SEQ ID NO: 2612 - DNA, 201 bp, Homo sapiens
cccacctcctcctggaaagccccagggaccacctccccaagggggccgcccacaaggacctccacaggggcagtctcctcagtaatctaggattcaatgayaggaagtgaataagaagatgacagtgtttcaaatgccttgaaacataatgtgatcatgctctaacttcaatataccaataaaataatcagcttgcaattt

SEQ ID NO: 2613 - DNA, 201 bp, Homo sapiens
ctcaaagtagctgctaaccttatgtgtatctgcaacaccctgaaaaattatctaataaaaaggcacaaagaaaaagcttgtcaatgttgtggataattagraagtgaataattttatttaatattagataaacaagcacataacagagatacatatattcaaatggaaggagtaaaattaccaccacatgcagatctgttt

SEQ ID NO: 2614 - DNA, 201 bp, Homo sapiens
atacttttttgattagccttctgaccatgattaaaatggtgtacctcaaagtagctgctaaccttatgtgtatctgcaacaccctgaaaaattatctaatraaaaggcacaaagaaaaagcttgtcaatgttgtggataattagaaagtgaataattttatttaatattagataaacaagcacataacagagatacatata

SEQ ID NO: 2615 - DNA, 201 bp, Homo sapiens
aaaagcttgtcaatgttgtggataattagaaagtgaataattttatttaatattagataaacaagcacataacagagatacatatattcaaatggaaggastaaaattaccaccacatgcagatctgtttttctgtccagaaaataacaagagattctactcaggtaaaaaaggaaaggaaggaaaaccattgtaattaaa

SEQ ID NO: 2616 - DNA, 201 bp, Homo sapiens
taataactataaatctcactttaaataatttaaaacaaattaaagtgatatatgagttaaatgaccaagcagacttgattctaggaatgttaaggaatgtycattatttgttttggataatgaagtcagcagaggaaaaaaaaatatgaccatctcaaaagatgccaacgttgtctttgataatatttaatatatttttta

SEQ ID NO: 2617 - DNA, 157 bp, Homo sapiens
tcccagcataaagttgggagtgacaccagagccttctgcaagatgcttctgattctsctgtcagtggccctgctggccttcagctcagctcaggacttagatgaagatgtcagccaagaagacgttcccttggtaatatcagatggaggagactctg

SEQ ID NO: 2618 - DNA, 201 bp, Homo sapiens
aggatcatgggcatggcccggtaccatgtgactgtgtgcacaggtgaacttgaaggtgctgggaccgatgccaacgtctatctctgcctttttggtgatgygggggacacgggggaacggctgctctacaactgcaggaataacacagacctgtttgaaaagggcaatgctgacgagttcactatcgagtctgtcaccatg

SEQ ID NO: 2619 - DNA, 201 bp, Homo sapiens
atgccaacgttggctggcagtggaggaagatgatggccagctgtccagggagctgttgccagtggatgagtcctatgtgctgccacagagcgaggagggtrggggaggcggtgacaacaaccccctcgacaacctggccctggagcagaaagataaatctaccacattctcagtgaccataaagactggggttaagaagaa

SEQ ID NO: 2620 - DNA, 201 bp, Homo sapiens
acagcactggcatgcatgccagctggttcctgggcagcgttcagatccgtgtgccccgtcaaggcaagcagtacacctttcccgccaaccgctggctggayaagaaccaggctgacgggcgcctggaggtggagctgtatcccagcgaggtggtggagatccagaaattggtccactatgaggttgagatttggacaggag

SEQ ID NO: 2621 - DNA, 201 bp, Homo sapiens
tttggtgatgtgggggacacgggggaacggctgctctacaactgcaggaataacacagacctgtttgaaaagggcaatgctgacgagttcactatcgagtytgtcaccatgcggaatgtgaggcgggtgaggatcagacacgatggcaaaggctccggcagcggctggtacctggacagagtgctggtgagagaggagggg

SEQ ID NO: 2622 - DNA, 201 bp, Homo sapiens
caggaataacacagacctgtttgaaaagggcaatgctgacgagttcactatcgagtctgtcaccatgcggaatgtgaggcgggtgaggatcagacacgatkgcaaaggctccggcagcggctggtacctggacagagtgctggtgagagaggaggggcagcctgagagcgacaacgtggagttcccatgtctcaggtggtt

SEQ ID NO: 2623 - DNA, 201 bp, Homo sapiens
ctggggatgtctctggggccagcacggattctagagtctacatcaagctctatggggataaatctgacaccatcaagcaagttcttcttgtctctgacaayaacctcaaagactactttgaacgtggccgggtggatgagttcaccctcgagaccctgaacattggaaatatcaaccggctggtgattgggcatgacagca

SEQ ID NO: 2624 - DNA, 201 bp, Homo sapiens
gaagtcagacaagtccaacaaatttgagcaggggcagacagacaccttcaccatctatgccattgacctgggggccctgaccaagattcggattcgccacracaacacaggcaacagagcaggctggttcctggacagaatagacattactgacatgaacaacgagatcacgtactactttccatgccaacgttggctggc

SEQ ID NO: 2625 - DNA, 201 bp, Homo sapiens
gaaccaggctgacgggcgcctggaggtggagctgtatcccagcgaggtggtggagatccagaaattggtccactatgaggttgagatttggacaggagatrtgggtggcgcaggcaccagtgcccgagtctacatgcagatctatggagagaaaggcaagacagaagtgctcttcctctccagccgctcaaaagtttttga

SEQ ID NO: 2626 - DNA, 201 bp, Homo sapiens
aggccccaggctggtttgtagactgggtagaggtggatgccccatctcttgggaagtgcatgacgtttccctgtggccgctggctggccaaaaacgaagahgacgggtccatcatcagagacctcttccatgcagagcttcagacgaggctgtacacaccatgtaggaaccacacacggcaaggccagcccttctctgggg

SEQ ID NO: 2627 - DNA, 201 bp, Homo sapiens
gtttgaaaagggcaatgctgacgagttcactatcgagtctgtcaccatgcggaatgtgaggcgggtgaggatcagacacgatggcaaaggctccggcagckgctggtacctggacagagtgctggtgagagaggaggggcagcctgagagcgacaacgtggagttcccatgtctcaggtggttggacaaggataaggatga

SEQ ID NO: 2628 - DNA, 201 bp, Homo sapiens
caaggataaggatgatgggcagctggtccgagagttgctacccagtgacagcagcgcgacactgaagaactttcgctatcacatcagcttgaagactgggkatgtctctggggccagcacggattctagagtctacatcaagctctatggggataaatctgacaccatcaagcaagttcttcttgtctctgacaacaacct

SEQ ID NO: 2629 - DNA, 201 bp, Homo sapiens
gaggggcagcctgagagcgacaacgtggagttcccatgtctcaggtggttggacaaggataaggatgatgggcagctggtccgagagttgctacccagtgrcagcagcgcgacactgaagaactttcgctatcacatcagcttgaagactggggatgtctctggggccagcacggattctagagtctacatcaagctctat

SEQ ID NO: 2630 - DNA, 201 bp, Homo sapiens
ccgttgcctgtgcccgcactgcgtcagcctacagacaggctcccacatggacccccggggcaactcggagctgctctaccacaaccagactgtcttctacmggcggccatgccatggcgagaagggcacccacaagggctactgcctggagcgcaggctgtaccgtgtttccttagcttgtgtgtgtgtgcggccccgtgt

SEQ ID NO: 2631 - DNA, 201 bp, Homo sapiens
ccacttgccatgaagggccaggatgcccagatgcttggcccctgtgaagtgctgtctggagcagcaggatcccgggacaggatggggggctttggggaaarcctgcacttctgcacattttgaaaagagcagctgctgcttagggccgccggaagctggtgtcctgtcattttctctcaggaaaggttttcaaagttctgc

SEQ ID NO: 2632 - DNA, 201 bp, Homo sapiens
aagttctgcccatttctggaggccaccactcctgtctcttcctcttttcccatcccctgctaccctggcccagcacaggcactttctagatatttcccccktgctggagaagaaagagcccctggttttatttgtttgtttactcatcactcagtgagcatctactttgggtgcattctagtgtagttactagtcttttga

SEQ ID NO: 2633 - DNA, 201 bp, Homo sapiens
ctgcacattttgaaaagagcagctgctgcttagggccgccggaagctggtgtcctgtcattttctctcaggaaaggttttcaaagttctgcccatttctgkaggccaccactcctgtctcttcctcttttcccatcccctgctaccctggcccagcacaggcactttctagatatttcccccttgctggagaagaaagagc

SEQ ID NO: 2634 - DNA, 201 bp, Homo sapiens
ggagcactgtgcctgtgcctcccctagagcctgctaggcccaaccgccacccagagtcctgtagggccagtgaagatggacccctcaacagcagggccatytccccctggagatatgagttggacagagacttgaaccggctcccccaggacctgtaccacgcccgttgcctgtgcccgcactgcgtcagcctacagacag

SEQ ID NO: 2635 - DNA, 201 bp, Homo sapiens
caatttccaaaggttgcaagatgtttttttgtggatgaatataaaattttattgtgtaattacttggttccattaaaattggttaacttgctattttcttkgttgagcatgtcccctccagtgcccttgaagcaccaagaacactaattccactggttgtgtaaaatcacatgcagaaagtcatcagtcctttcctgagct

SEQ ID NO: 2636 - DNA, 201 bp, Homo sapiens
ctgaggcagggaacccgtaacaagaagcttaagaagaaggataaagggaagctggaagagaagaaacctcctgaggctgacatgaatatttttgaagacaytggggattacgtaccctccacaaccaagacacctcgggacaaggagcgggagagatatcgggaacgggagcgtgatcgggaaagagacagagaccgtgac

SEQ ID NO: 2637 - DNA, 201 bp, Homo sapiens
gaagaggaagaagatggaagctgatggggttgaagtcaaaagaccaaaatactaatcactagttacaaccagagatgctccacaaggatatgctccccackgttttctttctacaatttccaaaggttgcaagatgtttttttgtggatgaatataaaattttattgtgtaattacttggttccattaaaattggttaact

SEQ ID NO: 2638 - DNA, 201 bp, Homo sapiens
agaggaagaagatggaagctgatggggttgaagtcaaaagaccaaaatactaatcactagttacaaccagagatgctccacaaggatatgctccccactgwtttctttctacaatttccaaaggttgcaagatgtttttttgtggatgaatataaaattttattgtgtaattacttggttccattaaaattggttaacttg

SEQ ID NO: 2639 - DNA, 166 bp, Homo sapiens
aacgcaaagcagtgtgggttgattctgaggtgcactgtgggaaagagcttgtcgctgcggtgttgytgttggagactcgattgttggtgacagcgaaagaacgataacaaaatgccggagcgagatagtgagccgttctccaaccctttggcccccgatggccacg

SEQ ID NO: 2640 - DNA, 201 bp, Homo sapiens
attgtcattagcaagctgacccagatcctttcatacctgaggcagggaacccgtaacaagaagcttaagaagaaggataaagggaagctggaagagaagaracctcctgaggctgacatgaatatttttgaagacattggggattacgtaccctccacaaccaagacacctcgggacaaggagcgggagagatatcgggaa

SEQ ID NO: 2641 - DNA, 201 bp, Homo sapiens
cattccagtatggtatcaaaatgtctgaagggcggaaaaccaggcgcttcaaggaaaccaatgacaaagcagagcttgatcgccagtggaagaagattagygcaatcattgagaagaggaagaagatggaagctgatggggttgaagtcaaaagaccaaaatactaatcactagttacaaccagagatgctccacaaggat

SEQ ID NO: 2642 - DNA, 201 bp, Homo sapiens; identical to SEQ ID NO: 2635

SEQ ID NO: 2643 - DNA, 201 bp, Homo sapiens; identical to SEQ ID NO: 2636

SEQ ID NO: 2644 - DNA, 201 bp, Homo sapiens; identical to SEQ ID NO: 2637

SEQ ID NO: 2645 - DNA, 201 bp, Homo sapiens; identical to SEQ ID NO: 2638

SEQ ID NO: 2646 - DNA, 166 bp, Homo sapiens; identical to SEQ ID NO: 2639

SEQ ID NO: 2647 - DNA, 201 bp, Homo sapiens; identical to SEQ ID NO: 2640

SEQ ID NO: 2648 - DNA, 201 bp, Homo sapiens; identical to SEQ ID NO: 2641

SEQ ID NO: 2649 - DNA, 201 bp, Homo sapiens; identical to SEQ ID NO: 2635

SEQ ID NO: 2650 - DNA, 201 bp, Homo sapiens; identical to SEQ ID NO: 2636

SEQ ID NO: 2651 - DNA, 201 bp, Homo sapiens; identical to SEQ ID NO: 2637

SEQ ID NO: 2652 - DNA, 201 bp, Homo sapiens; identical to SEQ ID NO: 2638

SEQ ID NO: 2653 - DNA, 166 bp, Homo sapiens; identical to SEQ ID NO: 2639

SEQ ID NO: 2654 - DNA, 201 bp, Homo sapiens; identical to SEQ ID NO: 2640

SEQ ID NO: 2655 - DNA, 201 bp, Homo sapiens
aacgagatcgggaacgagagcgagagcgggaccgagagagagaagaggaaaagaagagacacagctactttgagaagccaaaagtagatgatgaggtgagytaggacctgggtctaccaaggagttgatcaagtccatcaatgaaaagtttgctgggtctgctggctgggaaggcacacatatgctgaagaagccagaaga

SEQ ID NO: 2656 - DNA, 183 bp, Homo sapiens
cgttcgcagcctttccgcttcctgtttttccctccgaccaaccccgagcgcaaagaaattgacctcgcagcggtcctacaatrcttttatatcattggccaagctttaccccgcccctgcctcatgcagcctatgggctaggctttagggtccgcggttggtcagaccggagcacttggcctg

SEQ ID NO: 2657 - DNA, 201 bp, Homo sapiens
gcaaccactgaggcaaagtagcttaatataaaaataaaactttattctgtctcatcaaaagctaccagctgctgaagcaaacatgaagggtggcggggggkcagggattctagggccccagagtaagtagaccacactgagtcccttttggtcctcctgcctggatagtgctgagtggaaggggaggagctgggacccaaa

SEQ ID NO: 2658 - DNA, 201 bp, Homo sapiens
ttggtcagaccggagcacttggcctgaagacctggaattggcgacttcgatattaacaaggatggcggcggccgcagcaagtcgaggagtcggggcaaagstgggcctgcgtgagattcgcatccacttatgtcagcgctcgcccggcagccagggcgtcagggacttcattgagaaacgctacgtggagctgaagaaggc

SEQ ID NO: 2659 - DNA, 201 bp, Homo sapiens
cggtcctacaatacttttatatcattggccaagctttaccccgcccctgcctcatgcagcctatgggctaggctttagggtccgcggttggtcagaccggrgcacttggcctgaagacctggaattggcgacttcgatattaacaaggatggcggcggccgcagcaagtcgaggagtcggggcaaagctgggcctgcgtga

SEQ ID NO: 2660 - DNA, 201 bp, Homo sapiens
atgtgcagacggggttttaggtggtgaagattataattacaacaacatcaaccagtggaccgcaagcatagtggaattatcgttaacacatctgcctaagytgggaaaagcttataaatgtattgtgaaatgtgcagtggtccagaagagcgcatatggctttcgcacagcagctcctgtttttgggataccacatctgat

SEQ ID NO: 2661 - DNA, 201 bp, Homo sapiens
tctcagggcttatgaaatgtaattaaatttattaagaaaatagataaaaattagggtacacagctggccaccaaatgcgaagtcaatctgctacttaaccytgcacacaaaatcagttttgcatattaccactaacactaacacttacagagagtggaatcataactcattgaattttggagaggaataaacttagtgtta

SEQ ID NO: 2662 - DNA, 201 bp, Homo sapiens
gggcttatgaaatgtaattaaatttattaagaaaatagataaaaattagggtacacagctggccaccaaatgcgaagtcaatctgctacttaaccctgcamacaaaatcagttttgcatattaccactaacactaacacttacagagagtggaatcataactcattgaattttggagaggaataaacttagtgttaatatt

SEQ ID NO: 2663 - DNA, 201 bp, Homo sapiens
agtgtatcctttcaaaaatagttatttattagtgtgctagatgacaagtgtgcaatatactttaaagctatcaacaaaaactgaatattgtaagcaagcartatcatagcaattggcagattatctcatattctatacagcatcatttaaatacgaaaaatttaatgctagcaaaaaataaatgcagaaatatggcatgac

SEQ ID NO: 2664 - DNA, 201 bp, Homo sapiens
aatttttaaaaattttctatcaactaatagcatagtaacaactatgattaacttgtttactttttctgaggattagtaaatcgattttttttaatttaaartttttggatttatacttgagggtgaattaaatctggtaaactgaatttcctagttaaacaaaattagttgcagtatatgatgaacagtatatgactcaaa

SEQ ID NO: 2665 - DNA, 201 bp, Homo sapiens
ataaatatatgaacaaataagctgcaaggataaatgtggagaaaatgatgagaattagctaatatcttttcattttttaaaactttcttcccctcacttarttgtacacaatatttagtggaaagtaatttttaaaaattttctatcaactaatagcatagtaacaactatgattaacttgtttactttttctgaggatta

SEQ ID NO: 2666 - DNA, 201 bp, Homo sapiens
gggttttaggtggtgaagattataattacaacaacatcaaccagtggaccgcaagcatagtggaattatcgttaacacatctgcctaagctgggaaaagcytataaatgtattgtgaaatgtgcagtggtccagaagagcgcatatggctttcgcacagcagctcctgtttttgggataccacatctgatggaacctgtac

SEQ ID NO: 2667 - DNA, 201 bp, Homo sapiens
accactaacactaacacttacagagagtggaatcataactcattgaattttggagaggaataaacttagtgttaatattaacaatattaaggcaagattcwtgtaggaataccatgtgcatgttggatattttgccaaataacaataattaatacctgttaaatgtttaataataatattaacaaaataaaggagttcaac

SEQ ID NO: 2668 - DNA, 201 bp, Homo sapiens
agctatttttgtcttgtactactttgacccacccctgaataaacctcaattgctggagtggggtgtagttattaaagggatgctttttaccttttgctgtytgctgtggcagattccccagataaccaaggaaaaggggccacccatacctggaaataggccatagggcccctactactgccaacaagccatggcctacct

SEQ ID NO: 2669 - DNA, 201 bp, Homo sapiens
tggcagattccccagataaccaaggaaaaggggccacccatacctggaaataggccatagggcccctactactgccaacaagccatggcctaccttgacamttgtttgatcttaaaattgtgtcttggtaacaaaagatttggacaggcatatctgtagctttcaagttaattaattgcaatatttttttcttcaggattt

SEQ ID NO: 2670 - DNA, 201 bp, Homo sapiens
attttgaacttgggttctcagtagtgaattgagacttggaggtgacttttcatgtttggagtatcatctctgtctgggatctgggctgacaaattaaaacytagagtagtgcttatgctgaaatgatacttttcattttttggttgatttttttgccttcccttcaattttaaactgaagcattttaatgtgggtagaaac

SEQ ID NO: 2671 - DNA, 201 bp, Homo sapiens
ctgccctctaaagcactttctttcctttacttgcgtggtttcatgtaagctgtgctgtttagaaacaacatctcagactttacaaagaaatgacaaagaargcaattgcactttttaagggatatcgacaagcagtttctgttttctaaaggacaaaatacagagtgtgtgtcatttttaattagattctttcccctgctg

SEQ ID NO: 2672 - DNA, 201 bp, Homo sapiens
gtctttaggaaaatgtagaagaaagaacattattattctttaattcctacaaggtactcgaaaaccttaagtgaaaaagatttctatctttttatcttagygcatttatggaaaaaatattaactatcctgaatattttataattttgtaggaaaaatatgcatctattttttcttgacttcttttatatagtaataaaag

SEQ ID NO: 2673 - DNA, 201 bp, Homo sapiens
gtgcagcactgattgaccacagttgccaatctaaaagcacaaagacagaagtaaagctttatgctaattttatttcaatatgatagaaaatttatcttggyatgtccttttttagataactccagcaggaaactgtaactgctatgtctttaggaaaatgtagaagaaagaacattattattctttaattcctacaaggta

SEQ ID NO: 2674 - DNA, 201 bp, Homo sapiens
gtaactggtacttacttccaaagactgaatacaagccacactccatcatatcccttaaacttcatgaaaaaccattcaagatccccttgctgcaacactgktctcttcttctctactaaattctatttccaaaattggtaatagagccagaaggatccccagtacccagccctctgcctggcacaaactggtagcacaatt

SEQ ID NO: 2675 - DNA, 201 bp, Homo sapiens
ccattacatagaggaacacaaaattccagggtttttggaggaagggattagatagtgactaagccgccagaattgaggtggccattcctttttgtataggstaagaaacaggttatcagtgaaaagttaattatggctttggcactagaatagcactgttgcaaagtatttaagcaccccccatctcagccctttatttta

SEQ ID NO: 2676 - DNA, 201 bp, Homo sapiens
aaaggatggtttcttgaaataatttgtattgattgaggcctatgaactgacctgaattggaaaggatgtgattaatataaataatagcagatataaattgkggttatgttacctttatcttgttgaggaccacaacattagcacggtgccttgtgcagaatagatactcaatatgtgaatatgtgtctactagtagttaat

SEQ ID NO: 2677 - DNA, 201 bp, Homo sapiens
cttctcctattagccatatgataattgggctatgtagtatcaatatttactttaatcacaaaggatggtttcttgaaataatttgtattgattgaggcctrtgaactgacctgaattggaaaggatgtgattaatataaataatagcagatataaattgtggttatgttacctttatcttgttgaggaccacaacattagc

SEQ ID NO: 2678 - DNA, 201 bp, Homo sapiens
gtgtctactagtagttaattggataaactggcagcatccctggcctgttgtcatgcagtcatttcctgttaattctgggagacaatgatttcacaactagmgggaagcagtcctaaaagtttaaaatccgataaggaatatctgggacagggtttagatcatgactctacacagataccatgatgagagtatattaaagaa

SEQ ID NO: 2679 - DNA, 191 bp, Homo sapiens
aacattattattctttaattcctacaaggtactcgaaaaccttaagtgaaaaagatttctatctttttatcttagcgcatttatggaaaaaatattaactrtcctgaatattttataattttgtaggaaaaatatgcatctattttttcttgacttcttttatatagtaataaaagttattttggaagctc

SEQ ID NO: 2680 - DNA, 201 bp, Homo sapiens
gtccttttttagataactccagcaggaaactgtaactgctatgtctttaggaaaatgtagaagaaagaacattattattctttaattcctacaaggtactygaaaaccttaagtgaaaaagatttctatctttttatcttagcgcatttatggaaaaaatattaactatcctgaatattttataattttgtaggaaaaata

SEQ ID NO: 2681 - DNA, 201 bp, Homo sapiens
tttttatggaattttaggggatattttgaacttgggttctcagtagtgaattgagacttggaggtgacttttcatgtttggagtatcatctctgtctgggmtctgggctgacaaattaaaacctagagtagtgcttatgctgaaatgatacttttcattttttggttgatttttttgccttcccttcaattttaaactgaa

SEQ ID NO: 2682 - DNA, 201 bp, Homo sapiens
tgctgcaacactgttctcttcttctctactaaattctatttccaaaattggtaatagagccagaaggatccccagtacccagccctctgcctggcacaaastggtagcacaattaaattcagtatgggtggagcatggtacagtcttggtgccatagaaggagtagttgcatagtcacacatcatttgataagttggatgt

SEQ ID NO: 2683 - DNA, 201 bp, Homo sapiens
aaattgtccctggagactagggtttatgttagggtattgatagattagagcaggtggttgaagagatcttctctggtcagacttggaagaatttccaaaastgaagttagccccaagacttccctagggttgatgtactttatgatccagatgctaaacttcttagaatgaaaatatgcttcaacacttaagtagcataca

SEQ ID NO: 2684 - DNA, 201 bp, Homo sapiens
gatataaattgtggttatgttacctttatcttgttgaggaccacaacattagcacggtgccttgtgcagaatagatactcaatatgtgaatatgtgtctaytagtagttaattggataaactggcagcatccctggcctgttgtcatgcagtcatttcctgttaattctgggagacaatgatttcacaactagagggaagc

SEQ ID NO: 2685 - DNA, 201 bp, Homo sapiens
caaattaaaacctagagtagtgcttatgctgaaatgatacttttcattttttggttgatttttttgccttcccttcaattttaaactgaagcattttaatrtgggtagaaactctacaccaaatacactaaacattttggtgcttagtggatttctttttaggtaactggtacttacttccaaagactgaatacaagccac

SEQ ID NO: 2686 - DNA, 201 bp, Homo sapiens
atgatagaaaatttatcttggtatgtccttttttagataactccagcaggaaactgtaactgctatgtctttaggaaaatgtagaagaaagaacattattrttctttaattcctacaaggtactcgaaaaccttaagtgaaaaagatttctatctttttatcttagcgcatttatggaaaaaatattaactatcctgaata

SEQ ID NO: 2687 - DNA, 201 bp, Homo sapiens
gaaaagttaattatggctttggcactagaatagcactgttgcaaagtatttaagcaccccccatctcagccctttattttatctttcatgtgggctaatgrgaggataatcttacagatattataggaatttcttttctatctttatgaaaacaacgtatataaaatatatctagaaaacctttgtttgagactcttattt

SEQ ID NO: 2688 - DNA, 201 bp, Homo sapiens
accattcttcatccaaatggaggcactgaacagggagcaagaggttccatgccagcctactctggcaacaacatggacaaatcagattcagagttaaacartgaagtagcagcaaggaaaagaaacttagctctggatgaggctgggcagagatctaccatgtaaaatgttgtagagatagagccatataacgtcacgttt

SEQ ID NO: 2689 - DNA, 201 bp, Homo sapiens
taccgcggcgtggacctggaccagctgctggacatgtcctacgagcagctggagcagccgatgcagctgtacagtgcgcgccagcggcggcggctgaaccsgggcctgcggcggaagcagcactccctgctgaagcgcctgcgcaaggccaagaaggaggcgccgcccatggagaagcaggaagtggtgaagacgcacctg

SEQ ID NO: 2690 - DNA, 201 bp, Homo sapiens
cgccagcggcggcggctgaaccggggcctgcggcggaagcagcactccctgctgaagcgcctgcgcaaggccaagaaggaggcgccgcccatggagaagcmggaagtggtgaagacgcacctgcgggacatgatcatcctacccgagatggtgggcagcatggtgggcgtctacaacggcaagaccttcaaccaggtggag

SEQ ID NO: 2691 - DNA, 201 bp, Homo sapiens
gaagtagagcagaagaagaagcggaccttccgcaagttcacctaccgcggcgtggacctggaccagctgctggacatgtcctacgagcagctggagcagcygatgcagctgtacagtgcgcgccagcggcggcggctgaaccggggcctgcggcggaagcagcactccctgctgaagcgcctgcgcaaggccaagaaggag

SEQ ID NO: 2692 - DNA, 201 bp, Homo sapiens
cacccactgacagaaccctgaaggtagggaaaggtaagccctcagaaagggaaagagttccatggctcggggtggagctagggtgggggctgtggctgtgsctgcagctggggcttgagctggagctcggttaggctggggctgatgttgacagccgggagctgggtttgtaccagaggaggaggctggggtggaacctac

SEQ ID NO: 2693 - DNA, 201 bp, Homo sapiens
ggcactgctagcagggcttcaaccaggaagggatcaacccaggaagggatgatcaggagaggcttccctgaggacataatgtgtaagagaggtgagaagtsctcccaagcagacacaacagcagcacagaggtctggaggccacacaaaaagtgatgctcgccctgggctagcctcagcagacctaaggcatctctactcc

SEQ ID NO: 2694 - DNA, 201 bp, Homo sapiens
gcctggtgcagtgtgccaacgtggccccctgccccaacatcgtggactgctacattgcccgacctaccgagaagaaaatcttcacctacttcatggtgggygcctccgccgtctgcatcgtactcaccatctgtgagctctgctacctcatctgccacagggtcctgcgaggcctgcacaaggacaagcctcgagggggtt

SEQ ID NO: 2695 - DNA, 201 bp, Homo sapiens
ggcaataacaagctgcaggcttcagcacccaacctgacccccatctgaccacagggcaggggtggggcaacatgcgggctgccaatgggacatgcagggcrgtgtggcaggtggagaggtcctacaggggctgagtgaccccactctgagttcactaagttatgcaactttcgttttggcagatattttttgacactggga

SEQ ID NO: 2696 - DNA, 201 bp, Homo sapiens
ccagccgagcttccacctgccgctgccaccacaagctggtggaggctggggaggtggatccagacccaggcaataacaagctgcaggcttcagcacccaayctgacccccatctgaccacagggcaggggtggggcaacatgcgggctgccaatgggacatgcagggcggtgtggcaggtggagaggtcctacaggggctg

SEQ ID NO: 2697 - DNA, 201 bp, Homo sapiens
tcaatatgccgcgcctggtgcagtgtgccaacgtggccccctgccccaacatcgtggactgctacattgcccgacctaccgagaagaaaatcttcacctayttcatggtgggcgcctccgccgtctgcatcgtactcaccatctgtgagctctgctacctcatctgccacagggtcctgcgaggcctgcacaaggacaagc

SEQ ID NO: 2698 - DNA, 201 bp, Homo sapiens
gcccagcacagggagcagggagttttctctagatattccctggatctagtgtcctcccaggagtcagatcataaggctccatgcaccccccacctgaactsgtctcccctcttcaccacccagcagctgtgagaccttgagctggttatttctcctctctgagcctcagtttccctgctgtagaatgggactcataactgc

SEQ ID NO: 2699 - DNA, 201 bp, Homo sapiens
gcctgtggtggacctacctgttcagcctcatcttcaagctcatcattgagttcctcttcctctacctgctgcacactctctggcatggcttcaatatgccrcgcctggtgcagtgtgccaacgtggccccctgccccaacatcgtggactgctacattgcccgacctaccgagaagaaaatcttcacctacttcatggtgg

SEQ ID NO: 2700 - DNA, 201 bp, Homo sapiens
aggaacacaggctcatctcccgcactaaccaacccctgggatggctcacagccctgctcccagtgctgtgtcatgacctgaaatttaggggacaccaacayccaaggccagacccaaatggaaagcaaaagaggatgcaaggctatattaacccagtggaacacttagtgactatcacagccgaggccgggagtcagaaat

SEQ ID NO: 2701 - DNA, 201 bp, Homo sapiens
agcttgggaggaataacagttctgaactcagagggtcgttgtgagtattgaacaagtcagaactcagaacactgcctggtacatagtaaatgctcaataargtcacctattcattcatacgatggtttttcctctaattctctcaggtaggcacggcccccaccaggcgccatggactggaagacactccaggccctactg

SEQ ID NO: 2702 - DNA, 201 bp, Homo sapiens
gccatctcaacacacatccccaccctgtgtacacacaatctctgttattcatactctcactccttatgcgcactctcaacagggcatgtagtctgcactcragcatgccatcccagcctcaccctgcattttattcggctcatcccattttccctgaacattttcgctgaactagggccctggcaggatgctgggactgtg

SEQ ID NO: 2703 - DNA, 201 bp, Homo sapiens
acctattcattcatacgatggtttttcctctaattctctcaggtaggcacggcccccaccaggcgccatggactggaagacactccaggccctactgagcrgtgtgaacaagtactccacagcgttcgggcgcatctggctgtccgtggtgttcgtcttccgggtgctggtatacgtggtggctgcagagcgcgtgtgggg

SEQ ID NO: 2704 - DNA, 201 bp, Homo sapiens
ggttctcccacactcccacccactgacagaaccctgaaggtagggaaaggtaagccctcagaaagggaaagagttccatggctcggggtggagctagggtsggggctgtggctgtggctgcagctggggcttgagctggagctcggttaggctggggctgatgttgacagccgggagctgggtttgtaccagaggaggagg

SEQ ID NO: 2705 - DNA, 201 bp, Homo sapiens
ctactgagcggtgtgaacaagtactccacagcgttcgggcgcatctggctgtccgtggtgttcgtcttccgggtgctggtatacgtggtggctgcagagcscgtgtggggggatgagcagaaggactttgactgcaacaccaagcagcccggctgcaccaacgtctgctacgacaactacttccccatctccaacatccgc

SEQ ID NO: 2706 - DNA, 201 bp, Homo sapiens
caactacttccccatctccaacatccgcctctgggccctgcagctcatcttcgtcacatgcccctcgctgctggtcatcctgcacgtggcctaccgtgagragcgggagcgccggcaccgccagaaacacggggaccagtgcgccaagctgtacgacaacgcaggcaagaagcacggaggcctgtggtggacctacctgtt

SEQ ID NO: 2707 - DNA, 201 bp, Homo sapiens
gcccctcgctgctggtcatcctgcacgtggcctaccgtgaggagcgggagcgccggcaccgccagaaacacggggaccagtgcgccaagctgtacgacaaygcaggcaagaagcacggaggcctgtggtggacctacctgttcagcctcatcttcaagctcatcattgagttcctcttcctctacctgctgcacactctct

SEQ ID NO: 2708 - DNA, 201 bp, Homo sapiens
gcacactctctggcatggcttcaatatgccgcgcctggtgcagtgtgccaacgtggccccctgccccaacatcgtggactgctacattgcccgacctaccragaagaaaatcttcacctacttcatggtgggcgcctccgccgtctgcatcgtactcaccatctgtgagctctgctacctcatctgccacagggtcctgcg

SEQ ID NO: 2709 - DNA, 201 bp, Homo sapiens
atctctactccctccagaggagccgcccagattcctgcagtggagaggaggtcttccagcagcagcaggtctggagggctgagaatgaacctgactagagsttctggagatacccagaggtcccccaggtcatcacttggctcagtggaagccctctttccccaaatcctactccctcagcctcaggcagtggtgctccca

SEQ ID NO: 2710 - DNA, 201 bp, Homo sapiens
aggcgccatggactggaagacactccaggccctactgagcggtgtgaacaagtactccacagcgttcgggcgcatctggctgtccgtggtgttcgtcttcygggtgctggtatacgtggtggctgcagagcgcgtgtggggggatgagcagaaggactttgactgcaacaccaagcagcccggctgcaccaacgtctgcta

SEQ ID NO: 2711 - DNA, 201 bp, Homo sapiens
gaaacacggggaccagtgcgccaagctgtacgacaacgcaggcaagaagcacggaggcctgtggtggacctacctgttcagcctcatcttcaagctcatcrttgagttcctcttcctctacctgctgcacactctctggcatggcttcaatatgccgcgcctggtgcagtgtgccaacgtggccccctgccccaacatcgt

SEQ ID NO: 2712 - DNA, 201 bp, Homo sapiens
cacagaggtctggaggccacacaaaaagtgatgctcgccctgggctagcctcagcagacctaaggcatctctactccctccagaggagccgcccagattcytgcagtggagaggaggtcttccagcagcagcaggtctggagggctgagaatgaacctgactagaggttctggagatacccagaggtcccccaggtcatca

SEQ ID NO: 2713 - DNA, 201 bp, Homo sapiens
ccggcaccgccagaaacacggggaccagtgcgccaagctgtacgacaacgcaggcaagaagcacggaggcctgtggtggacctacctgttcagcctcatcytcaagctcatcattgagttcctcttcctctacctgctgcacactctctggcatggcttcaatatgccgcgcctggtgcagtgtgccaacgtggccccctg

SEQ ID NO: 2714 - DNA, 201 bp, Homo sapiens
cctattcattcatacgatggtttttcctctaattctctcaggtaggcacggcccccaccaggcgccatggactggaagacactccaggccctactgagcgrtgtgaacaagtactccacagcgttcgggcgcatctggctgtccgtggtgttcgtcttccgggtgctggtatacgtggtggctgcagagcgcgtgtggggg

SEQ ID NO: 2715 - DNA, 201 bp, Homo sapiens
atggactggaagacactccaggccctactgagcggtgtgaacaagtactccacagcgttcgggcgcatctggctgtccgtggtgttcgtcttccgggtgcyggtatacgtggtggctgcagagcgcgtgtggggggatgagcagaaggactttgactgcaacaccaagcagcccggctgcaccaacgtctgctacgacaac

SEQ ID NO: 2716 - DNA, 201 bp, Homo sapiens
cgtcttccgggtgctggtatacgtggtggctgcagagcgcgtgtggggggatgagcagaaggactttgactgcaacaccaagcagcccggctgcaccaacrtctgctacgacaactacttccccatctccaacatccgcctctgggccctgcagctcatcttcgtcacatgcccctcgctgctggtcatcctgcacgtggc

SEQ ID NO: 2717 - DNA, 201 bp, Homo sapiens
ggctggggtggaacctactgatacatatgttgggattctagctgtggccacaagagtgcgctgtgctccctctgcaacggtgcttccagccttcgtaattrgacttcaccctgagtacacacacaatcactgccactctcactatagacaaaccacactccctcctctgtcacccagtcactgccatctcaacacacatcc

SEQ ID NO: 2718 - DNA, 201 bp, Homo sapiens
ctgcaacaccaagcagcccggctgcaccaacgtctgctacgacaactacttccccatctccaacatccgcctctgggccctgcagctcatcttcgtcacawgcccctcgctgctggtcatcctgcacgtggcctaccgtgaggagcgggagcgccggcaccgccagaaacacggggaccagtgcgccaagctgtacgacaa

SEQ ID NO: 2719 - DNA, 201 bp, Homo sapiens
tccagacccaggcaataacaagctgcaggcttcagcacccaacctgacccccatctgaccacagggcaggggtggggcaacatgcgggctgccaatgggamatgcagggcggtgtggcaggtggagaggtcctacaggggctgagtgaccccactctgagttcactaagttatgcaactttcgttttggcagatatttttt

SEQ ID NO: 2720 - DNA, 201 bp, Homo sapiens
cgtggccccctgccccaacatcgtggactgctacattgcccgacctaccgagaagaaaatcttcacctacttcatggtgggcgcctccgccgtctgcatcrtactcaccatctgtgagctctgctacctcatctgccacagggtcctgcgaggcctgcacaaggacaagcctcgagggggttgcagcccctcgtcctccgc

SEQ ID NO: 2721 - DNA, 201 bp, Homo sapiens
ttggaaaatgctgccagtccgcaggaaaaagttgttactgctgctgtctgtgaccaagaggacactttatttcttgaaacaactgggggcaaactggctcycagataaggcttcagtccctactcatgtgaggaaaccagccctgcacctgagagtttattcagtgacgataatactcacaagaccctttttggatttgtg

SEQ ID NO: 2722 - DNA, 201 bp, Homo sapiens
aaggcttcagtccctactcatgtgaggaaaccagccctgcacctgagagtttattcagtgacgataatactcacaagaccctttttggatttgtggcccamcccacaagttatagttccttctctgaatatttcatccagattgtgaagagcagcttctggcagccacagttgtactatgtgacccctacttcccatgccc

SEQ ID NO: 2723 - DNA, 201 bp, Homo sapiens
caagaggacactttatttcttgaaacaactgggggcaaactggctcccagataaggcttcagtccctactcatgtgaggaaaccagccctgcacctgagartttattcagtgacgataatactcacaagaccctttttggatttgtggcccaacccacaagttatagttccttctctgaatatttcatccagattgtgaag

SEQ ID NO: 2724 - DNA, 201 bp, Homo sapiens
gaagagtgtttgggactgaaaaatccttgtctggatctagtcctcagccactcagaagctggcatgccatgactcaaagagccgcccgtctggaatgaagrcagtgacccgtaactcccacctgaagagcaggtgcttggaaaatgctgccagtccgcaggaaaaagttgttactgctgctgtctgtgaccaagaggacac

SEQ ID NO: 2725 - DNA, 201 bp, Homo sapiens
tgtgaactactaaaagtaaatctgcatggacttcttgcctggtgagttacacagaaaatgaaagtgattatcagtggctgtggcaagatgaaaggaaccaygccaggacttctgagggaaggaagagtgtttgggactgaaaaatccttgtctggatctagtcctcagccactcagaagctggcatgccatgactcaaaga

SEQ ID NO: 2726 - DNA, 201 bp, Homo sapiens
aatatcatactttgaatgataactctatatctatctataatatactatggtttaatgtttggaaatcaaacgcagtatttatttgtcatgtgaactactamaagtaaatctgcatggacttcttgcctggtgagttacacagaaaatgaaagtgattatcagtggctgtggcaagatgaaaggaaccatgccaggacttct

SEQ ID NO: 2727 - DNA, 201 bp, Homo sapiens
aggacttctgagggaaggaagagtgtttgggactgaaaaatccttgtctggatctagtcctcagccactcagaagctggcatgccatgactcaaagagccrcccgtctggaatgaagacagtgacccgtaactcccacctgaagagcaggtgcttggaaaatgctgccagtccgcaggaaaaagttgttactgctgctgtc

SEQ ID NO: 2728 - DNA, 201 bp, Homo sapiens
caggacttctgagggaaggaagagtgtttgggactgaaaaatccttgtctggatctagtcctcagccactcagaagctggcatgccatgactcaaagagcygcccgtctggaatgaagacagtgacccgtaactcccacctgaagagcaggtgcttggaaaatgctgccagtccgcaggaaaaagttgttactgctgctgt

SEQ ID NO: 2729 - DNA, 201 bp, Homo sapiens
tcttaccactgactgaagcatgcctgcagtctcctcctctgttgaatgaaggataatcataaggtgtttgttaggagcgctagaccacctggaaaactttyttagctgtggagcagtgcgcagtgaccagttctctgctgtgagaggccgtttccattctttcctgctgaatatttttcctgttagtgtttatactgagct

SEQ ID NO: 2730 - DNA, 201 bp, Homo sapiens
tgaacatgacatatttgtagttaaccaaacacaccttcttagtccagtttagtactttttcttttcgtgtattcaaggttaaacacccaaacatttaaggrtatgttgaaactacaccaatagagcatttcatatcataattaaaatgaatgttaggcttcttgtggccagttaatagttgatgagattggtgacattatt

SEQ ID NO: 2731 - DNA, 201 bp, Homo sapiens
gaaagtacaaagataccacagagctatgaagatcagacagtaagtcaaccagaggatcagtattcagagctgtttcaaatccaggatataccaacggatgrtattgatttagagcctgaaaagagagaaaacaaatcaaaagtaataaatctttctcaatatggaccagcttactttggccaagaacatgcaagggtactt

SEQ ID NO: 2732 - DNA, 201 bp, Homo sapiens
gcattgaatggtcaaatgtaacttcatcacagtatgactggagtcagccaatagtaaaagttgatgaggaacctcttaatcttgattggggtgaagatcaygacagtgccttagatgaagaggaagacgatgctgttggtttagtgatgaaaagtacagatgccagggaaaaagataaacaatcagatcagaaggcctcag

SEQ ID NO: 2733 - DNA, 201 bp, Homo sapiens
atatgtggcaccttcatcttaaatctgtacaagcatgtttagctaaagcttcagaaggggcttcctctgagagtctactttcagtccctggacagaagaaygtagattcttctccagaaacctctcctagtgtgagccccatgccacattcttcatcaattgccaatcttcaaactgccagtaaacttattctgagttcta

SEQ ID NO: 2734 - DNA, 201 bp, Homo sapiens
ctccggagatgcatctgcatcaggtcctcaccggagctgtcaaccctggagacaactgctactccgtgggcagcgtcggggatgtccccttcacggcatayggatcaggctgtgatattgttattttggcaaatgactttgaatgtgtacagatcattcctggtgctaagcatggaaacatccaagtcagctgtgtggagt

SEQ ID NO: 2735 - DNA, 201 bp, Homo sapiens
aaggttgccaaagcttcttttcaaaggaacaatgatgccttagatgctgcactattctacctttcaatgaagaagaaagcagtagtgtggggtctgtttargtcacagcatgatgaaaaaatgacaacatttttcagccacaactttaatgaagatagatggcgaaaagctgctttgaaaaatgctttttccttacttgga

SEQ ID NO: 2736 - DNA, 201 bp, Homo sapiens
gggcttttcattctgaggctgaagaagaactgattaatatgattccagcaattcagagaggggacccccagtggtctgaattaagagctatgggcataggrtggtgggtgaggaacattaacacgcttcgaagatgcattgaaaaggttgccaaagcttcttttcaaaggaacaatgatgccttagatgctgcactattct

SEQ ID NO: 2737 - DNA, 201 bp, Homo sapiens
agcaattcagagaggggacccccagtggtctgaattaagagctatgggcataggatggtgggtgaggaacattaacacgcttcgaagatgcattgaaaagrttgccaaagcttcttttcaaaggaacaatgatgccttagatgctgcactattctacctttcaatgaagaagaaagcagtagtgtggggtctgtttaggtc

SEQ ID NO: 2738 - DNA, 201 bp, Homo sapiens
catttcagttaaaaggcacactacagtcatcactaggcaattctgctttctaagcagttgtattgaaaacagagaatctctgtgtagaatttgaatatgayccaagctgagtattatctaaacaggttggtggaatgaatgcgcatgtaccttattatgctgacatactaaaaaaaataaaacctagtattgtatgaagga

SEQ ID NO: 2739 - DNA, 201 bp, Homo sapiens
gaggagttaagccagagcctccgcggggcgggtttccgagggaggcacagagggaaacggctctcgcagcccgaggagggtcaggcgcggagcttgtcgcmcctcccgcgcattctgtccagcccgggctccggagatgcatctgcatcaggtcctcaccggagctgtcaaccctggagacaactgctactccgtgggcag

SEQ ID NO: 2740 - DNA, 201 bp, Homo sapiens
gtccagcccgggctccggagatgcatctgcatcaggtcctcaccggagctgtcaaccctggagacaactgctactccgtgggcagcgtcggggatgtcccyttcacggcatatggatcaggctgtgatattgttattttggcaaatgactttgaatgtgtacagatcattcctggtgctaagcatggaaacatccaagtca

SEQ ID NO: 2741 - DNA, 201 bp, Homo sapiens
ctcgcagcccgaggagggtcaggcgcggagcttgtcgcacctcccgcgcattctgtccagcccgggctccggagatgcatctgcatcaggtcctcaccggrgctgtcaaccctggagacaactgctactccgtgggcagcgtcggggatgtccccttcacggcatatggatcaggctgtgatattgttattttggcaaatg

SEQ ID NO: 2742 - DNA, 201 bp, Homo sapiens
ttctgtgacatacaacttagcatgggatcctcaagataatagattgttgacagcaactgattctattcagttgtgggctcctccaggagatgatattctgsaagaggaggaagaaattgataatacagttcctcctgttttaaatgattggaagtgtgtctggcagtgcaaaacctcagtatctgtacatttgatggaatg

SEQ ID NO: 2743 - DNA, 201 bp, Homo sapiens
tgtggggtctgtttaggtcacagcatgatgaaaaaatgacaacatttttcagccacaactttaatgaagatagatggcgaaaagctgctttgaaaaatgckttttccttacttggaaaacaacgctttgaacaatcggctgcttttttcttgctagctggttcattgaaagatgccatagaggtatgtcttgaaaaaatgg

SEQ ID NO: 2744 - DNA, 201 bp, Homo sapiens
acgaggcggagggaaggcgaaaggggggcgaggagttaagccagagcctccgcggggcgggtttccgagggaggcacagagggaaacggctctcgcagccsgaggagggtcaggcgcggagcttgtcgcacctcccgcgcattctgtccagcccgggctccggagatgcatctgcatcaggtcctcaccggagctgtcaac

SEQ ID NO: 2745 - DNA, 201 bp, Homo sapiens
gaacatgaagatggagaaagagaaggaagtcctagaacttactcacgacttagtgtaccaatgccactgcctacggttctgcttgatcggaagattgaaaygctgctaactgaatggaataagaatcctgatatgctttttacaatacaccctgtagatggtacctttctagtgtggcatgtgaagtatttggatgaatat

SEQ ID NO: 2746 - DNA, 201 bp, Homo sapiens
ccgtgggcagcgtcggggatgtccccttcacggcatatggatcaggctgtgatattgttattttggcaaatgactttgaatgtgtacagatcattcctggkgctaagcatggaaacatccaagtcagctgtgtggagtgttctaaccaacaaggaagaattgcagcttcatatggtaatgctgtttgtatatttgagccct

SEQ ID NO: 2747 - DNA, 201 bp, Homo sapiens
gtaggaaaagatggtactcgagattatactgagatagattctatccctccactaccactatatgcattacttgctgcagatcaagatacatcctacagaayttcagaagaaagtacaaagataccacagagctatgaagatcagacagtaagtcaaccagaggatcagtattcagagctgtttcaaatccaggatatacca

SEQ ID NO: 2748 - DNA, 201 bp, Homo sapiens
ttgggtaagagatgggatattggtggtaggaatggattgtgaaatgcatgtatatgcacagtggaagcatgctgtcaaatttggagacactgaagctgatrgttctaatgcagaagaggcagcaatgcaagatcattcgacctttaaatctaatatgctggcaagaaaaagtgttgttgaaggaacagctatttctgatga

SEQ ID NO: 2749 - DNA, 201 bp, Homo sapiens
ggtaagagatgggatattggtggtaggaatggattgtgaaatgcatgtatatgcacagtggaagcatgctgtcaaatttggagacactgaagctgatagtyctaatgcagaagaggcagcaatgcaagatcattcgacctttaaatctaatatgctggcaagaaaaagtgttgttgaaggaacagctatttctgatgatgt

SEQ ID NO: 2750 - DNA, 201 bp, Homo sapiens
tccccttcacggcatatggatcaggctgtgatattgttattttggcaaatgactttgaatgtgtacagatcattcctggtgctaagcatggaaacatccargtcagctgtgtggagtgttctaaccaacaaggaagaattgcagcttcatatggtaatgctgtttgtatatttgagcccttgggcataaattctcataaaa

SEQ ID NO: 2751 - DNA, 201 bp, Homo sapiens; identical to SEQ ID NO: 2729

SEQ ID NO: 2752 - DNA, 201 bp, Homo sapiens; identical to SEQ ID NO: 2730

SEQ ID NO: 2753 - DNA, 201 bp, Homo sapiens; identical to SEQ ID NO: 2731

SEQ ID NO: 2754 - DNA, 201 bp, Homo sapiens; identical to SEQ ID NO: 2732

SEQ ID NO: 2755 - DNA, 201 bp, Homo sapiens; identical to SEQ ID NO: 2733

SEQ ID NO: 2756 - DNA, 201 bp, Homo sapiens; identical to SEQ ID NO: 2734

SEQ ID NO: 2757 - DNA, 201 bp, Homo sapiens; identical to SEQ ID NO: 2735

SEQ ID NO: 2758 - DNA, 201 bp, Homo sapiens; identical to SEQ ID NO: 2736

SEQ ID NO: 2759 - DNA, 201 bp, Homo sapiens; identical to SEQ ID NO: 2737

SEQ ID NO: 2760 - DNA, 201 bp, Homo sapiens; identical to SEQ ID NO: 2738

SEQ ID NO: 2761 - DNA, 201 bp, Homo sapiens; identical to SEQ ID NO: 2739

SEQ ID NO: 2762 - DNA, 201 bp, Homo sapiens; identical to SEQ ID NO: 2740

SEQ ID NO: 2763 - DNA, 201 bp, Homo sapiens; identical to SEQ ID NO: 2741

SEQ ID NO: 2764 - DNA, 201 bp, Homo sapiens; identical to SEQ ID NO: 2742

SEQ ID NO: 2765 - DNA, 201 bp, Homo sapiens; identical to SEQ ID NO: 2743

SEQ ID NO: 2766 - DNA, 201 bp, Homo sapiens; identical to SEQ ID NO: 2744

SEQ ID NO: 2767 - DNA, 201 bp, Homo sapiens; identical to SEQ ID NO: 2745

SEQ ID NO: 2768 - DNA, 201 bp, Homo sapiens; identical to SEQ ID NO: 2746

SEQ ID NO: 2769 - DNA, 201 bp, Homo sapiens; identical to SEQ ID NO: 2747

SEQ ID NO: 2770 - DNA, 201 bp, Homo sapiens; identical to SEQ ID NO: 2748

SEQ ID NO: 2771 - DNA, 201 bp, Homo sapiens; identical to SEQ ID NO: 2749

SEQ ID NO: 2772 - DNA, 201 bp, Homo sapiens; identical to SEQ ID NO: 2750

SEQ ID NO: 2773 - DNA, 201 bp, Homo sapiens; identical to SEQ ID NO: 2744

SEQ ID NO: 2774 - DNA, 201 bp, Homo sapiens; identical to SEQ ID NO: 2746

SEQ ID NO: 2775 - DNA, 201 bp, Homo sapiens; identical to SEQ ID NO: 2739

SEQ ID NO: 2776 - DNA, 201 bp, Homo sapiens; identical to SEQ ID NO: 2750

SEQ ID NO: 2777 - DNA, 201 bp, Homo sapiens; identical to SEQ ID NO: 2740

SEQ ID NO: 2778 - DNA, 201 bp, Homo sapiens; identical to SEQ ID NO: 2734

SEQ ID NO: 2779 - DNA, 201 bp, Homo sapiens; identical to SEQ ID NO: 2741

SEQ ID NO: 2780 - DNA, 118 bp, Homo sapiens
tgaacatgacatatttgtagttaaccaaacacaccttcttagtccagtttagtactttttcttttcgtgtattcaaggttaaacacccaaacatttaaggrtatgttgaaactacacc

SEQ ID NO: 2781 - DNA, 201 bp, Homo sapiens; identical to SEQ ID NO: 2731

SEQ ID NO: 2782 - DNA, 201 bp, Homo sapiens; identical to SEQ ID NO: 2732

SEQ ID NO: 2783 - DNA, 201 bp, Homo sapiens; identical to SEQ ID NO: 2733

SEQ ID NO: 2784 - DNA, 201 bp, Homo sapiens; identical to SEQ ID NO: 2734

SEQ ID NO: 2785 - DNA, 201 bp, Homo sapiens; identical to SEQ ID NO: 2735

SEQ ID NO: 2786 - DNA, 201 bp, Homo sapiens; identical to SEQ ID NO: 2736

SEQ ID NO: 2787 - DNA, 201 bp, Homo sapiens; identical to SEQ ID NO: 2737

SEQ ID NO: 2788 - DNA, 201 bp, Homo sapiens; identical to SEQ ID NO: 2738

SEQ ID NO: 2789 - DNA, 201 bp, Homo sapiens; identical to SEQ ID NO: 2739

SEQ ID NO: 2790 - DNA, 201 bp, Homo sapiens; identical to SEQ ID NO: 2740

SEQ ID NO: 2791 - DNA, 201 bp, Homo sapiens; identical to SEQ ID NO: 2741

SEQ ID NO: 2792 - DNA, 201 bp, Homo sapiens; identical to SEQ ID NO: 2742

SEQ ID NO: 2793 - DNA, 201 bp, Homo sapiens; identical to SEQ ID NO: 2743

SEQ ID NO: 2794 - DNA, 201 bp, Homo sapiens; identical to SEQ ID NO: 2744

SEQ ID NO: 2795 - DNA, 201 bp, Homo sapiens; identical to SEQ ID NO: 2745

SEQ ID NO: 2796 - DNA, 201 bp, Homo sapiens; identical to SEQ ID NO: 2746

SEQ ID NO: 2797 - DNA, 201 bp, Homo sapiens; identical to SEQ ID NO: 2747

SEQ ID NO: 2798 - DNA, 201 bp, Homo sapiens; identical to SEQ ID NO: 2748

SEQ ID NO: 2799 - DNA, 201 bp, Homo sapiens; identical to SEQ ID NO: 2750

SEQ ID NO: 2800 - DNA, 201 bp, Homo sapiens; identical to SEQ ID NO: 2749

SEQ ID NO: 2801 - DNA, 118 bp, Homo sapiens; identical to SEQ ID NO: 2780

SEQ ID NO: 2802 - DNA, 201 bp, Homo sapiens; identical to SEQ ID NO: 2731

SEQ ID NO: 2803 - DNA, 201 bp, Homo sapiens; identical to SEQ ID NO: 2732

SEQ ID NO: 2804 - DNA, 201 bp, Homo sapiens; identical to SEQ ID NO: 2733

SEQ ID NO: 2805 - DNA, 201 bp, Homo sapiens; identical to SEQ ID NO: 2734

SEQ ID NO: 2806 - DNA, 201 bp, Homo sapiens; identical to SEQ ID NO: 2735

SEQ ID NO: 2807 - DNA, 201 bp, Homo sapiens; identical to SEQ ID NO: 2736

SEQ ID NO: 2808 - DNA, 201 bp, Homo sapiens; identical to SEQ ID NO: 2737

SEQ ID NO: 2809 - DNA, 201 bp, Homo sapiens; identical to SEQ ID NO: 2738

SEQ ID NO: 2810 - DNA, 201 bp, Homo sapiens; identical to SEQ ID NO: 2739

SEQ ID NO: 2811 - DNA, 201 bp, Homo sapiens; identical to SEQ ID NO: 2740

SEQ ID NO: 2812 - DNA, 201 bp, Homo sapiens; identical to SEQ ID NO: 2741

SEQ ID NO: 2813 - DNA, 201 bp, Homo sapiens; identical to SEQ ID NO: 2742

SEQ ID NO: 2814 - DNA, 201 bp, Homo sapiens; identical to SEQ ID NO: 2743

SEQ ID NO: 2815 - DNA, 201 bp, Homo sapiens; identical to SEQ ID NO: 2744

SEQ ID NO: 2816 - DNA, 201 bp, Homo sapiens; identical to SEQ ID NO: 2745

SEQ ID NO: 2817 - DNA, 201 bp, Homo sapiens; identical to SEQ ID NO: 2746

SEQ ID NO: 2818 - DNA, 201 bp, Homo sapiens; identical to SEQ ID NO: 2747

SEQ ID NO: 2819 - DNA, 201 bp, Homo sapiens; identical to SEQ ID NO: 2748

SEQ ID NO: 2820 - DNA, 201 bp, Homo sapiens; identical to SEQ ID NO: 2750

SEQ ID NO: 2821 - DNA, 201 bp, Homo sapiens; identical to SEQ ID NO: 2749

SEQ ID NO: 2822 - DNA, 201 bp, Homo sapiens
gaaatattagtaagttggtttttagctctgcattatctagccatatttgtgtctggaacaggattaagaattatgatttttagctggatagtttctaatcrcttcaatctctggcttgctacaatcttcagcatcttttatttgctcaaaatagcgagtttctctagccctgcttttctctatttgaagtggagagtaaac

SEQ ID NO: 2823 - DNA, 201 bp, Homo sapiens
gtccatacaaatgccttgaaaattgtgatctcattccttttattctatgctagtttctttctatgtgttctcatatcatggatttctgagctgtatcagarcacagtgatctacatgctttgtgagacgattggagtcttctctccttcaagccactcctttcttctgattctaggaaacgctaagttaagacaggccttt

SEQ ID NO: 2824 - DNA, 201 bp, Homo sapiens
ccctggctggttgtctttggaacaaactgcttctgtgcagatggaatgaccaacacatttcgtccttaagagagcagtggttcctcaggttctgaggagargaaggtgtccaggcagcaccatctctgtgcgaatccccagggtaaaggcgtgggtcattgggtttgctccccttgctgctgctccatccctgcaggaggc

SEQ ID NO: 2825 - DNA, 201 bp, Homo sapiens
gtcacagggatcctggcacagagaagagttacgagcagcagggtgcagggcttggaaggaatgtgggcaaggttttgaacttgattgttcttgaagctatyagaccacatcgaggctcagcagtcatccgtgggcatttggtttcaacaaagaaacctaacatcctactctggaaactgatctcggagttaaggcgaattg

SEQ ID NO: 2826 - DNA, 201 bp, Homo sapiens
gccaatggttttcatgatgattacagcatacacagtgatcacataaacgatgacagctatggggcacacaggccatttgcttacatgcctcgtatcatgaytgattactgctttgttagaacacagaagagaccctattttatttaaggcagaaccccgaagatacgtatttccaatacagaaaagaatttttaataaaaa

SEQ ID NO: 2827 - DNA, 201 bp, Homo sapiens
gccctctcaacttctccctcacctccttccctaggggtagacagagatgtaccaaaccttccggctggaaagcccagtggccggcgccgaggctcgtggcrtcacgccccccccgccagggctgtacctccgtctccctggtcctgctgctcacaggacagacggctcgctcccctcttccagcagctgctcttacaggca

SEQ ID NO: 2828 - DNA, 201 bp, Homo sapiens
tgatccattttttttttttttttttaggacacctgtttactagctagctttacaatatgccaaaaaaggatttctccctgaccccatccgtggttcaccckcttttccccccatgctttttgccctagtttataacaaaggaatgatgatgatttaaaaagtagttctgtatcttcagtatcttggtcttccagaaccctc

SEQ ID NO: 2829 - DNA, 201 bp, Homo sapiens
gacccatctctcccaggaccccggggatcttaaggtcattgagaaatactgttggatcagggttttgttcttccacactgtaggtgaccccttggaataayggcctctcctctcgtgcacatacctaccggtttccacaactggatttctacagatcattcagctggttataagggttttgtttaaactgtccgagttact

SEQ ID NO: 2830 - DNA, 201 bp, Homo sapiens
ccctgtgaggccaacgagggcaccagagcacacctgggggagccaccaggctgtccctggctggttgtctttggaacaaactgcttctgtgcagatggaatgaccaacacatttcgtccttaagagagcagtggttcctcaggttctgaggagaggaaggtgtccaggcagcaccatctctgtgcgaatccccagggtaaa

SEQ ID NO: 2831 - DNA, 201 bp, Homo sapiens
ccagggtaaaggcgtgggtcattgggtttgctccccttgctgctgctccatccctgcaggaggctcgcgctgaggcaggaccgtgcggccatggctgctgyattcattgagcacaaaggtgcagctgcagcagcagctggagagcaagagtcacccagcctgtgcgccagaatgcagaggctcctgacctcacagccagtc

SEQ ID NO: 2832 - DNA, 201 bp, Homo sapiens
agctgcagcagcagctggagagcaagagtcacccagcctgtgcgccagaatgcagaggctcctgacctcacagccagtccctgatagaacacacgcaggarcagagtcccctccccctccaggctgccctctcaacttctccctcacctccttccctaggggtagacagagatgtaccaaaccttccggctggaaagccca

SEQ ID NO: 2833 - DNA, 201 bp, Homo sapiens
ttttaagtagaaaacactaacagtgtagtgcccatcatagcaaatgcttcagaaacacctcaataaaagagaaaacttggcttgtgtgatggtgcagtcaytttactggaccaacccacccaccttgactataccaaggcatcatctatccacagttctagcctaacttcatgctgatttctctgcctcttgatttttctc

SEQ ID NO: 2834 - DNA, 201 bp, Homo sapiens
gctgatttctctgcctcttgatttttctctgtgtgttccaaataatcttaagctgagttgtggcattttccatgcaacctccttctgccagcagctcacaytgcttgaagtcatatgaaccactgaggcacatcatggaattgatgtgagcattaagacgttctcccacacagcccttccctgaggcagcaggagctggtg

SEQ ID NO: 2835 - DNA, 201 bp, Homo sapiens
tggaacgagcctcctccttggaagatggaagaccgtgttcgtggccgacctggcctctcctggcctgtttcttaagatgcggagtcacatttcaatggtasgaaaagtggcttcgtaaaatagaagagcagtcactgtggaactaccaaatggcgagatgctcggtgcacattggggtgctttgggataaaagatttatga

SEQ ID NO: 2836 - DNA, 201 bp, Homo sapiens
taaaagatttatgagccaactattctctggcaccagattctaggccagtttgttccactgaagcttttcccacagcagtccacctctgcaggctggcagcygaatggcttgccagtggctctgtggcaagatcacactgagatcgatgggtgagaaggctaggatgcttgtctagtgttcttagctgtcacgttggctcct

SEQ ID NO: 2837 - DNA, 201 bp, Homo sapiens
accatctctgtgcgaatccccagggtaaaggcgtgggtcattgggtttgctccccttgctgctgctccatccctgcaggaggctcgcgctgaggcaggacygtgcggccatggctgctgcattcattgagcacaaaggtgcagctgcagcagcagctggagagcaagagtcacccagcctgtgcgccagaatgcagaggct

SEQ ID NO: 2838 - DNA, 201 bp, Homo sapiens
gtctagtgttcttagctgtcacgttggctccttccagggtggccagacggtgttggccactcccttctaaaacacaggcgccctcctggtgacagtgaccygccgtggtatgccttggcccattccagcagtcccagttatgcatttcaagtttggggtttgttcttttcgttaatgttcctctgtgttgtcagctgtctt

SEQ ID NO: 2839 - DNA, 201 bp, Homo sapiens
gaacttgatcaagacccagaccaccccaggtctccttcgtgggatgtcatgacgtttgacatacctttggaacgagcctcctccttggaagatggaagacygtgttcgtggccgacctggcctctcctggcctgtttcttaagatgcggagtcacatttcaatggtacgaaaagtggcttcgtaaaatagaagagcagtca

SEQ ID NO: 2840 - DNA, 201 bp, Homo sapiens
catttcgtccttaagagagcagtggttcctcaggttctgaggagaggaaggtgtccaggcagcaccatctctgtgcgaatccccagggtaaaggcgtgggkcattgggtttgctccccttgctgctgctccatccctgcaggaggctcgcgctgaggcaggaccgtgcggccatggctgctgcattcattgagcacaaagg

SEQ ID NO: 2841 - DNA, 201 bp, Homo sapiens
ggtatccctttgtctgggataaaaaaaatcaaaccagaaggcgggatggaatggatgcaccgcaaataatgcattttctgagttttcttgttaaaaaaaawtttttttaagtaagaaaaaaaaaggtaataacatggccaatttgttacataaaatgactttctgtgtataaattattcctaaaaaatcctgtttatataa

SEQ ID NO: 2842 - DNA, 201 bp, Homo sapiens
ctgaggagaggaaggtgtccaggcagcaccatctctgtgcgaatccccagggtaaaggcgtgggtcattgggtttgctccccttgctgctgctccatcccygcaggaggctcgcgctgaggcaggaccgtgcggccatggctgctgcattcattgagcacaaaggtgcagctgcagcagcagctggagagcaagagtcacc

SEQ ID NO: 2843 - DNA, 201 bp, Homo sapiens
cttgccagtggctctgtggcaagatcacactgagatcgatgggtgagaaggctaggatgcttgtctagtgttcttagctgtcacgttggctccttccaggktggccagacggtgttggccactcccttctaaaacacaggcgccctcctggtgacagtgacccgccgtggtatgccttggcccattccagcagtcccagtt

SEQ ID NO: 2844 - DNA, 166 bp, Homo sapiens
ctgtattccggggtcaaagcaacactaactcacctctctgctcatttcagacagcttgcctttttytgagatgtcctgttttgtgttgctttttttgttttgttttctatcttggtttccaccaaggtgttagatttctcctcctcctagccaggtggccctgtga

SEQ ID NO: 2845 - DNA, 201 bp, Homo sapiens
tttaaacagcctgctctacttaatactgcctgaaagcaagacagaggtattaacgcaacaaagaaagaggcttttcaagcacaggaagaaaccagaacaawtgtacaaataggtttaactggtgagagctgaaggggctccagatattttccaaatacttggcatgcaaaaatcaccacaagtcagtggttctgaaagctt

SEQ ID NO: 2846 - DNA, 201 bp, Homo sapiens
tcctggatttcctggcaaagcccaggccttctcacacgcactcagggtgatctgagcagaccacaggctgttcatcccattgggttaaaaagtacttggaracttagttgcagtaaggtcttaggttttgttggggttttttttgtgggaaagtgaaggcatctgcacctgaaatgaaataccagaaagcctccacagcaa

SEQ ID NO: 2847 - DNA, 201 bp, Homo sapiens
tccttccctaaccactttatttccttctgccctatcactgaggtgctttgccagcctcctgtcctacatccgttatccctcagtaagctctctggaacttyccaattgcagccacctcctaatgtccacagcctcctcttctagatctagtttcgtaggcagtccctaagggtagggcccatcctaaaaagttcgactgct

SEQ ID NO: 2848 - DNA, 201 bp, Homo sapiens
aggaaatggaagtacagggcagacaggtgacgtggcaaccgtccctaggaaaggcactgctggacccagctgtccctgtccctcaccagcctcacatgccsaagtcccatgtacccctggggctgccatgctggctgctgagccatgggcgctggtttggaggtgaacttcttcgaggaaagcagcttcttatcccccaga

SEQ ID NO: 2849 - DNA, 201 bp, Homo sapiens
acacagcccggccctgccttcctggatttcctggcaaagcccaggccttctcacacgcactcagggtgatctgagcagaccacaggctgttcatcccattrggttaaaaagtacttggagacttagttgcagtaaggtcttaggttttgttggggttttttttgtgggaaagtgaaggcatctgcacctgaaatgaaatac

SEQ ID NO: 2850 - DNA, 201 bp, Homo sapiens
caacacagcccggccctgccttcctggatttcctggcaaagcccaggccttctcacacgcactcagggtgatctgagcagaccacaggctgttcatcccawtgggttaaaaagtacttggagacttagttgcagtaaggtcttaggttttgttggggttttttttgtgggaaagtgaaggcatctgcacctgaaatgaaat

SEQ ID NO: 2851 - DNA, 201 bp, Homo sapiens
atctgactagtttccatttgtctctgcattacaactaatacctctgggaggtgggggtgggggtgatcctaattcaaacagtaaggctgcccaggaagtayttctaataatatcaaccttcgtctttccttttttgtactgtaggctctttgtctcctgatcttcttttattttgttccccctttttactactaagcccaa

SEQ ID NO: 2852 - DNA, 201 bp, Homo sapiens
gacccagctgtccctgtccctcaccagcctcacatgcccaagtcccatgtacccctggggctgccatgctggctgctgagccatgggcgctggtttggagrtgaacttcttcgaggaaagcagcttcttatcccccagaagttctgcagatcatctgtgcactttggtttttacttaaaatgtgatttaaacagcctgctc

SEQ ID NO: 2853 - DNA, 201 bp, Homo sapiens
tcagtactcctcagtagcaatgacagcaacaatgacacagtaaacatctgcatttcataatcctggtacaactggctcaccgaagactgccaggatacgcyactctctgctcaaggggaaaatgtatcttccgaacaataaatccttcactaagcagatgcagtgcttgcccttggggtgacagcatacagtggaggatac

SEQ ID NO: 2854 - DNA, 201 bp, Homo sapiens
atccttgccctgaagcttcaggatgaaggacaggaagctgaaggagaaaagcacactgaaaaagctctaatcagtatgtcttcacagacctatgtttttckatatgcagcccagttttatcaaagaagaggcaatatagataaagctcttctgctcttaaaaatggccttgcagggaacacccacttctgccttcctgcat

SEQ ID NO: 2855 - DNA, 168 bp, Homo sapiens
agctaagatccagccccagaatcctggaggagcaggagccccatcaccagcttcttgctcagggagacttccgccctcctcactgaggcaacatgaagccygaggcccagatgggggctgaacaggtagggcacatcagttaatgccagtgaggtcagcttctgccct

SEQ ID NO: 2856 - DNA, 201 bp, Homo sapiens
ctggtctgggtcatggggaagcgtccctcttatcgctggtctgtgttctcctggatttggtatctatgttggtacgactcctggccttttatctaaaggaytttggcttttgtaaatcacaagccaataatagacttttttctccccctctgttttttgctgtgtcatctctgccttgagactgccttgagacagtgcttg

SEQ ID NO: 2857 - DNA, 201 bp, Homo sapiens
ttctgaggatgaaaaacaggaactctgcatctcaggtggcttccagtctcgaaaacatggatatgaacccagaatgttttgtgtcaccacggtgtgcaaaragacacaaatccaaacagctggccgcccggatcctggaggcgcaccagaacgtggcccagatgcccctggtcgaagccaagctgcggttcatccaggcgt

SEQ ID NO: 2858 - DNA, 201 bp, Homo sapiens
gatttggtatctatgttggtacgactcctggccttttatctaaaggactttggcttttgtaaatcacaagccaataatagacttttttctccccctctgtyttttgctgtgtcatctctgccttgagactgccttgagacagtgcttgccttgagagagtgagccaattaacagctgcctgaattgtcattttccattttg

SEQ ID NO: 2859 - DNA, 201 bp, Homo sapiens
agtaaccctagaaggtggaaaagcggacagccttttggaggacattactgatatccctaaacttgcagataatctcaaattatttaggcccaagaagttaytaccaaaagctttcaaacaatattggtttatctttaaagacacatccatagcatactttaaaaataaggaacttgaacaaggagaaccactagaaaaact

SEQ ID NO: 2860 - DNA, 201 bp, Homo sapiens
ctgaggatgaaaaacaggaactctgcatctcaggtggcttccagtctcgaaaacatggatatgaacccagaatgttttgtgtcaccacggtgtgcaaaaaracacaaatccaaacagctggccgcccggatcctggaggcgcaccagaacgtggcccagatgcccctggtcgaagccaagctgcggttcatccaggcgtgg

SEQ ID NO: 2861 - DNA, 201 bp, Homo sapiens
cctcagccttctggagactgacaccaccctcttactcagagacgaatcgttttgtcgttgccttcacctccctgaccacaagtgctccggggctctttctragggaggcagctgttctagccgggaggctggagtctcctgggcctggacgcaccccggggtgtgagtgatgggtatgcctgaaaggaggggaagtggcgc

SEQ ID NO: 2862 - DNA, 201 bp, Homo sapiens
acaccaccctcttactcagagacgaatcgttttgtcgttgccttcacctccctgaccacaagtgctccggggctctttctaagggaggcagctgttctagscgggaggctggagtctcctgggcctggacgcaccccggggtgtgagtgatgggtatgcctgaaaggaggggaagtggcgcggctttaatcatctgggcta

SEQ ID NO: 2863 - DNA, 201 bp, Homo sapiens
tcatgttggaggagtgatgctcaagttagtagaacagatcaatatatcccaagactggtcagactttgctctttggtgggaacagaagcattgctggcttytgaaaacccactggaccctggacaaatatggggtccaggcagatgcaaagcttctcttcacccctcagcataaaatgctgcgccttcgtctgccgaattt

SEQ ID NO: 2864 - DNA, 201 bp, Homo sapiens
acaaagaacttggggtgtaaggataaggcaaaagctccaatcccatttttcagttctcctaggatgcacccctcagggagcctggccagagttccgaggcycgtgagcgtcagctgttgctttattttccatcaaagccctctgagaagtgagacctcagcaattccgggagccacatagagacagacttggcaagggacc

SEQ ID NO: 2865 - DNA, 201 bp, Homo sapiens
ttatcctcgtgctgatctgtctcattactaagtcaatggagaagacagaaaggtaaaaatcacgtgtagcaagaacaactcttatttcacaaactcaggtmtgaaacgaaacgcctgtccttcatggaactgcttttagctcctgtcttttcaaaatggcagagggagttcctacacacactttttccctggaggccaagg

SEQ ID NO: 2866 - DNA, 201 bp, Homo sapiens
acatctctgcctaatttaccaaagccagaccttcagttcaacatgcttccttagcttttcatagttgtctgacatttccatgaaaacaaaggaaccaactwtgttttaaccaaactttgtttggttacagttttcaggggagcgtttcttccatgacacacagcaacatcccaaagaaataaacaagtgtgacaaaaaaaa

SEQ ID NO: 2867 - DNA, 201 bp, Homo sapiens
tgcatctcaggtggcttccagtctcgaaaacatggatatgaacccagaatgttttgtgtcaccacggtgtgcaaaaagacacaaatccaaacagctggccrcccggatcctggaggcgcaccagaacgtggcccagatgcccctggtcgaagccaagctgcggttcatccaggcgtggcagtcactgcctgagtttggcct

SEQ ID NO: 2868 - DNA, 201 bp, Homo sapiens
atatgaacccagaatgttttgtgtcaccacggtgtgcaaaaagacacaaatccaaacagctggccgcccggatcctggaggcgcaccagaacgtggcccakatgcccctggtcgaagccaagctgcggttcatccaggcgtggcagtcactgcctgagtttggcctcacctactaccttgtcagatttaaaggaagcaaaa

SEQ ID NO: 2869 - DNA, 201 bp, Homo sapiens
gcttttcatagttgtctgacatttccatgaaaacaaaggaaccaactttgttttaaccaaactttgtttggttacagttttcaggggagcgtttcttccaygacacacagcaacatcccaaagaaataaacaagtgtgacaaaaaaaaaaaaaaacaaacctaaatgctactgttccaaagagcaacttgatggttttttt

SEQ ID NO: 2870 - DNA, 201 bp, Homo sapiens
cgcctgctcgccctggctccagccctcacctgccgcagccttagctgagcagccgccgccactgggcgccccccgctccccacttcgccagcgcccgctcstcggctcggcccggggtagtttgtagggacgcagctctccacgtgcgcgactgcgaggctggacgctacgggctcctggaaaggagcagacaccagcatt

SEQ ID NO: 2871 - DNA, 201 bp, Homo sapiens
tggccgcccggatcctggaggcgcaccagaacgtggcccagatgcccctggtcgaagccaagctgcggttcatccaggcgtggcagtcactgcctgagttyggcctcacctactaccttgtcagatttaaaggaagcaaaaaagatgacattctgggagtttcatataacaggttgattaaaattgatgcagccaccggga

SEQ ID NO: 2872 - DNA, 201 bp, Homo sapiens
ctccactgcttctactctgggttgggattcaggaagacaggcacagtcctctctgttcatagaaacacctgccagtgtcaaggattccagtcaggtgtctrtcccaactggtcagggagagaagggcagacccattctcaaagaccaccatgtccaaggtctgacagctccccactggctgcccccacaggggctttaggc

SEQ ID NO: 2873 - DNA, 201 bp, Homo sapiens
tatgaaacgaaacgcctgtccttcatggaactgcttttagctcctgtcttttcaaaatggcagagggagttcctacacacactttttccctggaggccaargtctaggggtagaaaggggaggggtggggctaccaggtagcagttgacaacccaaggtcagaggagtggccctcagtgtcatctgtccacagtgatacct

SEQ ID NO: 2874 - DNA, 201 bp, Homo sapiens
aaagacacaaatccaaacagctggccgcccggatcctggaggcgcaccagaacgtggcccagatgcccctggtcgaagccaagctgcggttcatccaggcrtggcagtcactgcctgagtttggcctcacctactaccttgtcagatttaaaggaagcaaaaaagatgacattctgggagtttcatataacaggttgatta

SEQ ID NO: 2875 - DNA, 201 bp, Homo sapiens
atgcttccttagcttttcatagttgtctgacatttccatgaaaacaaaggaaccaactttgttttaaccaaactttgtttggttacagttttcaggggagygtttcttccatgacacacagcaacatcccaaagaaataaacaagtgtgacaaaaaaaaaaaaaaacaaacctaaatgctactgttccaaagagcaacttg

SEQ ID NO: 2876 - DNA, 201 bp, Homo sapiens
agatactgagcgtgcgccccgggttctcgccgccttctctccgccgagcagcccttcggccaccctttgcccttaaaaatctgcagactgcgcctcctctscgcgggagcgagacctagcaggcccggggctgggcgtgccctcgcctgccacgctgcgcgctgccctcagccgggccgctggggccgtgcagtgcaccgg

SEQ ID NO: 2877 - DNA, 201 bp, Homo sapiens
ggggccgtgcagtgcaccgggcacgccgcgccaggctgggggcaggcaccgagcctccgtgggaggtcccgaggcagcttcgcctgctcgccctggctccrgccctcacctgccgcagccttagctgagcagccgccgccactgggcgccccccgctccccacttcgccagcgcccgctcctcggctcggcccggggtagt

SEQ ID NO: 2878 - DNA, 201 bp, Homo sapiens
tcctggaaaggagcagacaccagcatttgccacaatgctgtcatccactgactttacatttgcttcctgggagcttgtggtccgcgttgaccatcccaatraagagcagcagaaagacgtcacactgagagtatctggagaccttcatgttggaggagtgatgctcaagttagtagaacagatcaatatatcccaagactg

SEQ ID NO: 2879 - DNA, 201 bp, Homo sapiens
ccccacttcgccagcgcccgctcctcggctcggcccggggtagtttgtagggacgcagctctccacgtgcgcgactgcgaggctggacgctacgggctccyggaaaggagcagacaccagcatttgccacaatgctgtcatccactgactttacatttgcttcctgggagcttgtggtccgcgttgaccatcccaatgaag

SEQ ID NO: 2880 - DNA, 201 bp, Homo sapiens
gctgccatctggaaattcctcttttagcctctccttagaggtgaatgtgaatgaagcctcccaggcacccgctgaatttctgaggccttgcttaaagctcrgaagtggtttaggcatttggaaaatctggttcacatcataaagaacttgatttgaaatgttttctatagaaacaagtgctaagtgtaccgtattatactt

SEQ ID NO: 2881 - DNA, 201 bp, Homo sapiens
ctgactttacatttgcttcctgggagcttgtggtccgcgttgaccatcccaatgaagagcagcagaaagacgtcacactgagagtatctggagaccttcaygttggaggagtgatgctcaagttagtagaacagatcaatatatcccaagactggtcagactttgctctttggtgggaacagaagcattgctggcttctga

SEQ ID NO: 2882 - DNA, 201 bp, Homo sapiens
cagccaccgggattccagtgacaacatggagattcacaaatatcaaacagtggaatgtaaactgggaaacccggcaggtggtcatcgagtttgaccaaaaygtctttactgctttcacctgcctgagtgcagattgcaagattgtgcacgagtacattggcggctacattttcttgtccacccgctccaaggaccagaatg

SEQ ID NO: 2883 - DNA, 201 bp, Homo sapiens
atcctgaatattagaagatcagaagagctttccttgttaaagccgtctggtgactattttaagaagaagaagaaaaaagacaaaaataataaggaacccayaattgaagatattctaaacctggagagttctccaacagcttcaggttcatcagtaagtcctggtttatacagtaaaaccatgacccctatatatgacccc

SEQ ID NO: 2884 - DNA, 201 bp, Homo sapiens
cgttgtctgctgaaacacaggattttgcaggcgagtccgaggttgatgaaatagaagcggcgctttctaatttggaagtaaccctagaaggtggaaaagcrgacagccttttggaggacattactgatatccctaaacttgcagataatctcaaattatttaggcccaagaagttactaccaaaagctttcaaacaatatt

SEQ ID NO: 2885 - DNA, 201 bp, Homo sapiens
tccacaaattgaccggcggtcaggattgaaacaagcacgcgtgctcggctcacaccaacaaggcaagccaaaggcgcccctccccagagggatccctaacktgcccagcatgtagattctggactaacagacaacatacattcaccgctggtcacccagatcctcattcaaacccactgctggcacatccctttccttact

SEQ ID NO: 2886 - DNA, 201 bp, Homo sapiens; identical to SEQ ID NO: 2856

SEQ ID NO: 2887 - DNA, 201 bp, Homo sapiens
agttgcttttgataacacatgatgcaaagaaagaattagaaagaatgagcaatgaagccggtataaatgacaaacaagtgtccaaaggcccaagaagttaytaccaaaagctttcaaacaatattggtttatctttaaagacacatccatagcatactttaaaaataaggaacttgaacaaggagaaccactagaaaaact

SEQ ID NO: 2888 - DNA, 201 bp, Homo sapiens; identical to SEQ ID NO: 2858

SEQ ID NO: 2889 - DNA, 201 bp, Homo sapiens; identical to SEQ ID NO: 2857

SEQ ID NO: 2890 - DNA, 201 bp, Homo sapiens; identical to SEQ ID NO: 2860

SEQ ID NO: 2891 - DNA, 201 bp, Homo sapiens; identical to SEQ ID NO: 2864

SEQ ID NO: 2892 - DNA, 201 bp, Homo sapiens; identical to SEQ ID NO: 2865

SEQ ID NO: 2893 - DNA, 201 bp, Homo sapiens; identical to SEQ ID NO: 2866

SEQ ID NO: 2894 - DNA, 201 bp, Homo sapiens; identical to SEQ ID NO: 2867

SEQ ID NO: 2895 - DNA, 201 bp, Homo sapiens; identical to SEQ ID NO: 2868

SEQ ID NO: 2896 - DNA, 201 bp, Homo sapiens; identical to SEQ ID NO: 2869

SEQ ID NO: 2897 - DNA, 201 bp, Homo sapiens; identical to SEQ ID NO: 2872

SEQ ID NO: 2898 - DNA, 201 bp, Homo sapiens; identical to SEQ ID NO: 2871

SEQ ID NO: 2899 - DNA, 201 bp, Homo sapiens; identical to SEQ ID NO: 2874

SEQ ID NO: 2900 - DNA, 201 bp, Homo sapiens; identical to SEQ ID NO: 2873

SEQ ID NO: 2901 - DNA, 201 bp, Homo sapiens; identical to SEQ ID NO: 2875

SEQ ID NO: 2902 - DNA, 201 bp, Homo sapiens; identical to SEQ ID NO: 2880

SEQ ID NO: 2903 - DNA, 201 bp, Homo sapiens; identical to SEQ ID NO: 2882

SEQ ID NO: 2904 - DNA, 201 bp, Homo sapiens; identical to SEQ ID NO: 2885

SEQ ID NO: 2905 - DNA, 201 bp, Homo sapiens
aggaaggcgacagtacagagtgttttggttgaacaactactttaatgcagtcaaatctaacgggactagggtgggatagggaggaaggtggtatcaaattrttggactctgaaaaacaagtggatggattactaatatttgatttattactcaatatatatataattccagccttggaaagtaggaaagtaggctgctacc

SEQ ID NO: 2906 - DNA, 201 bp, Homo sapiens
aatagaagtcttttgatcccagtccctgggacagttttgtatgctgtatcttgtacacaggttgtaggttggtttattgccattttgttttatttctgctrtataaaaaccaagagccagacaattagacaactatggaggaatgaaaggcaattcaaacatctgcttgattcccgccccgccacccctaatttctgagag

SEQ ID NO: 2907 - DNA, 201 bp, Homo sapiens
caaataaatggcttctcagctgctgtttacaacaaacttccctaaccaaaacagaacctctaatttagggctaggaatagaagtcttttgatcccagtccstgggacagttttgtatgctgtatcttgtacacaggttgtaggttggtttattgccattttgttttatttctgctgtataaaaaccaagagccagacaatt

SEQ ID NO: 2908 - DNA, 201 bp, Homo sapiens
tggaccagggtgtgaagtacacggagctggagtacatccacgctctgaccctgctgcaccgcagccaaactggggtgggggaactgaccacccagaacacraggctgcagaggctcaaagagatcatctgcgagcaggctgccatcaagcaagccaccaaggacaagaagataactaccgtttagcagggcgtactgcggt

SEQ ID NO: 2909 - DNA, 201 bp, Homo sapiens
tcctacagagcacaatcattgtggagaagacagttcaagacctcctgaacctgatgcatgacttgagtgcatattcagatcaattcctcaacatggtgtgygtaaagctccaggagtacaaggacacctgcactgcagcttacaggggtattgtccagtcagaagaaaaacttgtcatcagtgcatcctgggcaaaagatg

SEQ ID NO: 2910 - DNA, 201 bp, Homo sapiens
actaccgtttagcagggcgtactgcggttggtgacgggggtcccctcagtcacactcactttttttccttggtatgttattgagtatattctgagcttagytttctctacagtgatactttagtggagaggaggtgtaaggattctttctctctggttttggcttttcatataaatgctaaaggaaggcgacagtacagag

SEQ ID NO: 2911 - DNA, 201 bp, Homo sapiens
tcagctccctcgtgaaagatgcttctgttcctctgattgatgttacaaacctccctactcctcgaaaattccttgatacctctcactattctactgctggragctcaagtgtgagggagataaatctgcaggacatcaaggaagatttagaattggatccagaggaaaacagcaccctgtttatgggtatcctcattaagg

SEQ ID NO: 2912 - DNA, 201 bp, Homo sapiens
tacagagcacaatcattgtggagaagacagttcaagacctcctgaacctgatgcatgacttgagtgcatattcagatcaattcctcaacatggtgtgcgtraagctccaggagtacaaggacacctgcactgcagcttacaggggtattgtccagtcagaagaaaaacttgtcatcagtgcatcctgggcaaaagatgatg

SEQ ID NO: 2913 - DNA, 201 bp, Homo sapiens
tgaagttcttattgggaacctgggtgataaattaatccctccacaagacatccttcgtgacgtcagtgacctcaaagccttggccaacatgcatgaaagcstggaatggttggcaagtcgaacaaagtcagctttctccaatctttctacatcccagatgctttctcctgctcaagacagccacacgaacacggatctccc

SEQ ID NO: 2914 - DNA, 201 bp, Homo sapiens
acaacacagctgacgagctcctgaacctggtggtggaccagggtgtgaagtacacggagctggagtacatccacgctctgaccctgctgcaccgcagccaractggggtgggggaactgaccacccagaacacgaggctgcagaggctcaaagagatcatctgcgagcaggctgccatcaagcaagccaccaaggacaaga

SEQ ID NO: 2915 - DNA, 201 bp, Homo sapiens
gcctggaatggttggcaagtcgaacaaagtcagctttctccaatctttctacatcccagatgctttctcctgctcaagacagccacacgaacacggatctycccccagtgtcagagcagatcatgcagactctcagtgaacttgccaaatcgttccaggatatggctgaccgctgcttgcttgtcttacatctggaagtga

SEQ ID NO: 2916 - DNA, 201 bp, Homo sapiens
atctgcaggacatcaaggaagatttagaattggatccagaggaaaacagcaccctgtttatgggtatcctcattaagggcttggcgaaactgaagaagatyccagaaacagttaaggcaatcatagagcgcttggagcaggagttgaagcaaattgtgaagaggtctacaacccaggtggcagacagtggctatcagcggg

SEQ ID NO: 2917 - DNA, 201 bp, Homo sapiens; identical to SEQ ID NO: 2909

SEQ ID NO: 2918 - DNA, 201 bp, Homo sapiens; identical to SEQ ID NO: 2912

SEQ ID NO: 2919 - DNA, 201 bp, Homo sapiens; identical to SEQ ID NO: 2909

SEQ ID NO: 2920 - DNA, 201 bp, Homo sapiens
tgaagttcttattgggaacctgggtgataaattaatccctccacaagacatccttcgtgacgtcagtgacctcaaagccttggccaacatgcatgaaagcstggaatggttggcaagtcgaacaaagtcagctttctccaatctttctacatcccagattttacaaggcatgagcatgaaatgcaaaagtttggcagtttc

SEQ ID NO: 2921 - DNA, 201 bp, Homo sapiens
aaagccttggccaacatgcatgaaagcctggaatggttggcaagtcgaacaaagtcagctttctccaatctttctacatcccagattttacaaggcatgadcatgaaatgcaaaagtttggcagtttcccaaggtcaaaatcagtcaatgacaaaaatccagaccacatctgtctgttctcagagtgcagaccagagtgtc

SEQ ID NO: 2922 - DNA, 201 bp, Homo sapiens; identical to SEQ ID NO: 2911

SEQ ID NO: 2923 - DNA, 201 bp, Homo sapiens; identical to SEQ ID NO: 2916

SEQ ID NO: 2924 - DNA, 201 bp, Homo sapiens; identical to SEQ ID NO: 2912

SEQ ID NO: 2925 - DNA, 201 bp, Homo sapiens
ggtgtcttcatattaaaccttcacaaccttcatgatttcataggattattttggaaatatagcacttgactttatgaaaggatctgggctaggtatattargggtagttgccaataacctgaagaagctggcattgtttacagaaacagatcaagggctataatttatgtcattttatagcagcagtatctattaatacat

SEQ ID NO: 2926 - DNA, 123 bp, Homo sapiens
aatgttttccatatactttgtcttgcctgtatgcagccctcgtgtaatacggtgaattagagtggtatttcactttgtattattttgtaaatatgtcaatrtaataaatagtgactaaattga

SEQ ID NO: 2927 - DNA, 201 bp, Homo sapiens
agagtccccattcaaggcagtcaagttaagacactaacttggccctttcctgatggaaatatttcctccatagcagaagttgtgttctgacaagactgagwgagttacatgttgggaaaaaaaagaagcattaacttagtagaactgaaccaggagcattaagttctgaaattttgaatcatctctgaaatgaagcaggtg

SEQ ID NO: 2928 - DNA, 201 bp, Homo sapiens
tggaaaggttatagaaacattatcacgactttctcgaacacctatagcattggccacaggaatcaggcccttcccaacagaagaaagcattaatgatgaaracatctacaaaggccttcctgatttaatagatgaaacccttgtggaagatgaagaagatctctatgactgtgtttatggggaagatgaaggtggagaagt

SEQ ID NO: 2929 - DNA, 201 bp, Homo sapiens
atcagcccaaatgtccagaaaatgatatacgaagttgttgtctagcagaaattaagcagacagaagaaaaatatacagaaactttggagtcaatagaaaartatttcatggcaccactaaaaagatttctgacagcagcagaatttgattcagtattcatcaacattcctgaacttgtaaaacttcatcggaacctaatgc

SEQ ID NO: 2930 - DNA, 201 bp, Homo sapiens
actgatccgactgagaaggcaaatctgaaactggctcttgatgccatgaaggacttggcacaatatgtgaatgaagtgaaaagagataatgagacccttcrtgaaattaaacagtttcagctatctatagagaatttgaaccaaccagttttgctttttggacgacctcagggagatggtgaaattcgaataaccactcta

SEQ ID NO: 2931 - DNA, 201 bp, Homo sapiens
tgtggaagaggatgaataaattcaaatcccgtgttgcaccctgcaccaaaaatttcagagaagggataaatagaagcctgcacagcatcgtgaattaactraagtgtttaaaaagctgcatttctggctgttcaacatcctccctccttagcccctcctaagtcttaatgctgagatttctaaagatgctggtactgacag

SEQ ID NO: 2932 - DNA, 201 bp, Homo sapiens
gtaccaagtttttattaactacaaggaaagattggttatttacgggcagtactgcagtggagtggagtcagccatctctagtttagactacatttctaagwcaaaagaagatgtcaaactgaaattagaggaatgttccaaaagagcaaataatgggaaatttactcttcgagacttgcttgtggttcctatgcaacgtgt

SEQ ID NO: 2933 - DNA, 201 bp, Homo sapiens
ttcttatttgatttggcagtgatcgtatgtaagagaaaaggtgataactatgaaatgaaggaaataatagatcttcagcagtacaagatagccaataatcytacaaccgataaagaaaacaaaaagtggtcttatggcttctacctcatccatacccaaggacaaaatgggttagaattttattgcaaaacaaaagattta

SEQ ID NO: 2934 - DNA, 201 bp, Homo sapiens
tccatacccaaggacaaaatgggttagaattttattgcaaaacaaaagatttaaagaagaaatggctagaacagtttgaaatggctttgtctaacataagrccagactatgcagactccaatttccacgacttcaagatgcataccttcactcgagtcacatcctgcaaagtctgccagatgctcctgaggggaacatttt

SEQ ID NO: 2935 - DNA, 201 bp, Homo sapiens
tcccagcatgacgaaaaattggagttctgccatttgagcagcttactggaaagatccagccttacttgtcttaaattgtccaacaaggtgactcattgccyggcaaacacttttaccctcagatgttactcatgatattataaaatatgaggccagtgctcaggtttgcatcataagtgagctatccctgaagggttttaa

SEQ ID NO: 2936 - DNA, 201 bp, Homo sapiens
atttcataggattattttggaaatatagcacttgactttatgaaaggatctgggctaggtatattaggggtagttgccaataacctgaagaagctggcatwgtttacagaaacagatcaagggctataatttatgtcattttatagcagcagtatctattaatacatgccttttcctcccatccacctcccccgcacacac

SEQ ID NO: 2937 - DNA, 183 bp, Homo sapiens
gttttggaaaatttaaatgctgcagatttgtgtagagttctaataccaaagacagaagtaaatgttttccatatactttgtcttgcctgtatgcagccctygtgtaatacggtgaattagagtggtatttcactttgtattattttgtaaatatgtcaatataataaatagtgactaaattga

SEQ ID NO: 2938 - DNA, 201 bp, Homo sapiens
ccagagtccccattcaaggcagtcaagttaagacactaacttggccctttcctgatggaaatatttcctccatagcagaagttgtgttctgacaagactgmgagagttacatgttgggaaaaaaaagaagcattaacttagtagaactgaaccaggagcattaagttctgaaattttgaatcatctctgaaatgaagcagg

SEQ ID NO: 2939 - DNA, 201 bp, Homo sapiens
ttagcattaagtacaataatgaagcaaagcacatcaagattttaacaagagatggcttttttcacattgcagaaaatagaaaatttaaaagtttaatggarcttgtggagtactacaagcatcattctctcaaggaagggttcagaaccttagatacaactctgcagtttccatacaaggagccagaacattcagctggac

SEQ ID NO: 2940 - DNA, 201 bp, Homo sapiens
gaactcctaaacaggtggatccaggtttaccaaagatgcaggtcattaggaactattctggaacaccacccccagctctgcatgaaggaccccctttacasctccaggccggggataccgttgaacttctgaaaggagatgcacacagtctgttttggcagggcagaaatttagcatctggagaggttggattttttccaa

SEQ ID NO: 2941 - DNA, 174 bp, Homo sapiens
aatttaaatgctgcagatttgtgtagagttctaataccaaagacagaagtaaatgttttccatatactttgtcttgcctgtatgcagccctcgtgtaatayggtgaattagagtggtatttcactttgtattattttgtaaatatgtcaatataataaatagtgactaaattga

SEQ ID NO: 2942 - DNA, 201 bp, Homo sapiens
actgcgaagaactcctaaacaggtggatccaggtttaccaaagatgcaggtcattaggaactattctggaacaccacccccagctctgcatgaaggacccyctttacagctccaggccggggataccgttgaacttctgaaaggagatgcacacagtctgttttggcagggcagaaatttagcatctggagaggttggatt

SEQ ID NO: 2943 - DNA, 201 bp, Homo sapiens
gatgtcccagtttctctgtttgaagaacataaggacatttctcacggcctgttgtgagacgtttggaatgaggaaaagtgaacttttcgaggcatttgacytgtttgatgttcgtgactttggaaaggttatagaaacattatcacgactttctcgaacacctatagcattggccacaggaatcaggcccttcccaacaga

SEQ ID NO: 2944 - DNA, 201 bp, Homo sapiens; identical to SEQ ID NO: 2925

SEQ ID NO: 2945 - DNA, 123 bp, Homo sapiens; identical to SEQ ID NO: 2926

SEQ ID NO: 2946 - DNA, 201 bp, Homo sapiens; identical to SEQ ID NO: 2935

SEQ ID NO: 2947 - DNA, 201 bp, Homo sapiens; identical to SEQ ID NO: 2936

SEQ ID NO: 2948 - DNA, 201 bp, Homo sapiens; identical to SEQ ID NO: 2927

SEQ ID NO: 2949 - DNA, 183 bp, Homo sapiens; identical to SEQ ID NO: 2937

SEQ ID NO: 2950 - DNA, 201 bp, Homo sapiens; identical to SEQ ID NO: 2938

SEQ ID NO: 2951 - DNA, 201 bp, Homo sapiens; identical to SEQ ID NO: 2939

SEQ ID NO: 2952 - DNA, 201 bp, Homo sapiens; identical to SEQ ID NO: 2940

SEQ ID NO: 2953 - DNA, 174 bp, Homo sapiens; identical to SEQ ID NO: 2941

SEQ ID NO: 2954 - DNA, 201 bp, Homo sapiens; identical to SEQ ID NO: 2942

SEQ ID NO: 2955 - DNA, 201 bp, Homo sapiens; identical to SEQ ID NO: 2931

SEQ ID NO: 2956 - DNA, 201 bp, Homo sapiens
ttcacaaacccttgcaacattgcctgaagtttatggaataagatgtattctcactcccttgatctcaagggcgtaactctggaagcacagcttgactacaygtcatttttaccaatgattttcaggtgacctgggctaagtcatttaaactgggtctttataaaagtaaaaggccaacatttaattattttgcaaagcaac

SEQ ID NO: 2957 - DNA, 201 bp, Homo sapiens
gcctctgccaggttcggtccgccatcctcgtcccgtcctccgccggcccctgccccgcgcccagggatcctccagctcctttcgcccgcgccctccgttcrctccggacaccatggacaagttttggtggcacgcagcctggggactctgcctcgtgccgctgagcctggcgcagatcgatttgaatataacctgccgctt

SEQ ID NO: 2958 - DNA, 201 bp, Homo sapiens
gttggaaacataaccattacagggagctgggacacttaacagatgcaatgtgctactgattgtttcattgcgaatcttttttagcataaaattttctactytttttgttttttgtgttttgttctttaaagtcaggtccaatttgtaaaaacagcattgctttctgaaattagggcccaattaataatcagcaagaatttg

SEQ ID NO: 2959 - DNA, 201 bp, Homo sapiens
acctgcaggtatgggttcatagaagggcacgtggtgattccccggatccaccccaactccatctgtgcagcaaacaacacaggggtgtacatcctcacatmcaacacctcccagtatgacacatattgcttcaatgcttcagctccacctgaagaagattgtacatcagtcacagacctgcccaatgcctttgatggacca

SEQ ID NO: 2960 - DNA, 201 bp, Homo sapiens
tgcctcgtgccgctgagcctggcgcagatcgatttgaatataacctgccgctttgcaggtgtattccacgtggagaaaaatggtcgctacagcatctctcsgacggaggccgctgacctctgcaaggctttcaatagcaccttgcccacaatggcccagatggagaaagctctgagcatcggatttgagacctgcaggtat

SEQ ID NO: 2961 - DNA, 201 bp, Homo sapiens
aaacataaccattacagggagctgggacacttaacagatgcaatgtgctactgattgtttcattgcgaatcttttttagcataaaattttctactcttttygttttttgtgttttgttctttaaagtcaggtccaatttgtaaaaacagcattgctttctgaaattagggcccaattaataatcagcaagaatttgatcgt

SEQ ID NO: 2962 - DNA, 201 bp, Homo sapiens
tattttggaattaaatacttttttccctttattactgttgtagtccctcacttggatatacctctgttttcacgatagaaataagggaggtctagagcttytattccttggccattgtcaacggagagctggccaagtcttcacaaacccttgcaacattgcctgaagtttatggaataagatgtattctcactcccttga

SEQ ID NO: 2963 - DNA, 201 bp, Homo sapiens
accttttctactgtacaccccatcccagacgaagacagtccctggatcaccgacagcacagacagaatccctgctaccaatatggactccagtcatagtayaacgcttcagcctactgcaaatccaaacacaggtttggtggaagatttggacaggacaggacctctttcaatgacaacgcagcagagtaattctcagagc

SEQ ID NO: 2964 - DNA, 201 bp, Homo sapiens
aacttatgtgcttaacaggcaatgcttctcagaccacaaagcagaaagaagaagaaaagctcctgactaaatcagggctgggcttagacagagttgatctrtagaatatctttaaaggagagatgtcaactttctgcactattcccagcctctgctcctccctgtctaccctctcccctccctctctccctccacttcacc

SEQ ID NO: 2965 - DNA, 201 bp, Homo sapiens
tggcttctaagacatttcccagggttaatagggcctggtccctgggaggaaatttgaatgggtccattttgcccttccatagcctaatccctgggcattgytttccactgaggttgggggttggggtgtactagttacacatcttcaacagaccccctctagaaatttttcagatgcttctgggagacacccaaagggtga

SEQ ID NO: 2966 - DNA, 201 bp, Homo sapiens
ccctgggaggaaatttgaatgggtccattttgcccttccatagcctaatccctgggcattgctttccactgaggttgggggttggggtgtactagttacayatcttcaacagaccccctctagaaatttttcagatgcttctgggagacacccaaagggtgaagctatttatctgtagtaaactatttatctgtgtttttg

SEQ ID NO: 2967 - DNA, 201 bp, Homo sapiens
ccacgtccctggcagccccgattatttacagcctcagcagagcacggggcgggggcagaggggcccgcccgggagggctgctacttcttaaaacctctgckggctgcttagtcacagccccccttgcttgggtgtgtccttcgctcgctccctccctccgtcttaggtcactgttttcaacctcgaataaaaactgcagcc

SEQ ID NO: 2968 - DNA, 201 bp, Homo sapiens
tctgcaaggctttcaatagcaccttgcccacaatggcccagatggagaaagctctgagcatcggatttgagacctgcaggtatgggttcatagaagggcaygtggtgattccccggatccaccccaactccatctgtgcagcaaacaacacaggggtgtacatcctcacatccaacacctcccagtatgacacatattgct

SEQ ID NO: 2969 - DNA, 201 bp, Homo sapiens
gatcaccgacagcacagacagaatccctgctaccaatatggactccagtcatagtataacgcttcagcctactgcaaatccaaacacaggtttggtggaasatttggacaggacaggacctctttcaatgacaacgcagcagagtaattctcagagcttctctacatcacatgaaggcttggaagaagataaagaccatcc

SEQ ID NO: 2970 - DNA, 201 bp, Homo sapiens; identical to SEQ ID NO: 2956

SEQ ID NO: 2971 - DNA, 201 bp, Homo sapiens; identical to SEQ ID NO: 2957

SEQ ID NO: 2972 - DNA, 201 bp, Homo sapiens; identical to SEQ ID NO: 2958

SEQ ID NO: 2973 - DNA, 201 bp, Homo sapiens; identical to SEQ ID NO: 2959

SEQ ID NO: 2974 - DNA, 201 bp, Homo sapiens; identical to SEQ ID NO: 2960

SEQ ID NO: 2975 - DNA, 201 bp, Homo sapiens; identical to SEQ ID NO: 2961

SEQ ID NO: 2976 - DNA, 201 bp, Homo sapiens; identical to SEQ ID NO: 2962

SEQ ID NO: 2977 - DNA, 201 bp, Homo sapiens; identical to SEQ ID NO: 2963

SEQ ID NO: 2978 - DNA, 201 bp, Homo sapiens; identical to SEQ ID NO: 2964

SEQ ID NO: 2979 - DNA, 201 bp, Homo sapiens
accagctaaggacatttcccagggttaatagggcctggtccctgggaggaaatttgaatgggtccattttgcccttccatagcctaatccctgggcattgytttccactgaggttgggggttggggtgtactagttacacatcttcaacagaccccctctagaaatttttcagatgcttctgggagacacccaaagggtga

SEQ ID NO: 2980 - DNA, 201 bp, Homo sapiens; identical to SEQ ID NO: 2966

SEQ ID NO: 2981 - DNA, 201 bp, Homo sapiens; identical to SEQ ID NO: 2967

SEQ ID NO: 2982 - DNA, 201 bp, Homo sapiens; identical to SEQ ID NO: 2968

SEQ ID NO: 2983 - DNA, 201 bp, Homo sapiens; identical to SEQ ID NO: 2969

SEQ ID NO: 2984 - DNA, 201 bp, Homo sapiens; identical to SEQ ID NO: 2956

SEQ ID NO: 2985 - DNA, 201 bp, Homo sapiens; identical to SEQ ID NO: 2957

SEQ ID NO: 2986 - DNA, 201 bp, Homo sapiens; identical to SEQ ID NO: 2958

SEQ ID NO: 2987 - DNA, 201 bp, Homo sapiens; identical to SEQ ID NO: 2959

SEQ ID NO: 2988 - DNA, 201 bp, Homo sapiens; identical to SEQ ID NO: 2960

SEQ ID NO: 2989 - DNA, 201 bp, Homo sapiens; identical to SEQ ID NO: 2961

SEQ ID NO: 2990 - DNA, 201 bp, Homo sapiens; identical to SEQ ID NO: 2962

SEQ ID NO: 2991 - DNA, 201 bp, Homo sapiens
accttttctactgtacaccccatcccagacgaagacagtccctggatcaccgacagcacagacagaatccctgctaccaatatggactccagtcatagtayaacgcttcagcctactgcaaatccaaacacaggtttggtggaagatttggacaggacaggacctctttcaatgacaacgcgagaccaagacacattccac

SEQ ID NO: 2992 - DNA, 201 bp, Homo sapiens; identical to SEQ ID NO: 2964

SEQ ID NO: 2993 - DNA, 201 bp, Homo sapiens; identical to SEQ ID NO: 2979

SEQ ID NO: 2994 - DNA, 201 bp, Homo sapiens; identical to SEQ ID NO: 2966

SEQ ID NO: 2995 - DNA, 201 bp, Homo sapiens; identical to SEQ ID NO: 2967

SEQ ID NO: 2996 - DNA, 201 bp, Homo sapiens; identical to SEQ ID NO: 2968

SEQ ID NO: 2997 - DNA, 201 bp, Homo sapiens
gatcaccgacagcacagacagaatccctgctaccaatatggactccagtcatagtataacgcttcagcctactgcaaatccaaacacaggtttggtggaasatttggacaggacaggacctctttcaatgacaacgcgagaccaagacacattccaccccagtggggggtcccataccactcatggatctgaatcagatgg

SEQ ID NO: 2998 - DNA, 201 bp, Homo sapiens; identical to SEQ ID NO: 2956

SEQ ID NO: 2999 - DNA, 201 bp, Homo sapiens; identical to SEQ ID NO: 2957

SEQ ID NO: 3000 - DNA, 201 bp, Homo sapiens; identical to SEQ ID NO: 2958

SEQ ID NO: 3001 - DNA, 201 bp, Homo sapiens; identical to SEQ ID NO: 2959

SEQ ID NO: 3002 - DNA, 201 bp, Homo sapiens; identical to SEQ ID NO: 2960

SEQ ID NO: 3003 - DNA, 201 bp, Homo sapiens; identical to SEQ ID NO: 2961

SEQ ID NO: 3004 - DNA, 201 bp, Homo sapiens; identical to SEQ ID NO: 2962

SEQ ID NO: 3005 - DNA, 201 bp, Homo sapiens
aatgaagatgaaagagacagacacctcagtttttctggatcaggcattgatgatgatgaagattttatctccagcaccaatatggactccagtcatagtayaacgcttcagcctactgcaaatccaaacacaggtttggtggaagatttggacaggacaggacctctttcaatgacaacgcagcagagtaattctcagagc

SEQ ID NO: 3006 - DNA, 201 bp, Homo sapiens; identical to SEQ ID NO: 2964

SEQ ID NO: 3007 - DNA, 201 bp, Homo sapiens; identical to SEQ ID NO: 2979

SEQ ID NO: 3008 - DNA, 201 bp, Homo sapiens; identical to SEQ ID NO: 2966

SEQ ID NO: 3009 - DNA, 201 bp, Homo sapiens; identical to SEQ ID NO: 2967

SEQ ID NO: 3010 - DNA, 201 bp, Homo sapiens; identical to SEQ ID NO: 2968

SEQ ID NO: 3011 - DNA, 201 bp, Homo sapiens
cattgatgatgatgaagattttatctccagcaccaatatggactccagtcatagtataacgcttcagcctactgcaaatccaaacacaggtttggtggaasatttggacaggacaggacctctttcaatgacaacgcagcagagtaattctcagagcttctctacatcacatgaaggcttggaagaagataaagaccatcc

SEQ ID NO: 3012 - DNA, 201 bp, Homo sapiens
ggaaactggaacccagaagcacaccctcccctcattcaccatgagcatcatgaggaagaagagaccccacattctacaagcacaacagcctcagctcatamcagccatccaatgcaaggaaggacaacaccaagcccagaggacagttcctggactgatttcttcaacccaatctcacaccccatgggacgaggtcatcaa

SEQ ID NO: 3013 - DNA, 201 bp, Homo sapiens
tcaccgacagcacagacagaatccctgctaccactttgatgagcactagtgctacagcaactgagacagcaaccaagaggcaagaaacctgggattggttytcatggttgtttctaccatcagagtcaaagaatcatcttcacacaacaacacaaatggctgcaggctgggagccaaatgaagaaaatgaagatgaaagag

SEQ ID NO: 3014 - DNA, 201 bp, Homo sapiens; identical to SEQ ID NO: 2962

SEQ ID NO: 3015 - DNA, 201 bp, Homo sapiens
gaggacagttcctggactgatttcttcaacccaatctcacaccccatgggacgaggtcatcaagcaggaagaaggatggatatggactccagtcatagtayaacgcttcagcctactgcaaatccaaacacaggtttggtggaagatttggacaggacaggacctctttcaatgacaacgcagcagagtaattctcagagc

SEQ ID NO: 3016 - DNA, 201 bp, Homo sapiens; identical to SEQ ID NO: 2966

SEQ ID NO: 3017 - DNA, 201 bp, Homo sapiens; identical to SEQ ID NO: 2967

SEQ ID NO: 3018 - DNA, 201 bp, Homo sapiens
ccacaaggatgactgatgtagacagaaatggcaccactgcttatgaaggaaactggaacccagaagcacaccctcccctcattcaccatgagcatcatgargaagaagagaccccacattctacaagcacaacagcctcagctcataccagccatccaatgcaaggaaggacaacaccaagcccagaggacagttcctgga

SEQ ID NO: 3019 - DNA, 201 bp, Homo sapiens; identical to SEQ ID NO: 2968

SEQ ID NO: 3020 - DNA, 201 bp, Homo sapiens
catgggacgaggtcatcaagcaggaagaaggatggatatggactccagtcatagtataacgcttcagcctactgcaaatccaaacacaggtttggtggaasatttggacaggacaggacctctttcaatgacaacgcagcagagtaattctcagagcttctctacatcacatgaaggcttggaagaagataaagaccatcc

SEQ ID NO: 3021 - DNA, 201 bp, Homo sapiens; identical to SEQ ID NO: 2956

SEQ ID NO: 3022 - DNA, 201 bp, Homo sapiens
tttctggatcaggcattgatgatgatgaagattttatctccagcaccatttcaaccacaccacgggcttttgaccacacaaaacagaaccaggactggacycagtggaacccaagccattcaaatccggaagtgctacttcagacaaccacaaggatgactgatgtagacagaaatggcaccactgcttatgaaggaaact

SEQ ID NO: 3023 - DNA, 201 bp, Homo sapiens; identical to SEQ ID NO: 2958

SEQ ID NO: 3024 - DNA, 201 bp, Homo sapiens; identical to SEQ ID NO: 2957

SEQ ID NO: 3025 - DNA, 201 bp, Homo sapiens; identical to SEQ ID NO: 2959

SEQ ID NO: 3026 - DNA, 201 bp, Homo sapiens; identical to SEQ ID NO: 2960

SEQ ID NO: 3027 - DNA, 201 bp, Homo sapiens; identical to SEQ ID NO: 2961

SEQ ID NO: 3028 - DNA, 201 bp, Homo sapiens; identical to SEQ ID NO: 2964

SEQ ID NO: 3029 - DNA, 201 bp, Homo sapiens; identical to SEQ ID NO: 2965

SEQ ID NO: 3030 - DNA, 201 bp, Homo sapiens; identical to SEQ ID NO: 3012

SEQ ID NO: 3031 - DNA, 201 bp, Homo sapiens
gctcctccagtgaaaggagcagcacttcaggagctttgatgagcactagtgctacagcaactgagacagcaaccaagaggcaagaaacctgggattggttytcatggttgtttctaccatcagagtcaaagaatcatcttcacacaacaacacaaatggctggtacgtcttcaaataccatctcagcaggctgggagccaa

SEQ ID NO: 3032 - DNA, 201 bp, Homo sapiens; identical to SEQ ID NO: 2962

SEQ ID NO: 3033 - DNA, 201 bp, Homo sapiens; identical to SEQ ID NO: 3015

SEQ ID NO: 3034 - DNA, 201 bp, Homo sapiens; identical to SEQ ID NO: 2966

SEQ ID NO: 3035 - DNA, 201 bp, Homo sapiens; identical to SEQ ID NO: 2967

SEQ ID NO: 3036 - DNA, 201 bp, Homo sapiens; identical to SEQ ID NO: 3018

SEQ ID NO: 3037 - DNA, 201 bp, Homo sapiens; identical to SEQ ID NO: 2968

SEQ ID NO: 3038 - DNA, 201 bp, Homo sapiens; identical to SEQ ID NO: 3020

SEQ ID NO: 3039 - DNA, 201 bp, Homo sapiens; identical to SEQ ID NO: 2956

SEQ ID NO: 3040 - DNA, 201 bp, Homo sapiens; identical to SEQ ID NO: 3022

SEQ ID NO: 3041 - DNA, 201 bp, Homo sapiens; identical to SEQ ID NO: 2958

SEQ ID NO: 3042 - DNA, 201 bp, Homo sapiens; identical to SEQ ID NO: 2957

SEQ ID NO: 3043 - DNA, 201 bp, Homo sapiens; identical to SEQ ID NO: 2959

SEQ ID NO: 3044 - DNA, 201 bp, Homo sapiens; identical to SEQ ID NO: 2960

SEQ ID NO: 3045 - DNA, 201 bp, Homo sapiens; identical to SEQ ID NO: 2961

SEQ ID NO: 3046 - DNA, 201 bp, Homo sapiens; identical to SEQ ID NO: 2964

SEQ ID NO: 3047 - DNA, 201 bp, Homo sapiens; identical to SEQ ID NO: 2979

SEQ ID NO: 3048 - DNA, 201 bp, Homo sapiens; identical to SEQ ID NO: 2956

SEQ ID NO: 3049 - DNA, 201 bp, Homo sapiens; identical to SEQ ID NO: 2957

SEQ ID NO: 3050 - DNA, 201 bp, Homo sapiens; identical to SEQ ID NO: 2958

SEQ ID NO: 3051 - DNA, 201 bp, Homo sapiens
tgcctcgtgccgctgagcctggcgcagatcgatttgaatataacctgccgctttgcaggtgtattccacgtggagaaaaatggtcgctacagcatctctcsgacggaggccgctgacctctgcaaggctttcaatagcaccttgcccacaatggcccagatggagaaagctctgagcatcggatttgagacctgcagtttg

SEQ ID NO: 3052 - DNA, 201 bp, Homo sapiens; identical to SEQ ID NO: 2962

SEQ ID NO: 3053 - DNA, 201 bp, Homo sapiens; identical to SEQ ID NO: 2961

SEQ ID NO: 3054 - DNA, 201 bp, Homo sapiens; identical to SEQ ID NO: 2964

SEQ ID NO: 3055 - DNA, 201 bp, Homo sapiens; identical to SEQ ID NO: 2965

SEQ ID NO: 3056 - DNA, 201 bp, Homo sapiens; identical to SEQ ID NO: 2966

SEQ ID NO: 3057 - DNA, 201 bp, Homo sapiens; identical to SEQ ID NO: 2967

SEQ ID NO: 3058 - DNA, 201 bp, Homo sapiens
aacccagaagcacaccctcccctcattcaccatgagcatcatgaggaagaagagaccccacattctacaagcacaatccaggcaactcctagtagtacaayggaagaaacagctacccagaaggaacagtggtttggcaacagatggcatgagggatatcgccaaacacccagagaagactcccattcgacaacagggaca

SEQ ID NO: 3059 - DNA, 201 bp, Homo sapiens
aaggaacagtggtttggcaacagatggcatgagggatatcgccaaacacccagagaagactcccattcgacaacagggacagctgcagcctcagctcatamcagccatccaatgcaaggaaggacaacaccaagcccagaggacagttcctggactgatttcttcaacccaatctcacaccccatgggacgaggtcatcaa

SEQ ID NO: 3060 - DNA, 201 bp, Homo sapiens; identical to SEQ ID NO: 3015

SEQ ID NO: 3061 - DNA, 201 bp, Homo sapiens; identical to SEQ ID NO: 2962

SEQ ID NO: 3062 - DNA, 201 bp, Homo sapiens
caagcacaatccaggcaactcctagtagtacaacggaagaaacagctacccagaaggaacagtggtttggcaacagatggcatgagggatatcgccaaacmcccagagaagactcccattcgacaacagggacagctgcagcctcagctcataccagccatccaatgcaaggaaggacaacaccaagcccagaggacagtt

SEQ ID NO: 3063 - DNA, 201 bp, Homo sapiens
tcaccgacagcacagacagaatccctgctaccactttgatgagcactagtgctacagcaactgagacagcaaccaagaggcaagaaacctgggattggttytcatggttgtttctaccatcagagtcaaagaatcatcttcacacaacaacacaaatggctggtacgtcttcaaataccatctcagcaggctgggagccaa

SEQ ID NO: 3064 - DNA, 201 bp, Homo sapiens
acaatccaggcaactcctagtagtacaacggaagaaacagctacccagaaggaacagtggtttggcaacagatggcatgagggatatcgccaaacacccaragaagactcccattcgacaacagggacagctgcagcctcagctcataccagccatccaatgcaaggaaggacaacaccaagcccagaggacagttcctgg

SEQ ID NO: 3065 - DNA, 201 bp, Homo sapiens; identical to SEQ ID NO: 2968

SEQ ID NO: 3066 - DNA, 201 bp, Homo sapiens
ccacaaggatgactgatgtagacagaaatggcaccactgcttatgaaggaaactggaacccagaagcacaccctcccctcattcaccatgagcatcatgargaagaagagaccccacattctacaagcacaatccaggcaactcctagtagtacaacggaagaaacagctacccagaaggaacagtggtttggcaacagat

SEQ ID NO: 3067 - DNA, 201 bp, Homo sapiens; identical to SEQ ID NO: 2966

SEQ ID NO: 3068 - DNA, 201 bp, Homo sapiens; identical to SEQ ID NO: 2967

SEQ ID NO: 3069 - DNA, 201 bp, Homo sapiens; identical to SEQ ID NO: 3020

SEQ ID NO: 3070 - DNA, 201 bp, Homo sapiens; identical to SEQ ID NO: 2956

SEQ ID NO: 3071 - DNA, 201 bp, Homo sapiens; identical to SEQ ID NO: 3022

SEQ ID NO: 3072 - DNA, 201 bp, Homo sapiens; identical to SEQ ID NO: 2958

SEQ ID NO: 3073 - DNA, 201 bp, Homo sapiens; identical to SEQ ID NO: 2957

SEQ ID NO: 3074 - DNA, 201 bp, Homo sapiens; identical to SEQ ID NO: 2959

SEQ ID NO: 3075 - DNA, 201 bp, Homo sapiens; identical to SEQ ID NO: 2960

SEQ ID NO: 3076 - DNA, 201 bp, Homo sapiens; identical to SEQ ID NO: 2961

SEQ ID NO: 3077 - DNA, 201 bp, Homo sapiens; identical to SEQ ID NO: 2964

SEQ ID NO: 3078 - DNA, 201 bp, Homo sapiens; identical to SEQ ID NO: 2979

SEQ ID NO: 3079 - DNA, 201 bp, Homo sapiens; identical to SEQ ID NO: 3058

SEQ ID NO: 3080 - DNA, 201 bp, Homo sapiens; identical to SEQ ID NO: 3059

SEQ ID NO: 3081 - DNA, 201 bp, Homo sapiens; identical to SEQ ID NO: 3015

SEQ ID NO: 3082 - DNA, 201 bp, Homo sapiens; identical to SEQ ID NO: 2962

SEQ ID NO: 3083 - DNA, 201 bp, Homo sapiens; identical to SEQ ID NO: 3062

SEQ ID NO: 3084 - DNA, 201 bp, Homo sapiens; identical to SEQ ID NO: 3063

SEQ ID NO: 3085 - DNA, 201 bp, Homo sapiens; identical to SEQ ID NO: 3064

SEQ ID NO: 3086 - DNA, 201 bp, Homo sapiens; identical to SEQ ID NO: 2968

SEQ ID NO: 3087 - DNA, 201 bp, Homo sapiens; identical to SEQ ID NO: 3066

SEQ ID NO: 3088 - DNA, 201 bp, Homo sapiens; identical to SEQ ID NO: 2966

SEQ ID NO: 3089 - DNA, 201 bp, Homo sapiens; identical to SEQ ID NO: 2967

SEQ ID NO: 3090 - DNA, 201 bp, Homo sapiens; identical to SEQ ID NO: 3020

SEQ ID NO: 3091 - DNA, 201 bp, Homo sapiens; identical to SEQ ID NO: 2956

SEQ ID NO: 3092 - DNA, 201 bp, Homo sapiens; identical to SEQ ID NO: 3022

SEQ ID NO: 3093 - DNA, 201 bp, Homo sapiens; identical to SEQ ID NO: 2958

SEQ ID NO: 3094 - DNA, 201 bp, Homo sapiens; identical to SEQ ID NO: 2957

SEQ ID NO: 3095 - DNA, 201 bp, Homo sapiens; identical to SEQ ID NO: 2959

SEQ ID NO: 3096 - DNA, 201 bp, Homo sapiens; identical to SEQ ID NO: 2960

SEQ ID NO: 3097 - DNA, 201 bp, Homo sapiens; identical to SEQ ID NO: 2961

SEQ ID NO: 3098 - DNA, 201 bp, Homo sapiens; identical to SEQ ID NO: 2964

SEQ ID NO: 3099 - DNA, 201 bp, Homo sapiens; identical to SEQ ID NO: 2979

SEQ ID NO: 3100 - DNA, 201 bp, Homo sapiens; identical to SEQ ID NO: 2956

SEQ ID NO: 3101 - DNA, 201 bp, Homo sapiens; identical to SEQ ID NO: 2957

SEQ ID NO: 3102 - DNA, 201 bp, Homo sapiens
gttggaaacataaccattacagggagctgggacacttaacagatgcaatgtgctactgattgtttcattgcgaatcttttttagcataaaattttctactytttcccccaccagctaaggacatttcccagggttaatagggcctggtccctgggaggaaatttgaatgggtccattttgcccttccatagcctaatccct

SEQ ID NO: 3103 - DNA, 201 bp, Homo sapiens; identical to SEQ ID NO: 2959

SEQ ID NO: 3104 - DNA, 201 bp, Homo sapiens; identical to SEQ ID NO: 2960

SEQ ID NO: 3105 - DNA, 201 bp, Homo sapiens; identical to SEQ ID NO: 2962

SEQ ID NO: 3106 - DNA, 201 bp, Homo sapiens; identical to SEQ ID NO: 2964

SEQ ID NO: 3107 - DNA, 201 bp, Homo sapiens; identical to SEQ ID NO: 2979

SEQ ID NO: 3108 - DNA, 201 bp, Homo sapiens; identical to SEQ ID NO: 2966

SEQ ID NO: 3109 - DNA, 201 bp, Homo sapiens; identical to SEQ ID NO: 2967

SEQ ID NO: 3110 - DNA, 201 bp, Homo sapiens; identical to SEQ ID NO: 2968

SEQ ID NO: 3111 - DNA, 201 bp, Homo sapiens
ggagcctgtctcgctggatcagccccaaggtgtggaaggagcactttgaggcctgggactgcatcttccagtacggtgacaactgtatccagaaaatctaycaggaactggccttcaaccgccctcaacactacacaggcatcgtggcagagctcctgttgaaggcggaactgtcactagaagccatcaaggccaactcta

SEQ ID NO: 3112 - DNA, 201 bp, Homo sapiens
agcatcagtgaacatccccagaaggcaaccaccgagctgcccttgctgcgggcggccctcaaggagaccttgcggctctaccctgtgggtctgtttttggwgcgagtggtgagctcagacttggtgcttcagaactaccacatcccagctgggacattggtacaggttttcctctactcgctgggtcgcaatgccgccttg

SEQ ID NO: 3113 - DNA, 201 bp, Homo sapiens
cagcctcatgccccaggcctcgtctttcatggaccaggtcttgttcaagcagcgagtgttgggtcctctgcttcctgagctgtcccctggagaaggtcccraggatgctgtcaggagatggaagagtcatgtggggtgggaacctggggtgtggttccagaaatgtttttggcaacaggagagacaggattgggccaacaa

SEQ ID NO: 3114 - DNA, 201 bp, Homo sapiens
gtgtgttccccagctgatcatgtcagcctcatgccccaggcctcgtctttcatggaccaggtcttgttcaagcagcgagtgttgggtcctctgcttcctgwgctgtcccctggagaaggtcccgaggatgctgtcaggagatggaagagtcatgtggggtgggaacctggggtgtggttccagaaatgtttttggcaacag

SEQ ID NO: 3115 - DNA, 201 bp, Homo sapiens
aaccgattgcggctgaacccagatgtgctgtcgcccaaggccgtgcagaggttcctcccgatggtggatgcagtggccagggacttctcccaggccctgargaagaaggtgctgcagaacgcccgggggagcctgaccctggacgtccagcccagcatcttccactacaccatagaagccagcaacttagctctttttgga

SEQ ID NO: 3116 - DNA, 201 bp, Homo sapiens
gcgcctggcagaggcagagatgctgctgctgctgcaccacgtgctgaagcacttcctggtggagacactaactcaagaggacataaagatggtctacagcktcatattgaggcctggcacgtcccccctcctcactttcagagcgattaactagtcttgcatctgcacccagggtcccagcctggccaccagcttccctct

SEQ ID NO: 3117 - DNA, 201 bp, Homo sapiens
tgacacattttcaagtgatacaactgagtctcgaggggcgtgtgttccccagctgatcatgtcagcctcatgccccaggcctcgtctttcatggaccaggycttgttcaagcagcgagtgttgggtcctctgcttcctgagctgtcccctggagaaggtcccgaggatgctgtcaggagatggaagagtcatgtggggtgg

SEQ ID NO: 3118 - DNA, 201 bp, Homo sapiens
ctttcagagcgattaactagtcttgcatctgcacccagggtcccagcctggccaccagcttccctctgcctgaccccaggccacctgtcttctctcccacrtgcacagcttcctgagtcacccctctgtccagccagctcctgcacaaatggaactccccagggcctccaggactggggcttgccaggcttgtcaaatagc

SEQ ID NO: 3119 - DNA, 201 bp, Homo sapiens
cctgtggtcacttatcctgacacattttcaagtgatacaactgagtctcgaggggcgtgtgttccccagctgatcatgtcagcctcatgccccaggcctcrtctttcatggaccaggtcttgttcaagcagcgagtgttgggtcctctgcttcctgagctgtcccctggagaaggtcccgaggatgctgtcaggagatgga

SEQ ID NO: 3120 - DNA, 201 bp, Homo sapiens
cgaggcctgagcggtataatccccagcgctggctagacatcaggggctccggcaggaacttccaccacgtgccctttggctttggcatgcgccagtgcctygggcggcgcctggcagaggcagagatgctgctgctgctgcaccacgtgctgaagcacttcctggtggagacactaactcaagaggacataaagatggtct

SEQ ID NO: 3121 - DNA, 201 bp, Homo sapiens
ggctgaggctgctgcagatctggagggagcagggttatgagcacctgcacctggagatgcaccagaccttccaggagctggggcccattttcaggtacaayttgggaggaccacgcatggtgtgtgtgatgctgccggaggatgtggagaagctgcaacaggtggacagcctgcatccctgcaggatgatcctggagccct

SEQ ID NO: 3122 - DNA, 201 bp, Homo sapiens
gggcaaaggcagaggtgtgcgtggcagcgccctggctgtccctgcaaagggcacgggcactgggcactagagccgctcgggcccctaggacggtgctgccrtttgaagccatgccccagcatccaggcaacaggtggctgaggctgctgcagatctggagggagcagggttatgagcacctgcacctggagatgcaccaga

SEQ ID NO: 3123 - DNA, 201 bp, Homo sapiens
gatcccagcatctcagagtccagtcaagttccctcctgcagcctgaccccaggcagctcgagcatgccctgagctctctgaaagttgtcaccctggaataygatcctgcagggtagactaaaaaggcccctgtggtcacttatcctgacacattttcaagtgatacaactgagtctcgaggggcgtgtgttccccagctga

SEQ ID NO: 3124 - DNA, 192 bp, Homo sapiens
ggaatggcactcagggcaaaggcagaggtgtgcgtggcagcgccctggctgtccctgcaaagggcacgggcactgggcactagagccgctcrggcccctaggacggtgctgccgtttgaagccatgccccagcatccaggcaacaggtggctgaggctgctgcagatctggagggagcagggttatgagcac

SEQ ID NO: 3125 - DNA, 201 bp, Homo sapiens
ctgatcatgtcagcctcatgccccaggcctcgtctttcatggaccaggtcttgttcaagcagcgagtgttgggtcctctgcttcctgagctgtcccctggrgaaggtcccgaggatgctgtcaggagatggaagagtcatgtggggtgggaacctggggtgtggttccagaaatgtttttggcaacaggagagacaggatt

SEQ ID NO: 3126 - DNA, 188 bp, Homo sapiens
ggaatggcactcagggcaaaggcagaggtgtgcgtggcagcgccctggctgtccctgcaaagggcacgggcactgggcactagagccrctcgggcccctaggacggtgctgccgtttgaagccatgccccagcatccaggcaacaggtggctgaggctgctgcagatctggagggagcagggttatga

SEQ ID NO: 3127 - DNA, 201 bp, Homo sapiens
gcaccacgtgctgaagcacttcctggtggagacactaactcaagaggacataaagatggtctacagcttcatattgaggcctggcacgtcccccctcctcrctttcagagcgattaactagtcttgcatctgcacccagggtcccagcctggccaccagcttccctctgcctgaccccaggccacctgtcttctctcccac

SEQ ID NO: 3128 - DNA, 201 bp, Homo sapiens
attggtacaggttttcctctactcgctgggtcgcaatgccgccttgttcccgaggcctgagcggtataatccccagcgctggctagacatcaggggctccrgcaggaacttccaccacgtgccctttggctttggcatgcgccagtgcctcgggcggcgcctggcagaggcagagatgctgctgctgctgcaccacgtgct

SEQ ID NO: 3129 - DNA, 201 bp, Homo sapiens
agcgggatcccagcatctcagagtccagtcaagttccctcctgcagcctgaccccaggcagctcgagcatgccctgagctctctgaaagttgtcaccctgkaatacgatcctgcagggtagactaaaaaggcccctgtggtcacttatcctgacacattttcaagtgatacaactgagtctcgaggggcgtgtgttcccca

SEQ ID NO: 3130 - DNA, 201 bp, Homo sapiens
tggctagacatcaggggctccggcaggaacttccaccacgtgccctttggctttggcatgcgccagtgcctcgggcggcgcctggcagaggcagagatgcygctgctgctgcaccacgtgctgaagcacttcctggtggagacactaactcaagaggacataaagatggtctacagcttcatattgaggcctggcacgtcc

SEQ ID NO: 3131 - DNA, 201 bp, Homo sapiens
atcagccccaaggtgtggaaggagcactttgaggcctgggactgcatcttccagtacggtgacaactgtatccagaaaatctaccaggaactggccttcarccgccctcaacactacacaggcatcgtggcagagctcctgttgaaggcggaactgtcactagaagccatcaaggccaactctatggaactcactgcaggg

SEQ ID NO: 3132 - DNA, 201 bp, Homo sapiens
aggcctgggactgcatcttccagtacggtgacaactgtatccagaaaatctaccaggaactggccttcaaccgccctcaacactacacaggcatcgtggcrgagctcctgttgaaggcggaactgtcactagaagccatcaaggccaactctatggaactcactgcagggagcgtggacacgacagcgtttcccttgctga

SEQ ID NO: 3133 - DNA, 201 bp, Homo sapiens
agccctgggtggcctacagacaacatcgtgggcacaaatgtggcgtgttcttgttgaatgggcctgaatggcgcttcaaccgattgcggctgaacccagawgtgctgtcgcccaaggccgtgcagaggttcctcccgatggtggatgcagtggccagggacttctcccaggccctgaagaagaaggtgctgcagaacgccc

SEQ ID NO: 3134 - DNA, 201 bp, Homo sapiens
tccagtacggtgacaactgtatccagaaaatctaccaggaactggccttcaaccgccctcaacactacacaggcatcgtggcagagctcctgttgaaggcrgaactgtcactagaagccatcaaggccaactctatggaactcactgcagggagcgtggacacgacagcgtttcccttgctgatgacgctctttgagctgg

SEQ ID NO: 3135 - DNA, 201 bp, Homo sapiens
ccagggcctccaggactggggcttgccaggcttgtcaaatagcaaggccagggcacagctggagacgatcttgctggcagggcctggccttgtccccagcyccacctggccccttctccagcaagcagtgccctctggacagcttgactctactcccagcgctggctccaggctcctcatgaggccatgcaagggtgctgt

SEQ ID NO: 3136 - DNA, 201 bp, Homo sapiens
gccaactctatggaactcactgcagggagcgtggacacgacagcgtttcccttgctgatgacgctctttgagctggctcggaaccccgacgtgcagcagaycctgcgccaggagagcctggccgccgcagccagcatcagtgaacatccccagaaggcaaccaccgagctgcccttgctgcgggcggccctcaaggagacc

SEQ ID NO: 3137 - DNA, 201 bp, Homo sapiens
tttatctcctgggattttcattagggcaaagatctcagcagccagctcctggtagctgatgaggatcagagcgtttgttcccccatgaaaggggaaatacytaggtaatcattccaggtgtgttcagtagttccaggactcagggactcaggccagtcaccctgtgaccgcaggttgctttcccaccctgggcaatgcagt

SEQ ID NO: 3138 - DNA, 201 bp, Homo sapiens
aaggagaccttgcggctctaccctgtgggtctgtttttggagcgagtggtgagctcagacttggtgcttcagaactaccacatcccagctgggacattggwacaggttttcctctactcgctgggtcgcaatgccgccttgttcccgaggcctgagcggtataatccccagcgctggctagacatcaggggctccggcagg

SEQ ID NO: 3139 - DNA, 201 bp, Homo sapiens
aggcaaccaccgagctgcccttgctgcgggcggccctcaaggagaccttgcggctctaccctgtgggtctgtttttggagcgagtggtgagctcagacttrgtgcttcagaactaccacatcccagctgggacattggtacaggttttcctctactcgctgggtcgcaatgccgccttgttcccgaggcctgagcggtata

SEQ ID NO: 3140 - DNA, 201 bp, Homo sapiens
ggaggaggggccggggcggagctaagatgcggaggagggtgacgcactagctctccagttcgcccgttcctggcctgacccccaccaaggcccataccgcwgtaggctcctcgggctgcccctcggttgacaatggtctccaggatggtctctaccatgctatctggcctactgttttggctggcatctggatggactcca

SEQ ID NO: 3141 - DNA, 201 bp, Homo sapiens
attatggatacaaagcagctgtatgtagatagtgtattgtcttcacaccgatgattctgctttttgctaaattagaataagagcttttttgtttcttgggkttttaaaatgtgaatctgcaatgatcataaaaattaaaatgtgaatgtcaacaataaaaaccttgggcattgttatacaccagtaaagaaggctgtactc

SEQ ID NO: 3142 - DNA, 201 bp, Homo sapiens
tacatagataattatggatacaaagcagctgtatgtagatagtgtattgtcttcacaccgatgattctgctttttgctaaattagaataagagcttttttktttcttgggtttttaaaatgtgaatctgcaatgatcataaaaattaaaatgtgaatgtcaacaataaaaaccttgggcattgttatacaccagtaaagaa

SEQ ID NO: 3143 - DNA, 201 bp, Homo sapiens
gtcctgttggaaaaacagcagatgatggatgtctagaaaacacccctgacactgcagagttcagtcgagagttccagttgcaccagcatctctttgatccrgaacatgactatccaggcttgggcaagtggaacaagaaactcctttacgagaagatgaagggaggagagagacgaaagcggaggagtgtcaatccatatc

SEQ ID NO: 3144 - DNA, 201 bp, Homo sapiens; identical to SEQ ID NO: 3140

SEQ ID NO: 3145 - DNA, 201 bp, Homo sapiens
attatggatacaaagcagctgtatgtagatagtgtattgtcttcacaccgatgattctgctttttgctaaattagaataagagcttttttgtttcttgggkttttaaaatgtgaatctgcaatgatcataaaaattaaaatgtgaatgtcaacaataaaaagcaagactatgaaaggctcagatttcttgcagtttaaaat

SEQ ID NO: 3146 - DNA, 201 bp, Homo sapiens
tacatagataattatggatacaaagcagctgtatgtagatagtgtattgtcttcacaccgatgattctgctttttgctaaattagaataagagcttttttktttcttgggtttttaaaatgtgaatctgcaatgatcataaaaattaaaatgtgaatgtcaacaataaaaagcaagactatgaaaggctcagatttcttgc

SEQ ID NO: 3147 - DNA, 201 bp, Homo sapiens
cctgtcctgttggaaaaacagatgatggatgtctagaaaacacccctgacactgcagagttcagtcgagagttccagttgcaccagcatctctttgatccrgaacatgactatccaggcttgggcaagtggaacaagaaactcctttacgagaagatgaagggaggagagagacgaaagcggaggagtgtcaatccatatc

SEQ ID NO: 3148 - DNA, 201 bp, Homo sapiens
ggaggaggggccggggcggagctaagatgcggaggagggtgacgcactagctctccagttcgcccgttcctggcctgacccccaccaaggcccataccgcwgtaggctcctcgggctgcccctcgaatggtctccaggatggtctctaccatgctatctggcctactgttttggctggcatctggatggactccagcattt

SEQ ID NO: 3149 - DNA, 201 bp, Homo sapiens; identical to SEQ ID NO: 3145

SEQ ID NO: 3150 - DNA, 201 bp, Homo sapiens; identical to SEQ ID NO: 3146

SEQ ID NO: 3151 - DNA, 201 bp, Homo sapiens; identical to SEQ ID NO: 3143

SEQ ID NO: 3152 - DNA, 201 bp, Homo sapiens
attgatgagtttcacactgatcttgtagataacacaataaagtgctttaaataggcacttttcttttgagctcggttaatcttgcattacagtctcatttyttttgtgaacttggttaatgtttctatataacttgcttttatctatagttacagcagttgcagggattcgtttgtttttactggagacatttttcaggaa

SEQ ID NO: 3153 - DNA, 201 bp, Homo sapiens
cgggttttccgtgcaccgccccccgcccccgccccttcccctcgcggggaccccggcccgtggggtgcaaagtgtgacccgcactggggggcggcccgggsatagctgcgttcccggctgaagattttgttttgtttttgaggcggccaggtttgttttggcaggaaacagtcattgggggcggcgcggggcggagcggtg

SEQ ID NO: 3154 - DNA, 201 bp, Homo sapiens
cctctgcgggggtgtggcgtgcgcagccagccattcaactgggcggtttcattcgcttccccactccaccgcgcttgtaactcgcgctctgattggcctcsctgctcttgccccgcccgggtctgtccccccacttgttccctaggaatagaatcattggtctctgaaggtggagaaatgttcttgtgttgagctttttat

SEQ ID NO: 3155 - DNA, 201 bp, Homo sapiens
gaggtcctgcggcaggggtggggctccaggtgcggccgcctctgcgggggtgtggcgtgcgcagccagccattcaactgggcggtttcattcgcttccccrctccaccgcgcttgtaactcgcgctctgattggcctccctgctcttgccccgcccgggtctgtccccccacttgttccctaggaatagaatcattggtct

SEQ ID NO: 3156 - DNA, 201 bp, Homo sapiens
gagaaggaagtaaaaaggaagagatcgcatcctgaattggaaaatgtgaaaatctctgaaacaactgggaattcaaagtttagacctgatactagttccaratcatcagatttgggatctgtaactgaatcagatattgactgtactgataatacaaaaaccaaaaggaggaaaacgaaaggaaaagcaaaagtagttaga

SEQ ID NO: 3157 - DNA, 201 bp, Homo sapiens
tacatttcacaagaatgcgagtttctttaaaaaaaccaagattctgagtgactcagaagactctgaatctgaagagcaagatagagaagatgggaaatgtsataaaatggaaatgaacccaatttcaggaaatctgaactgtgaccctattgctatgtcccagtgttcctcagatcatggatgtgaaactgatttagattc

SEQ ID NO: 3158 - DNA, 201 bp, Homo sapiens
gaagagattggactgggagggcaacgagcacaacaggagctacgaggagttggtcttgtccaataagcatgtggctcctgatcatcttttgcaaatctgcsagcgcatcggtcctatgttggataaagaaattccacccagtatttcaagagtcacttctttacttggtgcaggaaggcagtctttgctacgtacagcaaa

SEQ ID NO: 3159 - DNA, 201 bp, Homo sapiens
gtagcagagatggaacagcacggatttggagatttgagcagttagaatggaggagcattttattggatatggctaccagaatctcaggggacttatcttcygaagaggaaaggtttatgaaacctaaagtaacaatgatagcttggaatcaaaatgatagcattgttgtcacagctgtgaatgatcatgtcctcaaagtgt

SEQ ID NO: 3160 - DNA, 201 bp, Homo sapiens
cctgctataagactactattcctttccagaatgcaaggccttgaagacatgattccttagaggaagaatataatgggaagtgtacaggctaggaagaacttgaagtgaacaaatttcaaaatcttaacctgatgctaattttcagggttctccattacagtgtaaaaattcagaccacgacaactatggtgtcatgaggaa

SEQ ID NO: 3161 - DNA, 201 bp, Homo sapiens
ctgctataagactactattcctttccagaatgcaaggccttgaagacatgattccttagaggaagaatataatgggaagtgtacaggctaggaagaacttgaagtgaacaaatttcaaaatcttaacctgatgctaattttcagggttctccattacagtgtaaaaattcagaccacgacaactatggtgtcatgaggaaa

SEQ ID NO: 3162 - DNA, 201 bp, Homo sapiens
tgctataagactactattcctttccagaatgcaaggccttgaagacatgattccttagaggaagaatataatgggaagtgtacaggctaggaagaacttgaagtgaacaaatttcaaaatcttaacctgatgctaattttcagggttctccattacagtgtaaaaattcagaccacgacaactatggtgtcatgaggaaaa

SEQ ID NO: 3163 - DNA, 201 bp, Homo sapiens
actgtacaaatatctcagaactttctaacacatctgaaaatgatgagcaaaatgctgaggatttggatgatagtgatcttcctaaaacatcttctggaagraggagagtccatgatgggaaaaaaagcatcagagctacgaactatgttgaaagcaactggaagaaacagtgtaaggaactagtgaacttaatttttcagt

SEQ ID NO: 3164 - DNA, 201 bp, Homo sapiens
gctataagactactattcctttccagaatgcaaggccttgaagacatgattccttagaggaagaatataatgggaagtgtacaggctaggaagaacttgaagtgaacaaatttcaaaatcttaacctgatgctaattttcagggttctccattacagtgtaaaaattcagaccacgacaactatggtgtcatgaggaaaaa

SEQ ID NO: 3165 - DNA, 201 bp, Homo sapiens
tgaacagagcttaaagtcagaaattgaagaagaggagctaaaagatgaaaatcaaccattaccagtgtccagttctcacactgcccagagcaatgttgatsaatctgaaaacagagactcagagtcagaaagtgatttgcgggtagcccggaaaaattggcatgctaatggttacaagtcccatactccagcaccttcaaa

SEQ ID NO: 3166 - DNA, 201 bp, Homo sapiens
ctataagactactattcctttccagaatgcaaggccttgaagacatgattccttagaggaagaatataatgggaagtgtacaggctaggaagaacttgaagtgaacaaatttcaaaatcttaacctgatgctaattttcagggttctccattacagtgtaaaaattcagaccacgacaactatggtgtcatgaggaaaaaa

SEQ ID NO: 3167 - DNA, 201 bp, Homo sapiens
tcaagaattggttaaaatagttggaatacgatatgaagttgggccccctacactctgttgcctaaaactagcatttatagatccagcaactggaaaacttmtggacaaatctttctctattagatatcatgatatgccagatgttattgactttcttgtattgcgtcaattttatgatgaagcaagacagaggaattggca

SEQ ID NO: 3168 - DNA, 201 bp, Homo sapiens
gcttctgctgtagctagaaaaaagttattacataattctgaagatgaacagagcttaaagtcagaaattgaagaagaggagctaaaagatgaaaatcaacyattaccagtgtccagttctcacactgcccagagcaatgttgatgaatctgaaaacagagactcagagtcagaaagtgatttgcgggtagcccggaaaaat

SEQ ID NO: 3169 - DNA, 201 bp, Homo sapiens
caagaattggttaaaatagttggaatacgatatgaagttgggccccctacactctgttgcctaaaactagcatttatagatccagcaactggaaaacttayggacaaatctttctctattagatatcatgatatgccagatgttattgactttcttgtattgcgtcaattttatgatgaagcaagacagaggaattggcag

SEQ ID NO: 3170 - DNA, 201 bp, Homo sapiens
tctagacaaaggacatgtaggcgtaaatatccaaattatggtagaagaaatcgtagctggcgtgagttatcttctggaaatgagtcttcaagctctgtaaracatgagacttcctgtgatcagagtgaaggttctggttcttcagaagaggatgaatggagaagtgacagaaaaagtgagagttacagcgaaagttcaagt

SEQ ID NO: 3171 - DNA, 201 bp, Homo sapiens
ggtgtcatgaggaaaaaaaatcaggcatttttccaaaggaagtgctaatgggcctatttgacttctgagtgaagcaaaaactacccagatccattccctayaattcacatccccaaaggtcaaaaacaaactaggaggacctgggaatttcagctggagatactgattattgagttctgaagtagagtgttggaaataggc

SEQ ID NO: 3172 - DNA, 201 bp, Homo sapiens
ccagtctacctcaagtaggacagcttatcttggaacccacaagacaagtgctggtatctcttcaggtgttacttctggtgactcttcagattcagcagaaycatcagaaaggaggaaaagaaatagacctataacaaatggttctacattatctgaaagtgaagtggaagattctttagctacctctttgtcatcgtcagc

SEQ ID NO: 3173 - DNA, 201 bp, Homo sapiens
aacagtcatatttttagatacagtgaaatcttttatgtttctctacagcaccttaaaaattagaacttgaatactttgagtaaacttactacaatctcatsccaacaaactttaatggtagcatgtttggcctatttcattgtggcctgtactaggattagaaaatttggtcgtggtataacaaagaagtgtatttacaat

SEQ ID NO: 3174 - DNA, 201 bp, Homo sapiens
tgcagctacggctgccaataagatcaagctcatgagtgatgtagaagatgtcagtttagaaaatgtgcacactagaagcaaaaatggaaggaaaaaacctytccatcttgcttgtactacagctaagaagaaattgagtgattgtgaaggaagtgtacattgtgaagtaccaagtgaacagtatgcctgtgaaggcaagcc

SEQ ID NO: 3175 - DNA, 200 bp, Homo sapiens
tgagaaatttgtggttgcatgtctgttttaaaaaaaaggctttttgttttttagcataagccagaatattctaacctactaagtctgtgtcctttgctccytttgtagtatactttcatctaaattactgatccccaatatgttgatacacaggtgagaaagggaagaattcctaataaactgctattacttttaggtgc

SEQ ID NO: 3176 - DNA, 201 bp, Homo sapiens
ggtgcttgagaacttgtgccccagttgctgtgctccaaggacacacaggatcaattacatctttacagtttagcccgatggccaaaggctctcaaagatayatggtttccactggtgctgatgggacagtttgcttttggcaatgggatttagaatccttaaaatttagcccacgtcccctgaagttcactgaaaagccta

SEQ ID NO: 3177 - DNA, 201 bp, Homo sapiens
aaagacaaatggcctgctataagactactattcctttccagaatgcaaggccttgaagacatgattccttagaggaagaatataatgggaagtgtacaggstaggaagaacttgaagtgaacaaatttcaaaatcttaacctgatgctaattttcagggttctccattacagtgtaaaaattcagaccacgacaactatgg

SEQ ID NO: 3178 - DNA, 201 bp, Homo sapiens
gggatattacaaaaggtaccaagatgaaacattattttaatatgattgaaggacaaggacatggagctgtgtttgactgtaagttttcacaggatggacarcattttgcctgtacagattctcatgggcaccttctgatatttggttttggatgcagcaaaccatatgaaaagattcctgatcagatgttcttccatactg

SEQ ID NO: 3179 - DNA, 201 bp, Homo sapiens
gacatgctgatgaagtatttgttctggagacacatccctttgattccagaattatgttatctgcaggacatgatggcagcatatttatatgggatattacmaaaggtaccaagatgaaacattattttaatatgattgaaggacaaggacatggagctgtgtttgactgtaagttttcacaggatggacagcattttgcct

SEQ ID NO: 3180 - DNA, 201 bp, Homo sapiens
cctcctcacgcagtgggctatccagaagcagcaatctcagggtaaccagaactagagctgctcaaagaaaaactggtcccgtttcattagcaaatggatgyggcagaaaagccactcgaaagagagtctatttaagtgattctgataacaattcattggagactggtgaaattctaaaagccagagctggaaataaccgaa

SEQ ID NO: 3181 - DNA, 201 bp, Homo sapiens; identical to SEQ ID NO: 3158

SEQ ID NO: 3182 - DNA, 190 bp, Homo sapiens
cagatcgtgtggacttggccttttcctctgggtctgatgggagcctctggaggattttgagagaggaaggacaagtccgtctttagtttktttttttttttttcttgagatggagtttcgctctcgttgcccaggctggagtacaatggctcgatctcggctcactgcaacctccacctcctgggttcag

SEQ ID NO: 3183 - DNA, 201 bp, Homo sapiens
tacttgtgtcaagctccatgtcgttgttttgtgatgagcagtgatttagaactggccagaccttagaagagtcttcagcaagctgccctagggtaggggcrtattctctgtttgttttgtactggtaccccaggaggatgccttgtaactgctctttggtcatgatagtggtaatgaatccattcatgtaaaatgcaatat

SEQ ID NO: 3184 - DNA, 201 bp, Homo sapiens
tgataatgtaactataaatcatgctgtggactataaaattctctgcatttagcatagaacattgaattttattacataagtgtttaatgggtccttctgcwttaaaaagttgataaagatatagatgttaagctaaaaagcttgaatttattctgagatgttgtttgaggttttatcaatgtgagttcttaattttccatt

SEQ ID NO: 3185 - DNA, 201 bp, Homo sapiens
tatttcatttgatatttagcttctgaaagccctttgttataaagggaagtgattttctaaatttggtagcagcttgaaaacaagcaccacaaatgtaaaaytgcatggttctttttttactaatttaatttttttgccaagttatgtgctagcaaaatgtttgaaattgctattctttttctgttagcttggtatatatga

SEQ ID NO: 3186 - DNA, 201 bp, Homo sapiens
attttccattttgtagctcactcataacttcattgaatgtaattgtatgtgtctaataaactctttaaatgctagaggtatttcatttgatatttagcttmtgaaagccctttgttataaagggaagtgattttctaaatttggtagcagcttgaaaacaagcaccacaaatgtaaaattgcatggttctttttttactaa

SEQ ID NO: 3187 - DNA, 201 bp, Homo sapiens
gaggctcagtagaggtttagtatgatgccttccctttcttctttgagttatgaagaaactaatttctggcacagtgtgactgcttcaaacctatgttctgmtgctatctcctatagaggagggcagacttttttttcttagtgcatttgctggtaggtcaaggagggatggactttgaattagtgttcagagtcacagatc

SEQ ID NO: 3188 - DNA, 201 bp, Homo sapiens; identical to SEQ ID NO: 3156

SEQ ID NO: 3189 - DNA, 201 bp, Homo sapiens; identical to SEQ ID NO: 3157

SEQ ID NO: 3190 - DNA, 201 bp, Homo sapiens; identical to SEQ ID NO: 3158

SEQ ID NO: 3191 - DNA, 201 bp, Homo sapiens
ctgcacctaaagaggaaattgggtttataagaaaatggaggcaaagaacttaagttttaagaaaaagcacttcaaaacagaagggcaaatggaaaaggggratataaaacaaaccaataaaaataccatctgagggtgttactgtccaaaagtaaagaataagatgcatcactaagccctttgcactcgttatgacctcgt

SEQ ID NO: 3192 - DNA, 201 bp, Homo sapiens
aagatgcatcactaagccctttgcactcgttatgacctcgtaagtaaaaattatcacttagaataaggggtgcacactacattccctctgtcttctagacttttttttttgtagaagaatcagaaaacaatttactaacctccctgtttgatattaaaaataggaagaattttaatattttctgttagtacaagttgaact

SEQ ID NO: 3193 - DNA, 201 bp, Homo sapiens
gaataaggggtgcacactacattccctctgtcttctagacttttttttttgtagaagaatcagaaaacaatttactaacctccctgtttgatattaaaaahaggaagaattttaatattttctgttagtacaagttgaacttgattgtgccaactgaaaccccagaggtttgtatatcagtagaatgcaagaacattgtta

SEQ ID NO: 3194 - DNA, 201 bp, Homo sapiens
ttgaacttgattgtgccaactgaaaccccagaggtttgtatatcagtagaatgcaagaacattgttaaaggtgcttacgatcttttttgttttcctttccrctccattgtatcaattttttgagtaacttttaaatggctagaaaatggtctttttgctttgcccttttaaagctgaaataaccagctccattcttttcat

SEQ ID NO: 3195 - DNA, 201 bp, Homo sapiens
gttgaagttatacctctgaatttctgctgtggatatcaaggaaataataaagcagaaaccccaagaaatttgcaacttaacagtttgagactgtctcttaycctagtatttgggaagagaaggaataaatttgtcaaaactaggtgagaaaatagagcattgtgggaaaaactgagtccaactagattagcaaatgttaat

SEQ ID NO: 3196 - DNA, 201 bp, Homo sapiens
gaaaacaatttactaacctccctgtttgatattaaaaataggaagaattttaatattttctgttagtacaagttgaacttgattgtgccaactgaaacccyagaggtttgtatatcagtagaatgcaagaacattgttaaaggtgcttacgatcttttttgttttcctttccactccattgtatcaattttttgagtaact

SEQ ID NO: 3197 - DNA, 201 bp, Homo sapiens
aggaaaacgaaaggaaaagcaaaagtagttagaaaaggtaaaacttttacagctaacatatctaaaactgtgagacgtcaaagacaaagcaaacgccctasgttaagtgtggatgataatgactgggaggatttggactatgcaaaatctaaaagagttcttcgacgttcaaaaataaaaacgagaaatcagggtagaagg

SEQ ID NO: 3198 - DNA, 201 bp, Homo sapiens
actaacctccctgtttgatattaaaaataggaagaattttaatattttctgttagtacaagttgaacttgattgtgccaactgaaaccccagaggtttgtrtatcagtagaatgcaagaacattgttaaaggtgcttacgatcttttttgttttcctttccactccattgtatcaattttttgagtaacttttaaatggct

SEQ ID NO: 3199 - DNA, 201 bp, Homo sapiens
gaataaatttgtcaaaactaggtgagaaaatagagcattgtgggaaaaactgagtccaactagattagcaaatgttaattcctagctcaaactgtgaatastaaggattgaaaagtaaagtatgtaatgctaagggctgtgttgtcttttcttacgattttaagttttaaaggctgttaaattacagagatgttgcccaag

SEQ ID NO: 3200 - DNA, 201 bp, Homo sapiens
ctctcatttgtggcttagagagctatcaccatttcagaactatgatgcttttcttctcagaacttgtgttaagtagatagtaaacagattgattcatgatmattgtccttgactaagactgaaaagactaatgggatgccttttactttgctaattttaaaaactggtgatagatgtcaaatccattaatttatttaaact

SEQ ID NO: 3201 - DNA, 201 bp, Homo sapiens; identical to SEQ ID NO: 3163

SEQ ID NO: 3202 - DNA, 201 bp, Homo sapiens
agcattttcttttaaattgtgcactaacaaaatgctatataatctgtcttctgtccaagatctcctggtttccattgtaagggatttaaccaaaatcttgytcttccataatcttactctgtgaaatagaggaattcgtgtgccttagatttagaagtgtgttctttaatagagtgtacagggctaaaagagtatttaagt

SEQ ID NO: 3203 - DNA, 201 bp, Homo sapiens; identical to SEQ ID NO: 3168

SEQ ID NO: 3204 - DNA, 201 bp, Homo sapiens
aagttgatatatttatttatcaggtatcttgcagttgtcaccaaatactgtagttttcttatgttgtatggaaattatagttcaattattttaatgtgatrgagtgcaacaagtcattgtagaacttttcacctgttaatgttgaagttatacctctgaatttctgctgtggatatcaaggaaataataaagcagaaaccc

SEQ ID NO: 3205 - DNA, 201 bp, Homo sapiens; identical to SEQ ID NO: 3170

SEQ ID NO: 3206 - DNA, 201 bp, Homo sapiens; identical to SEQ ID NO: 3172

SEQ ID NO: 3207 - DNA, 201 bp, Homo sapiens; identical to SEQ ID NO: 3178

SEQ ID NO: 3208 - DNA, 201 bp, Homo sapiens; identical to SEQ ID NO: 3159

SEQ ID NO: 3209 - DNA, 201 bp, Homo sapiens
aagttttaagaaaaagcacttcaaaacagaagggcaaatggaaaaggggaatataaaacaaaccaataaaaataccatctgagggtgttactgtccaaaaktaaagaataagatgcatcactaagccctttgcactcgttatgacctcgtaagtaaaaattatcacttagaataaggggtgcacactacattccctctgtc

SEQ ID NO: 3210 - DNA, 201 bp, Homo sapiens
taatattttctgttagtacaagttgaacttgattgtgccaactgaaaccccagaggtttgtatatcagtagaatgcaagaacattgttaaaggtgcttacratcttttttgttttcctttccactccattgtatcaattttttgagtaacttttaaatggctagaaaatggtctttttgctttgcccttttaaagctgaaa

SEQ ID NO: 3211 - DNA, 201 bp, Homo sapiens
ctctgtcttctagacttttttttttgtagaagaatcagaaaacaatttactaacctccctgtttgatattaaaaataggaagaattttaatattttctgtyagtacaagttgaacttgattgtgccaactgaaaccccagaggtttgtatatcagtagaatgcaagaacattgttaaaggtgcttacgatcttttttgttt

SEQ ID NO: 3212 - DNA, 201 bp, Homo sapiens; identical to SEQ ID NO: 3165

SEQ ID NO: 3213 - DNA, 201 bp, Homo sapiens
ggtctttttgctttgcccttttaaagctgaaataaccagctccattcttttcatgaatagtaagttgatatatttatttatcaggtatcttgcagttgtcmccaaatactgtagttttcttatgttgtatggaaattatagttcaattattttaatgtgatggagtgcaacaagtcattgtagaacttttcacctgttaat

SEQ ID NO: 3214 - DNA, 201 bp, Homo sapiens
atttatttatcaggtatcttgcagttgtcaccaaatactgtagttttcttatgttgtatggaaattatagttcaattattttaatgtgatggagtgcaacragtcattgtagaacttttcacctgttaatgttgaagttatacctctgaatttctgctgtggatatcaaggaaataataaagcagaaaccccaagaaattt

SEQ ID NO: 3215 - DNA, 201 bp, Homo sapiens; identical to SEQ ID NO: 3167

SEQ ID NO: 3216 - DNA, 201 bp, Homo sapiens; identical to SEQ ID NO: 3169

SEQ ID NO: 3217 - DNA, 201 bp, Homo sapiens
ccattgtatcaattttttgagtaacttttaaatggctagaaaatggtctttttgctttgcccttttaaagctgaaataaccagctccattcttttcatgartagtaagttgatatatttatttatcaggtatcttgcagttgtcaccaaatactgtagttttcttatgttgtatggaaattatagttcaattattttaatg

SEQ ID NO: 3218 - DNA, 201 bp, Homo sapiens
tgtagaagaatcagaaaacaatttactaacctccctgtttgatattaaaaataggaagaattttaatattttctgttagtacaagttgaacttgattgtgycaactgaaaccccagaggtttgtatatcagtagaatgcaagaacattgttaaaggtgcttacgatcttttttgttttcctttccactccattgtatcaat

SEQ ID NO: 3219 - DNA, 201 bp, Homo sapiens
ctgtccaaaagtaaagaataagatgcatcactaagccctttgcactcgttatgacctcgtaagtaaaaattatcacttagaataaggggtgcacactacaktccctctgtcttctagacttttttttttgtagaagaatcagaaaacaatttactaacctccctgtttgatattaaaaataggaagaattttaatattttc

SEQ ID NO: 3220 - DNA, 201 bp, Homo sapiens
ttcataagtacatacattcttttggtataaaacaatattttgacagtttaggcttcattaatagaactattctgattatttggactgcattaattggtcaytgactggccatccaattaccattttttctttcagtccaaaatagttagacccttgcatacagaagtggtattttggtttttaatcagatttggtttcatc

SEQ ID NO: 3221 - DNA, 201 bp, Homo sapiens
gctttcttggaaagactcactttaccaagcatataaaggaaaaatgatttcaaacattgacaagatagatgagtgttaacaaagctttcttttttcgtgtyctccttatttaaaaaggtatacttacaatgtgaagtaacttatgaataaaaggaaaagtttatcccatattcaaataattcctaaggtcagcctcccttt

SEQ ID NO: 3222 - DNA, 201 bp, Homo sapiens
gtagtttctaacccctgttctatagtagttacaacaatttcacaacctatgtttacagattcttcataaatacatgcatactgacactataatcatgggasgtgtaaccatgattagtaggcgaggtacctaccactttttttttttcttcccctggctacttgagtagaatgcattataccagatctggtcactttcatt

SEQ ID NO: 3223 - DNA, 201 bp, Homo sapiens; identical to SEQ ID NO: 3174

SEQ ID NO: 3224 - DNA, 201 bp, Homo sapiens; identical to SEQ ID NO: 3176

SEQ ID NO: 3225 - DNA, 201 bp, Homo sapiens; identical to SEQ ID NO: 3179

SEQ ID NO: 3226 - DNA, 201 bp, Homo sapiens; identical to SEQ ID NO: 3180

SEQ ID NO: 3227 - DNA, 201 bp, Homo sapiens; identical to SEQ ID NO: 3158

SEQ ID NO: 3228 - DNA, 201 bp, Homo sapiens; identical to SEQ ID NO: 3183

SEQ ID NO: 3229 - DNA, 201 bp, Homo sapiens; identical to SEQ ID NO: 3184

SEQ ID NO: 3230 - DNA, 201 bp, Homo sapiens; identical to SEQ ID NO: 3187

SEQ ID NO: 3231 - DNA, 201 bp, Homo sapiens; identical to SEQ ID NO: 3185

SEQ ID NO: 3232 - DNA, 201 bp, Homo sapiens; identical to SEQ ID NO: 3186

SEQ ID NO: 3233 - DNA, 201 bp, Homo sapiens
ttttggaagaaactccaagaaaagccgaggttgcaggtgcctcatgaggctgaccttgcttttggaaccagagagagcagtcaccgtgccagcctgtgagrgtgaagtctctgccgatccctaagagaagagccaacgtttcactctaaacgcatgctccttctgctttaccggtcattctcaagtctgactacaaattag

SEQ ID NO: 3234 - DNA, 201 bp, Homo sapiens
gcagtgtgtgggagaggaccagccaagcgattctgattcttcccggttttccgaaagcatggcttcgctcagtgactatgaatgctccaggcagagctttrcaagtgactcctccagcaaatccagctctcctgcttcaacaagccctccaagggttgtaacatttgatgaagtgatggctacagcaaggaacttatcaaa

SEQ ID NO: 3235 - DNA, 201 bp, Homo sapiens
cccggtgctacctttttacccacacttaagtgacgcaaaatgcccttcaatggcgagaagcagtgtgtgggagaggaccagccaagcgattctgattcttyccggttttccgaaagcatggcttcgctcagtgactatgaatgctccaggcagagctttgcaagtgactcctccagcaaatccagctctcctgcttcaaca

SEQ ID NO: 3236 - DNA, 201 bp, Homo sapiens
cagctctcctgcttcaacaagccctccaagggttgtaacatttgatgaagtgatggctacagcaaggaacttatcaaacttgactcttgctcatgagattkctgtaaatgagaactttcaattgaaacaagaggctctcccagaaaagagtttggctggtcgagtgaagcacattgttcaccaggccttctgggacgtctt

SEQ ID NO: 3237 - DNA, 201 bp, Homo sapiens
aattagaatcatctggggcgtttaaacacagaggcctgagccctgcctcagacagaataaatcaaagtctccaggagctgtgcccatgaactctttttttyctttttaaagctccccaggtgattctaaagtcagccaggattgagaaccactatgccacactgttgcttttgttcaaggtaactaaatgggctcttaaat

SEQ ID NO: 3238 - DNA, 201 bp, Homo sapiens; identical to SEQ ID NO: 3235

SEQ ID NO: 3239 - DNA, 201 bp, Homo sapiens
agatgacatggaatcaagagttcagtttggtgatgtaaacttttgagatttcatttgacatcaatgtggagatgttaggtaggcatttagatatgaattaygagtttacaggaataatggaaactgtatatgtatttgggaatcatcagtatatgtatgatatataaagccatggaactgggtactagttaacacttagaa

SEQ ID NO: 3240 - DNA, 201 bp, Homo sapiens
ctcacacctgtaatcctagcactttgggaggccgaggcaggcacatcacctgagatcaggagttcaagaccagcctggccaacatgctgaaaccccttctytactaaaatctaaaaattagccgggatgatggcaggtgcctgtaatcccagctgctcgggaggttgagatgggagaatcgcttgaacccaggagatggtg

SEQ ID NO: 3241 - DNA, 201 bp, Homo sapiens
cagcgaacagaatggaatacagttgccgtccccaaggagctgacattctagtaggcatgacaaataaataaacatatattgtcaggtgtattattaagtgstatgaagaaaaataggataaagggacagtaatgggtcagaagtgaggacagcattgttttttagatgtgatggactgggaaggtctctgtaagtaacatt

SEQ ID NO: 3242 - DNA, 201 bp, Homo sapiens; identical to SEQ ID NO: 3236

SEQ ID NO: 3243 - DNA, 201 bp, Homo sapiens; identical to SEQ ID NO: 3234

SEQ ID NO: 3244 - DNA, 201 bp, Homo sapiens
gaaactccaagtgagtataatataatgtgtatttatattgaaattaggttaaaatgatgattttaaatgttaaaatttaaattaaattaaattaaattaaattaaataataaataaaatttaatttaatttaaattaattaaaatttaaaatgttaaaggttaaaatgaaaattaggtgatgttttcatttttgacttcat

SEQ ID NO: 3245 - DNA, 201 bp, Homo sapiens
tgagaccaggagaaagaaggttgggagatgacatggaatcaagagttcagtttggtgatgtaaacttttgagatttcatttgacatcaatgtggagatgtyaggtaggcatttagatatgaattatgagtttacaggaataatggaaactgtatatgtatttgggaatcatcagtatatgtatgatatataaagccatgga

SEQ ID NO: 3246 - DNA, 201 bp, Homo sapiens
aactccaagtgagtataatataatgtgtatttatattgaaattaggttaaaatgatgattttaaatgttaaaatttaaattaaattaaattaaattaaattaaataataaataaaatttaatttaatttaaattaattaaaatttaaaatgttaaaggttaaaatgaaaattaggtgatgttttcatttttgacttcatat

SEQ ID NO: 3247 - DNA, 201 bp, Homo sapiens
gagcaacatctgattttcatttttgaagaatattcttgttcctggctacagaataggtcatgtgggaacaaagagggaaacagaggtaccaattaggtggyattacagttgctcaggcaagaaatgatggtggcttgttccagatggtaatggtggaaggagtgagaagagaccagattctggatacattttgaaagtgga

SEQ ID NO: 3248 - DNA, 201 bp, Homo sapiens
actccaagtgagtataatataatgtgtatttatattgaaattaggttaaaatgatgattttaaatgttaaaatttaaattaaattaaattaaattaaattaaataataaataaaatttaatttaatttaaattaattaaaatttaaaatgttaaaggttaaaatgaaaattaggtgatgttttcatttttgacttcatata

SEQ ID NO: 3249 - DNA, 201 bp, Homo sapiens
ctccaagtgagtataatataatgtgtatttatattgaaattaggttaaaatgatgattttaaatgttaaaatttaaattaaattaaattaaattaaattawataataaataaaatttaatttaatttaaattaattaaaatttaaaatgttaaaggttaaaatgaaaattaggtgatgttttcatttttgacttcatatat

SEQ ID NO: 3250 - DNA, 201 bp, Homo sapiens
tctcagtactgtggtgcagtattagcccaaatctgtgtaatgggtaatattagcattacagaagacacacacatcacatagaccctcagaagacgtaaacrtcacatagaccctatttgtgcatcattttcaagtttaaaacagatatttgtaatgaacagaaaacaatttgtaattaattatattacctatataatactt

SEQ ID NO: 3251 - DNA, 201 bp, Homo sapiens; identical to SEQ ID NO: 3235

SEQ ID NO: 3252 - DNA, 162 bp, Homo sapiens
ttatgacatttaacccctaaggagttgtttttctcacttgttattatcaaacctaatggtttttaattttggtacaactccttaaagggttgaaggttgtracaataactgagggaactgatgttctgaataaatgatgtgaagtaaacacaattgtatttg

SEQ ID NO: 3253 - DNA, 201 bp, Homo sapiens
gtaatattagcattacagaagacacacacatcacatagaccctcagaagacgtaaacatcacatagaccctatttgtgcatcattttcaagtttaaaacaratatttgtaatgaacagaaaacaatttgtaattaattatattacctatataatacttgtaaatgttttcttaaccatttatatttggcttatgacattta

SEQ ID NO: 3254 - DNA, 197 bp, Homo sapiens
aagggccctggatccccttgccccgtcgcgccgtcgtccccccgctatccggttttgtgatggccgcgccgtggctgcctccctagagtccctcagsgccctttaaataccgcgttgggggggacactggggctgggggggtttgttgggctggtgagttttcgaggtgactgtgctgtgctcggtgaggggacgcc

SEQ ID NO: 3255 - DNA, 201 bp, Homo sapiens
tcgcgccgtcgtccccccgctatccggttttgtgatggccgcgccgtggctgcctccctagagtccctcagggccctttaaataccgcgttgggggggacrctggggctgggggggtttgttgggctggtgagttttcgaggtgactgtgctgtgctcggtgaggggacgcccagagagccctgacccggggtcactccgt

SEQ ID NO: 3256 - DNA, 201 bp, Homo sapiens
tataatacttgtaaatgttttcttaaccatttatatttggcttatgacatttaacccctaaggagttgtttttctcacttgttattatcaaacctaatggkttttaattttggtacaactccttaaagggttgaaggttgtgacaataactgagggaactgatgttctgaataaatgatgtgaagtaaacacaattgtatt

SEQ ID NO: 3257 - DNA, 201 bp, Homo sapiens; identical to SEQ ID NO: 3236

SEQ ID NO: 3258 - DNA, 201 bp, Homo sapiens
cttgccccgtcgcgccgtcgtccccccgctatccggttttgtgatggccgcgccgtggctgcctccctagagtccctcagggccctttaaataccgcgttgggggggacactggggctgggggggtttgttgggctggtgagttttcgaggtgactgtgctgtgctcggtgaggggacgcccagagagccctgacccgggg

SEQ ID NO: 3259 - DNA, 201 bp, Homo sapiens; identical to SEQ ID NO: 3234

SEQ ID NO: 3260 - DNA, 201 bp, Homo sapiens; identical to SEQ ID NO: 3234

SEQ ID NO: 3261 - DNA, 201 bp, Homo sapiens; identical to SEQ ID NO: 3250

SEQ ID NO: 3262 - DNA, 201 bp, Homo sapiens
acaggtgctacctttttacccacacttaagtgacgcaaaatgcccttcaatggcgagaagcagtgtgtgggagaggaccagccaagcgattctgattcttyccggttttccgaaagcatggcttcgctcagtgactatgaatgctccaggcagagctttgcaagtgactcctccagcaaatccagctctcctgcttcaaca

SEQ ID NO: 3263 - DNA, 162 bp, Homo sapiens; identical to SEQ ID NO: 3252

SEQ ID NO: 3264 - DNA, 201 bp, Homo sapiens; identical to SEQ ID NO: 3253

SEQ ID NO: 3265 - DNA, 201 bp, Homo sapiens; identical to SEQ ID NO: 3256

SEQ ID NO: 3266 - DNA, 201 bp, Homo sapiens; identical to SEQ ID NO: 3236

SEQ ID NO: 3267 - DNA, 201 bp, Homo sapiens; identical to SEQ ID NO: 3234

SEQ ID NO: 3268 - DNA, 201 bp, Homo sapiens; identical to SEQ ID NO: 3250

SEQ ID NO: 3269 - DNA, 201 bp, Homo sapiens
ccaggtgctacctttttacccacacttaagtgacgcaaaatgcccttcaatggcgagaagcagtgtgtgggagaggaccagccaagcgattctgattcttyccggttttccgaaagcatggcttcgctcagtgactatgaatgctccaggcagagctttgcaagtgactcctccagcaaatccagctctcctgcttcaaca

SEQ ID NO: 3270 - DNA, 162 bp, Homo sapiens; identical to SEQ ID NO: 3252

SEQ ID NO: 3271 - DNA, 201 bp, Homo sapiens; identical to SEQ ID NO: 3253

SEQ ID NO: 3272 - DNA, 201 bp, Homo sapiens; identical to SEQ ID NO: 3256

SEQ ID NO: 3273 - DNA, 201 bp, Homo sapiens; identical to SEQ ID NO: 3236

SEQ ID NO: 3274 - DNA, 201 bp, Homo sapiens; identical to SEQ ID NO: 3234

SEQ ID NO: 3275 - DNA, 201 bp, Homo sapiens; identical to SEQ ID NO: 3250

SEQ ID NO: 3276 - DNA, 201 bp, Homo sapiens; identical to SEQ ID NO: 3262

SEQ ID NO: 3277 - DNA, 162 bp, Homo sapiens; identical to SEQ ID NO: 3252

SEQ ID NO: 3278 - DNA, 201 bp, Homo sapiens; identical to SEQ ID NO: 3253

SEQ ID NO: 3279 - DNA, 201 bp, Homo sapiens; identical to SEQ ID NO: 3256

SEQ ID NO: 3280 - DNA, 201 bp, Homo sapiens; identical to SEQ ID NO: 3236

SEQ ID NO: 3281 - DNA, 201 bp, Homo sapiens
aagtggaaatggcttaagatgctcatagcccagccccggctgtgtctactccaggccaagcctgggctgcagtccttgctatgttccccccagggccctgrggggagggatcagggtgctgggggtttcctaggacaggggtcttcccccttgagacaccaagctctggctctagaagagctctctcctggagtggggagt

SEQ ID NO: 3282 - DNA, 201 bp, Homo sapiens
agagggttgggaggcagcagagcatgggtgacagtgggagcacacgacttccttggagcctgggcctttgcgggtcccaggtggtcaggcagctggagcaraagtggaaatggcttaagatgctcatagcccagccccggctgtgtctactccaggccaagcctgggctgcagtccttgctatgttccccccagggccctg

SEQ ID NO: 3283 - DNA, 201 bp, Homo sapiens
ttttaatctagggtaggcagttgtggtagcccagcattttcctgtggacgagacatggtgcatgttgttgctggattgaatggaacccattcctgtccccyggcctcgtcttctgtcctcacttttggtcatccacacccatgagcagcttcagcagagtgtaggtcccacttcaccccattctcctctcctctgacccct

SEQ ID NO: 3284 - DNA, 201 bp, Homo sapiens
gataggctctgattaattagttactctgactctggtctgccgagatccatttccaacccagttgcgttgggagagggttgggaggcagcagagcatgggtracagtgggagcacacgacttccttggagcctgggcctttgcgggtcccaggtggtcaggcagctggagcagaagtggaaatggcttaagatgctcatagc

SEQ ID NO: 3285 - DNA, 201 bp, Homo sapiens
ggctgtgtgttagttctgagcaaatccctcaccaagacccttccctcccaagccctcaaagaaatgaggcaaagcccttccctgcaagaccccttgtggaygtttttgcatctacctgatttttagccccacccagggagactttataccccatgatcctgccccaccgttgctgttgtctgccagctgggtctagcatca

SEQ ID NO: 3286 - DNA, 201 bp, Homo sapiens
ccccacccagggagactttataccccatgatcctgccccaccgttgctgttgtctgccagctgggtctagcatcacagggaagggggggatttatactcayggaaagactactgatcctaccggaaaccaacctgtttactgtactgttgtaaatatcatgccctttatatcctgtatattggcttcttttaaataaagtg

SEQ ID NO: 3287 - DNA, 201 bp, Homo sapiens
aaaagtgagcccggatcctcctgggagctgctccaggcatgtgggaagctgaagcggcagctctgcgccatctaccggctgaactttctgaccacagcccscagcaggggaggcccacacctgccccagcacctgcaggaccaagtgcagaggctcatgcgggagaagctgacggactggaaggacttcttgctggtgaag

SEQ ID NO: 3288 - DNA, 201 bp, Homo sapiens
ctctcctaccccaggtaaaaggtgctcctttgcctgggtttgaattccagcgctgccacttcctctctgcacctcctggcaagtttcttctattccccacrtttaaagcgatggcacctccgtcccagggtggtgtgaggattacccagtgtggtaggtgctcaataaatgttggtcattgttatcactgaagcccaacat

SEQ ID NO: 3289 - DNA, 201 bp, Homo sapiens
ggtcctgtttgtaaaacaacggtggcaacagctcctcttccagagctgcctctgcctttatcctgggagatggggaggaagccccatctctgctgttcccygcgtggaggaagcccacccagcaagctctctcctaccccaggtaaaaggtgctcctttgcctgggtttgaattccagcgctgccacttcctctctgcacc

SEQ ID NO: 3290 - DNA, 201 bp, Homo sapiens
ggcaaggggccgctggctgcctttgtcaaaactaaggtctggtctctgatccagctggcgcgcagatacctgcagaagggctacaccacgctgctgttccrggagggggatttctactgctcctacttcctgtggttcgagaatgacatggggtacaaactccagatgatcgaggtgcccgtcctctccgacgactcagtg

SEQ ID NO: 3291 - DNA, 201 bp, Homo sapiens
ccctccggagccccccttcaaccctcccggaagtgagcatttgcaggaccagggatgctgtgctgctctcccatgagccagtcaccgagtcggtctgctgmagccctttctgaacctctggccgtctggatgctccactgtgcttgccaagatgaagtgcgtcttggtggccactgagggcgcagaggtcctcttctactg

SEQ ID NO: 3292 - DNA, 201 bp, Homo sapiens
ccatgtcaggtactgagcaaggccccagatccttctctctggaggaagagggaagcccaggggtcctgtttgtaaaacaacggtggcaacagctcctcttmcagagctgcctctgcctttatcctgggagatggggaggaagccccatctctgctgttccctgcgtggaggaagcccacccagcaagctctctcctacccc

SEQ ID NO: 3293 - DNA, 201 bp, Homo sapiens
gctgtgcgcgccgcgatccggtacgtgggcctccgggctgtcccctctgggggcggcgatcctccctccggagccccccttcaaccctcccggaagtgagyatttgcaggaccagggatgctgtgctgctctcccatgagccagtcaccgagtcggtctgctgcagccctttctgaacctctggccgtctggatgctccac

SEQ ID NO: 3294 - DNA, 201 bp, Homo sapiens
cgccgtggaggtgactactgggcgcgggagtcctcaggacttgaagctgtcagccacagtgccagctccctgcgcccggccgacctgcttgccctcatccycctggttcaggacctctaccccagcgagagcacagcagaggacgacattcagccttccccgcggagggcccggagcagccagaacatccccgtgcagcag

SEQ ID NO: 3295 - DNA, 201 bp, Homo sapiens
gaaccgcccaaccgaggctgtcaggtgctacgagctgctggccctgcacctgtctgtcatccccactgacctgctggtgcagcaggccggccagctggccyggcgcctctgggaggcctcccgtatccccctgctctaggccaaggtggccgcagtctgcctttgcatcctgtcctccagccacccttgcttgccactgtt

SEQ ID NO: 3296 - DNA, 201 bp, Homo sapiens
gtgctcctttgcctgggtttgaattccagcgctgccacttcctctctgcacctcctggcaagtttcttctattccccacgtttaaagcgatggcacctccrtcccagggtggtgtgaggattacccagtgtggtaggtgctcaataaatgttggtcattgttatcactgaagcccaacatgctagtgcttctagacccttc

SEQ ID NO: 3297 - DNA, 201 bp, Homo sapiens
gtactgagcaaggccccagatccttctctctggaggaagagggaagcccaggggtcctgtttgtaaaacaacggtggcaacagctcctcttccagagctgyctctgcctttatcctgggagatggggaggaagccccatctctgctgttccctgcgtggaggaagcccacccagcaagctctctcctaccccaggtaaaag

SEQ ID NO: 3298 - DNA, 201 bp, Homo sapiens
cacagcagaggacgacattcagccttccccgcggagggcccggagcagccagaacatccccgtgcagcaggcctggagccctcactccacgggcccaactkgggggagctctgcagagacggagacagacagcttctccctccctgaggagtacttcacaccagctccttcccctggcgatcagagctcaggtagcaccat

SEQ ID NO: 3299 - DNA, 201 bp, Homo sapiens
tgctaagtcccagccccttcatgcttggctggcgtctgccctagggctggggttctcaagcccctggccctggcccagagatttggattcccttggcggcygtggagcccagcctttgatgtctttcaaagcttctgtggtgcgccctggattgagaaccaccacccgaggggtacagcccctctcttccaaccgagaagt

SEQ ID NO: 3300 - DNA, 201 bp, Homo sapiens
gccccttcatgcttggctggcgtctgccctagggctggggttctcaagcccctggccctggcccagagatttggattcccttggcggccgtggagcccagsctttgatgtctttcaaagcttctgtggtgcgccctggattgagaaccaccacccgaggggtacagcccctctcttccaaccgagaagttcctgtcccaga

SEQ ID NO: 3301 - DNA, 201 bp, Homo sapiens
tgctcctctgaggccaggaggccggtgctgggccagagaggacggcgtggcgaaagtcagcgtccactgcagcacaggatcagatggccgtgtgctgtgcrtgcaggagcctcgccttctgtgtctttagtcttgagccaaaatttgctcaaagactgatctcttccttgcagggaacagctttggggctgggggaactag

SEQ ID NO: 3302 - DNA, 201 bp, Homo sapiens
ctgggccagagaggacggcgtggcgaaagtcagcgtccactgcagcacaggatcagatggccgtgtgctgtgcatgcaggagcctcgccttctgtgtcttyagtcttgagccaaaatttgctcaaagactgatctcttccttgcagggaacagctttggggctgggggaactagaacccacatgttggtctaaaccctgag

SEQ ID NO: 3303 - DNA, 201 bp, Homo sapiens
ggagtcctcaggacttgaagctgtcagccacagtgccagctccctgcgcccggccgacctgcttgccctcatcctcctggttcaggacctctaccccagcragagcacagcagaggacgacattcagccttccccgcggagggcccggagcagccagaacatccccgtgcagcaggcctggagccctcactccacgggccc

SEQ ID NO: 3304 - DNA, 201 bp, Homo sapiens
tggtctaaaccctgagaaggtggcagtgaggaagtatcccctcaggtgactggatctgtgttcctccttaacatcatctgatggaatggcaatgaaaagcrtggattgtggaaaatacagaaaaacataaaggaaaaaactccaatcccctgagcccaccactgttcaggacccctgcttttgtcacctactatttccctt

SEQ ID NO: 3305 - DNA, 201 bp, Homo sapiens
ccagtcaccgagtcggtctgctgcagccctttctgaacctctggccgtctggatgctccactgtgcttgccaagatgaagtgcgtcttggtggccactgasggcgcagaggtcctcttctactggacagatcaggagtttgaagagagtctccggctgaagttcgggcagtcagagaatgaggaagaagagctccctgccc

SEQ ID NO: 3306 - DNA, 201 bp, Homo sapiens
actggatctgtgttcctccttaacatcatctgatggaatggcaatgaaaagcgtggattgtggaaaatacagaaaaacataaaggaaaaaactccaatccyctgagcccaccactgttcaggacccctgcttttgtcacctactatttccctttagtttttagcagcggctggatgtgatatgtctagtttaaccagtccc

SEQ ID NO: 3307 - DNA, 201 bp, Homo sapiens
tggatctgtgttcctccttaacatcatctgatggaatggcaatgaaaagcgtggattgtggaaaatacagaaaaacataaaggaaaaaactccaatccccygagcccaccactgttcaggacccctgcttttgtcacctactatttccctttagtttttagcagcggctggatgtgatatgtctagtttaaccagtcccct

SEQ ID NO: 3308 - DNA, 201 bp, Homo sapiens; identical to SEQ ID NO: 3287

SEQ ID NO: 3309 - DNA, 201 bp, Homo sapiens; identical to SEQ ID NO: 3288

SEQ ID NO: 3310 - DNA, 201 bp, Homo sapiens; identical to SEQ ID NO: 3289

SEQ ID NO: 3311 - DNA, 201 bp, Homo sapiens
tctgtgagctgtgcatagaggcgctggagcggcacgtcatccaggctgtcaacaccagccccgagcggggaggcgaggaggccctgcatgccttcctgctygtgcactccaagctgctggcattctactctagccacagtgccagctccctgcgcccggccgacctgcttgccctcatcctcctggttcaggacctctacc

SEQ ID NO: 3312 - DNA, 201 bp, Homo sapiens; identical to SEQ ID NO: 3290

SEQ ID NO: 3313 - DNA, 201 bp, Homo sapiens
acacctacacctgcttctccacggaaaatggcaacttcctgtatgtccttcacctgtttggagaatgcctgttcattgccatcaatggtgaccacaccgasagcgagggggacctgcggcggaagctgtatgtgctcaagtacctgtttgaagtgcactttgggctggtgactgtggacggtcatcttatccgaaaggagc

SEQ ID NO: 3314 - DNA, 201 bp, Homo sapiens
ggcgatcctccctccggagccccccttcaaccctcccggaagtgaggaccagggatgctgtgctgctctcccatgagccagtcaccgagtcggtctgctgmagccctttctgaacctctggccgtctggatgctccactgtgcttgccaagatgaagtgcgtcttggtggccactgagggcgcagaggtcctcttctactg

SEQ ID NO: 3315 - DNA, 201 bp, Homo sapiens; identical to SEQ ID NO: 3292

SEQ ID NO: 3316 - DNA, 201 bp, Homo sapiens
ctgtggacctacagccgcctgcgggagcaggagcagtgcttcgccgtggaggccctggagcgactgattcacccccagctctgtgagctgtgcatagaggygctggagcggcacgtcatccaggctgtcaacaccagccccgagcggggaggcgaggaggccctgcatgccttcctgctcgtgcactccaagctgctggca

SEQ ID NO: 3317 - DNA, 201 bp, Homo sapiens
gccctgcatgccttcctgctcgtgcactccaagctgctggcattctactctagccacagtgccagctccctgcgcccggccgacctgcttgccctcatccycctggttcaggacctctaccccagcgagagcacagcagaggacgacattcagccttccccgcggagggcccggagcagccagaacatccccgtgcagcag

SEQ ID NO: 3318 - DNA, 201 bp, Homo sapiens; identical to SEQ ID NO: 3295

SEQ ID NO: 3319 - DNA, 201 bp, Homo sapiens; identical to SEQ ID NO: 3296

SEQ ID NO: 3320 - DNA, 201 bp, Homo sapiens; identical to SEQ ID NO: 3297

SEQ ID NO: 3321 - DNA, 201 bp, Homo sapiens; identical to SEQ ID NO: 3298

SEQ ID NO: 3322 - DNA, 201 bp, Homo sapiens; identical to SEQ ID NO: 3299

SEQ ID NO: 3323 - DNA, 201 bp, Homo sapiens; identical to SEQ ID NO: 3300

SEQ ID NO: 3324 - DNA, 201 bp, Homo sapiens; identical to SEQ ID NO: 3301

SEQ ID NO: 3325 - DNA, 201 bp, Homo sapiens; identical to SEQ ID NO: 3302

SEQ ID NO: 3326 - DNA, 201 bp, Homo sapiens
ctccaagctgctggcattctactctagccacagtgccagctccctgcgcccggccgacctgcttgccctcatcctcctggttcaggacctctaccccagcragagcacagcagaggacgacattcagccttccccgcggagggcccggagcagccagaacatccccgtgcagcaggcctggagccctcactccacgggccc

SEQ ID NO: 3327 - DNA, 201 bp, Homo sapiens
cgacgactcagtgcctatcggcatgctgggaggagactactacaggaagctcctgcgctactacagcaagaaccgcccaaccgaggctgtcaggtgctackagctgctggccctgcacctgtctgtcatccccactgacctgctggtgcagcaggccggccagctggcccggcgcctctgggaggcctcccgtatccccct

SEQ ID NO: 3328 - DNA, 201 bp, Homo sapiens; identical to SEQ ID NO: 3304

SEQ ID NO: 3329 - DNA, 201 bp, Homo sapiens; identical to SEQ ID NO: 3305

SEQ ID NO: 3330 - DNA, 201 bp, Homo sapiens; identical to SEQ ID NO: 3306

SEQ ID NO: 3331 - DNA, 201 bp, Homo sapiens; identical to SEQ ID NO: 3307

SEQ ID NO: 3332 - DNA, 201 bp, Homo sapiens
cacagcagaggacgacattcagccttccccgcggagggcccggagcagccagaacatccccgtgcagcaggcctggagccctcactccacgggcccaactkgggggagctctgcagagacggagacagacagcttctccctccctgaggagtacttcacaccagctccttcccctggcgatcagagctcaggtgaggaccg

SEQ ID NO: 3333 - DNA, 201 bp, Homo sapiens
gatcagagctcaggtgaggaccggaggaaagcaggaggaaacaatagctagctgcgagcgacaggcagcccaggacatctgtcttaggctccagtggaccyccgtgcctcctaaggcttgagtgcaggtacccgtgttcctagagcacaggacgctgtctgcggctccccatcttccctgccagctccagcctgaactcaa

SEQ ID NO: 3334 - DNA, 201 bp, Homo sapiens
ttcccctggcgatcagagctcaggtgaggaccggaggaaagcaggaggaaacaatagctagctgcgagcgacaggcagcccaggacatctgtcttaggctycagtggacccccgtgcctcctaaggcttgagtgcaggtacccgtgttcctagagcacaggacgctgtctgcggctccccatcttccctgccagctccagc

SEQ ID NO: 3335 - DNA, 201 bp, Homo sapiens; identical to SEQ ID NO: 3311

SEQ ID NO: 3336 - DNA, 116 bp, Homo sapiens
aataatcatctaatttctatacattctaaaatatattcagcatctgtagtttatactttgtttctccaaagtatgtgggtaaacaataaaaaaaaactatraatattcaaaatggt

SEQ ID NO: 3337 - DNA, 201 bp, Homo sapiens; identical to SEQ ID NO: 3326

SEQ ID NO: 3338 - DNA, 201 bp, Homo sapiens; identical to SEQ ID NO: 3313

SEQ ID NO: 3339 - DNA, 201 bp, Homo sapiens
ccccatcttccctgccagctccagcctgaactcaaggactgttaagaccactccactgatccctaaagctgttgatgacaagttgattcatttaaaacttstgtacatgcattctcagactcatcttttttgtaattaaaattaaaaattaagttaaatttagtaataatcatctaatttctatacattctaaaatatatt

SEQ ID NO: 3340 - DNA, 201 bp, Homo sapiens
cgcgcccgggctcctgcaggcggggcgctgtgcgcgccgcgatccggaccagggatgctgtgctgctctcccatgagccagtcaccgagtcggtctgctgmagccctttctgaacctctggccgtctggatgctccactgtgcttgccaagatgaagtgcgtcttggtggccactgagggcgcagaggtcctcttctactg

SEQ ID NO: 3341 - DNA, 201 bp, Homo sapiens; identical to SEQ ID NO: 3316

SEQ ID NO: 3342 - DNA, 201 bp, Homo sapiens; identical to SEQ ID NO: 3317

SEQ ID NO: 3343 - DNA, 201 bp, Homo sapiens
tgcctcctaaggcttgagtgcaggtacccgtgttcctagagcacaggacgctgtctgcggctccccatcttccctgccagctccagcctgaactcaaggaytgttaagaccactccactgatccctaaagctgttgatgacaagttgattcatttaaaacttctgtacatgcattctcagactcatcttttttgtaattaa

SEQ ID NO: 3344 - DNA, 201 bp, Homo sapiens; identical to SEQ ID NO: 3305

SEQ ID NO: 3345 - DNA, 201 bp, Homo sapiens; identical to SEQ ID NO: 3287

SEQ ID NO: 3346 - DNA, 201 bp, Homo sapiens
ctctcctaccccaggtaaaaggtgctcctttgcctgggtttgaattccagcgctgccacttcctctctgcacctcctggcaagtttcttctattccccacrtttaaagcgatggcacctccgtcccagggtggtgtgaggattacccagtgtggtaggtgctcggaacagctttggggctgggggaactagaacccacatg

SEQ ID NO: 3347 - DNA, 201 bp, Homo sapiens; identical to SEQ ID NO: 3289

SEQ ID NO: 3348 - DNA, 201 bp, Homo sapiens; identical to SEQ ID NO: 3311

SEQ ID NO: 3349 - DNA, 201 bp, Homo sapiens; identical to SEQ ID NO: 3290

SEQ ID NO: 3350 - DNA, 201 bp, Homo sapiens; identical to SEQ ID NO: 3313

SEQ ID NO: 3351 - DNA, 201 bp, Homo sapiens; identical to SEQ ID NO: 3340

SEQ ID NO: 3352 - DNA, 201 bp, Homo sapiens; identical to SEQ ID NO: 3292

SEQ ID NO: 3353 - DNA, 201 bp, Homo sapiens; identical to SEQ ID NO: 3316

SEQ ID NO: 3354 - DNA, 201 bp, Homo sapiens; identical to SEQ ID NO: 3317

SEQ ID NO: 3355 - DNA, 201 bp, Homo sapiens; identical to SEQ ID NO: 3295

SEQ ID NO: 3356 - DNA, 201 bp, Homo sapiens
gtgctcctttgcctgggtttgaattccagcgctgccacttcctctctgcacctcctggcaagtttcttctattccccacgtttaaagcgatggcacctccrtcccagggtggtgtgaggattacccagtgtggtaggtgctcggaacagctttggggctgggggaactagaacccacatgttggtctaaaccctgagaagg

SEQ ID NO: 3357 - DNA, 201 bp, Homo sapiens; identical to SEQ ID NO: 3297

SEQ ID NO: 3358 - DNA, 201 bp, Homo sapiens; identical to SEQ ID NO: 3298

SEQ ID NO: 3359 - DNA, 201 bp, Homo sapiens; identical to SEQ ID NO: 3326

SEQ ID NO: 3360 - DNA, 158 bp, Homo sapiens
tggtctaaaccctgagaaggtggcagtgaggaagtatcccctcaggtgactggatctgtgttcctccttaacatcatctgatggaatggcaatgaaaagcrtggattgtggaaaatacagaaaaacataaaggaaaaaactccaatcccctgagccca

SEQ ID NO: 3361 - DNA, 201 bp, Homo sapiens; identical to SEQ ID NO: 3305

SEQ ID NO: 3362 - DNA, 110 bp, Homo sapiens
actggatctgtgttcctccttaacatcatctgatggaatggcaatgaaaagcgtggattgtggaaaatacagaaaaacataaaggaaaaaactccaatccyctgagccca

SEQ ID NO: 3363 - DNA, 108 bp, Homo sapiens
tggatctgtgttcctccttaacatcatctgatggaatggcaatgaaaagcgtggattgtggaaaatacagaaaaacataaaggaaaaaactccaatccccygagccca

SEQ ID NO: 3364 - DNA, 201 bp, Homo sapiens; identical to SEQ ID NO: 3287

SEQ ID NO: 3365 - DNA, 201 bp, Homo sapiens; identical to SEQ ID NO: 3288

SEQ ID NO: 3366 - DNA, 201 bp, Homo sapiens; identical to SEQ ID NO: 3289

SEQ ID NO: 3367 - DNA, 201 bp, Homo sapiens; identical to SEQ ID NO: 3311

SEQ ID NO: 3368 - DNA, 201 bp, Homo sapiens; identical to SEQ ID NO: 3290

SEQ ID NO: 3369 - DNA, 201 bp, Homo sapiens; identical to SEQ ID NO: 3313

SEQ ID NO: 3370 - DNA, 201 bp, Homo sapiens
gctcctgcaggcggggcgctgtgcgcgccgcgatccgcatttgcaggaccagggatgctgtgctgctctcccatgagccagtcaccgagtcggtctgctgmagccctttctgaacctctggccgtctggatgctccactgtgcttgccaagatgaagtgcgtcttggtggccactgagggcgcagaggtcctcttctactg

SEQ ID NO: 3371 - DNA, 201 bp, Homo sapiens; identical to SEQ ID NO: 3292

SEQ ID NO: 3372 - DNA, 201 bp, Homo sapiens; identical to SEQ ID NO: 3316

SEQ ID NO: 3373 - DNA, 147 bp, Homo sapiens
cgcgcccgggctcctgcaggcggggcgctgtgcgcgccgcgatccgyatttgcaggaccagggatgctgtgctgctctcccatgagccagtcaccgagtcggtctgctgcagccctttctgaacctctggccgtctggatgctccac

SEQ ID NO: 3374 - DNA, 201 bp, Homo sapiens; identical to SEQ ID NO: 3317

SEQ ID NO: 3375 - DNA, 201 bp, Homo sapiens; identical to SEQ ID NO: 3295

SEQ ID NO: 3376 - DNA, 201 bp, Homo sapiens; identical to SEQ ID NO: 3296

SEQ ID NO: 3377 - DNA, 201 bp, Homo sapiens; identical to SEQ ID NO: 3297

SEQ ID NO: 3378 - DNA, 201 bp, Homo sapiens; identical to SEQ ID NO: 3298

SEQ ID NO: 3379 - DNA, 201 bp, Homo sapiens; identical to SEQ ID NO: 3299

SEQ ID NO: 3380 - DNA, 201 bp, Homo sapiens; identical to SEQ ID NO: 3300

SEQ ID NO: 3381 - DNA, 201 bp, Homo sapiens; identical to SEQ ID NO: 3301

SEQ ID NO: 3382 - DNA, 201 bp, Homo sapiens; identical to SEQ ID NO: 3302

SEQ ID NO: 3383 - DNA, 201 bp, Homo sapiens; identical to SEQ ID NO: 3326

SEQ ID NO: 3384 - DNA, 201 bp, Homo sapiens; identical to SEQ ID NO: 3327

SEQ ID NO: 3385 - DNA, 201 bp, Homo sapiens; identical to SEQ ID NO: 3304

SEQ ID NO: 3386 - DNA, 201 bp, Homo sapiens; identical to SEQ ID NO: 3305

SEQ ID NO: 3387 - DNA, 201 bp, Homo sapiens; identical to SEQ ID NO: 3306

SEQ ID NO: 3388 - DNA, 201 bp, Homo sapiens; identical to SEQ ID NO: 3307

SEQ ID NO: 3389 - DNA, 201 bp, Homo sapiens; identical to SEQ ID NO: 3287

SEQ ID NO: 3390 - DNA, 201 bp, Homo sapiens; identical to SEQ ID NO: 3288

SEQ ID NO: 3391 - DNA, 201 bp, Homo sapiens; identical to SEQ ID NO: 3289

SEQ ID NO: 3392 - DNA, 201 bp, Homo sapiens; identical to SEQ ID NO: 3311

SEQ ID NO: 3393 - DNA, 201 bp, Homo sapiens; identical to SEQ ID NO: 3290

SEQ ID NO: 3394 - DNA, 201 bp, Homo sapiens; identical to SEQ ID NO: 3313

SEQ ID NO: 3395 - DNA, 201 bp, Homo sapiens; identical to SEQ ID NO: 3314

SEQ ID NO: 3396 - DNA, 201 bp, Homo sapiens; identical to SEQ ID NO: 3292

SEQ ID NO: 3397 - DNA, 201 bp, Homo sapiens; identical to SEQ ID NO: 3316

SEQ ID NO: 3398 - DNA, 201 bp, Homo sapiens; identical to SEQ ID NO: 3317

SEQ ID NO: 3399 - DNA, 201 bp, Homo sapiens; identical to SEQ ID NO: 3295

SEQ ID NO: 3400 - DNA, 201 bp, Homo sapiens; identical to SEQ ID NO: 3296

SEQ ID NO: 3401 - DNA, 201 bp, Homo sapiens; identical to SEQ ID NO: 3297

SEQ ID NO: 3402 - DNA, 201 bp, Homo sapiens; identical to SEQ ID NO: 3298

SEQ ID NO: 3403 - DNA, 201 bp, Homo sapiens; identical to SEQ ID NO: 3299

SEQ ID NO: 3404 - DNA, 201 bp, Homo sapiens; identical to SEQ ID NO: 3300

SEQ ID NO: 3405 - DNA, 201 bp, Homo sapiens; identical to SEQ ID NO: 3301

SEQ ID NO: 3406 - DNA, 201 bp, Homo sapiens; identical to SEQ ID NO: 3302

SEQ ID NO: 3407 - DNA, 201 bp, Homo sapiens; identical to SEQ ID NO: 3326

SEQ ID NO: 3408 - DNA, 201 bp, Homo sapiens; identical to SEQ ID NO: 3304

SEQ ID NO: 3409 - DNA, 201 bp, Homo sapiens; identical to SEQ ID NO: 3305

SEQ ID NO: 3410 - DNA, 201 bp, Homo sapiens; identical to SEQ ID NO: 3306

SEQ ID NO: 3411 - DNA, 201 bp, Homo sapiens; identical to SEQ ID NO: 3307

SEQ ID NO: 3412 - DNA, 201 bp, Homo sapiens; identical to SEQ ID NO: 3287

SEQ ID NO: 3413 - DNA, 201 bp, Homo sapiens; identical to SEQ ID NO: 3346

SEQ ID NO: 3414 - DNA, 201 bp, Homo sapiens; identical to SEQ ID NO: 3289

SEQ ID NO: 3415 - DNA, 201 bp, Homo sapiens; identical to SEQ ID NO: 3311

SEQ ID NO: 3416 - DNA, 201 bp, Homo sapiens; identical to SEQ ID NO: 3290

SEQ ID NO: 3417 - DNA, 201 bp, Homo sapiens
acacctacacctgcttctccacggaaaatggcaacttcctgtatgtccttcacctgtttggagaatgcctgttcattgccatcaatggtgaccacaccgasagcgagggggacctgcggcggaagctgtatgtgctcaagctgcggcccccagacctggcgcagcgtgtccagctgtgggagcacttccagagcctgctgt

SEQ ID NO: 3418 - DNA, 201 bp, Homo sapiens; identical to SEQ ID NO: 3340

SEQ ID NO: 3419 - DNA, 201 bp, Homo sapiens; identical to SEQ ID NO: 3292

SEQ ID NO: 3420 - DNA, 201 bp, Homo sapiens; identical to SEQ ID NO: 3316

SEQ ID NO: 3421 - DNA, 201 bp, Homo sapiens; identical to SEQ ID NO: 3317

SEQ ID NO: 3422 - DNA, 201 bp, Homo sapiens; identical to SEQ ID NO: 3295

SEQ ID NO: 3423 - DNA, 201 bp, Homo sapiens; identical to SEQ ID NO: 3356

SEQ ID NO: 3424 - DNA, 201 bp, Homo sapiens; identical to SEQ ID NO: 3297

SEQ ID NO: 3425 - DNA, 201 bp, Homo sapiens; identical to SEQ ID NO: 3298

SEQ ID NO: 3426 - DNA, 201 bp, Homo sapiens; identical to SEQ ID NO: 3326

SEQ ID NO: 3427 - DNA, 158 bp, Homo sapiens; identical to SEQ ID NO: 3360

SEQ ID NO: 3428 - DNA, 201 bp, Homo sapiens; identical to SEQ ID NO: 3305

SEQ ID NO: 3429 - DNA, 110 bp, Homo sapiens; identical to SEQ ID NO: 3362

SEQ ID NO: 3430 - DNA, 108 bp, Homo sapiens; identical to SEQ ID NO: 3363

SEQ ID NO: 3431 - DNA, 118 bp, Homo sapiens
gctgtggcctctcctagygaggggacatgactcctgcagaagtcctggctcaccgtccagtctgcatgcagggccaggccaggtgtgcccatgtccagttccttcctgcctgagcctt

SEQ ID NO: 3432 - DNA, 201 bp, Homo sapiens
agttccttcctgcctgagcctttacctgccaagagcctgcaacatggggttcccttgtcccttgactcttctctctcttccctcctagagaagatctgcayacttcctaacagaggcttggcccgcaccaaggtccccattttcctggggatccagggagggagccgctgcctggcatgtgtggagacagaagaggggcct

SEQ ID NO: 3433 - DNA, 109 bp, Homo sapiens
gctgtggcmtctcctagcgaggggacatgactcctgcagaagtcctggctcaccgtccagtctgcatgcagggccaggccaggtgtgcccatgtccagttccttcctgc

SEQ ID NO: 3434 - DNA, 201 bp, Homo sapiens
ttacctgccaagagcctgcaacatggggttcccttgtcccttgactcttctctctcttccctcctagagaagatctgcatacttcctaacagaggcttggmccgcaccaaggtccccattttcctggggatccagggagggagccgctgcctggcatgtgtggagacagaagaggggccttccctacagctggaggatgtg

SEQ ID NO: 3435 - DNA, 201 bp, Homo sapiens
gctcaccaaggagagtgagccctcagcccgtaccaagttttactttgaacagagctggtagggagacaggaaactgcgttttagccttgtgcccccaaacyaagctcatcctgctcagggtctatggtaggcagaataatgtcccccgaaatatgtccacatcctaatcccaagatctgtgcatatgttaccatacatgtc

SEQ ID NO: 3436 - DNA, 135 bp, Homo sapiens
gctgtggcctctcctagcgaggggacatgactccygcagaagtcctggctcaccgtccagtctgcatgcagggccaggccaggtgtgcccatgtccagttccttcctgcctgagcctttacctgccaagagcctg

SEQ ID NO: 3437 - DNA, 201 bp, Homo sapiens
aacagagctggtagggagacaggaaactgcgttttagccttgtgcccccaaaccaagctcatcctgctcagggtctatggtaggcagaataatgtcccccraaatatgtccacatcctaatcccaagatctgtgcatatgttaccatacatgtccaaagaggttttgcaaatgtgattatgttaaggatcttgaaatgagg

SEQ ID NO: 3438 - DNA, 201 bp, Homo sapiens
ccttgtcccttgactcttctctctcttccctcctagagaagatctgcatacttcctaacagaggcttggcccgcaccaaggtccccattttcctggggatycagggagggagccgctgcctggcatgtgtggagacagaagaggggccttccctacagctggaggatgtgaacattgaggaactgtacaaaggtggtgaag

SEQ ID NO: 3439 - DNA, 201 bp, Homo sapiens
ggagaggcagagctgcctggagcctgctgggctggtggaagccttggtggattctggcaggccaattatagacgaatggcctggggaacccgtgcagcccktggctgagtggttctaagccccagcacgtctgcctctggcttcacccagcctccttttctaactgcccttctctcctccccatcagtgaggaccagacac

SEQ ID NO: 3440 - DNA, 201 bp, Homo sapiens
ataattaaatatgcagaccagaaggctctatacacaagagatggccagctgctggtgggagatcctgttgcagacaactgctgtgcagagaagatctgcayacttcctaacagaggcttggcccgcaccaaggtccccattttcctggggatccagggagggagccgctgcctggcatgtgtggagacagaagaggggcct

SEQ ID NO: 3441 - DNA, 201 bp, Homo sapiens
aaggctctatacacaagagatggccagctgctggtgggagatcctgttgcagacaactgctgtgcagagaagatctgcatacttcctaacagaggcttggmccgcaccaaggtccccattttcctggggatccagggagggagccgctgcctggcatgtgtggagacagaagaggggccttccctacagctggaggatgtg

SEQ ID NO: 3442 - DNA, 201 bp, Homo sapiens; identical to SEQ ID NO: 3435

SEQ ID NO: 3443 - DNA, 201 bp, Homo sapiens
ggacttgctcccggatagcctcagtcagggagaggcagagctgcctggagcctgctgggctggtggaagccttggtggattctggcaggccaattatagaygaatggcctggggaacccgtgcagcccttggctgagtggttctaagccccagcacgtctgcctctggcttcacccagcctccttttctaactgcccttct

SEQ ID NO: 3444 - DNA, 201 bp, Homo sapiens
gggctggtggaagccttggtggattctggcaggccaattatagacgaatggcctggggaacccgtgcagcccttggctgagtggttctaagccccagcacrtctgcctctggcttcacccagcctccttttctaactgcccttctctcctccccatcagtgaggaccagacaccactgattgcaggaatgtgttccctccc

SEQ ID NO: 3445 - DNA, 201 bp, Homo sapiens
gtgaggaccagacaccactgattgcaggaatgtgttccctccccatggcaagatactacataattaaatatgcagaccagaaggctctatacacaagagayggccagctgctggtgggagatcctgttgcagacaactgctgtgcagagaagatctgcatacttcctaacagaggcttggcccgcaccaaggtccccattt

SEQ ID NO: 3446 - DNA, 201 bp, Homo sapiens
attctggcaggccaattatagacgaatggcctggggaacccgtgcagcccttggctgagtggttctaagccccagcacgtctgcctctggcttcacccagyctccttttctaactgcccttctctcctccccatcagtgaggaccagacaccactgattgcaggaatgtgttccctccccatggcaagatactacataatt

SEQ ID NO: 3447 - DNA, 201 bp, Homo sapiens; identical to SEQ ID NO: 3437

SEQ ID NO: 3448 - DNA, 201 bp, Homo sapiens
ccaccccactctcagggctgggaattgttgtggctcagctatttgggggaatctgttttccagtttctcagaaccagcgcaagcacacacatcccaggctyacacccctggtggctggacttgctcccggatagcctcagtcagggagaggcagagctgcctggagcctgctgggctggtggaagccttggtggattctgg

SEQ ID NO: 3449 - DNA, 201 bp, Homo sapiens
tggtgggagatcctgttgcagacaactgctgtgcagagaagatctgcatacttcctaacagaggcttggcccgcaccaaggtccccattttcctggggatycagggagggagccgctgcctggcatgtgtggagacagaagaggggccttccctacagctggaggatgtgaacattgaggaactgtacaaaggtggtgaag

SEQ ID NO: 3450 - DNA, 201 bp, Homo sapiens
ccaggctcacacccctggtggctggacttgctcccggatagcctcagtcagggagaggcagagctgcctggagcctgctgggctggtggaagccttggtgkattctggcaggccaattatagacgaatggcctggggaacccgtgcagcccttggctgagtggttctaagccccagcacgtctgcctctggcttcacccag

SEQ ID NO: 3451 - DNA, 201 bp, Homo sapiens
gacccagggaggcagcagcagcaagaagaggaggacttgcagaagctgtccctgcagcccccctactatgatctgggggtctccccctcctaccacccctyggtaaggacaaccgaacctcgaggagagtgcccctagcccaggaccacccagcctggccatgagcccagctgccttagagggaaaccagacagatgaggt

SEQ ID NO: 3452 - DNA, 201 bp, Homo sapiens
ctactatgatctgggggtctccccctcctaccacccctcggtaaggacaaccgaacctcgaggagagtgcccctagcccaggaccacccagcctggccatragcccagctgccttagagggaaaccagacagatgaggtggaggaggtgagggcaggggggcacagggaggcccacccaagcactgcaggcaccctgggca

SEQ ID NO: 3453 - DNA, 201 bp, Homo sapiens
ctaccacccctcggtaaggacaaccgaacctcgaggagagtgcccctagcccaggaccacccagcctggccatgagcccagctgccttagagggaaaccasacagatgaggtggaggaggtgagggcaggggggcacagggaggcccacccaagcactgcaggcaccctgggcaaagggtgactggatgctggacagacca

SEQ ID NO: 3454 - DNA, 201 bp, Homo sapiens
acatctgcgagtttgctaccttccctacgggcaatcgagaaagccagctcaatctcacggtgatggccaaacccaccaattggatagagggtacccaggcwgtgcttcgagccaagaaggggcaggatgacaaggtcctggtggccacctgcacctcagccaatgggaagcctcccagtgtggtatcctgggaaactcggt

SEQ ID NO: 3455 - DNA, 201 bp, Homo sapiens
acccgcttcccagcgtgaagatcacccaggtcacatggcagaagtccaccaatggctccaagcagaacgtggccatctacaacccatccatgggcgtgtcygtgctggctccctaccgcgagcgtgtggaattcctgcggccctccttcaccgatggcactatccgcctctcccgcctggagctggaggatgagggtgtct

SEQ ID NO: 3456 - DNA, 201 bp, Homo sapiens
tgctgtgctcactgtcttcttcctgtacaaccggcagcagaagagcccaccggagacggatggggccgggaccgaccagcccctctcccagaagccggagycttctcccagcaggcaaagctcccttgtgcctgaggatatccaggttgtccacctggacccagggaggcagcagcagcaagaagaggaggacttgcagaa

SEQ ID NO: 3457 - DNA, 201 bp, Homo sapiens
tttccaagaaggagtggtacgtaaaagccccgcccccagaggggtctgggaagtgcagccaggctcctggcgggcaccgtggccgtgttcctcatcctagktgctgtgctcactgtcttcttcctgtacaaccggcagcagaagagcccaccggagacggatggggccgggaccgaccagcccctctcccagaagccggag

SEQ ID NO: 3458 - DNA, 201 bp, Homo sapiens; identical to SEQ ID NO: 3451

SEQ ID NO: 3459 - DNA, 201 bp, Homo sapiens; identical to SEQ ID NO: 3452

SEQ ID NO: 3460 - DNA, 201 bp, Homo sapiens; identical to SEQ ID NO: 3453

SEQ ID NO: 3461 - DNA, 201 bp, Homo sapiens; identical to SEQ ID NO: 3454

SEQ ID NO: 3462 - DNA, 201 bp, Homo sapiens; identical to SEQ ID NO: 3455

SEQ ID NO: 3463 - DNA, 201 bp, Homo sapiens; identical to SEQ ID NO: 3456

SEQ ID NO: 3464 - DNA, 201 bp, Homo sapiens
caggtggaggtcaatatcacagaaaagccccgcccccagaggggtctgggaagtgcagccaggctcctggcgggcaccgtggccgtgttcctcatcctagktgctgtgctcactgtcttcttcctgtacaaccggcagcagaagagcccaccggagacggatggggccgggaccgaccagcccctctcccagaagccggag

SEQ ID NO: 3465 - DNA, 201 bp, Homo sapiens; identical to SEQ ID NO: 3454

SEQ ID NO: 3466 - DNA, 201 bp, Homo sapiens; identical to SEQ ID NO: 3455

SEQ ID NO: 3467 - DNA, 201 bp, Homo sapiens
aggacaagagctaggatgttctgaggagagacttcacctgggacgtgaaaggagcatgggcttgatgtcagacagctgtgaccctggacagggccccccccaccatctgtaaaacggggacagtatgatgtaccttgaagggctgttgtcagaattctacgtgatgtaagtcaagcacctagcacagatcagtctgtcaat

SEQ ID NO: 3468 - DNA, 201 bp, Homo sapiens; identical to SEQ ID NO: 3454

SEQ ID NO: 3469 - DNA, 201 bp, Homo sapiens; identical to SEQ ID NO: 3455

SEQ ID NO: 3470 - DNA, 201 bp, Homo sapiens
ggaaagcagcaacccctgcacatgtattgctggagggcagaagctgacctcactggcattaactgatgtgccctacctgttcagcccccatctgggcctcrggcttcatgttgcctcagtgaggagggcggaagtctccctgagcaagaagctggtgatggggctggagggcaggcagagctcatcaggtgaccccacctg

SEQ ID NO: 3471 - DNA, 201 bp, Homo sapiens
cacaaagtggctatatcactttgtgtttttaagtggcaataatttaactcagttctctattagatacctcaattccaaatatttttttttctgagaaatgyatgtaaattttattcagaaatagtaaagttttaaaagtgttatttcgatagtttctgtggaacaggtggtttttggttacatggggaagttcttcagtgg

SEQ ID NO: 3472 - DNA, 200 bp, Homo sapiens
ttcttatggcttagtattccatagtgcatatatatcacattttctttatccactcatgctcccctagctgcacagctgcaagctttagcgtctggtttccwgcaggggctccctggaccgcccgcccactctcgtgtcacccccaggtgccctggctgcgccgctgctactcgcgccttcttccgttaagcgacgctggt

SEQ ID NO: 3473 - DNA, 201 bp, Homo sapiens
ctaaaagcctcctggtataagtgctttgtgttatccttccaattattctacatttcaccatcactttcaaagcagtaatattatacatttctaatttgcawaacttactacagttttcaatttttttaccctagttaacacaaagtccttgaagtgaatatcatctttatcattattttattttagtaataagaaactggg

SEQ ID NO: 3474 - DNA, 201 bp, Homo sapiens
gtattattacctctcaaatctcaacagagaatgacagatgtcatattgtccttgcacttttttttacttcattgattgaatgtattaaattagatcatcamattcataaagatgaaatcaatcatatttgttgagataactaaactattggcttcataccctggatccatttctccttttccttcctaattcttactttat

SEQ ID NO: 3475 - DNA, 201 bp, Homo sapiens
aggtggtctctgaggcctacaggcgattccattcctgtctgcagtgcttagctcagggtacacatgtgagccacttctggccatgggatgtgaaggcatgyttgctgggggcttttgggaaattccttttctcttaagaaaaaaatcataagaaaaggagttctcttttttatctctagatgttatccctggaatcactct

SEQ ID NO: 3476 - DNA, 201 bp, Homo sapiens
gtgagccacttctggccatgggatgtgaaggcatgtttgctgggggcttttgggaaattccttttctcttaagaaaaaaatcataagaaaaggagttctcytttttatctctagatgttatccctggaatcactctagccatcttactacagcctgatgttcaatagggcattgagaattgaagtgcagagtgatgagaaa

SEQ ID NO: 3477 - DNA, 201 bp, Homo sapiens
gaagtgaatatcatctttatcattattttattttagtaataagaaactggggctcagaaagtttaggtaacacagtaggaaatgatgaaactgaaacaagmaatcatgtctatttgattgcttttttcctgtaaagacagtcattaatgctcttcaccaaatgttttcatttcttctgacacatgccaagatcgcacttcc

SEQ ID NO: 3478 - DNA, 201 bp, Homo sapiens
aacaggtaaaagacatattttacttctgggccaaagcttcaagaaccagtgcatattttgttgtcttctctctctctaatgcagataacagaagtcccatragcctgggtcccacaaagagacatggagtgtagcatccagcaatgtcgttataaacttgtagtgggaattaacaatacacatttgttgttataaactaag

SEQ ID NO: 3479 - DNA, 201 bp, Homo sapiens
aataatttaactcagttctctattagatacctcaattccaaatatttttttttctgagaaatgcatgtaaattttattcagaaatagtaaagttttaaaartgttatttcgatagtttctgtggaacaggtggtttttggttacatggggaagttcttcagtggtgagttctgagattttggtgcactcatcacccaagca

SEQ ID NO: 3480 - DNA, 201 bp, Homo sapiens
cacaaacaatttcttaaagaggaataattagaaatcaacttatgtgtgctgctggggtgtgtataatgcagctacaagttgggatcctctttgttctgaarttgaagtctcttgctagaagtgtccaggtacaggaagacagtagcagtgaggacccaggtcaccacacgttcttggtattattacctctcaaatctcaac

SEQ ID NO: 3481 - DNA, 201 bp, Homo sapiens
gttcttggtattattacctctcaaatctcaacagagaatgacagatgtcatattgtccttgcacttttttttacttcattgattgaatgtattaaattagrtcatcacattcataaagatgaaatcaatcatatttgttgagataactaaactattggcttcataccctggatccatttctccttttccttcctaattctt

SEQ ID NO: 3482 - DNA, 201 bp, Homo sapiens
tcttggtattattacctctcaaatctcaacagagaatgacagatgtcatattgtccttgcacttttttttacttcattgattgaatgtattaaattagatmatcacattcataaagatgaaatcaatcatatttgttgagataactaaactattggcttcataccctggatccatttctccttttccttcctaattcttac

SEQ ID NO: 3483 - DNA, 201 bp, Homo sapiens
ttccattcctgtctgcagtgcttagctcagggtacacatgtgagccacttctggccatgggatgtgaaggcatgtttgctgggggcttttgggaaattccktttctcttaagaaaaaaatcataagaaaaggagttctcttttttatctctagatgttatccctggaatcactctagccatcttactacagcctgatgttc

SEQ ID NO: 3484 - DNA, 201 bp, Homo sapiens
actacagttttcaatttttttaccctagttaacacaaagtccttgaagtgaatatcatctttatcattattttattttagtaataagaaactggggctcaraaagtttaggtaacacagtaggaaatgatgaaactgaaacaagcaatcatgtctatttgattgcttttttcctgtaaagacagtcattaatgctcttcac

SEQ ID NO: 3485 - DNA, 201 bp, Homo sapiens
gcagtaatattatacatttctaatttgcataacttactacagttttcaatttttttaccctagttaacacaaagtccttgaagtgaatatcatctttatcwttattttattttagtaataagaaactggggctcagaaagtttaggtaacacagtaggaaatgatgaaactgaaacaagcaatcatgtctatttgattgct

SEQ ID NO: 3486 - DNA, 201 bp, Homo sapiens
ggcccaatgcaatgtgaacaggtaaaagacatattttacttctgggccaaagcttcaagaaccagtgcatattttgttgtcttctctctctctaatgcagrtaacagaagtcccataagcctgggtcccacaaagagacatggagtgtagcatccagcaatgtcgttataaacttgtagtgggaattaacaatacacattt

SEQ ID NO: 3487 - DNA, 201 bp, Homo sapiens
aacttgtagtgggaattaacaatacacatttgttgttataaactaagatttggttataaaccactaagcataacctagccactgctgactgattaattcayaaagtggctatatcactttgtgtttttaagtggcaataatttaactcagttctctattagatacctcaattccaaatatttttttttctgagaaatgcat

SEQ ID NO: 3488 - DNA, 201 bp, Homo sapiens
aggaaatgatgaaactgaaacaagcaatcatgtctatttgattgcttttttcctgtaaagacagtcattaatgctcttcaccaaatgttttcatttcttcygacacatgccaagatcgcacttccccatccttttgaagttacttgcagccatgataattgccctggcccaatgcaatgtgaacaggtaaaagacatattt

SEQ ID NO: 3489 - DNA, 201 bp, Homo sapiens
catcccagatacatctcttttctttggcaagttgcagacttaggtagcagcctaaatatgccaccccttagagatggagcaagagtacttatgaaacttaygccgccagatagcacaacgatagaaaaattaagagctatttgtttagaccatgccaaacttggagaaagcagccttagtccatctcttgactcacttttc

SEQ ID NO: 3490 - DNA, 201 bp, Homo sapiens
tagagtttattaggtgaatcttctaaaactttccttctgttggatcccagtgacgtggaagtcatcagaaccccacggtacttggagtacctctctgcacmaagatagctggctgattttctgctcagtcacaattttacttgaaagcaagaattgtcctagctccttttccattattccaaaacgtttaacgttcaaagc

SEQ ID NO: 3491 - DNA, 201 bp, Homo sapiens
ggtgtgcttgttttgtttctttggtagagtttattaggtgaatcttctaaaactttccttctgttggatcccagtgacgtggaagtcatcagaaccccacrgtacttggagtacctctctgcaccaagatagctggctgattttctgctcagtcacaattttacttgaaagcaagaattgtcctagctccttttccattat

SEQ ID NO: 3492 - DNA, 201 bp, Homo sapiens
cccgcctgcagtggaaagtgtatagtgttttgtaataaatggcctgatgctaatgtgtaaatggcaaaggtgtatatagtatattaatgttgactgttaawtcttaagcaagaaacttttttcttgatgagactcacagatctacacaaactacaaaagttaattttcttgttacacccactgcactctgcaaccagtgtt

SEQ ID NO: 3493 - DNA, 201 bp, Homo sapiens
tgattcagcaactctacatgattccttccattaggaacggtattcttgccattgaaggcacaggtagtgatgtagatgatgatatgtctggggatgagaarcaggacaatgagagcaatgttgatcccagggatgatgtatttggatatcctcaacaatttgaagataaaccagcattaagtaaaactgaagatagaaaag

SEQ ID NO: 3494 - DNA, 201 bp, Homo sapiens
cccatacaaaaattgagctctttgtgggcggtgagctgatagatcctgcagatgatagaaagttgattggacaattaaacttaaaagataaatcgcttatyacagccaaacttacacagataagttccaatatgccttcaagccctgatagctcttctgattcctccactggatctcctggaaaccatggtaatcattaca

SEQ ID NO: 3495 - DNA, 201 bp, Homo sapiens
ttcgtcaggtggcacaggagcagttctttttaatgtgcaccagatgttgcatgggacaccggcctctacttttcttcattactctactctttactgttttrgggagcacagcaagagagagagctaaacactcaggcgactactttactcttttaagacaccttcttaattacgcttacaatagtaatattaatgtaccca

SEQ ID NO: 3496 - DNA, 201 bp, Homo sapiens
aaggccagttggacaaatgcgagtaaaaagcaacgtgaaaagctacttgagctgatacgtcgtcttgcagaagatgataaagatggtgtgatggcacacaragtgttgaaccttctgtggaatctggctcacagtgatgatgtgcctgtagatatcatggacctggctctcagtgcccacataaaaatactagattacagt

SEQ ID NO: 3497 - DNA, 201 bp, Homo sapiens
ttggatgacatgatcaacaggcctcgatgggtggttccagttttgccgaaaggggaattagaagtgcttttagaagctgctattgatcttagtaaaaaggsccttgatgttaaaagtgaagcatgtcagcgatttttccgtgatgggctaacaatatcattcactaaaattcttacagatgaagcagtgagtggctggaag

SEQ ID NO: 3498 - DNA, 183 bp, Homo sapiens
taaaagaggactgcatattaaaattcattctgtgcatagcatgcctaggcatgacactgattcaggatttcagtcacatcaagtttttgtgcacagaaagwtttgacctttggccctctactgaagattttgagaaatcaggatgttgacactgtaaaagtttcctaacataatcttgtactt

SEQ ID NO: 3499 - DNA, 201 bp, Homo sapiens
ctgtgtctggctaatatttaaaactagaaaaactattcctaatcaacatggagtggagagtttattcactgtcttatctgcagaaatttgctgtcaatatrtaacccgcctgcagtggaaagtgtatagtgttttgtaataaatggcctgatgctaatgtgtaaatggcaaaggtgtatatagtatattaatgttgactgt

SEQ ID NO: 3500 - DNA, 201 bp, Homo sapiens; identical to SEQ ID NO: 3489

SEQ ID NO: 3501 - DNA, 201 bp, Homo sapiens; identical to SEQ ID NO: 3490

SEQ ID NO: 3502 - DNA, 201 bp, Homo sapiens; identical to SEQ ID NO: 3491

SEQ ID NO: 3503 - DNA, 201 bp, Homo sapiens; identical to SEQ ID NO: 3492

SEQ ID NO: 3504 - DNA, 201 bp, Homo sapiens; identical to SEQ ID NO: 3493

SEQ ID NO: 3505 - DNA, 201 bp, Homo sapiens; identical to SEQ ID NO: 3494

SEQ ID NO: 3506 - DNA, 201 bp, Homo sapiens; identical to SEQ ID NO: 3495

SEQ ID NO: 3507 - DNA, 201 bp, Homo sapiens; identical to SEQ ID NO: 3496

SEQ ID NO: 3508 - DNA, 201 bp, Homo sapiens; identical to SEQ ID NO: 3497

SEQ ID NO: 3509 - DNA, 183 bp, Homo sapiens; identical to SEQ ID NO: 3498

SEQ ID NO: 3510 - DNA, 201 bp, Homo sapiens; identical to SEQ ID NO: 3499

SEQ ID NO: 3511 - DNA, 201 bp, Homo sapiens; identical to SEQ ID NO: 3489

SEQ ID NO: 3512 - DNA, 201 bp, Homo sapiens; identical to SEQ ID NO: 3490

SEQ ID NO: 3513 - DNA, 201 bp, Homo sapiens; identical to SEQ ID NO: 3491

SEQ ID NO: 3514 - DNA, 201 bp, Homo sapiens; identical to SEQ ID NO: 3492

SEQ ID NO: 3515 - DNA, 201 bp, Homo sapiens; identical to SEQ ID NO: 3493

SEQ ID NO: 3516 - DNA, 201 bp, Homo sapiens; identical to SEQ ID NO: 3494

SEQ ID NO: 3517 - DNA, 201 bp, Homo sapiens; identical to SEQ ID NO: 3495

SEQ ID NO: 3518 - DNA, 201 bp, Homo sapiens; identical to SEQ ID NO: 3496

SEQ ID NO: 3519 - DNA, 201 bp, Homo sapiens; identical to SEQ ID NO: 3497

SEQ ID NO: 3520 - DNA, 183 bp, Homo sapiens; identical to SEQ ID NO: 3498

SEQ ID NO: 3521 - DNA, 201 bp, Homo sapiens; identical to SEQ ID NO: 3499

SEQ ID NO: 3522 - DNA, 201 bp, Homo sapiens; identical to SEQ ID NO: 3490

SEQ ID NO: 3523 - DNA, 201 bp, Homo sapiens; identical to SEQ ID NO: 3489

SEQ ID NO: 3524 - DNA, 201 bp, Homo sapiens; identical to SEQ ID NO: 3491

SEQ ID NO: 3525 - DNA, 201 bp, Homo sapiens; identical to SEQ ID NO: 3495

SEQ ID NO: 3526 - DNA, 201 bp, Homo sapiens; identical to SEQ ID NO: 3496

SEQ ID NO: 3527 - DNA, 101 bp, Homo sapiens
sgccttgatgttaaaagtgaagcatgtcagcgatttttccgtgatgggctaacaatatcattcactaaaattcttacagatgaagcagtgagtggctggaa

SEQ ID NO: 3528 - DNA, 201 bp, Homo sapiens; identical to SEQ ID NO: 3492

SEQ ID NO: 3529 - DNA, 201 bp, Homo sapiens; identical to SEQ ID NO: 3493

SEQ ID NO: 3530 - DNA, 201 bp, Homo sapiens; identical to SEQ ID NO: 3494

SEQ ID NO: 3531 - DNA, 201 bp, Homo sapiens; identical to SEQ ID NO: 3499

SEQ ID NO: 3532 - DNA, 201 bp, Homo sapiens
taaaagaggactgcatattaaaattcattctgtgcatagcatgcctaggcatgacactgattcaggatttcagtcacatcaagtttttgtgcacagaaagwtttgacctttggccctctactgaagattttgagaaatcaggatgttgacactgtaaaagtttcctaacataatcttgtactttttgtatgttttttatat

SEQ ID NO: 3533 - DNA, 201 bp, Homo sapiens; identical to SEQ ID NO: 3490

SEQ ID NO: 3534 - DNA, 201 bp, Homo sapiens; identical to SEQ ID NO: 3489

SEQ ID NO: 3535 - DNA, 201 bp, Homo sapiens; identical to SEQ ID NO: 3491

SEQ ID NO: 3536 - DNA, 201 bp, Homo sapiens; identical to SEQ ID NO: 3495

SEQ ID NO: 3537 - DNA, 201 bp, Homo sapiens; identical to SEQ ID NO: 3496

SEQ ID NO: 3538 - DNA, 101 bp, Homo sapiens; identical to SEQ ID NO: 3527

SEQ ID NO: 3539 - DNA, 201 bp, Homo sapiens; identical to SEQ ID NO: 3492

SEQ ID NO: 3540 - DNA, 201 bp, Homo sapiens; identical to SEQ ID NO: 3493

SEQ ID NO: 3541 - DNA, 201 bp, Homo sapiens; identical to SEQ ID NO: 3494

SEQ ID NO: 3542 - DNA, 201 bp, Homo sapiens; identical to SEQ ID NO: 3499

SEQ ID NO: 3543 - DNA, 201 bp, Homo sapiens; identical to SEQ ID NO: 3532

SEQ ID NO: 3544 - DNA, 201 bp, Homo sapiens; identical to SEQ ID NO: 3490

SEQ ID NO: 3545 - DNA, 201 bp, Homo sapiens; identical to SEQ ID NO: 3489

SEQ ID NO: 3546 - DNA, 201 bp, Homo sapiens; identical to SEQ ID NO: 3491

SEQ ID NO: 3547 - DNA, 201 bp, Homo sapiens; identical to SEQ ID NO: 3495

SEQ ID NO: 3548 - DNA, 201 bp, Homo sapiens; identical to SEQ ID NO: 3496

SEQ ID NO: 3549 - DNA, 201 bp, Homo sapiens; identical to SEQ ID NO: 3497

SEQ ID NO: 3550 - DNA, 201 bp, Homo sapiens; identical to SEQ ID NO: 3492

SEQ ID NO: 3551 - DNA, 147 bp, Homo sapiens
cttttctcaagacaactacataagcagacaaaattgcaaagatctgmcctgtgtcgagtatgacagccacgactcgtggctctccggtcggagggaatgacaaccagggccaggctcctgatggacagtctcagccccccctccaac

SEQ ID NO: 3552 - DNA, 201 bp, Homo sapiens; identical to SEQ ID NO: 3493

SEQ ID NO: 3553 - DNA, 201 bp, Homo sapiens; identical to SEQ ID NO: 3494

SEQ ID NO: 3554 - DNA, 201 bp, Homo sapiens; identical to SEQ ID NO: 3499

SEQ ID NO: 3555 - DNA, 201 bp, Homo sapiens; identical to SEQ ID NO: 3532

SEQ ID NO: 3556 - DNA, 201 bp, Homo sapiens; identical to SEQ ID NO: 3490

SEQ ID NO: 3557 - DNA, 201 bp, Homo sapiens; identical to SEQ ID NO: 3489

SEQ ID NO: 3558 - DNA, 201 bp, Homo sapiens; identical to SEQ ID NO: 3491

SEQ ID NO: 3559 - DNA, 201 bp, Homo sapiens; identical to SEQ ID NO: 3495

SEQ ID NO: 3560 - DNA, 201 bp, Homo sapiens; identical to SEQ ID NO: 3496

SEQ ID NO: 3561 - DNA, 101 bp, Homo sapiens; identical to SEQ ID NO: 3527

SEQ ID NO: 3562 - DNA, 201 bp, Homo sapiens; identical to SEQ ID NO: 3492

SEQ ID NO: 3563 - DNA, 201 bp, Homo sapiens; identical to SEQ ID NO: 3493

SEQ ID NO: 3564 - DNA, 201 bp, Homo sapiens; identical to SEQ ID NO: 3494

SEQ ID NO: 3565 - DNA, 201 bp, Homo sapiens; identical to SEQ ID NO: 3499

SEQ ID NO: 3566 - DNA, 183 bp, Homo sapiens; identical to SEQ ID NO: 3498

SEQ ID NO: 3567 - DNA, 103 bp, Homo sapiens
gtgcctttggctctgtacctctgctgggcatctctccaaggtctaaggtaacatattaaatgtttttgtcagctaatgcaggctcagtgactttaagtctrta

SEQ ID NO: 3568 - DNA, 201 bp, Homo sapiens
tgccactgaccgggatccagttccagttcccatggtgtatgtggtttttttttttttttttttaactgcactcatagggtgctctgaggtcaataaagcaragccaaggccacccagttgcctttttgcctttggtaacataactctgggagtcttggtttatcctgtgtgtcagagagtgggcagaaataacggcctgaa

SEQ ID NO: 3569 - DNA, 201 bp, Homo sapiens
tacatgaagtcactcggtgtgggttttgctaccaggcaggtggccagcatgaccaagcctaccacaatcatcgaaaagaatggggacattctcaccctaaraacacacagcaccttcaagaacacagagatcagctttaagttgggggtggagttcgatgagacaacagcagatgacaggaaggtcaagtccattgtgaca

SEQ ID NO: 3570 - DNA, 201 bp, Homo sapiens
agaaatgggacgggcaagagaccacacttgtgcgggagctaattgatggaaaactcatcctgacactcacccacggcactgcagtttgcactcgcacttaygagaaagaggcatgacctgactgcactgttgctgactactactctgccaatcggctacccctcgactcagcaccacattgcctcatttcttcctctgcat

SEQ ID NO: 3571 - DNA, 201 bp, Homo sapiens
tagggtgctctgaggtcaataaagcagagccaaggccacccagttgcctttttgcctttggtaacataactctgggagtcttggtttatcctgtgtgtcaragagtgggcagaaataacggcctgaaggttactgaggaagaagcactggatgggagactgaaatggacagtctcggagcctgttaatcagctgatcacct

SEQ ID NO: 3572 - DNA, 201 bp, Homo sapiens
gatgcgagggctatttaaagcggcagcccgggcagggagccgccgtcggagcccttgcacgcctgctctcttgtagcttctctcagcctagcccagcatcrctatggtggacgctttcctgggcacctggaagctagtggacagcaagaatttcgatgactacatgaagtcactcggtgtgggttttgctaccaggcaggt

SEQ ID NO: 3573 - DNA, 201 bp, Homo sapiens
agcagatgacaggaaggtcaaggtaagtcagggaaacaggggtggggaatggagagtgctgagactctaaaagagaataggctggtagtcttggctccctrgtattgcaccctgaggggcagactatcatggggaatttaaatgaaacaagattcataaagcctgtgtagtgctggaatgccactgatgctaaatacatgt

SEQ ID NO: 3574 - DNA, 201 bp, Homo sapiens
tacatgaagtcactcggtgtgggttttgctaccaggcaggtggccagcatgaccaagcctaccacaatcatcgaaaagaatggggacattctcaccctaaraacacacagcaccttcaagaacacagagatcagctttaagttgggggtggagttcgatgagacaacagcagatgacaggaaggtcaaggtaagtcaggga

SEQ ID NO: 3575 - DNA, 201 bp, Homo sapiens; identical to SEQ ID NO: 3572

SEQ ID NO: 3576 - DNA, 201 bp, Homo sapiens
cgtagctcacaaggggacatcaaagatgacaaagaggagtggaagaagacagagagaatcaatgtgaggagcctggaacagggctctgaattgtcttcccrcagtgaaatcacttgtctattgctgagccaagaatttgactctgagcatctaggatgagaaagaagaactggcacctacgccatctctgcccctcgggac

SEQ ID NO: 3577 - DNA, 201 bp, Homo sapiens
tcacggtgtctgcgcgagacgcggacgcgcaggagaacgcgctggtgtcctactcgcttgtggagcggcgggtgggcgagcgctcgctgtcgagctacatktcggtgcacacggagagcggcaaggtgtacgcgctgcagccgctggaccacgaggagctagagctgctgcagttccaggtgagcgcgcgcgacgcgggcg

SEQ ID NO: 3578 - DNA, 201 bp, Homo sapiens
cttcacggtgtctgcgcgagacgcggacgcgcaggagaacgcgctggtgtcctactcgcttgtggagcggcgggtgggcgagcgctcgctgtcgagctacrtttcggtgcacacggagagcggcaaggtgtacgcgctgcagccgctggaccacgaggagctagagctgctgcagttccaggtgagcgcgcgcgacgcggg

SEQ ID NO: 3579 - DNA, 201 bp, Homo sapiens
ggagaacgcgctggtgtcctactcgcttgtggagcggcgggtgggcgagcgctcgctgtcgagctacatttcggtgcacacggagagcggcaaggtgtackcgctgcagccgctggaccacgaggagctagagctgctgcagttccaggtgagcgcgcgcgacgcgggcgtgccgcctctgggcagcaacgtgacgctgca

SEQ ID NO: 3580 - DNA, 201 bp, Homo sapiens
cggtgttcgtgaaggagaacaacccgccgggctgccacatcttcacggtgtctgcgcgagacgcggacgcgcaggagaacgcgctggtgtcctactcgctkgtggagcggcgggtgggcgagcgctcgctgtcgagctacatttcggtgcacacggagagcggcaaggtgtacgcgctgcagccgctggaccacgaggagc

SEQ ID NO: 3581 - DNA, 201 bp, Homo sapiens
cagtggacgccgactcgggctacaacgcgtggctttcgtatgagctgcagccagctgcaagcagccctcgcatcccgttccgcgtggggctgtacacgggmgagatcagcaccactcgtgtcctggacgaagcggactctccgcgccaccgtctgctggtcctggtgaaggatcatggtgaacctgcgctgaccgccacgg

SEQ ID NO: 3582 - DNA, 201 bp, Homo sapiens
tggccgacgtgaacgacaatgctccggcgttcgcgcagcccgagtacacggtgttcgtgaaggagaacaacccgccgggctgccacatcttcacggtgtcwgcgcgagacgcggacgcgcaggagaacgcgctggtgtcctactcgcttgtggagcggcgggtgggcgagcgctcgctgtcgagctacatttcggtgcaca

SEQ ID NO: 3583 - DNA, 201 bp, Homo sapiens
acttgtcttggtgtgctagcctacaccttctctttggtttagttttccttttctataacactctgaattgctaatcttactaacacctatgatgttacctkaaatcaatctcccatatgtatgctgtatgctatgctaagactcctgaaatatacttactctgtgcttgtgtatgtgaatgttaatgcaactattacctag

SEQ ID NO: 3584 - DNA, 201 bp, Homo sapiens
tggagcggcgggtgggcgagcgctcgctgtcgagctacatttcggtgcacacggagagcggcaaggtgtacgcgctgcagccgctggaccacgaggagctrgagctgctgcagttccaggtgagcgcgcgcgacgcgggcgtgccgcctctgggcagcaacgtgacgctgcaggtgttcgtgctggacgagaatgacaacg

SEQ ID NO: 3585 - DNA, 201 bp, Homo sapiens
gtgcacacggagagcggcaaggtgtacgcgctgcagccgctggaccacgaggagctagagctgctgcagttccaggtgagcgcgcgcgacgcgggcgtgcmgcctctgggcagcaacgtgacgctgcaggtgttcgtgctggacgagaatgacaacgcgccggcactgctggagcctcgggtgggtggcactggtggcgca

SEQ ID NO: 3586 - DNA, 201 bp, Homo sapiens
agcaagctggtgccgcggtctgtgggcgcgggccacgtggtagcgaaggtgcgcgcagtggacgccgactcgggctacaacgcgtggctttcgtatgagcwgcagccagctgcaagcagccctcgcatcccgttccgcgtggggctgtacacgggcgagatcagcaccactcgtgtcctggacgaagcggactctccgcgc

SEQ ID NO: 3587 - DNA, 201 bp, Homo sapiens
gggctgccacatcttcacggtgtctgcgcgagacgcggacgcgcaggagaacgcgctggtgtcctactcgcttgtggagcggcgggtgggcgagcgctcgytgtcgagctacatttcggtgcacacggagagcggcaaggtgtacgcgctgcagccgctggaccacgaggagctagagctgctgcagttccaggtgagcgc

SEQ ID NO: 3588 - DNA, 201 bp, Homo sapiens
gccgggctgccacatcttcacggtgtctgcgcgagacgcggacgcgcaggagaacgcgctggtgtcctactcgcttgtggagcggcgggtgggcgagcgckcgctgtcgagctacatttcggtgcacacggagagcggcaaggtgtacgcgctgcagccgctggaccacgaggagctagagctgctgcagttccaggtgag

SEQ ID NO: 3589 - DNA, 201 bp, Homo sapiens
ctttcgtatgagctgcagccagctgcaagcagccctcgcatcccgttccgcgtggggctgtacacgggcgagatcagcaccactcgtgtcctggacgaagyggactctccgcgccaccgtctgctggtcctggtgaaggatcatggtgaacctgcgctgaccgccacggccacggttctggtgtcgctggtggagagcggc

SEQ ID NO: 3590 - DNA, 201 bp, Homo sapiens
tggagcctcgggtgggtggcactggtggcgcagcgagcaagctggtgccgcggtctgtgggcgcgggccacgtggtagcgaaggtgcgcgcagtggacgcsgactcgggctacaacgcgtggctttcgtatgagctgcagccagctgcaagcagccctcgcatcccgttccgcgtggggctgtacacgggcgagatcagca

SEQ ID NO: 3591 - DNA, 201 bp, Homo sapiens
aagacgctcaatttggtactgtcatcgccctaattagcgtgaacgacctcgattcaggtgccaacgggcaggtgacctgctccctgatgccccatgtcccyttcaagctggtgtccaccttcaagaattactactcgttggtgctggacagcgccctggaccgcgagagcgtgtcggcctatgagttggtggtaaccgcgc

SEQ ID NO: 3592 - DNA, 201 bp, Homo sapiens
tgccttttgaactaggagaatcgggctaatttattaatgatgataattataatgtatctgtacagcactttttacatttgcgaagtgctttccaatccatkttagttactagttattacagctgtaaggataaaacacgtcatgtggattcattttgaattggtgctattggtatttcctctgttattgctaataaatgaa

SEQ ID NO: 3593 - DNA, 201 bp, Homo sapiens
tccactactccgtccccgaggaggccaaacacggcaccttcgtgggccggatcgcgcaggacctggggctggagctggcggagctggtgccgcgcctgttscgggtggcgtccaaaagacaccgggaccttctggaggtaaatctgcagaatggcattttgtttgtgaattctcggatcgaccgcgaggagctgtgcgggc

SEQ ID NO: 3594 - DNA, 201 bp, Homo sapiens
aggagctagagctgctgcagttccaggtgagcgcgcgcgacgcgggcgtgccgcctctgggcagcaacgtgacgctgcaggtgttcgtgctggacgagaaygacaacgcgccggcactgctggagcctcgggtgggtggcactggtggcgcagcgagcaagctggtgccgcggtctgtgggcgcgggccacgtggtagcga

SEQ ID NO: 3595 - DNA, 201 bp, Homo sapiens
atctgaaatatcagctcatagaaagtaacaaaatttgctgtcaccttaaataagacattttaattttgttataatgtacaatttagaagtttgattaattrtattatctatttaggcattaatataaaagaggtaggagtctgttatttaaaaaaagcattaaatttaaaaaaaaactgtcttgtctacttttagcttcat

SEQ ID NO: 3596 - DNA, 201 bp, Homo sapiens
acgtgaacgacaatgctccggcgttcgcgcagcccgagtacacggtgttcgtgaaggagaacaacccgccgggctgccacatcttcacggtgtctgcgcgrgacgcggacgcgcaggagaacgcgctggtgtcctactcgcttgtggagcggcgggtgggcgagcgctcgctgtcgagctacatttcggtgcacacggaga

SEQ ID NO: 3597 - DNA, 201 bp, Homo sapiens
tgttggagctaactccgtgttaacctacaggcttagctctcatgattacttcatgctagatgtgaattcaaagaacgatgagaataaactggttgagctcktattaagaaaatccttggacagagaggacgctcctgcgcaccacttattcctgacagccacagatgggggcaaacctgagctcacaggcactgttcagct

SEQ ID NO: 3598 - DNA, 201 bp, Homo sapiens
tgaacgacaatgctccggcgttcgcgcagcccgagtacacggtgttcgtgaaggagaacaacccgccgggctgccacatcttcacggtgtctgcgcgagaygcggacgcgcaggagaacgcgctggtgtcctactcgcttgtggagcggcgggtgggcgagcgctcgctgtcgagctacatttcggtgcacacggagagcg

SEQ ID NO: 3599 - DNA, 128 bp, Homo sapiens
atggattatcactggcgaggagagctgrgatcctggcgactactactcttgcttctgctcctcgcagcctggaaggtggggagcggccagctccactactccgtccccgaggaggccaaacacggcac

SEQ ID NO: 3600 - DNA, 201 bp, Homo sapiens
gggcagcaacgtgacgctgcaggtgttcgtgctggacgagaatgacaacgcgccggcactgctggagcctcgggtgggtggcactggtggcgcagcgagcragctggtgccgcggtctgtgggcgcgggccacgtggtagcgaaggtgcgcgcagtggacgccgactcgggctacaacgcgtggctttcgtatgagctgca

SEQ ID NO: 3601 - DNA, 201 bp, Homo sapiens
tacgtgaagacgctcaatttggtactgtcatcgccctaattagcgtgaacgacctcgattcaggtgccaacgggcaggtgacctgctccctgatgccccaygtccccttcaagctggtgtccaccttcaagaattactactcgttggtgctggacagcgccctggaccgcgagagcgtgtcggcctatgagttggtggtaa

SEQ ID NO: 3602 - DNA, 201 bp, Homo sapiens
tatccttgcctgtacgtgaagacgctcaatttggtactgtcatcgccctaattagcgtgaacgacctcgattcaggtgccaacgggcaggtgacctgctcsctgatgccccatgtccccttcaagctggtgtccaccttcaagaattactactcgttggtgctggacagcgccctggaccgcgagagcgtgtcggcctatg

SEQ ID NO: 3603 - DNA, 201 bp, Homo sapiens
acttccttatccttgcctgtacgtgaagacgctcaatttggtactgtcatcgccctaattagcgtgaacgacctcgattcaggtgccaacgggcaggtgamctgctccctgatgccccatgtccccttcaagctggtgtccaccttcaagaattactactcgttggtgctggacagcgccctggaccgcgagagcgtgtcg

SEQ ID NO: 3604 - DNA, 201 bp, Homo sapiens
tgaccgccacggccacggttctggtgtcgctggtggagagcggccaggctccaaaagcgtcatcgaggcagtcggctggcgttttgggtccggaagcggcrctggtggatgtcaacgtgtacctgatcatcgccatctgcgcggtatccagcctgctggtgctcacgctgctgctgtacactgcgctgcggtgctcagcac

SEQ ID NO: 3605 - DNA, 201 bp, Homo sapiens
aatgataatgctcccactttcgaacagtctgaatacgaagtaagaatattcgaaaacgcagacaacggaacaacagttatcaaactgaatgcttctgatcsggatgaaggagccaatggggcaatttcatattcttttaatagccttgttgaaactatggttattgaccactttagcatagatcgaaatacgggagaaata

SEQ ID NO: 3606 - DNA, 201 bp, Homo sapiens
gtcacagtgctggatgtgaatgataatgctcccactttcgaacagtctgaatacgaagtaagaatattcgaaaacgcagacaacggaacaacagttatcaractgaatgcttctgatccggatgaaggagccaatggggcaatttcatattcttttaatagccttgttgaaactatggttattgaccactttagcatagat

SEQ ID NO: 3607 - DNA, 201 bp, Homo sapiens
gtgggccggatcgcgcaggacctggggctggagctggcggagctggtgccgcgcctgttccgggtggcgtccaaaagacaccgggaccttctggaggtaartctgcagaatggcattttgtttgtgaattctcggatcgaccgcgaggagctgtgcgggcggagcgcggagtgcagcatccacctggaggtgatcgtggac

SEQ ID NO: 3608 - DNA, 201 bp, Homo sapiens
gaagtgtcccctccagtcggtgcgggtgtcaacagcaacagctggacctttaaatacggaccaggcaaccccaaacaatccggtcccggtgagttgcccgmcaaattcattatcccaggatctcctgcaatcatctccatccggcaggagcctactaacagccaaattgacaaaagtgacttcataaccttcggcaaaaag

SEQ ID NO: 3609 - DNA, 201 bp, Homo sapiens
aagaaaaagaagaaaaagaagaagggtaacaagacccaggagaaaaaagagaaagggaacagcacgactgacaacagtgaccagtgaggtcctcaaatggraacaagccacttagccagtttttgtaataatggcaaatctctcccatgtagcaattccctgctcctttttcctatctacatgagccctcttagagacctc

SEQ ID NO: 3610 - DNA, 201 bp, Homo sapiens
gccagtgttccgggtaaaagaccaaaagctgtttgtttcagaatccagaatgccagactctcggtttccgctagagggcgcgtccgatgcagatgttggakctaactccgtgttaacctacaggcttagctctcatgattacttcatgctagatgtgaattcaaagaacgatgagaataaactggttgagctcgtattaag

SEQ ID NO: 3611 - DNA, 201 bp, Homo sapiens
tgcgcgagacgcggacgcgcaggagaacgcgctggtgtcctactcgcttgtggagcggcgggtgggcgagcgctcgctgtcgagctacatttcggtgcacrcggagagcggcaaggtgtacgcgctgcagccgctggaccacgaggagctagagctgctgcagttccaggtgagcgcgcgcgacgcgggcgtgccgcctct

SEQ ID NO: 3612 - DNA, 201 bp, Homo sapiens
gcgggcgtgccgcctctgggcagcaacgtgacgctgcaggtgttcgtgctggacgagaatgacaacgcgccggcactgctggagcctcgggtgggtggcaytggtggcgcagcgagcaagctggtgccgcggtctgtgggcgcgggccacgtggtagcgaaggtgcgcgcagtggacgccgactcgggctacaacgcgtgg

SEQ ID NO: 3613 - DNA, 201 bp, Homo sapiens
gcagccctcgcatcccgttccgcgtggggctgtacacgggcgagatcagcaccactcgtgtcctggacgaagcggactctccgcgccaccgtctgctggtsctggtgaaggatcatggtgaacctgcgctgaccgccacggccacggttctggtgtcgctggtggagagcggccaggctccaaaagcgtcatcgaggcagt

SEQ ID NO: 3614 - DNA, 201 bp, Homo sapiens
tgggtccggaagcggcgctggtggatgtcaacgtgtacctgatcatcgccatctgcgcggtatccagcctgctggtgctcacgctgctgctgtacactgckctgcggtgctcagcactgcccactgagggcgggtgccgggcgggcaagcccactctggtgtgctccagtgcggtggggagctggtcatactcgcaacaac

SEQ ID NO: 3615 - DNA, 201 bp, Homo sapiens; identical to SEQ ID NO: 3592

SEQ ID NO: 3616 - DNA, 201 bp, Homo sapiens
ttcgtgtgtaccaagttgcaccagagcccaggctgttgcgctcagagctgctgtcgctctacagaggatctgaggtatggaagtaagatggtttcaaatcyttgcatgacatcagccaccatagatgtcactacagttgagagactttctcagacttatctctatcgggcctctctgggacttggttctgataataacagt

SEQ ID NO: 3617 - DNA, 201 bp, Homo sapiens
tctctaggccgagtgtttgcccaggaccccgacctggggaagaatggccttgtctcttatgagctgttggatgttatctctgaagggccatcagcctctarcttggtggcagtggaatcatccagtggggccatcactgccaaaacttcctttgactttgagcagctcagggggtttcatttccaagtagaaggccgggat

SEQ ID NO: 3618 - DNA, 201 bp, Homo sapiens; identical to SEQ ID NO: 3595

SEQ ID NO: 3619 - DNA, 201 bp, Homo sapiens
cttgtatttagtaattgccttggcttgtatttcctttttatttctggggtgcttacttttcttcgtgtgtaccaagttgcaccagagcccaggctgttgckctcagagctgctgtcgctctacagaggatctgaggtatggaagtaagatggtttcaaatccttgcatgacatcagccaccatagatgtcactacagttga

SEQ ID NO: 3620 - DNA, 201 bp, Homo sapiens
gctttactctcccgaatgcccaagatgacgacgagggaagcaatgggatactaagctacagcctaagccccagtcagcactttcgcctggacatgggatcrcgggttgacggcagcgaatacccggagttggtgttggagaaagcactggatcgcgaacagcgcgccacccacctgctggtgcttacagctcgggacggcg

SEQ ID NO: 3621 - DNA, 201 bp, Homo sapiens
tccgagttcaagccttggatccagatgaagggtccaatggggaagtccaatactccctaagcaacagcacgcaagcagagctgcgacaccgctttcacgtkcaccctaaaagtggggaggtgcaagtagctgcttcactaggtccgcctgaaacgctcttggaggcatacattgaggcgagggacgaaggtgtctttggtt

SEQ ID NO: 3622 - DNA, 201 bp, Homo sapiens; identical to SEQ ID NO: 3583

SEQ ID NO: 3623 - DNA, 201 bp, Homo sapiens
cgggacggcgggctacctgcccgctcaggagacgcacaagtcaccatcattgtggtggacacaaatgacaacgcgcctgtatttgagcgctccgtataccrcaccaaggttccagagactgcacccaatgggactgtgttattccgagttcaagccttggatccagatgaagggtccaatggggaagtccaatactcccta

SEQ ID NO: 3624 - DNA, 201 bp, Homo sapiens; identical to SEQ ID NO: 3608

SEQ ID NO: 3625 - DNA, 201 bp, Homo sapiens
acggcctcagatagtggctcacccccacttagcacccgaaggacaatcactgtgtcagttgctgatgtgaatgacaatacaccaaactttcctcaaccccrgcaggaacttttcgttgctgaaaacaatggccctggggcctctctaggccgagtgtttgcccaggaccccgacctggggaagaatggccttgtctcttat

SEQ ID NO: 3626 - DNA, 201 bp, Homo sapiens
ccgtataccgcaccaaggttccagagactgcacccaatgggactgtgttattccgagttcaagccttggatccagatgaagggtccaatggggaagtccartactccctaagcaacagcacgcaagcagagctgcgacaccgctttcacgtgcaccctaaaagtggggaggtgcaagtagctgcttcactaggtccgcctg

SEQ ID NO: 3627 - DNA, 201 bp, Homo sapiens
aagtccaatactccctaagcaacagcacgcaagcagagctgcgacaccgctttcacgtgcaccctaaaagtggggaggtgcaagtagctgcttcactaggyccgcctgaaacgctcttggaggcatacattgaggcgagggacgaaggtgtctttggtttagctagcaccgctaaactgctggtggaggtgactgacgtga

SEQ ID NO: 3628 - DNA, 201 bp, Homo sapiens; identical to SEQ ID NO: 3609

SEQ ID NO: 3629 - DNA, 201 bp, Homo sapiens
cctttgacaactactacagcctgctgattgatgggcccctggaccgggagcagatcagtgaataccaagtcctgatcacggcctcagatagtggctcaccsccacttagcacccgaaggacaatcactgtgtcagttgctgatgtgaatgacaatacaccaaactttcctcaaccccagcaggaacttttcgttgctgaaa

SEQ ID NO: 3630 - DNA, 201 bp, Homo sapiens
aggccgagtgtttgcccaggaccccgacctggggaagaatggccttgtctcttatgagctgttggatgttatctctgaagggccatcagcctctagcttgstggcagtggaatcatccagtggggccatcactgccaaaacttcctttgactttgagcagctcagggggtttcatttccaagtagaaggccgggatggtgg

SEQ ID NO: 3631 - DNA, 201 bp, Homo sapiens
gtgggtttcctgcggcgctgcagcgggacagctcgagtactcagtgccggaggagacggagcggggcgtagccgtaggcaatctctccgcggacttgaggmtgccagcggccgctatgtcctcgcggaactttcgcttcctttccagccaccgcgagctctacttcggggtggatctacccagcggcaatttggtggtcag

SEQ ID NO: 3632 - DNA, 201 bp, Homo sapiens
gcagcgggacagctcgagtactcagtgccggaggagacggagcggggcgtagccgtaggcaatctctccgcggacttgaggctgccagcggccgctatgtyctcgcggaactttcgcttcctttccagccaccgcgagctctacttcggggtggatctacccagcggcaatttggtggtcagagagccggcggaccgcgaa

SEQ ID NO: 3633 - DNA, 201 bp, Homo sapiens
cagatgaagggtccaatggggaagtccaatactccctaagcaacagcacgcaagcagagctgcgacaccgctttcacgtgcaccctaaaagtggggaggtkcaagtagctgcttcactaggtccgcctgaaacgctcttggaggcatacattgaggcgagggacgaaggtgtctttggtttagctagcaccgctaaactgc

SEQ ID NO: 3634 - DNA, 201 bp, Homo sapiens
agattcggattcacgtcctggacaccaatgacaactcacctctctttcctgccggcgacgtgcagctgcacatccccgagttcctgacgcccggagcccgytttactctcccgaatgcccaagatgacgacgagggaagcaatgggatactaagctacagcctaagccccagtcagcactttcgcctggacatgggatcgc

SEQ ID NO: 3635 - DNA, 201 bp, Homo sapiens; identical to SEQ ID NO: 3577

SEQ ID NO: 3636 - DNA, 201 bp, Homo sapiens; identical to SEQ ID NO: 3594

SEQ ID NO: 3637 - DNA, 201 bp, Homo sapiens; identical to SEQ ID NO: 3593

SEQ ID NO: 3638 - DNA, 201 bp, Homo sapiens; identical to SEQ ID NO: 3578

SEQ ID NO: 3639 - DNA, 201 bp, Homo sapiens; identical to SEQ ID NO: 3579

SEQ ID NO: 3640 - DNA, 201 bp, Homo sapiens; identical to SEQ ID NO: 3596

SEQ ID NO: 3641 - DNA, 201 bp, Homo sapiens; identical to SEQ ID NO: 3597

SEQ ID NO: 3642 - DNA, 201 bp, Homo sapiens; identical to SEQ ID NO: 3598

SEQ ID NO: 3643 - DNA, 128 bp, Homo sapiens; identical to SEQ ID NO: 3599

SEQ ID NO: 3644 - DNA, 201 bp, Homo sapiens; identical to SEQ ID NO: 3580

SEQ ID NO: 3645 - DNA, 201 bp, Homo sapiens; identical to SEQ ID NO: 3600

SEQ ID NO: 3646 - DNA, 201 bp, Homo sapiens; identical to SEQ ID NO: 3601

SEQ ID NO: 3647 - DNA, 201 bp, Homo sapiens; identical to SEQ ID NO: 3581

SEQ ID NO: 3648 - DNA, 201 bp, Homo sapiens; identical to SEQ ID NO: 3602

SEQ ID NO: 3649 - DNA, 201 bp, Homo sapiens; identical to SEQ ID NO: 3604

SEQ ID NO: 3650 - DNA, 201 bp, Homo sapiens; identical to SEQ ID NO: 3603

SEQ ID NO: 3651 - DNA, 201 bp, Homo sapiens; identical to SEQ ID NO: 3582

SEQ ID NO: 3652 - DNA, 201 bp, Homo sapiens; identical to SEQ ID NO: 3605

SEQ ID NO: 3653 - DNA, 201 bp, Homo sapiens; identical to SEQ ID NO: 3607

SEQ ID NO: 3654 - DNA, 201 bp, Homo sapiens; identical to SEQ ID NO: 3606

SEQ ID NO: 3655 - DNA, 201 bp, Homo sapiens; identical to SEQ ID NO: 3586

SEQ ID NO: 3656 - DNA, 201 bp, Homo sapiens; identical to SEQ ID NO: 3584

SEQ ID NO: 3657 - DNA, 201 bp, Homo sapiens; identical to SEQ ID NO: 3585

SEQ ID NO: 3658 - DNA, 201 bp, Homo sapiens; identical to SEQ ID NO: 3587

SEQ ID NO: 3659 - DNA, 201 bp, Homo sapiens; identical to SEQ ID NO: 3588

SEQ ID NO: 3660 - DNA, 201 bp, Homo sapiens; identical to SEQ ID NO: 3589

SEQ ID NO: 3661 - DNA, 201 bp, Homo sapiens; identical to SEQ ID NO: 3590

SEQ ID NO: 3662 - DNA, 201 bp, Homo sapiens; identical to SEQ ID NO: 3610

SEQ ID NO: 3663 - DNA, 201 bp, Homo sapiens; identical to SEQ ID NO: 3611

SEQ ID NO: 3664 - DNA, 201 bp, Homo sapiens; identical to SEQ ID NO: 3612

SEQ ID NO: 3665 - DNA, 201 bp, Homo sapiens; identical to SEQ ID NO: 3613

SEQ ID NO: 3666 - DNA, 201 bp, Homo sapiens; identical to SEQ ID NO: 3614

SEQ ID NO: 3667 - DNA, 201 bp, Homo sapiens; identical to SEQ ID NO: 3591

SEQ ID NO: 3668 - DNA, 201 bp, Homo sapiens; identical to SEQ ID NO: 3592

SEQ ID NO: 3669 - DNA, 201 bp, Homo sapiens; identical to SEQ ID NO: 3583

SEQ ID NO: 3670 - DNA, 201 bp, Homo sapiens; identical to SEQ ID NO: 3608

SEQ ID NO: 3671 - DNA, 201 bp, Homo sapiens
attgtacccttttggtggaagtactagatgtaaatgataacgccccagaggttaccatcacttctttgtcactccccatcagagaagacactcagcctagmgccattattgccctaatcagtgtgtccgatcgtgactctggctcaaatggacaggtcacctgcaccttgacgccgcatgtccccttcaagctggtgtcca

SEQ ID NO: 3672 - DNA, 201 bp, Homo sapiens; identical to SEQ ID NO: 3595

SEQ ID NO: 3673 - DNA, 201 bp, Homo sapiens
ccataaaaattgggccttgagagacagtttgaggtaaggcgttgtatatattgcagatagctctgaggtttttggagtgtaccatgctgtcttcctggcarggaggcccaagaccgcggcaactactgctctggcttctgatcctcgcagcctgggagacgggtagtggccagctccactactccgtccccgaggaagcaa

SEQ ID NO: 3674 - DNA, 201 bp, Homo sapiens
tggacgcacaaaacagtcttgagcaaatgtcttcattatcacttgtactgaggaaaacactggacagagaggaaattcaggaacatagtttattactgacwgccagtgatggaggtaaacccgagctgactggcacagttcagctgctcatcacgattctggacgtgaatgacaacgccccggaattttaccaatccgttt

SEQ ID NO: 3675 - DNA, 201 bp, Homo sapiens; identical to SEQ ID NO: 3609

SEQ ID NO: 3676 - DNA, 201 bp, Homo sapiens
tgcaggtgttcgtgctggacgagaacgacaacgctccggcgctgctgacgcccggggctggcagcgcgggaggcacagtgagcgagctgatgccgcggtckgtgggtgcaggccacgtggtggcgaaggtgcgcgcggtggacgccgattcgggctacaatgcgtggctttcgtatgaattgcagctggcggcggtcggcg

SEQ ID NO: 3677 - DNA, 201 bp, Homo sapiens
ccgacgtgaacgacaacgcgccggcgttcgcgcagcccgagtacacggtgttcgtgaaggaaaacaatccgccgggctgccacatcttcacggtgtctgckcaggacgcggacgcacaggagaacgcgctggtctcctactcgctggtggagcggcgggtgggcgagcgtgcgctgtcgagctacgtgtcggtgcacgcgg

SEQ ID NO: 3678 - DNA, 201 bp, Homo sapiens
tcacgttgctgctgtatactgcgctgcggtgctcggcaccgcccaccgagggcgcgtgcgcgccgggcaagcccactctagtgtgctccagcgcggcaggsagttggtcgtactcgcagcagaggcggccgagggtgtgctctggggagggcccgcataagacggacctcatggccttcagtcccagccttcctccttgtc

SEQ ID NO: 3679 - DNA, 201 bp, Homo sapiens; identical to SEQ ID NO: 3592

SEQ ID NO: 3680 - DNA, 201 bp, Homo sapiens; identical to SEQ ID NO: 3595

SEQ ID NO: 3681 - DNA, 201 bp, Homo sapiens
attccatctacatacaggagaacaatttgccaggtgtgttgctctgtactgtgcaagccacagacccagatgaaaaggagaatgcagaggtgacctactcycttctggagagggagattcaagggctgccagtcacctcctatgtctccattaacagtgccagtggcagcctttatgctgtcaactcctttgactatgaga

SEQ ID NO: 3682 - DNA, 201 bp, Homo sapiens
aagtgcgagtaattggggggctggattatgaggaagcctcctcctaccagatctatgtgcaggcgactgaccggggtccagtgcccatggcaggtcactgyaaggtgctggtggacatcgtggacgtgaatgacaatgccccagaggtggtgctcacggacctgtatagcccagtgcctgagaatgctacacccaacacca

SEQ ID NO: 3683 - DNA, 201 bp, Homo sapiens
gagactggatgaactggacagtgggggtagggagaaagggagtggccgtgttcctgcggtccgctgggatccggcaggtccagggtgaaggagatggggcwggagaggctgagcagtccgggttcgctgtccgccacttcggcgcggaatcagagcaggacttgctgagccctcctaccgctccctttccccctccccctc

SEQ ID NO: 3684 - DNA, 201 bp, Homo sapiens
tacagacctacgagctcagccccagcgagcacttcgagctggaccttaagcccctgcaggagaacagtaaagtgcttgagctggtgctgcgtaagggcctwgaccgggagcaggcagccttgcaccacctggttctcacagccgtggatgggggcatcccagcccgctcgggtacggcacagatctctgtgcgtgtcctgg

SEQ ID NO: 3685 - DNA, 201 bp, Homo sapiens; identical to SEQ ID NO: 3583

SEQ ID NO: 3686 - DNA, 201 bp, Homo sapiens; identical to SEQ ID NO: 3608

SEQ ID NO: 3687 - DNA, 201 bp, Homo sapiens
aggagaacagtaaagtgcttgagctggtgctgcgtaagggcctagaccgggagcaggcagccttgcaccacctggttctcacagccgtggatgggggcatyccagcccgctcgggtacggcacagatctctgtgcgtgtcctggacactaacgacaactctcctgcctttgaccagtccacttatcgcgtccagctacggg

SEQ ID NO: 3688 - DNA, 201 bp, Homo sapiens
gggcaacgtggctcgcgcgctggggcttgagctgcggcgcttggggccgggttgcttgcgcatcaaccatctgggtgcgcccagtccgcgctacctggagytggacctgacgagtggagcgctcttcgtcaacgagcgcattgatcgggaggcgctgtgtgagcagcggcctcgctgcctgctcagcttggaagtgctggc

SEQ ID NO: 3689 - DNA, 201 bp, Homo sapiens; identical to SEQ ID NO: 3609

SEQ ID NO: 3690 - DNA, 201 bp, Homo sapiens
cgacgtgggcgccaactcagtacagacctacgagctcagccccagcgagcacttcgagctggaccttaagcccctgcaggagaacagtaaagtgcttgagstggtgctgcgtaagggcctagaccgggagcaggcagccttgcaccacctggttctcacagccgtggatgggggcatcccagcccgctcgggtacggcaca

SEQ ID NO: 3691 - DNA, 201 bp, Homo sapiens
acatcaacgacaactcaccgcgtttcccgcggcccaactaccagcttcaggtaagcgaatcggtggcgcctggagcgcgctttcacatagagagtgcgcasgaccccgacgtgggcgccaactcagtacagacctacgagctcagccccagcgagcacttcgagctggaccttaagcccctgcaggagaacagtaaagtgc

SEQ ID NO: 3692 - DNA, 201 bp, Homo sapiens
ctggggaagctgccgcctccggccctgcccggctgcctccgccgcggccagtggctatggagcaggcgggcaccagacctgcggcgacagagcatccacgrctccggcggcccatgccctggctgctgctactgcctctcctgctgctgttgctgctgctgctacctggccctgcggcctcccagctgcgatactctgtgc

SEQ ID NO: 3693 - DNA, 201 bp, Homo sapiens
ccagacctgcggcgacagagcatccacggctccggcggcccatgccctggctgctgctactgcctctcctgctgctgttgctgctgctgctacctggcccwgcggcctcccagctgcgatactctgtgccagaggagcaggcacccggcgcgctcgtgggcaacgtggctcgcgcgctggggcttgagctgcggcgcttgg

SEQ ID NO: 3694 - DNA, 201 bp, Homo sapiens
gccgggttgcttgcgcatcaaccatctgggtgcgcccagtccgcgctacctggagctggacctgacgagtggagcgctcttcgtcaacgagcgcattgatmgggaggcgctgtgtgagcagcggcctcgctgcctgctcagcttggaagtgctggcgcacaaccccgtggcggtgagcgccgttgaggtggaaatattgga

SEQ ID NO: 3695 - DNA, 201 bp, Homo sapiens
aaattaccctttatctaataatagcattaagcacagtgtcttttatatttcttttgacaatcatcattttgagcatcatcaagtgctaccgctacactgcrtatggcactgcatgctgtggaggcttctgtggagtaagggaaaggtcccctgcagaactgtacaaacaagccaacaacaatattgatgccaggataccgc

SEQ ID NO: 3696 - DNA, 201 bp, Homo sapiens
gcgctacctggagctggacctgacgagtggagcgctcttcgtcaacgagcgcattgatcgggaggcgctgtgtgagcagcggcctcgctgcctgctcagcytggaagtgctggcgcacaaccccgtggcggtgagcgccgttgaggtggaaatattggacatcaacgacaactcaccgcgtttcccgcggcccaactacca

SEQ ID NO: 3697 - DNA, 201 bp, Homo sapiens; identical to SEQ ID NO: 3592

SEQ ID NO: 3698 - DNA, 201 bp, Homo sapiens
attcaggtgccaacgggcaggtgaactgctcgctgacgcctcacgtccctttcaagctggtgtccaccttcaagaattactactcgttggtgctggacagygccctggaccgcgagagcgtgtcggcctatgagttggtggtaaccgcgcgggacgggggctcgccttcgctgtgggccaccgccagcttgtctgtggagg

SEQ ID NO: 3699 - DNA, 201 bp, Homo sapiens
tatccttgcctgtacgtgaagacgctcaatttggtactgtcatcgccctaattagcgtgaacgacctcgattcaggtgccaacgggcaggtgaactgctcsctgacgcctcacgtccctttcaagctggtgtccaccttcaagaattactactcgttggtgctggacagtgccctggaccgcgagagcgtgtcggcctatg

SEQ ID NO: 3700 - DNA, 201 bp, Homo sapiens; identical to SEQ ID NO: 3583

SEQ ID NO: 3701 - DNA, 201 bp, Homo sapiens
gcaggtgttcgtgctggacgagaacgacaacgcgccggcgctgctggcgcctcgggtgggtggtactggtggtgcagtgagcgagctggtgccgcggtcastgggtgcaggccaagtggtggcgaaggtgcgcgcagtggacgccgactcaggctacaacgcgtggctttcgtatgagctgcagcccccggcaagcagcgc

SEQ ID NO: 3702 - DNA, 201 bp, Homo sapiens
cgttgtcgagctacatttcggtgcacgcggagagcggcaaggtgtacgcgctgcagccgctggaccacgaggagctagagctgctgcagtttcaggtgagmgcgcgcgacgcgggcgtgccgcctctgggcagcaacgtgacgctgcaggtgttcgtgctggacgagaacgacaacgcgccggcgctgctggcgcctcggg

SEQ ID NO: 3703 - DNA, 201 bp, Homo sapiens; identical to SEQ ID NO: 3608

SEQ ID NO: 3704 - DNA, 201 bp, Homo sapiens
cgctgctggcgcctcgggtgggtggtactggtggtgcagtgagcgagctggtgccgcggtcactgggtgcaggccaagtggtggcgaaggtgcgcgcagtkgacgccgactcaggctacaacgcgtggctttcgtatgagctgcagcccccggcaagcagcgctcgcttcccgtttcgcgtggggctgtacacgggcgaga

SEQ ID NO: 3705 - DNA, 201 bp, Homo sapiens
tacgtgaagacgctcaatttggtactgtcatcgccctaattagcgtgaacgacctcgattcaggtgccaacgggcaggtgaactgctcgctgacgcctcaygtccctttcaagctggtgtccaccttcaagaattactactcgttggtgctggacagtgccctggaccgcgagagcgtgtcggcctatgagttggtggtaa

SEQ ID NO: 3706 - DNA, 201 bp, Homo sapiens
gcaaggtgtacgcgctgcagccgctggaccacgaggagctagagctgctgcagtttcaggtgagcgcgcgcgacgcgggcgtgccgcctctgggcagcaamgtgacgctgcaggtgttcgtgctggacgagaacgacaacgcgccggcgctgctggcgcctcgggtgggtggtactggtggtgcagtgagcgagctggtgc

SEQ ID NO: 3707 - DNA, 201 bp, Homo sapiens; identical to SEQ ID NO: 3595

SEQ ID NO: 3708 - DNA, 201 bp, Homo sapiens
acaggccgctgcaggttttccatgtggacgtggaggtgagggacattaacgacaacccgcccttgttcccggtagaggaacaaagagtgctgatttacgartctaggctgccagattctgtgtttccactggagggcgcgtccgatgcagatgttggctcaaattccatcttaacctataaactcagttctagcgaatact

SEQ ID NO: 3709 - DNA, 201 bp, Homo sapiens
aggagaacaacccgccgggctgccacatcttcacggtgtctgcgcgagacgcggacgcgcaggagaacgcgctggtgtcctactcgctggtggagcggcgrgtgggcgagcgcgcgttgtcgagctacatttcggtgcacgcggagagcggcaaggtgtacgcgctgcagccgctggaccacgaggagctagagctgctgc

SEQ ID NO: 3710 - DNA, 201 bp, Homo sapiens
ccactttcgaacagtctgaatacgaagtaagaatattcgaaaatgcagacaacggaacaacagttatcagactgaatgcttctgatcgggatgaaggagcsaatggggcaatttcatattcttttaatagccttgttgcagccatggttattgaccactttagcatagatcgaaatacgggagaaatagtgattcggggta

SEQ ID NO: 3711 - DNA, 201 bp, Homo sapiens; identical to SEQ ID NO: 3609

SEQ ID NO: 3712 - DNA, 201 bp, Homo sapiens
acttccttatccttgcctgtacgtgaagacgctcaatttggtactgtcatcgccctaattagcgtgaacgacctcgattcaggtgccaacgggcaggtgamctgctcgctgacgcctcacgtccctttcaagctggtgtccaccttcaagaattactactcgttggtgctggacagtgccctggaccgcgagagcgtgtcg

SEQ ID NO: 3713 - DNA, 201 bp, Homo sapiens
ggctttcgtatgagctgcagcccccggcaagcagcgctcgcttcccgtttcgcgtggggctgtacacgggcgagatcagcaccactcgtgtcctggacgargcggactctccgcgccaccggctgctggtgctggtgaaagaccacggtgagccggcgctgacagcgacggccacggttctggtgtcgctggtggagagtg

SEQ ID NO: 3714 - DNA, 201 bp, Homo sapiens
cggtgtctgcgtgggacgcggacgcgcaggagaacgccctggtgtcctactctctggtggagcggcggttgggcgagcgctcgctgtcgagctacgtgtcrgtgcacgcggagagcggcaaggtgtacgcgctgcagccgctggaccacgaggagctggagctgctacagttccaggtgagcgcgcgcgatgggggcgtgc

SEQ ID NO: 3715 - DNA, 201 bp, Homo sapiens
tggtgctggacagcgctctggaccgcgagagggtgtcggcctatgagctggtggtgaccgcgcgggacgggggctcgcctccgctgtgggccacggccagsgtgtctgtggaggtggccgacgtgaacgacaacgcgcctgcgttcgcgcagtccgagtacacggtgttcgtgaaggagaacaacccgccaggctgccaca

SEQ ID NO: 3716 - DNA, 201 bp, Homo sapiens
acacggtgttcgtgaaggagaacaacccgccaggctgccacatcttcacggtgtctgcgtgggacgcggacgcgcaggagaacgccctggtgtcctactckctggtggagcggcggttgggcgagcgctcgctgtcgagctacgtgtcggtgcacgcggagagcggcaaggtgtacgcgctgcagccgctggaccacgagg

SEQ ID NO: 3717 - DNA, 201 bp, Homo sapiens
ctggtcttactcgcagcagaggcggcagagggtgtgttctggggagggcctgcccaaggcggacctcatggccttcagccccagccttccaccatgcccartggtagatgtggacggggaagatcagtctattggaggggaccactctaggaaggtgggttattacgttttcattttccttttgtgctttatgaataatat

SEQ ID NO: 3718 - DNA, 201 bp, Homo sapiens
ggtccagtgtctgctgctctcgcttcttctcctcgcagcctgggaggtggggagcggccagctccactactcagtctacgaggaggccagacacggcaccytcgtgggccgcatcgcgcaggacctggggctggagctggcggagctggtgcagcgcctgttccgggtggcgtccaaaagacacggggaccttctggaggt

SEQ ID NO: 3719 - DNA, 201 bp, Homo sapiens
gtgttcgtgctggacgagaacgacaacgctcccgcgctgctggcgtctcccgctggcagcgcgggcggtgcagtcagtgagctggtgctgcggtcggtggktgcgggtcacgtggtggctaaggtgcgcgcagtggacgctgactctggatacaacgcgtggctgtcgtatgaattgcagtcggcggcggttggtgcacgc

SEQ ID NO: 3720 - DNA, 201 bp, Homo sapiens
tccaccatgcccaatggtagatgtggacggggaagatcagtctattggaggggaccactctaggaaggtgggttattacgttttcattttccttttgtgcyttatgaataatattttctcttaccgcattttctcaaatatgtatcagaatatttcatttttgtctacattccatttatgcttgaatatttctagtgatac

SEQ ID NO: 3721 - DNA, 145 bp, Homo sapiens
gggttattacgttttcattttccttttgtgctttatgaataatattttctcttaccgcattttctcaaatatgtatcagaatatttcatttttgtctacawtccatttatgcttgaatatttctagtgatacctttgtaatataa

SEQ ID NO: 3722 - DNA, 201 bp, Homo sapiens
tgatcatcgccatctgcgcggtgtccagcttgctggtgctcacgctgctgctgtacactgcactgaggtgctcggcggcgcccaccgagggcgcatgtggsccggtgaagcccacgctggtgtgctctagcgcggtggggagctggtcttactcgcagcagaggcggcagagggtgtgttctggggagggcctgcccaagg

SEQ ID NO: 3723 - DNA, 201 bp, Homo sapiens
ggtgtctgcgtgggacgcggacgcgcaggagaacgccctggtgtcctactctctggtggagcggcggttgggcgagcgctcgctgtcgagctacgtgtcgrtgcacgcggagagcggcaaggtgtacgcgctgcagccgctggaccacgaggagctggagctgctacagttccaggtgagcgcgcgcgatgggggcgtgcc

SEQ ID NO: 3724 - DNA, 201 bp, Homo sapiens
gctgtcgtatgaattgcagtcggcggcggttggtgcacgcatcccgtttcgcgtggggctgtacacgggcgagatcagtacgacgcgcgctctggatgagrctgactcgccacgccagcgcctactggtgctggtgaaggaccatggcgagccgtcgctgacggccacggccactgtgcttgtgtcgcttgtggagggcag

SEQ ID NO: 3725 - DNA, 201 bp, Homo sapiens
caaggtgtacgcgctgcagccgctggaccacgaggagctggagctgctacagttccaggtgagcgcgcgcgatgggggcgtgccgcctctgggcagcaacktgacgctgcaggtgttcgtgctggacgagaacgacaacgctcccgcgctgctggcgtctcccgctggcagcgcgggcggtgcagtcagtgagctggtgct

SEQ ID NO: 3726 - DNA, 201 bp, Homo sapiens
gcgcgcgcgatgggggcgtgccgcctctgggcagcaacttgacgctgcaggtgttcgtgctggacgagaacgacaacgctcccgcgctgctggcgtctccsgctggcagcgcgggcggtgcagtcagtgagctggtgctgcggtcggtggttgcgggtcacgtggtggctaaggtgcgcgcagtggacgctgactctggat

SEQ ID NO: 3727 - DNA, 201 bp, Homo sapiens
cagtccaaatgagtattttgttcttgatattataaacaaaaaagacaaagacaaattcccagtgcttgttctgcggaagctgctggatcgtgaagaaaatyctcagctaaagttgttgttgacagcaactgatggaggcaaacctgaatttaccggatctgtttctctgctgatcctggtgttagatgccaatgataacgc

SEQ ID NO: 3728 - DNA, 201 bp, Homo sapiens
cagatgccaacgggcaggttacctgctccctgacgccccacgtccccttcaagctggtgtccacctacaagaattactactcgttggtgctggacagagcyctggaccgcgagagtgtgtccgcctacgagctggtggttaccgcgcgggaccggggctcgccttcactgtgggccacggccagggtgtctgtggaggtgg

SEQ ID NO: 3729 - DNA, 201 bp, Homo sapiens
aggagatccagagggtcagcctctactgctctcgcttctgatcctcgcaatgtgggtggtggggagcggccagctccactactccgtcccggaggaagccraacacggcaccttcgtgggccgcatcgcgcaggacctggggctggagctggcggagctggtgccgcgcctgttccagttggattccaaaggccgcgggga

SEQ ID NO: 3730 - DNA, 201 bp, Homo sapiens
gagtgcgcgcctggcaagccgacgctggtgtgttctagcgcggtggggagttggtcgtactcgcagcagaggaggcagagggtgtgctctggcgagggtcmgcagaagaccgacctcatggccttcagcccgggcctttctccttgtgctggatctacagagcgaacgggagaaccctctgcttcctcagattcaactggg

SEQ ID NO: 3731 - DNA, 201 bp, Homo sapiens
gctggtgtccacctacaagaattactactcgttggtgctggacagagctctggaccgcgagagtgtgtccgcctacgagctggtggttaccgcgcgggacsggggctcgccttcactgtgggccacggccagggtgtctgtggaggtggccgacgtgaacgacaacgcaccagcgttcgcgcagtccgagtacacggtgtt

SEQ ID NO: 3732 - DNA, 201 bp, Homo sapiens
acgacaacgcaccagcgttcgcgcagtccgagtacacggtgttcgtgaaggagaacaacccgccgggctgccacatcttcacggtgtctgcgcgggacgckgacgcgcaggagaacgccctggtgtcctactcgctggtggagcggcggttgggcgagcgctcgctgtcgagctacgtgtcagtgcacgcggagagcggca

SEQ ID NO: 3733 - DNA, 201 bp, Homo sapiens
ccctgacgccccacgtccccttcaagctggtgtccacctacaagaattactactcgttggtgctggacagagctctggaccgcgagagtgtgtccgcctaygagctggtggttaccgcgcgggaccggggctcgccttcactgtgggccacggccagggtgtctgtggaggtggccgacgtgaacgacaacgcaccagcgt

SEQ ID NO: 3734 - DNA, 201 bp, Homo sapiens
caagctctcatcatatgcaaattctcagaagggctgtgaacaccttagtaataaatttatcttttgaggtcattagcaaacatgaactcacagggatccasagatggtaaaattcaaaacagcctgtcaagttcaaaacagagaggtgaaagcagaagagacactttcctattttgcctaataggtctccttatatgcatc

SEQ ID NO: 3735 - DNA, 201 bp, Homo sapiens
gacgtgccaaccagcaaccagcaggtaaaacctcttggacttgtattacggaaacttttagacagagaagaaactccggagcttcatttattgctcacggycaccgatggaggcaaacccgagctgactggcaccgttcaattactcatcacggtactggacaacaatgacaatgccccagtgttcgacagaaccctgtat

SEQ ID NO: 3736 - DNA, 201 bp, Homo sapiens
cgaacgggagaaccctctgcttcctcagattcaactgggaaggtgggtttttctagcattttatttatttatataattttttttcttgaaagatattatcrattactcccaggggccgttcaaatagttttattcatttttctagaaatccagcagattttttttctgataaagtaaaccccttaacattggagccgactt

SEQ ID NO: 3737 - DNA, 201 bp, Homo sapiens
gcgatgttctctctgaatccagacaaatacagcccttttcccatgggaaagaggctcaattctttttcactctctctgtgctgaacgatggcgaacacagmagaatgggactgacgaaatcagatgatttcttctaatttggaggcaattttcactaattagaagaagactgagtatttgaaatgttatactcaagtcgag

SEQ ID NO: 3738 - DNA, 201 bp, Homo sapiens
tctttgccgcgatgttctctctgaatccagacaaatacagcccttttcccatgggaaagaggctcaattctttttcactctctctgtgctgaacgatggckaacacagcagaatgggactgacgaaatcagatgatttcttctaatttggaggcaattttcactaattagaagaagactgagtatttgaaatgttatactc

SEQ ID NO: 3739 - DNA, 201 bp, Homo sapiens
ttgggccacgtgatgtcactctttgccgcgatgttctctctgaatccagacaaatacagcccttttcccatgggaaagaggctcaattctttttcactctstctgtgctgaacgatggcgaacacagcagaatgggactgacgaaatcagatgatttcttctaatttggaggcaattttcactaattagaagaagactgag

SEQ ID NO: 3740 - DNA, 201 bp, Homo sapiens
gaaaaaattaagaaaatgaaataagttttgcagaataactgtgaaatttttattcatgaaatatgtacttacactttgggccacgtgatgtcactctttgscgcgatgttctctctgaatccagacaaatacagcccttttcccatgggaaagaggctcaattctttttcactctctctgtgctgaacgatggcgaacaca

SEQ ID NO: 3741 - DNA, 201 bp, Homo sapiens
ctgtgctggtgtcgctggtggagagcggccaggcgccaaagtcatcgtcgcgggcgtcagtgggtgccacgggccccgaggtgacgctggtggatgtcaaygtgtacctgatcatcgccatctgcgcggtgtctagcctgttggttctcacgctgctgctgtacactgtgctgcggtgctcggcgatgcccaccgagggcg

SEQ ID NO: 3742 - DNA, 201 bp, Homo sapiens
tgttatactcaagtcgaggagatccagagggtcagcctctactgctctcgcttctgatcctcgcaatgtgggtggtggggagcggccagctccactactcsgtcccggaggaagccgaacacggcaccttcgtgggccgcatcgcgcaggacctggggctggagctggcggagctggtgccgcgcctgttccagttggatt

SEQ ID NO: 3743 - DNA, 201 bp, Homo sapiens
tgactgaaattttgtctacacttagaacattttttgaaattcagtttacagaaattggagaaaatgctttttaaacaagtgtttcctttcttcaagaagayattctccttttaattgaaattttctccattcagtgataaaatgatcagccatgtgaagattcgaaacttcgagttcttttgaaattcagagtctgtaact

SEQ ID NO: 3744 - DNA, 201 bp, Homo sapiens
gagggtcagcctctactgctctcgcttctgatcctcgcaatgtgggtggtggggagcggccagctccactactccgtcccggaggaagccgaacacggcamcttcgtgggccgcatcgcgcaggacctggggctggagctggcggagctggtgccgcgcctgttccagttggattccaaaggccgcggggaccttctggag

SEQ ID NO: 3745 - DNA, 201 bp, Homo sapiens
taaatctgcagaatggcattttgtttgtgaattctcggatcgaccgcgaggagctgtgcgggcggagcgcggagtgcagcatccacctggaggtgatcgtrgacaggccgctgcaggttttccatgtggacgtggaggtgaaggacattaacgacaaccctccagtgttcccagcgacacaaaagaatctgttcatcgcgg

SEQ ID NO: 3746 - DNA, 201 bp, Homo sapiens
tcaaaacgctctcggttcctgtaaaagaggacgcacaactggggacagttattgccctgattagtgtgatcgacctagacgcagatgccaacgggcaggtkacctgctccctgacgccccacgtccccttcaagctggtgtccacctacaagaattactactcgttggtgctggacagagctctggaccgcgagagtgtgt

SEQ ID NO: 3747 - DNA, 201 bp, Homo sapiens
ctacacttagaacattttttgaaattcagtttacagaaattggagaaaatgctttttaaacaagtgtttcctttcttcaagaagacattctccttttaatygaaattttctccattcagtgataaaatgatcagccatgtgaagattcgaaacttcgagttcttttgaaattcagagtctgtaacttaaaacattaccctt

SEQ ID NO: 3748 - DNA, 120 bp, Homo sapiens
tagtcccaattactcaggaggctgaggcgagagaatcgcttgagcctgggacattgaggctgcagtgaactgtgatggcacaactgcatttcagcccgggwgacagcaagattctgtctc

SEQ ID NO: 3749 - DNA, 201 bp, Homo sapiens
aagactgagtatttgaaatgttatactcaagtcgaggagatccagagggtcagcctctactgctctcgcttctgatcctcgcaatgtgggtggtggggagmggccagctccactactccgtcccggaggaagccgaacacggcaccttcgtgggccgcatcgcgcaggacctggggctggagctggcggagctggtgccgc

SEQ ID NO: 3750 - DNA, 201 bp, Homo sapiens
gtttcaacaatcattacttaagaaaaaattaagaaaatgaaataagttttgcagaataactgtgaaatttttattcatgaaatatgtacttacactttggrccacgtgatgtcactctttgccgcgatgttctctctgaatccagacaaatacagcccttttcccatgggaaagaggctcaattctttttcactctctctg

SEQ ID NO: 3751 - DNA, 201 bp, Homo sapiens
cgagtgcgcgcctggcaagccgacgctggtgtgttctagcgcggtggggagttggtcgtactcgcagcagaggaggcagagggtgtgctctggcgagggtmcgcagaagaccgacctcatggccttcagcccgggcctttctccttgtgctggatctacagagcgaacgggagaaccctctgcttcctcagattcaactgg

SEQ ID NO: 3752 - DNA, 201 bp, Homo sapiens
atccagagggtcagcctctactgctctcgcttctgatcctcgcaatgtgggtggtggggagcggccagctccactactccgtcccggaggaagccgaacayggcaccttcgtgggccgcatcgcgcaggacctggggctggagctggcggagctggtgccgcgcctgttccagttggattccaaaggccgcggggaccttc

SEQ ID NO: 3753 - DNA, 201 bp, Homo sapiens
gtcgaggagatccagagggtcagcctctactgctctcgcttctgatcctcgcaatgtgggtggtggggagcggccagctccactactccgtcccggaggargccgaacacggcaccttcgtgggccgcatcgcgcaggacctggggctggagctggcggagctggtgccgcgcctgttccagttggattccaaaggccgcg

SEQ ID NO: 3754 - DNA, 201 bp, Homo sapiens
caacccgccgggctgccacatcttcacggtgtctgcgcgggacgctgacgcgcaggagaacgccctggtgtcctactcgctggtggagcggcggttgggcsagcgctcgctgtcgagctacgtgtcagtgcacgcggagagcggcaaggtgtacgcgctgcagccgttggaccacgaggagctggagctgctacagttcca

SEQ ID NO: 3755 - DNA, 201 bp, Homo sapiens
ggagcgcggagtgcagcatccacctggaggtgatcgtagacaggccgctgcaggttttccatgtggacgtggaggtgaaggacattaacgacaaccctccrgtgttcccagcgacacaaaagaatctgttcatcgcggaatccaggccgcttgactctcggtttccactagagggcgcgtccgatgcagatatcggggaga

SEQ ID NO: 3756 - DNA, 201 bp, Homo sapiens
tggaggtggccgacgtgaacgacaacgcaccagcgttcgcgcagtccgagtacacggtgttcgtgaaggagaacaacccgccgggctgccacatcttcackgtgtctgcgcgggacgctgacgcgcaggagaacgccctggtgtcctactcgctggtggagcggcggttgggcgagcgctcgctgtcgagctacgtgtcag

SEQ ID NO: 3757 - DNA, 201 bp, Homo sapiens
aacacggcaccttcgtgggccgcatcgcgcaggacctggggctggagctggcggagctggtgccgcgcctgttccagttggattccaaaggccgcggggaycttctggaggtaaatctgcagaatggcattttgtttgtgaattctcggatcgaccgcgaggagctgtgcgggcggagcgcggagtgcagcatccacctgg

SEQ ID NO: 3758 - DNA, 201 bp, Homo sapiens
aagccgaacacggcaccttcgtgggccgcatcgcgcaggacctggggctggagctggcggagctggtgccgcgcctgttccagttggattccaaaggccgyggggaccttctggaggtaaatctgcagaatggcattttgtttgtgaattctcggatcgaccgcgaggagctgtgcgggcggagcgcggagtgcagcatcc

SEQ ID NO: 3759 - DNA, 201 bp, Homo sapiens
ggaggaagccgaacacggcaccttcgtgggccgcatcgcgcaggacctggggctggagctggcggagctggtgccgcgcctgttccagttggattccaaakgccgcggggaccttctggaggtaaatctgcagaatggcattttgtttgtgaattctcggatcgaccgcgaggagctgtgcgggcggagcgcggagtgcag

SEQ ID NO: 3760 - DNA, 201 bp, Homo sapiens
tccactactccgtcccggaggaagccgaacacggcaccttcgtgggccgcatcgcgcaggacctggggctggagctggcggagctggtgccgcgcctgttscagttggattccaaaggccgcggggaccttctggaggtaaatctgcagaatggcattttgtttgtgaattctcggatcgaccgcgaggagctgtgcgggc

SEQ ID NO: 3761 - DNA, 201 bp, Homo sapiens
gtcccggaggaagccgaacacggcaccttcgtgggccgcatcgcgcaggacctggggctggagctggcggagctggtgccgcgcctgttccagttggattscaaaggccgcggggaccttctggaggtaaatctgcagaatggcattttgtttgtgaattctcggatcgaccgcgaggagctgtgcgggcggagcgcggag

SEQ ID NO: 3762 - DNA, 201 bp, Homo sapiens
tgcggtcggtgggcgccggcgtagtggtggggaaggtgcgcgcagtggacgccgactcgggctacaacgcgtggctttcatacgagctgcagccagaaacsgccagcgcgagcatcccgttccgcgtggggctgtacacgggcgagatcagcacaacgcgtgccctggacgaaacggacgcaccgcgccagcgcctactgg

SEQ ID NO: 3763 - DNA, 201 bp, Homo sapiens
actcaagtcgaggagatccagagggtcagcctctactgctctcgcttctgatcctcgcaatgtgggtggtggggagcggccagctccactactccgtcccsgaggaagccgaacacggcaccttcgtgggccgcatcgcgcaggacctggggctggagctggcggagctggtgccgcgcctgttccagttggattccaaag

SEQ ID NO: 3764 - DNA, 201 bp, Homo sapiens
ggagaacaacccgccgggctgccacatcttcacggtgtctgcgcgggacgctgacgcgcaggagaacgccctggtgtcctactcgctggtggagcggcggktgggcgagcgctcgctgtcgagctacgtgtcagtgcacgcggagagcggcaaggtgtacgcgctgcagccgttggaccacgaggagctggagctgctaca

SEQ ID NO: 3765 - DNA, 201 bp, Homo sapiens
ctggtgctggtgaaagaccacggggagccagcgctgacggccacggccactgtgctggtgtcgctggtggagagcggccaggcgccaaagtcatcgtcgcrggcgtcagtgggtgccacgggccccgaggtgacgctggtggatgtcaacgtgtacctgatcatcgccatctgcgcggtgtctagcctgttggttctcacg

SEQ ID NO: 3766 - DNA, 201 bp, Homo sapiens
attagcattagcagcacctaagtcctcattgaatgttctggttcaaggctccacctcagaaattctgaaatgggtagtaagagcaaattttcattttaaakcacacctgagatgattctcatacaaccgaaattttagatccatagccctatttgatacttgacagtgcaagtttctgtaatttaaaaagatgtggtggcc

SEQ ID NO: 3767 - DNA, 201 bp, Homo sapiens
atctgcagaatggcattttgtttgtgaattctcggatcgaccgcgaggagctgtgcgggcggagcgcggagtgcagcatccacctggaggtgatcgtagamaggccgctgcaggttttccatgtggacgtggaggtgaaggacattaacgacaaccctccagtgttcccagcgacacaaaagaatctgttcatcgcggaat

SEQ ID NO: 3768 - DNA, 201 bp, Homo sapiens
gttggtctcgaactcctgaccttgtgatgctcccacctcggcctcccaaagtgctgggattaaagctgtgagccactgtgccaaggcttttttattttttwtttttgtcattttctttcaaaacttgagtggtctctgagctcctgtcattaaacctatctatatctgtctatcagcacaactcaccttgaatatagtctt

SEQ ID NO: 3769 - DNA, 201 bp, Homo sapiens
cacagtgataggacatatggattttgaagaaagtagagcacacaagatcccagtcgaggctgtcgataaaggcttcccacccctggctggtcattgtacasttcttgtggaagttgtggatgtaaatgacaatgctccacagttgactatcaaaacgctctcggttcctgtaaaagaggacgcacaactggggacagttat

SEQ ID NO: 3770 - DNA, 201 bp, Homo sapiens
ttttgaagaaagtagagcacacaagatcccagtcgaggctgtcgataaaggcttcccacccctggctggtcattgtacagttcttgtggaagttgtggatrtaaatgacaatgctccacagttgactctcacttccctgtctctccctattccagaggacgcccaaccaggtaccgtcatcacattgattagcgtgtttga

SEQ ID NO: 3771 - DNA, 201 bp, Homo sapiens
gctgacagccacagccaccgtgctggtgtcgctggtggaaagcggccaggcaccaaaggcgtcgtcgcgggcatcgttgggcattgcaggcccagagaccragctggtggatgtcaacgtgtacctgatcatcgccatctgcgcggtgtccagtctgttggtgcttaccctgctgctgtacacggcgttgcggtgctcagc

SEQ ID NO: 3772 - DNA, 201 bp, Homo sapiens
gagatcagcacgacacgagccctagatgagacggacgcaccgcgccaccgccttctggtgcttgtgaaggaccacggggagccctcgctgacagccacagscaccgtgctggtgtcgctggtggaaagcggccaggcaccaaaggcgtcgtcgcgggcatcgttgggcattgcaggcccagagaccgagctggtggatgtc

SEQ ID NO: 3773 - DNA, 201 bp, Homo sapiens
tgtatttgcactaattatttggaagtacgtttaatatacacttttgttttgggatgcgtaatactatagatcaaaatctatggtttatgttggctactctycatttttggaggaggactttgctaactggagcaatggattcacctttcttctatagtgtatttacaaaatcaaatatttacatttccatattttgataat

SEQ ID NO: 3774 - DNA, 201 bp, Homo sapiens
ttgcaggcccagagaccgagctggtggatgtcaacgtgtacctgatcatcgccatctgcgcggtgtccagtctgttggtgcttaccctgctgctgtacacrgcgttgcggtgctcagcgccgtcctctgagggcgcatgtagtttggtaaagcccactctggtgtgctccagcgcggtggggagctggtcattctcccagc

SEQ ID NO: 3775 - DNA, 201 bp, Homo sapiens
ggtgtcctactcgctggtggagctgcgggtgggcgagcgcgcgctgtcgagctacgtgtcagtgcacgcggagagcggcaaggtgtacgcgctgcagccgytggaccacgaggagctggagctgttgcagttccaggtgagcgcgcgcgatgcgggcgtgccgcctctgggcagcaacgtgacgctgcaggtgttcgtgct

SEQ ID NO: 3776 - DNA, 201 bp, Homo sapiens
ccccagtgttcgacagaaccctgtatacggtgaaattaccagaaaacgtttctatcggaacgctggtgattcaccccaatgcctcagatttagacgaaggyttgaatggggatattatttactccttctccagtgatgtttctccagatataaaatccaagttccacatggaccccttaagtggggcaatcacagtgatag

SEQ ID NO: 3777 - DNA, 118 bp, Homo sapiens
caacaatggccacacatmgagattgaaatgaagggataaaaacattcctataaattcgaaggcaagttttgctgactagaaaaacaagccaataatttgaaatggtgtgcccgaatgg

SEQ ID NO: 3778 - DNA, 201 bp, Homo sapiens; identical to SEQ ID NO: 3699

SEQ ID NO: 3779 - DNA, 201 bp, Homo sapiens; identical to SEQ ID NO: 3698

SEQ ID NO: 3780 - DNA, 201 bp, Homo sapiens; identical to SEQ ID NO: 3702

SEQ ID NO: 3781 - DNA, 201 bp, Homo sapiens; identical to SEQ ID NO: 3701

SEQ ID NO: 3782 - DNA, 201 bp, Homo sapiens; identical to SEQ ID NO: 3706

SEQ ID NO: 3783 - DNA, 201 bp, Homo sapiens; identical to SEQ ID NO: 3704

SEQ ID NO: 3784 - DNA, 201 bp, Homo sapiens; identical to SEQ ID NO: 3705

SEQ ID NO: 3785 - DNA, 201 bp, Homo sapiens; identical to SEQ ID NO: 3709

SEQ ID NO: 3786 - DNA, 201 bp, Homo sapiens; identical to SEQ ID NO: 3708

SEQ ID NO: 3787 - DNA, 201 bp, Homo sapiens; identical to SEQ ID NO: 3710

SEQ ID NO: 3788 - DNA, 201 bp, Homo sapiens; identical to SEQ ID NO: 3712

SEQ ID NO: 3789 - DNA, 201 bp, Homo sapiens; identical to SEQ ID NO: 3713

SEQ ID NO: 3790 - DNA, 201 bp, Homo sapiens; identical to SEQ ID NO: 3592

SEQ ID NO: 3791 - DNA, 201 bp, Homo sapiens
cttcaagaattactactcgttggtgttggacagcgccctggatcgcgagagcctgtcggtctatgagctggtggtgaccgcgcgggacgggggctcgcctycgctgtgggccacggccagggtgtccgtggaggtggccgacgtgaatgacaacgcgcctgcgttcgcgcagcccgagtacacagtattcgtgaaggagaa

SEQ ID NO: 3792 - DNA, 201 bp, Homo sapiens
ttgctgcagttccaggtgagcgcgcgggatgcgggcgtgccgcctctgggcagcaacgtgacgctgcaggtgttcgtgctggacgagaacgacaacgcgcsggcgctgctggcgcctcgagtgggtggcactattggtgcagtcagtgagctggtgccgcgattggtgggtgcgggtcatgtggtggcgaaggtgcgcgca

SEQ ID NO: 3793 - DNA, 201 bp, Homo sapiens
tgcgcggtgtccagcctgctggtgctcacactgctgctgtacacggcgctgcggtgctcagtgccgcccactgagggtgcgtgtgtgccgggcaagcccaytctggtgtgctccagcgcgttggggagctggtcgaactcacagcagaggcggcagagggtgttctctagcgagggcccacccaagaccgacctcatggcc

SEQ ID NO: 3794 - DNA, 201 bp, Homo sapiens; identical to SEQ ID NO: 3595

SEQ ID NO: 3795 - DNA, 201 bp, Homo sapiens
aagtcctccgatgtcaaatcactgtaaggttttggtgaaagtgctggatgtaaatgataatgctccagaactggcggtcacttcattgtatttgcctatcrgagaggacgctccactcagcaccgtcatcgccctcatcaccgtgtctgaccgtgactcaggtgccaacgggcaggtgacttgctccttaatgccccacgt

SEQ ID NO: 3796 - DNA, 201 bp, Homo sapiens
tgtacctgatcatcgccatctgcgcggtgtccagcctgctggtgctcacactgctgctgtacacggcgctgcggtgctcagtgccgcccactgagggtgcrtgtgtgccgggcaagcccactctggtgtgctccagcgcgttggggagctggtcgaactcacagcagaggcggcagagggtgttctctagcgagggcccac

SEQ ID NO: 3797 - DNA, 201 bp, Homo sapiens
cctgagagaagacagaaacggtaaagagataaatgattggaaatattagataaaatggcatgattttgaagtaagaggagagcataagaaaggtgtagtcyttttgcaatggtgttttctaggagagggggcctgggagcccgggatctgcttctttggcttctgctcctcgcagcctgggaggtggggagcggccagctc

SEQ ID NO: 3798 - DNA, 201 bp, Homo sapiens
caaggtgtacgcactgcagcccctggaccacgaggagctggagttgctgcagttccaggtgagcgcgcgggatgcgggcgtgccgcctctgggcagcaacrtgacgctgcaggtgttcgtgctggacgagaacgacaacgcgccggcgctgctggcgcctcgagtgggtggcactattggtgcagtcagtgagctggtgcc

SEQ ID NO: 3799 - DNA, 201 bp, Homo sapiens
acggcgggtgggcgagcgcgcgctgtcgaactacgtgtcagtgcacgcggagagcggcaaggtgtacgcactgcagcccctggaccacgaggagctggagytgctgcagttccaggtgagcgcgcgggatgcgggcgtgccgcctctgggcagcaacgtgacgctgcaggtgttcgtgctggacgagaacgacaacgcgcc

SEQ ID NO: 3800 - DNA, 201 bp, Homo sapiens
tcgcgcagcccgagtacacagtattcgtgaaggagaacaacccgccgggctgccacatcttcacggtgtctgcgcgggacgcggacgcgcaggagaacgcsctggtgtcctattcgctggtggaacggcgggtgggcgagcgcgcgctgtcgaactacgtgtcagtgcacgcggagagcggcaaggtgtacgcactgcagc

SEQ ID NO: 3801 - DNA, 201 bp, Homo sapiens
cgagagcctgtcggtctatgagctggtggtgaccgcgcgggacgggggctcgccttcgctgtgggccacggccagggtgtccgtggaggtggccgacgtgmatgacaacgcgcctgcgttcgcgcagcccgagtacacagtattcgtgaaggagaacaacccgccgggctgccacatcttcacggtgtctgcgcgggacgc

SEQ ID NO: 3802 - DNA, 110 bp, Homo sapiens
attgcagacrgatatagattgcattttgaaaatcaacgaatggatctaaaatttacattggccacatgatgtcgctgtacaccacaaagtcttgtcaatagaagggagct

SEQ ID NO: 3803 - DNA, 201 bp, Homo sapiens
tacctgatcatcgccatctgcgcggtgtccagcctgctggtgctcacactgctgctgtacacggcgctgcggtgctcagtgccgcccactgagggtgcgtrtgtgccgggcaagcccactctggtgtgctccagcgcgttggggagctggtcgaactcacagcagaggcggcagagggtgttctctagcgagggcccaccc

SEQ ID NO: 3804 - DNA, 201 bp, Homo sapiens
gacgcggacgcgcaggagaacgcgctggtgtcctattcgctggtggaacggcgggtgggcgagcgcgcgctgtcgaactacgtgtcagtgcacgcggagarcggcaaggtgtacgcactgcagcccctggaccacgaggagctggagttgctgcagttccaggtgagcgcgcgggatgcgggcgtgccgcctctgggcagc

SEQ ID NO: 3805 - DNA, 201 bp, Homo sapiens; identical to SEQ ID NO: 3583

SEQ ID NO: 3806 - DNA, 201 bp, Homo sapiens; identical to SEQ ID NO: 3608

SEQ ID NO: 3807 - DNA, 127 bp, Homo sapiens
attgcagacagatatagattgcatttygaaaatcaacgaatggatctaaaatttacattggccacatgatgtcgctgtacaccacaaagtcttgtcaatagaagggagctactgatcactaaaagtg

SEQ ID NO: 3808 - DNA, 104 bp, Homo sapiens
attrcagacagatatagattgcattttgaaaatcaacgaatggatctaaaatttacattggccacatgatgtcgctgtacaccacaaagtcttgtcaatagaag

SEQ ID NO: 3809 - DNA, 201 bp, Homo sapiens; identical to SEQ ID NO: 3609

SEQ ID NO: 3810 - DNA, 151 bp, Homo sapiens
attgcagacagatatagattgcattttgaaaatcaacgaatggatctaaartttacattggccacatgatgtcgctgtacaccacaaagtcttgtcaatagaagggagctactgatcactaaaagtgaaggaggaagctccattttgtcac

SEQ ID NO: 3811 - DNA, 201 bp, Homo sapiens
ccgcccactgagggtgcgtgtgtgccgggcaagcccactctggtgtgctccagcgcgttggggagctggtcgaactcacagcagaggcggcagagggtgtkctctagcgagggcccacccaagaccgacctcatggccttcagcccaggcctatctccaagtcttaacacgtcagaaagaaatgaacaaccagaagcaaat

SEQ ID NO: 3812 - DNA, 201 bp, Homo sapiens
actcaggtgccaacgggcaggtgacctgctccctaatgccccacgttcccttcaagctggtgtccaccttcaagaattactactcgttggtgctggacagygccctggaccgcgagagcgtgtcggtctatgagctggtggtgaccgcgcgggacgggggctcgccttcgctgtgggccaccgccagcgtgtctgtggaag

SEQ ID NO: 3813 - DNA, 201 bp, Homo sapiens
ccaaacacggaaccttcgttggccgcatcgcgcaggacctagggctggagctggcggagctggtgccgcgcctgttccgggtggcgtccaagggccgcggrgaccttctggaggtaaatctgcagaatggcattttgtttgtgaattctcggatcgaccgggaggagctgtgccggcggagggcggagtgcagcatccacc

SEQ ID NO: 3814 - DNA, 201 bp, Homo sapiens
gatgccatggataaaagtacattcccattatcaggacactgtaaagtagtagtgaaactcctggatgtgaatgataataccccagagatggccataaccamccttttcctgcctgtcaaagaggacgctccactcagcacggtcattgctctgatcagcgtgtctgaccgtgactcaggtgccaacgggcaggtgacctgc

SEQ ID NO: 3815 - DNA, 151 bp, Homo sapiens
gaaaggaaaagaaccttccatttttggctgtgccaagaagctcagaaaggygataatataaaaaatatatagttaattgggaattgaatttacaaaatacattgtgtggtgatgcaatagaaagctcataattggaacgagattgagatgg

SEQ ID NO: 3816 - DNA, 201 bp, Homo sapiens
tcaagctggtgtccaccttcaagaattactactcgttggtgctggacagcgccctggaccgcgagagcgtgtcggtctatgagctggtggtgaccgcgcgrgacgggggctcgccttcgctgtgggccaccgccagcgtgtctgtggaagtggccgacgtgaacgacaacgctccggcgttcgcgcagccccagtataccg

SEQ ID NO: 3817 - DNA, 179 bp, Homo sapiens
gaaaggaaaagaaccttccatttttggctgtgccaagaagctcagaaaggtgataatataaaaaatatatagttaattsggaattgaatttacaaaatacattgtgtggtgatgcaatagaaagctcataattggaacgagattgagatggtatattcccggagaggaagtctgggatc

SEQ ID NO: 3818 - DNA, 105 bp, Homo sapiens
gacaacgtgagttttctaatattaacatccatctttccctcccaattttcaaatattaaatgtcacattcacccactttttttgtatttaaaaattatgtyttag

SEQ ID NO: 3819 - DNA, 201 bp, Homo sapiens
ctgacagccacagccacagtgctggtgtcgctggtggaaagtggccaggcgccgaaggcctcatcgcgggcgtcggcgggcgctgtgggtcccgaggctgycctggtggatgtcaacgtgtacctgatcatcgccatctgtgcggtgtccagcctgctggtgctcacgctgctgctgtacaccgcgctgcggtgctcggcg

SEQ ID NO: 3820 - DNA, 201 bp, Homo sapiens
tggctgtgccaagaagctcagaaaggtgataatataaaaaatatatagttaattgggaattgaatttacaaaatacattgtgtggtgatgcaatagaaagytcataattggaacgagattgagatggtatattcccggagaggaagtctgggatcccggctcctgctgctctggcttctcctcgcctactggaaggcaggg

SEQ ID NO: 3821 - DNA, 201 bp, Homo sapiens
tgtggtgatgcaatagaaagctcataattggaacgagattgagatggtatattcccggagaggaagtctgggatcccggctcctgctgctctggcttctcytcgcctactggaaggcagggagcggccagctccactactcgatcccggaggaagccaaacacggaaccttcgttggccgcatcgcgcaggacctagggct

SEQ ID NO: 3822 - DNA, 201 bp, Homo sapiens
acgcgccggcgctgctggtgcctcgagtgggtggcaccggcggcgcagtgagcgagctggtgccgaggtcagtgggtgcgggccacgtggtggcgaaggtrcgcgcagtggaccctgattcgggctacaacgcttggctttcgtatgagctgcagccagcgcctggcagtgcgcgcatcccgttccgcgtggggctgtaca

SEQ ID NO: 3823 - DNA, 190 bp, Homo sapiens
acagagggtgtgctctggggaagctccacccaaaacagacctcatggccttcagtccaagccttcctcagggtcccacctctacagacaacgtgagttttytaatattaacatccatctttccctcccaattttcaaatattaaatgtcacattcacccactttttttgtatttaaaaattatgtcttag

SEQ ID NO: 3824 - DNA, 201 bp, Homo sapiens
tggtgatgcaatagaaagctcataattggaacgagattgagatggtatattcccggagaggaagtctgggatcccggctcctgctgctctggcttctcctygcctactggaaggcagggagcggccagctccactactcgatcccggaggaagccaaacacggaaccttcgttggccgcatcgcgcaggacctagggctgg

SEQ ID NO: 3825 - DNA, 201 bp, Homo sapiens
agagggcgcgtcggatttggatattggagcaaatgcacaattgagatacaggttaaatccaaacgaatattttgacttagatgttaaaacaaatgaagaaraaacgaactttttagagctggttttgaggaaatccttagatagagaagaaacacaagaacaccgtttattagtgattgcaactgatggaggaaaacccga

SEQ ID NO: 3826 - DNA, 106 bp, Homo sapiens
gaaagraaaagaaccttccatttttggctgtgccaagaagctcagaaaggtgataatataaaaaatatatagttaattgggaattgaatttacaaaatacattgtg

SEQ ID NO: 3827 - DNA, 201 bp, Homo sapiens
agttcagttgttgatcaatgtattggatgctaatgataacgccccagaatttgataaatccatttataatgtcagattgttggaaaatgcaccaagtgggrcattagttattaaactgaacgcctcagatgcagatgagggcatcaataaggaaatagtgtatttctttagtaatcttgttcttgacgatgtaaagtccaa

SEQ ID NO: 3828 - DNA, 201 bp, Homo sapiens
taaatctgcagaatggcattttgtttgtgaattctcggatcgaccgggaggagctgtgccggcggagcgcggagtgcagcatccacctggaggtgatcgtrgacaggccgctgcaggttttccatgtggacgtggaggtgagggacattaacgataacccgccggtgttcccagcaacacaaaagaacctgtccatcgcgg

SEQ ID NO: 3829 - DNA, 201 bp, Homo sapiens
ctcgggcgggtggcactggtggcgcagtgagcgagctggtgccatggtcggtgggtgtgggccacgtggtggcaaaggtgcgcgcggtggatgctgactcsggctacaacgcgtggctttcgtacgagctgcagccggggactggtggcgcgcgcatcccgttccgcgtggggctgtacactggcgagatcagcacaacgc

SEQ ID NO: 3830 - DNA, 201 bp, Homo sapiens
tggtgccgcgcctgttccgggtggcgtccaaaaggcaccggggccttctggaggtaaatctgcagaatggcattttgtttgtgaattctcggatcgaccgsgaggagctgtgccggcggagcgcggagtgcagcatccacctggaggtgatcgtggacaggccgctgcaggttttccatgtggacgtggaggtgagggaca

SEQ ID NO: 3831 - DNA, 201 bp, Homo sapiens
tgcatgcggagagcggcaaggtgtacgcgctgcagccgctggaccacgaggagctagagctgctgcagtttcaggtgaccgctcgcgatgccggcgtgccrcctctgggcagcaacgtgacgctgcaggtgttcgtgctggacgaaaacgacaacgcgccagcactgctagcgcctcgggcgggtggcactggtggcgcag

SEQ ID NO: 3832 - DNA, 201 bp, Homo sapiens
tgtcgagctacgtttcggtgcatgcggagagcggcaaggtgtacgcgctgcagccgctggaccacgaggagctagagctgctgcagtttcaggtgaccgckcgcgatgccggcgtgccacctctgggcagcaacgtgacgctgcaggtgttcgtgctggacgaaaacgacaacgcgccagcactgctagcgcctcgggcgg

SEQ ID NO: 3833 - DNA, 201 bp, Homo sapiens
tggtcacctgctccttgacgtcccacgtccccttcaagctggtgtccaccttcaagaattactactcgttggtgctggacagtgccctggaccgcgagagygtgtcagcctatgagctggtggtgaccgcgcgagacgggggctcgccttcgctgtgggccacggccagtgtttctgtggaggtggctgatgtgaacgaca

SEQ ID NO: 3834 - DNA, 201 bp, Homo sapiens
tcggtttccactagagggcgcctcggatgcagatatcggggagaacgccctgctcacttacagactgagcccaaatgaatacttttctctggaaaaaccayctgatgacgagctggtaaaaggtcttgggcttatattacggaaatctttagacagagaagaagctccggagatttttttagtgctcacagccactgatgg

SEQ ID NO: 3835 - DNA, 201 bp, Homo sapiens
gaccgctcgcgatgccggcgtgccacctctgggcagcaacgtgacgctgcaggtgttcgtgctggacgaaaacgacaacgcgccagcactgctagcgcctygggcgggtggcactggtggcgcagtgagcgagctggtgccatggtcggtgggtgtgggccacgtggtggcaaaggtgcgcgcggtggatgctgactccgg

SEQ ID NO: 3836 - DNA, 201 bp, Homo sapiens
cagcctgggaggcagggaacggtcagctccactactcggtctccgaggaggccaaacacggcaccttcgtgggccgcatcgcgcaggacctgggactggakctggcggagctggtgccgcgcctgttccgggtggcgtccaaaaggcaccggggccttctggaggtaaatctgcagaatggcattttgtttgtgaattctc

SEQ ID NO: 3837 - DNA, 201 bp, Homo sapiens
ggtgtcctactcgctggtggagcggcggttgggcgaccgcgcgctgtcgagctacgtgtcggtgcacgcggagagcggcaaggtgtacgcgctgcagccgytggaccacgaggagctggagctgctacagttccaggtgagcgcgcgcgatgcgggcgtgccgcctctgagcagcaacgtgacgctgcaggtgttcgtgct

SEQ ID NO: 3838 - DNA, 201 bp, Homo sapiens
cgttggtggagagcggacaggcgccaaaggcctcttcccggactttggcgggcgccgcgagcccagaggctgcgctggtggatgtcaacgtgtacctgatmatcgccatctgcgtggtgtccagcctcctggtactcacgctgctgctgtatacggcgctgtggtggtcggcaacgcccactgagggcgcgtgcgcgccgg

SEQ ID NO: 3839 - DNA, 201 bp, Homo sapiens
acggtcattgccctgatcagcgtgtctgaccgtgactcaggtgtcaacggacaggtgacctgctcgctgacgccccacgttcccttcaagctggtgtccaycttcaagaattactactcgttggtgctggacagcgccctggaccgcgagaacgtgtgggcctatgaactggtggtgactgcgcgggatgggggttcgcct

SEQ ID NO: 3840 - DNA, 201 bp, Homo sapiens
cagtgaggcacttccatacaaaggaactccatcataccggatgccaccgtttaaggatcctttgaaacttcttaagaattcaacgagatttttaacctgaractgaagaatctggtactgtaagtgtaaagaagcttattttggaagccaatttcgtatgcgatgtttggttttcagagaaggggattgggcaccccacga

SEQ ID NO: 3841 - DNA, 201 bp, Homo sapiens
gctctattgacctacaggctaagtaaaaatgagtatttttctttagattcaccaacaaatggtaagcagattaaaagactgtcacttattttaaagaagtmtctggatagagagaaaactccggaacttaatttgctgctaacagctacagacgggggaaaaccagagcttactggcaccgttcggctgttagtccaagtc

SEQ ID NO: 3842 - DNA, 201 bp, Homo sapiens
tggtaaatgcagtgcacagtactcacagttttaggcgcaaggtgtcgctctttacttggtggaaagttcatttaaaggttggtctgaacagtgaggcactyccatacaaaggaactccatcataccggatgccaccgtttaaggatcctttgaaacttcttaagaattcaacgagatttttaacctgaaactgaagaatct

SEQ ID NO: 3843 - DNA, 201 bp, Homo sapiens
tcccagtacgagaggacgctcagcccagcacggtcattgccctgatcagcgtgtctgaccgtgactcaggtgtcaacggacaggtgacctgctcgctgacsccccacgttcccttcaagctggtgtccaccttcaagaattactactcgttggtgctggacagcgccctggaccgcgagaacgtgtgggcctatgaactgg

SEQ ID NO: 3844 - DNA, 201 bp, Homo sapiens
gccggcactgctggcgactcaggctggcagcgcgggaggcgcagttaacaagctagtaccgcggtcggtgggtgcgggccacgtggtggcgaaggtgcgckcagtggatgcggactcaggctacaacgcgtggctttcatatgaattgcagccggcggcgggcggctcgcgcatcccgttccgcgtggggctgtacacggg

SEQ ID NO: 3845 - DNA, 201 bp, Homo sapiens
ccggggaagcccacgctggtgtgctcccgcgcggtggggagctggtcatactcgcagcagaggcggcagagggtgtgctctgaggagggcccacctaagasggacctcatggccttcagccccagtcttcctctaggtctgaataaagaggaggaaggggaaagacaggagccagggtcaaatcaccccggacaggtgagt

SEQ ID NO: 3846 - DNA, 201 bp, Homo sapiens
gaaggggattgggcaccccacgactacagctctggcttctcctcctcgaattctgggaggtggggagcggccagctccactactccgtctcggaggaggcyaaacacggcaccttcgtgggccgcatcgcgcaggacctggggctggagctggcggagctggtgcagcgcctgttccgggtggcgtccaaaacacatgggg

SEQ ID NO: 3847 - DNA, 201 bp, Homo sapiens
gtacagtctgggtggaaatcttggacaccaacgataactctcctgaagtcgccgtgacttccttgtccctcccagtacgagaggacgctcagcccagcacsgtcattgccctgatcagcgtgtctgaccgtgactcaggtgtcaacggacaggtgacctgctcgctgacgccccacgttcccttcaagctggtgtccacct

SEQ ID NO: 3848 - DNA, 201 bp, Homo sapiens
gtgccctggacgaggcagactcgccgcgccaccgacttctagtactggtgaaggatcacggtgagccggcgctgacggccacggccaccgtgctggtgtcrttggtggagagcggacaggcgccaaaggcctcttcccggactttggcgggcgccgcgagcccagaggctgcgctggtggatgtcaacgtgtacctgatca

SEQ ID NO: 3849 - DNA, 201 bp, Homo sapiens
gcctactggtgctggtgaaggaccacggtgaaccctcattgaccgccacggccactgtgctggtgtcgctggtggagagtggccaggcacccaaggcctcktcccaggcgtccgctggcgccacgggcccggaagctgcactggtggatgtcaacgtgtacttgatcgtcgccatctgcgcggtgtccagtctgttggtgc

SEQ ID NO: 3850 - DNA, 201 bp, Homo sapiens
ccaaatggtaccctagtggtgaccgttaacgccaccgatttggatgaaggagtaaataaggatatcgcgtattctttcaatacggacatgtcagcagataytctgtcaaaattccatttagatccagtcaatggacaaatcagtgtaaagggtaacatagatttcgaggaaagtaagtcatatgaaatccaggtagaagcc

SEQ ID NO: 3851 - DNA, 201 bp, Homo sapiens
catgtcagcagatattctgtcaaaattccatttagatccagtcaatggacaaatcagtgtaaagggtaacatagatttcgaggaaagtaagtcatatgaartccaggtagaagccacggataaaggaaatcccccaatgtcagatcactgcacagttctactcgaaattgtggacatcaatgataatgtacctgagttagt

SEQ ID NO: 3852 - DNA, 201 bp, Homo sapiens
ttggtgctggacagccctctggaccgcgagagcgtgtcggcctatgagctggtggtgactgctcgggacgggggctcgccttcactgtgggccacggccakcgtgtccgtggaggtggccgacgtgaacgacaatgcgccggcattctcgcagtccgagtacacggtgttcgtgaaggagaacaacccgccgggctgccac

SEQ ID NO: 3853 - DNA, 201 bp, Homo sapiens
tactcgaaattgtggacatcaatgataatgtacctgagttagttattcaatcactatctttacctgtattagaagactctccacttagcacagtcatcgcyctgatcagcgtgtccgaccgcgactcaggagtcaatggacaggtcacctgctcgctgacgccccacgtccccttcaagctggtgtccaccttcaagaatt

SEQ ID NO: 3854 - DNA, 201 bp, Homo sapiens
ccgccaaccgaaggcgactgtgggccgggcaagcccacgctggtgtgctccagcgcggtggggagctggtcatactcgcagcagaggcagcagagggtgtrctctggagaggggttgcccaagaccgacctcatggcttttagccctagccttcctccttgtccaattagccgggatagagaggagaaacaggatgtggac

SEQ ID NO: 3855 - DNA, 201 bp, Homo sapiens
aagccacggataaaggaaatcccccaatgtcagatcactgcacagttctactcgaaattgtggacatcaatgataatgtacctgagttagttattcaatcrctatctttacctgtattagaagactctccacttagcacagtcatcgccctgatcagcgtgtccgaccgcgactcaggagtcaatggacaggtcacctgct

SEQ ID NO: 3856 - DNA, 201 bp, Homo sapiens
tttccaatggctgtaaagaatctgtttatttccgaatcccgacagcctggctctcggttttcgctagagggcgcatcagatgcagatatcggaacaaattsgttgttgacttacagtcttgattccactgaatattttaccttggacgttaaaagaaatgatgaggaaattaaatcccttggactcgtgttgaaaaaaaat

SEQ ID NO: 3857 - DNA, 201 bp, Homo sapiens
tccacctggaggtgatcgtggacaggccgctgcaggttttccatgtggaggtggaagtgaaggacattaatgacaacgcgccagtttttccaatggctgtraagaatctgtttatttccgaatcccgacagcctggctctcggttttcgctagagggcgcatcagatgcagatatcggaacaaattcgttgttgacttaca

SEQ ID NO: 3858 - DNA, 201 bp, Homo sapiens
agcggccagctccactactccgtctctgaggaggccaagcatggcaccttcgtgggccgcatcgcgcaggacctggggctggagctggcggagctggtgcmgcgcctgttccgggtggcgtccaaaagacacggggaccttctggaggtaaatctgcagaatggcattttgtttgtgaattctcggatagaccgcgaggaa

SEQ ID NO: 3859 - DNA, 201 bp, Homo sapiens
acggggaccttctggaggtaaatctgcagaatggcattttgtttgtgaattctcggatagaccgcgaggaactgtgcgggcggagcgcggagtgcagcatycacctggaggtgatcgtggacaggccgctgcaggttttccatgtggaggtggaagtgaaggacattaatgacaacgcgccagtttttccaatggctgtaa

SEQ ID NO: 3860 - DNA, 198 bp, Homo sapiens
gcattacgtattcagatactgctttgcttcatcctctctaaaatttaacaccgaggagtttaagaaatgaagataaggaactcgaattatttttaaaytttggatcaatgtaaaggcaatctaatatttggaaaatacttgcaatgttgttctcctggcgagaagatcctggagcccagtgcctgctgctttctcttc

SEQ ID NO: 3861 - DNA, 201 bp, Homo sapiens
atcgagaggacactcctaagcattatttactaataacagcaattgatggtgggaaaccagagctcactggcacgactcaactaaagatcactgttttagaygtaaacgacaacgccccagcgtttgagaggacgatctataaagtcagattactcgaaaatgcaccaaatggtaccctagtggtgaccgttaacgccaccg

SEQ ID NO: 3862 - DNA, 201 bp, Homo sapiens
ggccaaacacggcaccttcgtgggccgcatcgctcaggacctggggctggagctggcggagctggtgccgcgcctgttccgggtggcgtccaaaagacacsgggaccttctggaggtaaatctgcagaatggcattttgtttgtgaattctcggatcgaccgcgagaagctgtgcgggcggagcgcggagtgcagtatcca

SEQ ID NO: 3863 - DNA, 154 bp, Homo sapiens
tgactgtgatgctggaaaaaatttactaaatatgtacttacagaaaagggtgaytgctcataaaatacctcaggcaagcgatcccttaaaactgattgtcccaactcagaggccctcattttctgcaatggtgattatcggaccaagaggcccg

SEQ ID NO: 3864 - DNA, 201 bp, Homo sapiens
gaggtaaatctgcagaatggcattttgtttgtgaattctcggatcgaccgcgagaagctgtgcgggcggagcgcggagtgcagtatccacctggaggtgaycgtggacaggccgctgcaggttttccatgtggacgtggaggtgaaggacattaacgacaacccgccggtgttcagagaaagggaacaaaaggtacctgtt

SEQ ID NO: 3865 - DNA, 201 bp, Homo sapiens
tgtccacctacaagaattactactcgttggtgctggacagcgccctggaccgcgagagcgtgtcggcctatgagctggtggtgactgcgcgggatgggggytcgccttcgctgtgggccacggctagagtgtccgtggaggtggccgacgtgaacgacaatgcgcctgcgttcgcgcagcccgagtacacagtgttcgtga

SEQ ID NO: 3866 - DNA, 201 bp, Homo sapiens
tgatggtaatcgatggcggtaaaccagaactaacagggtctgtccagattcaaataaccgtcctggatgtgaatgacaatggtccggcgtttgataagccmagctataaagtagtgttgtctgaaaatgtccaaaacgacacaagagtgatccaactaaatgcttccgatccagacgaaggacttaatggagaaatttcct

SEQ ID NO: 3867 - DNA, 201 bp, Homo sapiens
tggtgctcacgctgctgctgtacactgcgctgcgttgctcagcgccgcccaccgtgagccggtgcgcgccgggcaagcccacgctggtgtgctccagcgcygtggggagttggtcttactcgcagcagaggaggcagagggtgtgctctgcagagagcccgcccaagacggacctcatggccttcagcccaagccttcagc

SEQ ID NO: 3868 - DNA, 201 bp, Homo sapiens
cctgaattagttcttcggaagttattggacagagagcaaacgccaaaactcaatttattgctgatggtaatcgatggcggtaaaccagaactaacagggtstgtccagattcaaataaccgtcctggatgtgaatgacaatggtccggcgtttgataagcccagctataaagtagtgttgtctgaaaatgtccaaaacgac

SEQ ID NO: 3869 - DNA, 201 bp, Homo sapiens
gtgctcacgctgctgctgtacactgcgctgcgttgctcagcgccgcccaccgtgagccggtgcgcgccgggcaagcccacgctggtgtgctccagcgccgyggggagttggtcttactcgcagcagaggaggcagagggtgtgctctgcagagagcccgcccaagacggacctcatggccttcagcccaagccttcagctg

SEQ ID NO: 3870 - DNA, 201 bp, Homo sapiens
tcgtgctggtgaaggaccacggcgaaccagcgttgacagccacggccaccgtgttagtgtcgttggtggaaagtggccaggcacccaaggcctcgtcgcgrgcgtgggtgggcgccgcgggctcagaggctacgctggtggatgtcaacgtgtacctgatcatcgccatctgcgcggtatccagcctgttggtgctcacgg

SEQ ID NO: 3871 - DNA, 178 bp, Homo sapiens
ccagagtaaaaaagggtaaaaaggtaatatattttagggcttaaaatagttatttttttccaagatgaaagctatgartaaacttaaaccagaaaatcgactagttttaaatctacagaataaacagtagagccttccttttagccacatgatgtcgctgtccaccatagagtgttct

SEQ ID NO: 3872 - DNA, 201 bp, Homo sapiens
gggacgggggctcgccttcactgtgggccaccaccagcgtgtccatcgaggtggccgacgtgaacgacaacgcgccggcgttcgcacagcctgagtacacrgtattcgtgaaggagaacaacccgccgggctgccacatcttcacggtgtcagcgtgggatgcggacgcgcaggagaacgcgctggtgtcctactcgctgg

SEQ ID NO: 3873 - DNA, 201 bp, Homo sapiens
gccgggctgccacatcttcacggtgtcagcgtgggatgcggacgcgcaggagaacgcgctggtgtcctactcgctggtggagcggcgggtgggcgagcgcrcgttgtcgagctacgtttcggtgcacgcggagagcggcaaggtgtacgcgctgcagccgctggaccacgaggaagtggagctgctgcagttccaggtgag

SEQ ID NO: 3874 - DNA, 201 bp, Homo sapiens
aggtgatcgtggacaggccgctgcaggttttccatgtggaagtggaggtgaaggacattaacgacaacccgccaatatttccaatgacagtaaagactatscggtttcccgaatcaaggctgcttgattctcggtttcctctagagggagcatctgatgcagatataggagtaaatgctcttctctcctacaagctcagct

SEQ ID NO: 3875 - DNA, 201 bp, Homo sapiens
gcgcgcgcgccaggaaagcccacgctggtgtgctccagcgccgtggggagctggtcttactcgcagcagaggcggcagagggtgtgctctggggaggaccyccccaagacggacctcatggccttcagccctagcttatctcaaggtccagactccgcagaagagaaacagctctcagaatcagaatacgtaggaaaggtg

SEQ ID NO: 3876 - DNA, 201 bp, Homo sapiens
aatttgatcaaaacattgaggattggtaatggcgtcttctatcagaaggggccgaggggcctggacacggctgctctcgcttctgctcctcgcagcctggraggtggggagcggccagctccgctactccgtccccgaggaggccaaacacggcaccttcgtgggccgcatcgcgcaggacctggggctggagctggagga

SEQ ID NO: 3877 - DNA, 201 bp, Homo sapiens
gcagaatggcattttgtttgtgaattctcggatcgaccgggaggagctgtgcgggcggagcgcggaatgtagcatccacctggaggtgatcgtggacaggmcgctgcaggttttccatgtggaagtggaggtgaaggacattaacgacaacccgccaatatttccaatgacagtaaagactatccggtttcccgaatcaag

SEQ ID NO: 3878 - DNA, 201 bp, Homo sapiens
gctatgagtaaacttaaaccagaaaatcgactagttttaaatctacagaataaacagtagagccttccttttagccacatgatgtcgctgtccaccatagmgtgttctctaggaaggaaaatacccagagcccctttgttacttcagagaagcggaggaataagagaagcagcaggactttaacagagactagaatattta

SEQ ID NO: 3879 - DNA, 201 bp, Homo sapiens
ggaccttctggaggtaaatctgcagaatggcattttgtttgtgaattctcggatcgaccgggaggagctgtgcgggcggagcgcggaatgtagcatccacstggaggtgatcgtggacaggccgctgcaggttttccatgtggaagtggaggtgaaggacattaacgacaacccgccaatatttccaatgacagtaaagac

SEQ ID NO: 3880 - DNA, 201 bp, Homo sapiens; identical to SEQ ID NO: 3676

SEQ ID NO: 3881 - DNA, 201 bp, Homo sapiens; identical to SEQ ID NO: 3671

SEQ ID NO: 3882 - DNA, 201 bp, Homo sapiens; identical to SEQ ID NO: 3673

SEQ ID NO: 3883 - DNA, 201 bp, Homo sapiens; identical to SEQ ID NO: 3674

SEQ ID NO: 3884 - DNA, 201 bp, Homo sapiens; identical to SEQ ID NO: 3677

SEQ ID NO: 3885 - DNA, 201 bp, Homo sapiens; identical to SEQ ID NO: 3678

SEQ ID NO: 3886 - DNA, 201 bp, Homo sapiens; identical to SEQ ID NO: 3616

SEQ ID NO: 3887 - DNA, 201 bp, Homo sapiens; identical to SEQ ID NO: 3617

SEQ ID NO: 3888 - DNA, 201 bp, Homo sapiens; identical to SEQ ID NO: 3619

SEQ ID NO: 3889 - DNA, 201 bp, Homo sapiens; identical to SEQ ID NO: 3620

SEQ ID NO: 3890 - DNA, 201 bp, Homo sapiens; identical to SEQ ID NO: 3621

SEQ ID NO: 3891 - DNA, 201 bp, Homo sapiens
caaattttatggaatttgattcctttggcccggagatggctgctagctgtgttttgaaatatttcttagacaagcctttcacaacatttcatcaattgaaytaaacactccttcttagcacttcctgtgccaagaaatctggaagtatagaagtattagaagattgccctaggcctcaagggacttatagtttatttttga

SEQ ID NO: 3892 - DNA, 201 bp, Homo sapiens; identical to SEQ ID NO: 3623

SEQ ID NO: 3893 - DNA, 201 bp, Homo sapiens; identical to SEQ ID NO: 3625

SEQ ID NO: 3894 - DNA, 201 bp, Homo sapiens; identical to SEQ ID NO: 3626

SEQ ID NO: 3895 - DNA, 201 bp, Homo sapiens; identical to SEQ ID NO: 3627

SEQ ID NO: 3896 - DNA, 201 bp, Homo sapiens; identical to SEQ ID NO: 3629

SEQ ID NO: 3897 - DNA, 201 bp, Homo sapiens; identical to SEQ ID NO: 3630

SEQ ID NO: 3898 - DNA, 201 bp, Homo sapiens
tccttcttagcacttcctgtgccaagaaatctggaagtatagaagtattagaagattgccctaggcctcaagggacttatagtttatttttgagaaacaarggcaaaaattaaaacctatttaagaacaataaaagtaatatgacataaaggtctaaaattaaaaataaaataccaaaatattttataagcaacagatgtg

SEQ ID NO: 3899 - DNA, 201 bp, Homo sapiens; identical to SEQ ID NO: 3631

SEQ ID NO: 3900 - DNA, 201 bp, Homo sapiens; identical to SEQ ID NO: 3632

SEQ ID NO: 3901 - DNA, 201 bp, Homo sapiens; identical to SEQ ID NO: 3633

SEQ ID NO: 3902 - DNA, 201 bp, Homo sapiens; identical to SEQ ID NO: 3634

SEQ ID NO: 3903 - DNA, 201 bp, Homo sapiens; identical to SEQ ID NO: 3791

SEQ ID NO: 3904 - DNA, 201 bp, Homo sapiens; identical to SEQ ID NO: 3792

SEQ ID NO: 3905 - DNA, 201 bp, Homo sapiens; identical to SEQ ID NO: 3793

SEQ ID NO: 3906 - DNA, 201 bp, Homo sapiens; identical to SEQ ID NO: 3796

SEQ ID NO: 3907 - DNA, 201 bp, Homo sapiens; identical to SEQ ID NO: 3795

SEQ ID NO: 3908 - DNA, 201 bp, Homo sapiens
cagcccaggcctatctccaagtcttaacacgtcagaaagaaatgaacaaccagaagcaaatttggatctttctggtaatgtaagtccaactttcgagtttyggctttaaatatttttcatatttaacttgtctaatcatcttttcaaatatcactttaaaaaatgtcttcaaggtgttcactaacgttgaaataaatcata

SEQ ID NO: 3909 - DNA, 201 bp, Homo sapiens; identical to SEQ ID NO: 3797

SEQ ID NO: 3910 - DNA, 201 bp, Homo sapiens; identical to SEQ ID NO: 3798

SEQ ID NO: 3911 - DNA, 201 bp, Homo sapiens; identical to SEQ ID NO: 3799

SEQ ID NO: 3912 - DNA, 201 bp, Homo sapiens; identical to SEQ ID NO: 3800

SEQ ID NO: 3913 - DNA, 201 bp, Homo sapiens; identical to SEQ ID NO: 3801

SEQ ID NO: 3914 - DNA, 201 bp, Homo sapiens; identical to SEQ ID NO: 3803

SEQ ID NO: 3915 - DNA, 110 bp, Homo sapiens; identical to SEQ ID NO: 3802

SEQ ID NO: 3916 - DNA, 201 bp, Homo sapiens; identical to SEQ ID NO: 3804

SEQ ID NO: 3917 - DNA, 127 bp, Homo sapiens; identical to SEQ ID NO: 3807

SEQ ID NO: 3918 - DNA, 104 bp, Homo sapiens; identical to SEQ ID NO: 3808

SEQ ID NO: 3919 - DNA, 151 bp, Homo sapiens; identical to SEQ ID NO: 3810

SEQ ID NO: 3920 - DNA, 201 bp, Homo sapiens; identical to SEQ ID NO: 3811

SEQ ID NO: 3921 - DNA, 201 bp, Homo sapiens; identical to SEQ ID NO: 3687

SEQ ID NO: 3922 - DNA, 201 bp, Homo sapiens; identical to SEQ ID NO: 3681

SEQ ID NO: 3923 - DNA, 201 bp, Homo sapiens; identical to SEQ ID NO: 3682

SEQ ID NO: 3924 - DNA, 201 bp, Homo sapiens; identical to SEQ ID NO: 3688

SEQ ID NO: 3925 - DNA, 201 bp, Homo sapiens; identical to SEQ ID NO: 3690

SEQ ID NO: 3926 - DNA, 201 bp, Homo sapiens; identical to SEQ ID NO: 3691

SEQ ID NO: 3927 - DNA, 201 bp, Homo sapiens; identical to SEQ ID NO: 3683

SEQ ID NO: 3928 - DNA, 201 bp, Homo sapiens; identical to SEQ ID NO: 3684

SEQ ID NO: 3929 - DNA, 201 bp, Homo sapiens; identical to SEQ ID NO: 3692

SEQ ID NO: 3930 - DNA, 201 bp, Homo sapiens; identical to SEQ ID NO: 3693

SEQ ID NO: 3931 - DNA, 201 bp, Homo sapiens; identical to SEQ ID NO: 3694

SEQ ID NO: 3932 - DNA, 201 bp, Homo sapiens; identical to SEQ ID NO: 3695

SEQ ID NO: 3933 - DNA, 201 bp, Homo sapiens; identical to SEQ ID NO: 3696

SEQ ID NO: 3934 - DNA, 201 bp, Homo sapiens; identical to SEQ ID NO: 3592

SEQ ID NO: 3935 - DNA, 201 bp, Homo sapiens; identical to SEQ ID NO: 3813

SEQ ID NO: 3936 - DNA, 201 bp, Homo sapiens; identical to SEQ ID NO: 3595

SEQ ID NO: 3937 - DNA, 201 bp, Homo sapiens; identical to SEQ ID NO: 3814

SEQ ID NO: 3938 - DNA, 151 bp, Homo sapiens; identical to SEQ ID NO: 3815

SEQ ID NO: 3939 - DNA, 201 bp, Homo sapiens; identical to SEQ ID NO: 3816

SEQ ID NO: 3940 - DNA, 179 bp, Homo sapiens; identical to SEQ ID NO: 3817

SEQ ID NO: 3941 - DNA, 201 bp, Homo sapiens; identical to SEQ ID NO: 3819

SEQ ID NO: 3942 - DNA, 201 bp, Homo sapiens; identical to SEQ ID NO: 3820

SEQ ID NO: 3943 - DNA, 201 bp, Homo sapiens; identical to SEQ ID NO: 3822

SEQ ID NO: 3944 - DNA, 201 bp, Homo sapiens; identical to SEQ ID NO: 3821

SEQ ID NO: 3945 - DNA, 201 bp, Homo sapiens; identical to SEQ ID NO: 3825

SEQ ID NO: 3946 - DNA, 201 bp, Homo sapiens; identical to SEQ ID NO: 3824

SEQ ID NO: 3947 - DNA, 201 bp, Homo sapiens; identical to SEQ ID NO: 3827

SEQ ID NO: 3948 - DNA, 106 bp, Homo sapiens; identical to SEQ ID NO: 3826

SEQ ID NO: 3949 - DNA, 201 bp, Homo sapiens; identical to SEQ ID NO: 3583

SEQ ID NO: 3950 - DNA, 201 bp, Homo sapiens; identical to SEQ ID NO: 3812

SEQ ID NO: 3951 - DNA, 201 bp, Homo sapiens; identical to SEQ ID NO: 3608

SEQ ID NO: 3952 - DNA, 201 bp, Homo sapiens; identical to SEQ ID NO: 3609

SEQ ID NO: 3953 - DNA, 201 bp, Homo sapiens; identical to SEQ ID NO: 3592

SEQ ID NO: 3954 - DNA, 201 bp, Homo sapiens; identical to SEQ ID NO: 3583

SEQ ID NO: 3955 - DNA, 201 bp, Homo sapiens; identical to SEQ ID NO: 3608

SEQ ID NO: 3956 - DNA, 201 bp, Homo sapiens; identical to SEQ ID NO: 3595

SEQ ID NO: 3957 - DNA, 201 bp, Homo sapiens; identical to SEQ ID NO: 3775

SEQ ID NO: 3958 - DNA, 201 bp, Homo sapiens; identical to SEQ ID NO: 3774

SEQ ID NO: 3959 - DNA, 201 bp, Homo sapiens; identical to SEQ ID NO: 3609

SEQ ID NO: 3960 - DNA, 118 bp, Homo sapiens; identical to SEQ ID NO: 3777

SEQ ID NO: 3961 - DNA, 201 bp, Homo sapiens; identical to SEQ ID NO: 3776

SEQ ID NO: 3962 - DNA, 201 bp, Homo sapiens; identical to SEQ ID NO: 3770

SEQ ID NO: 3963 - DNA, 201 bp, Homo sapiens; identical to SEQ ID NO: 3771

SEQ ID NO: 3964 - DNA, 201 bp, Homo sapiens; identical to SEQ ID NO: 3772

SEQ ID NO: 3965 - DNA, 201 bp, Homo sapiens; identical to SEQ ID NO: 3592

SEQ ID NO: 3966 - DNA, 201 bp, Homo sapiens; identical to SEQ ID NO: 3583

SEQ ID NO: 3967 - DNA, 201 bp, Homo sapiens; identical to SEQ ID NO: 3828

SEQ ID NO: 3968 - DNA, 201 bp, Homo sapiens; identical to SEQ ID NO: 3608

SEQ ID NO: 3969 - DNA, 201 bp, Homo sapiens; identical to SEQ ID NO: 3833

SEQ ID NO: 3970 - DNA, 201 bp, Homo sapiens; identical to SEQ ID NO: 3830

SEQ ID NO: 3971 - DNA, 201 bp, Homo sapiens; identical to SEQ ID NO: 3829

SEQ ID NO: 3972 - DNA, 201 bp, Homo sapiens; identical to SEQ ID NO: 3595

SEQ ID NO: 3973 - DNA, 201 bp, Homo sapiens; identical to SEQ ID NO: 3831

SEQ ID NO: 3974 - DNA, 201 bp, Homo sapiens; identical to SEQ ID NO: 3834

SEQ ID NO: 3975 - DNA, 201 bp, Homo sapiens; identical to SEQ ID NO: 3832

SEQ ID NO: 3976 - DNA, 201 bp, Homo sapiens; identical to SEQ ID NO: 3835

SEQ ID NO: 3977 - DNA, 201 bp, Homo sapiens; identical to SEQ ID NO: 3836

SEQ ID NO: 3978 - DNA, 201 bp, Homo sapiens; identical to SEQ ID NO: 3609

SEQ ID NO: 3979 - DNA, 201 bp, Homo sapiens; identical to SEQ ID NO: 3592

SEQ ID NO: 3980 - DNA, 201 bp, Homo sapiens; identical to SEQ ID NO: 3583

SEQ ID NO: 3981 - DNA, 201 bp, Homo sapiens; identical to SEQ ID NO: 3608

SEQ ID NO: 3982 - DNA, 201 bp, Homo sapiens; identical to SEQ ID NO: 3595

SEQ ID NO: 3983 - DNA, 201 bp, Homo sapiens; identical to SEQ ID NO: 3837

SEQ ID NO: 3984 - DNA, 201 bp, Homo sapiens; identical to SEQ ID NO: 3838

SEQ ID NO: 3985 - DNA, 201 bp, Homo sapiens; identical to SEQ ID NO: 3839

SEQ ID NO: 3986 - DNA, 201 bp, Homo sapiens; identical to SEQ ID NO: 3609

SEQ ID NO: 3987 - DNA, 201 bp, Homo sapiens; identical to SEQ ID NO: 3840

SEQ ID NO: 3988 - DNA, 201 bp, Homo sapiens; identical to SEQ ID NO: 3841

SEQ ID NO: 3989 - DNA, 201 bp, Homo sapiens; identical to SEQ ID NO: 3842

SEQ ID NO: 3990 - DNA, 201 bp, Homo sapiens; identical to SEQ ID NO: 3844

SEQ ID NO: 3991 - DNA, 201 bp, Homo sapiens; identical to SEQ ID NO: 3843

SEQ ID NO: 3992 - DNA, 201 bp, Homo sapiens
ccggggaagcccacgctggtgtgctcccgcgcggtggggagctggtcatactcgcagcagaggcggcagagggtgtgctctgaggagggcccacctaagasggacctcatggccttcagccccagtcttcctctaggtctgaataaagaggaggaaggggaaagacaggagccagggtcaaatcaccccggacagccacga

SEQ ID NO: 3993 - DNA, 201 bp, Homo sapiens; identical to SEQ ID NO: 3846

SEQ ID NO: 3994 - DNA, 201 bp, Homo sapiens; identical to SEQ ID NO: 3847

SEQ ID NO: 3995 - DNA, 201 bp, Homo sapiens; identical to SEQ ID NO: 3848

SEQ ID NO: 3996 - DNA, 201 bp, Homo sapiens; identical to SEQ ID NO: 3592

SEQ ID NO: 3997 - DNA, 201 bp, Homo sapiens; identical to SEQ ID NO: 3583

SEQ ID NO: 3998 - DNA, 201 bp, Homo sapiens; identical to SEQ ID NO: 3862

SEQ ID NO: 3999 - DNA, 201 bp, Homo sapiens; identical to SEQ ID NO: 3864

SEQ ID NO: 4000 - DNA, 154 bp, Homo sapiens; identical to SEQ ID NO: 3863

SEQ ID NO: 4001 - DNA, 201 bp, Homo sapiens; identical to SEQ ID NO: 3608

SEQ ID NO: 4002 - DNA, 201 bp, Homo sapiens; identical to SEQ ID NO: 3865

SEQ ID NO: 4003 - DNA, 201 bp, Homo sapiens; identical to SEQ ID NO: 3595

SEQ ID NO: 4004 - DNA, 201 bp, Homo sapiens; identical to SEQ ID NO: 3866

SEQ ID NO: 4005 - DNA, 201 bp, Homo sapiens; identical to SEQ ID NO: 3867

SEQ ID NO: 4006 - DNA, 201 bp, Homo sapiens; identical to SEQ ID NO: 3609

SEQ ID NO: 4007 - DNA, 201 bp, Homo sapiens; identical to SEQ ID NO: 3869

SEQ ID NO: 4008 - DNA, 201 bp, Homo sapiens; identical to SEQ ID NO: 3868

SEQ ID NO: 4009 - DNA, 201 bp, Homo sapiens; identical to SEQ ID NO: 3592

SEQ ID NO: 4010 - DNA, 201 bp, Homo sapiens; identical to SEQ ID NO: 3583

SEQ ID NO: 4011 - DNA, 201 bp, Homo sapiens; identical to SEQ ID NO: 3849

SEQ ID NO: 4012 - DNA, 201 bp, Homo sapiens; identical to SEQ ID NO: 3608

SEQ ID NO: 4013 - DNA, 201 bp, Homo sapiens; identical to SEQ ID NO: 3850

SEQ ID NO: 4014 - DNA, 201 bp, Homo sapiens; identical to SEQ ID NO: 3851

SEQ ID NO: 4015 - DNA, 201 bp, Homo sapiens; identical to SEQ ID NO: 3595

SEQ ID NO: 4016 - DNA, 201 bp, Homo sapiens; identical to SEQ ID NO: 3609

SEQ ID NO: 4017 - DNA, 201 bp, Homo sapiens; identical to SEQ ID NO: 3852

SEQ ID NO: 4018 - DNA, 201 bp, Homo sapiens; identical to SEQ ID NO: 3853

SEQ ID NO: 4019 - DNA, 201 bp, Homo sapiens; identical to SEQ ID NO: 3854

SEQ ID NO: 4020 - DNA, 201 bp, Homo sapiens; identical to SEQ ID NO: 3855

SEQ ID NO: 4021 - DNA, 201 bp, Homo sapiens; identical to SEQ ID NO: 3856

SEQ ID NO: 4022 - DNA, 201 bp, Homo sapiens; identical to SEQ ID NO: 3857

SEQ ID NO: 4023 - DNA, 201 bp, Homo sapiens; identical to SEQ ID NO: 3859

SEQ ID NO: 4024 - DNA, 201 bp, Homo sapiens; identical to SEQ ID NO: 3858

SEQ ID NO: 4025 - DNA, 201 bp, Homo sapiens; identical to SEQ ID NO: 3861

SEQ ID NO: 4026 - DNA, 198 bp, Homo sapiens; identical to SEQ ID NO: 3860

SEQ ID NO: 4027 - DNA, 201 bp, Homo sapiens; identical to SEQ ID NO: 3592

SEQ ID NO: 4028 - DNA, 201 bp, Homo sapiens; identical to SEQ ID NO: 3870

SEQ ID NO: 4029 - DNA, 178 bp, Homo sapiens; identical to SEQ ID NO: 3871

SEQ ID NO: 4030 - DNA, 201 bp, Homo sapiens; identical to SEQ ID NO: 3583

SEQ ID NO: 4031 - DNA, 201 bp, Homo sapiens; identical to SEQ ID NO: 3608

SEQ ID NO: 4032 - DNA, 201 bp, Homo sapiens; identical to SEQ ID NO: 3872

SEQ ID NO: 4033 - DNA, 201 bp, Homo sapiens; identical to SEQ ID NO: 3873

SEQ ID NO: 4034 - DNA, 201 bp, Homo sapiens; identical to SEQ ID NO: 3595

SEQ ID NO: 4035 - DNA, 201 bp, Homo sapiens
gcgcgcgcgccaggaaagcccacgctggtgtgctccagcgccgtggggagctggtcttactcgcagcagaggcggcagagggtgtgctctggggaggaccyccccaagacggacctcatggccttcagccctagcttatctcaaggtccagactccgcagaagagaaacagctctcagaatcagaatacgtaggaaagcca

SEQ ID NO: 4036 - DNA, 201 bp, Homo sapiens; identical to SEQ ID NO: 3874

SEQ ID NO: 4037 - DNA, 201 bp, Homo sapiens; identical to SEQ ID NO: 3876

SEQ ID NO: 4038 - DNA, 201 bp, Homo sapiens; identical to SEQ ID NO: 3609

SEQ ID NO: 4039 - DNA, 201 bp, Homo sapiens; identical to SEQ ID NO: 3877

SEQ ID NO: 4040 - DNA, 201 bp, Homo sapiens; identical to SEQ ID NO: 3878

SEQ ID NO: 4041 - DNA, 201 bp, Homo sapiens; identical to SEQ ID NO: 3879

SEQ ID NO: 4042 - DNA, 201 bp, Homo sapiens; identical to SEQ ID NO: 3592

SEQ ID NO: 4043 - DNA, 201 bp, Homo sapiens; identical to SEQ ID NO: 3715

SEQ ID NO: 4044 - DNA, 201 bp, Homo sapiens; identical to SEQ ID NO: 3595

SEQ ID NO: 4045 - DNA, 201 bp, Homo sapiens; identical to SEQ ID NO: 3716

SEQ ID NO: 4046 - DNA, 201 bp, Homo sapiens; identical to SEQ ID NO: 3719

SEQ ID NO: 4047 - DNA, 201 bp, Homo sapiens; identical to SEQ ID NO: 3718

SEQ ID NO: 4048 - DNA, 201 bp, Homo sapiens
ctggtcttactcgcagcagaggcggcagagggtgtgttctggggagggcctgcccaaggcggacctcatggccttcagccccagccttccaccatgcccartggtagatgtggacggggaagatcagtctattggaggggaccactctaggaagccacgacagcccaaccctgactggcgttactctgcctccctgagagc

SEQ ID NO: 4049 - DNA, 201 bp, Homo sapiens; identical to SEQ ID NO: 3722

SEQ ID NO: 4050 - DNA, 201 bp, Homo sapiens; identical to SEQ ID NO: 3723

SEQ ID NO: 4051 - DNA, 201 bp, Homo sapiens; identical to SEQ ID NO: 3725

SEQ ID NO: 4052 - DNA, 201 bp, Homo sapiens; identical to SEQ ID NO: 3726

SEQ ID NO: 4053 - DNA, 201 bp, Homo sapiens; identical to SEQ ID NO: 3727

SEQ ID NO: 4054 - DNA, 201 bp, Homo sapiens; identical to SEQ ID NO: 3583

SEQ ID NO: 4055 - DNA, 201 bp, Homo sapiens; identical to SEQ ID NO: 3608

SEQ ID NO: 4056 - DNA, 201 bp, Homo sapiens; identical to SEQ ID NO: 3714

SEQ ID NO: 4057 - DNA, 201 bp, Homo sapiens; identical to SEQ ID NO: 3609

SEQ ID NO: 4058 - DNA, 201 bp, Homo sapiens; identical to SEQ ID NO: 3724

SEQ ID NO: 4059 - DNA, 201 bp, Homo sapiens; identical to SEQ ID NO: 3728

SEQ ID NO: 4060 - DNA, 201 bp, Homo sapiens; identical to SEQ ID NO: 3729

SEQ ID NO: 4061 - DNA, 201 bp, Homo sapiens; identical to SEQ ID NO: 3730

SEQ ID NO: 4062 - DNA, 201 bp, Homo sapiens; identical to SEQ ID NO: 3731

SEQ ID NO: 4063 - DNA, 201 bp, Homo sapiens; identical to SEQ ID NO: 3732

SEQ ID NO: 4064 - DNA, 201 bp, Homo sapiens; identical to SEQ ID NO: 3733

SEQ ID NO: 4065 - DNA, 201 bp, Homo sapiens; identical to SEQ ID NO: 3735

SEQ ID NO: 4066 - DNA, 201 bp, Homo sapiens; identical to SEQ ID NO: 3737

SEQ ID NO: 4067 - DNA, 201 bp, Homo sapiens; identical to SEQ ID NO: 3583

SEQ ID NO: 4068 - DNA, 201 bp, Homo sapiens; identical to SEQ ID NO: 3738

SEQ ID NO: 4069 - DNA, 201 bp, Homo sapiens; identical to SEQ ID NO: 3739

SEQ ID NO: 4070 - DNA, 201 bp, Homo sapiens; identical to SEQ ID NO: 3740

SEQ ID NO: 4071 - DNA, 201 bp, Homo sapiens; identical to SEQ ID NO: 3741

SEQ ID NO: 4072 - DNA, 201 bp, Homo sapiens; identical to SEQ ID NO: 3742

SEQ ID NO: 4073 - DNA, 201 bp, Homo sapiens; identical to SEQ ID NO: 3745

SEQ ID NO: 4074 - DNA, 201 bp, Homo sapiens; identical to SEQ ID NO: 3746

SEQ ID NO: 4075 - DNA, 201 bp, Homo sapiens; identical to SEQ ID NO: 3744

SEQ ID NO: 4076 - DNA, 201 bp, Homo sapiens; identical to SEQ ID NO: 3749

SEQ ID NO: 4077 - DNA, 201 bp, Homo sapiens; identical to SEQ ID NO: 3592

SEQ ID NO: 4078 - DNA, 201 bp, Homo sapiens; identical to SEQ ID NO: 3751

SEQ ID NO: 4079 - DNA, 201 bp, Homo sapiens; identical to SEQ ID NO: 3750

SEQ ID NO: 4080 - DNA, 201 bp, Homo sapiens; identical to SEQ ID NO: 3752

SEQ ID NO: 4081 - DNA, 201 bp, Homo sapiens; identical to SEQ ID NO: 3753

SEQ ID NO: 4082 - DNA, 201 bp, Homo sapiens; identical to SEQ ID NO: 3754

SEQ ID NO: 4083 - DNA, 201 bp, Homo sapiens; identical to SEQ ID NO: 3755

SEQ ID NO: 4084 - DNA, 201 bp, Homo sapiens; identical to SEQ ID NO: 3756

SEQ ID NO: 4085 - DNA, 201 bp, Homo sapiens; identical to SEQ ID NO: 3595

SEQ ID NO: 4086 - DNA, 201 bp, Homo sapiens; identical to SEQ ID NO: 3757

SEQ ID NO: 4087 - DNA, 201 bp, Homo sapiens; identical to SEQ ID NO: 3758

SEQ ID NO: 4088 - DNA, 201 bp, Homo sapiens; identical to SEQ ID NO: 3759

SEQ ID NO: 4089 - DNA, 201 bp, Homo sapiens; identical to SEQ ID NO: 3760

SEQ ID NO: 4090 - DNA, 201 bp, Homo sapiens; identical to SEQ ID NO: 3761

SEQ ID NO: 4091 - DNA, 201 bp, Homo sapiens; identical to SEQ ID NO: 3762

SEQ ID NO: 4092 - DNA, 201 bp, Homo sapiens; identical to SEQ ID NO: 3608

SEQ ID NO: 4093 - DNA, 201 bp, Homo sapiens; identical to SEQ ID NO: 3763

SEQ ID NO: 4094 - DNA, 201 bp, Homo sapiens; identical to SEQ ID NO: 3609

SEQ ID NO: 4095 - DNA, 201 bp, Homo sapiens; identical to SEQ ID NO: 3764

SEQ ID NO: 4096 - DNA, 201 bp, Homo sapiens; identical to SEQ ID NO: 3765

SEQ ID NO: 4097 - DNA, 201 bp, Homo sapiens; identical to SEQ ID NO: 3767

SEQ ID NO: 4098 - DNA, 201 bp, Homo sapiens; identical to SEQ ID NO: 3769

SEQ ID NO: 4099 - DNA, 201 bp, Homo sapiens
tcccatcaccaaagtggacaccagctggggcataaaggctgactgtcctatcatgtgcttcaggccagctaatgtggctcttcaaactagggatgtgcacragctagatgcgtgccgtgtcactgtgggtaacagagatgcaacctgccaaggtttgttggtcaccgtggtcaatggtgaatcatcacgctgaaacatcac

SEQ ID NO: 4100 - DNA, 189 bp, Homo sapiens
tttgagctgactctgcaggccagtgaccagggttcaacttgctcagtgtcatcctgaacctgcatgtgatggtggatgaccattgcaamaatgcaaggacactatgccaggagttgcagccaagtggggccctctttgatgctgcaccactcacaatgcaacccagctatcccatcaccaaagtggaca

SEQ ID NO: 4101 - DNA, 201 bp, Homo sapiens
cccgcgctgggtcccgacggctctgcgctcttcgatatggtgccgcgcgctgcagagcccggctacctggtgaccaaggtagtggccgtggacgcagactyaggacacaacgcctggctgtcctaccacgtgctgcaggctagcgagcccgggctcttcagcctggggctgcgcacaggagaggtgcgcacagcgcgtgcc

SEQ ID NO: 4102 - DNA, 201 bp, Homo sapiens
agaagtagcagaagatgcagatattggcttaaactctctgcagaagtataaactctctcttaacccaagtttctcattaataattaaggagaaacaggatrgtagtaaatacccggaactggcactggagaaaaccttagaccgggaacaacagagttaccatcgtttagtcctgactgccttggacggtggacatccacc

SEQ ID NO: 4103 - DNA, 201 bp, Homo sapiens
agcgggatggcaaggccccagcaggtggcaatggcaacaagaagaagtcgggcaagaaggagaagaagtaacatggaggccaggccaagagccacagggcrgcctctccccaaccagcccagcttctccttacctgcacccaggcctcagagtttcagggctaacccccagaatactggtaggggccaaggccatgctccc

SEQ ID NO: 4104 - DNA, 201 bp, Homo sapiens
cttcgaactcacactacaggcccgcgaccagggctcgcctgcgctcagcgcaaacgtgagcctgcgcgtgttggtgggcgaccgaaacgacaacgcaccgygggtgctgtaccccgcgctgggtcccgacggctctgcgctcttcgatatggtgccgcgcgctgcagagcccggctacctggtgaccaaggtagtggccgt

SEQ ID NO: 4105 - DNA, 201 bp, Homo sapiens
ctcctccccaccccactccaacagttcctctttcccgagtaaggtggttggggtgttgaagtaccaagtaacctacaagcctcctagttctgaaaagttgsaagggcatcatgacctcttggcctctcctttgattctcaatcttcccccaaagcatggtttggtgccagccccttcacctccttccagagcccaagatca

SEQ ID NO: 4106 - DNA, 201 bp, Homo sapiens
gctgctgatgggagctccaccctgggagggggtgccggcaccatgggattgagcgcccgctacggaccccagttcaccctgcagcacgtgcccgactaccrccagaatgtctacatcccaggcagcaatgccacactgaccaacgcagctggcaagcgggatggcaaggccccagcaggtggcaatggcaacaagaagaag

SEQ ID NO: 4107 - DNA, 201 bp, Homo sapiens
gcacagcgcgtgccttgggcgacagggacgcggcccgccagcgcctgctggttgctgtgcgtgatggtggacagccgccactctccgccaccgccacgctrcacttggtctttgctgacagcttgcaggaggtgctgccggatatcactgaccgccctgtaccctctgacccccaggctgagctgcagttttacctagtgg

SEQ ID NO: 4108 - DNA, 201 bp, Homo sapiens
ttgctttgatcaaaatacatgaccaagattctggggaaaatggggaggttaattgtcaattacaaggcgaagtcccttttaagattatctcttcatccaamaattcgtataagttggtaacagatggaaccctagaccgagagcaaaccccggagtacaatgtcaccatcacagccacagacaggggcaagccgcccctct

SEQ ID NO: 4109 - DNA, 201 bp, Homo sapiens
agcttgtgctctggaatttgaggctgttgctgaaaatccactgaacttttatcacgtgaatgtggagatcgaggacattaatgaccacacgccaaaattcmcgcaaaattcctttgagctgcaaataagtgagtctgcacagcctggcacaagatttatactagaagtagcagaagatgcagatattggcttaaactctct

SEQ ID NO: 4110 - DNA, 201 bp, Homo sapiens
tgctgcaagccatgatcttggcgtccgccagtgaagctgctgatgggagctccaccctgggagggggtgccggcaccatgggattgagcgcccgctacggrccccagttcaccctgcagcacgtgcccgactaccgccagaatgtctacatcccaggcagcaatgccacactgaccaacgcagctggcaagcgggatggca

SEQ ID NO: 4111 - DNA, 201 bp, Homo sapiens
aagcgggatggcaaggccccagcaggtggcaatggcaacaagaagaagtcgggcaagaaggagaagaagtaacatggaggccaggccaagagccacagggyggcctctccccaaccagcccagcttctccttacctgcacccaggcctcagagtttcagggctaacccccagaatactggtaggggccaaggccatgctcc

SEQ ID NO: 4112 - DNA, 201 bp, Homo sapiens
tacaacctatgtgttgcacatacaggaaagacggagtttaatttcctaaaatgtagtgagcaattgagttcaggacaagacatactttgtggtgattcatytggggccttatttccactttgtaattccagcgagtcgacttcccatcctgagttgcaagccccgcccaacacggactggcgtttctctcaggcccagaga

SEQ ID NO: 4113 - DNA, 201 bp, Homo sapiens
ggctctcctaccgcctattcaaggccagtgagccagggctcttctcggtggggctgcacacaggtgaagtgcgcacagctcgggccctgctagatagagaygcgctcaaacagagccttgtggtggctgtacaggaccatggccagccccctctctcggccactgtcacgctcacagtagccatagctgacagcatcccag

SEQ ID NO: 4114 - DNA, 201 bp, Homo sapiens
gagctggcggagcgccgagtccgcatcgtctctagaggtaggacgcagcttttctctctgaacccgcgcagcggcaccttggtcaccgcgggtaggatagmccgggaggagctctgtgctcagagcccgcggtgtctggtgaactttaaagtcctggttgaagacagagtgaaactgtacggaatagaaatagaagtaact

SEQ ID NO: 4115 - DNA, 175 bp, Homo sapiens
cacaaacctgctcccaggctgcagcaaaactcagcctctttcttctaaggaaaagatcaccatactttgcagggyggaagaaagaacctgatgaagcagcgcgcacagagatccttttgagaaaattccaaagcgaggcagcaatggcagctccaaccaaatgccagctccgcgg

SEQ ID NO: 4116 - DNA, 201 bp, Homo sapiens
gtgtgcccacctcacactttgtgggtgtagatggggttcgagctttcctacagacctattctcaggagttctccctcaccgctgactcaaggaagagtcayctgatcttcccccagcccaactatgcagacacactcatcagccagcagagctgtgagaaaaatgagcctttgtgcgtctctgttgattccaagtttccta

SEQ ID NO: 4117 - DNA, 201 bp, Homo sapiens; identical to SEQ ID NO: 4106

SEQ ID NO: 4118 - DNA, 201 bp, Homo sapiens
tgaaagggtggacaaaagtgctcatttcggtggaagatgtaaatgacaatagacctgaagtgaccattacatctctgtttagcccagtgagagaagacgcmcctcagggaacagtaattcttcttttcaatgctcatgaccgagactccgggaagaatggtcaagttgtctgttctatccaggagaatctatcttttacat

SEQ ID NO: 4119 - DNA, 201 bp, Homo sapiens
ccctcaccgctgactcaaggaagagtcacctgatcttcccccagcccaactatgcagacacactcatcagccagcagagctgtgagaaaaatgagcctttstgcgtctctgttgattccaagtttcctatagaagacacccctttggttccgcaagccccgcccaacacggactggcgtttctctcaggcccagagacccg

SEQ ID NO: 4120 - DNA, 201 bp, Homo sapiens
tcaccgctgactcaaggaagagtcacctgatcttcccccagcccaactatgcagacacactcatcagccagcagagctgtgagaaaaatgagcctttgtgygtctctgttgattccaagtttcctatagaagacacccctttggttccgcaagccccgcccaacacggactggcgtttctctcaggcccagagacccggca

SEQ ID NO: 4121 - DNA, 201 bp, Homo sapiens
gattgaaagggtggacaaaagtgctcatttcggtggaagatgtaaatgacaatagacctgaagtgaccattacatctctgtttagcccagtgagagaagahgcacctcagggaacagtaattcttcttttcaatgctcatgaccgagactccgggaagaatggtcaagttgtctgttctatccaggagaatctatctttta

SEQ ID NO: 4122 - DNA, 201 bp, Homo sapiens
ccaatcaccacttctccctgaacgtgcagactggagacaatggagccataaacccagagctggtgctggagcgcgccctggacagggaggaggcaactgcycaccacctggtcctcacggcctcggatggcggcgagccgcgtcgctccagcacagtgcgcatccatgtgacagtgttggatacaaatgataatgccccgg

SEQ ID NO: 4123 - DNA, 201 bp, Homo sapiens
agtcttcagatccctgcagacctggaggcctcagaccttaccctctacctcgttgtggctgtggcagtcgtctcctgtgtcttcctcaccttcgttatcaygctgctggccctcaggctgaggcactggcactcctcgcatctgctgcgggctaccagtgatgggttggctggtgtgcccacctcacactttgtgggtgta

SEQ ID NO: 4124 - DNA, 201 bp, Homo sapiens; identical to SEQ ID NO: 4103

SEQ ID NO: 4125 - DNA, 201 bp, Homo sapiens
gagacagaaaagggctatattgtgggcaacatctccaaggacctggctctggagccccgggagctggcggagcgccgagtccgcatcgtctctagaggtargacgcagcttttctctctgaacccgcgcagcggcaccttggtcaccgcgggtaggatagaccgggaggagctctgtgctcagagcccgcggtgtctggtg

SEQ ID NO: 4126 - DNA, 201 bp, Homo sapiens
agaggaactccgcccctgtccacagaaattcacatcaccctgcaagtgactgacatcaatgataatccacctgctttctctcaagcctcctactcagtctrcctcccggaaaacaacgccagaggtacttccatcttctccgtgattgcctatgaccctgatagcaatgagaattctagagttatttactccttggcagag

SEQ ID NO: 4127 - DNA, 201 bp, Homo sapiens; identical to SEQ ID NO: 4105

SEQ ID NO: 4128 - DNA, 201 bp, Homo sapiens
accgagactccgggaagaatggtcaagttgtctgttctatccaggagaatctatcttttacattagaaaattcagaagaagattattacagattgttgacsgcccaaattcttgaccgagaaaaagcctcagaatataatatcacggtgactgcaacagacagaggaactccgcccctgtccacagaaattcacatcaccc

SEQ ID NO: 4129 - DNA, 201 bp, Homo sapiens
agttctccctcaccgctgactcaaggaagagtcacctgatcttcccccagcccaactatgcagacacactcatcagccagcagagctgtgagaaaaatgascctttgtgcgtctctgttgattccaagtttcctatagaagacacccctttggttccgcaagccccgcccaacacggactggcgtttctctcaggcccaga

SEQ ID NO: 4130 - DNA, 201 bp, Homo sapiens; identical to SEQ ID NO: 4110

SEQ ID NO: 4131 - DNA, 201 bp, Homo sapiens
ctgatagcaatgagaattctagagttatttactccttggcagaggataccatccaagggtctcctctctccacctatgtctctattaactcagacactggygtgctgtatgctctgtgctcctttgactatgagcagtttagagatttgcaaatgcaggtgacggcaagtgacagtggaagcccaccacttagcagcaatg

SEQ ID NO: 4132 - DNA, 201 bp, Homo sapiens; identical to SEQ ID NO: 4111

SEQ ID NO: 4133 - DNA, 201 bp, Homo sapiens; identical to SEQ ID NO: 4103

SEQ ID NO: 4134 - DNA, 201 bp, Homo sapiens
acagccgccactctctgccaccgccacgcttcatctggtcttcgcagacaacttgcaagagatactgccagacctcagcgaccgccctgtactctctgacycccaggctgaactgcagttttacctggtggtggccttggccttaatctcagtgctcttcctcctcgccgtgattctggccattgccttgcgcctgcgacg

SEQ ID NO: 4135 - DNA, 201 bp, Homo sapiens
caactacagtgaggggactttgccttattcttataatctgtgcattgcacatacgggtacaaaagagtttaatttcctaaaatgcagtgtgcccctacatkccaatgaagacatggtttgcagtgtttctcctggagccttaattccacctcatggtggggaggatttgacttcacatcctgagactctgacttcgcaagc

SEQ ID NO: 4136 - DNA, 201 bp, Homo sapiens; identical to SEQ ID NO: 4105

SEQ ID NO: 4137 - DNA, 201 bp, Homo sapiens; identical to SEQ ID NO: 4106

SEQ ID NO: 4138 - DNA, 201 bp, Homo sapiens
aatttgataaaaaggaaatacatttagaaattttcgaatctgcatccgctggtacacgactatcgcttgaccctgccacggatcctgatataaacataaaytcaattaaagattataagataaactctaatccttatttttcattaatggttagagttaattccgatggtggcaaatacccagagttatctctggagaaac

SEQ ID NO: 4139 - DNA, 201 bp, Homo sapiens
ctctgacccggatttggggctcaatggccacatctcctactctatagtggcgagtgacctagagcccctggcggtgtcgtcatacgtgtcagtgagcgcgsagagcggggtggtgttcgcgcagcgcgcctttgatcacgagcagctgcgcgccttcgcgctcacgctgcaggcccgcgaccacggctcgcccacgctcag

SEQ ID NO: 4140 - DNA, 201 bp, Homo sapiens
gcctctgacccggatttggggctcaatggccacatctcctactctatagtggcgagtgacctagagcccctggcggtgtcgtcatacgtgtcagtgagcgsgcagagcggggtggtgttcgcgcagcgcgcctttgatcacgagcagctgcgcgccttcgcgctcacgctgcaggcccgcgaccacggctcgcccacgctc

SEQ ID NO: 4141 - DNA, 201 bp, Homo sapiens
tcgaccagacgtcctacgtggtccacgtggccgagaacaacccgccaggagcctccattgcgcaagtgagcgcctctgacccggatttggggctcaatggscacatctcctactctatagtggcgagtgacctagagcccctggcggtgtcgtcatacgtgtcagtgagcgcgcagagcggggtggtgttcgcgcagcgcg

SEQ ID NO: 4142 - DNA, 201 bp, Homo sapiens
tgctcttcctcctcgccgtgattctggccattgccttgcgcctgcgacgctctctcagccctgctacttgggactgcttccatcctggtctctgtgtcaartctggacctgtagttccccccaactacagtgaggggactttgccttattcttataatctgtgcattgcacatacgggtacaaaagagtttaatttcctaa

SEQ ID NO: 4143 - DNA, 201 bp, Homo sapiens
aagccgcctctttcttccagtagaagcatcaccttgtatgtcgctgacatcaacgacaacgccccagttttcgaccagacgtcctacgtggtccacgtggscgagaacaacccgccaggagcctccattgcgcaagtgagcgcctctgacccggatttggggctcaatggccacatctcctactctatagtggcgagtgac

SEQ ID NO: 4144 - DNA, 201 bp, Homo sapiens
gcagttttacctggtggtggccttggccttaatctcagtgctcttcctcctcgccgtgattctggccattgccttgcgcctgcgacgctctctcagccctrctacttgggactgcttccatcctggtctctgtgtcaagtctggacctgtagttccccccaactacagtgaggggactttgccttattcttataatctgtg

SEQ ID NO: 4145 - DNA, 201 bp, Homo sapiens
acaaaacatatgttctcattggatgagaaaacaggtatgattaagaataaccagtcatttgattttgaagatgtagaaaggtacaccatggaagtggaagygaaggacggaggtggtctctctacccagtgtaaagtaatcatagaaatccttgatgaaaacgacaacagcccagaaataatcatcacttctctctctgat

SEQ ID NO: 4146 - DNA, 201 bp, Homo sapiens; identical to SEQ ID NO: 4110

SEQ ID NO: 4147 - DNA, 201 bp, Homo sapiens; identical to SEQ ID NO: 4111

SEQ ID NO: 4148 - DNA, 201 bp, Homo sapiens
aaggcagcaggttggcaggtgtgcctgcctcgcactttgtgggcgtggacggggttcgggctttcctgcagacctattcccacgaggtctccctcaccgcrgactcgcggaagagtcacctgatcttctcccaacccagctatgcagacacgctcatcagccgggagagttgtgagaaaagcgagcctcttctgataactc

SEQ ID NO: 4149 - DNA, 201 bp, Homo sapiens; identical to SEQ ID NO: 4106

SEQ ID NO: 4150 - DNA, 201 bp, Homo sapiens
ttctcacggccttcgatggaggtgacccggttcgctctggcactgccaggattctcataatacttgtggataccaacgataatgctcccgtgttcactcakcccgagtaccacgtaagtgttcgtgagaacgttcctgtaggcactcggctactcaccgtaaaagccactgatccagatgaaggagccaatggagacgtga

SEQ ID NO: 4151 - DNA, 201 bp, Homo sapiens
tggccagccccctctctcggccaccgtcacactcactgtggctgtggccgacagcatcccagatgtcctggctgacttgggcagcctcaagccttcagcasacccagacgactcgggcctcacactctatctcgtggtggcagtggccgctgtctcctgcgtcttcctggcttttgtcacggtgctgctagcactcaagct

SEQ ID NO: 4152 - DNA, 201 bp, Homo sapiens
gcttttgatccggatgtaggtgtaaactccctgcagggttaccagctcaactcaaacggttacttttccctggacgtgcaaagtggggccgatgggattamgtacccagagctggtgctggaacgcgctctagatcgcgaggaagaggcggttcaccacctcgttctcacggccttcgatggaggtgacccggttcgctct

SEQ ID NO: 4153 - DNA, 201 bp, Homo sapiens
tttgcgggtagaggtggaaataatcgatgttaatgataacccacccagttttgggacagaacagagggaaataaaagttgctgaaaatgaaaatcctgggrcaagatttcctcttcctgaagcttttgatccggatgtaggtgtaaactccctgcagggttaccagctcaactcaaacggttacttttccctggacgtgca

SEQ ID NO: 4154 - DNA, 201 bp, Homo sapiens
acagtggagaccctccactcagcagcaatgtgtcactgagcctctttgtgctggaccagaacgacaatgtccctgagatcctgtaccccaccttccctackgatggctccactggtgtggagctggcaccccgctccgcagattccggctacctggtgaccaaagtggtggcagtggacagagactcaggtcagaatgcct

SEQ ID NO: 4155 - DNA, 201 bp, Homo sapiens; identical to SEQ ID NO: 4103

SEQ ID NO: 4156 - DNA, 201 bp, Homo sapiens; identical to SEQ ID NO: 4105

SEQ ID NO: 4157 - DNA, 201 bp, Homo sapiens
tcttcctggcttttgtcacggtgctgctagcactcaagctgagacgctggcacaagtcacgcctgcttcacgctgaaggcagcaggttggcaggtgtgccygcctcgcactttgtgggcgtggacggggttcgggctttcctgcagacctattcccacgaggtctccctcaccgcggactcgcggaagagtcacctgatct

SEQ ID NO: 4158 - DNA, 201 bp, Homo sapiens
tcctgcagacctattcccacgaggtctccctcaccgcggactcgcggaagagtcacctgatcttctcccaacccagctatgcagacacgctcatcagccgsgagagttgtgagaaaagcgagcctcttctgataactcaggatttacttgaaacaaaaggagaccctaatcttcagcaagccccgcccaacacggactggc

SEQ ID NO: 4159 - DNA, 201 bp, Homo sapiens
actcctccactgtctacagaaactcatatttcactgcaagtgatggacatcaatgacaacccacccactttccctcatgcttcctactctgcttacattcstgaaaacaaccccagaggagcctccatcttatctatgactgctcaagaccctgacagtggtgacaatgcccgaatcacttactccctggccgaagacacc

SEQ ID NO: 4160 - DNA, 201 bp, Homo sapiens; identical to SEQ ID NO: 4110

SEQ ID NO: 4161 - DNA, 201 bp, Homo sapiens; identical to SEQ ID NO: 4111

SEQ ID NO: 4162 - DNA, 201 bp, Homo sapiens
cagggaactcctccactgtctacagaaactcatatttcactgcaagtgatggacatcaatgacaacccacccactttccctcatgcttcctactctgcttrcattcctgaaaacaaccccagaggagcctccatcttatctatgactgctcaagaccctgacagtggtgacaatgcccgaatcacttactccctggccgaa

SEQ ID NO: 4163 - DNA, 201 bp, Homo sapiens
ctactcaagtccagcgagccgggactatttgcagtggggctgcacacaggcgaggtgcgcaccgcacgggccctgctggacagagacgcgctcaagcagargcttgtagtggtcgtccaggaccatggccagccccctctctcggccaccgtcacactcactgtggctgtggccgacagcatcccagatgtcctggctgac

SEQ ID NO: 4164 - DNA, 201 bp, Homo sapiens; identical to SEQ ID NO: 4103

SEQ ID NO: 4165 - DNA, 201 bp, Homo sapiens
attggggaggcagctcctccaggacagcgtttcccgttggaaaaggctcaggatgcagatgtggggagcaattcgattagcagctataggctgagctccartgaacactttgcactggatgtgaagaagcgcagcgacggcagcctggtcccagagctgctcctggagaagcctttggatcgagagaagcaatcggactac

SEQ ID NO: 4166 - DNA, 201 bp, Homo sapiens; identical to SEQ ID NO: 4110

SEQ ID NO: 4167 - DNA, 201 bp, Homo sapiens; identical to SEQ ID NO: 4106

SEQ ID NO: 4168 - DNA, 201 bp, Homo sapiens; identical to SEQ ID NO: 4111

SEQ ID NO: 4169 - DNA, 201 bp, Homo sapiens; identical to SEQ ID NO: 4105

SEQ ID NO: 4170 - DNA, 201 bp, Homo sapiens
ttagtgtgttggagagcgcaccagcgggcatggtgctcatccagctcaatgcctcagacccggacctgggtcccagtggtaacgtcaccttttatttcagyggtcatacccctgatcgtgtaagaaacctctttagcctgcaccccactactggaaagcttactcttttggggcccctagactttgagagtgagaattact

SEQ ID NO: 4171 - DNA, 201 bp, Homo sapiens
ctacacacactggtgaggtgcgcacagcccgggccttactggaggatgactctgacacccagcaggtggtggtcctggtgagggacaatggtgacccttcrctctcctccacagccacagtgctgctggttctggaggatgaggaccctgaggaaatgcccaaatccagtgacttcctcatacaccctcctgagcgttcag

SEQ ID NO: 4172 - DNA, 201 bp, Homo sapiens
gtggtgactgaacaccccctggagctaatccgtgtagaggtagagatcctggatctcaatgacaactctcctagctttgccacccctgagcgagagatgcrcatctcagaatcagcagcatctggggcacgattcccactggacagtgcccaggatccggatgtgggcaccaatactgtgagcttttacactctaagcccc

SEQ ID NO: 4173 - DNA, 201 bp, Homo sapiens
gataatgcccgcctcacctactccattgtaggaaatcaggttcagggagccccagcctcctcctttgtgtatgtcaacccagaggatggacggatctttgyccagcgtacctttgactatgaattgctgcagatgctgcagattgtggtgggggttcgagactccggctctcccccattgcatgccaacacatctctgcat

SEQ ID NO: 4174 - DNA, 201 bp, Homo sapiens
cctcggacggcagtgacttcacttttctaagacccctcagcgttcagcagcccacagctctggcgctggagcctgacgccatccggtcccgctctaatackctgcgggagcggagccaggtgaggggctcggcgccgccccgggcgacccctgggggcggcactggagaagccgcccgtcctcataagggattgaacttgc

SEQ ID NO: 4175 - DNA, 201 bp, Homo sapiens
tcatacaccctcctgagcgttcagaccttaccctttacctcattgtggctctagcgaccgtcagtctcttatccctagtcaccttcacctttctgtcagckaagtgccttcagggaaacgcagacggggacgggggtggagggcagtgctgcaggcgccaggactcaccctccccggacttctataagcagtccagcccca

SEQ ID NO: 4176 - DNA, 201 bp, Homo sapiens
tgcccaaatccagtgacttcctcatacaccctcctgagcgttcagaccttaccctttacctcattgtggctctagcgaccgtcagtctcttatccctagtmaccttcacctttctgtcagcgaagtgccttcagggaaacgcagacggggacgggggtggagggcagtgctgcaggcgccaggactcaccctccccggact

SEQ ID NO: 4177 - DNA, 201 bp, Homo sapiens
actctgacacccagcaggtggtggtcctggtgagggacaatggtgacccttcactctcctccacagccacagtgctgctggttctggaggatgaggacccygaggaaatgcccaaatccagtgacttcctcatacaccctcctgagcgttcagaccttaccctttacctcattgtggctctagcgaccgtcagtctcttat

SEQ ID NO: 4178 - DNA, 201 bp, Homo sapiens
cgagactccggctctcccccattgcatgccaacacatctctgcatgtgtttgtcctagacgagaatgataatgccccagctgtgctgcacccacggccagrctgggaacactcagccccccagcgtctccctcgctctgctcctcctggctccttggtcaccaaggtgacagccgtggatgctgatgcaggccacaatgcg

SEQ ID NO: 4179 - DNA, 201 bp, Homo sapiens
ctgtcctagagagcacaccagtgggcacagtagtggggttgtttaatgtgcgagaccgggactcaggtagaaatggtgaagtgagccttgatatctctccrgacctgccatttcagattaagccttctgagaaccactactcgctgctaaccagccagcctttggaccgggaggccacatcccactatatcatcgagctgc

SEQ ID NO: 4180 - DNA, 201 bp, Homo sapiens
ttactcagtggtggaggagtctgagccggggacgctggtggggaatgttgctcaggatctgggcttaaagatgacagatctgttgagccggcggctgcaaytgggctctgaggagaatgggcgctatttttccctgagcttgatgagtggtgccctggcagtgaatcaaaagattgaccgagaaagcctatgtggagccag

SEQ ID NO: 4181 - DNA, 201 bp, Homo sapiens
aacatctcaccatcaggctcaacatttcagatgtcaatgacaatgcaccccgcttcaaccagcagctttacactgcttacatcctagaaaaccggcctccrggctcccttctttgcactgtggctgcctcagatccagacactggggataatgcccgcctcacctactccattgtaggaaatcaggttcagggagccccag

SEQ ID NO: 4182 - DNA, 201 bp, Homo sapiens
cctgtcctagagagcacaccagtgggcacagtagtggggttgtttaatgtgcgagaccgggactcaggtagaaatggtgaagtgagccttgatatctctcmggacctgccatttcagattaagccttctgagaaccactactcgctgctaaccagccagcctttggaccgggaggccacatcccactatatcatcgagctg

SEQ ID NO: 4183 - DNA, 201 bp, Homo sapiens
gacagcctgccatggagggccactgtgtgattcaagtggatgtgggggatgtcaatgacaatgccccagaggtgctattggcctctttggccaaccctgtmctagagagcacaccagtgggcacagtagtggggttgtttaatgtgcgagaccgggactcaggtagaaatggtgaagtgagccttgatatctctccggacc

SEQ ID NO: 4184 - DNA, 201 bp, Homo sapiens
cttccaatcctcagttctacgtgtgggaatcccagagaatgcacccattggtactctgctgctccgcctcaatgccactgatccagacgagggcaccaacrgccaactagactattcttttggagaccacacatctgaggcagtgcggaacctctttggcctagaccctagcagtggggcaatccatgtgttgggtcccat

SEQ ID NO: 4185 - DNA, 201 bp, Homo sapiens
tcgtgctggacatcaatgataatgctccaaccttccaatcctcagttctacgtgtgggaatcccagagaatgcacccattggtactctgctgctccgcctyaatgccactgatccagacgagggcaccaacggccaactagactattcttttggagaccacacatctgaggcagtgcggaacctctttggcctagacccta

SEQ ID NO: 4186 - DNA, 201 bp, Homo sapiens
tgtcctcctatgtctctattaactccaacactggtgttctctatgccctacaatccttcgactatgagcagtttcgagacttagaactgagagtgatagcrcgtgacagcggggacccgcccctcagcagcaacgtgtcgctgagcctgttcgtgctggaccagaacgacaatgcgcccgagatcctgtaccctgccctcc

SEQ ID NO: 4187 - DNA, 201 bp, Homo sapiens
gtggacaaagattcaggccagaacgcctggctgtcctatcgcctgcttaaggccagcgagccgggactcttcgcggtgggggagcacacgggcgaggtgcrtacagcgcgggcactgctggacagagacgcgctcaagcagagcctcgtggtggccgtccaggaccacggccagccccctctctcggccaccgtcacgctc

SEQ ID NO: 4188 - DNA, 201 bp, Homo sapiens
gagagtgatagcacgtgacagcggggacccgcccctcagcagcaacgtgtcgctgagcctgttcgtgctggaccagaacgacaatgcgcccgagatcctgkaccctgccctccccacagacggctccactggcgtggagctggcgccccgctctgcggaacctggctacctggtgaccaaggtggttgcggtggacaaaga

SEQ ID NO: 4189 - DNA, 201 bp, Homo sapiens
acgacaatgcgcccgagatcctgtaccctgccctccccacagacggctccactggcgtggagctggcgccccgctctgcggaacctggctacctggtgacyaaggtggttgcggtggacaaagattcaggccagaacgcctggctgtcctatcgcctgcttaaggccagcgagccgggactcttcgcggtgggggagcaca

SEQ ID NO: 4190 - DNA, 201 bp, Homo sapiens
tcgactatgagcagtttcgagacttagaactgagagtgatagcacgtgacagcggggacccgcccctcagcagcaacgtgtcgctgagcctgttcgtgctrgaccagaacgacaatgcgcccgagatcctgtaccctgccctccccacagacggctccactggcgtggagctggcgccccgctctgcggaacctggctacc

SEQ ID NO: 4191 - DNA, 201 bp, Homo sapiens
ttaaggccagcgagccgggactcttcgcggtgggggagcacacgggcgaggtgcgtacagcgcgggcactgctggacagagacgcgctcaagcagagcctygtggtggccgtccaggaccacggccagccccctctctcggccaccgtcacgctcaccgtggctgtggccgacagcatccccgaagtcctggcggacctcg

SEQ ID NO: 4192 - DNA, 201 bp, Homo sapiens
ctctaggcgccgctgctcaccaatcagggaatgggaagctgcgcgccattgagtccctccctcccccgcctctaccacacaaagcggaatgagatggataytcacagatcctgacactggagacttagaagtattttccttcgctttctgatatattttggatgtagtcggcctaggacttcatagatacataagccgatt

SEQ ID NO: 4193 - DNA, 201 bp, Homo sapiens
aatgcgcccgagatcctgtaccctgccctccccacagacggctccactggcgtggagctggcgccccgctctgcggaacctggctacctggtgaccaaggkggttgcggtggacaaagattcaggccagaacgcctggctgtcctatcgcctgcttaaggccagcgagccgggactcttcgcggtgggggagcacacgggc

SEQ ID NO: 4194 - DNA, 201 bp, Homo sapiens
gacccgcccctcagcagcaacgtgtcgctgagcctgttcgtgctggaccagaacgacaatgcgcccgagatcctgtaccctgccctccccacagacggctycactggcgtggagctggcgccccgctctgcggaacctggctacctggtgaccaaggtggttgcggtggacaaagattcaggccagaacgcctggctgtcc

SEQ ID NO: 4195 - DNA, 201 bp, Homo sapiens
gggacccgcccctcagcagcaacgtgtcgctgagcctgttcgtgctggaccagaacgacaatgcgcccgagatcctgtaccctgccctccccacagacggstccactggcgtggagctggcgccccgctctgcggaacctggctacctggtgaccaaggtggttgcggtggacaaagattcaggccagaacgcctggctgt

SEQ ID NO: 4196 - DNA, 201 bp, Homo sapiens
agggaagacacagcttttcgctgtgaatccgcgaagcggcagcttgatcacggcaggcaggatagaccgggaggagctctgtgagacggtgtcctcctgtyttttaaatatggaacttctcgtggaagacaccttgaagatttacggagtggaggtggaaataatagatattaatgataacgcccccagcttccaggagga

SEQ ID NO: 4197 - DNA, 201 bp, Homo sapiens
aggaggacgaagtggagataaaagtcagtgagcacgcaattcctggggcgcgatttgctcttcctaatgctagggatccagatgtgggcgtgaactccctmcagagctaccagctcagccctaataattacttttccttgcaactgcggggcagaacggatggggccaagaatccagagctagtactggagggaagcctgg

SEQ ID NO: 4198 - DNA, 201 bp, Homo sapiens
cacgtgacagcggggacccgcccctcagcagcaacgtgtcgctgagcctgttcgtgctggaccagaacgacaatgcgcccgagatcctgtaccctgccctycccacagacggctccactggcgtggagctggcgccccgctctgcggaacctggctacctggtgaccaaggtggttgcggtggacaaagattcaggccaga

SEQ ID NO: 4199 - DNA, 201 bp, Homo sapiens
ccccgcctctaccacacaaagcggaatgagatggatactcacagatcctgacactggagacttagaagtattttccttcgctttctgatatattttggatrtagtcggcctaggacttcatagatacataagccgattcacaaccaaccagctcgagaaaccgcggaatatcggcttagagcctgccatggcgaatcggct

SEQ ID NO: 4200 - DNA, 201 bp, Homo sapiens
tgtcgctgagcctgtttgtgctggaccagaacgacaatacgcctgagatcctgtaccccgccctccccacagacggttccacgggcgtggagctggcgccycgctccgcagaacctggctacctggtgaccaaggtggtagcggtggacaaagattcaggccagaacgcctggctgtcctaccgcctgcttaaggccagcg

SEQ ID NO: 4201 - DNA, 201 bp, Homo sapiens
gctgctcatgctaaccgccacggatccagatgagggaataaacgggaaattgacctactcttttcgcaatgaagaagaaaaaatttcggagactttccaayttgattccaacctgggggaaatctcaactctacaatcactggactatgaagaatccagattctacctcatggaagtggtagctcaggatggaggcgctct

SEQ ID NO: 4202 - DNA, 201 bp, Homo sapiens
aatgacaacccacccaatttccctcaagcctcctactccacctctgtcacagaaaacaatcccagaggtgtctctatcttctctgtgacagcccatgaccycgacagcggcgacaacgctcgagtcacctactccctggctgaagacacatttcagggggcgcccttgtcctcctatgtatccattaactctgacaccggt

SEQ ID NO: 4203 - DNA, 201 bp, Homo sapiens
tccgggatgaagagttaaaagtaaaagttaatgaaaatgcggctgcagggacacggttagtgcttcccttcgcgcgggatgcggatgtgggtgtgaactcyctccggagttaccagctcagctccaatctgcacttctctctggatgtggtaagcggaactgatggacaaaagtatccggagctggtgttggaacagcccc

SEQ ID NO: 4204 - DNA, 201 bp, Homo sapiens
ttagcgtacatgatggtgattctggagaaaatggtgagattgcatgctctattcctaggaatttgccttttaaattggagaagtcagttgataattactaycacctattaacaactagggacctggacagagaagagacttcagattataatatcactttaaccgtcatggaccatggaaccccgcccctctctacagaaa

SEQ ID NO: 4205 - DNA, 201 bp, Homo sapiens
tggacaaaggctccttcgtcggcaacatagccaaggaccttgggctggagccccaggagctggcggagcgcggagtccgcatcgtctccagaggtaggacscagctttttgccctgaacccgcgaagcggcagcttggtcaccgcgggcaggatagaccgggaggagctctgcgctcagagcccactgtgtgtggtgaact

SEQ ID NO: 4206 - DNA, 201 bp, Homo sapiens
accccacgcctgggatccggatatcgggaagaactctctgcagagctacgagctcagcccgaacactcacttctccctcatcgtgcaaaatggagccgackgtagtaagtaccccgaattggtgctgaaacgcgccctggaccgcgaagaaaaggctgctcaccacctggtccttacggcctccgacgggggcgacccggt

SEQ ID NO: 4207 - DNA, 201 bp, Homo sapiens; identical to SEQ ID NO: 4103

SEQ ID NO: 4208 - DNA, 201 bp, Homo sapiens
ctggagaaaggctctagggtgggcgacatctccagggacctggggctggagccccgggagctcgcggagcgcggagtccgcatcatccccagaggtaggaygcagcttttcgccctgaatccgcgcagcggcagcttggtcacggcgggcaggatagaccgggaggagctctgtatgggggccatcaagtgtcaattaaat

SEQ ID NO: 4209 - DNA, 201 bp, Homo sapiens; identical to SEQ ID NO: 4106

SEQ ID NO: 4210 - DNA, 201 bp, Homo sapiens; identical to SEQ ID NO: 4105

SEQ ID NO: 4211 - DNA, 201 bp, Homo sapiens
atctgtttcatccaaggaaatctgccctttaaattagaaaaatcttacggaaattactatagtttagtcacagacatagtcttggatagggaacaggttcytagctacaacatcacagtgaccgccactgaccggggaaccccgcccctatccacggaaactcatatctcgctgaacgtggcagacaccaacgacaacccg

SEQ ID NO: 4212 - DNA, 201 bp, Homo sapiens
cgagacttgcaagtgaaagtgatggcgcgggacaacgggcacccgcccctcagcagcaacgtgtcgttgagcctgttcgtgctggaccagaacgacaatgmgcccgagatcctgtaccccgccctccccacggacggttccactggcgtggagctggctccccgctccgcagagcccggctacctggtgaccaaggtggtg

SEQ ID NO: 4213 - DNA, 201 bp, Homo sapiens
tgtcgttgagcctgttcgtgctggaccagaacgacaatgcgcccgagatcctgtaccccgccctccccacggacggttccactggcgtggagctggctccycgctccgcagagcccggctacctggtgaccaaggtggtggcggtggacagagactccggccagaacgcctggctgtcctaccgtctgctcaaggccagcg

SEQ ID NO: 4214 - DNA, 201 bp, Homo sapiens
acagagacgcgctcaagcagagcctcgtagtggccgtccaggaccacggccagccccctctctccgccactgtcacgctcaccgtggccgtggccgacagsatcccccaagtcctggcggacctcggcagcctcgagtctccagctaactctgaaacctcagacctcactctgtacctggtggtagcggtggccgcggtct

SEQ ID NO: 4215 - DNA, 189 bp, Homo sapiens
acgcgcctgaagcacaaagcagatagctaggaatgaaccatccctgggagtatgtggaaacaacggaggagctctgacttcccaactgycccattctatgggcgaaggaactgctcctgacttcagtggttaagggcagaattgaaaataattctggaggaagataagaatgattcctgcgcgactgca

SEQ ID NO: 4216 - DNA, 201 bp, Homo sapiens
tatatggagtagaagtagaagtaagggacattaacgacaatgcgccttactttcgtgaaagtgaattagaaataaaaattagtgaaaatgcagccactgaratgcggttccctctaccccacgcctgggatccggatatcgggaagaactctctgcagagctacgagctcagcccgaacactcacttctccctcatcgtgc

SEQ ID NO: 4217 - DNA, 201 bp, Homo sapiens
ccgccctccccacggacggttccactggcgtggagctggctccccgctccgcagagcccggctacctggtgaccaaggtggtggcggtggacagagactcsggccagaacgcctggctgtcctaccgtctgctcaaggccagcgagccgggactcttctcggtgggtctgcacacgggcgaggtgcgcacggcgcgagccc

SEQ ID NO: 4218 - DNA, 201 bp, Homo sapiens; identical to SEQ ID NO: 4110

SEQ ID NO: 4219 - DNA, 201 bp, Homo sapiens; identical to SEQ ID NO: 4111

SEQ ID NO: 4220 - DNA, 201 bp, Homo sapiens; identical to SEQ ID NO: 4206

SEQ ID NO: 4221 - DNA, 201 bp, Homo sapiens; identical to SEQ ID NO: 4208

SEQ ID NO: 4222 - DNA, 201 bp, Homo sapiens; identical to SEQ ID NO: 4211

SEQ ID NO: 4223 - DNA, 201 bp, Homo sapiens; identical to SEQ ID NO: 4212

SEQ ID NO: 4224 - DNA, 201 bp, Homo sapiens; identical to SEQ ID NO: 4213

SEQ ID NO: 4225 - DNA, 189 bp, Homo sapiens; identical to SEQ ID NO: 4215

SEQ ID NO: 4226 - DNA, 201 bp, Homo sapiens; identical to SEQ ID NO: 4214

SEQ ID NO: 4227 - DNA, 201 bp, Homo sapiens; identical to SEQ ID NO: 4216

SEQ ID NO: 4228 - DNA, 201 bp, Homo sapiens; identical to SEQ ID NO: 4217

SEQ ID NO: 4229 - DNA, 123 bp, Homo sapiens
atgggaaatagctccggatggargggcccagcagggcagaggcgaatgctatttctcttcctgctctctttgttagaccaggctctctccgaaccgatccgctacgctattcccgaggagctg

SEQ ID NO: 4230 - DNA, 201 bp, Homo sapiens
tgccctggaatctgcgcaagatcctgatgtaggtgtcaattcgctgcagcagtactacctcagccctgatccgcacttctctttgattcagaaggagaacytggatggcagtaggtacccagagctagtactgaaagcacccctggacagggaagagcagccacatcaccacctggtcctcacagctgtggatgggggcga

SEQ ID NO: 4231 - DNA, 159 bp, Homo sapiens
atgggaaatagctccggatggaggggcccagcagggcagaggcgaatgctatttctctwcctgctctctttgttagaccaggctctctccgaaccgatccgctacgctattcccgaggagctggacaggggctcgctggtagggaacctcgccaaggac

SEQ ID NO: 4232 - DNA, 201 bp, Homo sapiens
tacaagaagatgctgagctggggactgccgttgccctgatcaaaacacatgatctagattctggatttaatggagaaatcctatgccaactaaaaggaaasttcccctttaaaatcgttcaagataccaaaaacacatacaggttggtgacagatggagccctggaccgggagcagatcccagaatacaatgtgacgatca

SEQ ID NO: 4233 - DNA, 201 bp, Homo sapiens
tcgggatacaacgcctggctgtcctaccacattgtgcaggccagcgagcccgggctgttcagcctgggcctgcgcacgggtgaggtgcgcacggcgcgtaycttgggcgacagggaggccgcccgccagcgcctgctggtcactgtgcgtgatggaggacagcagcctctttcagccaccgtcatgctgcacctaatcttc

SEQ ID NO: 4234 - DNA, 201 bp, Homo sapiens
cccgaaaatgggaacttacttgtgagcgaccgtatagaccgagaggagatttgtggcaagaagtcgacgtgtgttctggaatttgaaatggttgctgaaawgcctttaaacttttttcatgtaactgtgctgatccaggatattaacgacaacccaccgacctttagccaaaatatcactgagctggaaatcagcgaactg

SEQ ID NO: 4235 - DNA, 201 bp, Homo sapiens
cgtgagcctgcgcgtgttggtggacgaccgcaacgacaatgcaccgctggtgctgtacccagctctggggcccgaaggctctgcgctcttcgatatggtgmcgcgctctgcagagcctggctacctggtgaccaaggtggtggcggtggacgcagactcgggatacaacgcctggctgtcctaccacattgtgcaggccag

SEQ ID NO: 4236 - DNA, 201 bp, Homo sapiens
ttgatgtcaacgacaacgttcccgttttccaccaggcctcctacaccgtgcatgtagctgagaacaatccgcctggagcctccattgcgcatgtcagagcytcggatcccgacttgggacctaatggccttgtctcctactacatcgtggccagtgacctggagccgcgggagctgtcgtcctacgtgtccgtgagcgcgc

SEQ ID NO: 4237 - DNA, 201 bp, Homo sapiens
tagccaaaatatcactgagctggaaatcagcgaactggctctcactggagccacatttgccctggaatctgcgcaagatcctgatgtaggtgtcaattcgstgcagcagtactacctcagccctgatccgcacttctctttgattcagaaggagaacctggatggcagtaggtacccagagctagtactgaaagcacccct

SEQ ID NO: 4238 - DNA, 201 bp, Homo sapiens
cctggctgtcctaccacattgtgcaggccagcgagcccgggctgttcagcctgggcctgcgcacgggtgaggtgcgcacggcgcgtaccttgggcgacagkgaggccgcccgccagcgcctgctggtcactgtgcgtgatggaggacagcagcctctttcagccaccgtcatgctgcacctaatcttcgcagatagcttgc

SEQ ID NO: 4239 - DNA, 201 bp, Homo sapiens
cctccagcaagaccatcactctgcacatccttgatgtcaacgacaacgttcccgttttccaccaggcctcctacaccgtgcatgtagctgagaacaatcckcctggagcctccattgcgcatgtcagagcctcggatcccgacttgggacctaatggccttgtctcctactacatcgtggccagtgacctggagccgcggg

SEQ ID NO: 4240 - DNA, 201 bp, Homo sapiens
ctttgattcagaaggagaacctggatggcagtaggtacccagagctagtactgaaagcacccctggacagggaagagcagccacatcaccacctggtcctyacagctgtggatgggggcgagccctccagaagctgtaccacccagatcagggtaattgtcgcagatgcaaatgataaccccccagtatttactcaggaca

SEQ ID NO: 4241 - DNA, 183 bp, Homo sapiens
atgggaaatagctccggatggaggggcccagcagggcagaggcgaatgctatttctcttcctgctctctttgttagaccaggytctctccgaaccgatccgctacgctattcccgaggagctggacaggggctcgctggtagggaacctcgccaaggacctggggtttggcgtgggggattta

SEQ ID NO: 4242 - DNA, 201 bp, Homo sapiens
tagtgcttttttattcctacatcatattgaggaaggaatggagctgtttttttagtgatgaagatgttttcctggtgatgcattcacactttcaactggcycttcctagatcaaagttagtgcctttgtgagatggtggcctgccagagtgtggtttgtggtcccatttcagggggaagatacttgactcatctgtggacc

SEQ ID NO: 4243 - DNA, 201 bp, Homo sapiens
atcccgatgtgggaagcaactctttacaaacctatgagctgagccgaaatgaatactttgcgcttcgcgtgcagacgcgggaggacagcaccaagtacgcsgagctggtgttggagcgcgccctggaccgagaacgggagcctagtctccagttagtgctgacggcgttggacggagggaccccagctctctccgccagcc

SEQ ID NO: 4244 - DNA, 201 bp, Homo sapiens
taccgaacaccagggccctccttgcacgcggacgccgtgcggggaggcctgatgtcgccgcacctttaccatcaggtgtatctcaccacggactcccgccscagcgacccgctgctgaagaaacctggtgcagccagtccactggccagccgccagaacacgctgcggagctgtgatccggtgttctataggcaggtgttg

SEQ ID NO: 4245 - DNA, 201 bp, Homo sapiens
aagcccgagccgagttcccctctggctctgccccccgggagcagaaaaaaaatctcaccttttatctacttctttctctaatcctggtttctgtggggttygtggtcacagtgttcggagtaatcatattcaaagtttacaagtggaagcagtctagagacctataccgagccccggtgagctcactgtaccgaacaccag

SEQ ID NO: 4246 - DNA, 201 bp, Homo sapiens
ccgaacaccagggccctccttgcacgcggacgccgtgcggggaggcctgatgtcgccgcacctttaccatcaggtgtatctcaccacggactcccgccgcrgcgacccgctgctgaagaaacctggtgcagccagtccactggccagccgccagaacacgctgcggagctgtgatccggtgttctataggcaggtgttggg

SEQ ID NO: 4247 - DNA, 201 bp, Homo sapiens
tggaggatgcaccctccggcacgcgcgtggtacaagtccttgcaacggatctggatgaaggccccaacggtgaaattatttactccttcggcagccacaaycgcgccggcgtgcggcaactattcgccttagaccttgtaaccgggatgctgacaatcaagggtcggctggacttcgaggacaccaaactccatgagattt

SEQ ID NO: 4248 - DNA, 201 bp, Homo sapiens
tgtcagtaaccgaggactctcctgaagcccgagccgagttcccctctggctctgccccccgggagcagaaaaaaaatctcaccttttatctacttctttcyctaatcctggtttctgtggggtttgtggtcacagtgttcggagtaatcatattcaaagtttacaagtggaagcagtctagagacctataccgagccccgg

SEQ ID NO: 4249 - DNA, 177 bp, Homo sapiens
atgaaagcgagctcagggaggtgcgggctggtgcggtggctgcaggtactgttgcccttcctgttgtctttgttccscggggctctcccagtccagatccgctattcaattccagaggagctggccaaaaactcggtcgtaggaaacctcgccaaggatctggggctcagcgtccgg

SEQ ID NO: 4250 - DNA, 201 bp, Homo sapiens
gagtgacagaatagaccgagaacagatatgcgggaagcagcctctgtgtgttctggatttcgatactgtcgctgaaaatccactaaatattttctacatarcagtaattgtgcaggatataaatgataataccccgctattcaaacagactaagattaatttaaaaattggcgaatccactaagccaggtacaacatttcc

SEQ ID NO: 4251 - DNA, 201 bp, Homo sapiens
agacagagactctggagaaaatggagaagtttactgccaagtgttgggaaatgccaagtttattttgaaatcttcctcaaagaactattacaaactagtgwcagacggcgctctggaccgggaggagatcccagaatacaatctcaccatcacagccaccgacgggggcaagccgcccctctcctccagcataattgtcac

SEQ ID NO: 4252 - DNA, 201 bp, Homo sapiens
gttccccggggctctcccagtccagatccgctattcaattccagaggagctggccaaaaactcggtcgtaggaaacctcgccaaggatctggggctcagcrtccgggacttgccagcccggaagctgcgggttagcgcggagaaggaatatttcacagtaaacccagaaagcggagacttacttgtgagtgacagaataga

(The sequence listing continues in the following parts.)

What is claimed is:

1. A method for identifying an individual who has an altered risk for developing stroke, comprising detecting a single nucleotide polymorphism (SNP) in any one of the nucleotide sequences of SEQ ID NOS:1-580 and 1161-55,128 in said individual's nucleic acids, wherein the presence of the SNP is correlated with an altered risk for stroke in said individual.

2. The method of claim 1 in which the altered risk is an increased risk.

3. The method of claim 2 in which said individual has previously had a stroke.

4. The method of claim 1 in which the altered risk is a decreased risk.

5. The method of claim 1, wherein the SNP is selected from the group consisting of the SNPs set forth in Table 6.

6. The method of claim 1 in which detection is carried out by a process selected from the group consisting of: allele-specific probe hybridization, allele-specific primer extension, allele-specific amplification, sequencing, 5′ nuclease digestion, molecular beacon assay, oligonucleotide ligation assay, size analysis, and single-stranded conformation polymorphism.

7. An isolated nucleic acid molecule comprising at least 8 contiguous nucleotides wherein one of the nucleotides is a single nucleotide polymorphism (SNP) selected from any one of the nucleotide sequences in SEQ ID NOS:1-580 and 1161-55,128, or a complement thereof.

8. The isolated nucleic acid molecule of claim 7, wherein the SNP is selected from the group consisting of the SNPs set forth in Tables 3 and 4.

9. An isolated nucleic acid molecule that encodes any one of the amino acid sequences in SEQ ID NOS:581-1160.

10. An isolated polypeptide comprising an amino acid sequence selected from the group consisting of SEQ ID NOS:581-1160.

11. An antibody that specifically binds to a polypeptide of claim 10, or an antigen-binding fragment thereof.

12. The antibody of claim 11 in which the antibody is a monoclonal antibody.

13. An amplified polynucleotide containing a single nucleotide polymorphism (SNP) selected from any one of the nucleotide sequences of SEQ ID NOS:1-580 and 1161-55,128, or a complement thereof, wherein the amplified polynucleotide is between about 16 and about 1,000 nucleotides in length.

14. The amplified polynucleotide of claim 13 in which the nucleotide sequence comprises any one of the nucleotide sequences of SEQ ID NOS:1-580 and 1161-55,128.

15. An isolated polynucleotide which specifically hybridizes to a nucleic acid molecule containing a single nucleotide polymorphism (SNP) in any one of the nucleotide sequences in SEQ ID NOS:1-580 and 1161-55,128.

16. The polynucleotide of claim 15 which is 8-70 nucleotides in length.

17. The polynucleotide of claim 15 which is an allele-specific probe.

18. The polynucleotide of claim 15 which is an allele-specific primer.

19. The polynucleotide of claim 15, wherein the polynucleotide comprises a nucleotide sequence selected from the group consisting of the primer sequences set forth in Table 5 (SEQ ID NOS:55,129-55,503).

20. A kit for detecting a single nucleotide polymorphism (SNP) in a nucleic acid, comprising the polynucleotide of claim 15, a buffer, and an enzyme.

21. A method of detecting a single nucleotide polymorphism (SNP) in a nucleic acid molecule, comprising contacting a test sample with a reagent which specifically hybridizes to a SNP in any one of the nucleotide sequences of SEQ ID NOS:1-580 and 1161-55,128 under stringent hybridization conditions, and detecting the formation of a hybridized duplex.

22. The method of claim 21 in which detection is carried out by a process selected from the group consisting of: allele-specific probe hybridization, allele-specific primer extension, allele-specific amplification, sequencing, 5′ nuclease digestion, molecular beacon assay, oligonucleotide ligation assay, size analysis, and single-stranded conformation polymorphism.

23. A method of detecting a variant polypeptide, comprising contacting a reagent with a variant polypeptide encoded by a single nucleotide polymorphism (SNP) in any one of the nucleotide sequences of SEQ ID NOS:1-580 and 1161-55,128 in a test sample, and detecting the binding of the reagent to the polypeptide.

24. A method for identifying an agent useful in therapeutically or prophylactically treating stroke, comprising contacting the polypeptide of claim 10 with a candidate agent under conditions suitable to allow formation of a binding complex between the polypeptide and the candidate agent, and detecting the formation of the binding complex, wherein the presence of the complex identifies said agent.
